United States Patent Application Publication US 2014/0325702 A1 - sequence listing, part 17

SEQ ID NO: 18008 - DNA, 1951 bp, Heterodera glycines
accctatacttcgttggcacagtaagtgaacagggagcctacacaggacgagacggaggccaacaacagtgccaagtacaacagaaacacacgggagacgaagcgccacagggcgggcctcagccaagcggtcaacagagcgcacacagcacaaatggtgaagcaaactgtccaaaacatatgcgcttttcagggagaaaaatggggaaatgaaataaaaattttttttaaatgcaaaaaaatggaaatttttttccaattttgggccaaatttggtggcacaaaaagccaatatttatgcaaaatcgcggttcaacagagaggaataaattatttgcgtttttttttgttagggcattttcaacagtgcttcgtagtcaaccccgtcgccgtccgcattcagtggcggcggcgcgtcggccggcgccagcccaatccccgacattgccatccgggccaggtcgtacttgtccggcatgtaactggtgacactgcttaagcaacggaaagaatgagttgacattgacaaaattcaattatgaatcgcaggcccgtagccagaaaaaatttcagaggtggaggggggggggaggaatctgtgcatctcttaatgtcttacgtctgtctgctcattggcttaagataatgacttagaaataattttataattattttacagcgactaagatgcattttcattataaacttttggttttttttttttggaattttctgacatttttcattttcaagctaaatttgaattccaagaaaaatgccaaaaaataaacgggttccatcggcgaaaaggaattgaaatccgacagaaattttcctcaaaattgttgagaagataagggaattttcaattaaaacatcaagaaaaattgaacatacttttaaaatgttaatttttagtgtgcatttcagaaaattgtttttaaatttttaatttattaattttattaatcaaaaaacgcttccttttttcattaaaaaattgcttaaacagaaatattcatttttaaatttagacattcaagaaatttgtaattatgggagagatggcacggtggaaaaagtcagcatatggacggcatttatacaaaaaattaagccgaagccaatgccatacgaccaaatacatcttgaaaaagtcatcggccgtttattttcaatttacatccaggatgtacaaaatccgatgcttgtaaaacatcccaacaggatgaagcagttactggtgaaggacccgtgtgatgaagccaaactaaaagtgaagcaaattgaaggggtaggggaagacgacgaaaatgatcagtgatcaaagaccaacaatcagtgatcaacgtcgaacaatttttattttgaaattgcaaatttttatgcaaaattcaccacaatcattatttttttactccgtttcttcatatttgttgcgtagcgtaaattgattgcctaattgaaaattaattgtcattcatcacaggcatttttgacaacttttttccccaaaattaagacctaaattttaaaacaatgcttaaaattttttaaaaactaaaaagcatgataaagaatttaaggcttcaagatccaacttttcatgcttaattattgctgaaattgggattttctacttaatgattagtagggttgctactgctgctaaaaatggataaatatagaaataaagctgcattaaaaagagacaaaataaatgtacgaaattttttaaaattataaaatatgtaaaaaagtgaataagtttttataaatgtgattttcatgaaaatgttcttctttaaaaagcagaaaaagcacaaaaagacctaattagcataatttaattgttttaaattgatctcttttattttggtaaagtttataggaacggtgactgtgaatttatggaaaaaaactctgcatttttaaatttattttataaaaa

SEQ ID NO: 18009 - DNA, 1026 bp, Heterodera glycines
  unsure (1)..(1026): unsure at all n locations
ttaccnaggaaaaacacagttgccaatatgaagtaaattagtgcacaataatacacttttctaccgccaattaaatagagcaaaaggcacaaaaccatcctaaaaattgggggaaaataaatttattttaaaaatgccaaaaaatcagacccggtgaatttgtaggaactgtaggacaatgcgtgccaaatgttcaaactctgcgaaatgttcaacgcgtatttcatcacgaacacaatgccattctccaggaacaaatagaacaacgcatttgtggtcagcatgccaagcttttcggggctgaacctgcaaaaaaaaagagaaaattttttttgaaaaaaaaacttttggttgtggtaattggttagatatgctttataaatttagggaatctaaaataatttactatatgtcgccatgaaatgaaacatgtttgaagatgaaaatatatcgtttttttaaattttatcaatttttgtttaagtttaaaaaaaaaatttttcccatgtctatcgatataacgcctgggtgcactacgtttgtccccctttatcgtttcatgtccgaattttttttttttttttgaaaaaaccgtaattttcttttaattttttataatgaaaaatttgcgcaatcgcttgagcaccgatttcaatgaaaatcgcaacatttgatttaaaaatgttcaatgtacagatctttgtggcaaaaagtgatgggtgtatccccgcgatttcgccaattgaccagaaattttttttttattttcaaaattaacaaatttaaacgaaaccgaattgcaaaaaaaaatatatatatatacatacctatatatatataccttttctgaactccgaagacaaaaccagacaccagcacataggtgatgaacgccatcaacggaatgtacaggtcgggcgcattcacatcctgacagggcaacacgggcgcatcgccctcacatttgttggcccaatcctatgaaaaataatggttttagaaaaaaaaaaaaaaaaaattaaaaac

SEQ ID NO: 18010 - DNA, 2697 bp, Heterodera glycines
ctttcggtatgtccttaacatgcataacttctaaaagcagcttaatactagtcattttattttttgtttacaacgtttccacgaattttttgcataaaaatttactttgtgatggttcaaagtaaaaaattttctacctaaataagcttttttcattctttttaagctaaatgaatttacagtttttagttttacaaaatgttcaactttttgggtgaagcatttgcttcataaaatgagacgcaaaaatttggatttttttattttaattcccaaatgaccatcggaaaattattattttttgatggtctgatcagcgtgaagagtaattgatcgaaacgcttggtttcattaccattgatgggtcgcggaaagtttagtcgacccaaatgaattctttttttttgtcccggtttttaaaatgtttttcctaatttggttttgaatgtttggacaatttcgcttttttgagtttaacttttgaaaatttttgggtttcatcatttttcgggttgctctgatcaatgttttcgtccagcacttaatccgcagcaaaataacgaagacggcgccgatacaaagtggaaacttgcgcgatgaagcgagtccactgtatgattttttctgaaaaaaaactgaaaaaaatttttttctaacttttaacaaagataatttatgaaaagaaataataaaattgtgtacatattatgcttttgaactttgtatgagttgcaactgaccaaaattgggcatttgatccttttgcatcctttgtttatagggctttttccttttatcctaatccttttttaattggcaaaattcgcaattttaaatagtcactttcatagtcaataaagaattcgcgggacggacgcactcattaagaagaaaagatggattaattaatgtaattctctggggacaaaatcccaaatgggagtagtataaggcccaatatccggccccaaaatttggccccatcccctccacccttccacatcctttcttctgtttttcaatattccatttcccatcctttctttgcatagttgcaaacggcgtcagttgctgctgccccctaatttcacaaaacattccgcgcagtaattgacagccctccctcaccatctcccttcgttcgcccgcttcgctcttcttgtcccccttggtcgtactcctaccaatccaattgcgcacaaatcgatccgcaaattcctttacaacttcaataaattgcggagataattctccgtttacattttacgttttatgattatgttttatataattttatttttagcaataccttctaaaattctttttaaaattcccaactgtcttcaacatgtttggatgtattaatggaggaaagagacgcggaaagggaggcgtgaaaggcttttgtaaagtgagcaaaaatagaataattgcaaaaaaactttatgtacttaatttacggcttctattccaaaccacgttcatttaaaacaatttaagagaaaattttatgaactttaaattttgtttcgagggccactaatgcatttgtgataaagttttaattgtttaaatgtgtaaatttttgttgtttttccaaatagtgcatatataattattacctattcatattttagacagggcgtcataacatccaaggcatcaccaagccggtcatccgccgattggcgcgttgtggaggggcaaaacgcattcccggcatgaactacgatgaaattcatacggtaccaaaaaatgggcaggaatacttttttcttttgttcaacaaaaatgactatttttgacaatatttgttattcttttcgacacactttccatttttcgtaattttttcaaaaattatccatattcagtcaattttcaggtttcgttatatttcacaattattaaaaacgattagttattttctaaaattaaagcaatgattaactaaacgcattaaattttttcaggcagactatgacaacatccaaggtatcaccaacatgaccatcaaaaattttgctcgtcttgatggagccaacgacatcttcaacatgatcgatgagcaaatttggccaaacgattccaattttggaacggtgaatatttcttggttttcagaatcaaaaaactgaatgattataattaattaacaaaaaatatattaatgtggcaaattttaacaaatccatgtagacacaacaggtcaaatctcaaaatggtaataaaaataaatcaatttaaagatatttggtatagggatggccgaaggtgctaccggtttttggagattaatccaatttttagtgatatcaaaaaatctaggaatttcgttagaggtgagcggatcagacccgtgaaaaagtcagcgttgcaaataagaaattcaatgaaattttatacaaaattttctcatagtaattctactgccttttttacatattttcattaaaaaataatgatcgaccaatcccgatttgtgaggaaaatttgtcgaatcgtaggaagagacggtagaaagaacggctaaaatttgcttttttaattccaaaaatttcatgctcgtccataaattctttatttttcttaaaatatggattgggtttaacaataaattagcatttttttttggagaaaatcggttaacaaattacaatcgaattttcaaaaaatattgacattcattctcagtcg

SEQ ID NO: 18011 - DNA, 2159 bp, Heterodera glycines
ataaatgtaggtaatacaaaaatagatttaaaaataattttggtaccccaaattttgactcctctcgaagaaagcgttttggcattcgtttctgcgcgaataaaccaaagcagctaaaaaatgaaaactttattaatttcttaagtgtgtgttgttgtacctcctcaacaatgcccttccagaacacttttttggtggtgagcaatggaatggtcccttaaccccgccattttttaaacaatttcatttttttcgattgacctccccggaggctatagcgcgtttgcatgccaaaaatggaaattgttcctgtgccggttctgtcagtgcgcaccgttccgcgactcaaaatctcacccacttgccgcaaataattcatttcatccgaattcacttctttgctttctgtttccccattaatatttccagtcaaaattttgccctcgctacccattgtagtgcaaaattgctgaaaagccaaaaatctatgtacgacgattgcaattttagaatgttttttaacaaaaaatttaaaatcaaaatacccaaaataccgcgtattttggctttgcgtttaaatcaaatgccgaaattcaaatttgataaagccgatcgcgatctgcaccaaattggggatttatggcacggttcgcgcgaacgaatattaactccaatttggcgccaaaaactaatgccgagaattcaaaattcaaagcctatggcataaaattggacttttaaagccaaagtattatcattttcacgacaattatcggccgccctattggggcacttggcggcgtcggagtgcccaaatcaccggccgtcgaccgtttggccgagaaaaggtggcccacaatttgtgaaatgtttctgcattttattttgacagactttgggaggagccggaagatgcggacgaattcaaatcggacgaagagattgaggtgccgaaatggacggatgggaggcgcgagaactaacattggccagctcgggcaccgatcgccgtctgcacatttgggacctgagcaaaattggcgacgaacagtcgccagaggacgcggaggacggaccaccgggtgagtggaggcaaaacggactaaaatggatccttttaaagaactgttgttcatccatggcgggcacacagccaaaatcagtgacttttcctggaaccccaacgagccgtggtctggaacaaatttcaatttttgtaattttttgtgtctttttcacagatttggcagatggcggacaacatttacaacgaggaggagttggacccggcgatggtggaaagtgttgcggccgcaagcggcgccggtccgatgggccaacaacattgaacacaccagaacatattcaaacaaattctgaagctaattgatgatgatggtctctgtttcctcaacaacactaaatatttattttctgtcatccatttttatgtttttgaataaagcgccgataataatgatattataaatgactggcaattatttaaaatttttttccaaaatgagggggtgaggttaaatgaggtacactagggttgcacccccgaccccgacatttttggccatttttcggggttaaccccgacccgaaccccgacttttctaaccccgacgttcgggggtgcaaccctaaggtacactattacccaaaagtgtgtattaggtaaggcctacaaaaatgttgctagccctgttaaagtgaccgagaaattgggtgccaaagaattacaacacttttttatcaacaatgagacaacattttaggccacttaaaacacgcgaaaaaagatcatggtcggcggaggcattctattacatcggcaatattggcaaactcaggctggtgaacatgctgatctaaaccgaaaatacgcagtttaattttaaaatggaaagaaatttttattttaaacgaaaactgcggatatacactttagtcaaggccccaaaaaatggcacaaatgatataccaatcgattcgtttcgacgagctatgcacgaaaaaaataggtatccagttgcgggaatgccaaaaaaacggtttttgaaccggtttaaaactcgaaaaattgagtgaaaaggagggctcctgaccctttaaaatggtcaaattcggacaaattttgtatcattcaaaag

SEQ ID NO: 18012 - DNA, 1018 bp, Heterodera glycines
  unsure (1)..(1018): unsure at all n locations
tttggggtaattttttagaaaaacttggaatttatggggtcggggggcgctgataggcccggtatgggttcaaaagaaaaatacgacagttaactgatttggtagcaattttatgaggttttaaaaatgaggatttttcatgccaaatgaggatttttagggctgaaatgaggattttcaaaatttaaagatcgaaaattaattttttaaaaaattttcaaacagaaatttttcaagaaaaaaaatcttagaaaagtttttctgtgaaaattctataagaaaaaaattttttttttaaatttcaggcgattttttcataatttactaagaattttcaaaaaaaatcgctgaaaaattcttgaaaaatttgtttaaaattttttttttaaatttattcccggctgtgttatgtctcggctgtgtttcggcggctgtgttttgcctgtttcgtggtattgatgggttttcggcgctttttttatgtttaaccattatttaaaatgtgacccaaaaatgcacaaattagccatattaaaatctgcaaaaatgtaaggtatttgcaagcatagagcctctagtttagaaaacttatattgtataaaattttggggggttaacacaaaagataagaataatcagtttatggttgattagtatggtgggtaactttctttaaatgtatggaattctttagtttttttgtattattgcattattaagagtttatgattcctaatgataccaataaagttagagtttattcgagcatgaacaaagttattgtataaaaagcaggtattgtcagttgattggactcataaaagtcgattggactcataaagtgcattagagccccgatttccattgcatagtttgctcaaatacttttgtacctgactgtatgtaatttctacaaaatttttccaagaaaaaaataaaaaatttattggagttctgttcttagtacgtgttgtatatacataagtatactttttgtgcttgttttgacaaanatttt

SEQ ID NO: 18013 - DNA, 1133 bp, Heterodera glycines
  unsure (1)..(1133): unsure at all n locations
tatcccctcnggggttaaaagaggcacaaagataaaagaataatgatggacagacgaatgatgagtgacaagtgtccgctgcccctcgggggttggggagaggcgattagcgattagtggtgtcccgtgccccccccccccccccctcattttctggcccaaatttaagcaacgacatttgaccctcgccggggggccaaaatgtgtaaagttagaggggggggggggaggttgcctgtgtttatgttgttttatgcttttggacggattaagaagcgggcaaaatcctcgtcttaaattccaaaagctttgagcagcggatatgcccgggccaaagtttaaaaacggagacaattcttatttaaattttgggaatttagttaataaaaattttacaaattaaaactcaaaaaataaagtaaaaaaagaatatttaaaattaacaaaatttttaattattaacccgaaaattttcttaaatttaattgcatcttatagataatccagcagtgtttttgcggataaagaaattttaaacatttttctttgattgttttgcggcataatggactgttataataattaattcgaaattaaaataggtatattaaataaaaaagcatcggtgattttttttaatatattttcccacctgggactggaaattttacgatgctcattacatctggcagcgacaggagcagcacggaattgcgctaaaacaaattcaaaaataattatttaaataaaaaggtgcttttaaaaatatttattttaattttaattaaccatttttgaaccaaaaaattaaaaaaaaagatcaaagattcttaaaataaaattcattaacaatcaatttcaacactaatttggatatgattctcaaattaaaggaaatttaaaatagaatttatttagaaaaaaaatgcttttcaaaaatgtttatttttatttaattttacttattttaaattaaacaatgaaaaacatatttaattatttaggcgaaaataaatgcattaacaatcaatttcaaactttaatttggatattattaaccaaatgaaagggatccaagtaaaggttaattaaagttaaatattttatttaataaataattaaaatattcttta

SEQ ID NO: 18014 - DNA, 2148 bp, Heterodera glycines
tcaaatagaataattaggctaatgatattaatttcctcaatttcatgattaaattaaaaaatatttggactcatgaaatgatcaagggttttaataaaaagcattcattgatcgctgggaaaagcatacatatagcacaggacgaggttcagcgccacgccgtcacaaagttcggcatagcgaagctgaagactcggcacaattggccattggcttgggtcgaggattggccacggatcagcagcagatgtgccacaaacacaatccctgcaaatgtgaattttaaaatgccaaatttattatttgtatagaaaagcgcccaatttttgaggcagtttttttttttgcaaaaaagcaataaaaaactctcaaaaataaccaattcttcgccatgttaaacattttaaatgaaataaaataaaataaaatgccaaattaattaatcgaatatttaaaaaatgaaaaaaaaacttacttaacccattcgcccaaggcacaactccaaaattgtccctcatccattcaattttgaaggcagaacaggcagaaagagattaattgcaattgattagttttaatgaatagtttattgagtttctgttaaaaaaataaaaaagattaaaaatttggttggaaaaacaatttatacaatttaaatataaaattgtcaaattaagaataaaattttaaaaatatgactattttttgttttaataataaacaatgagaaaaaataattgaattcaaacatttgtccagtaaaatattccaacaaaatttcggtcaggaatttaagtagttaattaaattaatgatggcaaccattggtaattaaacgatgcctaattaccggctaattagtgaatgttgctgttctatatatttttttttgaatgtgcatttgtgcattggaccgtcaacacatattcacacatattgttgtctgtttgtttgcacatccatcggcgggcgaggcgagaaatttggggctcaaatttggatgaaacattttcccgtccgcgcggctaatggatcaaagcggaaaagggacatggggggatgggacaagtcagtctcgtccgataaaaaagtatgggacaactcagtcccgtacaacaaaaagttactttttgctggattcgtaagtagagaaattgtaagtcgtggcacatacatgtaggagtttaatccatattaagtttgggattgcaaagcagtacccgcaaatcccgaaatttggagatttgtaagttggggacccggcattgagggatttgggacaaaacgacatttgtggatccgactctgacttttagcgactcgttccactttcaaaaattctattagaaagttttttaaaaaaatttaaagtatttcaggtcctgtgctattcttgtctgataaaaaagtccttggattaggcaacagcaaaatgtcttaaattttccataaaatgtcccgattttaaaaatagccaataacaagcgaaaaattttctaattaacgtcatcaaatttatatagttaatcattttaaaatatattcaatattaataattctgccaaattgagttgaaaaattcgtaacatttttgctattattataatataatccaaaatataaatcattttttaattgcattgaaaatattattttagatcctttcagactgtcattacagaaaatgaaagtattcttaatgatttctttatttgtgtttttgatcatcattttaattaatattaattatgttggatcagaaaagaaaaaaatggaacaaaaaacatttgacgaaatatttggagaaaaatgggaagaaaaaagaaacgaaggacagaaaaaaagagaaataattggaaaatttaataaaataaaagagaaaattaagcaaaaaggaagaaaatattcagcaaaagaacggagtaaaattgaaggaaaaatagcaaaaaaattgggcacaaatcgcaaaaatattcaaaaatggatcaaagaattaaaattaaataaattcaaatcaataaatgaccaacgaaaatttgaaattgttcaaaaattcattgaaatgtcaaatgaatacaaacaaaaaggaacatattcgaaaaaagaatagaacaaaaattatgccgaaattagtaagaaaattggagt

SEQ ID NO: 18015 - DNA, 2147 bp, Heterodera glycines
tttgccgcagccgttgccgctaccaccacgaccaccaccaccaccgaacggcatcatccaaaaagcatccgtaagcacaaaaagcaacgggtgcacaaacagaagggattttaccattcgtcgtgggccaaattttaaaaatattttaaacgtttcgaattcgtttagccatttatatcgggctttcgctccggtggaaacgacgtaaattaacgcatttatctccaactcgaacatcggctctatttcgccaacggttcaaaaaaattatttaatttatttacacagatttactccgttgaaatttgtggttacaattttttcaaaagaaaggtcatatggtttaagtttaagttcatctttgttattgtgaattttgttccatttgatcaaacttatgctaattgtcagttgattaggtgtgacattctcaaactttcattaaccaattcataatttaaactagagtgaagcgggaccgggaattttgagcaaaaccgggaccgggacttgccgggacctgagaagccgggaccgggacctcgatttttcttcgggaccgggaaccgggaccaaccgggaaattttaaaaattcaaaaaaattttaaaaattaaaaaaaaattaattttaatttatttcaattgaaaataatacaaaattaaatttttattttggttttttatttgataaaatccaaaagttaaagctaaattaaattaatgaaaattttcaaacaaattttcttcaatcatttcaaacaattaatcattttgggctaaatgactattagaaattcagatttgcttctcaatcacttttttcggcgcgcttccaaaagacttttggggaagaaggaggtccggcggtgccgataggcgccgccggggaaaattttgaaaatttgagtgtgattttttgaagaatatattaatattttttttaaattttttcctttaactccaattttcatctctttatttattttttttattgagttttacataacaagttttttgttgacaagcaaaaaaaaaaccgagactagtcccggtcccggtcaaaaccgggaccttggtactcaattgtactcagttgtccgctaccagatcccggtcccgtggcactctacttttatgtatgtattcaatttagctcatattctaatatagttttggaattaccatacccgggtccgtggtgcaccgataaacgccatcgaaaaagttttcaaaaaccgaatatgattttgcccatttttctagattgttatgaaaataatgtaaattctctccaagttttgagcttttgtactcatctaacgggtgcacatttctcgtaatttcacttcacttctccattcccaactgattttgctgacattttacgctatcctctgctgaaaaaatcgcgaaatatgcactaaaataagcaaataaaattttttattaacgcttttttggtaacaaaacaacgtaaaaagttaactaaaacacttaatttggattatatcttaattgtaaataaaattaaataatattttaaaaaattttttgaatacaaatttttaccaagaaaaaaaaaattttcgggaatcaatttttgaaaaatttttttcaattcataggggtgtaattttctaaaattttttcaggcgattattatgggtgtacaattttctatacgatcgaaaaactattaaacatgctaaaacataaaatatttttttaaatttatattttattaattaatcataaatcatcggatgatgccaccggaagtgataaattgcgcgaaaatatatttattgattatgtcgactgccaacactaattagatattgtatttccttttaatttgtttttgttaccctcagcaatcatagagaagtaaaaatttatttatttctttaatcaaataaacactacacacaatatgaatagggaacaaaataatacttttcaaacaaaaattgtaatcgcatttattaggcaatttgtgagcaaaaattttctaggaaataaatgtacaaagtttgtatagaaattttggcaattttaaatttacccagaaatttttgggattttttcataacacaaaaaatcaagggaaattgttctctttgaaaaaatccagtttttacgtgag

SEQ ID NO: 18016 - DNA, 1682 bp, Heterodera glycines
ttttgctgacatttagggctatcctctgctgaaaaaatcgcgaaataggcactaaaataagcaaataaaatgttttattaacgcttttttggtaacaaaacaacgtaaaaacttaactaaaacacttaatttggattatatcttaattgtaaataaaattaaataatattttaaaaaatttttcgaatacgtacaaatttttataccaaaaatttttaccaagaaaaaaaatattttcgggaatcaatttttgaaaaatttttttcaattcataggagtgtaattttctaaaattttttcaggtcgattcttatgggtgtacaattttctatacgatcgaaaaactattaaacatgctaaaacataaaatatttttttaatttatattttattaattaatcataaatcatcggatgatgccaccggaagtgataaattgcgcgaaaatatatttattgattatgtcgactgccaacactaattagatattgtatttccttttaatttgtttttgttaccctcagcaatcatagagaagtaaaaatttatttatttctttaatcaaataaacactacacacaatatgaatagggaacaaaataatacttttcaaacaaaaatatgtaatcgcatttattaggcaatttgtgagcaaaaattttctaggaaataaatgtacaaagtttgtatagaaaattttggcaattttaaatttacccagaaatttttgggattttttcatgacacaaaaaatcaagggaaattgttctcttggaaaaaatccaggttttacgtgagccccggtcccggtggatgaaatcccagcccgtcttttttggtcctggtaagtccgtcccgcttttcccaaaagtcctggccccaatattttttatgaatttgcctcctttttttgttagcatttttttttgttaccatttattttaaataattaaaatacattatgtttagatattaacattcagagagtaaaaaaatgcattttcaaattgtctcatttttggttttttgcattttccataattttccatcgttcgcgcggtattgtgggggaaaagcaatcagttcgtttaaaaagaagctgaagtatgaaccggatcaagaaggagcgccgcttgaagttaaaagggagagccgaaacagttttgtgggaggaaacggaaaagtgaaagcgaaaataaacaacaaaaaaaaagagaaataattaaaaataattaattactaattgcatgtccacaggtgtatattggctatgtgaagaaaagcccaacttacgaaggatgcgtagcgataaaaatattcaacccaaatttttacgctatttatgagaattcgaaagattttatgcaaaagattcaaagcattcttccgcctgacgagcgaaagcatttaatcacaatggttgacgcgtaagaaatttatttaaaacaattttaatattattatttaaaattatttttggatttttatattaaaaattcaatagcggaaaattaaagaaacagaataaaggattagtcataatggaattaggctcaaaaagccttgaaaaacggatatatgaacaaagaaacatttatggaaatgactcgaatttatttgatgatttgaagaaaattgttgagccaatttcggaactgcacaaaggcaatttttgttatttt

SEQ ID NO: 18017 - DNA, 1477 bp, Heterodera glycines
gcaatgctttatgcataatttctgtatctgctcatgctttatagcatatatacaattagcatcatcagcatataattttattttcactcctgatggcaaagcatcaggaagatcgttaatataaatcaaaaatagtaaagggcccaggacagagccctgggggacaccagagccaacttttttatttgaggataaagcatccccaattttaacacgaaaagtcctattactcaaaaagctttttatccacattaaaagtttgccccgtataccaattttttccaatttgtataaaagtaagttatggggcactgagtcaaaagctttctgaaaatcaatataaatacagtccgcattttttccattaataattgcatcataccaatcttccacaactgttattaattgacttgttgtagacctatttctaacaaaaccaaattggtattccgaaattttattgttttttaggagaaagttgtaaatattttggctaagaattctttccataaccctgcaaagtgagcaggttagagaaataggcctataattttcaggattaaatttgtccccttttttgaaaagaggaaaaacaattgattccttccagatatctggaagagaaccagagtctaatgaaatcctgaaaaggtcagtaataacagttgctaatgaaggatggcaatttttcaatgttttatagctaatattatccggagaagttccatttttattcggaagttttcttaaaagtttttgggtctcaatgatgttaaattctatatctgatataaagctttgattaacaaaagtgttgtccaagcttagaaagcctggatcaacttcagaattgttaaacgaatttacaaataaattggcaaataattcacatttttcttggtcattatgatagcatttgttttcagaaaccaaattcgatatttcaaagggattaacatcatatttttgtatatatttaaaaattgaattttttccctttgaaatagccttttgttcaagttgagaatgaaatttttttgtttgtatttttatgtgtaaactaatgctatcataaagtgccctttttgttgggtcgattttacacagcttatatagtttggccttttctttaatggatgccaataaatgcgttggatatttaggggctaactcttttttggtaagtctttttatcggaatacactcgtttaaggtttctagcagtgttttattaaaggcgttatatttttcatttacactgaaatgaccctgagataaggtgctaattctagatgaaataaccgtatttaaaagagacacattcgacggggtgaaccgtcgaatattaataaatttgggtttttgagtagtttttggaatagacatagtgaaaaattgcgccaaatgatctgatgaaaaaaccccgccttcaatattacaatgctttacaatttgatcatttgccgatagaactaaa

SEQ ID NO: 18018 - DNA, 1272 bp, Heterodera glycines
ggctttttctatcaaaaagggagatgaataaaatttttaacaatttttaattcctttttaaacaggccaaaaagtttaggcttaactctttttttcagaaaaccgatcagaagcgcaccaaactttgcagggatactgaaaggaagagaaataacctattttaaatattatctagtcagttcatttaaataatttttatccaaaaaatttttttttgggttttcggggcagtccccctgaaccgatgcgcccagatttatggggagaccgaatccttccggaatagcttcactatagcctgtactttaattctgcgttggatttttgctccccataattgtttgagtaccccaaacggacacttgaaaaaatcgatttatttttgttttcggggcagtccccccgaaccgatgcgcccagatttatggggagaccgaatccttcgggaatagcttccctatagcctgtactttaattctgcgttggatttttgctccccataattgtttgagtaccccaaacggacacttgaaaaaatcgatttttttgttttcggggcagtccccccgaaccgatgcgcccagatttatggggagaccgaatccttcgggaatagcttccctatagcctgtactttaattctgcgttggatttttgctccccataattgtttgagtaccccaaacggacacttgaaaaaatcgatttttttgttttcggggcagtccccccgaaccgatgcgcccagatttatggggagaccgaatccttcgggaatagcttccctatagcctgtactttaattctgcgttggatttttgctccccataattgtttgagtaccccaaacggacacttgaaaaaatcgatttttttgtttcataaatatttttttcagaaagtgctctaaagcgcaccaaattttatttacaacttaattttagcactctgatgctttagtatcaaaaaggaagatggagaaaaaattttttaaaaaatttttccttatattttggttatatcgttttgcttttggtggggtgcttggaacagtggaatcatgcgcacccgtccgatctggcaagttaagcaacgattgctgactagccaaaaggttcggtgccgtgatgaaacgaaccagcactgcttaccccgcggcacccggcacggtcccccgaaggaatggatttaattaaattctctccttcggggatttttttccacttcgtagaaaggcgttagcgttcgattgctctagtcaatttttcaaaa

SEQ ID NO: 18019 - DNA, 1988 bp, Heterodera glycines
caatatcaaaaaaaattttctcttaaaagagaaaagttcgcaaaaaatggtgaaaatatttattcaaaatgccaaaatgactacgaaaacccaaattttcatatttttgggggtgtaattttttaaaattttcaaaaggccgaacttagaggtgtattttttgctttttttgaatttttctgtgaaaatttgccaaggatggccgaaatatagactaaaaagtcaaaaatggcgaaatatggatttattcccgaaaacccccaaaatttggtttaatggactaaaaactttcaccaaatcaaaaaatttaacgcagaaatgctatttttgagcccctttcttcatagcatatgcgcagaaaaaatatgttagaccatataattagagttgcacggtactggtaccggtttttttacaattaccgattaccgtgctaatttacaaccctagttatgaatatatgtatttttttaaattaaaaaaacaaattatttgattgttaagttaaaataaatgtgcaaaaaatagtactctgctatttattttagtcaattgtgatttttcaatataaataaattttaaataataattacatgttttaaagttgtctctgattttgtctccccttctctatggaagtgccaaactaactctaattagggatggcaattaaattggaagttgattgattcattctttatttactaattattcccaaattcctccgtttctttccttggcaaatattattcttcgttaactccaatccaatctaatcactcttttgaataggccaatttctcttctctttcccattttcctctctttttctcccgccgaaaagaatgggccaattcgttttgtccatgggttttggagtttggcccaaacttttgtgataaattagtgagagtgctttcggatgagaagcggccatggggaaattgcctgaggcgccgcaatgggcggccaatgaattggcgggccaacgcgtcgcttggctcatccatccggcgccgtgtgttggttttggcccaccgggtcggccccggggatgggcgaagagaacgcaattggcggggaaggcaccgccgaactcaccagccgaactctccacgcaatacaccgccactttctgtttggtgaagtgaattattgcaccggcggacggcacaaaaaacacggagacaaaaaaaacggcggagtgccaataattccccgcggcattcctttgtccgctgcttttcgccgccgtcgttcttcggtcgcttcccccattttgccgtttcgttcgttccctctgcgcaatttctttctctccgcttcattttcgctgcaatgtcgcgcatttcgtcaatggcacgctttcgggtggcggctgcgctggaggaggaataccgcggcaatgagtcggcccagcagccgagcaccagcaattgggacgggcggcgtgaacgattgccgtcggtgtccaattttttggctgcacggcgaaggtcagtcaatctgcagagaaaagtgatcggagcgatgatcagaaattgattgatatggtttcgagaagcattggctaatcaatactaatgaatgaatgccttggatattaatgtaatttgcatgtataaaaagagagctttgattgatcattgaactttgatccattgcgctttgaaaatgaacaaaaaaatttccttttcatttggatgtaaaattttgggggaaaagaagcggaaagacgcaaaaagaggaaggagagagaaaggaagcgccttgtgaacggtggacggacggacaaattgaaattgatgaattgggcgcgggcggcacagcgccataaaaacataaaacaaaaatgggcgaaaattgggtcatccatcgcacaggtcgtccgtgcgtccgtccgacgacggatcgacggaggactgcgcgaggcgggatgaaatgaaattatgggcaataaataaaatgccaacacaccaacgacgaca

SEQ ID NO: 18020 - DNA, 1164 bp, Heterodera glycines
gagtcgacgccctaaaaaaatttcggcattccgtcccatccctacttcacatggctaagctctttttcatatcgtattcatttcccatttgcctttttgccctcttttggcacgttttgaatttttaaaatgccttccctcaaaatgcctcccccccccctctctacggcatttctttctccaatctctcccctcgcccctcaaggcgttcgatcaaaatcatcaccgccacccctcgcgcggttcggccatcgcctgctgccagcactcacactttgatgacagcatttgcggccgctttatgcgccgcaatcgctacctcgcgccccattccgccgaaacggcaaacggaacctttggtggcgcattgcacgcggacagaaacgggggcggcaaactgaacggactgagcggcgcactgagcgggtgggacatcagtgaggaaaactgctgggagcagttggaggccaactcggaactgtactcatcgctacagatggacatgccaataaaaggtgccaaaaatggacaaaagagcgaaaaatgccaaaaagacagagtggcctttttcactggttgtatctttcagtgctcaacggttcgccggggtatataaacattttggacggactgaacgcgtggcaattggtgtcggagttggcggatgcgaccggacaaccggcagccgcctccttcaaacagttcagcccggcaggggcagccattggcgtgccactgaacgatgccgaggcgcaagcgcttatggtatttatgggagagagataaatccgtaaaatcctaaatcattgctttccacccaaaaggtctccgatttgcctttggactttcggcggcactctttggcagttgctttggcacgtgcgcgaggtcaattcctttttttatgtgttgattttctatattttctacacatttatttttccgtttccttttcctgtatatttcttttccaaatttcaattcagaacaaaattggccattccaaacgccaaattcaaacaaattaaagcaaatcgtcggtacagtaccctcctctgtctttaccgtatcctgtccttatctgttctgtcctgtcattcttttttattttgcttttcgcaaagattagatatcttttgtttagccggagtttgtttgttttat

SEQ ID NO: 18021 - DNA, 2310 bp, Heterodera glycines
ttgttccgggatttttcttcgctctccattgggtttcccgatatgtgttgtggctacattgactgagcctccgaatctgttccgccttaattgtcgtttgaatccatgctctggatttgcctctttgccttcgaagccatactccctcatgacttctttgattgctagctctttgctcaatgcacttcctaaagcctttcggagggatgacgtgtcccaaaagtctggattttttgctttctcttccagaatttcacgcaggaaaggcttgtatagcttcttctcaagcattaaataaattggcggcccttcaatgtcttcttccgctgcttccaattctcttgccaggcgttccaattccatgcaaaaatgctttgtgtcttccaccgaaaagcatctcttgaggttcgacaactccgtgtgcaacctccttacatattcgcctttgtctccataggtgtcctttaacagcttcatggcaatttcgtaatttttctcttccaagcgtagacctccgatgagcaatgcggcctctcgctcaaccagcgatttcagcaaatttagcttctccgttttgcttcctggcttttggtccacagccactttaaatgcttcttcaaacatgggccattcccgtttgtctcccccaaacggcttaattcttagtgttggcaattggtacaatgcggcagtcatttcattgcctctcgcacggttattccctttgtctgcttctgcattcgacttcgacattgcttttgcatgttctctttgctccactcgcgcgtctctgtccgctttggagcgttgcagctttgctcctgcttccaccttcatctccaggtccttaagctctgttagctttgtgttggctgcttccatttttgtgttcagtttctccgttgtttgaaattgttcatacgctgtctgctcactttttctttcgtccttgtccattttttgtatgacgtcatgccatttgcttgcggttatccaaatttgctcgattttggcattcactgcctccacctctgactttattctctctgccgcgctttccaggagaattgcattttccaatgaggtcagagtttggtccggctcagcatacaattctgttgccgttttcgccttctcaagagcctttagctctattgcgatttttgtacgcaaaaatcccgacatttttgctcacttttgggttctgctacccgacttccgaacaaattgtgtggggttcggggtcacaaaatagcagtaagttggacaaacagtggacaaagtgagtttgacttcagacccaccaagagtcttacagtgtatgaagaaggacgctacgagttacgaaaaactcgtcgggtccgaccgtgtaagcgggaggcgccttgggtcacaaaaaaccctaggagcgacctgctcacaatggaggacgccttgggttacaaaaaacccgaggggtcggtcactggagaaaggaacacgcctcgggttacgaaaaacccgaggggccaactgagcaaggaaaaagacgcctcggattacaaaaaatccgaggggccaaaccctggggaaggcaagcgacacgaattacaaaaaattcgtgcggccgaactatgggaccggggaagcgcctcggattacaaaaaatccgtggggccaaaccctggggaaggcaagcgacacgaattacaaaaaattcgtgaggccgaactatgggaccagggaagcgcctcggattacaaaaaatccgtggggctgcgctaattggcaagggaagtgccacgaattacaaaaaattcgcgggactcagctctgggaccaaaggaagcgctacggattacagaaaatccgaagggcaaccttccgggttcaattcctaccgtcccctgtttttcccttttttgccctgcccaaatctcaaaatttcctcttccccccaatttactcactaatcccaaatgctcctgtgcgcaatgtctgttcggccgctttttgtccacgcacggtccgttgaagtgcccaggtcgccacttgacgcagatgggggaggggtctgcgccgatttgtccgtttttcgctgccgccaattgcccaaatttgccgcccaagaatttgcaccaaaatattccacaagtttatggctcaaacttgggtaattaaacccatacataagaaatgtgtgagaaatacaatggggggaaattgtgacaatggggaaaaaatgcgagggggaaatgcaaagggaaaaatggcacaattggggggggcacaaaagtggggtgagtcgcggggaggggggcacatcaccgg

SEQ ID NO: 18022 - DNA, 1497 bp, Heterodera glycines
gcgcggtaagccggaaaatgtatttgtccggaatctgaaaagatatttgtggcaactggcatagcgaaaatgccgacgggggggaatgtacggaaacataaaaacaatggcaaagccagagagagaaattttaaattcaaattcgaatttatttttaatttttcggtgccccccactcaccaaacagttcaaatcgcgctccaccagcggcagcacaaaagagagtgtggtggtgttttccggttttgagcaccaccgtcccctcgcgtcccattgctccgtgccggggcatcggaccaaaatcagaaaaacgtgggacggcggcggtgggtcggcgccgtccgcggcggtcgccgctgtgtccggagggtccgccagcccatcgttgtcgcggtcccacaccgggccggaccacatcagaagccgcttgtagtgctgcacatactgacggacgagcctggaaatcaacagcaatacttaagggtcgaagtgatcagcggaaagagtgaccgatcaaaaacagacaaaatgaaatgatcatttagcgatagataatcgatataaattgacgatcaaacatatatgatcaataaaattgatcactcggtgatcagaaaaagggatgatcggtcaagaatgatcattaaagtgatcatcagaataaattgatcattttataatcagacagaatagccaactaataatcggtgattatttgtgatcagcgagtgattgatcaccacaaattaaaaattataaaaacgtacgacaaaacttgttgccaaacacctaaatataacaaatgataaatgaaaagattcactttctcatttaccgttgtaaaatccaatgggcacttgaatttggccttggtgaatgtaccgggcatagtctgaacaaagtgccaattgctaatttaaacatcatcaaaacactgaccattgtccgaaaagagactgatccgcgcagttccgctcgcattatttgcggaagtgccaaagcgaacgcatttctcatggcttatagtcggagatgaactgaattgtgacggagagcttgtttaatggtcgaccattcttcgaaaataatattaatttggccattagataattgggcaaacggtggccaattgctataaaccaacgattgatcatttgttcctccagtttggtcagtcgtcctttccggttgatcatttatcccttcggtttgatcatctgtccaaaccaatttgtctccattttcatccttttgtctttgtttttccaagcttctttcctccatctgtttgaatggttgacaattgattagataaagcatcaattgtttgccatttgatttgtcgtcattttgtcccaattttgcttatttgtcgcttccgttgtcgcccctttttgtgccgttctttccattttcgtcgtttgttctgctggtggtattggcacttgctccttcctttgttgtttttctccttcacttttctcctcctcgccgtgt

SEQ ID NO: 18023 - DNA, 1213 bp, Heterodera glycines
agcaaagaattgagacggccgagagtgccattgtttgggagcaaaaaagaaagagagagtaaagagacatttggaaagcataaacacctgtaacgggcaattgcatcaaagctaaaaggggagaattgagaatagaaaaacccagcattatgagtggcacctgtgaaaagattgtacagctcgatgttctggaagggcttctccctgtgccgtttttttatggaggggccccaggcgccaaaaacggcacgcattgaactgacgcgattgtcatagcttaattggtcaattaaggatcaacaattgtgctagttagttggcaaatccgacccgtgctctcctttcattttgctggcgttcatcttctcggccgttttgaacagtttggtgcccactgccgagtcgatgaccaattcgccaatgcgtccactacgggcgtagctgaacgaaagtcggataaaaagcaacgatcatcttttgattgtgccatttcccactggtatcgccgtggcattgtttcgcgggtgtaaacgcggaaaatctgtccacccgaacattcgaaaggtgccaacactttgttgagcagtgtttcgtctgaaattcacaaatggaagtgccgaggatgacttttatgttctcactgttctcgcgcagttttatgtgcccgacgattcccgggaaaacttcgcgaatgccggggtccgccatatccacaaaacggtccaatgtcacggccatgtcatcacgcagcttttgcgccccgtggtcagacacaatgatcagattgatacagcccaaaaagcccttaaaaggaattggccaatcgaatgaatggcaaatccattggaaaagcaaaagactgacattgttgtccaattgttgcatcagataattgatcatcgcgtccacataaatcttaagggaaaaggacagaaatgaaacaaaagacccactaaagaccaatgccgaattgaccgcgtccgaatccggcccctcctgtcattaattttaattgcttttttgaattttttaaaatagcttttgcctggtgcatggccgagtccggctgctcaaaataaatggccaaaaacgcgggccgttcgttctcgtcgagacggagccatttgatcacctttggacaaaatggcaaaaaatgcttcagttggattaaaaagaggaagcgggacctggtcgactcgcttgagaagggaat

SEQ ID NO: 18024 - DNA, 2252 bp, Heterodera glycines
  unsure (1)..(2252): unsure at all n locations
taatagtgtgaaaaatggtgtcgtttcttcgcttgccatttatgaagccgctgttgaaatctatcagccagggctcacctatcatcccatatgccctaagggcactgagtgcagagaattatcattattggttaaggaactaatcgataaccattgtgaaccacaatctcaagaaagagcaggtccttgaaccaccattcccaaagggaggtctttattgtcaccaaggttttacttgataagttttggttaactccgatatcctatgttacctctcaccagtccactggtcttggcaaagtgcgggaccagctttgcgccggatatgtaataaagaacacacaatctccagtatgagcaggttcttgaaaaagcacaaagcacatataaagcactggttacaaataaacaaagaaaacactatctccgataggagcaggttctttataaaactataaagcaaaaatacaataagcgttggttagtaatgtaataaagaacacacaatctccagtatgagcaggttctttaaaaagcacaagcacatataaagcatgggttaaaaataaacaaagaaaacactatctccggtaggagcaggttctttataagattataaagcaaaaatacaataagcgttggttagtaatgtaataaagaacacacaatctccagtatgagcaggttcttgaaaaagcacaaagcacatataaagcactggttacaaataaacaaagaaaacactatctccgataggagcaggttctttataaaactataaaacaaaaatacaataagcgttggttagtaatgtaataaagaacacacaacctccagtatgagcaggttctttaaaaatcaaaagcaaatataaagcgtttgttagtttaatgctgatagcatagctcggttatgagcaggttctttcagttgatcctacgttaactctcaccagtccactggtcttggcaaagtgcgggaccagcttcgcaccggatgttggccgttaacgataaggaattattgtaaacctttcggactacaatcgcccgataaaatgaagctctattacataggctgtatttacatgtatgacgtaacacgtaacaaaattagacgaatagaaaataaattccagtatttattggggctggaccaaaggaatatttagatgtaagctctacaaatttgaactttaataaacaaaaatgaaattaaagtctattcatatgaaattcatgtttttatgtaacatgtaaaaacgatagatggaatttgtgtttaatgtaacatgtatcatagacttgaaagaacaaaaaaggaaaaaatattatttggattttaatttacatgtgacagacatgtaacatgtaacaattgtaggattgaatgaacaaaaaatgaaagtttccagtatatttatagtggtggaccaaaggaagttatgtttacatgtaacatgtaacaaataattaattttgactttaatgaacaaaaatgaaattaaaatctattcatagagaatttctgttgacatgtaatatgtaacaaattagactgaatgaacaaaaaaggaaaaaatattatttggattttaatttacatgtgacatgtaacatgtaacaattgtaggattgaatgaacaaaaaatgaaagtttccagtatatttatagggaggaccaaaggaagttatatttacatgtaacatgtaacaaataattaattttgactttaatgaacaaaaatgaaattaaaatctattcatagggaatttctgttgacatctaatatgtaaacaaattagacttgaatgaacaaaggaaaaaatattatatggattataatttacatgtgacatgtaacatgtaacaattgtaggattgaatgaacaaaaaatgaaagtttccagtatatttatagtggtggacccaagggagttatgtttacatgtaacatgtaacaaataattaattttaactttaataaacaaaaatgaaaataaagtctattcatatgaaattcatgtttatatgtaacatgtaaaaacgatagaaggaatttgtgtttaatgtaacatgtatcatagacttgaaagaacaaaaaaggaaaaaatattatttggattttaatttacatgtgacagacatgtaacctgtaacaattgtaggattgaataaacaaaaaatgaaagtttccagtatatttatagaggtggacccaagganaagttatgtttacatgtaacatgtaa

SEQ ID NO: 18025 - DNA, 1703 bp, Heterodera glycines
  unsure (1)..(1703): unsure at all n locations
ggaattccagaaaaatggctatctattttctgaaaattttatacagcacaatgcntctcaagcatgatagggagagcggtgcgcaatggatattatatgcaccagagaatttttggtttctaagaggaattccagaaaaatggctatctatttttctgaaaaattttataccgcacaaatgctctcaagcatgatagggagagcggtgcgcaatggatattatattgcccagagaatttttggcttctaagaggaattccagaaaaatgtatctatttttctgaaaaattctatctttttctgaaaaattttataccgcacaaatgctctcaagcatgatagggagagcggtgcgcaatggatattatattgcccagagaatttttggcttctaagaggaattccagaaaaatggctatctatttttctgaaaaattttatacagcacaaatgctctcaagcatgatagggagagcggtgcgcaatggatattatattgcccagagaatttttggcttctaagaggaattccagaaaaatggctatctatttttctgaaaaattttatacttttctgaaaaattttataccgcacaaatgctctcaagcatgatagggagagcggtgcgcaatggatattatattgcccagagaatttttagtttctaagaggaattccagaaaaatggctatctatttttctgaaaaattttataccgcacaaatgctctcaagcatgatagggagagcggtgcgcaatggatattatattgcccagagaatttttggcttctaagaggaattccagaaaaatggctatctttttctgaaaaattttataccgcacaaatgctctcaagcatgatagggagagcggtgcgcaatggatattatattgcccagagaatttttagcttctaagaggaattccagaaaaatggctatctatttttctgaaaaattttataccgcacaaatgctctcaagcatgatagggagagcggtgcgcaatggatattatattgcccagagaatttttggcttctgaggaattccagaaaaatggctatctatttttctgaaaattttataccgcacaaatgctctcaagcattatagggagagcggtgcgcaatatatattatatcccccagagaatttttcgtttgtataaggaattcctataaataatggatatatagttgtgaaggggacgggggctggggggaagggtggggagccccgcatgttgtggtacacgcatcgattatggaagccgcgcatgcactagcaacgaagtcctttgcgcgaagcgctcatgtaatgcatattcttttcatctctcacaagtaaactgtctacaccgtgcaatcactgtgcaaagcatacggtctacaccgagcaactactgtgcaaagcatactgtctacaccgagcaattactgcgcgacacgctagttatatactactaaagaaacaaggcaactcatttccaaaaacaaaatctccttacggggcgtcgggaggggttcgaaatttcgaccttggggacaactttttgaggcgcatctgggaaaactataggtttttcgctccgagggccaactgagcgccaacggcgctgaaacggctttttcaaaattttttttgaagttgctcggattcaaaatttttttaaaggcctaaatgaaaaatcggcctcg

SEQ ID NO: 18026 - DNA, 1457 bp, Heterodera glycines
  unsure (1)..(1457): unsure at all n locations
cggtttttttttttaaatttttggctaggctaaaaatgtttgttttttaaattattttttattatgttttatctaggggttaagcaccgacccgacccgttaatgggattagggaatgtcgtctattgcattcctaatcggatgagagtgtcattaaatgaatttttctaaaacatttttttgtttagaaaaattactggtttttttctagacattttgtgaaatttactgtctctcttcgagggtcgaggcttaaccctagtttgaattatttttcaggcggttccccggccggcgagtgcattcgtcgcgcaccgcctgcacaaattgtgaatttcatggatgacccggacacatgcccgcatggctatttctgcgttggaatggtataaaaaaatagaaaatattattatttttttatagttaataaaataaaatattgtttaaacttatttttagaaaatatgaaaaaatatttttaaagggatttttgtttttgttgaaaatttaggtttttctaaacctatgcatggaattgtcttaaaaagtaaaaaaatctttgcctgctctaaaaaatcttaaaaattttaaaactttcacatatgaattaatttgggtggaaaatttcaaaaaaaaaattggatattcaaaaaaaaagattttcttagcacatgcatggattgttgaaaaaataaataaaataattttgtctgtcttgataaaaatcttacgcaatttaaaatattaaaaaatttaaaccttccaatgactcgaagtaatgtggaaaatttggaaaaatatgcaattttccaagcctgactcgccggtcggccactgttgtcccgcgctgtgcccactcggtactgaagtggaccactcttttgcatgtgtccccggcggcgctttgccaccggcttcaacaagcgccggaagtgatttgttgtcgccaatacaaccgacaaagtcatcttctagttcacctccatctcccatttttggtgagagttttgttaggacaaatggacatgaaaaaatggacaaatagacgacaaaattttgggggacggggggaattcggacaaattggcaatgaataaaagtttttataaaaatattttaaaaaatgccaggccgtgacccgcccggtgcgccgcaatcgtcgccgcccattcttccgccgtttgccaatttcaccagccgttttttggcacaatttttgcccaaaaaagtgtgcccatcagaaacccatttttgccatttcctctctggcgacacttttgctcaggtgagtcaaaatttttgataaaattatataatttttttttccttaggcagtctgctgtaagaggccgtgcaattcgatggcgcccgagtcgctgtatttgaacgnngaatgcgttgcacggggccagctgggctccgagtgcaaagctgagaccatgggggggggggggggg

SEQ ID NO: 18027 - DNA, 1150 bp, Heterodera glycines
tttttaatcattgttcaaaaaaatttgctgacgaattgtacactgacggattgtccattactgacggattgtccttcactgacggattgtccactaacggattgaccactgacggattgcccactgaaggattgtacggaccccgcccgtagccagggaggagggccgaattctcccatttctcaaccttataattgaattttaaaccctcaaaatggcataatttaatcatttttgggcaaatttttgatatccggcgctgaaattttaaaataatctggaaaagttttttttagtccaaatagcaaaaaaaaaaggtctttagtaacatgtaatataaatatttgggcattttttctcaaatatttatttaaatatttggggagtaaatctaaatcctcgccctacagatgaagctcgaaatttccaatcttttttcagtatcatgagcaatgtggtgcagcagaaggaatgaattgtgtgaagggtcattttttttttttttttggaattttcttttgcaaaaattacatattggaaaagaaattaattaattaatatccatggaacactaatggaattgatcaaaatgaattttatgttgaattattactaaaaatttaattttatttaattgttttatctttaaggccaatgccaatgcattgaaggcttttctcccgcatccgatgtgatcactcatccaaccaaaaatccaagccaacaatgtatcagagattgtgaaaaggtaagaatgattttctaaatttatttatttttaatgattatttattaattaactcgaattacatgaaattaacccaattttttaaaatgatatttataaatgtttgaatttatttatcaaaaaatcaaaatgattttagaatctagaaaaacctaaaaaagaaacctctttaaattttttgtatggaaataaacttgaaaaaatatggcaaaaaattaccacaatttttaagagttttataggtttttttatatttgaaaattctttgtatttttttgagaaaaaaaaaatttctgttttcattgaaaattcctaaaaaaaacttcattgtacgaacataaaaaatttctaaaggctcagcaaatataatattttttgttaaggccaccagcctaagtcggg

SEQ ID NO: 18028 - DNA, 1975 bp, Heterodera glycines
taattcccaaattcgtcattttttaatattttgtactaaaataaatgaaaatattcatgttgcacaacggactcgaaccaccaccctttgtccctttactatcttacaaaaaccactgagccacacatgcaaatcttttctggtacaggagctttatgaaaaatgtaataaaaataaataaaaatgcacgcaagaatctatttccataaaccaaaaataaggccatgatttggcggatagtcggacttttacgcctgaaaaaatctattgacttacaattttgtagctctggataaaaaatgagacaattttattgttttattgacaagtagtccaggcattttaagttttaacaactattaggtacctatttctcgattttttgcacctgaaaaatcctagacctggttatatgaatgcatgttttaaattttgatattatttgtaaattggagagattttgaattgaaatatttatacaatgtaaaatggttatatggaatggtccaattgtcgaggatgaacttgttgatcacaagaagacatttccctctcaacagcctttttcgacgcctcagcagaacggacagtttggagcatttcctcagaaagttcttcggtctaaaactcaaaattgttatttaataacggaaaagtaacaaaaaggaaaagaaaccgataaaatcatttgcatttttgccctgtcgcgcaacgacgttccatcggcaacgggtgcagtcaaatgcacttgctcctcctcagattcgggtctcggaatgtgttgaagaattcgagcagtccaacgaggcgatcgctcgaaattgtcagcacaagatcaggcagttcaccaacgagacggaacctaattatgagagaatgaaataaaacgcatagcacatagcatgtattagaaatgaaaaatttcgttgttttagagaaatagttcttttaaaaatttttcatataaaaatttcatagtgaaaaaattttctagcttttttaaagattttttgttgaaaaatttcaaaatatagtttcgagggggataaaacgacgtggggaaaacgatggggccaaatgatcacatcggaatttggacgtcgtcgatggtggctctgagcatgtcgatgcacatccccgtcggtttcaacaaatggtcatccgaccaacggttctcccgggctttcatgcaattgtcaaatgagtcgaaaagacaagtcggagattggagaggcaaagttggaaattgtcgtatgccttggccaccaatgaacgcaatctctgatcggttatctgcaaatattatcattttcttaaattgaatgatgccctaaacaattccctgacatgttcgtatgcttttgtggacggctcgtcctaagtgttcagtttcaattgaccaagttcggcgattaatgtcgtttttgttgggtcaaaggcaccgccggagcaaacgacaaaaatggcagggtcaattttgacctccaactccagcttcttgcgcacgtcaaccatgtgctgaagggctgtcgcagaacggcctaaaaagagcaataaaaaaaaattttttttaaaaataaattcaggttttcaactaactgtcatgaaaatggtcatttttatgcaaaactgctagcaaattaaccgttttttgcgataattttttaaataatactctcaattcaaaattttcccgtcctccggttcccaaaacagttggtgaagacggactgattttggcggtctgaacacgtcgattgttcaccgccggggaatggcacgtaaacaccacctaaaattacagaagcagtattgttttagtttaaaaaaatcaggagcatgtttaggaaaacacgttgttcaaagtcgccctctagcggatatgtttcaattttagtgacattctatttacaattaaaaaattcatcaaaatcgctactttaggaatttattcctggggtttgttagccataat

SEQ ID NO: 18029 - DNA, 1286 bp, Heterodera glycines
ccgattcgatgctgctcacactgacgccagtccagtgtcattgcgcaacaaatgagaggaagtgtcgggcaaatcactccgcggggtgctgatttgtttggaagcattttcaaatgcctaaaacagaaaaataaggaacaaataaacataaaggacatacttaagagttgggtaagctgttggaggaatgatttggtgatggtgatgtccaatgtatcggtggcctcaacgattatggccaagtggtctcagtgatggcggacccggtaccggtgaaagagtctgagaaaaaattgttatttgttttatttgttggtactcattaagtttgtatccgccttttgggtcaaatttttcagaagcgtagccagacagtcagacagtgcactatttccttctttatttttctcacctcttcccttttcccacacacaatgctgccagccagcacacggctgcttactgtctacccttccacccgccgcagccccacgttgacagacagtcagattgacagacagtcagacagtgcactatttccttcttttcttccgcttacaaagggaggtggccaagtgtccgtgggatctcggaatgagattttttgggtagatagagcacccctgggttcttaagaaaaatgctttcaatttctgccaaatggacccctgtgccgagataaaaaatgccaaagtttttaatgattaaataaaagaaataattatttacacccttccacagtggccggtggcgtagtgggttacgcctctgccgcaccttttttctgtcctaggttcaaatccccgttatgtaaatattttttcccatttatttttgcactttatgcaaattatttggccgaggaaaattgattcccgtccaataacattttcattcattttttcaaatgtacgttaaccccaaaaatattctttttctattttccaggtttttaaaattaatgtaaaaaataaatccatgacttataaggccaaaaatatatatgcagtggcgaacaccagtcatattatgaccaaacaactgatggttgaatgggtggacaaagttctttgtcctgctcttcgcccaaaccaaaaatcgcttttgatcgttgacagttggactgggtggaacaattttcatccaaaaaatggaattgaattggctgttaaacaaatcccaaagcatggaactggaatttgccaaacagttggatgtctatgtttttcggtatttaaagggtcaaagaagaatacaaaaaaatttagaatttggaaagaatttac

SEQ ID NO: 18030 - DNA, 1149 bp, Heterodera glycines
ctcacaaagttatggggagtgaaatggtgaaatattgttttcaccacaaggcattttttctgaaaaccggattcaaaaatctggggtttggtataaccgttttagaaatagcgtagaaaacagcttcgatatcaagaaaccaagtcaagtccagaaaggaatattttaaaacgatttcgttttgttttggcattatgataccgaataactttcggaaattatggaaacaaaattggagaaattcgaataattttttgactgcaaatttttttccttttttgaattgggttcaaaaaaattttaagagaatttttgattattaatttgaagtcttgaatttatttgacaaatccaagacttaaaactgggagaagcaaggggctgtggctgggggcctaaaatttgggccacattggagaattaattctgatttctgaaaaagtcccagaaataactattttttctttccataccttcttgtagagctcgagctgctctttccaatggtcttatcccggtctcgatccgtgccgaactcacaaagttatggagtgaaatgtgaaatattgttttcaccacaaggcattttttctgaaaaccggattcaaaaatctggggtttggtataaccgttttagaaatagcgtagaaaacagcttcgatatcaagaaaccaagtcaagtccagaaaggaatattttaaaacgatttcgttttgttttggcattatgataccgaataactttcggaaattatggaaacaaaattggagaaattcgaataattttttgactgcaaatttttttccttttttgaattgggttcaaaaaaattttaagagaatttttgattattaatttgaagtcttgaatttatttgacaaatccaagacttaaaactgggagaagcaaggggctgtggctgggggcctaaaatttgggccacattggagaattaattctgatttctgaaaaagtcccagaaataactattttttctttccatacgttcttgtagagctcgagctgctctttccaatggtcttatcccggtctcgatccgtgccgaactcacaaaagtatggagtgaaatgtgaaatattgttttcacacaaggcattttttctgaaaaccggattcaaaatctggggt

SEQ ID NO: 18031 - DNA, 1286 bp, Heterodera glycines
  unsure (1)..(1286): unsure at all n locations
cgagctaatgcattgtcnccaaaaaacacaattcatagccaganaggtgcatgtgagatgtggaaacgaatccaccacaccatttgcctttcctaagaatcggaagagacacaattcncaatccaatcaactgcttttccctttatgtcaatcacccgaagtgatgtgacgagttgggcgaagatcggtatcaattcttttttcggccaacaattttgcaaagaatgcaaaagaaaccaacgaaatttgggcccctccgtccaacatagcctttgccgtcaaaccacaaaccgatacatttagggccattattctcccgatcgaaaccttattcaaatttttcgtcgtctcattttcggtcccatccttcccaaacaatttttccacctcagcaggactcatcgaaatgccaccaacaaaaagattttgactcggttgtggtggtctttcctgttgttcaacaataaaattttgtcgaacgaaatttgatgttgagctgttgttattctgagtgccttggtttcgttggggctccgaacattgcctggcaaaatgtccgaattttccgcaattataacaagttgggcggttttgttgctggtcattggcttgtggaaaattttcttggcgaaaatgctgctgcattggccgtgggctgtactgaggcacttgaaattggctgttgaaccttgagaaattgtttgacttttgcattgcgagcttcgatgccttttgagttgattcagctctcgccgctaatgcaacaaattcatcaaaaatcattgaaggacgacgggctaactcgagagttaatgctaactccgggttttggagagcccttatgaagtgccgaattgaataatcgtcgtaaagatgctcgagtaacccagggtaggcttttctgaccagcgaagaaatacggtccgccaaatcgtcgattctctcattatttcggcgatatgcaccagacatcagctcgtcaaatgccgacatttgcctagcatctgtctcctccagcagatttatcatcgctctctttacgctgtcataacggaatgggttatttgcaaccgcaacattgaacgcacgttccgcacgccccaaacattttgatcgaagtgcgcttaaacgcttcgcttcaggccattcttcggttgcgacatcaaaatgccggaaaaacgatcggacgccatctgccccgaagttcccttttagttcaggcagtgaatttaaggtcattgcgtatgaaaaattgtctaggcttttaattgcctgtgccaaaatca

SEQ ID NO: 18032 - DNA, 3350 bp, Heterodera glycines
  unsure (1)..(3350): unsure at all n locations
cgggaaaaattttgtattttttaatgcgatttgttaacagaatttgtaaaaaaagaccaattgattaatttttgggtttttaggatgcttaaaatgaaagaaaaaaagttagaatattttttttaattaaaatttcaattaaaataatggtaaagaaaatatgaagaatattctatcccagtggggaattgaacccaagcgagaaataataaaatcagaaggtttagccacttgaccactgcatatgaacaaacgctttaaacgaaaataaataatttaattttttttttctcaaaaaatttctccttcttcaccaatttcctactcttttctcacccagacccccattcttaccagtgcaaatttttaccggcggtaccggtactagacaaaccggtaccgatactttgatttctgaaaaaccggtaccggtaccggtaccaaaaaaaccggtaattaccggtcggtaccggtaccggtaccgatactttgatttctgaaaaaaccggtaccggtaccaaaaaaaccggtaattaccggtcggtaccggtaccggtaccgagcaactctactatatatatatataccaaaattataatgatttaaaataaattaatttcaataaaaaaatatctaataaaaaaataatttattcaattttttcagcacataatgccgtcggcaaagaaggcaaattccatttgttcatccttttttcgctacggtagttcccaccatcatttttttaaataaaatcatattccgatcacttgattcatttgactgatcattatcgacaaataattaatctggactaattctttaaccgaagttttaatcatttctttttataaaaattgcttggacacataaaaatttgaaataaatattaaataaactaaataagaataacaataaaataaaattaataaatttctattaaaatactttttcaaccaatcaaaaaagggatcacattttgtccggactgctcccattgatcgcatggacacaagtgaccagccaactctatgatcaaagtgcatttttgcgtcaaccatcaaagctgtcatatttgtcaaagctgatctcaacgctcaacgaatttcgtgagcaaaaaacaattaattatttatatataattaatcactataattagtgggtcattaattaatattagccttcaaaatgtaatttacaattatttattttttaagaatttctctatgaaaaatccttgttgcaaggcattgaggatatatgaagaacaatttatggttttttgtgtgatgtgtccatatgtaaaatcagatgatgtaaatcaaaaaacgaattaaaacaccataaatatatatttatatatataaatacatttattatgtacaaaatttgttgtatttcataaaacagtatcagattttaatgaattaaatttttctttttctttttttaaattttaagactgcccagtcaatttctttcacatcaagcggatttgaacccagaacccatttttaatgcaccgctaaatgaaaaattcacaatagaagtcgatcctgctctatccaatctatatatagcttatatgcaatttcacggagcaggacaaaacgtcgtcggacgaatttttgggccataacttttttttctttctccaccaaattaaacattcatgctattattcgaaagcatttgaaaaacgctattaaactagtaaatttccaaaaaaaatgtattcatgcacaaagaaatcagggcaaaaaaagttcgaaatactgggttttcgagttccttctggccataacttgtttgaaacttaacgaaaatttttgcaattttacaaattaataataaaaaccacagagctatcgaacaacaccaacaattcttaatttgattgacagtgaacaaagttatggttcaaaaagtcttccgacgacgtttcggccggcgacgttttggggtgcaccggcaatttcatacatacatacagttgatatgttcccttgtaagcaccggaggtccggccgtcccgatatgatttacaaatcgctgaatattaattttttggctgttaaatttcaaaaaaaaattgcttagtttaaaaaggttgtgcaccgaaaaggaggctttttcgacacttttgaccttttgtatgagatttattgcacgaaagggagtgtggagttggaaaaaaagttcgaaaaactagggtgaaaagaacgtggtgatcaaatggaatttcccgggatataacctccaaaaggtacatttcgtcaaaatgtttttttataaaaaaaaaaaaaaaatcaaattnttaattttacaggcagataaagaaatttatgtagataattaactttttattaaaaataaatatttcaaatttttgccataattttattggactcaaacaaaaataattttcttaatacgaaattagaagttttataaacataaaataaaataaaattaaattgattaaactccttaaaattggttaatgtttatcgaaatgagttagcttcaaaatttcagcaagaaagcacccacactcacagaatacggtatattatgaatcgcaggactccacactcacttgaaattaaaaaatttctgtgaaatctgctatttttgattttttttttcagtattgtgaattaaggttctgttttctttgattgccattaatctacaaaaatgcaaataccgtaccatatgcctaatctttgtcatggcaaaactgtgattttttcaaaaactaatctttcaagctaaaataggtatttaatttggaaaaataaaaagcatttttttctttttttacattttatgttacatttttcaacttttttttttcttgttgcacgttttgccattagcgcgtttaaatcacttcagctatcccgaattacacaacagctgatcaccatagcaataacagaaatcaccagaaagatgccagcgcccaccgtaccaccaatgaaatgaccaatactatggtgtgcattcggttcattagcagtaatttgatgcattttgatggcacataaagcgatgccgccaacgcatgccaatgcaattattagccacaaaacaaagcaacactttgcgttacagcagcaacagtcgttgtcattgttggtactgctaccgccgatacagcaacagcaacaaaaatcgcaatcgccacaatcgtcacaatcgccacattccaagtcatcgccccgctttgtccttcggcctctgtttttggctgaacatttcttattggtgttgttgcttttgttggtaatgacatttttaatgtgtgcttaattattggacacatattttagcataaattatgg

SEQ ID NO: 18033 - DNA, 1844 bp, Heterodera glycines
aaaaaaaattcatttttttttaatggccacgcaaaggaggttaggccccgaaaaagaaagcatcaaattttcttttttttaattttcttacaattaggtgtcttagataatggaaaaaaatttttttttaagagtagcgatttttaatgcttttttctatgtaaaacattaaaaaaggttgttaagaattttctgttttacgtgtctttttcaaaaatttttttcttgaagttttcttattaagaaatttcttaggaattttttttaataaaaagtttctaggtttgaaaacatttcgggggggggggggtggcgacgcggagaggaaaggacctgctccgagaaatttagaaaaaataaataaattccctctaaaaataatcgcttaatttgcccagcattaattttgtgcagcttacttttttttaaaacgcctcaagttatcggccgctatcgcaatgatagcgatggccgccagacagccgccgaccacaatttccacatccaaagaagtggtttctttggttgtaggcgatggagttgttgctgtcgtcgttgttgttgttgattatgtgcagtcaacgtagacatttgctccaaatttgttgtaataccagcaaacagcgccgtccgtcattacacgcattgggggagcttcagcccccgagcattgcttcacccatcggcagaaaagcaaaaccactaaaaaaaattcaattttctcttaatggccacgcaaggaagttaggcacccgaaaagaatgcatcaaatttcatttttctaaatttcttacaattaggtttcttagatattggaaaaaatttttttttaagagtagcgatttttaatgctttttctatgtaaaacattaaaaaaggttgttaagaattttctgttttacgtgtctttttcaaaaaattttttcttgaagttttcttattaagaaatttcttaggaattttttttaataaaaagtttctaggtttgaaaacatttcgggggggggggggtggcgacgcggagaggaaaggacctgctccgagaaatttaaaaaaaaaaataattcccgctaaaaataatcgcttaatttgcccagcattaattttgtgcagcttacttttttttaaaacgcctcaagttatcggccgctatcgcaatgatagcgatggccgccagacagccgccgaccacaatttccacatccaaagaagtggtttctttggttgtaggcgatggagttgttgctgtcgtcgttgttgttgttgattatgtgcagtcaacgtagacatttgctccaaatttgttgtaatagcagcaaacagcaccgtccgtcattacacgcattgggggagcttcagcccccgagcattgcttcacccatcggcagaaaagcaaaaacactaaaaaaaattcaattttctcttaatggccacgcaaggaagttaggcacccgaaaagaatgcatcaaatttcatttttctaaatttcttacaattaggtttcttagatattggaaaaattttttttaagagtagcgatttttaatgctttttctatgtaaaacattaaaaaaggttgttaagaattttctgttttacgtgtctttttcaaaaaattttttcttgaagttttcttattaagaaatttcttaggaattttttttaataaaaagtttctaggtttgaaaacatttcggggggggggggggggtggcgacgcggagaggaaaggacctgctccgagaaatttaaaaaaaaaaataaattccccctaaaaataatcgcttaatttgcccagcattaattttgtgcagcttacttttttttaaaacccctcaagttat

SEQ ID NO: 18034 - DNA, 1036 bp, Heterodera glycines
caattttctagttaggcctcaaaaaatgactatctatttttcaactatttttatatgataaatctaaaatggaatatgccaaagaccatatatccacatgattggacttagctcgattttttcggctatgatgtctaaatttgactcttaattttctgttggcctcaaaaaatgactatctatttttcaactatttttatatgataaatctaaaatggaatatgccaaagaccatatatccacatgattggacttagctcgattttttcggctatgatgtctaaatttgactcttaattttctgttggcctcaaaaaatgactatctatttttcaactatttttaatacgacaaatcgaatatggaatatgccaaagcccaatatatccacatgattagacttagctcgattttttcggatacgatgtctaaatttgactctcaattttctgttggcctcaaaaaatgactatctatttttcaactatttttaatacgacaaatcgaatatggaatatgccaacgccccatatatccacatgattagacttagctcgattttttcggatacgatgtctaaatttgactctcaattttctgttagcctcaaaaaatgactatctatttttcaactattttaatatgataaatctaaaatggaatatgccaaagaccatatatccacatgattggacttagctcgattttttcggctatgatgtctaaatttctcttaattttctgttggcttcaaaaaatgactatctatttttcaactattttaatatgataaatctaaaatggaatatgccaaagaccatatattccacatgattggacttagctcgattttttcggctatgatgtcactacatagggtgcctactttaaatatcgattgattttctccgctgagcgcagagagtatgagcgggcgtgcccgtgcctattgggtggttgtgtctgcgtctctgacgtgtggtgcgcggggagggggtgggggggggtgtctggaaatgtgagttcgggatggtgg

SEQ ID NO: 18035 - DNA, 1236 bp, Heterodera glycines
  unsure (1)..(1236): unsure at all n locations
ccccctttcttcgggggcctttctttccattgccgcgaccccctctcaccatagccgtggacccctctctccgtgggatcgggcccctcttttccgcggaccccctctctccgtcgccgcggaccacctctggccatcgcgcggaccccccccccccccctctcttccacggaccccgtctccatcagccccccncccccccgcctcttccccggtcgggtgcgcgagttttgctacgcatggcgggaggggggcgtggtgtcgggaaagtaatgctcaaaatggtgctagagactaaattcttagccgttcggcttagggggtgatgaattgactgcccacaaaatttggtgtcaatcggacaaggggtgcgtgagttttgctgcgcaagtctcgggggtgcgcgagggggcggggcgtcgggaaagtactgcttgaaatggtgctagagctgaaattctttcgtcgttcagcttagaggctgctggaaagatggcctgtgaaatttgaagtcaatcggacaagggttgcgggagttttgctgcgcaagtctcgggggtgcgcgagggggcggggcgtcgggaaagtactgcttgaaatggtgctagagatgaaattctttcgtcgttcagcttagagggtggtggaatgacggcccgtaaaatttgaagtcaatcggacaaggggtgcgtgagttttgctgcgcaagtctcgggggtgcgcgagggggcggggcgtcgggaaagtactgcttgaaatggtgctagagatgaaattctttcgtcgttcagcttagaggctgctggaaagatggcctgtgaaatttgaagtcaatcggacaaggggtgcgtgagttttgctgcgcaagtctcgggggtgcgcgagggggcggggcgtcgggaaagtactgcttgaaatggtgctagagatgaaattctttcgtcgttcagcttagaggctgctggattgacgacctgtgaaatttgaagtcaatcggacaaggggtgcgtgagttttgctgcgcaagtctcgggggtgcgcgagggggcggggcgtcgggaaagtactgcttgaaatggtgctagagatgaaattctttcgtcgttcagcttagaggctgctggattgacgacctgtgaaatttgaagtcaatcggacaaggggtgcgggagttttgctgcgcaagtctccaggggaggcgagggggcggggcgtcgggaaagtactgcttgaaat

SEQ ID NO: 18036 - DNA, 3735 bp, Heterodera glycines
  unsure (1)..(3735): unsure at all n locations
gtacaaagtgtaaaaacgctgacacaatcagcagtctgtttttgactagaaaaggcttttattttttgttgggcgcggcgcgtaaattaattntaattacggaaatccgtaatccgtaattatggatggtctaaaaacgctgtaaatacgtaaatccgtaatttttttaaaatgaaaaaataccataattattatacaaagcgacggttttaaccatatgccttaaacttcctatgaataaaaatgcaataaaaaagaaaaagcattcttaagaattgactaattttttttaaatgcacacccaaaaagtggaaataatcataaataattaaatttaatattcttaatttttaaaattttttctaatatttcaaaaaagctcaaatatcttcttgcatttattttctccttttttatccataaatcctcgctctaatcatcgttaataaatttggctagggttggggtcgtccaaagtttcttcccaagtacagtttcactgctttttaagtacagagtaactgctcataaattaaattacgcacagaattgtgaaaaactgttaaatgtttattcagatgttaggtgtttctattgttcgtcagcatagatttttccaatattttttgtttccgctgatcattttctcattttgctgcatttgttgcggcgcgctttttaaaaaaaactttttaggaacggaggggggaggggcaggagaatctttggccaccatttcactctttccctacagtatcacataccgtcattctttataatagcatttcaagcgcatctttgtcaaaattcctgtaatggcatcactttttgctttttcgcttttccaaatgaataaaatatttttccaattcggaaaaaagaggggaatcactgctcactttccttttttcattctttcgttgattcattgactccacaaaaaattattgtaataataaaacgaagcgatcgaatggacaaaaattccaatggcaaatcaatgggacggcccaattcattcgattcatttcactttgacgggacaattattattcgccttaattattgtaataattcccatttttgacaatgctaaaattgggtgaacttttgtttcaattaaaatgcctttgtttcattcattctttttgattttgctctttttaaatttatttttccaatttattttcttaaaagcattgaaagtgccgcgtttcttagtaaaaaaaatattaaacgaaacgatgcaaaacgaagcgcagacaatcactgaaaaggtgggccaaacatggcgaaatggaaaaaacgggaaaatggggggggggggcggtaataacaatttaatgtaattatcattaattagtccaacaatgccaaagtgccgtttcagccgccgcccctcggcgcctccgccccttccctcggtggcagcgctttgtcctcccttttcgcctcccctctgatcactttggcccctccgatcacttcctccgcttcgtttctcctctttttgctgacgatcaccttccttctgctgatcagtgcttttggccttttgcttttcaaatggcacatgcgcaacggaaagagcgaaaacggagggagcaaagaaaaagcgtggaacggcagaacgccaatcatttcgcagcctttgcgagcggtgatttgaccgaccgcagaacaaatgatgggcaaaatgcaaactgtcggatttaaataattcatttttcctttttggtacttttcggttttgtgtacacatcccaaaatttaaaaaaaaaatgtacaaatgatgcacggagtttttgattggacaaaaggaataatttgccataaaatgacaaaaaaaccctcggttgacatatcataaacccgaaagtaccccctttttgtgtacaatttttttattttgttgcttatgattttgccatttttcacaacaaacaacattcaattggttggacttgccaaatttggggattattttaagggttaatgatcctaattagagcaatttttgtgtaaaaataatttttatttccttttctgtgtacggtataacaaagatagaaaattttgttcatacaattaaatttgacattttggcgaaatgttttaaaataattttacttcttcattttctatgaactcatagaaatttattttaaaattactcaactttaagcaattaattaatacctaattaatttttcagtaatcaatccgtccatttggcatacgtttctgcttccttcgtcttcccccggtgcttcttccgtccgtttttcttccattccgtttgttcttcctctgctgctgctgcttctgctactgcttgttgtccctccattcttcggcctttgccatggctttcgtcccccttttcccactctcttccgcttcttcttcctccaccgaattcactccgtctcccctcggctttttcctccttttttgcttcttccttttggcacttttcttcctcctcaaaaccatttgcttcttcgcccgccaacttcgccttttgcttggccctcttctgaacatttatgacctcacaaatccattggaaaagcgcaaatgaacaaaagaaacaaacggaagtgggaagagagagaaagaaacaaggttaattaagaagcgaaaaacaaaaccaaaaaataggttaattagtgaaaacgtagaaacaaaaagtggcattggtatgccaattttaccatttgaattgggcttgcctttaccggcctatgcttcttcccccgtccaaattatgcattttaattggccttaattcagttgcctttgatcgctttgctcattttttggcaatgacactccttaattagtttatggaggaatgccactttcgaacattggccaaaaagcgaaccatttaaaatgagaattaagcaaaagaaagattgcagagatgtgttttttgatggtttgtaatgcgtaaaaaatatgtaattaatttttcttttctgccattccatcgttttttttcattttgccttcaatatgccattctgtgaatttaaatgccattcttttgctgcccttctgtgatttctatgattacatttttctaactttgttcatttcgacacttaccaatgtcaaattcggcactagggctaatatttatagttttttttctgagctctccgtttgttaagctacttttcgagttattagtaactattttctagttttttattttgagtaccaattaacaaaaatgcaataaaacgaaaaatcacccctaagaatcgaccccaaaaatttatgaaaaataaacatgaaaaactctctctaaaattcatctctaataagatttttttgattttctaaattattgaataaatttagtcattttacaaccctaaatttgaggcttttaagtgcctattttggcggtttttagagctaaaacttggagctcttttattaacatccaaagggttaagtgtactctattagcctgcgatgccatccgtctcttttttaaattaaataatttgcagaaaacttcgttgtgncatatggaagcgccgatgcttcaaatcaacaacataaatccggcgttgaagcaattaaatatcatccaaaaacacaacattatgaaattaaggataaatttcgaaagaatacaagagcatacttatttttgaatgacattgtcgtaattaaagtaaatttattaatgaaaaataaaaaataataatattaatt

SEQ ID NO: 18037 - DNA, 3307 bp, Heterodera glycines
  unsure (1)..(3307): unsure at all n locations
cttggaaatccggtttccaaaaaaattttgagcattggattccgattcgaaaatttttgaacctcgaatttctcaaaaagttgnggcttcggaattccgaatgtttgggttctcggaatgccattcctgataattccaattcaattttttcagccgtgaatttcttctgcaagattttcgcaaatgaagtgatccatcaaaaagtgcttgcgtcactgcgaccaaaggatgttggacgaatggaatcagtcagcgtctccttgaaaaatattttgctctccggatcagtggacaatgctttttggaaagtgcattatgaacgactttttggcaagggtatattttttttttgtttattgttgatttatgggtttttgaatgacaaaaaatactttttcgagggtttagtaggggtcaataaagaaatatttattggtttcgtttccattttagttcaagatgatcgacaaattccatatcgtgagcgttttggtgaaaaaatgagatggcaagcgaatgctgcacgtatgcttatggcgattcctcttcgagagcctaaaaccgttgatgttcctgacgagtaagtgaattgattgataatttagtaatttcatggacccgaaattcacaaatttttttgttttgtaggcctaagtcttcacctactgacccactttcaccatacgacccgtcccatccgcgtcctacacaaccggactatcccgacatgcgtgattatgatccgcgttcatttaaacctcctgagccggacgatgacccgcttcgactgcatccgatactgcccgctgcgccgtatgcaccaccggcacggcctcgaccttcacagcctaatgcgcccactcgaccgccacctacttaccccgacattggcagaccgtattttgatcctcttccgcaccagccgacgaacccgtacagcgactggccctatggacctgcagcaccgactggatccggcggatatatgggcggttatgatggtggagtgtatgaacctcgtcctgaccagcctgggaactcgaattatgacccatatggaagaggaggatcggacgacggcaaccacggacacgatggtccaggatcttctggtggcggtggcggcggattttttggtccttatctttaagaagttcggatggaagtctatttgcttgttgatatgcaattgtttccattgtataatatgtaatgtggttaacgggtattcattcatttaacacatacattggcatatgtcaaccatactatttgtttcaataaaatatatcgcaatattggatgacatcattttgtaaaaatgttaattttacatgctttactttgtttgccttaatatttacaaaaattgcggttttggcgggctaaaaattattcttttattttcaaaaatatcctaaaaataaatgagttttagaaattgcccgaatattttttttaattaaaaattttaaatactatttgtgttcgcttgtatgccaaattctgcttcaacaccgatggaagagtttgaggaaatggtcgctgttcttcagcttgatggcgtccttgactttgacgcggtgcgaagagcagtcagttctggtgcaatccgagtgcgcgaatgtgacgcggaaacgcccatggttcaggtgtctgaattttgactccttcgatagacattccgaaccgagttcgaacaaaataaaagttttctgatactgagttaatgaaattttgtttgaatttttgtctggagctcgcaatttgtcgagccgatgccagattcatgctcagaaattccgagaaatgtgttttcttaacttataaaattaaaaaaagtaaaaatgactatttattgaatatgaaaaaaaaatcgaaaaaccggaattgattattagtcttttatcttaagattggatctcatttgtattctggacaatggtcacaaacgttaggcactgatatgcttttatgtccttcttcaatgtcggattaccatcaccatgaaggtattaaatttcttttaaaccgaggtcgaattttttttcaatctcattgtcagctcccataaacagtattaaatattagagtgttggtttggtttttcatggttgtttaaccgaaacgaaatcgaaaaccaaggggtaggccaaaaatctaaggccgaggagtccaaagccaccctaactaaaagccggtagacccggttaataatcaaccgtgaataacccgtgttgatgtagcctatcttttttattacatattcatgaatttagttttgaaaaaacaaaatcatacgcactttcaaatacacattttgactacgtcgaaagataaacaaaaaaaaaaaattttccggaaaaaaattctgttcatgaacaacataaaaaatctgttcttcccattgggcattctgtgcgttttacgttttaatttcaggccatcagaggttggaattggtcgctgtgtcagacactcgtctctgtgcgcaaaaagttcttttagcaactgacgaaagtccgactaatggcaatggcactcggaatgaacaaagcacttcaaatagttcaaaggcataaagacaaagcatttgagcacttccagtttttttaaataaatattcacatatttggtaattcttccttcctcgtttttgagtcctgaaaatcagtgtttttgggagtcactaagctcaattatgccgttcattttggtcaatcccttagtgattggaacgaattcgaataaagtcaaaaactaaaacattcaaatttcaagagcgaatctacaaatgaaactaatatatatacatatatatatatatatatatataatgttgtaatttcgaggatcattattcataaatattcattatttttgggtgtcattaattgatgttttgttttgtacatttttaattgcttcagagtcccgaagtttaagaaaaacatgttttttgacacagtccttccacgtgcattaataaatgtcggcgcattcttttcttccattgcatacttttaaagtgattcatcattcattttgtgcttgacatgctgctttcagcaaacattttcggaatttttttttctcgatttggcaaacgaaatcatttattgttgcacagttgaccaaataaaaagcatttaatagcatttcaactcattttatcaaatggaattaatatttattggaattaaaatgattgaattataaatacattttctttaattaggtcgtcggcagaaattgatgggtctattggaaggagaaacgtccaacgggaaaggaggtgtagaatgat

SEQ ID NO: 18038 - DNA, 2843 bp, Heterodera glycines
  unsure (1)..(2843): unsure at all n locations
ctccctctctttttttctctctatctctctttttccctctttctctccctccctctctctttctttgtctttctctccttctctttttctttcatcgctttttctctctcttcttcactctctctctctctattttctttctcttactctctctttctttctttctctctccctctatttttctttctatgtttcctcaccctctttttctttctttccctctcctcactttctctcattttctctctctctctctccctctctctctccctccctctatctttctttctctctcacttactcactttctctctccctctctctctccctccctctatctttctttctctctcacttactatctttctctctttcccatctctctctcttctctccctttttccttctctctctgtctttctctctcactcaccactctctctctttttctttctctcactctctctttctttctctctcactcttccctctctcacatcctttctccctttttcgtaatctcttatctctctcttttaacctcctcaatcactttctctttctctctctttgtctttcttctctctctctcacgctcaaatttctctgtctctctctttctctctctctctctctgttttacactctatttttttctctctctttcaatcccgctctctcatttcccttctctccctctccctctctttaactctatctctctctctttatttctcgctcaaatttctctgtctctctccctctatttttctttcactctcctttgctctctcaatctcttctctctttctctctttcagtctcgctctctcatttactttctctccctcttcttctcttaatctctctcttttcacactctctaactactttcactcctatccctctctttatctctctctctctatctctttctttttctctcaaattttctgtcttctctctctctatttttctttcactctcttgttctttctcatctcttctctctctcttttcctttctctctctctctctttcctccccttctttttatcacgctctctatcgttcattttccctcatcttttaatttctctctctctctctctccctctctcctttcttacttctctctcactgctttcttctttctcacttttttctctctctctcttgataattagagataatacggtaaacgtttttaattaatcgcgcaaattgtggttgggtgtcataaaattgattggagactaaaattgtagcagaactgcaaataaatcctaacaaatgaaaaaggttttttaaaatgggagtaaaaattttaaaaaaaattaaaactattaaaaaaatcattaaaattacttttataatattttcgatcaattggaaatcattacaataattgaaaaaacaaaccgataataaaaaaatcggcagcaaacccaacgaactaatcaataaatgaattacttcagagattttaacatttaagtctgattttttgttaaaatgatactaaatcgacaaaagcctttgattgatcgcgaaaattatgattggtcatgtaaaagttgattttttgttcaaggaacggaatgaaacgtttgatttgacttctttatttttaacattcggaatattggaataataattcaataataagaaaagagaaatcgaatttacgggtgttgatttcgtaaatgttattgacttttgttgttacaataataatcctcttttccctctttcattctctctttttttttgcaaatgctttcgcttcgaaaaataatccattcaaagtgtgacatacatagtcacacatcaaattagtatagttaattaattctgtgtgttgtctgtccttcccttttttttgtttgatttgcccaatgaaaaattcacaaaatcttatataataaagttgagtgtgtgtatgtatgtttgtatgtgtcattgtttgaatttgtgtggcgttttgtttgagttttgcgttaaaaatgaatttgaaaagagatgaaaagaaattgttttgaaaaagaagagaatataaagaaaagagacgaaaataaatagttaagatgaagaagaaggcaaaagaaatagcacagaaaaagaaggtaaaagatttctcctcctaggatgtagaggttagagggagggatggtgggaaatagtgcactgtatgactgtctgtctatgcgggcagcggcagatgggaggggcatacagtgaacagacgcgtgctgctgtgcagcagcagtctgttggacgcgtgcgtgtgtgtgggagaaggagggagtgggaaaaaaagagagtaaattgcaatggaaaagaaaagagagtaaaagaaaggaaagggagagataatgggaaatttctctcgcatcccttccttatttataacccattttttattgtataaaatatttaacaaaagaaagaggacaccccttagtttgttcactaagaaaatcctataatattaacattgtgttgtgttgtataaatgctttgaaaaatgaaatgtttttgttttacatttttttgttttgttattttgtgtaaaaaacagttttaaaatgtttctttttctttctttgttgtgtctgttataaattgatttggttttgatatgaaagatattgttttgcttatgtaaatggtaatgaaattttaaatgaatgaatgagaattttgtttgaaaaatttgtatagaagaaaaatgtgcgtaaganaaagtcaagaaacaaggaagaactgttatgccataaggaaatgccanaagaagaatgcgaggccgctaagcggtcgagccgctgtcggtttatcattca

SEQ ID NO: 18039 - DNA, 2379 bp, Heterodera glycines
  unsure (1)..(2379): unsure at all n locations
attaatacacatttgattcagcgtacgatcgtggacattagaaactgaaacaaattataaactcgttagattctcaactcaaaacgcaccattagggtggatgattggtgtatcaaatgtaacagttggaccggcccgaggatatgaacgcggacagtcgagaaggacggaaaaaacaccatgtccactaaatatgtttttgaagaggaataaaatttgtccttactaaagcgaaccagccggaccaccgatcatgattttcaatttaaacatctggaaaaacaccaatagaaaaagaatggaggggggggggggggggaagaatgtgttcgatggtcggaattaattttttataatgaatgaaaatcttaaaaacaaccttttatatagaagttcacacacacctaacaaataaggtggaaaaaacctgacattacaattttaagtcaggaatattaccagacaggcagacagtgcactatttttgttggagagaaaagcggcaaaaacaaaacgccaatacattcaaaaacagtacagtctttttctttgaataattcttaatgaggtcaagtttctaaaagactaaattggttgtatactatcttaacaatattgttagcgtttgcaattttgttttttcatgcgctagagacgtgaaagtagtacgccaaaatgagaggaaaagaagtacaatttatttagttttatatcttttgattggagcgtgaaaacaaaattcgagcgtcaataacgttcggtttttttcattaccgttatgctaaatttggtgtggatttaacgtgtaggaaaaaagttaaacgttacgagtaaaagttgtttttttactttgttaaaaaatatagtacataaacttggaagaaataaagataaaaagtaaatgtgacactgcaaaggagaaaaaaataaattatttacgaaaattgcgaacttttgggacgtttaataaaaaaaaaataccttaaagaaatgtaagatgggtaaaaccccgaaataagtaaataaaagtcccaagttttgttcacaaccacaaaaagaatgtattcttcctactattcaaaacatgtatttacgtgaaattgacaatcctattgattatagacattttcttctgggtaatatttattcaatcatttcccttcactgtgtaaatttcaacaataagtctggatgatatcacttgctgtagaaaactctgtaatataaccttaaggtaaacgtaagttattattttatggacactcaaagggtaaaaagcattacgtttttgaccgccacagagaatacgaattgtcaaatttgagaaggtaaatgccctgtccgggataaacatgagatccggaaaacacctaaaaaacacatttgttcactttttgtcacttgaacgcacagaattacctcctcgtgacagtcccttcggaaggtctgaaaatgaaaatattaaaacaccaaaagcaatggcaatggggccggaccggaatgatttcgtctacgcgcggtttgttcgcgtctttctgtcgcttcgccgcgtccgcttccacatcgtcgcccgccgtctgtccgccggtgcgtccctcgccccccgccgcttcgtcgtcctccaattcgtcctcactctcttccacttgcactgtcacttggttcgtctccgcaattgtccattcgaaataaacgccaaaaccgaggtcatagtaatcggttgcaaaactgcaaagagaggactaatgaatgactcatatcaattggaaacgtactcccagactaaagaattgccctctgggtgcgtcgggacacgaacctaaaaataatgaaaaaatgcgaatttcaattagcatcttttgtttattttatacaatattcttcgtcccttttgaaaggccaaacagataaacaaacaaacaaataaattaccactagtaaaattgtttggctcataatggaaaggaccgtttcaagattcaaagttcactcactgtgacagtttcgccatgaccaattttcagaactccctcggtgccctcctttttgatgttgtctttaaattcctgcacattcttcgaggtccacatcgaagcgggcgccacttccggatttgctaaagacaaaaaataaatgttttaaaaatccattaacaaaaaagaaaaatgaccacaaaacacaaaaacaaaagaaaaatgaaaagaaagttactgtgacagaataagcccatttgagcatggacagaaggaactgaacagaaaggctgtccaaatcggacatcggatgcatcaaattcagcaagcacttacgaggcgcttctgcgtcctcctcgtcactcacatcggattcaccgngcacctcctcggncaattcatcgac

SEQ ID NO: 18040 - DNA, 1286 bp, Heterodera glycines
  unsure (1)..(1286): unsure at all n locations
cattagggtggatgatgggagtattaaatgtaacagttgtaccgacttgaggatatgaaggcgggcagtcgagaagggcggaaaaagcttcgttttcactagatatgtttagaagaggaataaaatttgtccttaataaagcgaaccagccggaccagcgatcatgattttctatttaaacatctggaataacgccaatagaaaaagacagaaacagaaaaaaacgtacattattatccatttgttcaactaggtaaccatcacgttgtaattgtgcaatttcgcgtggaagcggatttcgcgaaatcgtccaagcaacaaagatacaaacacaactgaacgcaataaaaaaatggagtaacttaaattgcaaaactgttagataaccaagcaacgatggagcccactatccaaagcaccacacaaacaatttgaagaaatgagccaaaccacataatagagcaaggcgatctggtcaaaaattgatcttaatattaggcctaatacgtagacggccttagccagacaggaacctgcatcaacttgatcacccatttgttgccgatgcgcactagttgctttaccagcggtttcagaaaggcttcacggtcgatggcggagaaatgcgtgcggatgtccgtcgccagcttgtccgtgatctgttttatggcctgcttctcgtccggcactttggattcctccgcggccaaaatcgcgtaacggtgctgaattgtttggtattaatggcagaatagttttaaattgactggccaccttgaagtcggggtaccctttgcggcaaattcgaatgccttccaacacgtgctggtcgatcagcttttgcacgaaagtcatgtccgaagctaaaagagggggtggtgggaaaatccttctttccatgcatcaatgcgaccgaattttcccatttagaaaaccagaaaagatgaagatggatggatgaatcaagggattgtttagattaaaggatgagaagtgggcaaggggctaaagaaccagacaaaatttaatggtcacaaatcgattggccggcggaaggctttggaataacgacgacggctgacgcacctttttgagggggaggcacagacagaaggaaatgtgagagacatgcacactctatgaatccactcgacggcgcgctgtcagaaatgggattgtgcgagaaaagaaagaagctcaaaacgatcggcagatgtctttcatttatttgggcagtgattggngagaaaaacgatatcaacaaaagaaaagtcagggcttgggaa

SEQ ID NO: 18041 - DNA, 2652 bp, Heterodera glycines
tttttaaaattaaattaagtatcgcgaacaatgattgtaggaaataaggcgtgaatttgtgaaagggtcaaagcgattacgacgataatcataaaccagcgggtgaaaacgggctaaaaattcgttcacaagatgtggatgatgcgggaattgacaaaactccatagccaaagaagacaaaaagtgaagtttttttgaattttctgtgaacgtttggccatccaaaactcagtcacttttcggggaaattgaagagttaaatgcgctgacccacaaaatgtccaagccacgaaatgtccaagccacgaattgtccaagccacgaattgtccaagccacgaaatgtccaagccacgaaatgtccaagcctcgaaatgtccataagggtaaaaaacacgaaatgtccaaaacgcgaaatgtccaaaagagtaaaaaacacgaaatgtccaaaactcgaaaaagctcataaaaacccggaaggagtctaatttagggttttcagggtcgctgaatacgaacacgacctttatattgccccttgcctaaccctggacccaaatataaacataaaattgcaaaaaaaaattcaaagcacctaaaaagagtgctgatcaaaattcgaacaagttttagggtccctatgccatccgaattctctctatagacacaccctcagcttcacatattaaaaaaaataattttattaaacattcaataaaattctttacgacgtggacaattgaatcatcaaaattctcgaaatccttcaattttcctgcatatccctcaatttgtaaaccgagcgccgtcataagatcatggatgtcaccgttgttgttgtacgacgcgtccgccaaaattcgcataatgacagcatcctggaggatgtatcgtttgtgtcgcttgtgaatgaaatggcgagcagatcgggcagcgtccacctgtctgtcgatgctttcattaaccccacaaatgaagtccaagagggcggggtggtgacagaggcctttctaaatgtttcttttcaatttgcttttaaaaaattaaagaccataaaatgaagatgagttgcttccagtccgttgtttgtacgagcgagggcagacgtggcctgagagtgcatgttccaaaatgggattgggaagtggggcgcccgaaagatttcgtcctcccacgctggaactgaatttttttattaaattaaaacggatgaattgattaaagaatttgcctgaaggcgctatcgaagtcgatagcgggctcaacgaatattgaacaatctgctcccgtggacatcgacgtttcccaacaattttttcttctcacgccgcatcatttcagtcaacgcattgttggaactcatggcacaaatgcttcatccgttgctgatcgcctcacttttgacaaaattcgggtcggcttcagacatggctcggccaggacactttctttgattttctgtcgccttgattccgcctttaacacagcattaattatttggttttaaatttaaacaaacttgttgtttctgaggcgctgggaggtggttatgttctctttgacagacaatctcccccaaacttggtctttccgcgctcaaaggtcactgttgaaagttcagcctcgttcaaagtttgttgttcaacattgtcggaagttatcacggcatgcgattcgtcaacctccactccaaaattcacggcctcctcagttgtgtttgaaatgtctgacaaaaacgcttcttccgactttttttgtagactttcaagtttattacgaatcatttgttcgatcaatgaataacaaaatctgaagacaaaaaacagcagatattttaaccgaattttcagatttttcttattcggctgggtctaaggttaggcaaggggcaatataaaggtcgtgttcgtattcagcgaccccgaaaaccctaaattagactccttccgggtttttatgagcttttcgcgttttggacatttcgtgttttttacccttatggacatttcgaggcttggacatttcgtggcttggacatttcgaggcttggacatttcgtggcttggacatttcgaggcttggacatttcgaggcttggacactttgtaggggcgccccatatttctggtcaaattttaaaaagcgtatccagacagtcagacagcgcactatttccttcttttctttttctcaccccttgccttttcccacacatcgatgtttgcgtgcccattttgagtcactgatactaaatgtattggcttatattcacagcatgctcacccactcccttctcccaggggaattattttggatagggttctttacccccataaactttgcataccccatttttctcaccgttgatgttattaatattgaattctgaaccgatgtgaatatattagactacaaatgattgaatattttgaaagcatgtttcccactcccttctcccagggggattattttgtaaaggctttttttccccaacaaacttttcgaaccccatttttcgcaccctgaatgtaatttttattgaattctgaaccgttgtgagaagatgagactagaaaaaattgaaaattttgaaagcaatgcttcccactcgcttctcccaggggtattattttgaaaagctgtttattcaaaa

SEQ ID NO: 18042 - DNA, 4167 bp, Heterodera glycines
tttcatagagaattacatgaaaattctgacgaaaaagtaaagaatcatattctcgaactttaaggtattcatcaagaaaacttcaacaaaaaatatttttcaatgtttttcgttgaaaatcatgaaatttcttttaaaatttaaaattcctagttttttaatttgtttaattttttatttcttaaaatattcaataatcaatttttacgcaaaatctattcggtaaatcagttttttcgagaatttcttagataatttcaggtcattcggtgcacatagaagccaactagaaattttttgaaaattttcgcaaaatttttcatagaattttaaccaaataaattttaaggtcaatatgaataaatgcattatcgcccaccaccacctttttataggttgttcaagggattttggtcaaacttcatcaacccgagaccactccactagctccgatcaccaatgaagaagtggacaacaatcagcagacagacaatggcaaaaatgccgtagaaagcggtggcaatgcttcatcttcttcttcacctgcttcaacagtgccactgataattttggcactgattttggctgtgctggtgttggtcagcattttttggatattgatcaagcgggcaaaggctggccaagagaagcagaccgatcatgccaacggcaaaggtgggtcggggcaattagcacaactcgcgaggcaaactaattaattaattgatggggacgctaaaatggcataaatttgggtccgaatagcacgcattttttttttataaaggaaattcaaaaatccatggaaattttttttctgtttttttggcgtgagggagccttcgcaattttttttaaattttattaaatcttttaaaaacgatctgatagatttccatggatacaactggaaaattcaagaaacccaaagaaaaattaaaaatttttttatgttttttttgccatgaggaagccttcgcaaattttcaaaatttattaaatttttgaagatttcacaacataaaaggggtatttgtgaactgtcaaaggcgcgcaaacaggaaaaatttaatccatttatccgaatttttcccagaaatcaggtgaacaatttcctaattttgcgcgattcaaatattctatcattcaaaaggagaaaaattgtttaagatttgcgcctagaaaattgaaattttttaattttaaattttttagccgtccatttgccgtcgccggccggcgattcgaccactccaatgttggacatgcgtggaaatgccgagcggacaaccgccccggacactgtcggcatggcaccggaaaatggcaccgcgggaaggaactgattttcattcattggcattttgttcattctttggcatatgtccttctctccctgacaatatgctgaccatttttttttgtttaatacatacattttttgaggcttccttttttgtcatgccataattttttggcaattaaatttcaaatttttcttttggaaaaatcagattttttgatttttcatttggcttactgtctctcttttttcttttcattctcaatttgggttcttcttttgctatttaattttttaaatcaaatttcgggattttggtctcgactttttgttctaattttgcctgttttacaactgaaaccctccgacttttttagcattcattatcactattattacattaatttacactcctaaatatttaaaaattaatatttcaattattttgccacgcgccacccttacgttgtgaccagtcaaaattaattaattctgaaaattattttgatttattttaaatgattttttttatctatctttgtatcaatttatgggcagttgatatcactaatatttaggtgaaaatataatttttccagtcaaaatgccaaatttggcgcccaccaactgcccatccaactgaaactccattaatttgatttttattttattatttttaaataaatggctctccaatgatatgattaaaaagttttgataaagtgaacttacaaaaatacagaaatatttgataatttcctttatattaaaatcttttaataaatatttataaaattaatatttaataaaaaataattttttttttcaatttaataaagtaaaataaaaaattccaagaatatttttttctgttcaaaaactgtttgacaaagatccattagccgccttgaaggtggtatgccgtttagaaaattcctcttttggcactgatgccattagtgataacactttggcattccccgaaaggaatggaatttaaatgccaataaatacaacaaaaattcaaaatatttttatggtgctcattaaaaagggatttttgtctggaacattctcatttttttcaataaatattttaaatatataaaaaatcagaaatttttggctgtaaaataaatgatattatttatttatatatgcccttaaaaattctatgaaaattaaatgtgttttaattgtagatataaataatttcgaaatttatttggttctgagtcatctttggaaatctttttttttggataagatttgattcaaattataatttatagcataaaatttttaaaaattttcataaaaaattgaaaaaattatttgattttttagctaaaaattaattttaaactgaatcagcttacggttcgtcttaaaaccaaaggtcagttttgcaacagtagaaaaaataataaaaaaaaaacttaaaaaatccacatgtttgagagaaaaaaatgggattaaaccacctcgtgttgtgtctggaaaatggcgtaaatcaaagccctgaaaatggcacattttcaaagaattggcacagtgttgcaattcacagacgactcgcattaatggcacggcacattttaatctcccagttaatctccatcaacacaaatttcattatggaatggatgaaccaatttatttgcaacctaatatagtttggagtatcatgctggtagaacaaattttaaatttctcacatgaacatttggacaacatttttgccgggattcagtttggcggcatggcgccggccgccaatcggagaattttggcaccatcccagaaggcctgagagaaagttttttttttattttcccgtataaaataaaaatatttttaactttttttttaattaaattagtaatgagaattattttttaaaacaaatatttattattttgaggttaagaacccaattttttaaatagaaaatgtatttattcagaaaagagattcgcaactattttcttttcactaatttttgactattttgaccaggtgtcaaatgaatttttaggcaaaattgaaggaatattcattttttaattttaatattctatgaaaaaaaattgaacaatttttttgttgtcactaaattctgcgccctattgataacattaaaaatcttgaaattttttacaaaaaattattttgcaaaaaatgatgactcattaacagaaggctggcaaatttgttaaaatttacacgacaacaaaacaacataatgactaggagacttcaccaatgacatgttaggctcacttaatcctcatcagcagcgccctttggctccaatccctaatcctttttaagggaaattcattagctaattacaataatcctacaaaaattagaacctggtattttgtaaaagcccggatctagatttgaatttcccagatggacctggacaggatggcagactaaatgtccttttgtaacaggacattgacccatgttttttttaaaacacagaagccagatcaataccagagatgtggccgaaattttgacaaattaactgtaacttatcaaaatcccaaggaaaaaattctcaaattttatagatttttaacgcattttggttataccaattaaattaggattgaacatcggctggaaacagcatgcaaaattcacgattttttgcctgttatcccaatttgagtgccgtgtcggcaatcggaaatcggtattttatttttatctcagctcattatagtcatttttcccaatttttttttttacaaataatattcaaaaacaaaattttaagcatttttcatgtggattttcttagggatttgttgagttacagttaaattgtcgacttagtaccaaaa

SEQ ID NO: 18043 - DNA, 2999 bp, Heterodera glycines
  unsure (1)..(2999): unsure at all n locations
aattagttaagattagtggtttttggtcatatagaattttctcattaataggaatagtgatttttgatcantatacacaccgagtccaaaaaacgagacnatgtgtcaataaagagagagtgcagagaaactttttgtctctaacttttctctccttttggcatactatctaatatttcattattaggaaaaacaacattccttctctccatataactttttttctaaccatacaatctgcaccaaattttgcatatcgatagagaaaaaaaatctgcatcgatttctatgtttactatcatcgcttaaatgttgttttaaaaagttataagataaaaaagttaaattattattctttttaaagatttaatggctaaaagaactttattacggaagcgacagaccaaaaatgcacgccatacgcatgagaacaagcgggaggagagacgaaccaaaatggcaaaggcgacaaaagcccgatagtccaagaaaagtgagttttttcactaattttaattcaagatcatttttttaaatttcagccgctccacagctgaatcccaatgccgaaatgccacctcaggacgaagcagggccgtcatcatctgctgcatcggccgaagaagcgatggagacaccaccaccaactccagcaccagtgccaacgccggagatggacgaggaaaaatttggaacagtatggtgctcttctctggccccaaattgaccaaatgaatgcattgatcaacagaccgattaagtggtaaaaagggtgaattttttttttaaattgtctgaaggtttatcggaggtgatgtgagctttgtgtgagcactgatcggtcattgcggatcagcagtgacttcgtttccatcgcctatctgcaattgtcatcttgatcagatgctcactgaaggatggcaatgtcaaacccggacaatcccgcagacaacgcaacagtcagaacaattcgcaaacgcagtggaaaacggagagaaagcaacagccgcagttcggtccagcacgatgggaattgtcaaggcaccgctcatgaagacaattgaatttgatcggattattccagcaccgtttcacgtgttgcaggggttgggaaacgcacttgttcgtgaacttgagcagcaaactgatgccacaattgccgttcaacaatttctgcgacagataggggctcggagggaacaatttcgtaaaaaggacatgacgggaaataccataagaaaagtcctcaaacgtgcatcggaaatggaacatctctttgaatcgacatggccaaagacaatttgccaagctcttatgcacttaggccaaatccaaaatttcacaaaagtacaaattttgagcaaataactcccaaatttataaatttaggctcaaccactttcgccaaatgacttggacgcatttgaacaccaaattgaggagttccgtggttttctggcccaagaacaacggatgcgcgacttcctatctcagaaaccgaaggcccacttatttctcaatcatttcgtcccatttgctcggcaacactcttttctcggcttgctggacgagcagggtgggcagcaaaaattaattgacgcaaattttcataaaaattaggggatgaggcgctgcattcggtttggcgaagactggagcaatggtggaaatgcatgccggacgcggaccaaattctacaacaattggagcaccattttgtcagcaattggctcctcgacaccggcagaattgctgagatgaagcaggcgagttttgagtggcgtgggaggggttaattttcccagaaatcatttgaattaaacattttagaggctggaagaccaaaaagaaaacgacaattttttggagcattcggatggtgaaaatgaagatgacgctgtcattgatgttattgggtgatcaaattttgttttgttttttaaatttacttaaaaaaatcttagaataatatgacttaattattttttctttattcgttgagaaaaacgtgaaatattgcttaattaaatatataactccggtgggattgaacctgggactccctttttggtggcaaactcacagaccagtaagacaaaaaatcaattagtttttgaactgggggctcaaaattgactcggtgtgtatagcatttggtcatgtaacatttttctcattaagattagtgattttttgtcatatagcatttttctcagtccaatttgaataaatttagtaacagcatttctctcacagcttattttaaatcttttaatacattttaattaattatatttttgggggtcctttgtccgtgggtcctctgtctttgtgggtcccttgttacgaaaatattgacaaaaatttctgaaaattggtttgaatttttgaaaaattcgcaacccataaaaatttttaggccgaaataagttaacaaaaaaatagggcttccatacaatctgggccataataatttttagaactctcaaattgagtgtaaaaatctttagaggtttttgagtcaatttaaaaaataaaatgaaagtgtggggattaaacgatggaaactaagacagactacgtgcttagcctctaggacatataaatggtttaaatcattttataaaatacaaaaattgccaaattactttcatgtattttagaattgaatattttgtttattttttcaatattttcgaccgtttttattgcattttgttagggaatttagacaaaagaaaacccaaaattttctcgaaaaactccaagaaataactttggtcatattcatataaaatagacataattacaatttaaataaaccaattttttgtactttttgaccaaggtgcgtcatggaaaaatataattaattctaaaactagagaccgcaagcattacatttgttataaatttataattttttaataaatgattttttatcttttcgtggtttactggaaaattcttatgcaaatcattgattttttgttggcatt

SEQ ID NO: 18044 - DNA, 1202 bp, Heterodera glycines
atgatgttacactattttaatcaaaagctgaattaattaattaatccttaattaccatcaaaatccgtcaattttattgaaacatctgtggaagaaaaaagactgagttttttaaataacagcaaatttaacggcttgaagtccaaatgcattgcaacttaaaaaacaaattaaaattatttcgataaaatcagtaaggaaaggatcgaacatgtattaaatttaaaataattaattattctgttcaagtaattacaatatttttttttgtctttgaacagtttttcatattattcacattaattaaataattttaatttagaatcgttaactctattattgacaattaattaataaactaattagttaataacctttgtgcaaaacatccaaagtgctcacgatatcttttaccattgtgatcagttgattctttgatttttttgttttaccacgttgcaattcttggtccaagctcatttcgcccagctccaaaatggtcaaaaaccccggcgaaaaaatttgatttggcataattaggccactaaaaattgcaaatttaattaggtattattttttaatgctaattaaattttgaattttactagtccatcatgttgacaatgtgctcattttttgaatcaaatggttttaattttctcaaaacatttgtgccattataaaaatgtcttttattattgccatacaattttatggcaacacatttctgtttcggcagattttgcccacgtttttttccggtgtaaccaatgaaaatctgaaaattatttgttcgttatattagagtagagcggtaattgtaaaaaaaaaaattggtacagggaatttttcgggttaaaaaccgtgactttttggctgggaaacaccgggactagtctcggtcccggtcaaatccggggctaggcattcatttgtaggtttttttcagtaccagtcccggtcccgctcagctataggatatattgattagagaccgtaaaatcgaaattttctaaaaatttttttgtcaatttccgatcattagaatcatatcctaatgattggtgttggttaaggtttagtgaattatattaaattatttttatcgtgcctaattagattcaaataattaaacaattttataatttattgattatgccatactaatttaattaattcttaatgttcttacttgtcctgat

SEQ ID NO: 18045 - DNA, 1865 bp, Heterodera glycines
  unsure (1)..(1865): unsure at all n locations
tactgttgaatttcgacaaaattggtcagataaaattgttgaaatttgaaaataaaataaaaataataataacatttttcttggaatggcattcatttcaactggctaaaaacttgaaatttaaaagatttttaaaatggaagatgatttttaatatatttatattttttttataattaattatgaagagaattcaaaaattaattatgcacggtctcttaatttctaaagataacattttgcggacccacttataaaatggaaatattatgatctgccaggatttgtcctttgttactaaaaatgtttttttcaaattttatgttgattaaatttatattcatttaatttaataattaattaagataaaaagacaagggtaacattgaaaactcaaaatatctattttaatttgttaatttgtattatttgaataaaaatttttatgggatgaaaaatttgcattagaaaaaaatataaatttagtggaaaataagtgactgattggtcatgcataaaaatcaactcatttattaagggttgcaattttaatttttttccattttaaatatttttttttcgtatttataatttgtattttgtttttaataatgaaaacgaatgtggaataaatgctttacacaaatgatcattgtgataatcattaaaaattcagaaaatttgtgcccctcccccaaaatgcgataatcaaaattggtaatttctattgtaaaaaatgtattttaaaaaggcagaaaaaataaattagaaaaggcttagacaaattagcctttttaggttttatgttttccaatttgtaggttatatttttttattttctgaaattggtaatttttaaaacccaacttttaggaaggcctgagggatgtgcatatttgtcccattttcaatttaaaaaaaatattaaaattgattaatatttgatttaacttttttttgcactaattaattagaataatttttaaatcacaaataatttttcttccttcttaaatatttttgctttaaaaatattatgtttaatatcattaaaaatttagcaatcaattaacaactctctgtttaagcaaatcatatataaaattagcaatcaattgtcaaccccacagtttaatgatgtaatgccaattttgcccaatttggcaatgaaaagcccccnctcacccacagttaaaggatatcattaaaaatttagcaatcaattaacaactctctgtttaagcaaatcatatataaaattagcaatcaattgtcaaccccacagtttaatgatgtaatgccaattaaggatatcgtgccaaatttggcaatcaaaggccccctccccctactatttaaggatatcgtgccaaatttgacaatcaaaggccgccttcccctactatttaaggatatcatgccaaatttggcaatcaaaggccccctccccctactatttaaggatatcgtgccaaatttgacaatcaaaggccgccttcccctactatttaaggatatcatgccaaatttggcaatcaaaggcccccttcccctactatttaaggatatcgtgccaaatttgacaatcaaaggccgccttcccctactatttaaggatatcatgccaaatttggcaatcaaaggccccctccccctactatttaaggatatcgtgccaaatttgacaatcaaaggccccctccccctactatttaaggatatcatgccaaatttggcaatcaaaggccgccttcccctactatttaaggatatcgtgccaaatttggcaatcaaaggccccctccccctactatttaaggatatcgtgccaaatttggcaatcaaaggccccctccccctactat

SEQ ID NO: 18046 - DNA, 2271 bp, Heterodera glycines
  unsure (1)..(2271): unsure at all n locations
ccccccccccccccccccccccccttccccgccgtcgtctcgactcatnaatagatattatttacatttgacagagagggaaagtttgtccctcaaatgccatcacatcactggttgtcatagatggacatcacaaaattttggcacaatatgccaaacacattttggcattgtgttgtaacttatcctggtgtgacttaagctccctacccgttcttggtacgatattgtttccctccccggtactgcttcgtcttcttcctcttcctctcacgtgcctatcttcctccccttggtaacagcatcgtctgtctgcttgcaggggccttatgctcgtctcgcggtttagtaaaccacggttaacgcattaaccacggtttcgttaaccgtggttaacgaccgaccttaaccggtatgctcgtctttaaccatggttaagtaaaccatggttaactcaaccgtggttaagagaatttatcttgaaattgaaaaataattaatattaaaaaaatataattaaattattataataattattttttgtttatattatcaatattagcatagattttattaaaaaaccccgaaaaactattaaatcaagaattggttttctaaaaatttttggccataacttttttaaacacagcaattttttttttaattttgcaaattaatagaggactcttggggctatagaatgataccaagaatgtttaatttggatgcttcaagaaaaagtttgctgcattaaaattgtcaaattatttttttatggccgtgtgaactgcaatggagccaacatttcttggtaatagtgcattacaaacaattacgttgttatgcaacatgctacaaacagcagcaattgagtcggggtcgttttggcgcccacgttttggcgccgacgttttggcgcccacgtgccagggtcaggtttttaaattttgtctatgtttgaataaatgaaaatatgtattcgtcagttttctgagtcgctaatcacgaatattgtattcatcttgacaattgcgaagcccggactcgatttaaatgaaatgcaatttttgaacatattagatcaggccttctatctgttttgttttatcaaatgttttaatatggtgggtccaaatctgagaaaatgatttaccagattcaaaaccgtagttgtacctgtttcaaaaaatggcctgtacctaaattttgtcaccttttttaaaaagctattttagcggtttgggcgtgtgcaaattttttgatgaaataacactaatccgtcaataatttatatcatagacaaaaataaaagtcagattctttttctacatgtaaaattaccctagaaaaaatttatttatttattttactatttaaattattaaataaatttacgttaaccacaactcgagttgtggttaagattccttaagaaagattaaaccacggttagatgagcataccggttggaaataaaccacggttaacttgcgttaaccgtggttaagaagggagtaaaccacggttaactcaaccgtggtttatccttaaccacgattaaaaagggaaggacgagcataccggttaaggatttttaaccacggttaacgccgttaaccgtggtttagctctaaaccgcgagacgagcataaggccccaggattatggcaaaactcgggattagccaaaaatttaaaggaaatatttaggtatttctgtttccctttaaggcggtcaaaagcagcgaattgccatcgctcgcgcattggtgagacaaccgaaagtccttttgctggacgaggcgacttccgcgttggatgcgcgcaacgaacagctgataagggagtcgttgtccgcttgtgcgaagggtcgcaccgttctgatgatcgctcatcgcctttccaccgtaagacgtgccgaccgtattttggtgatggaacatggccaaattgtgcaggtccgaaataggaaacggttgttgtgagaattagcgcacttccaaataggacggaaatcatgcggaactgatgaaactgaaggacggcctttattactcaatggtgcaaaaacaaatgggagaaatgttggagaaccaatgaattgcctctgccatttagctgatctcatttcctcttttgtaatctgtgataactcatgcttctgctgctcaggataaatgtgtttgtttttgtacatgttttgtcccggtttgtcacgccttttaaatgcaaatcatttcactggggcacgggggaatgggccagtgggggg

SEQ ID NO: 18047 - DNA, 990 bp, Heterodera glycines
  unsure (1)..(990): unsure at all n locations
tgcacggaactaactctgacatattacccacctatctttatcagtatacgttccgtcggttccatggaaatgcaaaaaatttccaaaatattctcggaagaaattcgataccaatatccactataattgtggctttacattgtgtatttcaattttaggctcgacagtttgaaaaataaaaattggactcaaacttttattaaaaaatcattgggactcataaaaaaatgattggactcataaatttttataggactcataaatatttgattgggactcataaaactcgatgggactcataaaagtcagattggactcataaaactcgattggactcataaagtgcactaaagccgaattccgttggttttcggggtcgctgatcactaaaaaatttataaaaaattgcataatggnaacttaatttttttttaagggaaattaatattggggtctttttttgtcgaaaaaagcatgtaaaacgttcaaattcccaaaaaaaaaaaaaaaaatttacggatgacacgccccaattcatcgatgaacagcaacagttgctggtacttgctgcccggcatgttctggtgcggcgcgctcacatggtattggggtaatgaagcggtgcccacggaaggggcgacgacagcggaagaagaaacttcaacgagaaacaaattatgagagcccagcaggtcgaagcaagcctaagccagtcctagcctaatgaatttttattattttcctaggggggagggggtagcaaaacggtggtacttgtgggttttgtgtcaacaaaaaaaaatttttttttttgttaaatttatttgaaatttataaaaagttgtttctataggttatcggtgccgtagaatccgaatctgatatccatttcgaaccccgaactcggattcgaacaaaaaaatcgaaaatccaaatttttaaaattttctcctaattatgattatcagcgcaagaaattatattgccgtt

SEQ ID NO: 18048 - DNA, 2297 bp, Heterodera glycines
  unsure (1)..(2297): unsure at all n locations
ctgaagcgcgtgcgcatttgaaaaggtggcaaagcggcggttccatccggtcgnctgattgtgagcccacttggcacanatgccaaccnnggaangatggacctgtgcaaatggagttggagaatttccaaaaaaattcaacatnttcaaaattttcattttaaaagtgaaaatggacctgtgcaaatgagaatttccaaaaaaaaaaaatttcaacaaatttccaaaatttttcatttttatgtgaaaaaaggtgtgcaaaattttgaccaagggacctttcaataacgaggtgacgaaggacattaaatttttaaaatttgccacctttaatttttagcgtattagagatattaaattttctaaactttgttcccattttcttaatttttttcgggtatttcaatattgaggtgacgagggacaataaattttcaaaaaaattcctcattttcttaaatctttttttaggaaattccaataaacgaaggctgtgccaagagagagttaggctttcatgtcgttatttaatttttttttaaatttacacgagctggtatgccaagctcagtgcaccgctggaaattggacaactgtttctgaatgagttcggcctccaaaatttgcagttcaattttctgtttgttccaatcaaaatgtgccaagttttgctgctgctgcagctcttcatcattcaaaatgtcgtcctccaccgattgactacgctttaaaatggacaatttaaatattataaaatttaaaaattcatttaaattgcttttatgccagacagtgtatggcaaagatggcacggaatttcgaaatttttggtgtcggaatcggaaatactactgggcctcggaattccgacttccgaaaaatttttgggcctctgcctctgaatttcgatttcccaaagtattttgtggccttggaatatcatccctggtatttggctaggcgattcattcaaatttgtgagctactattatgatccaaggacgtcttttctaaatttgtttcaaatatcagaggggtaattaaacaaaagtttctcaatttttttttttggttttttcggacacatttttccaccctccccatgctggtttttttttcattttttccaattattatgccttcaaaatttcgataggaccattttctgttgtgctgatgttgatggcatcatttccgtggtcgtaacccggcgtcgaaatgggataacaattggcgtccgttcttccactaacgcagtgccaaccgcctccggcatcattccgtcaaaaatgccctcttgcgaatggtcaaaaatgcctgattcggcaaccaactggtgcaatttgctgtgctctttaaaaaattttccattattttttgtataaaaatgccatttcgaactaagttttccacaccatcctggcgggggatgtaaaaactccgtgtatccaaaaatcgtcacccggacgcttttttagactgtaaaatttgaaaaaaaaaaattcaataaggtacctcggcaacccccctccccccctaaataaagcccccttcctctgcccatcgctcgctcccgccccccattttttttttgaattaacaaaaagcgagtacattgaggcctttaattttttgcattaagatatcccgtttaaaaaaaaaaaaaaaaattaaaatcggcccaaattttttagagttggaaaaattgaggccctagtttttttttttgcattaaaatatcttatgcttgttcggcttttggtgctcaattctttggcacagatgaggcaccggactttggccaccaatgtgccatctctgacaatttgctcaaaacatttggcatatttgccgcccccgtgccatggaatcgcttcctttccctcctcttcctcctcatcattatcattatcaccatcattgttgttgatggtggtggtggaaatgaacaattcattgtcacttccatcctcaaaatcggaaaatttgccaccaccttccgccgctgaggttgccgattgctgcaatttctgattggtgtggtgcactgtaaaggggaggggggctcttatatggtttgtcccccaaaatttaaaaaacatatataatttttatagagtcggataaaacacttttccttaggttttcggggtcgccaatcacgaattcggcatctgttttgacccattcctagctccgaattcgaattgaatctctttgtgcaaaaaaaaaaaattgaatttagttgaaaattgagtttttgactttttgttcgaactcgggttcggagttcgaaa

SEQ ID NO: 18049 - DNA, 1675 bp, Heterodera glycines
ccgatcactttttggccatatcttctattgctgatcactttttggcccagcgactgatcaatcgctgactgtcattggccgatcactttgatttgattaaaaagaaccacaatattaatgacaacggagggagcagcaggttgtggcaaaatggttggggctgagcatgaaaattggcaccgccaattgaagatgaacagcacaaattggttgaggagaaggaggaagacaatgatgatgataaggatgacaataatccgcaaccaaatggtactgatcaggcgctgaatcggccatcgccgactgatcgccccaaaaagataatgcaaatgggggcggcggtggcacggcagatggtgccagcagaagctcatcaacttcggcagtcgttgagcggggttcgctttttggttggggacaccttccacccagagagaaattcgaaaataaattttaaaaatttcataggaaaatctttcttttttttcttattcgtcttagtttttccaaccgtgctatttttcagatgtaacaatgtaacacaggcttgaaaataatttgcttaaatggcaaatttatggattttgagggcaaaatttgaaaaaaatctatgaaatttaatgcttgttggggaaattgtttggaaatattagtgaaatttaaagaaaatgccttaaatttttagtttccttttcttttaaatttaagtctgagggctctttctattcccaaatatttggctcaaatttcatttctttagggcaaaaggaggccaaatttctcagctttttggagcagttcacactgagcacaatgtcccgcatttttggccgtttcgtcggcacttatcccatcgcatttctgatctcctcactgatctttgcctcgctgtcaggttgagcaaagttacaaaaaatggaggccgaaattcagaaaaatattgatcatggccctgtcttcacttgctgatcactttttggcccagcgactgatcaattgctgactgatcgctggccgatcactttgatttaatcaataaaaacaaccacaccattaatcacaacgatgggagcagcagcaggtggtgcaaaatggttgggcatgagaatgacaataatcagcaaccaaatggtagtgatcaggcgctgaatcggccatcgccggctgatcgccgccacccaaccgcccaatcgtcccaaaaagatggcgcaaatgggggcggcggaaggcaatcgcgcgcagttggcgctaaagcagatggtgccggcagcagttcatcaacatcgtcctcaacttcggcagtcgttgagcggggttcgctttttgccgaaatggccaatttgtggattttgagggcaaagattgaaaaaatgcctgtggaaattaatgcttacctgggaatttttggaaattttgagtgaatttttttttaatgctaaattttctaaaactgccctttccaatacaattctaaatgtttccaacattttttgttaataataaatcattaaagtccatttttcccgaaataattggctcaaatttcatttctttaggcccaaagacggccaaatttctcagcattttggagcagttcacactgtgcacaatgtcccgcatttttggccgttttgtcggcacttatcccatcgcatttctgatcttctcactgatc

SEQ ID NO: 18050 - DNA, 2272 bp, Heterodera glycines
tatattaatatttaagaataagcatttaatttcttccccctgatgaaagtatttcgttctaaataataaagcatttttaaattgttatatattttgtatcttcaatatgccttgctttaatttctgtatttaatttatttttcttttgaactgtaaatcataaataaagtacatttttttctaatgttaaatctccatcagtaaaatgttagattggacgaagcttattcctgtagtctcctgctgcttggtttgtgatttttcgaatttctattccgtccatttggtggaactaaaatttaaaatctgacttttcccttttcttatatttttgcaatttatattttgttagaatttaatttatacttttattttttatcattagtttaaagactattaattagttttattttaattttttgattagcacttacaatttagctgtatctgtttattctaattttttcgcatatcaaaaaattatttttttaaataaataaaacgttcctgatgcgctgtgggtgcggtaagaagtgcagggtgcccatgtgacgggtactattaagttcattttgttgattttagatttttattatttaattatgactaagtaaggttcgtttcaacgtatggagataatgaataacatatatattacatatttagcaataaataatcgtttctgataattaatatctaaattttatttaaatattctgtgtttttttatcataataatttattaattttattgattttgtatttagtatattctgtttatattattatttttccacgtaaaaacaaacgcctttttcaatttgcaattaagagattattataaatttattaaaaattttaataaacaggattttattatttagcggctaaaaaaaaaaggttaggttatttagcatatttttctcagtttataattgaatcagtttacgtgtgttattattctttgttgtttgaatttgcattaaaaacaacgacggatctcattttcattttaaaatgggggtataagtcatttgggagagcattacaaaggttttggcatttttattacagattttgatttatattatgaaaagattttacatattgagtgagaatataatatatttttattaaaatttcattttgtccaattataccatatttatattcttgagcattgtctgtgtaattgaattgcagtgcattgcttttcttattatagattaataggattattttcggagaaatatgcttggttataatttattgctaaactttttaatagctatttatttatttagtttaaaattttttaagaattaaatttatcatctgaaaattaattcatctgaataacctcaattttttttacagtagaaatttactaaactgtctttttatatgttttatcaaatataagcataaattgtagacatttatccaagtgaaataacgccggaatatactttattcaccacctcaaacttgggtaattaaacccgcacgaaaagggcggcacaacacaaatagtgacatcaaagaaatgaacaatgggcaaaaagaacagacatgatggacattacttttccattcggttaaatgttaatttacgttttattattaatgtgtttaagcgattttccattgaatcaatcacttttaattatttcttgcgcttaccatccctcgcctttttccttcaaaaaatattttattattcatttacgaattaaaattttgtgattcctttatctcaaatttttattaaacattttttgtgtttttattttatttttcccttttttatttttaaggtttttattatttttgcgtcgttgcgacaaatataattattatttaattgtgtcgtattgattttttatgacaaattgatttatatgataagattttatatattgaacaaataatatatttaattttattgtaagcacatcacttattttttattgatattatcatttattattactattttcttgatatcttaatttttataaaattgctaagcatgtatatctattttttctatagaactgataattttgtttgtttttctttgaaaatatgttttataaataaatcgcaggaaatcatttcgttttagtcgaatagaaaattttttggtttgctttatcaatttaaattgtcaaaagccaaaaaaaatgacctgaaaagtattggtaccggctttttaccattaccgataaccgcgcaaccccacggaaacaaaccgagaatttaggataaa

SEQ ID NO: 18051 - DNA, 1691 bp, Heterodera glycines
tgcagtgcaaacattcgtttctctctctgtcacttatacaatccatgattaggcatcagattgatatttatggaaaagtccggatttttacaaaaaactgagcgtgtaaacaaacctagtttagattagggtcggccgggtccgggtagcaaaaatcggatccgggtattgcgggtccagaaaaaccgggtccgagtccggtccaagtttttcaaccgggtccgggtatagggtcctaaaaaatacaaaatttcctttttttcatatttatttccatgaaaataaaagcttatacttaaaaatactgtatatgtatatgaaaaatattataatttaaaaatactcccgactatttgtcataatcttcaacaaactccatgtggttataacatatataactagcgggtgtgtgcatgcgagggtggcgcttgggaaagcgctgcgcgcttcttgagcttcgctacctaggcgcgttttagtctgttagggtctttgcgtcagccgacatgcacttggtttcctccaataattggagttgacacatcgcataatgcaatggaaaccggaagtgccctaacgttgcacatcatggccctcctccctcccttagtccaggcgttggcacgttattgggttgagcgctaaatggcaattcacctgtaggccctaaagagggctgaccggtccatgtcccggatccaagcttctcaccattttcgcacccaacatagtgcagatgggaatgggattggcatctctccaaaaaccatgtgcccaactgctctggactaagccatttattgtaacttgagcatattagtagctacaatattcagcactttggctcggccttgggcatcaatttcccggttgggagcatgaacacggacattgtttccgtctgttgcccgagagaaggccgtatacaattgaccgtgggaaaatacttccctttccagatcaatgccgacagtgcggattgtttggccctgacctttttgaatggtcatagcgaatgcaggctttattgggaactgcaaacgctcatattttatgccgccaggcgatttgtcttcatagacatttcgtgttctttcaagaaagaatctcacttggccgccaatagcattgctattgataacacgaccaatgaggcgatcatcgccaagttcttccagaactatgcgtgtgccattgatcagtccttccttatcacttttattgataagaaggacgacgacgcatccgactttaagccggagactgtgcgggggcatgcccgagtctgtgcgccggttcaacgcagccacttcggactcgatctcatcgatgtccagtgggcggtcgtcaaggggcttatccgtggacaagtattcccgcacttgacctggcacattcgccatcatgatctcgttgacttcatcacacgtgtcaatgtgcggagcgagaatcaaacgattgagcagctctttgtcattgccaaggagttgttggaagttaggatagacataatctatcagctcttccttgctcttaacgaggaacggcggaggaatccagaagtgctctccggtttctccgagcccgatttggcggcacatttgcaagtacgcttgctgaccttggcccagtctctggttgatggtcaatttcatcgtggtgaattgaccaaacaacggagacgtttgaaa

SEQ ID NO: 18052 - DNA, 2832 bp, Heterodera glycines
gtcagctgaggaacgtgccatgctcaccgagcaaaccgtcatcaaactcccggtaaaggacagcccaattgttttgattcaccagggagaagaagcggaaccggacgagttgtcacgttcgacctcaaaccgtgcgcaaacaccgcaatgttcgtcctttggcgattggcaagggcagtgccacaggaaaccatcattcgctgcatctgcctctacaccgcgcaaatgctggaagtggcacgcctcgtccgagaccagggactcagcaatgtgctcgtcaccactgcggacgccacccaggggcacgaatcagccttggcggtggtgattacgacagtgtcgcgaaacaccgtcgacacgaacaacgaccaacccttttgggccatgccgaacagaatcaatgtagcgctctcccgcgctggccacgggttagtggtaattggaaatctgttggttctttgcagaacacctgcctggcgccggttcatcgacgaggcagtgcgtgagacaactgtggtcggccctgactacgtccatgccattcgacaacccaactgccaacacgatgaccgcgggcgtcttgtgctcgaaggggacggaatggtgaggtcagaggagttttatgcccgatggagaggtaatgagggccgacgatcaggtaattcccgctcaggggaccgaagggagaataggtttaatccttattcagttcagggaaactcgcgcggcggtggtggcggcggcggcgatcggcggtcaaatcgacgatgaatgatggagaaaattcgctgaatggatgatccgcggcgctggcgtttttccttcctcccgtccctctccctcaattatgtacatttcattctcccatttcctaattgtctttcctctgttaatttctaaaattgttgcctctcaatttcttacttttgtactggaatttcggctgcctttttctctattttctctctcaatctgggcaccattcctatacagctctctcaaatcggcactttcttctttggcaccgattcatcgcactactctgggacggaatgagctctggttgatttcctccagcccctcaggccaagactgatcaaaatcttgatcggctggcgcgcaggtggttggattgggaaccgaagggcaaagacgttctcggactggcgcacattcatcaacattcatcgaggatcgcggacgatcctatggaaggggggagctgtaagggatttgcccacccccaaaaaacaattttcatttccctcatcagccggactttccatctttccatttatcgcttttcttatctccttcatcaccgccccttttccattcctttcacttttcctttccccagcgatcagttagtcgtcggagtcatcggatttacgatcgatcaactaattcacttttctcatatcgtccgtccatggaatacttcgatcacatattttatccggagaataaattactcttttaacatcgaggcaatttgggggatttaaccatcgatccctgggcccgggattcgtcctcccaaatcggcctccccatttattcgaaagcggtgagtcgtctgggggacccacgcgcctccctcactctatttattatatttatttgtgtggaataaatcactatttcttccttgactgttgaacggacacaacaggggggatttgagagcatgcgatgctgaaatggtgtcctttcattgaatgatgcatcgtgagggagggatggccactcggtggaattgtttggagttcgtaaatggagtgacctcaatgggggggggggttgagtgacctgatgagagggggattgatttctggtgagtacgagtgtggtctccccattttcatgattttcttttttgcattttacaaatattccgcttcccccattaaatttcttttattagaatgaaaaaatagacgaaataccaagtaatttacgtttaaaaacaaaaagggtcgtgtttcaactggcatgtcacagtatttatgcccaaaatgctgtaattttcttttctttaaatctttaattttttaaaatgattttttcccatttcagtcaccaaggcttcgtccagcagacagaccttcatccgtcgcccatccacacggcgccagcgcgtagtcacatccagttcaaaactggtacaattcccgcaatgtcacgtgtgggtggaggcactgttttttttgtagcaacaacagaacgatgaggaaacagacagtccaatggtgaaatgtttttaaattaaaaaatgatcaatgatcacattatgtgtaaattatttttataatgagtgatttccaaaaaatgaaataagtttttttggtgttttagcaacgccctcttccgccgcttttcaaaaaggctggcggcaagcgattggtgactgaagaagatgctgacattggagtgaactccgacgtcaaatttggagctggagaagccgatgagtaatcggatcaccccaaaaaggaggggtgtttaaagaccaatcatctcaaaggaggggggatacaaaaatattatgttataattttacatttttgcgacgacaacatcattttgtctgctctaatgctttttgctattgttgtccccaatgccattttctctctgatcgacgtaactcgttcaatggcttcgaaattgttgccattgacggaatgaatttgccataatacccaaccattcccaaaaaggatggcaactccttaaaattttgggggactggcattttctgaatggcttccaccttttccggcgacgtttgaatccgttctttgtcgatgatgtgccccaaataagcta

SEQ ID NO: 18053 - DNA, 1339 bp, Heterodera glycines
  unsure (1)..(1339): unsure at all n locations
gagcatatgannttaaatgagtggaaattttttaaccaanttagcagaccccaacaccttancagcgnntgattctttcntgaacctcaaggggtggaattaactcgaatttaactcgagccccaccccccccccacccgcatcaagaacatgagtctgcttatgactgagctaatagcttcaattcctctgtccaagacagcatcaacaaaatttttatgctttttctttcttcttgtgtccttattgcttagcaattggtcaagttatggcggcgatcccaatttttgttgggtcagatgttccagcagctttcgcgaaagtttaatttctcaactcataaacaaaaatgtttgcgaacttttacggttaagctataaaaactgtgaatgtaaaccaatgtatttctgaatatttcgctttgaacttcctttcctcacagtttgtttgattacctttctgtccctttcattcctttgtgttccattcgtttaatatgaaattttctttcgtttattttaaaggaagttttcatcgattcctgcacacaacgccacgccatttttattatagcatccacatccatttcattgctctcactccatttgcccctcccattcattacatttgcgctacaatcgatatttcctccgcctcttcaattttgtttacccagttcgcgccagtcattttccagccaaattaaaaattcggcgctactttaaaagtggccgtttttggaaatttttttcaaaatttttaatgtcataaaaacagtttcctgggcttttcgatgtcgctgatcacgaatccggcatccatttcggccaattcgaaatcccggacccgaattcgaacaaaaagtcaaaaatccaaattcgaattttgcatatttcgtctaaaattggttgcattgtaattataattttaatgattgatcttgttaattttaataaaaaaatttaaaaaaatgtgtaaaaaaaaattttgaaaaaatttccaaaaacggccacttttaaagtagcgccaaaaaatctatatattgcgtatttcgacacattcatttttcatttacagcttaattttaatctcacatcccttcttttcccctttagacgcgtccctctcgcgttcacctccccatttccctctcttactttcaccctgccctttcctcgtccccactctccacccctcctacgccaccgcctcctactcattgcccctccccttccctccattttccactcacccctcttccccactgctcccaccctttgcccctccccctatttccactcacccctcttccccactgctcccaccctttggccctccc

SEQ ID NO: 18054 - DNA, 1692 bp, Heterodera glycines
  unsure (1)..(1692): unsure at all n locations
ggagcagatgttggaggacgaggaaagagagaaggcggcggggggtgccgaaggtgaacagatcgccaaaggtgggcactatgatcactcagcagcaggcagaggtataattagtgttaatgcgcgattggaaaacgtcaaaagggtcgatcagagggggagtggggagggacggggattgccaaactgatcagcaaaattgcccaattacctaattacaaaatgcaacagatgctaactcaactgtctgtggcactgtgcattcgcaatttgttgaggcatttcaccagacaattgtcgccactgaaacaatgccaacggagctaatcgaagagaaaagtcagctgaagcgaaaggatgtgccaaatccggaagatctctcatatcaaatcgacgcacgcgacgaggaattgtcaaaaagtttgccggcggcacaaacggacggcactttgacgtccaccgaatgcgatgccaacacctccatcacaactccgtccatttcggccgacctttgggcggccgcgcaacaacttagcacctcactgcataataacaataaaacctctgccgtcgcatatggaaaaacgtcaaatttggaagtgaatttgccggcacttcctccgattgtttgtggacaatttgtcatcgcactgcttgaactacccgaacgggtgtttcccatttatgtcgacgaacattccgtgccttggcattggttgcacgccgccaaaaacgaaaagcaggcgaccgatggccatgagaagcgattgatcggcaacgaatcggaggaagttcgtttgtttggcaaaatatcccatgttttacctttgctttctgaagagactgttcttcgactgtgccattgataagctctgtcccttccgtgccgtttgggtgcgcgagcgttcggccgtttatcaaagccaaggccacgcccactccccgctgttatctccccagggattgaccgttcaaaacgctccgatcactcccgaccgcgctcatctccttctaccgatcagtgaaaacgctccgatcactcccgaccnctctcatcctcttctntctcctcaacgatcaatcaacgtctcttctcanatcactnatcaatcgntgtgtttctccaataatatcatttttactccaatctctccccatttccaattaaantnccattctcaacttcctatcantacattaatccataatccatccccaaataacatcaatatttcttncccantctcttccatctcttcanntattaacaaaaacctcanccaaanaacccctttnaattatttccccaattttaaaataatttanacacaatttcttttaccacttccnctattnaatatcactttttcccccatcttaatnaatccaattttcactccatttncttccaattntctatcaatcntcantcaattttcanaaccaacnacncncttccaattcnctatctttacnnttntattcnncnaaaacctccctttaatttctttctcattaacacaaatcaacaaatttaattanttctattnctttnntttcanttntctcttccctnccctnttcntcccntaccacaattcnattttcaaaggatcnncccncanccattcnntnccnttcaccactcaggaggacggactggctcagagaatacaatacacagcagaagaa

SEQ ID NO: 18055 - DNA, 1780 bp, Heterodera glycines
aaaaattttggcttgcggtcacataatgggaaagtacagttttttctcaccgtataggaatttttcccagtggtgaaatgtgtgcacacagcggaaatgtgcgggatgaatcgaatgcattcggcaaaagttttggaccaacgaccgcacgagtacatcttcgcttacgcgtctgtactgcaattgcatccgtttcaaatgggtcaattcgtcaaagatggctttctcgtgaatgtatcggcgggcgatcgaagaacgcggcgcgtgttgctcggtgggggagggctcggcttaacgggaagaagtgccaggtcggtttggactcgacttctccaagttccacccaccgaattcggccatccttccgatgggctgctgattatgcggcatcggtgggtacagtccctgctcgagaatgtgcagttcggtcactcccacttcttcttctcccctttcttccgctctttctgtccccctcggcgtcattcttctccgaattcgctttccttctgtgccgccctcctcaattttgtgctgcacttttttcacaagctctttttcactgtctgctcaatggaaaaagttgagtgattggacgggcactgacttttcttgccgttctctccgttcgtttgaccgtccgtttgtgccgttctttccctcgccgagtgtttggcacggaacttggctgtcacattgtgctgttttcgcataatgttctgctggtgttctctgtcctcttcctcagcttcttcgtcctctttctctctcgcactctctccattccctgcactttctgcgtgtccctgccctcctctccaagtttccccttgtctctctttcccaacttccctcactttccgcagttcttccttgacgatgcgttgtatcgtttgttctatctctgctcttccggctctgtcctgtgcctcttctcttttctgtccttcctccttctgctgattgaatgtctttgccattttctgagtgttcgttgttgccatttgtgccaaatctgtcgtgctcgttgctctcggcacttttttcttgaagtaaaacgaccccgaggcggaggaggagcgacgctgaacggttttgtgactgctgttgtttccttccagcgctcaccgacatcgtcgtgctcgcgtcgaccatttcccgaccggcggtgcccttctcccaaaacgaattgcccctccgcagcagtgacagcgcttcatcgcctgccatctcttcgtcttccgtcagttcaattcgcgttttgcgcactttggctgaatccgtctcagtgatttggtcggccaatctccgccccccccccacggcactcttttccatttgctgctcaatgattttccgctgaatgtttctgtcctccgacggaacatcgtcagcagataatgcaccgcaagttccgatcaaatattcaatgatcagtttgttcccgcgccgttttgcgacatccaacggagtaagcaattggccctgtgttccgatcacttcgagttggtttttgctcggccatccgccccttttctgatcagtcgcttagttttattttctctgaccttgttcatcatcaaagcattggttggtgcgccgtgaatgcacaacaaatccaccaattctttgctccccttggaagccgctaaatgcaacgaaattcgaccgcaaaaatttggtgccgaaacgaaattagggtcaatgtcgagaaaccactcgacaacttcttaattttttaatgggtttttttttacaattttcaatattatttgtactg

SEQ ID NO: 18056 - DNA, 2099 bp, Heterodera glycines
agtaatttttgaaaggatcgcaccccatcgaatatttccttatttttttttaataactgtccaaagggtgactgtgtcattggttctcctgtagtccttaaggtacttggactttccacagtaaaatgtggtacaaattttggaactgtcctccctcacggcgggacttaaaagcagggtaaagccaagttcaaaacttcagagatttatttgttctaaattttatagtttaatttcttagagtcaaaaaatttcggaaccaatttttaaaacgaaacagtgcacaaaaagagaggggggggggggtagaagacgagagtaattttttgaaaggatcgcaccccatcgaatatttccctatttctttttaataactgtccaaaggtgactgcgttcgttgacaagtaattgtccaattaaggtacttggactctccgcagtaaaatgtggtacaaattttggaactgtcccgcctcacggtgggacttaaaagcatggtgaagtgaaattacaaatcttcagagtattttgtttcgaatttttgcaattaatttcaaaatgccaaaaaattcggaaccaattttagaaacgaaacagtgcacaaaaagcgagggagggtagacgacgagagtaattttttgaaaggatcgcaccccatcgaatatttccttatttctttttaataactgtccaaaggtgactgcgtcattggctctcctgtagtccttaaggtacttggactttccacagtaaaatgtggtacaaattttggaactgtcccgcctcacggtgggacttaaaagcagggtaaagccaagttaaaaacttcagtggagaatttttagttttgaatttttacaatttaattacttaaagccaaaaaatttcggaaccaatttttaaaacgaaacagtgcacaaaaagaggggggggggtagaagacgtgagtaattttttgaaaggatcgcaccccatcgaatatttccttatttctttttaataactgtccaaaggtgactgcgtcattggctcttctgtagtccttaaggtacttggactttccacagtaaaatgtggtacaaattttggaactgtcccgcctcacggtgggacttaaaagcagggtaaagccaagttcaaaacttcagaggaaaatttttagttttgaatttttacaatttaattacttaaagccaaaagattcgaaacagaagcattatttaaatcaaaaataattattaaattttttacattttagtttcaaaaaaacaaacaaaaaatgttcccaattttgaaaatgaaatagagcacaaaaaggtgggatggttagacgaaaagagaaatttttaggaagggacgcaccccatctgatatccacccttttctgttccataagaggccaaaggcgactgtgttcgttgacaagtaattgtccaattaaggtacttggactttccacagtaaaatgtggtacaaattttggaactgtcccgcctcacggtgggacttaaaagcatggtgaagtgaaattacaaatcttcagagtattttgtttcgaatttttgcaattaatttcaaaatgccaaaaaattcggaaccaattttagaaacgaaacagtgcacaaaaagcgagggagggtagacgacgagagtaattttttgaaaggatcgcaccccatcgaatatttccttatttctttttaataactgtccaaaggtgactgcgtcattggctcttctgtagtccttaaggtacttggactttccacagtaaaatgtggtacaaattttggaactgtcccgcctcacggtgggacttaaaagcagggtaaagccaagttaaaaacttcagtggagaatttttagttttgaatttttacaatttaattacttaaagccaaaagattcgaaacagaagcattatttaaatcaaaaataattattaaattttttacattttagtttcaaaaaaacatacaaaaaaatgttcccaattttgaaaatgaaatagagcacaaaaaggtgggatggttagacgaaaagagaaatttttaggaagggacgcaccccatctgatatccacccttttctgttccata

SEQ ID NO: 18057 - DNA, 1325 bp, Heterodera glycines
  unsure (1)..(1325): unsure at all n locations
tttgttcaagagcaaactgatcagagtctgtggccttctaaccgtgttattttgtcagcattttgttcctttccaccctccacttttacgccgggcaacagttttccgctctccatcaatgcgatgctatgcggcgcacccttttccaccagcgtcacgcggtcgttgcgcaacgcacgagcgtccacatagacaacggtggggtcggggctggccgcgccttgcatgcccacggccgggttcacgcgacagccaaacgaagtgctcaccgcccggggcgacagaccgagcggcgcgaacactttgatgaacgcgttgcacaactgcacgcggggacgctcctctgccacaacaacgcaattgcgcagactgtacgaggagaacagaacaataggcaatgaacaaaccgaacaaattgaaataaccccgcccctcgccctatttgatgttttatcatttttctgtctccccaccacaccttgacagattgacgcttttctccctcagctgtcccacttgggtcgccagctccttcaggcaaagttccaggacggaatacgtgcaaaaagtgtccctgcttcggtgctgactcagcgtctgcatccacaccagtgggttctgctccaactccagcggagggatcagaatgctctgatgaccggaatagacactgaacgaaggtacaattaaacggggaacgaaacgaacgcacattggaaaatgccaataaaaagcacctgcaaagacaccacaaagtgaagccgagtccggagtaagggtccaggcagacggtgacagtccgggaagggtatagttcgcaggccattttcagacttttgcactgtttcgcggcaccaacagcagtaacaacaatgcccgagagttgtccagtggtgctgacagcaaagtcctaaaaaaggggacgcattagtagcagttttacaaaggcaatttaaaattgaattgatgaaatgccaaccaaatagaaaatgtcgtcgggctgtcgtgcgatggacggctcaacagcagcggtagagctgcccgccttccgcactttgctgcgcgccacggacagcgacggggcgtcctcaatgtccaaaatggtgggccatgccttggcgttgacgcggtgagacagctctttgctgcgcagcagtttgatcagagtgccgttggagagcagtgcaacagccttgctcacatcgatgatcttanaatggaaagataatgcaacaatcgaatgaanaggggtattatcagtcatcatgcatgaaatatttttattttacatcatcctattttttatgaccattcgaacggtgagc

SEQ ID NO: 18058 - DNA, 2179 bp, Heterodera glycines
gcacggtaacgaagtatttcggcaaaattgacgcattcactggcggacgatggcaactctttgccttgggcgcccgcaatgcgcacgccttggacaatgttgccaacgaacatcgccgcagggcccacttccgctggtggttcacgaggtttgggcaggttcagcacgcaattctgcggacacatcagcagcgttgacgggtgtaaacatccgtccagaaaacgtctgcgcgtctccgtgacgtaaatgccgccgagagaagtcttaagaggaataattggttaattatttaaatgggcgagttgcttttgcctttggcaaatggttaggcggcacgagagcaagacaataaatgcccaattggtgaatggattcgcacgcctgcagcacgcgcaccatccaattgaacgcctcctcctcgctgatctccgcacgctgctcgcacacaatgcacacgcgttcgtcgcgcagaacgctgacgctgaacacggcgatgcggccccggtagacgaacttcatcggctcaacagccagcacggtggcaatcaactgaaaacattttcatggcataaaaaaaatcattcggtctttggctatcttaaaaaacgaaagaatcctaaatttaaaatagtataatgagtgttaatttattattacatcgtccgcactgtgcacacgtccggacacgtgcagaagcgactgtttgcagccgaccgtgaagatgagtccctcggggccgagaaagccggccaatccggaccgaacgtactccagcggaccaatgggtttgtcgtcggagccgagcggcagcacagcaaatgtgttttgggagagccctttgaggccgtggtagcaaacggcggcggacggtgcgtgcagacaaatctcgccgacttcgtccgctcggcacaaccgcggcgcaccgcacaatttgacgacaacggccattcctccgggaattacttggccagtgtcctgaagatgagagaacaaatgagataatggtagtgcatttattatgaatttgtgattccttccaagcaaatttatcccccacaagatttgttgatgaccccttcccattgctcacccttgaaaaaccagaaattccaaagaaaatgcgcaaaaaatccgttttttttaattcaacagacaccgacttggagtgtgagcgaagtcagtgagttctcctggtccacacggaccacgcaatggcttagggccaacattgagagcactccgcgaccgctggtggaacaatttgtcgttgttgtgccgccgccattgcgtgcaactgcgacctgttcgggatggctgggccgacgcatggccacaatgccagtctcggcagagccggcgcatggacaaagtgcaccgggccaaatgccgtgcgatttgaaggtgacgatgaactgatcgcacgaggacagagaccaagggttagcaccatccgccacctttgggaagggggttagaaaaaaaaagttgaacaaatccgatgggggggggggaaataattggaatcaaaaacaatgaaaaaagggtaataaagttttggtcctaacaaatatttaaccatgttcaattgcaagttttagtaattcatcataaattttttaaaaaatcgctaaaaatatattcaaaaatttttcttgaaattcgaaaaatttctaacttttgatttttgataataattttttaaattcttccggggaaaacagttcttaaaataaaatttaaaaagaattttgcaaaacttttagtgattctccattccctaccaaaaggcaacgaagtgattttagttgaatttgttgcgagtggtcgccgatcgccatcagcgaccagtgcaagtcacgggacttggcaacggaatgttgtgccgaatggcgggtgacttgggaaagccacgcggtcgggttgactttcatcagcgaatagggcacgaaatggacgcgcattccatggagaatggcaccaatcacagcgaaccaaaggcccacttcccttcggaagtcgaccacgcaaaccatcgtctcatctgagcggaaagagagataaaaagggaatgcatgggaaatcagtaaaatgacaaataactcatatatgagtcaaaatttcgagctgatacccttcagtttatgatgagagtagttttcatcgtatgtgaccttccttg

SEQ ID NO: 18059 - DNA, 3435 bp, Heterodera glycines
  unsure (1)..(3435): unsure at all n locations
ttttgggctccagtacaattatgctggctttttcgttttagtggtctgtgagttagtcaccaaaaggggggtcccaggttcaagtcctccctatgttgtgtgttaatttcaatttcttcttttaaagaagaaggcagaattattttttcattaataaaagttttcgtggcaataaaaaatcatattcaaaaagcgttggttacgtccaacatcgacaattttatgaaatttttttagcttataacttggtgaatactagagcaaataaaaccattttatgctcattttgaagggaaaattctggagaatattgtaaattttatttggtttggccttaaattgtggacttggctaaaaaagaattaaaattattgaaaatttcacctagttgaaaaatttttccctatgttcaaattttcttcaaattttgcataggcccatagtttgaccccctttatcggatccctgtttattttatgaaagttatgtttttaactcgagatcagctcttccatttttacaagggaaaatccccggaaaattttaagttttgcaaagttttggcgttctgattactaaataaaaatccagcataattgtacttggagcccaaaattgggccgctgtgtttaaacaattaaattaattatataaatcaatgtcaatgaatttcataatacaaaaatatttaaatataaattaaaaataataatttccccgtttttgtataaggtatcatattttgtaagattcaatttaatccatgtaacatccgcttgttaagccttaagcaagccgtataaaaccatgatttattcaattctctaattttcctggttcaagaataacctcgaaaaaacaaagattttatttatttttttaaatttaagcaatattctaatttttaaaaatacttaatataattgaagagtgtaataataattatttgaatttataaatcgcataatttaatgtaattaggtattatattaatcattgagactattttcgggtcgcctacacttagtttttttttcggttcgacctagtatcattttttacaataactttttccccgtttttaagtcgtcattgaacaaatggataaaataaattggaaattacgagaaattgatcaacagaagagcaaggaaaagcaattgacagaatatttggaaagtggcgaatttaaatttgctttacaaatgagcgaaaaattcacaaaattattaccaatggtaaaacgatttaaggaaaaaacaatgaaagttgacgaatttatggaggaattggcaaatatccagcaaaatttagaagaagaattgcagagaaatgaacaaaatgaacatttgttcaatttaattacggtaattgcgcgaaattttggcggagttttcgttaaaattggcgatatacaccaaattgaaatttgttttgatggagcgcacaaaatgttgcaaaaactgtacgatttggccatagaacgattagtgaaggaaaaaaagggtgcaaatggcaatgacaaacaatttgaatgtcgtggcaatgacaggaacagttttaaagcggcaatcagagagctaacgggcggaaatacggcacagagtgccaaactattgcagtatatggacaaattcgtgccaaaaagggaagccccgtcgcatttgatcaattcattttttacgtttgcgacgcgacttgaagcatttttgtacgggaaaagcagcggcgatgccaatggagaaggagaagcggatcggcaagcagaggaggcaaaagcaacgaaaatggcacagccgaggcacagaattggcgcatttattgccgcgacgcaatgcctcggcatttcggcgacacaaatggaggagaggtaaagcaaaattggaagaaaaaactttattacacttggaaatcctgtaaagaaatgagcaagcttgaaaaaattagcctggataaagtagcaagcaaaggcttttgaaaaaggcttggacctgcataatttacctcattttcaccatttccacggaaattttgaaatcaatgctttaataaatttgttttagcatttttgactcaccaataaaagttgcaaaaatcaattcaatcgaggaaaagcgagcgccgctattcggaataataatagaaaagccgagagcagaaacggaaaagcaatggataaaagcggcgtgcaaaagtaaggcgacaagaaataaattttttttagtatttttacaaaaagatcaaattttatatttgctcgagaaaattttactaaaaataattttttcagaaaatttttcgatccttaggggtcaaaaagaccaatttaactgaaggagtgggggcccttctaatagaggctttttggaaaaatgccaaaaatggacaaatatagtaaatttggacatatcgcgaaataatatggaaaaatatagaaaaaatggatatagaaatccatccgaagcttcaaaccatgctaaaaatatgtttcaggcctcccatagaccaggaaaataaggatttccatataattgcaaccctaatgatcacgttaaaattaaaaaaaaacctgatgaatcaatgttcaaaaaaggttcaaaaatagacattaaaattttttatttaatttgaatttttaaaaataataattttagacaatttcaaaatgttgaagcaactggaagaacataaattttcgatttacgatgcaattaaattgatcagaaaaattgaccagcaaatcgaattccaccatataaagatagaaatcccagcagaagtcatcgcattggtagaacaattcggcagcgaacaaaaatatctgattggatggcacaattactctaaggatgtttacaaaaaaattcaaaaatgccaaaatgcgcggttgttgcaaaaaatcttggcacgatttattgaaaagttgcgcaaaattggcattgacccgaaagcgcagatggtctcgacggatttgagcatcggcgaaacgattcaacaaacaattaaattctattgcgaggcttagtaagaattcagacacattaataaagcatacaaataaaattcggttttttttcaaattcgataggcgaaaagattgaaattttcgagaaaaaataatttataattttgctacagagtaaccaaatttataatttttgatatcactcgagagctctaagtgttctcgattagcctgaaaaaatttttaaaaaaattcattaactttcaaaaaaaaattataagcagacaaaaaaccagggatttttaaaacattttttaaacttatatacagtgtttgtagagaattttgtgctctttctgtaagttatattcggtttccgcgtaaggtttttttcagccctctaggaatttttttcgaaaattttaaggattcaagccattttatggttttcaganttacccatgaaggac

SEQ ID NO: 18060 - DNA, 2585 bp, Heterodera glycines
aattattcaattattttatcaaaatcttttttttgttttttttcattaattccgaccccaaaaatgtcggaaaccggaagtctttccgtgccatacctggtgcctatcgacatctgcgagaaattttatgaaatttaatgcgatttgttaacagattttgtctaaaattgaccaaatgacgcagtttttgactcaatttctacaggattattaagtaaaagcctatccggcggtgccgataggcgccgccgggaaaatttcacaaattttgaatgaaatttgcgatgaaaaatgagttaactttaattaaatttattatttaatttatttaaaaatatttggcattctgtcttagaaaaatttaaaaaaaaaatcaataaaatcccgcataatcccgcacaaaaaatcaaatttgaggatcccgctgcgggattggaactcaaaattctttgcgggacgggatcccgcgagattaattttctgtttacccaccccttttttcatatgtgttcttgatttaaaaaaatatgtcttaattaatttcattaagagttctaagcttcgattctcgactcgctaatttctcgcgtttttcgcttctctcttttggtctcatggtatcccgggatttaatcaatccatgatacatattgggtcttaggtgacagggggcggatacacagtttagaaaatgagcaaaattggaactaataaatctcttccaatattttttgcatttttatcaacaacaattcaaattcactcatgcaaagtggtttttgttttagaaatacactccatgatggtaaatggataaaatgtttccggtacattttggctacggtaattcaaattatcgttctaggcagaagattcatcggtcttacaactggtgattgtgcctgcatttgagctaaaaatataatattaaataaaagcaggtgtaaattaactgttgaataattgttttttaccccattcattggcccttgcaaattctgtacgacaaattggacaagtgctatgccctgaaaacctggaagggatttcagcaaatatttttaaaaaatatgggaaattaccatgttttgaggcattcggcgtgataaaagtgcttaaacaaaagttttcaaaaagacatacagataaaaattttgaatttttatgtgcttttggattttattccaaatggctgggaaatagagaagggagaactgcacagattcgagaccagggctgcacgcaactggatttgcaattacgtaaatccgtaatccgtaattacggcgattttctcagttacggaaatccgtaatccgtaattacgggggtccaaaaaccccgtaatttcccgtaatccgcaatccgtaatccttaatttttaaaaatcaatttgtgtcagaattttagaaaaaatttttaaattgtgattaataaaaatcaaaaaactgatttttttgatggagtttcttcattttttatttcaattttacaaataatttataattttgtgtctgaaaaacccattctttttgaatttatgggttgatttttgaaaatttttgaaagtctgatcattataattggatttatgtatgtatcagggatgtgccgaatcggaatcgtaatcgtaatcggaatcgcaattaatcggattttgggccataatcggaatcggataatcgtaatcggattttgccttgaaatccgattattacacccctaagaattgaccttttgaaggaatttttttagtgagaataccaatgaattttgaaaaaaatgtttactgaaacgaatgttttaatcttattttaacataatgactgaaattaaatctttctcacaaagcagtgccggattaattctccccgatataatcaagttttttgttatttagcaaaaatgtcaaatatctgggaatattctccaccgctgtgttgattgtgaaagatctgagaaaacgtttattgcctgagaatgtggacaaacttttatttttgcatcacaatcttaaaatttatgattttgattatgaataaaatttttgggaaaaaattatttttaaaaaatcggaatcgtaatcggaatcgcaattaatcggattttgggccataatcgtaatcggcgatttaatcggaatcggattttgtctggctcggcacatccctggtatgtatataattatttcaacattttaatagtcagaaaaaaatttcggggggggggaatccgaagaatttttttggtcaaaatttgtttagattatttaaaaaaattcagcaccggagagcaaaaacaggaattgtaactatttttaaccaaaaaagactaatttttgccattttggagtcaacatttaaaaattatggtccggcggtgccgataggtgccgccgggcaaattttttttgaaaattttaatgattttattaataaaaatcgacaaaaaattttaaaaagtaagaaactttggtttttataaaaaaataatcttgcaggaaatagtctcgaaaaataatcccaaaaagccaattacggatcaaaattacggaaaaatcccaaaaatccgtaagccgtaatccg

SEQ ID NO: 18061 - DNA, 3230 bp, Heterodera glycines
  unsure (1)..(3230): unsure at all n locations
taaaaatgtatacaaaaataataaaatttaatgtacacattttcgttttgttttttcattgctccctttggcatcatcagccgatcgatcaacagtcaattcgcaattttgctgtttttgttgtcactgatcagcggcagccagcagagtttaatgttgtcgtccttttttatttgctggttaaattggcgcttttggcattttatcgcagcggcgggaaaagtccaatgatggcagcctcagcttcatcagcggaagttgtacaatttggcacaaaatgttgttgaccattcattttggatggcatttgatttggtggatttaaatatggcaaaagtttcaaatttttgccatttttcacatttttccctcttttatagttaaattttgttgtcattttgtccaaaatttggcaaatgttctcactccttttactaattgcacgtgcgttcagcgatcagtcagcctttttcgcccattttcacggaaaaaacagatgaaaacattcgcgcacccaaatttactcaatttcatttattttattgcacatattttgagtaaatatgttcattaaataaagccaaaaaacattgcaattagtaattctttttccttttatttttttcggctttttgacatatgaaaaaattatgaataaaatacctaacaaataagcttctttggcggaaatttatgtaaaaatgacacgaaacaaaaaatattttcatcaaaatattattattattattataaaagctgattttttaatgaatttttgttaatgattattttaattgtttttattcatttaatttcatcatctgttcagttgaatctccaccgatgtcccgttattttgctttgataattattcctttcctatttgatataattttagttgttaaaagcgatattcaagtttgttataaaacaaataattaacaaaaatgattaattaaattattatttacttttaatggtaattaataaagaaatgcgatttaaaatttttttttgatttaggcaattgttaattaaattttctatttatgaatttatgttttatgcgtatatttttgtaagaatttattaaaatgtcagaaaatcaaatgaattaaagttaggagtttaagaccaaaaaaataaataatcatttggaattaggcgtaaaaacaataataattctattaaaaatgttaatcttgttatgagaacgttttatgaatttaatttctctcttataaaaaaatattatataagaaaatttaaaaattttaaggaggcgtcatttttgcatttaaaattgtgctcaaacattgacaattcgtttaattattcaaaatcaaaagattggcaaaaattggaggaatatgtgccgaatttattgccatatgataagcaaaaagaattttcggaatgggaaatgtgttatgaaagcatccaaaaattcattatttattgcaattttcttcaaagcagcaaaaattattattataaccgaggtaggaagaaagaattgtattttaaaaagaacaaataacaattaaattaaaaaaataaaataagattctgttaattaattacggccccgttttggctccgggaaatgcgtcagtgaaaattttactgtcacaaaaacaacttccttgagttttcaaggctattgatcatgaatccggtatccatttcggtcaattccgagccccggacctgaattcgaacaaaaaatcgaaagtccaaattttcgaatttagcatttttggttcaaaaaaggcataattgacctccttttgaagaattggtggctttcagtttgtttccgtgtattaaaacttattttgaaccaaacacactaatttcgaaaatttggactgtcgaccttttgttcgaattcgggtccggggttcgaacgatgttcttaaagaatttaattttagattacaatacttaatgctacaaaattttatttaaaatatttgtatcactgacgcattttccggtcatgccccgttttcccattagtcacggtcctaaccaattaaatgccaaatttttaattaaaaaatatttaaaatgtaaattttaagatttttatgaatatgaatttgaattcattgctctcaaaccggaatttgcatattcaaatggggacacaatgccaatggatgatgcgatgcgccaaattgttgaggcatataaacaattgtttgaaaggaaaaagaagaatttcaaattgaatccgttttcaaagaaagcccctcctcaagtcaattttgtcaacaaagaaaattgtgcaaatgtaaaattatttaaaatttattaaataaaaaataagtttaaattttaataaattataaattggaaaaataataatgttttaaaataatacagaaactgattcatacttgtatattaattttttcatagttctaattttaattttctgtataaaatactggaagatacagctatagaaataatatcgggtggcaagaatctgatccaggcttgtagctgttttgtttttgtttttttgaaaaatattaaaaaatgattaagcttgtgaaaccaagagagagatcctttagaaacagataaaaaataaaaataattatataatttaatattatttgaaacagatattttttcagtgaattatttataattatgtgtaggaaatatctgttttcgtttacctgtatgctgtagagaaaaaagacctgtacctgtctgtgcctgtacaatgtggatccagaaaaatccattctgggtcaagttacggtacagatcgagtttgaatttttattttaaatttaaaaaaagatatttcatttttattcaaacgtttaatcaattttcgttaatttattcaaggtgattgcctggtccgctattcatgtaaaagcagtcggaaagaatcatttggccaaagaaaacttgcaaaaagtaaaaaatcatttgattgaaaatacgccgttggcattggattttcctcctccaattgttcaaggtatcaacaagtggtgaactaaaccattctcaaatattgttataacaaataatactttatttgaattttgatatatttagaaatcaaaggggcaattagccagaaaaaatttcgggggcggagggaaatccgaagtccttttttggtctttagcccaaaaattgntttttcactgagtgtaattttttaaatttttggcttttcacaagaaaannatatt

SEQ ID NO: 18062 - DNA, 3035 bp, Heterodera glycines
tcaattagccaccgggcaagattgggatgggcctcacctttctgcaacaaataagccaatggcttatgatcagtgtgcaactctacattccccatgtaaatgaacggtctaaattgtcttagcgcaaaaattattgcgcctaactcgacctggactggtggccacttacgctctgcttcggacaaagtgcgactgcagtaggccacggcgtgaaatgcactgttgtcctgctctttctgcatcagagctccgccttgtccaactgttgaagcatctgtgaagatgtggaatggcttggaatagtccggaaatcggagaatcggatcttcagacaagagcttcttgatttggttgaacgcctcatgttgttcgacgtcccacgaaaatggcatgtctttcttggtcagctttgtgagtggcccagtaattgttgagaatcctggtatgtgtttcctgaaaaacgacgccattccaacaaatctgcggacttctttcaacgaagtcggcgctgtaatatctttgatgatctccacttttcccaagctgggcgtgtatccgtctttattgataataaagcccaaaaattccatttttgatgaagccattacacattttttgggacttacctttaaattgaattgccgtagccgagtgaaaactttccttagtgccaataaatgcaaatcgaaatcaggcgatttggagtaaatcaagaaatcgtcgacataggctataacagagtcttccagtcctgaaagaacatgagccatgactctggcgaaggcactggtggcgttgcgaagtccgaaaggcatgtgcgtcatttggtagacatcgtcttcagtaatgatgccgcattttctgctggctcgttcggtcagtcttatctgaaggtatccggaggacaagtctaaagaggtgtaccaatggcaattgccaattttctcgagaacgacttctagtctcggcagtggaaagtgatcaggcactgtaatttcattcagttttctgaaatctatgcatggccgcagccctccgtccttcttctgtaccaaaacaatgtttgaaatccacggagtgtcagaattgaccattactccagctttaatccatttctgcatatgatctctgacctcttctctgaaacgaaatggcgtcctgcgcggcttggcagttatcggatcctccgtggttgttatgatgtcatgttctcccacaaggcatgagcctaaatcgtattgggattttgagaagacatcagcaaactcaacgcagagttttttcagcttgttgaggttttcacccgttgcagaggatttggcgaagttgattttgaatgatgggtcatttgtagtaatttctggattgacattggcttcctttacttgcgattgttcctcaagccatggaccgtccacgctttgtttcaattcattggcaagtgctacgtgcattccggcacaaatgttgattggtgcatcagttgggttggtcaatatcatcttgatgcatccctccacgggctttgcgacagttgagatcatcccgacatgcattttggagagtcgtccatccagtgaatgtgttacaacttgatcaagttgaatttgtgagtcaagtttgccggtcagcatgctataggatcctggttgaatgtcaacatgatgacgtgccacaactttgacattggagtaaagcaagtcacctctttctcccatggttacagattttcctgaaatactgattagaccttgaacaaaatcaaaagtaatcggtggaagttttgccatcaagtcacatccaagaatgacttgataatcccttctgtcactcataacttcatcctgaatgagttttatttcgccaaaaattttctgacctgcaatttcgatatgtaccatggctgctgctgttatgttgatccaatgtccggaggctgatctaacggtgtgatttgtcggaaaaattttgcatttcaattcattggcaagactcatccgggcaagagaaacacttgctccggtatcagccagacagcttactggtctgttgttaatcagggaacggactgtcgctgttaagcgtggcgtcattgtatgattagcaacaatttcttccataatggaatgattagatgaggccgtagcccaaaaactcctgctctttgagagcacactcatatggaatgcaatgaatccagccattgcaccaagagagaccacgattccaagcagtgccaacaaatccgaaagtgtgagaaaaatacccgttccggctttcaagtcggattccgatgcttgttctgcgttcacaggtatggcgaccaacgcgatcatcagcaacaaaatcaaaatggttgtgctcgttccgatttgcaaaacagaagagggcctaagcctttttcgtggtgatttgtttacaacgttggttgtcgttgatgctgctgtggggtcagaagatgaaaatatggtctgaaaacttgacactgaaggtggccaattcattgggttccctggaatgctttgcaaagggatatcttcaacggttacgctggtatttggaaattcatcaattgtcacgtttcccgtgttgcgcgagcctcttgacttctttgcgccaaaaattattcggcccagccatccaggaccggtgtaagtttcaagaagtactggaagccaccttaagagaaaatcaatcaagagaactagacttacaaatgataggacgcatagccatgtcagtttgtagtctccgactacttttttctcgagttcgtctgttaattctcgccactggtcagaaactgtgactcttacttttttgtgctgttcattaattcgataagtgagttcacttgccttgaccataccgcttagaaaagcatgtgtttcaggtcagagacgttgaacaaagccatttggtgaaatgagtgcctttcaatttcgaatatccctgggagccgtggctcaatatcaaagtcttttactttgaggattttcgtttctcctgttacctgatctacctcccagaggctg

SEQ ID NO: 18063 - DNA, 2588 bp, Heterodera glycines
taatttcctaaggttctgatttatgaacggcagaaacaatttgtagagacttaaagtggaattggcacatatgaaagcgatcgaagcgcaacagaacgaatatttgataatgtgcaagaaaatttgaaaggattgtgcgaattgacacctttttattgtgcagagctaattaattcgctaatgtaaattgacacaaatgagcagaaaagaacaataaattttagagagatgaaaaatccaatgaaataagcgtgccccgtcggtggcggacaatttgttcatagtggacaatccgtcagtaaatttatttttgtgtcagattaatttgcgaaaatatttgttcaatttaaattccaaggaaatattttaattttaaaaaattgtagggattttttacaatatttgaacatttttattaataattttgaccgggaattcgctgcgccattagaaacaacgactccgccttatgtgccacccaatacaaatgttccgaagctttaattttaccataaattgtaaaaattcattatagatacataaagaaagtttcattaaattggtcaccgcatttccaagagttcggccttttattggttcattatttttattgcattttcggtaagaaattacaaaaaggccgaatatgtaattatcctgctcttttaccggcaggaaaaaaatcccgtgacttttatttggtgattttggcaccgtccgtaagacattaattcaaaatctatcattttatctcgtgcaatccgaaaatcgaacaaaacacacaatcataaatcgggaaaacgaacaaaaaagagattacttcgtcgaggacataaatcgcttctcgcggacgagataaaaataagatcggcgaattcggggaaggcaaatcaaaatacctgagagtgttgggggatttacaacgacagaaaaacgtacgcttctcggaggtgccgtcgttgggcattccaaagatggcaaaagcttacggtctttttttgggaattgaaatttaaaagcctgtacattataagcccaagcgacggatggtgggggattttttcagtgagagggagggtgaaaatccgacacaaaatttgatttaaaagtaataaaaaatattttgaattgaaacatgctgcagattcattctgtgtcgtattttcggttacacgtcaacttgtgcgctattattcgtactgtttttcggaaaaaatcgtcatatcattagtttaggtgtccctttctgtaaaatttaaaattttctcttttttgggttttttcataactttttctcttgtattatgaatatttttgccgaaaaacagtatactttggtgattctaccgtattcccttcggtgttttctgtgtctgacccgttcttccgtttctttctttctctctctcattggtgtgttttttctccattttcctgctcattgtcagtttctgcttctgctgatgacactttttagccgactttcggccattgaatgcgttcggtggtaagggcgaatggacccgtaaaaacggagaaggaaattgcgcgtttgtcgccgactgaaatggccacccgaatggcacgtggagcagagaaacagaggcgggaattggtatttgacgaattgagggtccttaagggggggggggggggggagaaataccatagaaaattggggaaaatggccaccggacgttttttggggcatgggaaacaaaaaaactattttttatggatatttttggtactgtccattagttgggctcgtcagtctctaactgtctgtcttgccattgccgtctctctcaaactttccccccacccacgccattatattgccgaggaatgggagaggtacgactctgtgactgcccccccccatcggatatgctcctgagattcggccaaaaaagcacctccgtgatgtcgccgtgcagccgcgcgttgacaatgttgtgagccctccacaggtacatgaccatgtcgtggagacggttcacctgtcatttgtcaaatgattgtcctttgattggcctaagtcagctcactcactctctgctcgttcatcggaaagagttcggtggtcattttcatgaagtgttttctgcagtgttcacatccgaagaaagtgctgacccatccctgaatggcacgcaacggaagcaaagggttgaaggaaagccgatctgaacagggcaacagccgattaatacaccaattagcaaaactaatgctttaaatggtatcaggtccccaaaatgaccctttactgcatccaaataagcgtgaacggtaatggtgtggaaaatggtccaaaggccgcaggtatagccacggaattcgggagaagagccggcacagtgctgccaggaggcattggaggggaagggactgccgaagacacgctgaaagaggtggggaagtggtaggaagaaactgcggagtggtcattggcatttccctttttggttggccattgatggcatttacctttggtgccaccgaaccagggggggagggtcggtcattttggcgctgccgaaatttcttcccttccccgcccccctctgttcctccttcccccc

SEQ ID NO: 18064 - DNA, 1117 bp, Heterodera glycines
acttcgtccattcgagtcacttcgtcaagcagtgccattctcacctgagaaagggtaaaaggggcgacagggcagaagaattaccgccttcagcagatcagtttccgacacaaaatacaattgcttacagctgaaagagaaattgtgaagggaaaggcgaaagaagtgatcagacaaaggaaaggacagaccgatcgggaaaacgttcgcagtcgatcacatcgacgtggggacgcaccgattgggtgctcttttgctgctcagtgtccaaagaaatgaaattcccttcaatgggaggggtcgagtccgttccttcttttcgtccttctctctctctctcttcccttttcttctattctctcgtccttctctctctctctcttcccttttcttctattctctcgtccttctctctctctctcttcccttttcttctattctctccgttctactcactctttccttccccactctttgtctgcccgatctcttacctggctgcactctctgcatcgcttcgtccagagtgacggctccctgaaatctgtccaaaaattgttccctttccgtttcattctcttactgctccatgaagatggactgttggtcgtccctcttgaacatggccacataagggaattttttgattcctaaatttaggagaaattaatcgttggagaatggggggaaaatggcagagggagagggggggggggggcactcgttgagaaagcaattccgacgcccaaaaaattgggaatcggaattccgagcccaaaagtgtcggaaaacggaaatccatcgtatcccttctctggtgcaaatgcttaatacgccctctccctcactcggccttttcctctgttttggtgctaatgagtccctgccgattaatcaattattacccaacattggcaccagcggtgaatttgacaacgtccgtctcactccgatttgtttccgattctgccaaaggtcgagaattgactaaaatgcgaatgagcaaaagccggtgcttttgtcctcacttggacaccaacagcgtcaaattgttcaaagattatgagtaaaaagttggggggcgggaaaatgccatgccaaaggtcctcaaaacgag

SEQ ID NO: 18065 - DNA, 875 bp, Heterodera glycines
  unsure (1)..(875): unsure at all n locations
tggacatgatcagtgcncagcgttgaagacgactcgccgcataaatcggtattcctttttggagccaaaaatcgccaacaatggcttgtggtccgtgagaagagtaaatttccgaccaaatagcattcggtagaatttttggaccgcaaaaacgagggccaatgcttccttttcaatttggctgtagtttttctgcgcgtcgttgagggtgcaggacgcgtgctcaatcaatcttttttgttttactattacaaaaatagtcgagactctcgacatgggatttttcattgcgtttttgcatccgtttttaattgatgttgctactcaattcatcactctattcatttcagcaaaacattcttccggaggacggtgatgaaaaatcagacctttcagtgccaatacggtgcgtttaattttccccaaaaatgcttctcctctaatcaataaatgtgtctctctttttttaagatggcaattgtccgttggacaaaacggtgcgttgcgcgtgccggcattgccgcttcaaaaagtgtttggctgttggcatgaacaaagacggtgagattattttgtcggcacattctttgatcattaggcagataaaaacttctggtgacaaaggtggtaataacagttgatgtgaaaggttcaacaaatcaccgattttataatggggagcattttgttctcccccccccccaattaaaagggtccacctcgtttcggctccgctcgtttcggcgccagcccagttttttgactataacttttctttttccaccaaatctaatattgttggtatccttctagagaaaaggtacacatgtggcctgggcttttgaatacttctagccatactttttttgagcatt

SEQ ID NO: 18066 - DNA, 754 bp, Heterodera glycines
ccccccccgaaatgaaaaaccaaaaaattactgtatcggatgtgtttactgtacccaaacggattgcttgaattattgacaatgaaaaaatgaacatttttctgcattaagttcctgataacggataaaatggtgattggaattggaattagacaaattttcgtctcaccatttgtcgagactctcgcgcattccttggccaatttgtggggaggacaccattttaacaaaacaaaaaaaaatggccgattgaactcgtttcgttaagttgctgatgatcgaatgggccaaaatgctgccggtctttcacactctgtccattgttgacaaagtgagcaacggattttgtttgtttggcattcatttattttttgctttttttggcatttcggaattactatcggaattcgctttgaggcttcttccgatcattaaattccgttttgttgtgatcaggctgatcactgatcattctttcttttgttatcaattgatcttgttcttattcaaatccctgactccaaattgacgacttgatcagtgatcagtccattttggccatttattttggtcaatcacttttttttaatcccggctccaatttgacggctttttaaaccctcatttttgtttgttttcagttagcactgctcagacactcggccattactttcccgtcgttgctccaatgcttttactctcccgacgttgggacggacacaattgtgttcccgagcggagcattctttgaccg

SEQ ID NO: 18067 - DNA, 2528 bp, Heterodera glycines
  unsure (1)..(2528): unsure at all n locations
cccaagtttccaaaaaactnttttgagaagcgcaccacttcatttgtcatagttttgagataaaattttgaacctgggaattctatttccgatttctgaaaatttttttgggcctaggattccttgttataaaatgccaaattggacgcacttttactggcgccaatgaatgaatttgaatcagatgattaaagtgaaaaaaaggaagatttacgagcactaaaaagaaaaattgttttttttttgttaaataatttcgttgatcactcactacccgatcggggtccccgacccccgacaattgagatccacccgacccgacccccgacacgtcgccccccgaggtcccggcccccgactttttgccccccgagggctcggggctgaaccctagtccaaacccgccggtcccggtactttcaaaattccggtctctatataaaccatccctttttaaagggtgctatgtgattataaaaaagccacaaaaaagtgcgttatttcaactaaaaactaccctatctttgctcaaacctacagtcaggtgcaaaagtatatgaacaaaaaaaaatttttttaaacccggttttccacgagatgcgttattggatggaaatcttttctatgccaaaacaaacccccaatattactcgtaaaaatggcaaaagacattccgatgacgcaatccatcaaaaagttacgggtgcccaaccaaattgacccaatttttggcggtgcaaaagtatatgaagataacatttactcgatgaaaactcaattccaagtaggcagaaaattctgaaaaaattcctttataaaatgatcaattttctaccattttcccttgaaatacggtagaaatcagtcatttttgagatgtccaattttacatcctatgaaactctgcgagtattagtcgtagaccaaccattcaaaaggcgattcggtagagaattttgtcctctttctgataggcctactaaaaattttccagaaaaattttcctaacccccctaggaattttttctcgaaaatttccccgatttcaagccatttttgactttccaaatcaccatgaaggagtgatctgatcaagttggtgtaaagacttttttgatcagcactaaaagttagcttagcaggaattttttcagaattttctgcctacttggaattaagttttcattttcatcgagtaaatgttttgtcatatacttttgcacctaactaaaattaatttttaataccatttcgatacccctaacagttctttattatcctataaaatttcaaaaaattcgtcaagtttgaacaaagttattcccaaaagtacacaagtaaccaagtttcaaaaaaattttggccataacttttttgaaagcttgtgaatttttttgaaattttataggctaatagaaaattaattgttaaggctatcgaatgatattaacaattaaaattttcatttgatgtcttttttataacggctcagcaccttctagaatggctgtaaaaattgtttatttatttgattatcattgtacacttacgaactgttaatgtgcagcttggtaatatttgtggtgccgatcagcggaatgatttgaccggcgaacagttcccagcttcggtgttgatccgccatacttataatgtccaaagtgatgtcgcccatttcaaacagtggcttaaagcggcgtagaaatgagagcacagcgccgtcaatgaaactgaaagcagaatgtgatgatggcactcatgttgggtcggattccggatttttgaattttagcgaagaaaatctcgaaaataattcaatcttagagagcgaaaaaaagagttaccccaaaaagcattgaaatcatttgtttgcaaattatgctagtgaaatggataaaaaaaaggaatagattttcttgagaaatccacgtatttttgagcatttcaatttttaaaaaatgcaaaaatatgtgctaaaaattggaaaaaccaatggtatttttgcataaaaattccaaaaaactcattctttatcatttttgcccgcacaattgcaaataaaaaacatttggaggtgtttgggggtaaaattagtccttttttgataaattgtttttaaagataatttttccatcagttgagtaagtgccagcaagaaactacgatatccagtaacgaattaatgaagaattcgattttcggtacacgaaataaataaagaaaattttgaaagggcctataaaaatggcaagaaagttgatttttaggggtgcatttttgaattttttgtgtttttcttagatatttttttcaaaaatgccaaaatatgtgcaaaatatgtgccaaaccccgaaatatgtgcgatatgtttttatgtgcgaaaacgccaaaatatgtgtttttatgtttttataagtcgctctaaatcaaaaattgttcggagaaaatgctatttttgggcttctctcgccataactaagccgcaaaaaaaatatgttaaaacataaaaatcccagccctaataatga

SEQ ID NO: 18068 - DNA, 2493 bp, Heterodera glycines
attcagcgatgcctctttccctttgtctctcaaaaatgcccacttttctccttattcacgtgtttttgcatcgggtgctatttaatcacggcgccccctttcttctggctccttccttctttttttttctgcgtccacttttgttaatcgccaattttgccttctgttgacctatttacttttatcgtcgattttttccccctttggcaaataaatttggttgtttggtttgtagttccctttttgcctaagggacgagccactctctttggggaaatcgccaattttcgttgtttggggcattcctcgccccagggtcagcgtcgagagcagccaaattcgtacggggtcggatcaactcctctgatccgaagtccatcccctcccttcgcctccccattttggtgattggaatcgggacgatcccggagtacgatgaggttcacgcactcagagctcagaggatcatcggatgagatccgaagtgtactgatcaaaatgccaaatggccgaatttgggggcgcccagtgaacaaaatatgccccctcgaggagtcaccggagtcagaacgaaataggacagccgacatggacgagaatggcggcgccattgaggatcccgttcccccgggcacaactgcccattaaccgaggaaaaacccgccgaaatcgccaagcgaatcgaacaaagcatcgaagaggaggtgcccacacgggaaaccgatcccgggattcgacggtcgcagcgaacgcggaaaatccgggaaatcagagacccggatggtacatgccgaaaaaagcgcagaagcgcaaatttgcacaaccctgcgtcggattggcacttttggcagtgctaatgtggggagggaccgtggttagttgccagcccgccccacggaattcgagactgacggcactgttagactcgggcaatccaggaaaactgtgtgagatgagctgcgcagcacgtgggataacggtgcacagcgacaaatcggtggacaagctcgaaatctgctgcccggacggatgttggtcaacctcgcccaaaactctcgagaccaactacgaactaacggtcgagctactcattcatggctataattgtacgagcagttgttgggtggggaaaagttcccctaggagtgtcggccatcgttgtgcactaaagtcggaatgtgacttaatgcaatgcctctggtgctgggagcaactcgctaatccgaagtgcaacccgcgatggtcgtcgaccctatttggactcggaatggcggttgttttggtgatctgcgggtgtctgtggccgatgatcagccgatgtttgctcggagcgtctctgctgtggaaggtgatggcatgggcgactcggtagccaattcagggttttaatcgtttgactggcgggatgttcccgagccgacggctgatcaggtgaaaagccgagtgaaaaagggcgcgagaaatgccgggccgaaatcagggaggtccaagaacgactacagctggcgagacgggcacacgcagcagcccgggcctggagaaatcccgaacgaggacgggcacatatgcatgaggccgcaatggcattgcttccgctgctttgcttcatggcatttcgtcctcatccaggcccatctcggtgatgctgcgctcggaggactgcgcaagaacgccatcgggactcaaatgctcgggatccgcgggcacgatcctgactctgttgccatccgatccggttaactcatttctgatgaggtcagcccaggacgagctcctcagggcagttcggctacgtttgagctcaataacaatggtctgtgtgccaaaaacggagaattggctccgttcctatacggtttcaacagttgcggttaaaagatgcccagcggcgggctcctgtcatgacgatgagatatttctcaagccgaaaacgccaccagggcgttctttgcgtgttcaaaaaaggctttcggcatcatcaagccgttcgccttcacccgcactaacagttcggccacgaactaatgtgctggggccagcaacagcgttaacaaaacgttgccttatggtgcacaacggctggcactgcgctgctgctgcagcaaaacattttccggaatattctcattccggaaatcttggtgaccacaaatgcccccattgtggagctcttctcttcctacacgaagacagcagcctatgctgccaaaaaggaagggttgtgttgccaaaattgaacccacaccctcaagagcttatggagcttatcgttggtgaaaaccaaccaaaacagggtaaagagtttgtgcgacgcatgtcgcgttataataacttgctccaattttcaagtgtttccgctggaaacaagccgagccctgcttgtggtccgatggccgttatccttaaggcatacattgggtgtgcagctattttgctgccgtatggcaagacaaacgattccaccttcagactggtcagagatgtgtcactgga

SEQ ID NO: 18069 - DNA, 1605 bp, Heterodera glycines
agtgtccccccaaaaagtctctaattccggctggcgcgacccgtcgtcggtcgttcggtgttgaccccattttcggacgacggcggcggcggggtcggctggcagcagcagcacgacgacgacgtcggcagggcagcgcggctggcagcactggtggggcgggagcggcgacgacggcggcggcagcgacggggcgatttttattccctgccccgcaccagccgccccgggggctcttaatttttgcagtagcgctctctgctccgtagggctcctcatttttttgcgggtgcttcatgtgcacttcttcttgtctcttgagcaggcaggcagcaaatagagcacatattcgttacgcttgtttcgctcattaaaatttaaaaaacaaaaaataattatattttttaaaaattacagaaaagtgatcagtgggtttttttgactttggattaaaataaatgaattgaaaaaatgcttatcaccactttttataagcgtttttctgttcataaaatttttctcaaatttaaattttacaactttacaaatttacggatatttgaaaaaggcaaattttttaaattgatagacttaaaaaattttaatgcaaatttgtgatgtttaagaaacagccgagatttgtattccattattgcaatgaccgggatgggcttcttggaattaatcactcttttcttgctgatcccggatattgaaattgattttccaacctcattatcttttttcactttatccggatgtaatctcgagaaaagatcgcttttatgtaaaaaaaaacaaaaaacaataaacactttgttttacagaggaagaactgtgtaggaatgcattttctcttcatttttaaaattcattttaattaaatataatattttttaaatttttaatttattttttaagctgagacatcgaaaattgtccaatagttcacccacaaattcccccagcacatcgccaacttcgtccagtcttgtcaacacatcacaaaatgttaataataatttttaaaattaaatttacattttaatatattttttacaaatttttttgtgcatttttggcaacatttttctccaaaaaattgaaattattgcgtgcaaaaatgcagaaatatgatactataatattgtgcaatgtacaattctctgaatgccaaatgcattttaattttctttttactattcttttgcttctatttttttaaattttcattattgaacattcaatttttaggttttagaaaattacctaattattttaatttaaaacatattttgatttagtaaagctaatttgcatagtaaaaaagaaaattgttaattgtatattaaaaaaaaatttcgtttccttgagagacgacaaaagacactttttaataactcggtttaaagatttatttatttttaaaaaatcttaaaatatatttttttagcatatgaacacttcgccagcaacctttgacgacgacagatcgccaacaatcgccacaaaatcgcctcctccccccgccgactgttcaaattcgtccacttccatttcttcaacaaaatcatcgccaacacaacagcagacaaattcagcagc

SEQ ID NO: 18070 - DNA, 1096 bp, Heterodera glycines
  unsure (1)..(1096): unsure at all n locations
aacagccnccatttgacgacaacggcacgnacagcagaagaacagccgcatcaccatcagcaacagcagccggtgcgcaagaatttgatagaggtaaaaaagcaaaaattaattaaattaaaagttgggaccggcgacatcaccggaatttacatacccgtttccccgcaccaggcggatccccgggatttaagagtttcccatacaggaagagatctctgggattttcgtccccgttttccccacagggcagggatcaccggtatttttgtttcccgtacagggatcaccggtatttccatcccgtttccccttaaataggtccctgtgatttaatcccaatttattttttattttttttaaacgtaattagcaaaagaaaaattaataaaaaaaagtaatttaaattattcattaaataaataagtgtttgttattcgttattattactaataaataagtaattttttttttgcgtcattaaggaattaataaaatttcaatttattgtattcattaataaattaataaaatttaaattttattttatttctttccagaaactgattgaaattgaccgtttacctgaactgataaatttgcgtggacttcgaattcataactcggagagttcggcctctgaacgcctttcccacgtacaaaaaaatgaataaaataaacctattttaataattttatttttggacagattggcgacgaaattgtggaacaattggtggaatggaccaaattgttgcctttttattcggaattacctgttgaagttcatacttatttgctcacacatcgatgggccgaattggtgggaaatatttttattatttatttattttatttttaattattttttaaattatattaaaatgtaaaacaaattaaatttttctttttatttaaaggttttgttgtcaacctgcttctttgcccattgttcagctaataatgccagccagaataaacgtatttatagtttttttttaaatttactcttcaaatctataatttatttaaattgtaaaaattgtttaaatatatattaccanaaaaatttttaaatttaatttatcctttttag

SEQ ID NO: 18071 - DNA, 1190 bp, Heterodera glycines
tttggatttgttcgaatgtcggaaattatgccgatgtccttatccgtagtgacattgtcacttgggcaattgaagtcgcttcggcttcggcgttaatcctttttgagttggagatccaatcccatgattcgtttaactgcaacactctccaattagtgacccaaattatgtccccaagtttcaatgcggtgtccgaagacctggccaacgtttcccaaatttcacttaataaatcattagccacaaagacgaatcccgctctttcgtcttgaccaaaagcaatcacaatgactccgtcctcccgaatttggcaaactaccattttcttaccaccaccgaaattttcctcttcatctgatgcgcgagaattttcctttgaaaattgctcattctcgcttttatccgctttctcattttcattctcggcttggtccacactcagaactgatgacccgagggccttttcatttccttccacttccatctctccggcattcgccttttcagaagaatctcgaggccctttctcgaccaattcatcatccttttgggaaatgaccccaattagcgcccccatggtttcaagcggactcacaattttggcaatttctacattcatttggtcattttcgcccgaatttgcttggaaaaattcgtcttcctcattcaaaactgtcgacccgagggccttttcattggactccgctgttattggcacagacttaaaaattatttttattattattttctggattttgtttcacctctccggcattttggtcttcaagaagacgatcaaccgagtcaggagatagtgccaacatcgcgccgttgttttcgggtgaaagtgccaaaagcgactccatctgctgatcaacaggatgagcagtagcagtgcctccagcggcttttgagtccaattcctcatcagaggtcaaatcctcgtactgaattgccgcggccggtggttcaacagacggtggaggaacaggaggaagagcaagaccaactttgtccttattcgcttttttgtactttttgggcatttcaactgattgcttaatttaacttttattactaatagatagagaaaaataattaaataatgatcagagatgccaaataaggccataaaaaatgaggaaaattgaattttatgattaaaaaaaaatgcttataataaaattaaa

SEQ ID NO: 18072 - DNA, 772 bp, Heterodera glycines
aaaatgccttattggccgaggacaaacaagccgaagcgagtgacaatcgtcttactcaccttaaatgtctccaaatagccgctggtgaatgtagtaggacattataacggcgtcgaaatttgaataaacaatttatggaaaatgtcaagagaaaagtggagcgaaaataatatgttcaaaaaataacaaatatgctgatttattaatacggtaaatattttaagtagtactgtagcacaaatcttttaatgcgatgcaatataaatttattaattagttctatgtatacagtcagtattttaacaatttcttactgtagcaagttcaaacgcgtactgtgcctgcgaacaagcatttttgggtaattaaattattacatattttcttttgttgactttcattgtgaaatggcgaatgaaggtaaagttaaaaaaaattgagaaagtataaattttacaagcaaatctttgagtacttttaaatttgcctgtggttttgagaaaaaaatgaagaattggcgatatgtttaattaaatgttttaaataaatattttaaatttatttcatgtgaataaattaattgaattttaaataaggataaaacaaaatatatttttttaaactcaattcttgttaatttgaaaaaatttttttaatagtaaaacggccgggtgtccaacccagagtttaagagagatgcccattaaggaccatggaggtagtgccagaggaatggaagagggaaagagaagcgggaattgatgggtgaaaa

SEQ ID NO: 18073 - DNA, 1527 bp, Heterodera glycines
attaaaagaataaataaataaagaacgtcaaaaaataccccccctaagaggaagtgtttcaccactgattttatgaaatcttttaggcaggcttataacttgtttactataaaagcaaataaaatcattttatgctcattttgaagaaaaattctaaagattattctaggtttcgtttctaaaaagaattgaaatttttttcgggaaaggggaggttggtcgggattcggacctgacaaaaaatgggaggggagttcaaagggaaaagtttatataagataagtcatgggggccggtcaaagggaccgccccagggaaagcataaatgtgaaaagacaggaggggccaaactaactacataaagaataacattggtcaggcccataatttgaacccttccatcggaatttctcttttttaaattcttttctaactcgggtggctcacgtatttttacaaggtaaaaccccagaattttttaaattgtaaggcaatttctacaaaaaagggtgggtgccctctcacttgcgccccacacttttggccttgctttatttactccaaatttttttgtctgatttaaccagagttaccattgaattataaccccctgaactagagcactccacctgaaataaagcccatttttatataaataaaaaagtcaatttgccatgtgggcttttttaatttaagatttaaataatttaaattggtatcattcaatggctctaaactttatgtattttcccgcaaaatttcaaaaaatctgaaaagtcgggggatccacaaagtgtggggtcaaaaatgaaagagcattttatcgaacaattgtgatcagtcaccgtgataatgataaggtataagagttgaattttgtttttccatgtcattttttcttgttctgttcgacttttcatttcggcctcccatacaaaagcattggcgtgaaaattgccggcaacgtgacattgaaagggccctgttcagtgaccatggccaaataggttaaaaaatcttgttccctttttgcgctgaagatcagcgcttcaatcagatggaccatttcggcaaaacgttgcgccgcccccatattgccgtggttaatgcgcaaatggcacattaacaggtcggcatagtgatcggaccaatgctgcaaggtgcgacgaccatcaccggacaggccggaaattgctggaaaatttattttctttcgcaaaaaaatattttatttaataattttgaattaattttgtaccaaagataggccccgcctcctttaacccccaaaaactgcataagcgagagagtgttttcgtaggttatattctcaaataagacactaattattataaaacagcaaattggcacccgtatttaatcacaactttaattagttataataaaatgaaactaattttattattctcttattttaattgtattcgttttttacctgaatgtgataatatcaatgcgcggtgcggataaaaattcctcatctgaaagtcgtaactgattaaatgg

SEQ ID NO: 18074 - DNA, 954 bp, Heterodera glycines
agagagtgagagagaagagagagagtcggagaaaaagcgagagagagagagagagacagagaagggagagagaatgcgagaaagagagagaaagcgagagagtcggagaaaaaagcgagagagagagaagagagagagggagagaaagcgagagagagagagaagagagagagggagagaaagcgagagagagagagaagagaaagcgagagagtcggagaaaaaatcgagagagagaaaagtgcgagtgagaaagcgggagagagagagagagagaaaaaagcgagagagagagaagcgagagagagagaagagagagagggagagaaagcgagagagagaagagaaagcgagagagtcggagaaaaaatcgagagagagaaaagtgcgagtgagaaagcgggagagagagagagagagaaaaaagcgagagagagagaagcgagagagagagaagagagagagggagagaaagcgagagagagaagagaaagcgagagagtcggagaaaaaatcgagagagagagaaaagtgcgagtgagaaagcgggagagagagagagagagagaaaaaagcgatagagagagttagttaccgtatatttgtttgggttcaatgcaatattctccgttcctttcaaaaaatcatttagtgttggaaattgctcaaaaatcccatcgtaaaattctctccgaatgctaatgaatgagcgaatgtgttgctcaactgaatgcattgaacggattgtttgacagagcgccacacttttgtcactcaaagttgaaggaatttctaccaattgtgcagcaaatggtcgatcaactttaaatatttaaatcaaattttaataattgtttctttttcggtaaaatttggaattattatgaatgttttttaactcaaattatttgcattattatcatttaagtagcgaattagtcattaaaataaatg

SEQ ID NO: 18075 - DNA, 673 bp, Heterodera glycines
agtttttgaaacgaaactccttgtcaatataacatatatagtaactaggtgcacagttggcaatggtgtgaacagttttgtttttggtgctgtgagaaagcgcttcgcgctcagggacgcggcttcgccgcgtcgctagaaagtgatgtaatttagcaattcatcgcagcctcaggacgggcttgcttctttcggctgaaagtgagacgaaattgctattttaggtcttctcaattgaacgagcattggcatggaataacagaagtggaaaaacgcttttcattgtccaatttccaaacatttccaatttaagagatgatgcttgctcctgaagaggataattagtctttgaatttgtcgggccgtgacaattcctttccgccgagcctttcctcactaaacgattcggaaagtctggcgagcgaagacagtggagccagagagtgttaatggataacggttgccttgtttttagttcctacttctttttttaggacgagaattttcgccgtctgtctggcgaagtctaaatgctgaagaccttagcttgtgcaaccgccaattgtgaatcggcgcgatattttttcgcttttttgcgaacatggaaatgtgattatgataaaaaatctttttattttagataatttttggaaaaaaaaatttagcctttgcc

SEQ ID NO: 18076 - DNA, 978 bp, Heterodera glycines
tttttaagcatttttgattcgtaaacaacagacctttttagatcgcttgtttttaaaaaattcatttattttaaaatttttgtttattcctaagtaagttctttaccatgctggaaaatctttgtatttgttaagacccaatagagcatgggaagagcttcccgttactattttttagaagataataaaagtgaaatgaattataacatctaccaatattttaatgcctttttgcgtgttttattttggatcgcgtaaggtcgccttgtccctgattacaccgtataattttattactagagaccgagatttccaaatctgccggatcggactgatattttcaaaagcgagctgattccggatccagtcttaaatttcagacaacgcagattttcaaattgccggatccggaaccggattggtaaacatttgtattttcatttatggggaacattcgaccgcttcgcggcatcaggacgggcgcttcgcgcccgtcttttaatttttttgggaattcggccgcttcgcggcctcaggaacatgccgccccacccctcagaatccccaatcacactgggattctgagctcttaaccatgtctaaagtaaaatatgattgcatattcgtgatcagcggcccaaatatcccctaaaatcatatttttagaagatttttggtgaaaaaaattttccactcaaaaatcatggtcacacccctgtggtcccaaattacaaaatgacttttatttctataacttttttcaaaaaagtgataaaaatgccaaataaaatttataaaatagagcaaaaaattgcggatttttgtagtattttatttataaaaaatactttttcagaagggagttaggaatttttttctgaaaaattgaatttttctagaaattctggaataacttttttattttggaagatagaagtaccaaataaatcccataaaattctcccaatttttctctat

SEQ ID NO: 18077 - DNA, 1548 bp, Heterodera glycines
  unsure (1)..(1548): unsure at all n locations
aacgcacgaaaaacatggcttttcttttgttgttaagctacttttcgagttattagtgcctattttctaggcttttattcttagtgcctaaaaagcctaaaaattctgaaagaacctatttttgcctattttagcttttttccaaaatttgttaacaaaaatacaataaaaatacaaaaatgcacccttaagaatcgagcctaaaattttctgtttttttttactttttgaataaatttgtaattttacaccctaaaaaatgagatttttagtgcttattttccattttatcgcctattttgggctttttagggcctaaaaatatcatccctataacattactcagcatttgcatattaaacttccataaaattcttgtaaaaaattttcgcttctgtaaatcacatttatttttcatgtattcctagaatattttcttataatccctccaaaaaagatccaaaaataatttatttttagtttaaaaaagagaaattcaaaaatcagaatccgatgtctcatttctctgctctcttcgatttccctcttggattaaacgttttcattgctcatttatttcttctccaaattgttttttccattttgaaatgttcgttctatcaattttcatcatttttgcaatttccgtgtcactcattttcggattttcttttttaatttcgcaataaattttcattttttcttccttcgttattattttcttgcttatgccaaattgtttcttccatttcttaattactgaaatgctaactccaattttcttataaatttcggcataatttttctcccattcttttgttgaatattttcttttttgtttaaattcatttttcattacaatgaatttttgcacaatttcaaatttttcttcatcagtttttgatttgtagcttttctttatttgtttttgaagaccaaattctttaatccattcataaattttgtttcgatttgtcagcaattttttcgttattttattttcaattttattccattctttttttgagaattttcttcctttttgcttaattttttcttttattttataaaattttccaattatttctctttttttgagttcatttcgtttttcttcttctttttcttcccatttttctccaaatatttcatcaaatgttttttgttccaattttttatccactgacccaacataattaatattaattaggacgatcaaaaaaacacttaaagagaataataggcaaaatttcattttaaagatgagttatttcttaaataaaataaaatttaaaacattaaaaatgaatttattattttgatttgacagaatattattcatggcaaatacatatatatatatatatacacataataattatattcttagaataaataattttaagaagattgtanataaataaaaaataaagtaattccacgattaaataaacatttttatcctactgatncaaaaaaaattttattgctcatgaagtttttttaatgtcttaatttctttattttgatagcttttgacaagttcta

SEQ ID NO: 18078 - DNA, 1657 bp, Heterodera glycines
  unsure (1)..(1657): unsure at all n locations
tttttcgcatcgcccaaactgagtttttttcgcatcgacctagcacccattttttgctccaaatgaaaaaaactttaattttttgttaaatctaataatttcattaatgaaaagcaattcttgaaaatcaatgccaggataaatacgaaattaaaattgcattttgtgaaaacaatgattttgttgctactaatgttgctgcatctgaatatttgaaaccgcattttgatcaccaattttcatgcgaaacaatcgcttgatgctttttcctaaataatcaacataaattaaaaaaaattaaataaatgaaaatcaaacagtcaactaattatcacataccgaaacattttatattcgaaacaaatttgatacggtaagcattgatggtgcaaaatgatacgattggatttaaagcggacggtaaaataattggaaaaggtgagagtttgttgtaatacagaagccaatcccatccttgtatatcaatattgaaaagcagaaacgcaagttgaaaatttaatgaaaaataaatgatgatgggcatagaagcctaaataataaatgtaaatttaataacaaaatattgaataatttatatttaaatagtacaaaaaagtgctcaattaacctaaaaaatgagatttcgagaaacttgtttattcacttcaatcatctttttggctatttcagaagaagatgaaacgcttcaaacacaaaaattaaaataaaaaataattttaaattaatttaccatttggttttcatgtccaagaattttttgatacaatatgctagtccaaatattatgatataagcaaaagtgcttataatgacaaggtaatataaacttaaagccaaatggatatcctaaattaaaaaaacgaatttttaaattttattgatttaccgttacattaattgcatatgcagccaaaataatttggtcgtcgagatttatgcccaaaatttccgcgacagatttgtcgtccaatattgcgtgatcagccggtggaaaaaagcaaatgaacatattaacgcaatatgcaaacgggaacaaaagtatcagaaaaagcagcaaaaaatatttaagggacgaaatttttttgccacttaattttgaaaaattatttttaagtttattatatatatattatatatatatatataaaaataattagggattttttttaggcacaaaaaatagcgaaataggcatcaaataggcaaaaaaaatttaggtataaaacacgtaaaaatttaaatatttcaattgtaaatgaaattattaaataatttaaagttttttctaaatacggacaaatttttaaaacaaaaatttttattgagaaaaaataaacaaattttggaattatttttttgaaaattatttcaattctttggaacgtattttctgaaatttttttgggtcatttcttaggggtgtgtttttcgtttttattgtatttttgttaaggattttcgagaatcctgcaaattggcacattaggcacaaaaaccccgaaataggcaaaaataggcattataaaagtcatcgtagacaccccaaaccaagcggaannacgcgtttttcgtgcttatctttgctttacaatgcgcaaattttaggcatttgtctaaaaaaagaaatcctaataat

SEQ ID NO: 18079 - DNA, 999 bp, Heterodera glycines
cttcataataattttcaagcagtctccatgttgtttattaacgtgtcgatgatcgagaaactttttttaattatctatactattatattaaaattgctaaaaaaattttaacttaaatatttgacttatctttttaataagaaaaattgttcattttttttacattaaattgtatttcatagtttatgttttaattattccaaaaactcttgccgagaaacccaatgtcctcttctttattacttacgcaaaatattttagcttcatatgccttgcccaatgaatattatattttatgcttttcaaaagtgatcacattatttttattttcaatgaaattatatatttatctttatttattatatgatttcactggattactttataacaaaataatttacaatgtaaataatacattaaagaaatatgaaatattaaataaaaaatgattttttatattttcactcatcgaatttcttcttgtaactttttatttattattttaaatgtttttcattatttaattaaaaatgttttttcatatttattaaattatttttaatcagtccacgtgtgtcgagaaaagtaataatagtcattcgaaggtcaatagtttctttttctcgttgagcatcgagtcttcgcggtatatcatgaatgttcgtgcttcagttatctgtttcatttaatgtatcaaaaactaataaattttataaaaaattgaaaaaatatatatacatactatttataaatttttcattcaattttttgcaataaaataacatgattttttaaattattttcaccgagtaaggttttaagattaatattttaagtgcataataagtaaacttcaaatcatattcaattttaacaattatctatttgctcttaaaagcttttttgagtgattgaattttttatcattattcattacaatataattttgaattaatttttaattataaacatttataaaaaaataaacaagtatttttt

SEQ ID NO: 18080 - DNA, 1620 bp, Heterodera glycines
  unsure (1)..(1620): unsure at all n locations
gaataactttattacttgcttatattatattaaattaaaatttaaatcaaccctgaagcttttacaaacaattacaatcacactgaataaagtttctttgctgattaatcaaacattgatgatatttgttgattttatatttttttttgtatatttctttattaaagttccataatgttaacttttcaattttttaagatatcattttaatttatactgttaaaaacaataattttttaaaaatatttaaaagtatatttaaaaatatattttaaagtattaatattattctcgtgtccaataaaacgaacggtcatgaatcatcgaaatgtactcttatttaatatataaatcttttgttgtttaattttatatgtgtatagagcccagcaacaatgataatttttcgtcccatttgtcaattttttaaaaatattagatccattttgttcattatttatatctttcacaatttcattttttatacgcatttttaatttgagtttttcatttttaattagaataataaacgttcccattttgcaattattttcaaatatctaatgtaaatataaaatttaaatttttttaccttatgattaaatcatctttctttaaaagttttttttttcttttttttaattcattagtttaaatatttaaagttcatttaattttttaatgattttttcaaatttcataaacatttttacataaggaataaaaagttttttgttctcattagtttaaatattaagaaatttactaattaatatacaaatactgttacaatttcataaaatgatatacaaaattatgtttagcaatcaatccttttctagggattttgccttcaaataaacatttaattatattagtttatgttttccatataatttatttaattttaattttagatgctatttgtttttattaattttttaattaagatattttttcaaagatagaaatttaaaattatttttttctgattcttgaatttatatactttcttcaaaaatattatggcatttttgcttaaatagtttttttatcttgtcgggtgcaccacctgttctctttgccatctgtttttttaaaattattaggtggcatattcttgtgttcttaaaacccacgttgtgtgggttcttttgtcaatattttgtagagataaagcaacattcataataatattattcttatattcattaaattctgtatatttaattttcgtttattttaataaatttgaaaatataaaataacaaattagacgaaataaaaaaattgtattttcctttatttctttgtttcattaccatattatttaatttatcttaacaaaatattaataaataaattgacaattctcgacagtaatgcagtagccctgaacgcgcttgattcactcataaatagcattgcattttttgtatttcagtaaaatttaattattattattatttgatccaaatatgcaaagttcagtgttgttcgtctcgatttagttttttaacgttattttattatttttatggtttaaaagacgaagaaatcttggagagtttaatctaaagttgatttttccttnatgtattaagcttagcttcactttca

SEQ ID NO: 18081 - DNA, 910 bp, Heterodera glycines
aaaaattctgtatgtttaaatttattataaacttgtgtctatctgtgatgtcattatttaattggtattttctgaaaaatacccgtgaaataaaaattatttgcctatttaaagccattttattccaaaaaattctgtatgtttaaatttattacaaacttgtgtctttctgtgatgtcattatttaattggtattttctgaaaaatacccgtgaaataaaaattatttgcctatttaaagccattttattccaaaaaattctgtatgtttaaatttattacaaacttgtgtctttctgtgatgtcattatttaattggtattttctgaaaaatacccgtgaaataaaaattatttgcctatttaaagccattttattccaaaaaattctgtatgtttaaatttattacaaacttgtgtctttctgtgatgtcattatttaattggtattttctgaaaaatacccgtgaaataaaaattatttgcctatttaaagccattttattccaaaaaattctgtatgtttaaatttattacaaacttgtgtctttctgtgatgtcattatttaattggtattttctgaaaaatacccgtgaaataaaaattatttgcctatttaaagccattttattccaaaaaattctgtatgtttaaatttattacaaacttgtgtctttctgtgatgtcattatttaattggtattttctgaaaaatacccgtgaaataaaaattatttgcctatttaaagccattttattccaaaaaattctgtatgtttaaatttattacaaacttgtgtctttctgtgatgtcattatttaattggtattttctgaaaaaataccgtgaaaaaaaattatttgcctatttaagccattttattccaaaaaatctgtatgtttaaattta

SEQ ID NO: 18082 - DNA, 840 bp, Heterodera glycines
ctccctccttgctcaacacgcatattttgttattgttcaagcccaacaaacttatgttaatggtgtcattatttacgctttcataaataacctattttttgtttttgcacatccactttaccccccccccccctaaattcctttcgtatccccttttctccattttcttcatcataatcatcattttctctctctctctttctctcgacttcacgcgctctcagctctcaatctctctttctctctctctcccctacactctctcctccttcctcactcttttctctctctctctctcttcctctcttcgtgctgacccctctcattctcttatctatgctgctgccatctgcaaacgcggacggaccctcaccccttccgcgccgagcggcgcggcacaaaacttttaccgcccctcctttcgtaaaatttttcaccaaccctcaccaccgacactttaaaaaaaaaatgcggtaaaaaaagttttatcccccccccctctcaaaaaaatgcggtaaaaaattttgtgaaatgatgcggtaaaagaaccccctcccctcactctcgcgcacccccaacccgtgccacaggcacggggtcgcgcgataaaaaattacatcaaaggcgccgaaagcaatcaatcattttcacaccccgctactacacttgcaagctatatacaaatgggcaaattgttgagccgcgagggtcgcgcgagttcggatgggacccatgcttccaagtgaatgaatgcttatccaaatttattttatatccattcattctttagcccgatggatttcaaaaaacatttgcagaaatgatcaaggatgaaaagaa

SEQ ID NO: 18083 - DNA, 1602 bp, Heterodera glycines
  unsure (1)..(1602): unsure at all n locations
tattagaacattttaggcaacagctgaccagcgaaaatcaaatggaaagcgaagaggctggtgaaattgtggccggaccaggtaattaggatagcgtatctcaccaattacattaaccagcgatcaacatgatgatgatcgcactgccaagtctgaaccggaaaatgtgccgctacgaaaggcaccggcgcgcgttggaggaagcgggtgggacaaatgggggaaataggggaaaatgggggacaaatagagagaaaaaaatggatacaaatgggaaattaaaggaaaaagtgcattttcagcactcgcagaggacgacggaatgtcttcgagcgaatcgctgtcggaagacattcgaattttgaccaacgactttttctccgaagcgcccacttccaactcaaagtgcttaccccttcttccgttttctcattttccttataattcccccattttccctcttagagggtccgcttctttgggtccctccggcggttgtcccagtgccacactgttcaacggttttcgtgcctcattttcgggcgtaattgacatgcgcaaaaagtcaatggcggatgaaattgtgccctcaatttttgtgccgcgcaaacggtcggcctgcgactttggcacgttcagcgcattacgagaaatgtcgcgccaaaacaccgctccaattaaaatacgcgtgaccaccgtccgtggtactgtactttacagtcattttggaatacttttgtggagattttttttgtttcgggcatttgattgtaaaacaagtcattttgatgttttaattccgacagatgacagcagtaaacggccagagactgaaattgtccatcgttcgcagcttttggcgcccgaaagtgtcgcgtgggcggtgccgacgacgcgccaaaattcagcggaagtgccaaaagagaaaagcaatgcgcaaccgctaaaacatcaacgtaattgccaacggcacgcgccggcaagccgaggcaccctttcgtttccgctggtcaaacgaattgcccttggcagggaaattcgcggtaatttgggagaataggcaaatgaaacgaaatgccaaatttagtgaatcattatttgctgaatgacggggaggacttgaccgatttaattgtgccggacaacgaagacggacaaaaggggacgaaggagcggcaaaatgagcaacaacaaaggccgaggaacggcacagaagtgccaaaaacggttgacatttcggaataggaaattaaatactaatgcagaaagtgccacagcccaacggcacccttttcggctccgcgtcctttcgcggtccgtcgcttaacattccttcggtgcctccttttcggcgcggcctttcctccattgaattggcacgcgcgacagcagacgacgaagcgtataatgacgaagaagcatccgaaacgacgtcaacgaggggtgggggatgaaatgccanagttggcgcaaaaaaaacaatttaagcggccgatgaaaatggggtaaaagaaagagaaatatccaatggngatgccatgaaacaccgcagtctcaacaagtaccgtaacaaagtcagcagaacaagggccgacgcaacgt

SEQ ID NO: 18084 - DNA, 1157 bp, Heterodera glycines
ccccccccaaatccgttgattcaccatttcttttgccattgctttccgtttctccgtttaaggcacttttctgtgctgttgggtgccattcttctcgctgaacattgccaatgctttgtgcattgaaatgggtgccgattggtgccaaattggcttcggcccctttttctactccacttggctcggctacatgaattccttcatgaacccactaatttacacaatgtcagtccccgaatattctttaattgattaattagtgcttcttttcagttttaatgccgaatttcgtcgcgcatttaaaagtttgctgttgggtcggcgcggaaatgtttttgccagacgaatttaaaagtgatgcgggggaaaatagaaagaatcaaacgcattgaatgccttttgtcgtctaaaatctccgaaaaatatttataaaattgaaatttatcaacagcaaaaaaaaaaaattcaaataaattattaaaaagtatttttctcttttggtcacttcgtcctgtcaaaatgattctttttttaacgaaaagcagaaaatacttcaaaaatcattctctggtgaaaatacaaaacatttggagaattcggtacttcgattttgtgcacaccctaaaatttataaaaatgtgaacaaagggcagacaattcgaaaatcggttctcttttgaacttgtcgagagtccattcctaccttaattaaataaaagagttatcaagcattaatatttcattatatgtaattaaattttgtgaaggccaaatgaaaaaaaaaataatattttgaataaaaatttattaagaatgcataaaatggaataaatataataattagaacaattaattaaatgtttgtttctttgcactttctctgtttttccctcgtccttcactttttctttccaagacctccaaaaaggctgctgagtcctccgagtcccccacctttccgttgaaaattcattaatcatttaaaatgtgccattttattcaacgtaccgctgccgaaaccgccgccgccgccgccgcacgagggacaacacgaatagcaaggaggaggaggagggggaggaggagaactgaggaaaaatggaagattagaggaggagggagagaactgaggaaaagggtggggggggggaaagtcg

SEQ ID NO: 18085 - DNA, 535 bp, Heterodera glycines
attacggaaaaaacccaatccattgcaaattcaatgtggtacattttttgtgccattaatcaaagctgcgtttcacttctgctgtttttgactttgtacaatttgttgtccactgatggctgagtttctgctaaaaatagcatcaaatattttaagttggggatgaatttttaaattttgcattgtcagaatcgcaacaaatgataatgcacaaaatgccaattgaggaaagtccagcacccgtgccgagtctgtccgatcccaccctttttaaccccccccccccccctctcccccaccattttccacaatgacatccacagtaaccgtcagaatgtccttctcctcgtcgtgccacccattctcggaactcatcaaatcctaaattaatttttcttatttaaatttacaatttatgtttaccctgaatgggattttgcataaaagtgtactttcgttgacaatcgatggatttttttggaacaaaatggcgttgggtctgaaatgtgtgccgctttatcttgcttttgtgaaa

SEQ ID NO: 18086 - DNA, 1983 bp, Heterodera glycines
  unsure (1)..(1983): unsure at all n locations
atgggacagtaaaacggggaacatttcttcgacagtcaacactttggacggaactgtcaaaattataggcaaaaatcaataaacgaatagtcttactgtacccaaaaacagtagtcaaaacaagaaaatactgtgtcttgtgaatttaataaattcaattcgcgctatggagaagcatcaatcaagtcgtggtactactcacaaagcagtgtaaataattattatggataaattgactacagtaacaagagtaggatcggattccgttagtcggagcgtttttgggcaaaatttcattaattttttgagtctccggaaccacccttacacacactcaccaatgattttcagaaattcatcctgtgccattagtgggaatcgaatagccatcaaaattgggccaagcatttgccgacgattttcccccgaacattcgatgccattttgacggcaccgttcgtcagcccaacgcagtgcctacaatttaaatttctcaaattagcaaaaacattgaattcctatatttgttacgatatacaacaaaattcttaattatgtcaaaataaaattacgaaattaaaaagtgcccgaaactttttcgtaattgtcagactttaatgagatttgaaaattaattaatttaataaaattccaaaatcaaatttaagtgagttaattccattatattgttttaacattatcaatttcttacggcttgccaaatgaaactttcttctccaactttgagctgatcacggctcagaatctcacagaaatattgttgataaattggtaaaaaatcatccgatctgatcagtatttgtgctttttggtcaatgtaagccaagcatcgatcagcaaattcccaaaataaaagtgaaattattatttaataaatcgaaaattaatttttgtacattttcttgcaggagacgagcttgggcaaaggcaaggaaaacatttggcaattttgcaatgggaaagtcagcgaatccttcgatcagaccgatgatggcatattttttggctaaataataaataaataataattaatccatcaatgaaatcaatttaatttttgacccgcataaaacacagccattgcattttgtccgtccaaaacactcaatttgttggtgtaaataaagcgtaacatcgccttaaatggcacggcacaaaccttaaggactacagaagagccaatgacagcagtcacctttggacagttatgaaaaagaaataaggaaatattcaatggggtgcgatcctttcaaaaaattactctcgtcttctaccctccctctctttttgtgcactgtttcgttttaaaaattggttccgaaattttttgactctaagaaattaaattgtaaaaattcaaaacttaaaattctcctctgaagttttgaacttggattaaccatgtttttaagtcccaccgtgaggcgggacagttccaaaatttgtaccacatttcactgtggaaagtccaagtaccttaattggacaattacttgtcgacgaacacagtcgcctctggcctcttatggaacagaaaagggtgaatatcagatggggtgcgtcccttcctaaaaatttctcttttcgtctaaccatccctccctttttgtgcactatttcattttcaaaattgggaacattcagaataataaaacgcattttctgaaagatggggtaaattaagttaattttaattcatttatgatttgcaaaatcaaattctgtgcaacttatttcccaaaaacacgaatatcagaaggcataattatgtagaaaacaaccagtaaaataaattcttataaggttaagtcgtttcgtccccaaattaaattcttttttaaaattagtgcttattttggcattttttagagcctaaaaatccgatccctagntaatgaattnantaaaatacttttataaattgagcaaataacataacataattgaaaaaacataaatcaa

SEQ ID NO: 18087 - DNA, 2368 bp, Heterodera glycines
  unsure (1)..(2368): unsure at all n locations
gagcatttgtcggggtttaatccggaatnccaaaatttccgattcgtttgaaaacttcattcaaatgtttncgatgctcctcatgtgaacgactgaccacgatcatgtcgtcaaggtaagcaaaagcgaactgacaatcggccaaaatcgaatccatgatcgattggaaaatccctggcgctgatttcaccccaaatggtaagcgcaaatattggaaatttcctttgtgcgtggcgattgtgcacagttctttcgatttctcatccaattcaacctggagatacgcatccttaaggtcgatctgagaaaaaattcgtcctccattcaatttggagaaaatgtcttcgggcaacggcaatggatgctgattcaaaagcaactcgttgtttaagcccgttgaaaaatctgcacaaacgcgtgctgctccgttggccttcttaacaaccacaataggtgcggcccaacgggtgtgatcgatcggtctgatcactttctgcgccaacaatcggtccaattcggcctcaacaatcaaacgtgtgttgaatggcactggacgtggcctgcagtacacgggaacagcatccgctttcaattcgagatgggctttggctttggtgcagtggcccaggccttctgcaaaaacatgcggaaaatttgactgaaggtcgagcaaagtcgtgtccttcttcgtcaggatttgactcttcattcggtccttcccttccgcttgaacgacattcactttcattgccattttaactttggctctgaatgtgtccaataagccaaaagcgtccaaaatgtcgattcccaataaatttagtgaaccctttttggtcacataaaattgtcctttgtgtgtgtgtcctccgaacgtaaaagtcgcaaaacccttccccagcagggtgcattcagttccatcgtggtacttggcactttcgctgcattgaattagtcggggacgtccaatttgaagatgtgcttcttcgtcgatcacggttatctcagctcccggatcgaacacaaaatcaatgggtttgccattcacatcaactggtgcctccacaagacggctcggttggttcagtgcgttcactgaaatacctcccagttgtaaagcattcatctgctttccttgcgtcggctttctcgaatgcttcgaaagccattctcgatgacgcgcacacatattttgcaaatgtccaacttttgaacattttcggcatgttgctttcgcatgaggacaacatcttggttcatgtccaccgccacaacgccaacaagtaggctgagttgggcttttgtttggttccctcttctgaaatggtctccgattgatcgccaaaacattcgaatgggatgggcgctcaatggccttagcttcagcaattgttgacaggaacatctgcaagtcactgacgacattgtcgtactttgctttgtcgccgtctgctgtcagctttcccaaaattcgcttcctcagttcggcgtctttcggcgatttcagagcgatcagaagcatgaggcaattgaactgctcttcgttcagcttcttaaaatcaaaatcgcgaagcagccgcttgtggcggttgacgaaagcacggaagtcttcgtcgtcctgcttcactgcccgcaaacattcgtatcggtcaatccaaaccgattggggcttggcaaacaaacttttcagttgtgccgatgtctccgaaaagtcgaactcggtcggcttcttcggcagacaaaatttgctgtattcgttgtatgctccctcgctcaatttcgtcagcaccagcttcactttcagttggtcctggatgtttgatgaagagcagtcgagggccaacacaaaacggtcgatccagctttcgatgttcttcccagattgatcatcaagatcaaaacattcgacgtttgaaagagctgggagttgagttgattgagctggcgcggcattcgtctgttgagcaatcagcaattgttccactagtttctgctgcttggccagcaatttcgtcaattcatcaattgttggatttgctgccatttttgtcgttcaccactcttatgtttgcagcgcctagatacaaactgagtgggtgcgcgtggatgagctaataaatgtcgcctagacaaattatcagcagcgctaacttctactgattgctaaaagctaatcagtaaggatgacgaacaatttggaaaattcaaatgccgactggctgaagttcgctccgatgaaatttggaagaaatttgttggtgctaaaagcaaatccaacaaatccaaaacagacgaaatttctttgaagaaattaaatgtcgaaatatctgtcacgggcgtcgccaatttgttgtgccttttcacttga

SEQ ID NO: 18088 - DNA, 2962 bp, Heterodera glycines
tttttcttgcgaatcaggcaaaaatggactcttgtgtttctaaagtttggaagtgttttgaaaaaatttcacaatctatgaatgtacaatgcaatttatgccaaaaggttttgaatcgaggagatgcatcgaccaaaggaatgtggagccatttgaagtcgattcatttagaggaatacaatgaattgcaattgcaggagccggaaaagccaaaaaataaggttattatttaaggctgtttagtttatttcacaaattaagacaattgattcctttttgcttaaaaaacatgacgagcaaaaggaagttgaggaaatgttgactaattttatggtccagcaaaactgcgccttttcagtttttgaaaattcaattcttctaaaattaacgcaacgtgcataccctaattttgaggtttgacagtcagccactatttagaatgagatattattcagactcgcagtgaatggcattttcgaaaaattgtgattccaagaatggctgaaaatcttcaacaaaaaatcaaagacaagattgggactggttattacagcatcacaagcgatggttggcaacaacctacaaaatcaccctcattgcagaggttattactaattaaaaactataaaaacctaatcaatgtgatattatcattttttagtgtgacaattcattcagtcgatgaaaattttgtgcgaagcgattttgttctcaatgttgcgccaatatatgatgctcacaccggcgaaaatctcgcagaacacatcgaaaagtgtttgattaataatgggttttcaatggaaaaattggttatgatggtcagagatgacgcaaaaaacatgatcaaaacatgccgaatattagaaattgaaaggtaaaatataattggtaaaatatttaaaaatattgtttagctttcaatgtgttaaccattttttgcatcttacaatatgtgatgttttgaaagaaccgaaattatctgatctgatcgaaaaagtgagagaatgggtgaaagagtgccgtactacaaaaggagctgcattatttcggaaaaagcaaaatgaacagggtcaaaaaacaacaaaactgatcatggtaaaaacagtaaaatgaacatggcgtgattttttaaattttagtcagttcccaccaggtggaattctacctatgcaatgctttctcaatttcgccagcaaaaaaaagcaatccttgcgcttgagtttgatagaatgcattcagaaattcgaacggttaagcgggcaaaagtcgaaaaaatttctaatgatttaccgagaattgatgcagtcgattttgatttattgcgtcatgtctgttcgattttggacatttttgatgcggagactcgaaaagttagaagattttcatctcaaacttagttacaatgttttatcaattttagttttctactgaaacatccatcgcttcatctgttatcccaactctaaaaaaaatccgtgactttctcgcttttactccattccacccatctgttcaatttcttgccacttcattggcaaatgcaatcgatcgccgtgtttctaatctggcacataatacagcgctccaaattgcaactattcttgacccacgatttgcgtatgatgaaaacatttggcgtaaaagcttatgggcagatattgaggaagaattgaaaaattttgccaaatcaagtccatgaatatttatttttaattttcaattttttgaattcagttgagggccaaaaaaatgtgtcggtcgatgatgagcatttggatgatcaaaatgccgccttttctggcttagttcaccatgataacgtcgatttgagtgctttggacgaaggtggaagcagcgatgagagtgttcgatgttcgaaatattagcaattttttttattttattgcatttaagatgacatttgggttactcctaaatcgccaggtgccgggtcaattccatcaacactttcgggagaaattaatgctgatctcaattccaaaattgaatcacaattggctcattacaaggccattgttcgtcctgcaattgactctgatgttttttgttggtggcgcgaaaacgctccaaaatttccagaattggcaaggctggcacggattttcctaacagcaccggctacttctgtttgtagtgaacgtgtcttctcgaaagctgggctcctttacgcaaattcgcttagaaatcggttcaaacattttgtcttaataaaaaattttcagtttaaggctttctggtgaaatggctcaaaacttgttgatcattaaagcaaacatgaacaaattgtttttgggaccatctaatgatatcgatgacgaggaaaaggatgatgaaaataatgatactgaggccaaataataatgagaaacgcatcattcataaaaattaatttacaaggccattgttcgtcctgcaattgactctgatgttttttgttggtggcgcgaaaacgctccaaaatttccagaattggcaaggctggcacggattttcctaacagcaccggctacttctgtttgtagtgaacgtgtcttctcgaaagctgggctcctttacgcaaattcgcttagaaatcggttcaaacattttgtcttaataaaaaattttcagtttaaggctttctggtgaaatggctcaaaacttgttgatcattaaagcaaacatgaacaaattgtttttgggaccatctaatgatatcgatgacgaggaaaaggatgatgaaaataatgatactgaggccaaataataatgagaaacgcatcattcataaaaattaattttttgtgaaattatttggaattaattcaaatcaaacccccgcccccgcccccgcgggggcggaattttcgtgcccccgtccccgcccccgcgactctgacccccgccatcccccgcccccgcggaaagccacccccgcccacggggctcgaaccctacattt

SEQ ID NO: 18089 - DNA, 3085 bp, Heterodera glycines
cctttgattgtagtttatttataccttttttcgctttaccaattgcaacaccttctcttgcatcatttctctttgtgtatcgtttaaagtcgaacccttgacctttttgggcatttatgttgttggctgctttctctagcaaatttttgagccccgtttttccctcactaacaagtgactctttgaggtccctaccctctaatacattggatagaactcgatttccagattcaagtccttggcgcccgatggctgtcccgatttctttcccaattggtattaggtaacgcaatagactcctaaaaacagacccgataccactaccgcgctggtatggaacccctctgaacacattataaccaccgtattggacgactacttctggagaaatttgggttaatgctgaccattcaactttaaaaggatcaaaatcaacgtgcatttttctttcttttttttgttgcgctttttaaattgagttttctagttatttatatttgtttaaacacatttttttgcataaatttgttcacaaaaaaatctggtgatatttttgcgcgttttagcagttgcaaaattgcttcaaagtgcatccccatacaccgtccaaatataaagaaaatcacatgctttccgcatgagtgtgagtatggtgcttggagcgaaagttgatgaaactgaatttgagcaaaactctttaaaaatttttggatgaaagggcttagcggtggccaaattcctgtcgaatcgtagtattccacccgattttgctgctcgcaatacacggcaacccaatgtgaaccaggcgaaccgctcggatcaacgttaatcaccattgagtaaggaactggtgttgttgctcctgctggaatttgatctgatggaaaacaccctaaaaaggtcgaacgcgtgactgggtttcgagcaagaattttatttatttgaacactgttcatttttaaaagtaggaactctttctaaagtgtagcgttaatgtacatgtaccgtattgaaatggcattaagttaccaccggatgttctgatttcgatgaaaatttcacttatttctttgactagtacgcgatggtattggacggagagaaactgctcctctataatttcgtcaggttttccccgaatcgtaacgatacgcaaaactggggcaatcacgtcaccaatcatcattggttcaattagatcaggtgcataaacatgaaaagaagcaactcctccactcatgtctggcataaattttgcaatcgtttctttttcagtgaattcggttgagttaaaacccaaaatgtaggccaattggtctgaaatttttattttttgcacataacgatcgtccagtttcaacgaaaatctgttcgttgcactgtcaaaatgtaggaaacatgcagagtatgctgattggaaaacttttatccatgctgtcatgcctaattctttggtttgatcgagaattgtcctttcttcgtcatccatcagtgcaatttccgcattcaacttttctgttatcagtccctctaagtgttctaaattacggccacgtagacgcaaaaaatatttatcaagctttttctggtattcctcttcagtgtcatcccaattccgcagggggaccttgcttgttgctgcacgtttttctctctcaagtagaccaccactggttgccccgtaaaggtcaagcaacgtgtcaacccccgctaaaagggcgtttaataattcttcttcgtttttatcatcatcatcatcatcatcattaacatttcttttgtctctttgttgttgttgttgtttattgatgtactcggctctgcccaattgacgtgctgtattggccgcttcagtgaattttttctgtacgccttccactttaactgcgaacggtttgttgccttcttcaagcagtttgtaaagacttttccaaagctcaacggggtttgtcacgttagaggatggaattggtatttgaacattctctccaattttccattcaatttgaacaaattggtcctctgatgtgccgagtgagggccacgaatgggggtatatgatcacacctaagcccacatcccattccgaattaaattgaagttttcttggtagtcgaactcgaaaagagtttgtgcgatttccttcaacatttgtgttggaaggaacgatcacatagaatgagttggatgaaggcattctcatttgaaatttaaaaaaaaagagccccctttatatatttttccatgtcatggagcttgcaggaatccagctgttgtgccgttgactgtagcctttccatttcaccaaaacgtattcaacaccttgctttttcctctttcggacgaccttttcaatgtcatatagggtatcatcatcatcatcatcatcatttttgcgcactagcacacgacagagatcgttggcatagaaacggcccttgatcagggaaccgtcgtcatcacgtattcggtacgtgacgggaaagcggtcagtgtgcacttcggcaacagtgaacacttcgttggtgaagcgtccggtgtagcccttttggaacacgtgtttgtacttctcaatgcgcacacggtcacccaccttaaaacgtggttgtggttgtttccgttttgctgctgctgcttccgctgtcccaccaatagcgttctgcttgagttttttcctgagcttttcggcattctcaaaattcacatcaactgggcgcatttttatgcttgagttgtacgagtggtttattccatgcacaatttgctgtatcacatcaagccatttttgggttccccgttccgtgaaatagcgataaaggcgttctgtgatggttcggttggatcgctctgccatccctgcgtgaatttgagacgaggtgtacatagaagaaagtttttcacgttggttattttatgaaatattccagaacctattttgcattaaattcgagcccttggtcggtcaacaatgtccatggtatgtatttggagcgtattaaggcaagtcgttcaaagagcaagcaatccatgtcggagctatttttgcattttcatcgaaatggacaaagagctgtctgctcagtgt

SEQ ID NO: 18090 - DNA, 3282 bp, Heterodera glycines
gactctagtcaaaaatacaaaaaatttcttagataagattctcgaatcgtatgggaaaatctgctaactagttccgtgtttgagttccaattttctttatcagaattcgaaaatcgcaaactcctctaatgtataagaaaaagcctgcgcttatcattttaattttcaaaattaacaagacttataccatatagaaacagttttttttaaaaaaactttactgtagaaatcaatcactgtcgaaaccaacactgtcgaaaactaacagcaccaggaaattaagcgtctttcgactaattagaaaataattttgtcttttgacttccatcagtagggatgggatttttatgtttttacatattttttctgcggcttagttatggcgagagaagcccaaaaatagcattttctccgaacattttcgatttagagcgacttataaaaacataaaaacacatattttggcattttggcacataaaaacatatggcacatatttcggggttttggcacatattttggcatttttgagaaaaatttgcaataaaaatacaagaaaattgaaaaatacacccctaaaaatcaacttttttcacaattcttatagaattttcaaatttttaaaattttttttcgaatgtagaaagtaacaaaatcgaattcattaattcgtcattggatttcaaagttctctgctggaactttcaatttataaaaatgattaatcaaaaaaaagatcaatttaccccaaacactttgaaatgtatttgatttgcgttgtatgggcgaaaaatgataaagaatgagatttttgggaatttttatgcaaaaacacacttgatttttccaatttttaacacatattttagcacatattttgggatttttggggtttttagcacatatttcagcattttttagcacatattttattacatatttcaggatttttagcacataaaaatcccatccctattcatggattataataatataaggagaaacagagattatttaaaagatttaaattgaaaaaaaactaattctttaaaaataaaataaatatacaatatttttactttcgctaatctggcgcatttccttaatgtgtcatttttatataatttaaataattatttatttgaacttatcgattgaattttcaatttattttaataaatgataaaaattattatatttttgccttaatattgcgcaaactgtttattatattaatttaaaataacatttttagtaaataatgacaacaatatttttggacaacccactacataaactgaacaacattggaatgacaagataaatttaaatgataataagtatataaaattttattaaattatattaaaaaattcaaaaccttttatgaaattttaagtcaattaaatttgaattaagaaataattaagaaatttaaaattagcgaaataaaacaataaaaagaaggtcgtaaatatgtaaaacgattcaagtaaaattgtccctttttgttaaattattacagattgttaataaataataaaatataattaatatcaaaaaaaataaataaaatttctattttagataaaaataaacgaatgttatttaaatctatgcttttttattatagataaataatttctttttaatgtatttgtattttcagttctttttctcaactggaatttaatatcatttatacaaaaaaaaaatcttgagcaaaaaactgcatggactaattgaggacggataactgggcgccgcgccgactgagcgctgttcatttcttacagaaattttttaaaaattttccatttgagataaataacatgcatttattaaaatagttaaatagatagaaaaaataaataatttatttatgttttacatttttttaaatatcataatcaatgtgatgctttctttttttatttataaatataaaattttcagcttgagatcaattgttttttcctttatttaacaatatattttaattaattttactttttatcttttttcaatacttcatattttaatctcatgatgtgtcaggacgtatttcagatgccttcggactctttgcttattaaatattatttattatgtttattaaaaaatttatctatttgctattttattcagtgtatcgaaactttatccattttagtgcttttcctatttatttatcatttctgattattttattatgatttttggattaaattttattttaatttcttattaacataagttccaattaattagaaaatgttaaaagaatattttgaaatttatttaagtatttaattttctcctttattcatattatcatattgtaaacaatttttatttgataatatgtcaatttcatattttataattaaagcaatttttttacattattatcagatggattaattgttttgaaatttttctgattgttctctaattttatgaaaatagcctccctggcaaaggtgttgttgctcacagtttttttgatggaaatagctaattaggttatcccatatttggatttttatataaaattctttttattttattttttggtgtttatcattttttgattttcttttgaatcatctattaattcatttcatgtatttaattttgcaatctttggcaaagatagattaatttatttgtattcatttacttttctaattatagattttaagtttatttctcatctgtgtaacgtaaatacaataaagaataattaaataatatttttaagataaatgttgaagaaaagattaaaactgtaacttttggatttaacacttcaatcttttaagtaactttacgaaaatattggtgaattagaaatgtgatgatatatctgtttttgtttattggttttttattatttgtaatcattaatctaaattataatactatttgaataatatgcttgaatataaaaatttattgtcacagcttgtttaattaaataaataaattatatctaatgtaatttgaaattaattaaaaaattaattattatttcagcacatattattttttcattttattgtgtatttatcgttgtcttttttgctgataaattaaaatttttacttatttattttaaataaatctctttaataataatttacatgttaaacaatttttattattttttctcatattttcgaattaactatttataattgtgaattatttcaatttatacagtcacgtaatatttgactgaaaattatattacaaagatgtgctatgaagcattgcttc

SEQ ID NO: 18091 - DNA, 2531 bp, Heterodera glycines
ataagtcatccgcctcttcttcgtaatgccacgctccataaaatctgtccacagtataaccacattccaatgcctttgccttaaaaacgaaatttattttaattttatatataatttgttaccaattcaaggctggtgtaagtcgccacgtatctccgctgtgccccatcatgagggcacttgtagttacatcttgttgtctccttcttaaattttgacgcacatctccaacataacggaaacaataatctctcatcacacttcaactgcaaaaccggaacccgtaacccccgcggcgggttgaccctcactttatacaatcccttatacttcaaatcctctggtctcgtccaattaacattaatctcatcgctcttaggtataataatctctggcaatccaatcgggtaagctgtaccgtaattcacagacggatacagactcacaatatcgtaaacgctaatttttttcttctcgtccgattttgcaaacaatttcatcggtcccgtcctccctcctgcataagccatccgcggatcaatcggccccttctcattccctctgtcgtcgaagaagtcccgcatctcctcatcctttttcagttccttttcaatttggcacccctaaaaactcacaataaaaatgtaaatgtcagataaacttacccaaacttcttcgacgtccaaagtcttacgcagctccatcaatctctcctgcgtctcatcgttcaattcctgagccgtccttcctccaatcagttccgccgccgggtcataacaattcaaacatccgtgtatgtaacatcccatcacctcaatgcatttgtccctacctccgttattcccaataaatccgtccaatttgtaatttccaactttgacctctcgtccattccccgcgtgccttatctcaatcccatcccgcttgctccgccactccaaatactttattgccatcacacttgcccgatcacaccgctcatatcccttctccggcacaatcgataactgctccgtcaataaaaacattgccttaaaaatattcatcgcgacccccgcattcgtacaactcctcggcaacgggtcaaaccccttcgtaatgtcgttgatcaaaattctcctaaactcaataattgacagcaataaaatctccgtgtcgtttcggcaataattcttcaattcttcatccaaataaaagggtgtctccttgttttcgttatacctaaaaaataagattttattgtttttttttaaattattttcctaccatttttcgaattttataaatttctctttattcatagaccctggtgaataatcttccattgttggcagatgttgtaatcgaactccataattttctttcttgttgtagtaataggggaaaaagggcttgtcctcacagtccaaattaaatgtcgccttcagcgactcaagcttcaccggcatcaataaacatgagtctctccaaatcagccttgaatgtttcttcgagttttgcactttaaattcataaattttcaatccattgatgagcggtagcgggttcttcccggtacggcagaggtaattaaaaacaaaatgacctaaaatttaggatttaaaaatttagattaattgttttcattaccgtcaaaacgtccggcgttatgtgcaaatatgtacgtatcgtaattcgtaaaagcagttaaaatccactccacaaaatccttggtcggctcatgtccctccgcctcgctccaatccttgatcctctcctccccacaaattttgcaattcgtcctgtttttgtcatcacagcattccgtacacgtaactctcaccgaaatataattaataacatgctccttctggtcccccttgtaaatagaatcctgcgatgtctccgaatcctgaagttaaaattatttattttcatttagtttactataaaacttacccaaacgacaattcggtaaacatccttttcctctttctcctcgatcggcataatataacacccccgcttggggtcgtggctcacactacaaagctggcaataagtctctccgcattcatgatccttcttcggattaattcgataagttttttcacaaatcacacaacgtttccataaattgcaagtctgatgtccctgatgatagctgtagcatccccaattgtaaaagtaacgtcgacacttcgggcattcaatcttcactccactctccttttcacacggcattcctccaactctattgcagtaataacatctcgcccggcaatccatcgtatgataaacatcctgatcgtaaaaacattcacattcaacgcagaacttccttccacggttgaaaaagcagacataattcttcagaccatcccaatggccattctccaaaaatatcggcactacattttcacgtcccatagggcccttccacaaaacacggattgatttccgtggatcagctgacttttcaaatgcaacaacccggtatttaccggggtaaatctcatcctgaaaaactcattatttgagaatcttttttt

SEQ ID NO: 18092 - DNA, 1624 bp, Heterodera glycines
cggaaccattttggaatcaaaatttaaaaaaaggcggtaataaaaataattgcgttaagcatgtcagcacggaggtgaacgaagtggcgacacgacgagcaaatcggcaacagcagcgaattctttttcaggtaaaaacaaaattgaacggcacttttaattatttattttttgacacgtaatttgttttgaaaaaatcttttttcaaatttttcacctttttaattactcaaaacagcgaaagtttgccatttttgaacaaattttcacatccaaaattttatttttacctcaaaatctttgacttttcctatgaatattttgaaaattatcaaaaggaatttctgggtcatttggatgctttaaattttaatgttttaaaatgtgtttaagttttgaaacgaaaacttatttagaaacgatactgtattttaaaaaaagatacaatcgattttaaattctgccaatttttaatttttttcattttttcgaaataaatttatttgtttagatttctgttgtggccatcatcttctacctgtacatgtctggtaaaatattaaaaaaacatttttttttctaatttttaaatttttccctcacccattttatttagcctattatttgctttaccatgtgttcaatgtgtccaataaatggctggtgttgttcaactcgttcttttattccaccacacacatgatcaatcccgtaaaatggagaatagtttcacatttaaatgaaaaaaacgatttatttttggcatttttatgccaattttaaacaaattttggcacatatttttttgattttcttactaaatttctgggtgatttgagaaaatttgttaacattttcatcaaatcaaaaaaaaaatatgagaattttttaaatcaaaattttcaaaatttaatttcttttttcaaatttttaatatttttgttcgtctttttttgatttttctcaaatttcaaatgcttaaatttaaattttgagtaaaatttccaatcgtatcaaattgatcaccctccgttctacaggtgatctacttttcgttgaacaaggacatgcgagcgcagctgatccgtgccattgccgactgtttgaattgggcttgttgtgtcggtgacgcggccggcctcagtcggttcggcggcattcactcgtccatctacggccgggccagccggcggacacagcccggcgctgagtcgtcctccggcggcagtgtgctgctgcacaagtcctcgtacggcgccggttgcatgacagaggcgaacaggtgaagaatgaatgcatggcaggcacggcatggcatacaaaattggtgcaggatggcttagtgccagccgggcggttctggcactttttgtgattaaactaggcgttttttgatcacttatctgatgcgagatccaggtcacggtcggcacgggtacggctatttgagaatctcgggttcattttctcgaatcgaatttttgaaatgggtgccaattaattggtaattcaaccatttgttttctttcagttccgtgcaaaccgaaaatgccaaaccaggatggacgcttaggtgagagatggtgaaataatatataatgtcatggtccctagaatttaaatt

SEQ ID NO: 18093 - DNA, 1100 bp, Heterodera glycines
attcatttttggattatttcatttttctgttttttcattttcttgcctttttgtccccagcagatcatcatcgtctcgtccgatgtccatttcatcaccatcatcatctcctgatggtgattattatcatgtgattagtggtgtgatcagattgtgtttttttgataaggtgaaaagccaccaaaatgccaaaaaccgccgctgcgacacggcgtccaacaacaacggcacccacacagtggtgcctgttcaggtgttgtatctgctattactgctgatcaaaccgttttttttttgatcgaatgatatcattttcctaagtgtttctcaatagccttcaaaatttcagaatttttttttttgatttaaaaaaaattatggctagaagaactcaaaaaacagtgtttccgacgagaataagacttattttctaagctaatagaaaacatttattgctatcgaatgatatcaaaaactaaaaaattgattgtttttaagcaaacttataagcataatttgtttattttgatggattttatccatttttttttacaaaattatgacaacatttgagctaaatgaagccaaaatttactttattgcgttgattaagcttgggcctttgatcagatagataaaattaaaattagtgatgccaatttgatcaaacagcatgaggcaataaaacttttttactgattattagtgatcagatcgaatggacaaaaattgatcatgttttgccaagcgaaaatgatcactcggaaaaacactgatcatcaccagcttatgtacaggcttctggtgaagctgcaaaaaaggtgatgccaaaatcatcggcgccggacggcacgacgacgacgacggcacaaggccaacaaacattgcgacgaatgccaaaacaatactcgagcatgaaggcgatcagagtccgatttgtgcaatgattcgtgccattttttaattatttttataaaattatatttttaaatcagttttttttctccttcattttttcttattattttgttttttattgtggcacttttctgtgtttgattgatttgatttgtattattattatttattttttaatatat

SEQ ID NO: 18094 - DNA, 1261 bp, Heterodera glycines
taatcagcggacgggcgcatcgcttgcgaatttttgggggcgacggaaggtaaaggagaagttgaagaacgatggacaacagctgaacggggcggagggaggcgagcagttcaacggaatgccaagggtttgcttttacctggttgccaatcagcaaattcgaatccaacacctcgggcaatccgtacaaaaaagcgttgcaaacggcggcacgtcgaagtcgcgcgggagggattgtgaagcacttgtcggagttgctgtagccaagaagagtgttgaaatggcggagtagtacctgagcaaaaagaagaagtacaaaatcggaattcaactatgcgagcaaattgcgtacactttgctttttggcattttctgccgggccgcagcgtttgctggccaaaaaatagacgaacagagagacgacaaggaaaacggtgtgtctgtgggggcggggggggaatatttcataataaaaaaagcattcttgttgatgcacctctccgaattttgcatgtccacgacgcggttcaacaacaggcacaggttggactcctcgtcagtgaactcgcgcattcggccgtaccgaccatctgaagcaaattcaaataaatctcgatttatctcttgaaaatataaccattggttgatgaatgaatggaactggcggcgggagagagaatggcatggaaagggtgctgatgagtgatgtcggtcactgaagcgaatggacggactttagagagatggcatggcatttgaagaaaagtaaagcaaaaaaggaaaagcgaaggaaaatgcaattagaaaagaaatgccaaagtgccgatgaggaaaaaggaaaagaaagtgccaaaacaaacacagcaaaagcaaagccaaaagtggggacaacgacagacacacagtggcgggtcgaagacgtacaagaaagcgagaagacagacggggagcagttcatcgcggtcaactgcggcagagggtatattcagtaacgcgagacatgcatttggattcgaatcgaaaacgttaaaaatataaaaaactgacatatacaaaataaaaaattaacaaaaaatattcttacataaaataaagtaaatccccaaatattttatgaagaccaaatgtatctattttatgttaatgaaacttttattcctaaagaaacagtcacaatgagttcaatgtggagcgtattccgcatgaaatagaaaagaatttaaaagaaatgcctgtattaacccaaaatattaatcctttt

SEQ ID NO: 18095 - DNA, 1458 bp, Heterodera glycines
  unsure (1)..(1458): unsure at all n locations
aaagtggcagttacgcaggccatgccaagcggactttgttcagcaattgtcatcgcgccctgcgctcgcgcactctccacctctccgcggggtagtgcactggcgagttgttccgcgggagtgctcgcctgtccaattagacaactattaggataattagtggtgcaaaggtctagcaaatcactcaatgatagatttgcgccattgttcaatctaaaaacgcacttcttgcattgcctttccaactgattgtaactgctgttgctggcgtcgttgtatgctgggcgatgcgaaaaatttggtgcccgcggggctcgaggaggacagcgcccgaggggacggcgaccgacgcgaagaagcggatgcgacattttggtggacggagctgctggtttcgctgagccaatccgcaaattcacgcgccgcttcgtccgccaatgggaaaaagccggcacggacatcctccttggggcagaactgctccaacatttggtgaatcacctgcggacatttggaaaatgtacctctgatgatcaatacggcttttcaactcacttgatagaggaaaagcgcctgctgacagcggatacaatcaacgaattggtcactgtccgccttttggcagttgtgggcccagccctgctcttccaacaccgtctcggaatggtaccgaaacagccgagcaatgacggagaacagccgttcagtgttttgctcattcagtgccgaagggccaccggccaaagtgatctataaaatgggacaaagtgagacgaatgaacgtacggcacggcatcctcaaactgtaaacactaacacatgcgaatgattcagcatggcgtctaaagcagatcggaactgctaattgtaagagcgaaaactcactaccaagtcagtgttgactttttccacctttatccattcaaagatctaatcatttacagtatccgtcacagtactgcctgtacctgttgtgccaaaatgtcggtcatgatcagttgcactgccaatggtccggtgggcggagggggcgttcctttctcgtcgtctgcctctcgttttgtctcgttttcctctctttctccgtccgtcttctcctcctttgtgctattgttgtcaatccctctgcctccctctcccatcggttgcgatggttccgtcgcgctttggtcaaattgaacggacgcgggcaaaggggcgggcaatcgctggagagacgaagaaaacacttccaggagcaagtccagcgaaattcgaatgtcaatccgagtcagcaactgcaaaaaacggatgccattttgggattgtccgattttggcattttttaaaattaattaatttaaatgctcacatggagccaatcaatcgccttcagcacttcgtcgtacacgtcgtttaatcgcaccgcaataaactcgaagaggncgtgcgcctcaaacggaagcgggcacaggtcgg

SEQ ID NO: 18096 - DNA, 1259 bp, Heterodera glycines
catttttggaaattttttgaatttaattgaaattttttcgaattttccaaaatcccgcaatcccgcacgggatcccgcaaattttaaatgcgggatttgcgggattaatcccgcgggatcctgtcccgcaaaaaattttgagttccagtcccgcagcgggatccgcaaatttgaaatttccggtctctacttttcaaattgttgttctaaaatttacttcctttttttattgcgaagacagaagacgaactgatgttgctgggagaggaagacgacaccattgaacctgagagaatggatgccgaaacggaagaagaactgctcgggagagcttctgttgttggcatttgctcgcaaaaggcaaaattttggtttttttccagggaaaattcaattcataaggcatcattttgagaaccctttttaagacgatttctgttgccaattcgaacaacggaaaaaattccaaaaatgagcgaacgaaagcgaattcaatgttcgggaccaaatacgacgagaatttgaagcgattccaattcaagtgagggaatgggaaaaacttcgtaaccattttcaaacacagggatttgtcagagttttggttacatcaaatgcaaaatctccgttcgaaactaattgcaaaagaatacggattttccaccctctctcttttttgtccatttgttttattgccattttgacagcttgtgcggtgctccatctgttggccctattcaattcggtggtgggatggacctttcgctgatatcaaataaatcatcggacgcgagcacaaacaatgggacgacgacggggggcagccgaagcgaagggaaggcaaaaagtgcgaaggatcactgacacttgaatttatcctcaatttaaatgtttttcattttttagacaaaaaggcagagacagcggcgacaacaaaaaggacagtcgtcgccaaacgcattttgaaacggaaagtgccaaatccatcggcaagaaaactgacggcggatgcgagccgacatttgggaggacaaagcgccaccgcaattcgagtgaagaaacgccggtcgaggagtttggacaccatgttgaggtgcaaatggtgagttacgttaatcgaactgaccgaccaatggcatttgctgctattttaattatttgaaatccaaaaattacattccattagggacacttcttcgtcttttctggacctcacttcttccaccgatttttcctctttttttgatgagccgaaaaagcct

SEQ ID NO: 18097 - DNA, 1809 bp, Heterodera glycines
  unsure (1)..(1809): unsure at all n locations
ctgctgaaccaccgggaaacgcncaaagcgaagcgccattcggacaaacatcggacggagtcggagccatcgccaaaagtgaacaatcaatcggacaaatgccaatcaaatgggaaacgcttcctttttcagtcttacgaagccgcttctgcttacataacagaattttcgtcaaagagtgcgtccaattcaaatcccgttcatttgcttctctttgccttttagccactctttttgtgtgccccgtgccgcccactttggatgagaatgggctcaagggatacttcctcacttttggagatgttcggtccgttgtcgtgccacacaaccctttcacgggtgaacatcgcgggttcggtttcgtcgactttgccaacgaaacttcggccaaagcggcgtatgccaagaggggactgatttgggtgcgttttcaattttgagtaaaaatcgccatttcaaattaatggcaaacttagcctcgcggcggattgaaacccttcaatttgaattggtaccgtcccaaacgaccgttttctccgccttcgtcaaactcggaactttacgtcttcggactcagtcaaaaatgtaccgaattcgcaattttctcctattttggtcgctacggttccattgaacgcgcacaaatcggacgcacgacggacggcggtcgcgcagcgctccttcgcttcaccgattggcacagtgctttgcgcgcaatcgaagaaaacccaaaacaatgcgaatgggcaaagacagtggcagaagcacaggaacaggtggcagcagatgaggcatttacatgattaatcgaattaattaattaaggacggaacaccgccaatgaaaaaatgggtcaatgttttcgatttgccaaaaaggtaagaatttttgcaaatggaaatgaactacaaaacaccaaattgtttgttcagcaccaatgaaaattcgccgtcttttcgtccctcccgtcgatcggagaactcatcgccgaccattcacaagcagttcttcccggacctggttcagcagaaggcaagtgaatttgggtgtgtacgagtttggactgatcagttgtcaggatcaatcaccaaactttggaatgccaaaattggcggttttagagaaaggggcgttcgcagtccatgtgccgttttttggcgaaggaggaggacgacgcttacaatggcacgtcggacagagaccaatttgaggagggcaaaagggacaatgagtggcagcagaaggggcatcattcgcaatcagaagcactaaaccgagcaaaagtcaggtacagcgaagcaaaccttattgtaaacttaattgactacgactaacttaattaattgcccttaattccttttagtattggtgcaaaacgccctctgacgggtgcttcgtcttcgtcggaggacgactctgaggtgctcgtcacacgagagcatgtgccgcgtaagggccgtacgcttttccgtgccgtcgatgctatgcgttgcgacagtgttggttcggcagtctcggcacaacagcaccggagtcgttcgcacaagccaaaacccgggtggaacagtgtcagcggcgaagggagcggtgagcaattgcgatggaaatgggctaattggaaccaatttggcttaatgggtgttctcgttgtttcaggtgccaccgattctcgccactccctcgccctcttttccctcctcttcctcctcctctttggctttggagtcgtcgctcgtttcggctgaggaattccgtcgaaccaccaccggattcgtcttcgtccgtttcggcattgcgtgaaaaatacgg

SEQ ID NO: 18098 - DNA, 1925 bp, Heterodera glycines
atttcagagttcccaagtgtccttttttctaagatttcttctttatttggcacgacctccttattttgtgcttattcttggatttgaaaataaaattacaaaaacgaataactgttttgaattatatatgtatcatttttatggaagcaaatatttgaattaattcgattttgaaaaaaattgcgtttttatttcgttttcttgaatgtaaaatgctctaaatttcagtgaaaattttgttaaaaatggtcaacatttctatttttcctccggcggcgtctatcggcaccgccgggccttccaaaacttattttttcataaaaaattggccaaaaattgtcatattttgaataaaatttttcaaaatgctgattttttgtcagccaaatgctgattttgaaaattttcagttggcagccctggtttttccgctaataaaatattgttttaagtcgatttttcatatttttattgcgtttccttcacgctactattagttttagaaaaatcttatttttggggtccgaattttagtttttgagccattttgtcttattttgaaaaaaaaacatggaaactctgttttatttacctgctgaattttccctctaaccctccccctgcggtctaaattttttttgttgtgtatcgattatttttacatgctttcggatgtgaactgtctgacttctcgctgtctccactcctacacaaacacaaaaacaaaacgaaacaaatattcataaaacaaatattgctgataatttcgcaacttttaaaaaaaatcattgttttgtttttcatttttttgaccggcaccaccggggaaataactcataaaaatagagggaaaaattggcatagatccataaatttggcaaatacctttttaaacaatatggaagtttcagcaaatttttggccaacgatttttcaaatttgaaaaggctcaaaaaatatcaaaaattatggtaaaactaaaattcgttttttttaaattttttttatcccttttataaatgcgcctcatttcagagctaattaccgaagacaaaaattttgatcaaatttccgagtgcaattttttttatataaaatgccatcgtcggtggaactgatgagacatttgttgagcacgggtgagcattcggatgtgcactttttggtgggggacggagacgcaaaagaggcgagtttaattaaaaataaaaattttattttatttttcaattgcaatttcattaattatccacgttttttaaaggttttgccagcacatcagcttattttgaagagcgcttccgatgtttttgaggcaatgttccgttttgacgccaaaaaagaaagaccggaaaatggtaaaaaaataataattttaagggaaaataccaattatgctatttgttcttcattttgtctctgctaatttccctaattaatttaacaattagtttctggtaattgtcctgatgttgtggagatacctgacattgaagcagaagcgttcaaaataatgttgagcttcatctatacggacgatttaagtgatttgaatggagacaatgcaatggcagtgctttacgccggtggatttaatttttaatttaatttattaattgttgaattccctaattagccaaaaagtacaatatccctgatttggtcgaccggtctttgcaaattcccatctccgaattgcgcaatgttttctttgcgtatgcccaagctctccttttcgacttggaggtgagaaaaacaaatttatttttaataattagggttgtaaattatatggactaaaaaacgcgaaatatggacattaatatggactaaaaaagcccgaaatatggactaaaaggccaaaaatggacaaaatatggataaaaatggcaaaatatatgttgtaaaccccaaaaatcccaaaa

SEQ ID NO: 18099 - DNA, 1223 bp, Heterodera glycines
  unsure (1)..(1223): unsure at all n locations
ggactaaaaaagcccgaaatatggactaaaaaggccaaaaatggaccaanatatggataaaaaatgccaaaatatatgttgtaacccccaaaaatcccaaaaaaggtgtgcatatttaatatttgcttaaataaacctaaaaagtacaataaacaaccaaaaaatggggtttaaaacttaaaaatgcatattttttattgttgttcgttgtatcaaaaacacctccaagtttgccaaatttcgaaaaaattctcattaaaaaaaagaaatgttcgcaaaaaaatgacgaaaatatttattgaaaatgccaaaatgacgacgaaaactcaaatttttcgtgttttgtggggtgtaatttttaaaaatttccaaaaagttgatctttaggggtgtatttttcgtttttttttcatttttcttgtgaaaatttccaaaaaatggccaaaatatggactaaaaacccaaaaatggcgaaatatggatttattcccgaaaacccccaaaatatggatttatatggactaaaaaccttcaccaaatcaaaaaattttaacgcagaaatgctatttttaagcccctttcttcatagcatatgcgcagaaaaaatatgttaatccatataatttacaacccttattaataatgcttttgttcgaattcgggtttgttgagctcgaaacttgtcgaaattgtgtgagattcatgatccaagtgtaagcaatttttaaggatttttccatcaaatgtttgcgttacatttgtcaaaatgcggctgacttgttcggatcagatgaatttttgcaaattgatcagaaaatgttatgcaatcttctcgagagtgatcgtttgttactcaacgatgaatttgaaatttggaaaattgtaatttcaatttaattttttattttcattttttaatttcgatatttttttctatttaggcactccgttgggccgatgaaaaatgtcgtcagaatggcattgaatgctcctcgggaaattgtcgttccgtacttggtcctgcactgttcaaaattcgttttcctaatatccatgagaaggattttgcaaaatgcgtcggtaaaaattttgaaatcggaaattaaatagaaattgttttggtcgatatgaaattttacctttaatgcttgaatttcatacatggataaggagggtcagcaaggggaataaaatttatgggaaaactgacaaagagaactgat

SEQ ID NO: 18100 - DNA, 1197 bp, Heterodera glycines
  unsure (1)..(1197): unsure at all n locations
atttgaatggcagtcgatattacactgacacccgtgaagcggtgatgcaagccatagcaaactgtattttaaattctggcngcaattctaccaaaaacgtgttagaccngcagtactcggctcagagtgaagattaagggacgcaaaagagacgatttaaaagcgattcgaaaattctatcgactgatataataacgatgcagtcgcggcgttgacaactgagatggaaccaaaagttccataatatctttccataaggctggaaaggcagaatttgaatggccagtcgatatttacactgagcacccgttgaagcgggtgatgcgaagccatagcaaactgtatttttaaattctggccgcaattctaccaaaaacgtgtttagaccgcagtaactcggctcagagtgaagattaagggacgcaaaagagacgatttaaaagcgattcgaaaattctatcgactgatataataacgatgcagtcgcggcgttgacaactgagatggaaccaaaagttccataatatctttccataaggctggaaaggcagaatttgaatggccagtcgatatttacactgagcacccgttgaagcgggtgatgcgaagccatagcaaactgtatttttaaattctggccgcaattctaccaaaaacgtgtttagaccgcagtaactcggctcagagtgaagattaagggacgcaaaagagacgatttaaaagcgattcgaaaattctatcgactgatataataacgatgcagtcgcggcgttgacaactgagatggaaccaaaagttccataatatctttccataaggctggaaaggcagaatttgaatggccagtcgatatttacactgagcacccgttgaagcgggtgatgcgaagccatagcaaactgtatttttaaattctggccgcaattctaccaaaaacgtgtttagaccgcagtaactcggctcagagtgaagattaagggacgcaaaagagacgatttaaaagcgattcgaaaattctatcgactgatataataacgatgcagtcggggcgttgacaactgagatggaaccaaagttccataatatctttccatanngctggaaaggcagaattgaatggccagtcgatatttacactgatcacccgntgaagcgggtgatgcgaagccatagcaaactgtatttttaaattctggc

SEQ ID NO: 18101 - DNA, 927 bp, Heterodera glycines
tagcgagggggaaaaaagggaaatgcctgaaaaatttggctatttttaacaaaaatcgttaaaaattctgaaaatttttcctcggcggcgcctatcggcacccccccccccgccaaaaaactccaaattcttcttaaatattagctcaaaattgaagtgcttctaaaagggtttttattattgaaattaatgaaaaattttgaaaattttcgaccacaggtctaaatttgccatttttccccaatttttgctgtttttctcccgattttggcccatatttagagatttttcgcctcagaaaatgcaaagcgtttattctgatcctaatttacttttaaatagtttttagattgagttttttatttattttgaaaatttaaaaaaaaatgaaattacggattacgtattacggcaaattacggccttttttgacctccgtgatgacggattacgggtacccgtatttgaaaaaatcgccgtaattacgggttacggacttccgtaattgaaaatcagttacgtccagccctggtatggagaagggatggaatttttagacttacacattttttgattagtgcaaagttcggtttcgtccttgaatggcaagggcgtcctggaaattggtccgtttcacatgtaaatttgaaaatatccttgaattcaagattcacacaaaattccaattttttccctggcggcgcctatcggctgatcggcaccgccggaacatatctttctatttgcttttaaaatttggttacacagccaaaaagcgttaaaaattgatcaattttggcaaaatacgttaacatattttctatttttttccccggcggcgcctatcggcaccgccggatcccctcccctatttgagattttttgcaaaaagcgcgccgcaaaaaaagttgcgtggaaagtaaaaaa

SEQ ID NO: 18102 - DNA, 1303 bp, Heterodera glycines
tttttcttttgacgttctgtatttaatttattttttatttatttgctttaaatgaattgaaatttacacataacataaggaggacttgaacctgggaccccctttttggtgactaactcacagaccactgagacgaaaaatcaaacatatttacactggaagcccaaaattgccatgtttttaagtgcattttaggccttccattgttcaggaaaattgattgttttttgagtaatgcctttttaatgggttttgagtagagatcggaccggtcggttttttttcggtatttttcgattttcgatttcggtttttgaccgaaaaaaccgaccgagaaatttttgagtttttcggttttttcggtttttaaccgaaaccgttcgaccgaaataatcaaaaaattaaaattttcccccggcggcacctatcgacaccgccggccccccaaaaatttatcttttcttaaaaattagcccaaaatctcaaaacttggtaaaattacaaaaaaaaatttcccggcggcgcttatcggcaccgcctgccccaaagttatgactagagttcgcaaaaaaaggcatcaaaaagcgcgaaaaaggcactaaaataggcaccaaaaaattgaacaaaaggcatgaaaaggcacaaaaatcccgaaaaaggcatgaaaaaaggcatttaaaaaattttattaaggatttttagggagcaaaacacgtaaaacttaaccaaaattacttaattttgctgatttaatgataattcaatattttataatgtttaccaataaggaaatttttaaacctaaaattttttatcaagaaaaaaatgaaattttggcgaacaatttttgagaaaattttcaattcttaaaggtatattttctgaaatttttttagatcatttcttagtggtgtcttttctgaaatttacttagacatttcttaggggtgtattttcccgattttattgcatttttaatggaatttttcggaaaaaacgtcaaaaaggcaccaaatcgctaaaactaatctttgggattttttagaatcaaggagcaaacacacgtttttttggctccctttttcaatcattttcccaacctataatacaccattcaatagaggtttcaatagctctacaattttactcagaggagatttttcgctttttcaataaatagaaacagtttattgcttttttggaaaaaaaataaagaaattcaaaaaaaccgaaaaatcgaaataaaccgaaaattttcttcggattgtcgatttcggtttttttcagtttttagccgaaaccg

SEQ ID NO: 18103 - DNA, 997 bp, Heterodera glycines
agaaaatggaaaaaagttatttgattaatttaaaattacatttaaatgtagttaaactgttactcatgcgcatttaaaactcatataaaaacataacttttcatatcatgtgaataacagaaaatttcatgcaaaaaattatgagttatgaatgagtaataaaatttcaagaaaatttgttcaagtttaaataaatgaaaatacattattacattaaaataaggacactttttcagaaggatactaactttttgggttgaagaaaaattaccataaagaaatattaatatttatttttacttgattaatttagggtattcattaaaccaagtaatattatattcaattatttaaatgaatgtaaattttttaactgtacctaaaaataatatttttaaattttttaatcagcaacaataaatatgattaaatataaaaaaataatgtagttatattaaaatagaaaattttaatatagatatgacttcacgttcgtaagttttgttagactactgagcaagttaattaaaaaataaatatactatgaatcaagttggcaaatattatctaactatataaaacaatctaacaagtgattgtgccatcattcattctacaaaaatatttaaataaactcaaaaaatttcactacaaaattgtacaataaaaataacatagtgataaaaaataaaatgtgcaacataacttttataaaacaaaaagtaccaaattttcaaatttagggtgatatgttgatttgttggaagaaaagctcaaaatggctatttttaggcaatcggtccaccggcccctaaaattcgccctgaaattttcaaaatttgactaataaattcacaattttcagtgaaaatctgttaaaaaatggtcaacatttccaccaatttttcccccgggtggtgcctatcggcaccgctggaaccacgccccctgtttcaaaaagatttttttggataaagcgctctgcaaaaaacttttt

SEQ ID NO: 18104 - DNA, 1802 bp, Heterodera glycines
  unsure (1)..(1802): unsure at all n locations
gaattaaagaatcgcgtaaaacacattttcataatnaaanaatgtttggagcgttcaacaaaatnttnttctgaatgagtacgcttcaaataatgattaaatntaataatatgtaataacccatntaaaaattcaaaatatgcatatatcaaagttctttgtaaattttatgtattatgtgaagcaaataattaaaaatcttaagctaggaaaaagtaagtaactcgtacaaattttccggtaatgaaattacaatttgagacaaagcataatttttaaatgaattttcctaatgcaatacaataattaaaaacatattttccatgaagtccacgattttatacggtactcctggtccgtccaaaaattcgaattataattatttggaaatttaaaaacatatattttgagaaaataaagaacattttatataatcattattcttaaacaattaaatttccaccttgaaaataaatatttattcaattattaatccaaagtgacatttaatgtgataatgactaataaatatccaaatttattcttatttattcatttttaatgacaaaaaattaaatgtcttaagttgactactctcagaagataaaacaaaatttggctgccatgattcaattttcttaaagatgggcgttttgtgtaatatgtgctgagattaaaagttttaattaaataagaaaaactaataaattcaaagaaatgttacaaatttattttttttattggctattacgtataagagaatctcaatataaaacaaaaaaatatatatatggtcacaacgaaggactttttttacaactgcacaatccaagaaaaaatgttaatctactttacaaactaagcctaattctcataaaatataaaagacaaaattatttgtatatctatagtgggcgaaaatgattcgaaactcaaatttaagatataatttaaaataacaaataatttacaaaagaaaaaaataataataataatgcacaacaaaattaatgagtattattttatttatatattttatagtttaaaacagaaaatctgaataataataaaaatttcaacgataagttgtcctttcctaattgttaacagttttagccctttgaacaataaaataaaactataaatgggtatttaaaatcaaaataattcctactttcaaaaatcataaatatgttttcatgactaggtaatatttttgcccattttcttacaaaaaattcgtttaattttggttataggcagggctacaaattaacattttcaaagtcagcattttactaacaaaaaaacagcatttgaaatcaaaaatcaacattttgaaaaaattattcaaaatacaaagaaaaagttaattgttagaaattaacaattttaaaattctgaatataaaaaatcaaagctgaaaatttaaattaaattaattaagaaatcaaaaaacaattgaaaaatgtcataaatttaatataaaccacaaaaaaataataaattcttcttcctcttcgttcatttttgcctgcggaattaaattttttaatgcaaggattgtacataaaaagagagaaacgaaattcatttagcgttctgttcaccaaaagtattaacaatcggtgattttgaaaaaaatacaattaaaaaaataatacaaaaaagataaaagaaaaaattctttttagaaaaaatttaattattcgaaattcgaagattattaaatatattattgcatattaacccangaatataatacgaatgtttattttatggtgttcaataaattataataa

SEQ ID NO: 18105 - DNA, 3435 bp, Heterodera glycines
aaatgccttttttaatttctcacccgatgcaattctttgcaataaaaagataaaagaacacatagtgacaattattgtcccaattttcatattcttttgctgttgaaccgccgcggtctccccaataattgtgcatcgtttcattatccatcggttgtcccattcattttcatttgatttggccaatgtcagcttttcctttgtccattcgttcaccaattcaaatggcaccatttgcattggcggcacatgaacagaaaaacgaatttggtaattgacggaagaaatggcattggcacgaagaaaatgctaaacaatttggaaaacaaaaataaaggcaataaaaatcaatgatttgtcgaaaatgtggggccacacctccttgaaactgttgacccaatcgaagttcgcttgctcgttaaaagaatcgcaacgcaatcgcttgggttggccatcttttctcgaaatgtgtaaccatttggacagaatttggccagcagaaattgttgcatttggtccatcaaaatcatcaccaaacgcagcgggcaaccgtccaaatgatttgattgaattcaattggttgagatcagtgaaaattgtcggcgaagtgcgacgaagcaaattgtccaaatgatcatgacgggaaaagtccaaatggtgaatgtttgtcgaaaaaatgggccaatttcacgaacaaaaatgtcccaaattggctgcacatccgtgttgtgtgatgaatgaatccacaaatataaattgatgcctcttttgtcaaaaatttgctgattggaacgaagaaaagcgatgacggagtgatcgatgtacctaaaaatgaaataaatacttttattgtcatagctctctgatttttaattactcaatccgaaggtgcttaaaacggattttgctgcgcaacagacggtcgtcgggcaatggaaattccacaaatccgttatcgatccgtacataaagtttcgtttctggtcctttgtccttgtgaattgaggttcgattccaaattgtcaattcgcttttgccattgaaatgtttgtccactagcgcattgaaacgtggcgaaagcaatgccaatttgaggccgagttgggcatggtcaaaacagggcaaaatgtccatccaaacgtcattacaaatccaacggaaatgcgaaaacagtttagataaataaatgacgaatttgtgtgacttttaaaatccttttaccgtcggttcatttatgtggcaattagcacaatttgtcgagttacgaatgatggcgtcgtcaaaaagcgaaggaagaattgctgaattattcgttagaaatttttattatttttcaaatgcgaggcaaagcgaaaaaacaaacatttttatagtcatgaaaagggattaatgaatgttttggtacttttccattatgcggccaaaccccaaaattttaaaaaaagaaggggtgctttaaaggacgatgacgatacattcgatgacattttagctaaaattgcggcttttatgcctcctaaataatttttttgcacaaaactggcgctttccccctctttttttaaaattttggggtgtggccgcataatggaaaagtaccgaaaaaagttttagtggaaaaacatgctggggccgaactgacggattcggcggaatttttcacaaatatcatttatgtcatttgtttctggcgtttttactatacttgagccctcgaaattggttgaactccacagttttacaaaatttgttcaaagatttccatttttatccaatgttttagtaagtatttttgcattttacaatttttttcgtaaatattttggcgtttttcgtaaatatttatttaaaatgttcggaatttttcacaaatataaatccgtgccttaataaagtcttttttatgcacagtgaacagtttaccctccttaatttatcattcgccatgcgttgttgtcacttttaaaaggacgacgttcagccaactcatttttactcgttttaatgtttaatgttccaaattggggtcaaatcgataaataaaatttaaagttttttgttcgaaaaatcagaaattttttttgtttcttaaattattcaaaaatcattaaattgacaaacaaaaagaattcttatgttgaaaagttcgaattttctttgaaattgcatcgatttgtccctgattttgtgtttctttctatttaaaaaaatgagtcgatacaaaagatacaaacacctgaattttcagcaattttttttttttacattacttccaggtaaaagttcaagaaaattttactgcgtacaaattttcaaatgtactcatgtttttttccaaaactttgaacaaagaaaatcaaattttcattgatccgtgattttaagtgcttaaatcgccgcatcccttatggaaaaatgaaatgtccccctgtttaaactagggttcggaccccgcccccgtcacccccgcccccgccaggggcgggacaggttttttggcctcacccccgtccccgcccccgtgactctgacccccgccatcccccgcccccgcgaccttcacccccgcgggggcgcgggggtgaaaatacacccctaagaatggcatattcatggataaaaggcaaaaaatttatacaattttgatttttttaaccattttgataaattttttatgaattaaagttaattttattattggtcattgatgtgtagtgtggtgtagtgcttagtgaatcaaccttgacattactttctgtcgtgagttcgattcaggttgacggtttcttttttaatttatttttttaattttaaaattcgcctggcgctgcctatcggcatcgcagggcccaaaaattcgtaaatcttattaaaaaaattctctaaaaattgcaaaaacctatcattttttggacaaaatctattaacagatccatcagttttcaaaaaattttcccggcggcgcctatctgcaccgccggacctctacgctcgcacattcaccaagttttttttttggaaaaatgtgccacaagaaaatatgttacaaatctgagttccaattttgcttgagtaaatcatgataatttaatatattaaaaaacaaaaatttatctaaaaattttattttttttttgtaaacatctgttagaaatcgagcttaaatttcaaaatctgccaggcggcctatcggcaccgtgggcccccccaaaacctattttttcttaaaaaattagccaaaaatctctaaaatttggtaattctttagacaaaatctaggtaatttatgccaaagggaattgaattgaggcgatacattgactaaaggaatgtggagccatcacatcattcataaaaaattaattttttgtaaaatttttggagtaattcaaatcaaacccccgcccccgcccccgcgggggcgaaatttcgtgc

SEQ ID NO: 18106 - DNA, 3386 bp, Heterodera glycines
ccattgggcttttctcaacaaacaatttttctgttgttcttatcttgccaattctgatttctctccaaattgtcaattcgcttttgccgtcgaaatgtttgttgaccaacgcattaaaacgtggcgaaagaagtgccattttgaggccgagttgaggacggtcaaaattgggcaaaatatccatccaaacatccgtacaaatccaactgaaaatgagaaaaaatatgttgaaacggtcttaaaaatgaaatttcgtaattttttaacccaataaattctcacattttcctcaaaattcgcttattcattttcatgccacgcggagactttgtcgttttccaaatgtcacaaatgaatccaacagtttctgttgatttgtatcagttgcagaattgaggcgatggttggcggaggaaagtttttccttttgtttgacgggtgccatttagaaaaataatttgtaatttagtagcctaaaataatgaaattttgaaaaaattaaaacaaaaattgggcgtaaagaataaatgaatcgcaaaattccattttttctgtcaattatgtattatgatgatttagaattttcggatggaaaggaagtgctctctgttttcatttatttatccaattagaacccccgggggttctattgttcaaccttattttttcacaaacgcaaaaaaatggcgatttttttaaacttttcgtcaaaaaattgtaaattcatctgtcttttagtcattactccttatttttaatcttttacgaatgacggacgagcggaacttattagcatcgttaaagtttaaagaaagtaggaaacaattcaaattttactcaaaatcatttaaaattttaggatggaaattttctgtttttgcatactgaaggccattggtcgattttaatacatttataaagagagagaaagagtaaagatttaagcatttgcttctacgttttcattttcgtttttcgtgactataaaaatgtttgttttttcgattggtttctcattgtgtaaaaatatttctaacataattattattgtgccccctttgtgacgtccttcgtaattgtgctaatttccaacaaaatgaaccgccggtaaaataatatttagacaaagttttccattgccctgatttgattttccacaatttcagttggatttgcaccgacgtgtggatggacatgttcccattttttgaccgtcttcaactcggactcaaattggcacttctttcgccacgtttcgaatttttggtcgacaaacatttcgatggcacaagcgaattgccaattttgaaaaatatcgtattgcgcaagaacaaagtgacagcggtgccagaattgcgtgtgtttattgacaatgccaattatgtgccctttccggtgcccgaccattcgctgcccaagaaaattcgttttaagcatcttcggatttggtaattcaaattccgacatggattaacggatacatgttcctattttcagctacatcgaccattctgtcatcgcatttatccgtgccaatcagcaaatgttcgacaaaggaacaaacttggagttcttctatgtgtcttggaacgaaaccttttttgtccagccaatttggaatgctttgatccgccatattttgccaatttttgtgccaaatattcgccaattgaaatttccatgtgctgatcaactgtactgtttgcttcgtttcacttctccaaaagtgctctccgatctcaacattcattcaatcgatgctggtcgtctgttcccaaatgccattgattctggtgaccaattgctcgatgagatttgtggtgattctgatcagccacttgcatattctgctggccaaattttgtctgaatggcttcacatcccggcaaaagatggccaaccgaagaaattgatttgctggagtgattcgtcagaaatcgctgatttagtcaacaatttcaagaaggtgtgtggccacagtttcgttggattaattgccatttgattttcatttcccattgtttagaaatttcgccgtgccaccacttcttccgccagctatcaaattcaatttactgttcatgtgccaacggaaattgtgccatttcaattggtgaacgaacggatcaacgaaatgctgacattggagaaagcagaaaacaatgatgaaagtatggatgaagaagatgatgatgaatgggatgagcgatggataatgaagcgatgtcaaattggggagactacggccgcgttaaaccaaaattcgggcaatttgaacaatgtcagctttacgttctatggaaattgcattgggtgagttgcaacagcttttgctttaataatcaaattaaaaactgcgctaaatttaggccattgtcgacaccgacagaagacgaagaagcgggacaaagcgccggaaaagagtcgacgtattgtgacatgaatggattaatttggaaatgatcgatcattatgtattatgtgatgaaatgaattttatgaaggaaattcgcaaatatctacattcatatatatgtgtacatgtaaataaatcggatgtataaaaaatgacaaaaataaatgcgaaatcaaaagttttttagaatttgtgtaaaaaaataatcataaattggtatttttgcacaaaattattcggtatgcagacaattatattcattgatgaaacaaattgagaggagcaattatcagctatcaatttacgggattcccgacaaattgaaaaaggaggtaaaaatttcatgagcttaaaatctattaaaaacagacactttggtggagacaatggcctaaattaagggcaatttgaaattagtaataatattgtaaaaactgatgccactcacccaatgtcaaactctccataaaggcgaatatccacattgttcaaattttccaaattttcgtcctcccattgaactgtcttcccaatttgccatcgcttcaacaaaaaaccgatatatttaccatcatcatcatcatcatcgtgttcttcatccatattttcatcttcgtcttcttctttctccaatgttagcatttcgttggttcgttcgtttatcaattcaaatggttccattggcgttgattcataaacatcaagacgaatgatgtagttggtcgaagaagtgttggcacggagaaatgcctataaaatggaaacgaaaagcaaatgccaattaatccaaatcatttatgaatatgtggccacacctctttgaaactgttgacccatcctttggtttctgaggtatgcgcataatcacggcaactcaattgctttggcttcccgtcttttgtcggagtgttcaaccatttggacagcgcttggccagcagttgcatttggcccatcatcagcaattgaat

SEQ ID NO: 18107 - DNA, 1065 bp, Heterodera glycines
aatgaattaattaccagtcgatatttgtaattgctaagcaaacgaaaagatttaattaggggacaaggaaaagagaaggaaaacggaggagacggaggagagaaaagggaataaaacaaagtacagagaaaaaaaggggggggggaaagtccaacaaatgacagctgccaaagagacaattcaattcagaaagagcgaatggcaaatgaaagtggcaaatgggcattttctattggccgggaatggactttgcccctaccattttatgcttacatttcgctttggacattgccattcgcatggatcattcggtcaatgccaatggcatcgccaacactcagcacagtgagttcgggcggagaagtgttgctgggacgacgacggatgataatctttgggtgccggggaaatcggcaggcaaatagccatttgaatattaacaaattctaacattagggcatggaagggccaaaaaagcactcactcttccgctaatcagcacgtaaatccgtccccggatttgcgtctgttcgactttcgtccgaaactgccaaaattcctctctcacttgggctgccaacgcgtgaatttggtcctccccaagaaggtcactcagctgacgacagctgaacgtgttgcggctgtacagctccaacgtctccccccccccccaacttttttaaacggctgaagttctgttcctgctgtgactttgcattaagcaccataaccatgtgaaattccgtccggtgaaggacccacagacggcaatggctaagcgcttcaaagtttgaccgatcgcttttgactggtcaaccgtaccccttcccgactgaccaattactgtggcagtcctctcacaatggtacagtatggccaattcgccaaatacgcaagggccttccataatgcgaatgaaacggcgatctttggtcacttgcactcttcccgctgtaaatggaagataaagtgccattcgattatgatgagcactttcgggagaggttattcaccctcgaggacgaacagttcgctgctgagttcccttgccgtacgatttgagtg

SEQ ID NO: 18108 - DNA, 1396 bp, Heterodera glycines
  unsure (1)..(1396): unsure at all n locations
gagagctaaaattaagaaaaaaagttgctaaaaggtaaagggcaaaaatgaggtggaaaatggtggaaaagaaagaatgaatttatgngcaaaaatggtcggggcaattttgtgataatttggcaattaaataaacntcggaattccctccggcaaccgaatggccgactattcccttttcaagtgccatttgtaatggacaaagcacagaaccaacgaacggtgggaatgaacggacgacgcaaaaaaaggaattccgtccgtccgccttggcattgtgttcattttattcttcttctgtcctttgttttcgtttttaagtgaacggaataatttagcggaaatttaatatgacttactcattcattcgttccgttcattgcattttccattttgaaattcattcttttggaaagccaagaaaagaacgaaatgaatggaggggcgggggaagggacgaaggaatatttttgggtggggtaaagcaaagaaaagtgagcagcgatggcacggcacaggcggaattaagccgggcgtcggcatttttgatggtatgccattgaccggagcccatcactcactcatttctcacccattctgcggctcattggcagttcaccgcccccgccatgggttgccctttcgttgccaaatttattggtttactcgccgtcggagatggttggccttcccccggcggacggttggccacgtcaatttccctcaggcatttgggggagagagtgaaagggacgaatgctttaatttaatgctttatgttttagccaaggaagagaaattataatctgattattttattatcatttaatagttaaatagggcaaaactcaaaatatgaaaaatgaattggttaacagtgaataacaaaagcttttaaacaaattaaatctcattttatttttattagtttctaatgatgctcaaatacaattgttaattagtatttaattaatgagttaacagaagagttcaccaagtcagaagaacagaagaagaagaagaagaagcagagcaacagcaagcagaaggttttgactgaacgcaattggccattttccatgtcaattttagagaagaattgcgtttttgaagacatttttcaatgtgagtgtttaatttgtccgtttgcattgactaatttaaattaatgaaaaaactgacagattaccgtacaaatattacagtagctgacaaaataaattaatacgctgaatgcatatcatttcaatatattcgttttgccagattttagcccatcaaaaacagtaactgtttactttctgtatacaatacattttcccttttctcctccctttccattcattcgcccattggtccgcccattcgccgtccgccgatttgaaagggtttaccc

SEQ ID NO: 18109 - DNA, 2357 bp, Heterodera glycines
  unsure (1)..(2357): unsure at all n locations
agtccaaaatgcggatttctctttcgattatgtatccgcgacgtttgtgagtgnatgatgaagccgacgcatcaatcttgtcattgtcctctccgattgatttggctgttggcaaattgttcgaatgcgtcgtcgtcttggtcattgtttgtcgcttcatttataccggcgaagttcgcgtttttgtccatcacaacatcatcgtcatcatcgttgagccaacagttgcagcaggtgacttttgcgctgaatcccttgttgtcctcggccgcaaaaagagcacggagcaattgcatggcacggctttgagcatttgcggcactggtgcgctccagaacagatgttattgcagtaacagcacacctaaattgaaattaattgtataatgaacaagttatgaacaggtaggtacctaaaacctataattttgaactaccttttttaacagatgcagaagggtttctctcgtccgtcattcgtaaaagatgaaaaatatggagaatgaactaaaacaaatgaaattacaaaaaaaatcaattttttggcgaaatgtttacaaaataagtagccattttttggtgggtttttgaaaaatgagcgttgaaaaaacccccctctgaattagaacctccctctgtaatataacccccctttcgaggggggttgaaaaatagaacccccgggggtactaattcaataggtacggtattcataattgttttttcctattgctaggtctcggaattaagaatcattcaaaaaactacgaaaaaattgcattttgggaagctgataaaaatcataaaaattataaaacaaaataaaaaccagaaataaagctgactttttaaagagccaaaagtttctctttcgaatgatatattctaataaacaatgatttatttgagcgattttataaaaaatccttaaacaatgctatgacaggacttatttcccaccctaataaaaataaaataatgaaaaatgcaatgatatacataaaacataatccaacacaataaagattatgaaaaattttgtgataatgtatctgtaaaaataatagactacctcattttatcataaagcaccacctatattggagaataatgatcaaaaattaacaaaatgatgaaaaagataatcaaaaaaaatctagaggattatgtggtatcattctccgaaaaacggagtgagaggaacttgaaaaaaaaaacacaaagaccgtgaaaatgtgatacaatgaaatgacggagataaaacatcgaaagaaaaaaacgcataataaaaattaaaggcaaaaaatcgaacaaggcgaattctaataaatatcaacaagttttactccatttacatgaataaatggaaaagttaaaggttgtagaacataaaaagaaacgaaattgagagattataaaaatgcattagtttaagtaatatattaacaaaagacttgtaaataataaaaaggacaaaaaagcaaaatgctaaaatttaaaaaacaatcgttcaaaattaaaaaaatgtattcaaataaagaagaaaattaaaaaggcataaactatttattgttcataaagatatgacaatgcgaaaactctattaaaattacccttaaaaaaactaggcgtctgagggcatggtgccgaatttagtcagctgggcctagcagttcagggggaaccgttaagcagtcaggtgtagaccgtcgcgaaaacagtgtgttaaatctacattttttcgttgtgagagtatttttttgaaacaaatgttttttggcttcgttttttggggtggcgtccccaagcgaagcaattccattgattttcggtgtttcctcctgcggagtttggcagagaatgggctgcaattgcgcaccagcgctgggacgcgaccgcgattgcgatgcgtgatccgcgattcgcgacatttttttcctcgatcagcgattcgcgaccgctgcaatttgaatccgcaatgcgcgatccacgaccgcgggattttaaatcggcgatccgcggaatttgcgactccgcggcaattttgggtaaaaatttttaaaggaaaattatttattgaagcgattgttttatatattaaattatttaaaagtaagtttttgtttataaaaaatagagtgccacgggaccgggaatttttgccaaaaccgggaccgggacttgccgggacctgagaagccgggaccgggacctcgattttttcgggacctggaccgggaccgcaagaaaaaccgggaaccgggaccaaccgggaaattttaaaaattcaaaaaatttaaaaatttaaaaaaaaattcaaattttaatttatatcaagtgaaaataatacaaaattat

SEQ ID NO: 18110 - DNA, 4047 bp, Heterodera glycines
atccaacgcagaattaaagtacagactataggatctttttattcccgaaggagttcggtctccccataaatctgggcgcatcggttcagggggactgccccgaaaacccaaaaaaaaattttttggagaaaaattatttaaatgaactgactatataatatttaaaataggttatttctcttcctttcagtatccctgcaaagtttggtgcgcttctgatcaagattctgaaaaaaaagttaagcctaaactttttggtctgtttaaaaaggaattaaaaatttttaaaaattttattcatctccctttttgatagaaaaagcatcagagtgcctaaactaacatgaaaataaaatttggagcgattcagaaccctttctgaaaaaatatttaagaattaattttgcaaaaaataaataaaaacgaaagactcacattttcgaaaatttttttgagccagctagctcggcgctcatttcagtgtaagttagacctttaccggggagtatccctgcaaagtttgttacgcttctgctcaattagcaaaaaatatgagtgatcgaattatcactaagaaagttaagcctacattttttggcatatttaaaaagcaattaaaaaatttttataatttaataattttcctgcaccgaaggtactcactcggcctcttcgcggtcatcgtggtgtgtacatcgattacttcgtcattacaattttagtcctaatcagggctggagcgcgcacagaaaaaaaccgcggccgcgcatcgcgcatcgcgcattcaaattgccgcggccgcgaccgcgcatcgcgcaaaaaaaaaaaccgcggccgcgcaccgcgcatcgcgcattcaaattgccgcggccgcggaccacgcatttaaaaacaaaattttcaatttaatcaataaaattttcccaagtgaaagtttttttgaaaaaaaatttgaaaatttgactgcactttgttacgaaaattgcctatattaaaatatgtactcattgggggaggcattcgaagaatttttccattatatagaaatttttttttaaattttcatgcgggggggggggggggaatcttggattttctgagtcccaaaattctggattttttttgaataaattaacaatctattaattttttaaatcgcgtttttgtgggcggttccaaaaaactttttgggaacattgtgggggggggggcggcggtgccgataggcgccgccggaatattttgatattttcagcgagattagttaacataatttgtcaaaaaatgaccaaggttaatttgtgattttaggctgtttaaaaattaaagaaaaataaaagttggaatatcttctttattaattaaatttcaattgaaataatgtaaagaaaatatgaaaaaactttctgttccgttgaggaattgaacccaagagacaaacactgaaggtcagaaggtttagccactacaacacataagattatggaggaatactttaaatgaaataaaaaaaatatttttttttctaaaaaatttctcattcctctccaattcccttctcttttctcaccagacccccattcttacctgtgcttaaaaatgcgcggcgcaccgcgcaaaaaaaaaaaccgcggccgcgcaccgcgcatcgcgcattcaaattgccgcgaccgcggatcgcgcaaaaaaaaacgccgcgaatcgcggatcgcggccgcgctccagccctggtacagaattttgtacaattattaattggaaaagaaacgagagcagcggggaaattatgggtaatcatgcgcccttttgccacccatccatcgccccatttacaccccacacaaaatcatataaatagaaaagtgcgtgccattgacccccatgcgattgctcgcctgcgccgtttcgcgcttcaagctgtggtcgccgcggttgaccaatggtccaccgaccggcttacgctgaaaagcgtacaggcttggcaatggcctcgcccgcatgcgcagtcgccatttttacttttaattcctaatatgggataaacagaagaggctaaaaagccagggatagccattgttttgatggtcttaaagccaattctggatttttacacaattttggcatttttttagggttcagagccattttttggcagtttttaaagaatatttaggacatatttgagggatttttgagtgcatatttggcatttttagagaatataactcccatcctatgcgctggaagggctcaaattttgacctttgcgcacaacttttgatgcgcatttgagaaaaaataagggtttttagctccggtggccaattgagcgccagctgcgataagtttgtctcattttcagttcagttttacgaattttttttgaactttttaatcaaaaaattgccccattttaatcagcaagcattaggaattttccgaattttcacttttgtccattccttaatttttcattattttttaaaaattttaaaacaattaaatttaattttttattttgaataaagagcaaaaatgttctcttgcactggaaaaaatttgtttgtttttcgaaagataaaaattttctttactttttgttacaaaatcttgaaattttttattacttagtggattttttgaattcaaactaccgtacctaaatacagtccccccaccctaaattagcgccccgcttttgaggggggttggaaatggagcccccgggggctctattttaggaagtacggtatgcaacaaaatgaatgaaaacataattgaattgatatttcaggcagttatattgcgttaaatccggtgggagggaggcatttttaacaaaggcagacaaaaaaaaaggagaaatagtacacaaactattgcattattaggtagttgaaaaagaaacgagcgtaactgttgaaatagtgcatggactgagcgcccctctgccacccattcctcgccccttttacatcccacagtaaaaaacaaacaattgattacccatcatatataataaacgcgttcgctctgtcgccgtgcgattgcctgccggcgccgtttcgcgccgccccgccatctgtcgtcaacgggcttcccaccgtctgttcaggaccgtaggccgcgcgtcggacagtgggcagatattgtgtcctcatgtggtgggcccgccacggacacgcgctttgtgagacgcaacggtccataaaggctttaagcctggtgatggcttcgcccgcatgcgcaatcgtctaggcgacgatgccatgtggcgctgtggcgcttgcattcggttggagtcggcttgagcgaaatcgccaactttttttttcaatcccaattcaagtaaactagaaaagtaccccctcttttttgaattagaaccaggggcatggggaacaacaattaactaacaaatgccaaactaaatcgtgtgaatttaaaatgactcagaaattttctatcaaaattctggaatctgaaaacttctccaacaagattttccaaggacatccttggcattcaaggacagcattttctctttgcaataaacaaagcgccagcagggatgccaataggcgcagcagcggagcctaaattgtgggttggtctccgtccccgagctgtttgggcctgctgcttcccacgcgaactgtcctccccgacgctccccgcgaatttcttccccgagagaggtcggggactaaccctaacctaaacaaataattgagaaaatagtaaaaatgggtatacattttaaaatattatatttttttttctatgaatataaattgaaattggtgcaaaacgaaataatttttgattttttgtcacaaattcttggaatgtccacgctttttgtgtattttttaatcttttgtctttgttgtcccaatcaatttttaaaaattttctacaacaaaaacgaaaatatttttcccgatttttgagagttttgaaatttaaaaattttaataaattactaattttcctaaaaatgaaatcaaggaaatcaaacaaaatctgctgtacataaattaacca

SEQ ID NO: 18111 - DNA, 3039 bp, Heterodera glycines
  unsure (1)..(3039): unsure at all n locations
accatttaggataggctaatttagccttgaaatatcccctccccgcatttatgtaacaatattatgtagtttttattccactactttcggtctgcaaatgtcgcactaattgtagaagttaattaattgagaccgattatttttaatttttcactgcgatatcatcttagtccataccattaactatgccttgaatatcttaaattatgctttcgattttgactaatttttgcttaaaaatacactattctgttttgatcaaaccaaatacatgcattaaaatgtggataataggggtgctagatcgtttcataaaatccgccaaccattcgatagccaagctttttctctattagcctaaattggtcaacattagaaaaagttatatgaaaataagtactatttctgccagaacttatgttaaatttgataattttatttgaaatttttcaaaatttccaattttttcccccgcgccgcgcccccaaaactcctaaaaaatgatttttgctttatgattttaactattanaaaagttgtagaaaaaatttcgctttcgcatttcgcattttcgcatattttatcttttcgcatttcgctttttattttttaatttggcccatccctgctattcatacattcaattcagttttctttttcaaaagtttctgttagaaaattttttcggaggagcgggggggcgggtaaagtgcttttaattatgtgattataatgttttttttaattataaatacatagctaaatttacaatgcggtgaaaatgcactggttaaatatgtgggaaaaatgtgtaaggacagcgcatagtccaatcaatcaatggcaagcagtacggcataatgggtgccaaagaaaaaaacttaaattaaatattaatataataaaaacaaaatttagtttaggtttgaggttgtccgagaaaatgaggctggagagatgaaaaaattgcaacaaaaaaaaataaataaataaaaatacaatacctaaacactaatattaaatcattttcataattcaaattttgttaataaattggattttatttaaaagttttccaataaaataataaaaaggcttggatctgcttacatttatttcttcataattaattactttatttgactcaaaaacaatttatttcaaaataaatgattcgaaaaatgattctctatttgccattcctattcggtattattttcttctatttggaaattttgaagcctaattaatacaaaagtacacattaatattgtatattttaaaatgaattttttgataaaattttatacaatgaaatttctaataatttaatttattttcagcttttaagtcttttgtcttattagtgtgacttttattagttaaatattattattagtattattgtataaaattataaaagaacaaaaggttgaacgttattcgaaccaatgtgcgtttccgaaaaagcaaggaccatttggataggctaatttagccttgaaatatttaattcaatcatttatgtaacaatattatgtagtttttattccacaactttcggtctgcaaatgtcgcactaattgtagaagttaattaattgagaccgattatttttaatttttcactgcgatatcatcttagtccataccattaactatgccttgaatatcttaaattatgctttcgattttgactaatttttgcttaaaaatacattctattctgttttgatcaaaccaaatacatgcattaaaatgtggataataggggtgctagatcgtttcataaaatccgccaaataaataaataaaaatacaatacctaaacactaatattaaatcattttcataattcaaattttttaataaaatcaattttattttaaagttttcaaataaaacataaaaaaactcggatctgtttatatttattttcttcatgatcagttgactcattcaaaataaatgattcgaaaaataattcatacaaacaatttttggatttttctttgggtttttaaacctatgttttattggtccataataattattcttaaaattttaatttaaaaatttttttctaaaggcggttataaacataaaaaaattgaattttcttatttctttttaaatatagaaaacctattaaaaagtataaattctgtatatttttctcttttatagcttttcgcattataattgatccacaatgaagtaagttatgaattttaagaattttaaaccgaatacgattttgaagctatgagcattttgggaacaacatgtctccaaatttgccaaaaatttcaaaaaaaaaatatcgataaagccaaataacgaaaacacgcaaatttttgtgtttttttggggagtgtattttttaaaaatttccagaccgatccttaggggtgttttttcgcttcttttttttcatttttttcaatatatggaccaaaaatcttaaccaaaccaaatttttttttttagtctaagtagcatatgcgcaaaaaaccaaccctagcaatgagtaaaaaaagagtttaatgagtaaagagagatttttacttttaaataaaataaaatccaatttcagtgtttttgttctccgggattcaagactcgaaaatttttttttgccacttattcattcatttattcattcaattcaattatacttgtattaaaaataaatatatataatatatatatttttttttgcctttttatttcacccattggaaaaatcagatgaatttatgttaattgatgaacacacaaagtgaacaaacagtcaccattgatcattttatgtccagaaaaatatttcactgatgttgactagcattcattagtaatctcatttggtcgcttttatgaattagaactaaaataacaaagaaaataataatttttatcaaatttttggttctaatcacaccacaccaatccaaattttagtaaagggtgattaatgagaatttaaaaatgaatcgtccattaaatcccttttaatgaaaaaaacttttcaattttctgg

SEQ ID NO: 18112 - DNA, 1650 bp, Heterodera glycines
  unsure (1)..(1650): unsure at all n locations
aatagcatttccccatgagattgagaaaaagcaattcccctaaagaagcattaacggatcatttgaggaaacaaatgatccatttggtcgataattggggttgtagaaggcagaatcggtagttcagctggtagaacactcttccggaaggccaacagaaacggcggttcaaattcccccccccccgacagtttttccctcaaaggcttttctcagctcattactttattcacgaaaaataaaaacaaccatttaaaaccttttggtgaaaataataaatgtatattgacttcatttattagcattaataatcattntttataatcatttcccccccccctccctattaatttctcaattacagtttcattttttttcgtttgaattcattctccccccccccccttccttcgtctcccatttcatttgttcgaccttttctcctcccctcccattggctctctttcgtcccaccaaaaagggaccgccccttctccataacgtcggcgatgcaatgagaaggggcggggggagcgaaggtgaaaaaaagcgggagaaggaggagagaatggtagtcaaaggaaaagccaatggaaaagccaaaggaaaagcaaagccaaaggaatgggcggaggagggccaatgaaaggcgagacgaatcgcacggcacaaacagtgcacgcgcaacaaacaaaacgcgcaaatggccccattttaaaccaaataaattccaattttccctaatttttgatgtatttaaaataacgaaatccaacaacaattaagcaattagtactccaattaatgctaaatcccgcaaaattgcaacaactttggacgaccgttttcaccccgcagaacagcaacggaagtgaaacattactgacaaacaattcatttgctcaaaagaagcaaatgtttccctccaccccgggggaaggtgaattttgagaaatacaaaaataaataatattaattaattattaaaatttaaaataacagcagcaggcagccatcatcattatcgtcatagccatcatcaacagaacagctcattaacgacgacgcccaaacaacggcacaaaaggggggaggggagaaaagaagacgaagaaaaaagagacaacaaaaggcataataatgaggaggaaaatgagcaggatgatgagccaaatgaggaggaggatgaggaagagcagagggaagggacacgcaattgtcgcggcgatggcgacgaagcggcgggggactgcgaacgccggcggagaacgcccgacgcgtcgccgacgacgccattctccgaaaagcaacaacaaaatgttgcttcatcaaccgttttggaaattaaagaggagaagcaaaaggacgaaggaattgaggagaagcaaaacggaggcgaaagggaaggtaccaatggacgaaagaacggggcgaaaaacaaagggaacaatggcaatttgacgcgggtgcaatcgccgacaacgaaggacactgacggaggcgagcggaggatgaagcgagcggcgagaaatgtcgccggattggagcaaacggggggagcggcaacggacaaatcgcaatcggcgcagccgaaaagcgaacagcggtcagtgggcggggagggataaatggaactgatgagagagagag

SEQ ID NO: 18113 - DNA, 1139 bp, Heterodera glycines
cgccaacggtcttttccccggcggaattccttttccggtgttcggcataaacatcgaccaggtcaaaaagcaccttaggcgcatattcattccgttttttggcattttgctttgttcacaattaccatttaaattagccttttccacttaattcgacacttcattttcagattctcaaaacctgcaaacagcttgaagattcgaaaaattatgaccaattggcccactttctcaacaaaatgccgttggcagtgcaaatgaatgtcgcgatgcatgagactgtcctcagggcacgcgctctgataagctttcatacggtaaggacaaggccatttttgtttgccttgggcacactttggccaatttccggcgataatttgcatatattttcgccctcatttgccttaaggggaatttcaaagagatgtacgccattttggaaagccacaaattctcacaagacagccattcgatgctgcagaaaatatggtgggacgcacattatcaggaagcagagcgaatgcgggggaggtgaaaaagggagagaaaattggagaaaagtggaaatttggggaagagaaattggaaaaagaaattggaatcaaaaatgaaaataatgaaagaattttaaggacacttggcccagtggacaagtacagagtgcgcaagaagtacccgtgtccagcgacaatttgggacggggaacagaaaacgcactgttttaaggaaaaaacggttgggcatagggcacaccaaataatgggaaagtaatgaaacatgccatctttgcagaggacaatgctccgagaacattatctgaacgacccctacccgaacccggcaaagaaaaaacagctggcggaagaggcaaacctcacaccgatgcagggtaattaatggaataattaattaattgattaggttccggaattgcgattcacgaaaaacgaagttttgaatttaaatgacgaattaaatttaaaaaacaaacaattatttcatttaagttggcaattggttcaaaaaccgacgacaggttggtgacaaataaattaaaaatttaattaattaattaattcaaattatttacagagagaccgagatgccacccaaaagcacaagtaaattcctttcggatt

SEQ ID NO: 18114 - DNA, 1250 bp, Heterodera glycines
tcgtatgtcgctataagaaaatttccactgccgaatcaatttaattggattatttatttgtccaaagatctgattttattttcattttttttacttttacggaattaagaaacgcttggcgaagaaatgagtcaaaatgctttttatttgcattgtgatagcgaaatgaataaagaaagaaactttttaagtaattaacgtattttacgagcagtttttttagttctgacaattttggcgttttttgaacacatttttgaggcttttggcatacagtatttcctcgattataagccccggggcttctattgttaaatccccctccaaagtgggcttatatttaaggggggggggggggtactaatcgaggaaatacggtatattatgtgcatatttgcggtttttagaacataaaaatcccagccggctcttcctaaatgatattttagattaccctatcaacagatggttggacaatatctctttccgtttcacaattctctgaatagatgtcactttcggctcaatttgaagaattgctgatcaacagttggataatcatacaattcttttcagtgtttggattgtgtgttcagttcatttatcgttttttgttgttgaacaggtaaaaacgcttaactcttgcttttgacacacgggagtcattcaccattagagcccggcctggacctggatccaggcctggatttttcctggatccaggtctaggccatttttcggcaacatggatttttcctggacctggatttttgttcaggaaacccaggtcaaatgagcaaaaaaatctaggccaaggcaaaagcctggatttcctggacataattttcgaatttattatttcaagtggccgatttttttcaagtttcaattcaaaaaatgtttaaatagatttaaaaacagattattattgtaaattatattttttagatgttcccgccgaagaaatttttcaaattgagcaacttttgcgtggaaatctcagcgactttgtgttatattgtgaacgaaaagtatgatgtgccgaatcatttttaaagattatttaattttagttaggattatcttcccgggcaaattttaatgggagcttctattgtcgaaaatatcatttgttacacggtaattgtcatttgcgggtacaaaatgtccatatttgttcataaaaactaggacaacagttcaaaacagaatacaccaaatcagccgacaaatcatcattaatctgatca

SEQ ID NO: 18115 - DNA, 1204 bp, Heterodera glycines
gtccgcaattgtcttacgcaattgtcgtccgcaattgtcgtccgcaattgtcgtccgcaattgtcgtccgcaattgtcgtccgcaattgtacggtccgcaattgtcgtccgcaattgtcttacgcaattgtcgtccgcaattgtcgtccgcaattgtcgtccgcaattgtcgtccgcaattgtcgtccgcaattgtcttacgcaattgtcgtccgcaattgtcgtccgcaattgtcgtccgcaattgtcgtccgcaattgtcttacgcaattgtcgtccgcaattgtcgtccgcaattgtcttacgcaattgtcgtccgcaattgtcgtccgcaattgtcttacgcaattgtcgtccgcaattgtcgtccgcaattgtacggtccgcaattgtcgtccgcaattgtcgtccgcaattgtacggtccgcaattgtacggtccgcaattgtcgtccgcaattgtcgtccgcaattgtcttacgcaattgtacggtccgcaattgtcgtccgcaattgtcgtccgcaattgtacggtccgcaattgtccggtccgcaattgtcgtaacaccccattaagagcctttttattcacatgaataaactacaactctaatgatttcggaaaaaatctaaatattaaggaaaaattaataaataagatgattttcttccctattgatcactagggattgttttttatgtaaatacatattttttccttgattctccatagcctaattagtaggaaaaacactttcttttttgtgtttgcgaacaaaagttaggacttttatttatatatttttatacatattttggactttttcgtacatatttcgcaatttttcgtacatatttttttgtgcatattttgaggatttttgagaatttatagaaatttttttgtgaaaaattaaaaaatttttttgaaaatgtatccctaaaaaatctatttttttcaaaaaatgagatatcaaaaataatttttaaaataataaaagtgatttaggtaatttttaaggcattttgtgcctgtttcaccctttactaggaattttttccaaaaaaataaccattaaaaaaattttatttacatatttggtacatattttgggttttttgtacatatttctacatatttagcacttttatacatattttatttgcatatttcgcgatttttattacataaaaaacaatcccta

SEQ ID NO: 18116 - DNA, 1527 bp, Heterodera glycines
  unsure (1)..(1527): unsure at all n locations
acatttacttttgcttctgcgcccattgctgtcaaattgtccattggttttggctcgtgttgctgttgttgtacagcttcaatatgttgttgctctcgttgttgctgtccctcttcgtcctgcgcttttccttcgtttggtcccacgcaaattttcgtgttaaaatcgggtgcaacagcgaccaaaatgaagcaaatgataaacagctcaatgacaccaaatgtaatggtgaacgacctttttaaaacaattcacagattgcggccgtaaacaaattttgcgatggttaaaattcacttggaatgacaacaacaggtacggtaacgccggtggttgggctcaaacgggtcggcacactgtagcggcaccggttgcttttggctttgggctgtcgtgccgttgttcggcttcgtcgcgttgtgcgcttgagccgatcttctgtcataataacaactcttccaactactttaaaggaattaaattttaatgattttaattaaacaaaacctgccacaggcgcatggcaattttttggaaaaccatcgaatataattttccattttctttttcgcccttagtaaaaatggcatattttttcaatcgtttctacatatatatcaaatgattaatcacgataaaattaaaaatttttttgcttcgtgcaatagcaaatatccaatgattatttatcctaaattccttcttaaaaaatattttattataaaaatatcaaatttaagtttccttaaatattcttagcatttaatttgtcttaagtctgaaatattatttatagaacactaaatgaacagaatggccaatcattttatcattcgctccttggcaacgatttgttggcatttgcacattttcctcctttaatttgggaccatggtaactatgagaaccctctcaaaagtttgtgtagttttggaagcctgacgaggcgagaacaaaagggggcgatggggtggagaaagggcgtgtgccataaagaaacgcccgaagttggtgggaaattcaattatttatcaaaacgaaatgccatttggaatcacaagccaacggaaaggggggagggaactctttttggtgcatttaacaccgaaaatggataagggaccgaaaaagaacaacgttcaaattggatgaagtttattctgataatggtgtcatgacaattcgtacaaaaggcaactcgtacaattgcttaagttaagcctaggctttaaccttaggcttaggcctaagctttaggctaagcctaggctttgggtctaggcataggcttaagcttaggcttttttttttgtaaatgagttgaattttgtacgagtttcctttgtacaacagtgtacgagttgccttttgtagagttgccattcattaacccgggagccgatcaggaatggcacnngtcgtttccgaannaattaaagtgttgtcaaagcaaatagcccctttnccaaaaacatattaaaaacaattgggtaaattgatatgtaaaaaatctgataaaaatcactg

SEQ ID NO: 18117 - DNA, 1694 bp, Heterodera glycines
tagcaggaattatttcagatttttaagatccttttgaaatagttttttaagtttgttcagacttttttccgccattattttgaccatctctcacttcgttgaccctatcaccttcattctatttttgattcgggattatttggtgctgataagaagccgatatattggactaataaatacataaataattgcccataattagggcatccaaaaatatggatataaaatcacgaaatatggccataaaatatggaccaaaaatcgcaaaatatggatttcaaaattccttcaaattcgctaaattaaagtaaaactttcaaaaatggctaaatatgatattaaaaatcattttagaagaaaaaaatatgataaatctaaaatttactcatttttagcaaaaaatcaactagaaagcgaaactttacttttttaaacttatttttgacctaaatttaaatttttaaggaaattaaaatttattcatattttcgagaaaattttattaaaaaatgattttttcggaaattttccgggttttcggggtcaaaaagccaatttagctgttgggggccgttctaatagaggttttttggaaaaatgccaaaatatggaaatattgatataaatcgcgaaatatggaaaaatatggaaaatatggatatagaaatccgtcctagaagcttcaaaccaagctaaaaacatgtttttcgtacgtttcaggcccccacagtccagaaaaaaaatatggatttccataaaattggacgccctacccataatatttcatttaatttcgatatataaaattgcatgtttgttcaaagacttttttccaccgttgtataagttagagaatttttaaagaaatttacattaaaatatagtagttaatttctttcctaataaatttgtgcgttttttcttttccttaaaaatagtttacacaagtaagatgtcctcattttattttagtaattcgagttcaatctgagaatgagcagcgaaatcaagagaaaaacgtacctaattgataatcattaataaatgcatgttccaaaacattcattcacttaaggcgttatttgccggccgaagtttggcatgccattttgggttttatgtgccgttccgatttgtcggtgaatgtcgctttgacttgcgctcgtttctctgtcttttcgggtgtcttttgtttggtttcctcataaagctcccattcattcttaccaatcagatgaatggttggccaaacgttgtggtcgtgttttgcccccggttgagtttcatcgcttccgtttgctgaagcgtggccacgaccgctccgtcgcttaccgcgcatcgctccaaacccgcgaaggctccaaagacatgccaattgcggaagtgccgtcgcccgcacatttcaaccttttcagctccgttaatattcggtttgaattttgcgttcttattttattactcttccaaattttagatcatttttttacaattttaatcaataacaatttgagtttttcacctgattgtgagaaaatgtgaaaattgagaatcttatttgtttttggattagtaatttaggatttattaattttttttgctggaaaaagcgaacaaaggtcaaactaaaaaattttggccgatgttaaaaaatggtggggagggcggaaaagtgaatccatcctaaaaagcattgt

SEQ ID NO: 18118 - DNA, 1796 bp, Heterodera glycines
tctctctctctttctctccctctcttcaaaggcctttcagagtaacaaaaagtgaaagattgtccctttgggaaagaaagcaaagtgaaggaaagaaacaaatggagatgggcatttatggccaaatataattatttttttagttccatgtgattttctggacaagtggtgtttgatcaatacacaataatcaatgatcaaacattaaaccaaaatcttaggtggtttttctaaaatgttggttaaagtacgaacatgcgactttttgaaaagtgtcatgtgatttctgctaaaagatcgatctgtgtgatttttgatcactgagtttgatcaattgctgctgatcagtgtcagtacggttcagtccccttgtcccacccttttcgtcgtcccttccctttccatggcccttcgatggtgcgcattccttcggctcagttaattaattgctttcgcctccgtttaagtgaggactttcccccgacatttcaatgttttccttctcaacaccattttgggctgtcacactttttaaaagacaatctttccattttccgtccgccatttataaattagcgcagaatttgcaataattgcgcgtttatttgattttgtgttgattagcgctccgattgcgccgccgttgtctcttaattggcccatttgcaactgttccttccctttgcctccctcccaaatgcgtcaacgcggccgtccccgtcgctcgtcgatgccggccgttgcgcaccacaaggtgcaaaatttgtgggaaaaatgatcgaaggcaattccagctccaagacactccgtacgggcagcagcagcagcaaagtccgtcccagcagtactacagcggagaggcggacacggagagcggggaggaggaggagtcgcggcaactctcggaccgctactcgcgcatccaactggcggaccacgcgtggcccttggccggtgccgagcttagtgccaccagcaatcggcactttccgctttcgaacacaaaaaacggtaaaaatgaggacgaagcggtgccgaccaactcggaatctctaagagtcgcccatgccttttgttgaaaacgcctacagtaaccccaactggccaatgcttacagattccttcgacgacgacccttcccttccaacgacggattttgattatttgtacggccatgctcagcagcagcagcagttcagcaccaacgacgagttggagcccgatgactccgctgcggcccaattcggttgtgggggaacgaagcggaagagggcattctccttctccagtgcgccttccgcttccgccaccaacacaatgacgaccagcacaacgacgattatggggctggtgaacgggggaggcggcgcggggccgtcgtcggcgatggtcggcggcggtggcccaacagcggcggttgtggagaagagaccggccaccaaaatttgccgagtttgtggcgacaaagcgtacaggtggacaatgccacaaatactgctccaaaccgccttttgttcagctacaacttcaacgtgatcacttgcgaatcgtgcaaagcattcttccggcgaaatgccaacaaagagaaggttttggcgcccaatcgaccgaatttgaatttcgtcccaaaggaaattcggtgtccattcaacgaacagtgcgacattaacattctgtcgagacgcttttgccaacggtgccgactgcagaagtgcttcaatgttggcatgaaaaaggagtggataatgagcgaagaggcgcggctggagaagaagcagcgcattcaggagaacagg

SEQ ID NO: 18119 - DNA, 1782 bp, Heterodera glycines
tacgtttggtactgaattggcactataagatttgaatcggttcaaaaatcggtctatacataattgtcggtttttatatggcgcggttcaacttcatataattgtttttcgacttagctcgtcaagagctttcgaatttccaccaaaagccaacattcttcccccccccatctttaaattgcccattggtcatctgctgacccgtgcccttcccttgaaaatggcgtcgttttgtgtgccctttgatcactggtcactaatgagccttaattgtgtcatttactcctcaccaattatacgctcatcacactaatagcccaaccacattaattaaaataaactgatgactcaatctctctctgcccctttaatgcctcatttttcgtccgtttcttaatttattctttataattttaaggtttttcctcgatcatttcgttttacgtaattttaaccacaaaatacatatgtctgctgatgataattttgttgtgcatgaatctttcaacgacacaagtaaactgaataaaaacattgcctaattaattaattaattaattgccgaattaattaagtttggcccgccagcattgggggcaccgattttgtagacatcccgtggtggaagagaatggcattctggcgcaacattttgctcaatgccagatttaatattttgtttaaaaatgaaactttgttatttttaagggacttttcactgtacgtacaccgacaaatgacgcacattcaaatgcaactacggtaataaaatgccaaaaagcaattttaaagttaaaaaaaaaaaatttttagtcaattatcaacgcggtgactgaacttacgaaaaatgtggcccaattggagcaacaacaggtgaaaaatgtttgacaaaattctaaaaattttatttaaattccaatttttccgcagggaatggacaaattggcgaatgtcaaagaaattcaggtcctaattacgtaattaaatcacaatttttaggggtcatggtaaaaataaaatttccttttttcaaaaatattccaaaaatgaaaatttcgaatttgaatttgttttaatttttaaattctttaatgccattttgcctatctctttcgaacccctaaaaataaattttgcacattttcagtcgcttctcagcgcagcgattgacgaaaaattgtcctattttttgttgatggcattttttctgatcatcgtcgttggccttctgcagctgatgatcaaaggaattgccgataaaattttgatgcgattttggcggaacaatggaaaagggaaggaggaggagaaggaagaattggtggaagaaaaaggaagaggagagaaaggaggacgacatgaggaggagccaattttagaggagaatgattgggatgaggaggaggaagaagaaaaagaggaggaggaggctgaaggagaggaatttgttggggaagaggatgaggaagaagaattggtggaagaaaatggaagaggagaggacgaagcaagacgacaggaagaggcacttttggaggaattggaaggggaaagggatgaagaggaggaagaaggagaggggaatgaacgagaggaatttgttggggaagagaatgaggaagaagaagaaaaggaggatggaatggaggcatttttggaggaattggaagggacgacagatgaagaggaggaagaagaggaggaatttgacaatgacgaggaggagaagcggaagacgaagaaccaattgtgaggaaagaagggcacaattttggtgagcaa

SEQ ID NO: 18120 - DNA, 578 bp, Heterodera glycines
gttgaaaattgagttttgggaataaaaattaatttctttatatttttaattaaagtgcgaattttgtgggctgagatttgcgcagaaaggaaatctgaacagccacatccgcactcacaccggtgaaaaaccgtttgaggtgagttacggatttggattttttgactttattatttcttttgcaaaaaatagtgcaatttttatggcatggcatttctcaaaggagtcagcttgacctctcatcgcgtattcatactttacacttttttttcaaacacagtgcgacttttgtggacagcgatttgttctcaactcacatctgaaggaccatcggcgcactcacacggtgagaaaccgtttgaggtgagttacggatttgcggttttaaaaacaaaatgcactattttgatttatttattttttaattccattacctatttggtttttattataaaattaaataaataaatttcaaattcagtgcaccgaatgtggccgacgatttgctcagataagcaatttgcgtgtgcatttgaacagaaaaaaaaagtgcggaaagaaatgatcaaatgggattt

SEQ ID NO: 18121 - DNA, 2471 bp, Heterodera glycines
  unsure (1)..(2471): unsure at all n locations
caaaaaaatttttaaactttttcgtcagatttcaaaaanttcatccatttactaagggagtaggtagcaatttgtgctttccatgtaaatcctatcttccaggtaccactagatttctgaccgttgaatttatgagcgatttttgggacttaaattcttaaaatgtaatacgattttttaaaaatttagttggcaatgccattttctttgtgtgtgacaatgttgctcatctgttccaatctggctttgcaaaaagtaaataaaatacaatgatttaagttaatttagtgattttttttcaagttgggaacgcttttatttttgtgagagataactttacaaatttgttttggaaaacggttgagaaaagtgagtgtttgtttttcaaaaaaacaattaaataaaacattaattatttttttctaattcaagtttggaatgcaactcttttcgtgcggaacggtgttgttgttgtcgtctggggtaccatcgaaaaaagtttgtactttttttcattatgccctcttaaagaaaaaaattattaaaaattggaaaatttttgacccttctaaatgaaaatcatcactaactactcatactagtatttaatttttctacttttcagttttcactgttttcaacgttctaattcgttcaattgcgcatttcttcacatcggcttacaatgcgtttgccggatttgtgttgggcgtttggcattctgtgcgcttttctcccccagcgacaaaagtggaggaattgttgaacaaggcgcaagaaataaaagttcgttagttttctgagtcaaaataaaaatcgctaaaaagtaaaatgagcagattttcaagacttgttaatttttgacataaaaaattattgtttttcaaaaattgtgttatttttttggtgaaaaacatatcttagaaaaaaattccagacctttttcttttttgctaaattgaacagacattaggtatatgaaaatgtattttctttttaggaccaagacctgccttctgatgatcacccgctgattcagcattttcatcgcattttgactgccacattggctgaggagcggacggtcctggagcaacggcttcgtgaattggcccagcaaaaacaacagcagagctcaccatcagcaatattggtattgaaaagaaaaggaaaaacgagactttctcttttatttaaaatcggggaaccaaagagttggaaaatgcaaaaaaaaaaaagagccatttttaagtagttaaaaatgttacctttttttggtgaataaatctcaaatttagtttagaaaaaatcttcatttgcgttatttaatagtccacatttatcttccacaaattgacattaaaaggtttggttagcttttaaaacttgcgagaaatttttcttacaaattttctaatttttttttgtgtgcactcaaatcttctgttacggttttttagcccactccaacaattgacggaaacgcactgaaggacaacttgcgaaaagagcttgacttgaaattgcgcgttgaaaaggaggaaatcaacaaaacggtcaaccattttgaggagcaaataatgacggttagttttttttggtacttgttcagtttacctgacagatttcacatacattttcagatgcctataaatgggttttagaaactaatgaaaatagttttatggggtttttgatgtctctgatcatgaaacaggaagaataaaattcgaaatttgtatggatgatatcctcatgggcatcttgtcaatgagggtattattggtacatgaaacctatcaattctttgtccctgtacagctcatgtagtgaacggtagcgctgatctgagcccggattcgtgatcagcgaccctaaaaaccccttaaaacttattttcattaagtacctttttttccaataattccatataaattgtatccaaaagaaaagcggtccacgaatgattatttatttttttagcacaattgaataatttaaattcagtcagtcgatgcgcctttcaagcgttgtctgagaataaatgaaaattattttattcaaattttttagggccaaactttagcagattcattctttgtcagaattccctattctttactatattttaccaattatgttttcaaaagatttttctagtaaatttagttttttgacaacttattgttgcttaaaaattcctttcgaaacggtggtgtaataatacccttattcttaaacatttttcttttttttgcagaaacttcgcacgctcattgaacaaatgcattcccaaaaagacgtgttggagcatgagattgatgaagtgcgcaagacgcaattggagttgaaaaaagacgtggaagacacagggaaaccgttgttgaagaaggagaaaatcacacaacagttgaaggaggacggacgaacggaaacgatcaaagtgagaaattattgggattaggagcagg

SEQ ID NO: 18122 - DNA, 2856 bp, Heterodera glycines
  unsure (1)..(2856): unsure at all n locations
tgcttgggaagcacttgatggaaaaaaccagggttgcgaccccgacgtcggggtaggaaaagtcggggttcggagttgtcggggttggaagcgtcggggttcggggttgggatgaccaaatcgttcggggtaggggttcggggttttttttttaccttatgccatatagtcaaaatttttttattattttttctgaaaaaatatttattaatttccatataaataattttatttgtttattttttatatttttttatcatgaagatttttgtataaaattatatttttcttgaaattttaaaattttttttttcggcgacgtttgtctttttggcggcgactttttgctgcatcgaatttctgcataatagatgaaattattataaaatgttatgatgacaaaaaaggcaatttcgagaaattatatttaaaaaaatgaatttatttaaaaaatgagcaaaaatttctgattacttttttgtttttcaaaacatgtttttttcgcggcgcgctttttctaaagaattttagggaaacgccgccggtattctaacatttttcaatttaaataaattttgtttttcttcgatattttgtcaaaatattattaaattttcatgatttgagttatgtaaaattgaatttttaatttcaactaaggatttagaaaattaagggttaatttgttaacaaattaagccaagaatggtcgatttttatgaatatttttgtttaaaaatcatattagtgaataaaaaaataaattaaaaaataccaaccggtatcgaactcatgacagaaagtaatgtcagtgtgaagaactaaccattacaccacattccgaataaacaaacaaacaaacaaacaagtaaaatagcaaatttacttgattaataaaaatttcgcaaaatggtttaaagaaattcaaaagcgtcggggtcggggttaaccccgaaaaatggccaaaattgtcggggttggaggtcggggcggggtaggggtcgcaactctaaaaaatatgggcgggccggctttgaaccggcgtctctggctttccggaccagtgttctaccagctgaactaccgatcctgccctctccagctgcccactttgatcgatcgcataggatcaattgttgcctcaactggtccattaatcttcctcttcgggaagcttcttcttcttctctatctcagaagagagaccagagcgggagggaatggaactgcccagaaaatggtcaaatgctttggtgagacaagaaacaatgatcaatgctattgcncattcttgcctaaagtgcttgctcaaaaaggacgagtccaaaagccattttcagacacacagaaattgataatccgactgtaatggctaatcaaaaaatggctgtgggagcccaaaatggtgtggtagcataagcaacaggtgccaaaatgaaggaaagatggcccaattttttcctaaataataaggggcaatggtaaacgttatcctggctatgtctttcttgggtcgcgcacttcacaaatagtgggcaacaacacacattttgctgccacatcagcacagcagcaaatttttcgttcattttactaagcgtttgggtctggaaaaaattattaatataaattatatctgtaaaaatttactgaaatttttctgctataaatggaagcgccttttttaatttttctcagtaaattaattttgcatgttatttttgaaaataaatctttcctcatttttggaaaaaacggtaattctttaagcttcttttaattttgaactaaaaaatattagcaattaaaaaaaaatctgactgtttttagagccttttagcctaaaaagcaaatcccttgcaataaaattgttcaaaaataaaattgttcaaagaagaaaatatgtatggttgcctgaattggtgctgttcacttgccaagcaattctcttttattgcaacagattctacttcatttttacaagcaaattttatctgataatgatgacgtaatgccaatgccattctcattttttacttcatgttgagagagagagggagagagagagagagagagagtagaattattttacatattgcgaagatagcgagaatgcgaaggagtgattgagagtcagagaatttagtaaaagaaaaagaaggagagagaagagagagactagagactgactctaaaatatttaattaaaaacaaaaaacgaacattagagttaaaaattgatttttaaaaaacatcatcaacagtaaaatattgtttttttaaatatttcataagcagtaaaacattgatttaaaaaaatcaaaatcatgcgcagtaaaatattaattttttaatggagattagggttattcaatgattataattagggagtgtaattatatggatataaaatcgcgaaatatggacataaaatggcaaaaatcgcgaaatatggacataaatggcaaaaatgtcaaaatatggacataaatttttcaaaattgagtgcaaaatttcttcaaatttattggttgaaattgcatatgagatacatttccaaattttttgactcggtaaggcgctttgacaaagacggctttcgttttgcaattagtcggtcaacatccgaaattggtctcgaattttttcggcaattacgtgcaatcattttaaaagaaaaaaaacataaaagataaaatttattaatttttttagcgtaaaatcaacaacaaaagcgaaattttcgcttttttgcttatttttgacataatttattaatttttaaagaaaatttaaattttatccaatattctccaagaattttcgggcgaaaaaaggattttttggaaaaatttt

SEQ ID NO: 18123 - DNA, 1148 bp, Heterodera glycines
gggctctaatgcactttatgagtccaatcgaactttatgagtccaatcaattgacaattccgggtttttatacaataactttgttcatgttcgaacaaacctatttttttggtatcattcgaatgcacaaagtctgcataatgtaataatacgagaaaacaagagaattctaacatttcaagaaagttacaaacgaaaataatcagcaattactcaattaatcaaatcttttttggtaattgcctgaacactgcggttttatatattttagcttagttagactttgtgctttcgaatgataccaaaaagatagggtttgttcgaacatgaacaaagttattgtataaaaacccgggattgtcaattgattggactcataaaggtcgattggactcataaaggtcgattggactcataaaagtcgattggactcataaagtgcattagaaccgatttttttctatggctctcaatttccggaggaccaaacgaagccgaagtgtggcgccgaaaagtggtgaaaaggaggagcccagcgggtggccaagtcgaaatttctacgtcgtggagatcagtgagtttgcctaatttttccagcatttttaagccttttaccgatttgtatctcttaaaagtgccgcaaatactgacactcagaaaaattagacaatttggtaccctgtgtgaggtccctgaattatttatcaaaaattctcgaaagctgattcatgtattaaaaataatttaattttggtcattttaatgattattaaatattaaatattttataattttttcgaatagggaaaattggtaaatctaaaatttttataaaaaaaaaaaatgaaattttgacaatcattttttgagaaaaattttcaattcttagggggtgtatttctgacattttttcaggtatttcttagggggtgtattttcccgattttatcgcatttttactggaattttttcggaaaaacgccaaaaaaggcacgataaaatgccataaaaggcatctaacgcacgacatccccgaaatgggcaaaaaaaagacataataaaaactcaacctaaaagcttcaaacaaagggaaaagtgtgttttttatgcttaatatattgaaattattgcgcaaaaaaaggcttatg

SEQ ID NO: 18124 - DNA, 954 bp, Heterodera glycines
atcttttggcacataaaaataaagttacatattttggtttaataatctgtaagaaaattgaaaaatacacccccaaaaatcaactttgttctcatttctacaaattatttatttatttccaatttctactcaaattgatcgggtcacctttcacatttttttttgaaagaaattcgtacaaaaaatttttttttataaattttcaaaaaaacaagtttaagacaaacattttattcattagaaaagacatatgaaattttgtaaattttacctataaaaattaaatgattttttgtggtgcttcataactttattcacattcaaaaaatttacaatacaaataaaaatggagaagagagaatttcgaacaaacaaattgaggctgagttagaatcaatgcaataaaaaaaataaaatattaatcaatatgaatataaaaataatagttgagtatatgtgttttcatatgccatttcaaatttatccatgttaaaccaggctaaagcagcatcgacctgaagtgtggaggagagctatatgtttaaaatgaaaatcactttttgaattaaattataataattggtgaccagaaatttttattttccgcttaatttccaatattttaaccgttgtgattggtctgtgcttttttctgcaatcattttggaacatttcaaaaaaaattttaaaccatagtaattgattatttatttgtcgtatttagcgcctataaaaaattgggggatgggggggttaaattattttaataatattctcatggggtcaaagctttgtttttttaccgactgtacaatttaaccctaccatttgcttcaaattccattcggacaaggtgtcaatcgacttgactttctaatgaaattataaacacttaattaggtggctaaacaataattaaagtggtgttctattgtctcgactcacttttgcaca

SEQ ID NO: 18125 - DNA, 2021 bp, Heterodera glycines
ttgtttagaaaattaattgagtcaatttagcgcctcccggcccctaccggtttattaaatcataatttatttcctagtttctaaaaaattttggatctatatgaacttctaataccggaaattcttgaaaaaaatgaaaattaacagcttattcattaactataattggtggactaaaatattaaaacataatgacaaaatagaattttggcatttgtaaaattaaatttacttaaataaattaaacaatgcaaaaatgtgtatttaaacaaatgaaactcacattcttttttgtatttttgtttttttttaataagctgtagccaaatttaaattattttaaaataatttatattactgttacatcggaagttcttcaattggtggcaatggttcggcctttacattgaaaattgtttaatttgaataaataataaataaatatatacatacatacagtcgcacattgtattttgttgagtgattgcatgcacaacaattcacggtcgcctgacataataattaacaataatttgtattatttaattgggggttaccaaagatttgtgaggtccgatgaagcattccaaaagtttttaagctaaattatttaataatattattttctactcgggctatcaataaaatgcatacgcatccgagaatgatgtcttcaaatttaatagtgaaaagtcaatcatcatccattgaccccccccccccccccggggaatttttcgcgttttaggccaaggaaaagcattcattcaagccatttatgccgcaaaaaagaaaattacttaacccaataaaaagatcatttgtaaaaactcccatttcaaatgggattttcacaagcagttatttgggcgcctagactgtaaccgaattaaaaaattatttttaaaatatgaatatttaaaatttatttaaaataaataaattaccgttttggataggcgtcggaagctcaattggtggcaatggttcggcctttatatagaaaattggttaatttgaataaatgataaaaaagtaaaataagcatacacattgtgttttgttgatagaagcatcgtcgttctgcatgaaaaaattcatggatgcctaaaataattaaactgtaatttgtattatttaattgggtaccaaagatttgtaaggacccgtgaagcattccaatcctaaaataattaaacaataatttgtattatttaattgggttaccaaaaattgtgaggtccgatgaagcattccaaaaatttttacgctaaattattttaataatattattttctatcgaattattaacaaaatagcatacgcatccaagaatgatgggttgttaaaacatctaatcgctaagcaattttcatttattttgggagcatctgttattaattttgtcttattttgctaccatgccaatatttgtttaaagcccgatttgatatgggtctactgcaaaagcccaagtaatatttaatgttttactttgtctgttgggtgtaattgcatcgcgcgcaattccaaaattgggccttaaaataaatattatatcccatttaagttcaaaaaataattaattttaattattttgattaaatcactaacgttttttctatcaatttgtttgaagccatcagtgcttggcgcggagctcagaccacaacgatctcatcagtgatgccaaattgcactcattattaagcctctggtctttttcaaatataaaacttaaaaatcaataaacaaaaaaattactgattttctcagtgataaaaaaacaaattttttttgactgttactccagtaaaattattttgcatttatttttttatttagcctaccaaaaaacaaaatcttttgtttattgtcatcctgataatactatgaaaagaattcaattcctaacaaaaaaaaagactacaaaatccaattgaatgaaatttgttgaagccatcccttcgcaacccaaaaactgattttttatggcctaatccgtctatttatgcacataa

SEQ ID NO: 18126 - DNA, 1270 bp, Heterodera glycines
  unsure (1)..(1270): unsure at all n locations
tctanngagtcttgaaaaaattgggaaaacttcactttaatttaatattcttattttttcgaaaaaataaataaaataaatatttgcttttttaaaagagttttacagaaaactttccagcgatgagttttttcacgcaaatttttccaaaatggaaaactgcgatttatgcttcacaactagaaaataagtatttctcatcaaaatatacgtgaaaataaaatttatttttatttttaattataattagcgtgttgcctgtgtatggtctaaaaaatgacaaaatgcacataaaacatgcactacaaatactcaaataggacctaaaacccgaaaaatgcccaaatattcaataaaaacaccaaaatggatttgagctatataaaatgtaaaagttttgtaaaagaaaaaaaatcgagaaaaataaaattaaaaaatggctaatatgtatttttcaaaaacataaaaaattttttgattcaggtgtatttacgagttttttaactttaattatctgataatttattgaaagtttttaaaatttctttccaaagccaaaatttttaaatttttggtatattttaaaatttccaaaaagtccttcttaggggggtctattttcggttttattgcgtgcaaaaaatatcaaaaatatgtttaaatctaaaatggcttaatatgcatttattcttgaataaccagaaataagtatttattataggcgctaatttttctccgtccatctttcaaattagagtgagttattaataaataactaaaaatcctactttgacggttgggcacctaaaaacttttaaataacaatagttaaaattagggtcgcagcatagggtttatcgggcatttagtaaatttgaactttttaagtacttttttgtgatttaaatacaccaaaatcaaaccagtaatggtaattaattaattatgttggcaactaaaacctttttggccgtttctttcacatttcttcccgctttgtttgcaattgacttttgcaattcccattgctgcttcagttcatgcagtgccactgttctgtagtttctgaacagtgcgtgaaaagattgcagtgccgtggcatcatttgatggcaaattgggagcaattttctgccattttactaaaattataagtgtttgtttaatcgtttcgtccgggtttcgtttttctttcctttttggtgcgtttgacttctctttgagcgtaacacctccattttgccccttttttggaanatgctccgattttt

SEQ ID NO: 18127 - DNA, 1046 bp, Heterodera glycines
gggggggggggggggaggggtctcccaccgaaaatttgcggcaaaggggtctcaacaaaaccgagttgccgaccttttttttttgcttttccaatttttacaaaaaaacttttggggaacatgggggcggcgatgccgttaggtgccgccagaaaaattttgaaaatttgctgccatttgctaacagattttgtctagaaaatgaccaattttggcgatttggggaccttttttaagaaaattggtacaatggtggaaaaaagtcttgactcaagatgataaaatttgcagaattttaaatttcgcctggaattttagctgattattttttgtttatgtatatttatttaccccaaaatatgggccttttatacaccacaaaataatttcaatccgctttatcattctcgtgaataagtcttctgatcagaccttgctcaaaaaaggggcggaaaaaagtcaacttgaaaaactatttaatagtttacccaaaaagctgaaaaaaatcttatttatataacttttgatactgttaaaaaagtctcttataccaacttggtcagatcactcctttatggtgaccgagacaccaaaaaatacattgaaaatctggaaattttcgaaaaaaattcctagggggttaggaaaatttccctggaagttttgaataggctcattggaaagaacacaaaattctctaccgaattgccttttgaatggtagggctacggtttgtatataaaaagttattcttgggttgaaaattggacaactcaaaaatgataaatttttgatcattttcccttgaatacgatagaaaatagtgattttttatcgtcatcaaatccaacccaagtataactttctatctacaagtcgtatcccaccattcaaaaggcaattcggtagagaattttgtgctctttctggcagcccaatcaaaaaactccagaaaaattttcccagcccctaggatttgatcagtatctaatgttaagcaagcatgaattatttcaggtttttaaatgaactttaaggtgcttttt

SEQ ID NO: 18128 - DNA, 2627 bp, Heterodera glycines
ataattcaatgtttccatcgtagtgtgcgtcttttcattgtcgagttccagacacgttttatgttccggtgtgattgaaatttgggttgtttgatcgtaaatacattcaatctttccgttttgatcaattgcgcagtcgtttgttcctgctaccatgttagtgacttcatcacatgaaaaaatagtcggcgaattgagtaaaagcctaatcatgattaaataaataaattgtttccgtttaattatttttattttctgtaattttctttttctaccgcaattgtagactgatagaaaaataaatatggtgaagcggtatagtatttttataattttaagactaagggtgataacgtaaagggtgagcattatcatgatcagaattagtgcccaatgcatttgacctatgcattgtgggtttcgaatgtattccatacagaagcgacagataattaattcacagattggtgatggaggacatgttaagtttttgtactcagatacgcttgtgcctttcataaatttaatgactggtttatattcgttcatagtaatttttgtaggtagagaaataaattcttcgctctgtggacttcgctttaggataaagtatttatcaaccaaaatttctaattccgtggtagtatgagttgggtttatttttattccaccttttgtacattcagcggatatttgttcgttttcgaacggatcgaattctctttttttacgtttgagttcatccatcaatgtgtcattagccaaataaaaaattctttcgatgcttccccatgcttttattgggataatttctcggtctgatttcacaagataagttttttcgtgtggctcgtaaaagcaaaattttgttccatgtgtgtcagtgcattcgtgttcttgacagaatttttgtgtaccaatcgtcagattgccctccccaaggcaacgataatcaattcgagaattggcttgtgtatgaagtaaattaagacttttgactgaatgaatgctattatcataaagcattattgaactaaatatatttttatccattagggagcatttttccgttttattgaatgaacaaacgtttggtttaaagaatgaaataatattttgaatattctcctgatcagttatttctctttttattcggtgatatgaggcaaaactacaaaaaattgtccaatcaggacatttgcattgtggtccacaatagggtgggtgattttttatgacgtgttgtttgtgacaaaatattttacgataacaaaattccattgttaatttattttgtctgatagtaaatccattttcaacacaaaatgttgtatacttcgttctccatttttcattggtttttggacattcatataaatgggataagcatggtaagagttgcataaataatagaagaaacgtgagtgtgtttaaaaatactttgcttaattttggggatgataggacactttgttttctctttcgatttgtaccaatttgtttgtgttcagtggtttttattaagtttgtgatagtctcattctcttcacagtcatttttgttaatctctaacggatatagtaattttaatggacggttaatgacatgtttgcttggtagttcaatattagcacctcttatgataccgtcttttccttttatgacatttttaataattcctgttttccacattgctcttggtgtctcatcgtgaattatgacaacttcatttggttctggaaaagattttacacaattctttgggtttttattttctgttttgtatctttctctcagactcggcaaatattcttctgtccaaattttccaatagtcatccaaaatttttgttgtctttttccataactctattgtttggtcataataagttggttttggtaaatatgttgggtcattagtttcattttcttccaaaattgggggaatgcatagatttttgtgcgggagtataaaatcgattggtctaagaatttggtacgaattaatttcgtcataaatgaatgtaattggtcgtgagtttactaatgcttcgatttcacaaataagtgtttgaaatgaatcaaattctatcaatttccttccgattgcttttttcattgctgattttacattttgatttaaccgttcgattgctccgttttgccaaggggctaattcaattgaaaaaatccattttatgttttccttttcgaaatagtttttaattgagtcgtctttaagtatgtcctttaattttaggacttcaggtaatacttttgatgcaagttttaattgtgatgcattgtcactccaaatattcttcggtgtcccttttcttgaaataaatctgcgaaatgcattgagaaagtgttgaactgataatgatgtcactaattcgaggtgtatcccacgtgtggagaaacatgtgaaaagtattatccaacatttttcagtgaaacttttaatttgaagtggacccatgtaatcaaggccaacgttttgaaaaggctcagttatttgaactcttgattttggcattgcggcatttttggttgctgatatggttttgcgttatatcttttgcattagaaacatttgtttctgatttggtcaacaattcttcttcc

SEQ ID NO: 18129 - DNA, 1052 bp, Heterodera glycines
cagctaacacagaacctgggagaacgaatttattatttcattaaaaatgaaaattaaatttaaaaacaccaaccaacatagaattcggggatgtcaattaccatacgtctttcaaacatgtctgcttggacgagttgttcaaacaacgggtctctacgatcaaaaacttcggagcgaagaaaatcaggataagcaattctaaattactaaagaataaagcgttttaatttcttccccacgggaaatcatccagagaaattgcatttatccgctcagtcgacggctgcttcacattttttgccctaacattagcaagcgtagtggccaagcgtgtagaaggaagcctttttagcaataatgaacaaactgacaaatgcattaaaattttttattgaatcttaatttgatttatttcaatgataagagataaattaagcagttgtttttcaaagtcagtaattaaaaaaatatgaattaaaaatttagtaatttctgtaactgcaaacattggaagggcggatatataagtagatttatttgggaataaaatgaaatgcagagaaattttgaataaataattaattgtatggccttatgttttgaaatttaaaaaggctgattcgccgatttacctttccctttttctcttatctgcatttttcaatttttcaatttctcatttctttccttttcttttttgtctcaaaactaatctaaggttaagaaaccaactattgcgatggatgctaatgaaaatatgcaaacagaagacaataaaaaaggaaaagtgaccaatgatgagcgtaacttggtcgtctcatttattcagtttttgcgtcacaaagtctcatcgaaccaatgcactgatgaacagattgaaggccttgaaggttttctttttgactaattgttggtggtatataaaaaacgctgcttgaattttttaatcatttcatggctttttattattgtctataatttaatgcatagaattaatcagccagaattctaaacaaatctcaaatttatttcatccagtggtgaaagcatga

SEQ ID NO: 18130 - DNA, 2624 bp, Heterodera glycines
  unsure (1)..(2624): unsure at all n locations
ggccaagctgggaacccttctgcaaatgctttctctgagatgcttcgtgttggagaggctgtgagttattaccatggatttttttaaagtccgattttaactcggcaagcacaaatcttttgttgaatcgctttttccgttttcagcttgctagatcgatgcaagagagtaacccggatttggttgagcagctccgtcgtcagttcggtggagaggacggaaacgatggtggcgccggagctggaggcaatcagaacaacaacaaccagcagcctccgcccggcagtgtttgagaagtaaaaatatcagtgaaaaggagggaacggacagaaatttatgtgatggtccgattaattgtccttctccttgtgctattccttttgatttcatcagaaaaactattatattattatgtgttctctccagcaggaaccgttatttgttaatgtcacataacgcttataaatctattcttggaaaacatcttatgaaccaaataaatcaccaatttgcatttgtatttaagcaagtgtaacagggcagtgggtaattggggggacacgcgctgcacgggtcgaagggcgcgagttgggttttgcttgcatcgaaaaatggcactgctgcaagtgaaaaaacggagaaaggcggcggttggtttgaagagggacagggcaacaaattgtagcagttctgctcctctcgggaattcctttccggcaaacactgaattttttggaaagggtaaggaaaaattggcatttcagtgcaactttttggcagggacagttgcggatccgccgccggattccgctaccgcaagtcgttgagcagggactgaaacgggtgcattgacttatatttccgcggaattccccaacggttgctttggccaacctccacgccgaccactcattccattggcaagggtcgctgtgttttttgaatgggcccggctccgtacaatgcctttgttccaccggtgttccgtggcacggaatgcacttagtcggaccgtttgtcagactttggtctgcattttcattgggcccactttcaactcatcactgacagcctctgccatttcacattttctccggtcacaaattctccatcttgtcctaaatggtcgtgaagagcccatcggaagactttggcattccgtccattcactccaaaaagtccattcggcgttggcttcggcaatggaaagggaaggatttgtccaagcttgggatggctcgtcccgctttgtgttcggctctgtcgagagacatgcccttgcccttaattaacagttgcgtcgcttccctttggaatttgctctcccactgcgtgtcactgccttggcatttgttggcatttactcccaaacatgccctggtccgagtttgcgcaaaaactgacattgggcaaaagttaagttgacaaaaaaaatgggacggactccccgcggagtgctcaaagcacagcgaccaatggttccaaggtgaccattccgcgttgagtggcacaaattggagaaagaccaggaagagggtgattattaagcagtggaacatttgcccaaagcatggcaaaacaattaaagtgattagcggcggaggaagaagcttccttcctccccggcggcaacggaacacaaacaatcggaagacccttccgtccctcactcactcacttcccccgtccttccaatccctttgccctctcatcttctcgacctaattatacgagcaaaaaaacagtaatttgtttgttttacactcaccaattttctaaaataagaaatgaacacacaacaacaaacttaagcagacaaattattgtttattcacttattaatttgttttgtctgctattttccacaattcccttgacaaatggccgaattgccgtcgctcgataccaaatttatgtggcagcacacgtggccaagtgcggatgtcctctgttcgtttcgtacaatctcatctttgggaatgtgatttttcaattgtattttcggtgaatttattgcgagcaattcggagctttggcgcggtgctttcattttggaactcggtgccggaatcgcggcacttccgtcaatgacggcacttcgatacgacgcagcaaaagtggtgataactgagcaaaaccaagaggtccgaattttccatttgttgtccgaaatggccccaaatttaatatttattcaagttgcaggttgttggcctctctccgtgctttttggcgcgcctttttggcttcgtcttttctcgcggggtcgtgcggttggtggttgtccggggggtgctcggtccgttcggtgctcttttcttcctgcgtgttccgtggctttcgtcctccgagtttgggttggcttcggcccggcgcttccctggctcgggttgttgccgttgtgccgtccgtcgccttcgtcttcgcttccggcgtgttcttcggcccgtgcgtgttcggctctcttttttggctgctgcgctggctcttcgcccgtttccctctgctcgtcgcgttcgttgcttctcgcctccgcgagtgtgtgctcttgccctctcaaggttccttcccttttcctttttntttcctttccccctcatgggatggtcggttgaggaactttt

SEQ ID NO: 18131 - DNA, 3223 bp, Heterodera glycines
atattttgaatctattataatgttttgatcatttttgtttgctcttaccatgctttatcatttttgaaccctttttttggcgggggatggcctcccccgactgtccctcgttttttcttttttccacatttattcattgtccttcttcgatcaactttgagtttcaattgcggagagtgaaaatattatctattatttattttttcaaaatgaggctttttgaacttaaattaggcaattaaaaattttcacttaacatccatgatttgagcattaaaacaaatatttttttttctaatgagcaaattaatttttgctttttttatattattttgcctaatttttgaataggttccgaaaacctggcattcactcctttttggtggttttgccaattttactgtttttcatttaaatgtcttattattggccctttacaatgggcacttttacaaatttatcccaatgtttcttcgtcgtttcgatgttttataattttgcattttttgccaaagaaaaattcttaatgaatttttccactattttctttttcttttttctgctaaacttcaattcggttcaaccatgtggttggctgaaaaatgggccccccacggtgattcaaaggccaatttggacagactcggcaagttacaatggcctggtcagtaaatgaataattttgaattttatttaatctaaattatggtgacatgacaattcgtaccaaagcgtacttgcgccaatggtcttttattaattttttaaatttttatgcattattttgtatgagttgatgctgaccccatcttcgtggcatggcgcatgtgaaattgttatttggggacctctatatttagtaattcattttaactcaaattgacaaagtttttaattaacttaattaatctcaatcattgaaaagcaagaaaatgcttcagtggtccttgagaagaactttacaactctgtcttagattaagatttgcttggttttccttttgtacgggttgttaggaggttgctctgccaatggtcccatttcataccattagaacgcaacgatgaccgagcagcactttggcattaattgcgttgacctcgaattgccgatggacatttcacaattcaccgttaacgtctcagcaacactttttgatctatcgtgtgcaatgtttcttaaagaacgggaccttgacgaactgcccgacaattatcttcaagtctcaaagcgtggcaacttgaagcctgtgaaatgatgcctacagtaatgagatgcaaaaagtagagtgattctcttgttagccgacatttttgaccgaattttgcggatgattagtgaacaaaaaaatgatgaattaataaataatttataattgagatacaatttttaaaaattgtcatgaaaaaataaaacgtagcagcagggcactactgtattgctctgtgatggctggcagatttgctcgttcttataagatttttccaaaattaaaatcagctttttaatttagcaaaattataaatgaaaaaaattaaaaaaaattaaaaaatacttttaacctaaaaaatatattaaataaattaaaaaattaattcttttttaagttgttttagaataattcgtaatttttttaaatttttttaactgcctcttgattttttaaggcatttataaaaaataaatcctttttaaaataaattgtctagaagtgtacatttgtttatattaggtttttaattttataaatcatatttttgtttatttatattatattttaccaattgtttattaaattcatcattttctaatcatccgtaaattcatttgcatatgtcggtcctaaaatgctgcactacgattatgtaaaatctcttctcaaatgacaagtttagatcctctgaacttgttgggtgttttgttggcaacaaattgcccataactcatggtcaaatattcgcgttgtgtcgtcgacatcttgggaaatctcgttttgccgcgggttttcgaattcggcactgttccagacgcagtccagaacaaaacaaaattataatcgaatcgactttggatttttcttttaccaaaaaaaagtgatttaaaaatttttttaataattattatttccttaattaaggttttccataactcgaagtttcccaatcaacattcacgcggttgaaacagcaaaaaaacgaattcctattttcttaattgattttggaaacaaccccgatcaaagtgcactccgagaaaaaagtgatggcattgagatgctaacggatatggacaaaaaggtgaatcaattttaaataaatttaagtatttattttattaatctagaactttttggggaaaattagggtttttaattatggctcgtgtagtgacctacaaaaaatgcaggtctggtctggtatatgtatatgcaatttggaaaaagcaaaaattcaattttttgaaatgttatactaattgtttataacttaagcaaaaaataaaatgctggcgccctttttgtaattttccaaaaaatgttctaggaattgaggttttgggcgttatcaacggaattcacgaatattgatgaaccgaaattaaatggctgtttttgtttaaaattttgggtacttttccattatgcggccgcagctcaaatttttataaaaaagggagaaagcgtcagttttgtgcacaaacaaaaaattatttaagagcataaaagccgcaatttgaactaaaatgccattgaatggatcgtcgtcatcctttaaacgaccgcaaaaaaaattttactcgccaaaactggcgcttttccttcatttaaaaaaaatttgaagtgcgaccgcataatggaaaagggtgcttgcgcgttttataaaaaccgccacctagtcgcgttttataaatccgccagtcgcgttttataaatccgccagtcgcgttttataaatccgccacctaacaattcgcgttttataaaaccgccagtcgcgttttataaatccgccaaaatggaaaggcgcgttttataagtccgtccagtcgcgttttataaatccgccaaaatgggtttgggcgtgttatgaatgggtcaataggcgaatagtcaacgacaattctagatgtattttttttgatgctaaatagatcgataaattttacgtggcaacatgtgccagtcagcctgcaataatctttggcgcatactacagcggaataa

SEQ ID NO: 18132 - DNA, 2731 bp, Heterodera glycines
tttttgaaccttaacgaaattttccgaaattttgcaggtcccacaagcatgtgaaggactttcgaatgatacccaacaatcttttggatttggttgacaaagaaaaaagttacaaccacaaactctggctaaacgtgggcaaacgaatcattaaaaaaaacaaaaaaatatttttgctttttttttgtattgccccattttgtgaattttttttattgcgccataagtccgtcaaaggtttaaaactaaaacaatacaaaatattgttttttaagtttaaattttcaccatcaatttttgaagcggcggtgcacacaagataaatgtcaaaccattcatcaaagcctccccacggtttgctaatttgtgccattattttccatggcaatccatcgatgtacactttgtcgctgtaccgactgcacccggccttctcacgtacaaattccgatgttttttcaatttccagaaaaatttccattttcgattcagcaaatgtgcgtcgtccgtgcctcggaaattgcagtgggtacagtaagccaccagtagaattcctacggtattgttgttgaaggttgaccacttcttctgctgttaaaatgccggatgtaactgtaaattaatatggaaaatacagtagcgaacaattgaaaaaaaattaaaaaaaattaattataataattttataaaataaaaaaagttcaaaaaagaggtggaccaaaaaaaaacaaattaatttttttaccaatttttcccgaaaaatcctcttttgagaaaagtggaaagcgaattttgaacaatgccgggccaagcatttgacggcgattctctgctgaacattcaatgccattttcacggcacttttggtcggtccaacggagtgccgaaaaaaataatttaaattaatggacatattttccaattaaattaatttatttttaaagtaaaatttactgcattccaaattgaaatttcttcacggattttcaattcgtcacgttccaaaatttcgcacaacattttttggtcaatttgcaaaaaagcatcagatttgattaaaatgtccgcgttattgtcaatgtaagccaagcaattgttgacataattctaaaataaacaataaattggatgtttttctttaaaaaataaatttaatcgatgagattattccatataataatttaaaaatattatttcacctccaagtcgaaaagacgggcctgggctaaagcgaagaaaacattgcgcaatttggagaaggggatttgcaaagaccggtcaatcaaatcaggaatattgtattttttggctaattaaaaagattcaatattaataaattaaattctaaaaattaatccaccggcgtaaagcactgccattgcattgtctccgttcaattcacttaaatctgccgtgtaaatgaagctcaacatcactttgaacgctgctgcttcaacgtcgggcacttccacaacagggcaattagcagagactaattgagaaataattaagacaattagcagatgctaattaaatttaaattagagcatcaaccgaaaccaattgaaaattagggatacaatttctagtgattttttttttttgctcaattgatttgaagaaagcagctcaaaaaacgcatttctgcgttaaaattttttcatttggacgtattttttggtcattagaaatcacaattttggcaacttcgtcacttaaaatagtgaaaattcactattttagcgttttatcattatttttacactttttcaacattttttggaaaattcctttttttcactattttggcactttttcgtcactattttagttaactaattcgagactttcgtcactaaaagtcgcatccctatttattaggttaattagcagagactaattgaatcaattaacaaaaataattaatccattttttaccgtcttcgctttgttctttgttggcgtcaaaacggaacattgcctcaaatacgtcggaagcaaacttcaaaattagtttatgtgctggtacaagcttaaaaaagattttatttttaaaaatcgaattttattatttttattttcaaaatttgcctcttttgcgtctccgtcccccgccaaaaagtgcacatccgcgtactctcccgtgctcagcatcaactttagcccagcaatcgccgctttggacatgataaattggaatattttctgaaaacataaaatgtgtagtgcataacgaagacaaaaagtgattttccaaaatatccgaccaaaagaaagagacgcacttaaaaatcgatgttttaccggtgatacggagggagagagattaaaactgaggagaaataaagacaatcacaatgggggcggagccgttatttaaaaaacatcataaagtgcgttatttaaaaaaccatcattatggaaatttttgtcgaaaaattatttataattttgctccaaagcaaccaaatttttagttcttgatgtcattcgatagccctaaatgttctctatcagtctgcaaaatttcaaaaaatttcgttaagtttcaaaaaagttatagctcgaggaactcaaaaaaccttgattttcgaacatttttgaccataacttatttgaaacttaacgattgcagactgatagagaacacttagggctatcgaatgatagcaaggattaaaaattggtctttttagagcaaagttataagcaaacatttttattttgatgg

SEQ ID NO: 18133 - DNA, 895 bp, Heterodera glycines
  unsure (1)..(895): unsure at all n locations
tcggtcatttatggctnttgtgcctattcaccctntaagaagaatttttttccaaaaaattaaccattttaaaaattttattacatatttggtacatatttttggtttttttttgtacaacatctttttgacagccctaattataatttttagtccgcaggataagttatttttttaataaatttttactttcttccaatccaaataattctaagatcacatccctatttcttacaagcgcataaaaattaaattgaaaattaaactcgcctcttttccgtctccgtcgcccaccaaaaatttcacatccggatgctcaccagtgctcaacaaatgcttcataatttgtatcaattaattgtcctgcttctccaagagttaatttattatatataaaaaagtcgaaattaatgcgaggcgaaaatgagaagttattctatatcatttacaaaaatttgtggtcaatctctcaaagaaatgacttcttctgcagggacggcattccgaagcctcaaaaattttggaaattagaatgaagtgccatccctagcgagcactgttcaaatatgataaatgatcgctggaaaacaaactgagtttctacgaacactcaaaaacaatttatatttttgggctccataaaaaatttggaaaaatatgaaattttctaataattagaacacttaaaagtgatcgaattcaaaaaatcaacataaagccaatttttctgcacattgaatcatttatgtattgtatttttagtagagtcccacgggacgcggtaccggaccgagcattcgcggtcccggttcccggtcccgggttttgaaaagctcaggtcccggtcccggtaggacaaccgggaaaaacaagcactggtaagaatgatacatat

SEQ ID NO: 18134 - DNA, 2337 bp, Heterodera glycines
aaaaatttaattgattgctaatcactcaaaaattgttctattatgcattgttcttttttttcttcataggggcaatgaggtcggttgcgcgacaattggcccacacgcattcttcacagagctcaaagctcaccgcaaaacggccatcttccaagcgcgcgactttctgttgattatgaaacagtcggtcccagtcgtctaaataaattttattaagtttatttatttaaatttaatatttcaatttaacctgcacataagtacgtcgcgagcatgaatttcccttttgccaatttccacagttcccggtcctccaccttgcgcttctttgtagtgtccgactttggtggctccacttccgcgtttggttgattgatttctttttgttcgggaacagcgaaggtaacagatttcttcattttggcaaaaatgaattgggattcgggatggtaatttaaatttgctttgaaaaatggtggagtcaaatttgaatttggatgggagtggccaagatttagagtataaaatgagtttccagtttgcaaatttatgtaatccatctgaaatggttcttgtcactgtattttgctctaaactgctgaactgtcagcccaagtcgctgcgcgatcggttaaatcatcccgaggatcggagtcttgttctgaagcatcttattggtcgtaaagtgcgcacgacctacaacgacaggaacggaatgaccaaaacatttttcgtcggcggcatttcgactaaaggggcggcatttcttccagcatatgggcagctgcgcagtccatttaacatcaatgtggcagcgcatttctatgcgcgacaccgcataaggcttcactttccctatttaccgtgcattggtgagcaatttggaggaggaggtgagaatcgctactacccaatggagcttcttgacctgattgatgacaacaacaacaacaataatgaacaatggttggaccgccttttcaccgaaattgggtcaccatcatcatcaaattcatcatcaactcagacaccgtgcctatccattgatgaagagatgacttgccgcattcacgcagatgaagcagctgctttctgaacaaaccctggccctggaagagcgggtccgaaaatggagaaagagaaagtcgagctgcaaacggatatgctgcgcaaggaaatggagaagcactttcggcgtcaaatgttggagatggaagaaagattggatcaaaaatggacttcgctggtggataaagagcgacaaagggcgcagcgaatcgcaactcaaagttctgcggttattggtcagctaatgatgacaaagggggatgaagagaaagaaaatgaaaaagaggggagaaaaaaataattatcagcaatcgctgtcaatggtgtttgggggagggcccagtttcgttcgggagtaggaaatgtggtcatgttttttgttgtccccaatgctctgtcccgataattgccagtgatgaacccaattgtctgatttgtttcgagaaagtcacccaattggaatatttaggatcttaaaatcgatgaaaaataccgaaaataattaaattgatgtaacatgatcctaaatattagtgctgctcgagagtatcagtcttgagtctaggctcaaaaaattgtcggtactaaaaatttttttaaacgcttttaagaaaataagaatgtctctttttttcagcactactaaacatgtcatctccctttcattcaatgattttattttaaaaatgtattgagaattacagaaattttggcttttagcacaacactctaattaaaatttccgtaattgaaaaccctattatgatcattgtccctcaccccccttaaattatgggttgagcggtaccggtgctggtactgtaaaattgtgtacctagtaccggttttgaccggtacctgtactaatactgattttcccaatcaaaaaataccgctttttcaatccaaaaattatcggtaccgattaccgttcaactcttcctttaatacataaatgtttttcatgcaattgaatttaatcattttaatccatttttattttgaacaaatttattgaattaaaaaataaaacaaagttatcgtttaaagaaaaaatttccgttgtaaatctcttcttttcgaaagcgagcaattgttttctgtctgtttgtccgtgttcgcttctaaaatgaaaaaaattattattagatatttattttgatatatttttaattttaaaattttttatttaattttaggagtgcctaagcactcattttttaattttttttttaaatttaggagtggcctgagcactcaacttttttt

SEQ ID NO: 18135 - DNA, 1151 bp, Heterodera glycines
  unsure (1)..(1151): unsure at all n locations
cgttaacaaattgcattaaaaaatgcaaaaatttcccggcggcgcctatcggcaccgccggcccccgtattccccaaaaaattgttggaaaaactgccgcaaaaaaagtggtgtgaaaagcaaaaaaaaaaggtcgtcgcccggggcggaggccccccccccaagccagccaaaatcctgggaccgtccctggggggtggcaaaacccggaagtaccttaatttaaataaaaattcaaaattgtttaataaaatattaagaagtgaaattaccaaagatatttggtaaaacattaaattaattgctgaagatagaaaggaatttaattttggttaaagtctttttaaattgtttgactttgacagttaagaaaaaacaataaatagttgagagaaattgttattaatgtttcataaaaattcaataatttcgctaagacaaaccgtttaaaccaattaaaaatttaataaaaatgcctgaggctgaccattaagagccactttttaattagagaaaaatataataattcctttatattttcatttaaaaatttcaaaggccttttattcattttttaatataaaatctcaaaggattttaattcttcattttaataattaatttttcatatgcattttctttaccaaaattattaagaaatatatttttaaaattttttgcaaatatttttttacatatatcaaaaaaaaatttaaatttatttcacagcttcatcttgtccatgtcaaagatgggctctcattgcaagaagctgttgatgcatcggacgggcttgcggtcattggcattttttatcacatcggcgatgatggcacatcaatggccaatttggaaagtggactgaaaagagtggcagaaaaaggcatttttttttaaaatgaaaatataaaaattattttaaatgaaaatttctcactaaaattattgctttctactaaattgaaaaaaaaaacaaaattttccaataaatttttgttgacaaataaaggaaataaaaaaaaatttgggggaagaatttttgtganaattttccaattcttaggggtgtaattttgaaaatttttagttcgattcttaggggtgtatttttcgtttttacaaagctccaaaatagtgattcctagtgatga

SEQ ID NO: 18136 - DNA, 2202 bp, Heterodera glycines
cccccctttttggaaaaaaaatttcaaaaattttttctcaataaaaacaagttttctaagggtttttgagatcgttgatcatgaatacgacttccatttcggccaatttcgaatcccggacccgaattcgaacaaaaagtcaaaatttacaggtatttgaagttttggcgaataattttttaaacagcagaccttttttttggcaaattatgagtttttagttcgcatcactgtgaattgttttaagttcgttcgcccacattgacatttttaggcaattagcaacatctaatgatttatgcctctaaatttaattgacttcccatttccttggaaattcgttttatccgtgcttgggaattaaagaaaaaataaaaaattaattagtagtaattattgaaattttattactatagtatttggctaaaataattgcccattgggcaattttttgaaaataaaaaaaaaattcaaaattgaaataatttcaatttttgtaaacagttggaactgttccgcgctgtgcaagggcccacgtttggccagcgtctcactgataatgtgcgtccggtgcaaccgctgaacggtcgtcgcgtgcagttccgctcgtccgcgctgaaccgtcaccgtatttgcaaccttagcagcgcggctgattatgtaacgacacgcagtcgcgcgacgcgcacgtgcacagcattgcacgagagcctgctgcaccatgcactaattgcagttgcctctgcggtgattatgacgatgaaacagcagggaataatgtgaacaatcaaaagcggatttatcaacaaatttgtgtgcataatttgatcagtaattgtattaatataattttttggcacataattaaatgtaattagtgatggtattgattgtagtaattgatagctcagattttgtttagatcaatattacataattgtgtttttaattgctttgttaattgccattaattaaaacaagggtttaacaccgcacaaccaaatggaatgaaaatatgtaactataaaaattaatcttttttttatttagttaactctattttttatttgtcattttcaatattttgggaaatttcaagctcatgagattgtgctttcaatcgtccaataatctagcccaaacttttgctaaattttgcataaaattctttccatttctttggtgaatgcttttcatttggcataaatttcttttttgttttaaaatattttaaaataaatttctcttttttaaatttattagcaattttcacaaaataaatgggaaattttatatttaaaatgcaataattaattggttttactttgtgtttgccacgaatattcatcaaatttcattagaaagagtttaggcacaaaatgcattcatattaaatttgagaagaatgctcatttaaaaagcaattaaataaatggttttttaataatttacattttattaaaaatgattgatgaaatatttggtcaatgatgggatgaaaaaggaggaaaattaaatgttgtttgtcagataaataatcgtctggttaaaaattttattgcaattaaaattttgtactgaaattagaatgatcaaaagtgtgacctttttttttgttttcctacccttggcggatttaaaaaatcttggcggatttaggaaacatcccagcaccattcaaagtcacccaatctgctgaattgtaaaaaatatttctacaattttttttggctttcactctaaaatattcacatttttagatagggaatttaaaaaataatcaatgtaagcaatttttatgtaaaatttgtaaaaataaatactacaaacatcattaataaatttgagtaaattttttatttaaaattggtttttatatgaaacgagaaaaaaacatactgcaaaatacattaatcattattaaatttatgtagataaattaattaaatgaatgaaaatatgtaaaagcaaaatattaaaaggaattttaatcattttcattttataaaatatggaaataaaaatattattattcctaataaccctaaacaatttacataaaatttatgctggtggaattaatgaagaaaaaaactttgacgaaatatttggccaaggatgggacgaaaaagcggatgaaagtggagagaatgaaacggatcaaaatggaataattggacaaacgaaggccaaaagagacaa

SEQ ID NO: 18137 - DNA, 3318 bp, Heterodera glycines
ataactttcatcttttcaattcattcatcaccttacacgcacaaatgagctgttttttgatgaaaaaaagtgttcatttggaaatggaggggagtaacttaactgatcggacacaaatgttttttaacacatcaaatgagcgttaaacggttccacaatgatatgattaatgtccaaaatatgctttttaatttcaaatgaacgagtaataaacccgaaacaaaaatcattacggcaacaattagcaagttttttgccattttgggttcatataaaagcgaataagcagttaccattaacagcagaagaacatccatttgctcagcaatttgaaactccctataatttttaaaatttatataaaataaatttaataattttgaaatgactctttatttccaattctttcatttctgattaaaatgcaaaaaaaaaaaaaaaaaaaatttccacagagaaaaactaatcccaaataagtcaatatttaagaaatcccaagattttaactagtaatatgtaattgaaaaatcacaaaattttaccgtaaaatatgcaagaaactcacattgtcctcggcattgcctcgctgtgctctctgctggcaattatcgccaccgtagtcactttgccatcgctgtactcggagatgagccaactgaacaacaaagtgcgcgacggcgttcaagtaaaaaacaattttaaagaataccgtaatttattaccgtattcccaaggccttccgtgtcaacaccgactcggcctggactgacctgatggatgtgcaagtcgtcgtggcaccgccgtcaaaggcccgtgacaaccccttcagctccatcttccgtgccaagcgtcaattgcctggccactgcaattgcggtcccccacaacggccaaactgccctcctggcccacctggtccggccggaccgcctggccaacccggacagccgggaggcgcaggactgcaaggacagccgggagcacctggccaacctggtaagcatcgctacacataattgccataactcgtctcacatagctcctccgtgcccgccccagaacatcccttgtccacgctgcccggctggcccacccggcagccccggagggcagggaccgcccggacagcaaggagcccccggccagcctggtgcgcccgctccgggcggaggacagggaccgcctggcccatccggaccccaaggacagcctggacagcccggacgcagcggaacacccggccaacccggacagcctggaaataatgctgttattttgtaagcattttgatgggctaacttagtttaaatatcattttcaatgtttagcaacaccattcctggcccgagaggagctcccggagcgcctggccaacccggaagccccggcagccaaggccaacctggccagtccggaggccaaggaccgcctgggccccctggtgcgcctgggctgcccggcctgtctggcaacagcggtcagcctggacagcccggggcacccggccaacccggcaaggacagcggctactgcccgtgcccgccccgctcttccgcgatggcactcaaaaagaaaatggcggcggtcaaaaaagcataagcgaaaagtgcaggggaaaagcgaagaaacgagaagaagacataaagcgattctgttgaataaatttatagtaaattgctgtctttcatttctctttgttgttaaacaaatttcttaattgaataaaaagggtatattttctttattagttttattttaagaaagagaaatttaattttctaattgaaacatagtttttaataaataaaattaatttttatttttaaaattgcttattttcatgcgtttggtgcttattttctaataatttttgtttcaaaatttttaataaatgaaaaatttaattttttaattattctttttgtaaagagcttattgcttcattgcttcgttaacaatccacttttactgcgtttgaatagatttaaacatgaataaagaatatgtatatatttcgtacattcgttaaccaatttaagaaaattttaatttattacaaaaattataatttcgttgcctcgttagctcagttggtagagcgtgagacttctatctcaaggccaggggatcgagacccctacggggcttactttttgatatttttttcgaatttttttattaaaagtagaagccggcaaatttgaaaagttataaaattatatcaatgaatgatcttccaatttttcaaaacataatcctctaatcatggaacctttttttcaaaaaataacaccaaaaataaataaagaatttaaccaaaattggaaacagtttagggtggttttaatatgacgtaattaacatgtcaatacaaaagaggaaatggcatagaaaacaaattaaaattcctcatttgcttccattgtaatgtgctgcatgccgtctaaaaaggattgtgccgatacatttaaattgcgaatttttccattatttcaaacattgtcacagtgttcttaatggtaatagccgagacattttctttactataaagcacattttcgagttccttttgaatttggtttactgtttggtactcgtgcagtccgtttgggccaatttcgaacaatttttgctcagaactcaatttaatcttcaaaaagtcagcttctgaaaccattcgctttaactgttcctcgccagaagccaaaatgtgatcagtgaattgctttaaaagaagttttgcttggtttattttaaattggcaatcgtccgacgtttggccatttgctaattgaaataaatgggccaatgggtccatgtaaaaaaatggtggtgaaatttcattggacacaccaaacgacactttaacttgagcattctaaaaaggatgaaaggtaacaaattgatattaaatttttatttgcatttttgtaaaaaaaaaaaattcgctttaattacgcgactaattaaatttttccatattttattgtacctttatgaattttgcttctctgttacaaagagggcatcgaattagttgttgttgtttaaccctaaaattcatatgcatttgtttttaaacaactttaattatgtatgtattaccatttgatgatacaatcattgtgaaaaatatgctaaaaggttcattaacaattaattaattagacaattattaattggtaattaaacttgataatcgtcatgtaatttcattgtttctttttcactattgaatgtctcaagggcaattgaacattcattagcctgaatagcatttttcatgtcaagcgtttcatcataattgttgttctaaat

SEQ ID NO: 18138 - DNA, 3235 bp, Heterodera glycines
ccgtgcaccgtttagcattgtatgatatcctcactattttcaatatttttacttgtttttattgtttatttctttgaaatttctattaatattttacttttgtagtgtttaatgcaatcaaagaacattttaacttgaaatttttaacaaaatgaacttaataaaatattagtagttaattattgtaaaatataatttattaataaataagtttaattcatttattaaaatctaaaaataatgataagaatatatgtatacttcatattatatatcattttattaattaattttcaatataaaatttctttcttccatcattaaaatgtttttgcttagcaataagtaaaaaattccatatatgcacgctacccctctccgcctcccatctgatatgaaattcttaacgcttttttcttaattattattatttttttcatttatttccttatttttagctatcatcaccattattattattttactaaatttattttaatatttattttttctacaactcttcatctcttcattaggcttgggttatgacacaagtaccatttgtcacccctccagtcgccacatgtcaccacacctctcaaataagttttgggttatacgaccaccatttggcaggttgccaactaaattgttcatgctatgccacactacactaaaatgagtcgccgtatgaccaacattttatgccatccacggtcagtcattagcgcttaaatgaccaccagcgggcgctcagatagcccatgcgggcgcttaggtgacacgtgcgagcgctcaggtggcctggcatcccttccctccccaaaggccacgacagctgatgtccgtccctccaatacgatttgactttaataattatttaattaattaattttatattttttcatttatttttaaatttttatctattattttaattttattttaatttatttaatttacctaattttaatttattttattttatttttaatttaatttgaatttatttaatttaattttttaattaatttattattattattatttatatttttgtgtggtattagagagagcaagagaaaagagagagagtgagagagaagagagaatgagagagagagagagaaagaaaaaagagagagagagagagataagagagagaaagaaaaaagagagagagtgagagagagataagagagagtgagagagagagaaaagaaagaaagagagagagtgagagagagaaagaaaagagagagagagaaagagagagagataagagagagtgagagagagaaagaaaagagagagagagaaagagagagagataagagagagtgagagagagaaagaaaagaaagaaagagagtgagagagagaaaaaaaagagagagagagagagaaaagagagatataagagagagaaagaaaaaagagagagagtgagagagagagataagagagagagtgagagagagaaagaaaagagagagagagagaaaagagagatataagagagagagagaaagaaaaaagaaagagagtgagagagagagataagagagagagtgagagagagaaagaaaagaaagatagtgagagagacagaagagatatagagagaatgaatgttagcttttttattcaattattttttaaattataaaaaaattttttttaaatttatttattttaatttaataatttattttaatttaatttaatttattttttaatctttttatttatttttttatttcaattaatttgaactttaacttttatttaattttaatcctattttaatctaatttcatttattaatttaatataattttagttttatcaactttaattctaattcatttaactcgaattttatttttagcgctcaaatttaacaagcgggctcacaaaaggcccctgcgtgcgctcagatggcacgcacgagcgctcaaatggtccctacgtgcgctcaaatggcatacgcgagcgcttaaatggcacacacgcgagcgctcaggtggcatgcgtcccttcccttccccataaggcatgacagctgacgcccatcctctgcctccctttcccttctctaataggatttggccttgggttttatccttcagatgttttttcaattatttacctcttctgggattggatatatttattataggtgttttttaaaggtttaaatttggtactgaaatgtccctttccactgggactgaaatggcggggctgaaaattaagggccaaaatctgcatgggtaactacttatcagttaataaggaattttcaactcttcaaatttgcacgccgccgcataatttaattagcacctcacacacgaaaattttcaaaattacacaaaatataatgccaaaatattaaaaaaaaaaattggcgactcgcaggcgtaaattcgaaattttctttttttaatttctaatttttctttcttttttgtatttttattttacttccatcttttttatagcaattattaaagctgctaaaatgtcaactatagatgttgaagagactatcaagagaattcaatcgcaaaaaggtgtcaccggagtgattataatggacaatataggtaagaactcaaaaaaacaaacgagggtctcacaaaatatgtttctgaaaaaaccatttttcctcgtgtttaggccgtgccattcgttccacgtttgatgatgacaccaccgcgcaccatgccgcacttcttcaacagctctgcgaacggtccaaaaatgttgtgcgcgaaatggacacgagcaacgacctgagcttcatgcggttgcgcaccaaaaagaatgagatcatgatcgcaccagacaaaggcatgcgctcgtctttcccgctttttggggcctttaaatttgcaaattttaaatttgggtgtgtgaaaaagaagtcaccgacaaatttgtaggttcaagtctgtttcttttaatggcgttttgctctcggttttattttttcgattccattttcggaaaatagcgagacatgcctctttttcacgagattactgacaataaatacattgcaaattcccttttcagattatttgattgcagtgatttataagaagagccgctgaaagacagacaaaaaaaaattattccccttatttctatatatcttcacccctttttccatgtatttgataaatgagatactctgactgtttcggtattgcttcactacatttat

SEQ ID NO: 18139 - DNA, 1065 bp, Heterodera glycines
  unsure (1)..(1065): unsure at all n locations
agtcatatcattaacggatcatttcattattacatattaaatataaatttaaaattttanattcaaataaataatagaaaaactttggctatcttttcacatcaagtgctgtatctatacaatttttatgaccataaaaatataaaccatntaagatttctctattattctattcaattaaaacaatttttaatgagttttaatcttgtttaattaaaaattattaattactataaaggattaaaaaaatatttggtaaaagtcaaatcactgaaaaatttaaaaaaatattaataaaaagataaattcatttgaaatagatcaagaaaaaatataaaatactttaataattaataatctaagaacatttcacttaaaattatttgtaaaaaatataatttaattttgctcataagtaattgaaataactcttaaaatgaattaaggaaatattattaatgatttatagttaaatttaaacttggaaataattttataattcataaagtaaattaaaaggatttaaaaagaaaaaaagctggccctctcgtcggcaacaaaattgccgacaatttggtttaaatattaatcctattttaaaatttaaaaatgaaaaaaattatttcattaaaaattaaatttattttttgcattaaacccaactgctaacaaaacaagagtttatatttaaatttgataaaatataattttatttgaatttgggaaaaaatttaaaaaaaacatttaatagacattatttaataaatttaattctcccaaatgaaattttcccagatggagatatttattaaatgagaaaatttaaaattcacaaacatgaccaaaaggaatatttaaaaataaaattcaaaaatttgaaatgataaccgttaactatttgttcacgccaaacgagtgaaaataaattaagaaagcgaattatgttataattaatattaaacacttaattagaaaatttttaatgtttaaagcaaataaactacttataattgggacattagctgttaataaatcgataaaaatgcaaatacaaacacaattttt

SEQ ID NO: 18140 - DNA, 1055 bp, Heterodera glycines
agagaatggctgttctcggaacagcggaggaagaggcgacgaagttaatgccacacaaacccgaaaccggtagtaattaatgactgacaaatgaacgccctccccaaaaatgaaaaaagacggaacgagtcatttttgggtgcaattcattcccctcacccggattttttaaaaattataggggtaacgaacggtctgcgctccggtcatttttcactctcggattattcaaaatttgaatttcgaaagaaaacggttacgagtttgtagcaaatagggtgccagagagttagctgcttttccaaaatcattggcattggcactcgaataaaagtacaaagtttcattggtttccaattaaaaattcccgccccttttgttacgttttattgcgtttgggtccctctgctgctgctgttgtcctccttttccgtgccattgtcgtgtctccaaatgagccaatttggcctcgtaaatgcgtcgattgcccgcattcattggccccgcaatgcaattgcggcggcgcaaccgctcgcgcagttcgtccagccgaagcatggcgaattgatgccgaagtgcgtccaacacggcctcgtcagagtggcgttgtacagcttcaccgtcatcaccatcgcttggctcaccatcactctataaactcaaaaaattgttaaattcttggagccgcgtttccgtaagttgttttgtgttttgcattcgaaattgtcgatggacacgagctgcgcaatcggttgttattattgttgtggttgtgttgctgatttttctgctgtttttggcccttcgccggcgtcgcggccaaaagtgactcatcacccactcactgaccgtcggctccgtagtgtatcagcaactgacacattgccaaattcccctgaaaatgccgacaacaaaaatcattctggaatgtaagttcaaaatatttttgaaggtactaattcagtttgggtcctatattttggtcaaattttaaaaaagcgtaaccagacagtcagacagtgcactatttccttatgaatttttctcactgcttc

SEQ ID NO: 18141 - DNA, 1167 bp, Heterodera glycines
gcctgcaggtcggggagggggacgggaaaggcactcccccgccgagacacccctctcccgctattgcgcggacagtgccattcccccaagcaattcaagtcgagaatcaaaaaaaaccgaaagccacgagcgatcactcccccccccctccgatcgaattatcgccttggacattcattttctgttttttgcctcagaaaacacttcgcttcccatttgtacggttggcattgaagaagactcaatttggaaacgataaaacaatgtatccgggcaaacggcgccaacgcaacttcaaacggtgagtgatggcaaaagggcgaaagaaaggggacggaatgggacgaggaacaactccacgtcggcgggggagaaggatggcgggggacaatgttttgtgtggaagtcacggaaaatgccgtgccgtgctcggcccagacgattgcgctcccttctccagggattgtgggccaattgggtggaaacggaagacaggccaaaaattggccaacattcacagtcatttggccaaaggaatgtcattaaagcagcaattggaaaagcgaaatgccaagccaaaataaaaaaaacatgcctagggaaaagcctaatcaacagaagaaggtcagtgccaattcatcacaaactgactttgaactgttcgttattccccccccccccttctcaattgcattgcttttgcgccttttcctcccccggatgatcccttctcatttccctcaccttcacatccttccgttgaacaattatgagatgaaatggcgcaattaatttctgtaccatggagcagataaatgaaaaagaggggggggggagagggggagacgagcaaatggaaacattaaaaatatagcgaaactgattttcctcaaatcactcaaatattggctctcccccccctccttcctctcctcaattctctgcttaaattcccctcccctctttttcccccccccccccactttccccattctctcactattttatttccctcctccgctttgtctcttccctttccttctcccggtgcgcttcatcatattttgcttcatcttcattttcttttccctataaagaaccgggcgaatgaataaaattacttattccttattaatcacaaattgggcaataaaatcgggcgactgg

SEQ ID NO: 18142 - DNA, 1192 bp, Heterodera glycines
ggggggggggggggggttggggccaagtgcattaattattgctgaaaggtgaaaaggcgagttgagaagagaaatcgcggatgagtgacgagcgaagtgccgatggttctgcttaattatgagaggagcttgtcatcaccgatttcattctcattttcgttttaatttcctttaatttccatatttgggcatgtcatttgtgccattgactaaatatgccattctttggccaaaagcccttttttaattgttttttaaagttttaaatttagtattcggacatttcacaacagcgaattctccacaaaatgccctcgggacattggaccatttggcgaccttctccatgcgcatacgaatcaacagcagtcttctgtcaatgttttgccgtcgaacccttcgaaacggcacagggaaaggctaaacggagaattggagacggtgagttacggtattcccattcgatgggaacaaaaaacagtgaaattaatatgggccattcataattgaggataattccagcgattgttttgctctcttttcaggtggcctctctgttgccctacgaggagtcggttcttcaaaggttggacaaattgtcagtgctccgtctggcagtcgcatttttgcagatcaaagcacatttccaaggtgaataaaagtgattagtacgtgctatttgatgttgggtaattatcggtgatattctgctaatgaagggtggacggggaggggggcaccgacttgaaaatcatatccatccgtcatgctaaaaggggttcatttcagtgtcgagtggggtgaagaacagctgaagagaaactgagaagttggcacttgacaaatgaggggagagggaaaggcattgccaatgggcatttaccaagatattagtaccattctcaattaatgaacaaacaaatgacataacgaaatgtccatccgagtacgaagggggcgagaaagacaaacaaacggcgaaaatggcacaaatggcggaaaggggagggggagggggagggggggggagtgattatgagaaagcgcgagggaatggccaaagcggcacggaacagtcaatgggaggggtcccttttttgggcttctcggcgggaaatttcggcaaatctgaggacaaaaaggagacaaataaatagtgccaaatgagaacaaaagggaaaaaggtaaggca

SEQ ID NO: 18143 - DNA, 3505 bp, Heterodera glycines
  unsure (1)..(3505): unsure at all n locations
aaaataattccaccatttttgtaattcatctttattcaaatgatagtggcatacaaaaaatgacagccttaaatagtaatgtctgtgctaattgatcgatttttgtctaacatcacaagagagtcgcattcgcncatcaccaccagcattatccccccggtgggtactgcctggttgaatttgatgctcaccgctgttgtcccgttctttatcaggtcaaacagcgcagcttgatcatctccactgctggtcaaattgaacacataaatgcagtgggtttttccgaactgttcatagctaatgccattgctttccaatgagttggcgaatcccactgcttcgttcatgtcattgaaagggcgaacatatttccaatttgggtagtccaagtcgtatggcgcttggggaaaggagcggccattagcaataattgagatttcgcgcacattaaacggttaaaagttaaacggactgcgcgaaattgttccaatatagtcagaattagccactaaccccattgtgatacgacggggaatttgatccatgaacaaattggctgtaaactcgaaacgtccatgactaatgaacattgatttcatcagcgttttcctcacagcatatcgtgccggtttcacttcaagttttcgcgcaatgtccaacgccagtccatccatcaatgagacttttttcacatacattttcaaactgacaacctcgaagcggtaacgaggagcagctgcagcaccctgggcaacagcgggcgtagtgattaggacaaactcgttgtcgttgggtaaaatttcaatgtccagctcacagaagttgatcaagtagagaggttggttgaacaaatcggcgtcaattttggcaatgaattgcgctgttctgcttcctgcaaacaggttgcgtcgcgcaatgcatccatccccggtctcaagcgagccgccgatgtcacggtaatagcccgccgcattcaaatgcgagtcctttgccgtattggaataggacagctcatgtgagaagtatgttttgtaggccatcagggaattggagttgaaaacttcacgtccatttatgctcattttgatgtttcggatgaaagtctgaccgatcatctggatcggagcaacttcatctgctgtgaggtcaaccagctgaccatgctcattttctttgcgaattcggaattcactttgtaagtagcatttggacaaatcaataaagttttgactggaatgaagcttgaagtggtagggagtgtccgtcagtgggttactgggaagcagctcaaacacttttgatgaagagacgctcacattggtgggtggaatacgaaaaaagtctaaggcattggtgattgagtttgcactgtcattatcaattttatggaaagccatttatttagtaaagtccaaatgcgtctgaacgaatacgtttgtttcctggtttgctgattgtccgtccaattatggtctgatggcttggtgcatgagatttttttctttttatactcttcattcgaccaccgccaaactgttttggcaggccgcccttctcaagcaccgtatcaattcctttctttccctcgctgacaaatgcctccttaaatggcactccttcgtttcccactctctccagcactcgctgccccgtgctcagtgcctccgatcctactgtagtgccaacacgacgaagaataggaaggaaaaagcgccaaagtccgcgaaacacatcccccacccctgcgcctcgttgtccataccctcgttggaaggggctggaccctcggaagtaatcctcgctttctatgccacttccgtattgcatgtactcatcatatccgataatgtttgggtcgaacacaatatgaaccattttatttgcgtaaaatgagtgaatgaatacaaaaatgagtgggttttaaaaatttatcactttcttaaatattaataccaccatggtcgtgccataggcgaatggcaccagtcgtcccttgtccatcgtgcgcagctcaatttcaatttcgctgatctcccgtggccgcactcgagcgtatattggcgaatcataaatcttctcattgtagtcaccgggtgtggcaccgctcaccgacaccacgcgaagcagcgaactcagcgaattaccaacaatcatgttctcggtcagtccttttgagtagactgcgaaacttgagaatccaccccgtaagtcacagccgtattttgagatttcttgaggcccaacgtgttgggggttttcaaatccaagcacatagcctagctgaggtgagaatgacaagtggctgatcactggatttttgaacaccaccttgaatcgctcaaagtcatcaagatattgtatttctacatcatcgacaatgtttttgaaaggatcatatggccattcggactcattgtcatcgtcgtcgggaaactcgtctccggcagctaaaccgccaaaaacctatcatccacatccaatgtctttgattcctttttgctttcgtttagggcttccactgatcgtttagcgtcctttgctatactctgtggtggtggtggtggtggtggtggtggtgatggtgccggaattgaagtcagaataggcttaataggaggcggcggtggtttcggtgttgttggtgtaggcccaatctgagaagttaaactagaaatagatgttgtagatacggtagttggtacagtggacttctttgcgacatttggctcctttggtttagctgccagaggtggtggtattttagggatattctgcgccttggtcgatgaagcaggagtcggaatagttgatttagatgctggagtgggtgttggagttggcttcggcacagccgctgttttgaacggagaaggcttcggggtcgatggggcttgcttaatgggtggaatgggagcgggagccggggaagttttggttatagcaggtgtcacacttggcttttggggaggtactgtagcagattttggagctgcctgttttggtgcctttggcgcttcagttggaggatgagaaggatgagcaagcgttggagcaggtggtatcggttgcttagcgacaggaggaggtgttgcttctttgactttttcagcctctttccctgtctcatcgagtctggggggaaactgaggctgttgctgctcatctgtctcatcatacctcgggggcgagggcagtgaagagagatcatcaattgttgatctcttgaggcgcttggcgtgtggaggcgagccgatcactaccggtttatcgaagtaaccttcttcatgcgcaagcggcttaagtctgactttttcttgactcttcaatgttgcttgtaaaaaacccctgagttgctcaacttttttgtgcgacgcctgtgggacaggtactctgatgacacgctgtcggtcctcatcaacggaatggagattggtgaaatgaatgtcaatccattggtcatccaaggtaccaattgtggaatgccatgagtagggatagctaatgc

SEQ ID NO: 18144 - DNA, 987 bp, Heterodera glycines
ttaacaacggaaatgggcacaatgacaaggaaaaaaataataaaattgaaaaaaggatgccttgcccttagcaggtcaattttgcctgaaaattcgaattttatttgttatttcataatttttaaagcccacctccgctcaacgcattgtttatttctttgccccacgcgtcccatgtctactgattgatgagcatttaaatacaattcaaacaattagcacttccaccgcccctccccccaggggctacgggcgcatttaatttgaaaaattcggattaaatccggcacaaacagaaaaattgggaaaataccccggacatttaaaaacaaatttaatttcccaaattcaccttctcatcggcacgcttcacacagttaccgtacgccattttcttgaaagagtaccgtatgttaattaccgtatcccgtcgtattattgttttaccatgaactcgccaaggaaaggaagacaaccttttgggggaaaatggtgttacaaaaagccgtagccgtccttgtctcaaaaacaaaccgtcgccctggcgaataccgaaattcctttccgcacccgggaatagttggcgaagtgttgtcggcatcatcccggccgacgagcgttgctgcccgccgccgcttctggccgaccgaccgtccgaggcggcggcgtcgaaactaccgcttagcattcgcattgcctagcaaatggggatgtgccaacgtaagcatgtggagccaaaaagcattgtttataaatatccccccccccacaaaaaacgatttcaaattttccataaatttccttccgtcatatttcgacgcccaaaattcggagccaaatttttttccaagtgaatcgaattccataaattttattactctccaaagcagggctggccgtgatcacggatctcggatcacgggtcacggattttttcaaattttccgtgattttgatccgtgattggcattttatatagggaatttt

SEQ ID NO: 18145 - DNA, 1192 bp, Heterodera glycines
gtgatctcgcctcacggattttcgcgattgtagactcagtcacggccagtcgtgctccagagtcaagagtatttagaagctattaatatgcactcagcgattatcattgcttataattttatccaacgctttgtacaaaaaatgatccgcccccggcatttccattgtccctgatatcagttcgactgacttggccaatcatgttgtttgcagcgccccctccaccgttgagtccgtttgggatgccttggtcgtcgtcgctggcggcggcaaatcgctcgacgactgctggcgatcgctcccgccaccagccgccgccaagaaaagtttgtgccaagtcgaacagtgcccggttcggattcgttgcgtccgctggtgatgccaaggccgggggtgccacggcgagtgggtgccgtcggtatggcgcaattttgttgctgtcactgccctcttccaatgctgtctttgaaaatgctagagccaatcccacacaccgatatgaagagattccgtaggttcaggatttgttccaactccgaattttttggacgaaattccaatgaaagctgtggcattttatttgaccaattgaaagaaaggcgcaatttttaattgcaatgccatagctttcgcaaaattccgaagctcaagggaaacaaaacaagaaagaccccgataaattctgtgagtagataatcgagactctcgcacgccttttacataagtgccgtgcccggtcactgcaacgaaagtcgccagaaagtttagggggcgggctaccacgtcataggttaatcagggtcagttagtcccgagttaattactcgttgggctcaccaacaccaccaccacttttccattagcaccttttcgtcgggtggcgccgcgccgagcgtaagcgatgctaattgacgggtgggctgaagcatgttggtcagtccttgtccaagcatctgcaaaaacgggcacaatttggagggggaggaagcaacaaaaaataaaagaaaagaaaaagtgggacctcggaaggacgcgcatttgttgggattggctttacctcgggcccggaatttgcactttaaaaacaaacctaattaaaatgagttttgagcatattttaaaatagttcttttgattgtaaaaaataattgagtaaattaaattattaaaaagaaaattaattaattaatta

SEQ ID NO: 18146 - DNA, 2985 bp, Heterodera glycines
  unsure (1)..(2985): unsure at all n locations
aaaaattaagaatacaattaagcaaattctcttcatacacgattcattctctttcatcccatccttttttcacttcacggacaaaatcgacaaaatctccgaatcgcgttttcggtcgtaaataatatcgttttaaaaagtcgtgagtcgtttttcgctctcgaagaggtcaattcggaaggcacccaaaacgatctctcgtgccgccccccccgtcgcattccttcgccacaaaaaatcgccctcacacaaacacaacatatgatcgaagatgggaaaagcactactaaatgttcggcgttcaactcgataattgaatgaaagtagtgataagcgatgggcggagaatggcacggggacgaagaaaagtcaaacagaagggagggagagaagaaaagggagggagagggaggaagagggagggagagaaggaagaagagggagggagagagaggaagagggagggagagagaggaagagggagggagagagagaaggaggggatgagaggggatgagaggggagggcacaacattaggaagaagcgaaggaaggccaatcggtgtgagcggaagcagcaaaacactggcagatgatggacgaactgtctgctgatgttggacagacatcagttgccgtgacatcattcatttggctaccaaattgcgccgaaatggtataaattcgacaaatcttcgaagacccgcaaagcggggcgaatttgttgaagttttggggattggcacgcgtttcattattttttttatgccaatcttttgattttttgccaacttgcaccggcatttcccatccctttttcgatgggcttttccccacctgctgttaaaagcaatgatcgacagcgtgcctttgccctgcattttcccctcaccccacaaaataatttggtgataattgacaaaatgcaggcgaacaaacaaacgaaaaactggtgacataaagaagatgaattaatgaatggacgagccaattaattagtgggcataattaatacctaattaactaatgaatgaatgaatgacttccgtctccgattaaaccatttgaaaattggttgaagagcgatcagttggtatgacgtgttataattgcattaataaagcatttacgcgaagactgcccccgtccatcaccgttttatggcccgtgtatcccgccccccccaaatntccccccccccaaaaaaaaagaaattccgctcattcattttggttggccatcgattaaaataataaataaataaaaaatattttcaaaaaagtcggctgattttctgtacaaaactgtactgctccctttgatcggataataataaagccattgtttttatccttcgcttggggcggcagagaatcgcattaaatttgcattttccaccggtgattaaaaatgagagcgatttgatcccttttcggagtttccatttttgacagccaaattattattacatattttgaaaaaatatttccctcatcattttgctacaattttcggtctttggtccgtccctgtcgaccaaatgtcgcccggtcgaccatttgtcgcactttcgcagtttgtccaaaatgtccgcttggccttggccatgctgaggccggcgaagcgccttttgacctgcattttggtgccccttttgctcagcccattgccgctgtttttcagaacgaaggcaaatttgaataaaattgtgaaaaatgaaataaaaataataataaattaacaaaaaagaaaaaacccacaaatgggttaaggaggcttcctgcgcttatgtggtgatgataatggggtcggttttgggctctgtttttcaatatataaaaatgttaatttattattaataaccctaaattttctttttcatataattttaattatattattatttttttgttttttcaataatttaaaattttctttttcttttttataaccctttttaattccaaatcttaaaacatttatttatttatttatcctttttttgttatttcccccatttagcctgtttttggctcaccgaagcattgccattggccgtcaccgctttggtgcccgttttcgccttccctttgttgtccattgacacggccagcagagtgtcctccgtttacctatcggtgcattttttaacaaaaaaatcactgaattttcaatgataattttgtttttatttttttgttaaggatagcaatttcgtttttttcggctcaatgataatggcaggtgaataactctaattggggatggcttttccatttttaatttgttcgactttaattgcccgaagaatttaatttaattgccctcatttgtcagttgcggttgagtcctcgcgacttcacgaacgaattgcgctgaatgttttgctgctgaccgggccaaacccgcgctggtatgcccataatttgcccaattaaaaattgttttaaactctttaattgttaattaggctaatgctcggcttccaattggccaccgcttttctctccatgtggatttcgaacacagcgacgacaatgtaaaaatagtcaatattaaatatttgaaattgaatggatgcaattttaggatgatggtcagttttgtggtgacaaaagggggaaggaacatttgaaacaatcaaaacgatggcattttgttgaaacaataattttaaatgcaggtgccaattgttgtggcggtgatcaaagagttggacttgtgccatcggagagagtaaaatttttggaattttatttatgttaaatatgagacaaattgtaagagggattttaaattttaaattatttaaaatataaattaattgccaggagcgacccgctggcggagcctttgccggacgaaggcggaaaaattgtcgatttggacacagtgtccaccagacaattgaacatttacaaggcgcgagaatggcttaaaacataagccaaacaatgttaaaatttagggccttctgttgagcat

SEQ ID NO: 18147 - DNA, 3421 bp, Heterodera glycines
aagtctcggtctcgagtctagactcgagaaaagtctagggtttttgggtctctgtctcgataccgagtctcggagtcaagtctcggaatcggtctcgagtctcgggaaatttttggtctcgaacagcactaataattaaagtcagaaaatatctgtttttcgatttttatcctgtcttactatttcaacaggacgaaggcatccacaataaaagtgagcacaatttactttaataacaatttttttgaaaagcttttgtatgttaatgtttgctttttcattatattgtaaaaaaaaagacatggataatacttataatccatgttaagtgaaatttaatgataaatcgaaaatgttgtaaaattcattatttaatacaattaaaaaacattaaactgaaaaacatattttttaatttaataaatacaattaagctctattaaattatttttcatttttatatatgaaaatatttaatggttccattaagcatattgggaaaaatatgattattactaaaatatagttaaacttcaaattgtttatccttataatagaattttcaattaataagtgaaatattaaaaattattctataagcgtaatctggagtttttaaaaatgaaaaaacctcgaagcacaataaataaaaagaaaaaagatatattcaacggtttttgaagtgttgcaaatgcaaaaaatgcaaaaaaaattagaacaattaaatttttaataatcattaaagttatggcttaatgaaaatattgaaaatgtataatcgatttaatctaggaagataaattaatttaaaattttatatttatttaaacgaaaattatattttaaaacctgtttaaatataattcatttacgaataagacaaaaagaaaatatacaataaaagaaataataaatatacttttttcattaaacataaattttttaatcaataatatgcaaataataaacctattaagttttaaaatttggaatgtaaacttatcgtaagcaaaaaaaaacgcgacaagagatgaattaaaaataaagcaaagttatatagaaattacaatggttgtactaaaaatgaaaaaaggcattaatcaagaaaatagctaattcatttttataattatttaactgtaaaaatttatgaatatttgaaagaattttaaaagtaatttattttctaataacaaaataattcataggtaaaaaatttttctgtcaggccttctaatgtttttagaatgtacaccaataaaattgcaatcaattttttttttgatttgaaactacgcgatttaggttgacaatacattctaattttacagcaatttacttcgtacctttgccctttaaatcgttcaatgaattctttattttttaaaataaaaaatgcacattttatgattaaagtataatttttggaattctcttaaaacattttattttaaatttaattataagtttcgggcggtgcctatcggcaccggtcatcattaaatattataatatcgtttactaaaaatttttaataaatataatgaaaatttctggtatttgatggtactcataaatatatttaaattattataaaccgtagctgccactgaatatttgccgccatcgaacaccagcttgcccctcatgacaaaacttcttcagagtcttctttattctaccgtttacctaaaataaagttaggatttaacagatttatgtaaggcttgatataaaattttcagtaagtttatttttaatttaatttaattaatttctataaaacaactatagttttgtaaagttgttgaatgtgtatccaattaatcattttcgtttaaatcaattttcacctttttgctaattcgctttttatcatttttttgttaaccaaatttttttttaattttttataaattaaagattttttatttttctcataaataatttttaattgttaaaaattacatagcctaaaatttttagccaaaccggaccggacttttaaggttgaaaaaccggggaaaaccgggaaaaaaccggaaatttcccggtcccggtcaaaactggtcaaaaccaggacttcggtactaagttgtccgtgttttggtcctggtcccgaccaacactacctgaaactgatgctcccccttagagatatgtagaacaatattttttcgttgatttttatttatgattgtatttatatcttattttattttttgccatgaatcattattgttaatccctttaataaattctccgctccttattatttccatatcctcttcttttacttctccattatccaattagtttgatcgatttatttacttaaaattggaaaatggttgcgaattaaatgtgaaaaatggaattgaaattaaatgtgaaaagaaggaattgaaattgaatgtgaaattgatgaaaattaaaatgatctgaattccaaaagtatttgagtgaaaaatggccaaaagagggatttctgatgagggacggtccgggatgggagtgggatgaaaaaaccaaaggagagttttgtccgggaaccgaggaaagggacttgggatctcgatgaaagggacggagaagaatttcttctccggagttttgctcgtaattgaccgggggagctaactgatattccgtttccctacggggaaaaggatcagcgaaatgctgatccttaatccccgccttcttttgttactgtgtgtaagggggggaaaggggtactgtacgttacactattttaaattaaactaatgagtagtgtagaacacaaaaagtaaattactcatattatggtcaccgatttgtatgttaaaaagaagaggatcaaataagattgataagaatttggaaagaaagtcagaacccaatacaacatcaaagttattttccgagacccatgagtcttcttctgtgatgagtaattttaaggagtgagtttgagacgctatttcaatgttagttgaaatttgccgatagtttgcaatggaaggaacgacacaccaacacataggggtttggggaaggagtaaaatttggacttttgataacatgccattcggacatgagtaaatgagatgtcagattttaagtcaattttgcagttaattaaaacagagttgactttaagttggatgactgggaaaggagggctttggttacttgctttttgaagctacgaaatggtgttccaggaggaaaaaatatttgtaatggatagatgaacagaatagttataattgaaatgaccatgagagtgaatataaatgtaatgctaatgaaagatatgggagaatactgttcaaaattgttaacattttcgttggataatgaagcatgtacagaggggaatagcgatataaaaagaagaacggtaggcataatggactttttataagaatttctg

SEQ ID NO: 18148 - DNA, 1582 bp, Heterodera glycines
tagcacttttctctctctccgggcctcaaacggttttcggtaattatcgcaaataattaatttaaaacctattaaattattattttttaaataattttaaaaataatttcgaaattcttagcccaactcactttttcaccgatcgtcagtgaagttgcgctcgaaaattgttgaagaatgtttgtatgaatacagaaaaatggtcgaagatcggccatacatcaaaattatttcgggccttgaaacggtatgccaaaaaatctctttttaaaataattttggttgcattaggaagcccatccggcatttaaaaattacctgggcgagttcaaatatttgtgggtcgatttccacgccgttctgaacaaagtgttgcgcataaatacgtcaaaaaattaccagcaaattgagaacagttgccaaatgtcggaggaatcgcccgtggtacggcaaaatggcacaattcagctaatgttacggcccgaagtacagtaaaacacacggacgattttgatcatgatcatggaaagggttaagccaaaagcggggtctgttgtcccttccggttcctatttgttgatcaacaaaagtgatcgatcagtgccttcacatgagtgatcaaaaggcatttgccgcgtctgatcgggccgggaactgcgcttcactttcttacatatttatgcattccaaaaacggcagtgaaatcaaactgatcaaagaatggacaagttttatcctaaaataagaaactgatcagagaatggaacagattttattccaaataaacatggtgggggttctccattttatgagtccattaattcacagacatttattttcatcctcaatttttgttgggtcattgcttttttatggcacatattcattcaaaagttctaaaatagtagaaacagaaacaaaacaaattctcacaaaatggaaatgaaaagacaacccaaaaaattgtgattctgattaaaaatagaaaattgcaaaagtaactgaaggagattaattaattaattaattaactggacttggctgtattaaaataagttgattttgccaatttacaaactaagtaggtttcttaaattttgaatgatcaaagactgaccaatcagtttcatcacttccaattggtcaattccgttcatatgatcagtttcatcacttccaattggtcaattccgttcatatgtttggggtggctgggcccaatttctttcaaaagcttattatttattcaattaatttcctaaatttccgccctattctaaaattttcgctttttcagtcccttttttgcgattttggcaaaaaatttgcatttgtgaagcattattttgttgaactgaagagacaggtcaacatggaataccaattcattactgaggcgagtgaaatgctgaaaaagatggaagaggcctatgaaaattggatggggatttgcgggacgaaatgccgaattggaaatccaaaagtggcggacgacgtccaaatggtactgggcccaatcaaatgccaaaaaattaaaaattttaaaaaaatagacggggcaaacaaaagagaaggaagggtt

SEQ ID NO: 18149 - DNA, 1098 bp, Heterodera glycines
aagagcaccttccaattggcactgaacgcactgaacaaagtgccattggaagcgaacgaatcgcaaagcaatcagacgcaaattgacgggacatgcgccgcgctttacaaggaggtgagtgaggtaagggaaacaacagcaaatcagagacaaaccgcaagagatggggccggcacggggttggacctgctggccgaaaccgaaactctaacaaattctacaaaaatttagaaaaataataattgacattggcatttactcttttttttaatagaatatgctgaagaacatgtgcgtgttcgccaagaagttggcctatttgtccaaattccgccaaatttatggctttgccccgccggcgccgacttcgtttggcttgaattggctgctgaaacgaaaacgaaacaaatcggctgccgcgaaaaacattcagaaagttgacgaatgcctggacagaatgcgggacgtgtacaaggcggaagtgaccaatatgggcaaacatttttgggggacgatgaagcaacaatttatggccaaattggcatttgagagaaatgccaaaggggtggcggaagagattgaagcgatgacgcgggcggaagaagagaggcggcggaggacaacgggaggcggacggaacagcacaagcagcaggagaagaagccggggatggccgtgggaaggggaggcgaggagataaagccggtcagacgcgagacaaagggaggaaaagcatgtgatgagaccaacagaggagagggagggattgttgataaatggggttggccaatatcatcaaattttaatttggcattagcatttgtaaatggatttaatggatgttattaataaagtttagcaaccaaaaatacttttgtttattcgtattcgctttttttagccgttatcagctttatcagaaacaacctgttgtatttctcggtggtgcggaagtgtaaaagatcaacccacggtgggactcgaacccacgacacctcccataacgcgggatgctctaaccactgagctacgcaggtctcatttcctccacactcatctcatccctctaagatgcactcttctcggcccgagatagag

SEQ ID NO: 18150 - DNA, 2765 bp, Heterodera glycines
  unsure (1)..(2765): unsure at all n locations
cggaaactaatttgtttctcttcatcctttcgaggcccgaagcacaatacacgcggcaacaaataagggaatcgtgggctgctaacttggtaaagtcacagaacaaattgccattattttgcactgcttttccagaacgaacacaatgccaccgtccgtttcgtcgtcggttggccgttgcgttacgactttgaccgattgttggaggaatttttgactttttctgacttaattctctacgacatcgaagacacttatgccaacttatatgtgaaggtttacgtgtctcttcagtggcaacggcacttttgtgacaacgcaaaattcgttctgaaaacggatgacgactccgttgtggacgtgggccgactccgctggtgggtggaccacgaattcgcccgaagagtcgcaacgcacccggccagcgtttttggcgggatgtggaaaggagtgaaagtgaaccgggagaagacccaccgatggcacgtcctccttcacatttcactcttcgaccgtcaaatactcattcatttaggtacgtcccgcgaactctgtacgctgcgaagagatacccgccgtatatgaatgggtaggcataggcacaccttcagaatttagtcaggggagagaatagccccctgctgaacttgttgtttataaatacaggcccacttatcttttgtccaacgaagcggtcaaaaagattttgaacgtaactgccaaagtgaaagctgttccgattgaggacattctgttcacgggaattctggccagcaaaatgcaagtgcataagttcagcgcttggaagcacttccgatatggaaaatccgtgagtttcgcaaatttctatcagaaaattctgacggaaaacgatatgaagaacccaaattagagtttaagtcagaaaggcatctcggatatttgttcagttgtacgcctacgaaaagtgccgaaacgactcaaccgatggtcgtcctgtgccttatgtaattgccatcttcggattgtccaaccccgaaaaaattcgtcaagcttttgatgaacttcattccgtaaattgctcctcttcatggttgtccattcgaaggcttctttggcaaaaagcattgaattggtggaaggaattggatgacatgaaaagggtgacaataaaatggcaaaaacaccaatggaatgattacgaacttaaatctaattaaaaaatttaaatgttacaattttattaaacggttaaaatgaaaaattgttttttcattagaaaattttaaaattaataggaaatgaattgaatttagcgaattagatcatgtgcagtgggcattaagtgagtatcgaatttcgtcgggcgcggcgccaacggtcactgactgggcaaaagtttgaaggcatcgaaccatccaccgaatatgatgttgaaatcggattggtatttttgtatcgtcacgagcaaagtcgtctgaaaagtgaaaaggacattcggaagagcaaagcaaatggataattaattaattaattagtgcctggtcatcgtccaccattttctcgtccaacatctctaagaaggacttgtggaaaaatatgtgaaagcgtttgattgtctcggaagaacccgctaagaagcctaaaattggaaaggcgaaaatcgcattgggacgcttgtttacctccactgaccaccgatttttgtttccgatacaccttaaagggaaggaagggacatttgagggattgccaatgccgtttgtttcgcttttgctctgcttgccttgtccaaagtgtatcgttcgacccggtcaattttcggtgtcagctgaaccaaagtgattttatctgattttagcaccggcgaccacactccgtagggtatttctgaggcagatccatggcctgttaattaagcacttcgtacagaattgaattcactgatcctttttgtaagatcgaatgccgaagcttaccatatccggcgtccaaccaaacaaaaaactgctgcccgttcaacggtttgggaaagcgtgagattaaagtggcattgagcaggaagtacggcttcgagttgaccagaatatcgtaatcagggtaaatcgtctcgggatgggttcgcatttgctcatcccagtcgccgtgccaatggttctgttcccagcgcataatctcttcaatctgtggggccacaattgtttggcatttggagggagagtaaacacctcatttcggaatttgtaataaggcaattcctgcaaagacagctccacaacctaaaaaagaatattgtataataataaaaactccaaaaagactgaaatcgactgacttgaatccgctcccaattgatgcgctttcccaaggactgaagataggaagtgaccaatgaatcacagtaaatgattatgcggttttggagtcgtagcacaatgttggccaagtatcccaagtactggtcgaagtgacgagtgaatctgaagaaaatgccggaggttgaaactgaatgctgcgcccatgactattccaaatgaccgtggccattcccctcgtcaatgtccagcagtgctgtgactatcactggcgcctcgcgtcgtttcctctccaatttggctttggcatgcgctgtttttcgtcgaaagtgtgtgaatgatatcgacaataatatttaatcactaccgttttgttttgtgtgtatcagaaacgacgacttcggctactgaagacggctttttcggcggaaggagcgtcggcgcanagccttcccgtccgggggaggacga

SEQ ID NO: 18151 - DNA, 937 bp, Heterodera glycines
tagagaaagaatttaatgcaattcatttattacgacctactaaatccaggtccaggaaaaatccaggctcctcgagacctggacctggatttttttaaactcattttaaaaatcaaaaaaatgtttgaaaaattcaattaattgcttgggaacatctaaaaatatctaatttacaataataatttgtttttaaatatatttaatcattttttgaaaacttgaaaaaatatcggtcacttgaaataataaattctaaaattttgtccaggaaaatccaggttttttcctgttttgcctggacctggattttttttcacatttgacctggacctggatttcctggacaaaaatccaggaaaatccatgtccaggaaaaatccaggttgtcaaaacctggacctggatccaggaaaaatccaggcctggatccaggtccaggtcgaactctactcataacctacctaattgtctggatgagaaaaaacgtacctaattagagaaagaatttaatgcaattcatttattacgacctactacatatggacgacacccaactcgtactaggccaactcgtactgccccaactcgtactgtttttcgacaaaaaaatcgtcataactttttttaaagtcgaccaaattaaacattcttggtatcattcgatagctcttaacgttctctatctatctgcaaaatgtaagaaaattttattgcttttcaaaaaagttatgaccaacaatcgtaaaaaattttgtttttgtccataacttttttcaaacttgatcaaatttttggaaacatggtggatagatagagaattttaagggctattgaatgataccaagaatgtttaatttggccgactttaacaaaagttatgacgatttttgtgtcgaaaaacagtacgagttggggcagtacgagttgggtttttacc

SEQ ID NO: 18152 - DNA, 1091 bp, Heterodera glycines
attgatttttgccgttgttccatttgccctcttccaacccgtgaaaggggaggagacccattcaccttctctggtatagccccattttcccaaacccataataaaagtattctaattttccataattgttactcggaagctatggactgtcccaaaaaagttaaaattccccctgaacttattttggagttggccaatttccttcattacaattttcgctggttcggcatccgaatttctttgttctttgaccattttctcgccaaaaatcaaaggaaaattcgtcgcaataaaattaaggtataatgatttttcctctgcattaaataattggaaatgagaacaagggaaggtccattacagaactcattagacatttggtacctagtttttaatttgagctttttctcttgggtcctttttcaaatccgtttattttttctaatccctttattaattgtgtataattatactcccaatgctgttttcagcaactctttgaagaaatccgtgctcaagagaaagctgtggccgatgcgaaaaagttgttggaagatgcagctgttcgtttcggagaagcaactgctcgtctcaaagatttgaagcagcgctacaaaaagcttgtctcatttttatatttcgatttttattatagtgactaatttattgcaaacacagttggagtccgaaagaccggttttgacgccgcagatggttcccagcagcgaaactccaagtcctgaacccgtctcatcggtactgtaacttcaaaatttctttgctttttgtattttatggcaaggtgttccgtttaagtatctgagtagtgtcaacaggcgccgccatggattttatatatgaaaataacaattttctaatatttttcttgaaaaacttattaatttccaaaaataaattggccgacgaactaagccggggggggggaactagctgctcccgattttatattggaacttggtcatttccgggtaatactctagtttgtccactccatttttgaaaaaatctattttttaaatcaagagggcgcggtttccacgggtttttggggtcactgatcatgaatccgg

SEQ ID NO: 18153 - DNA, 1280 bp, Heterodera glycines
  unsure (1)..(1280): unsure at all n locations
acggacatttagcgacttggaaaattggaccagaacagaaaaccaaggccagaattgagtgtttgtgcaaataataaataataatgccatttgctgtttttaagaaatttaaaaatgccaaaattcgtgttttaatgcaccaaacactcaaagaacgaccccggaggacgggggaagaagagcaggacaaaggtttagccaaacaaaaactcggaaattagaaaaaatttgggttaattctaaacaaaaacaagtttggctacgcctttggcctgtccgattaaagaagacacgcacacagaccaatttcgggaataatcaacatttttatagttttatatgggcaataacacattttgttgttggcgttataggctgtgctctgttaacggatacaactgtgcaagttgaggcgcgaacgtacggttttcagatttgatgacttagaaaagacgtgccaaaatcggagtgtctcatcaccggccccagtgacaatggactcgccgtccggggacatcgccttgggagggattattaagtgaattactagtaaacaatgaaatcggtcagtttcattcgaccaaacataccaagtaaagtacgcgtgactggtgcccggacagctttgtgatgggctgcatgctcgggtatttccacagaatcacttggttgtacgagtagccgtgggtggacaccaactcggagctgtgctttgaccatgcgacgttacaaacctaacaatttggaacagcatgttaagggacggaggacctcgcccttttcttccccacctggctgcccgtctccacacattgcattgcctgtccggtcattgtgttccaaaaacgcaacgatcggtcggcggtgcctccaccgctgaccaaaatgctcggatggtggggcgacctacaaaatatgaggacagtatttcggagtacaaatttccactgattttgtaggtgttcccccatcgcccgtgttgggacgtccccaactgaccatgccaatgctttgacggccgcgttgtgctctgtgtacgtctgaatgggctccgaccgtcgcaggctccacaccaacaattggttgtcattcccaccggatgccaaatactctttgttcggagaccatttcaatccgcacacctaataacataagaaaggaatttaaattttgaggtaaaaggcattggccaagcgttttttctcnaattcaaacagagcatctctgtttatatgcaaatttacaataaaataaaatatatgtcattcgtacataaaaaa

SEQ ID NO: 18154 - DNA, 1177 bp, Heterodera glycines
cccccccccccaaaaattatgatgtcgttgcttcgaattcattgtcagaatatatgtgtgttctcgaaagcccacctcctgccgatgggcactcatccgtttctccgaccgttgaatgtcgcgcaagtcgcggtgaagaatgaagcgatcacgcgagcccgagcaaatgacgttttcgttccatgccaagcaaccgatgcgcatgtcatggattttcaagttgtgcagcattttctgcgcatgtgtgtcccaaatctgagaaaacgaattcaattatatttctcaaaatatgtatctgtaaaattagtatgattaggagagcacagatcggatatgatcccgtaaaggactaaccaggagccctttcctgattgatttttaattcgagggtcaaaaatttgtccaagttttggaactgaagccataaaaacggataaatatgtaaagaattgaatgaaaaaaagacaaatgtctcgtttaaattaacaggcattcatagttcacctgcaaaaagcctttctgcgtgccaaccgcgagcaaatcgccccgttctgaccaatggactgacgtcactgattcgttgttctccgaactcaaatcgcacagcttcacaacttggctgttgcaggcactccacaaataaacgcacgtgttcagcccaaccgaaagcatattttgggaggaccaatcaacctaaaaacaacaaataaaataatggaacagagcgagatggaccaaacttaaaaagccaggacacaaaatgggatatgatcttttgtgtttttaccaaatttgcggacaaacgcatttgaccaagaattatttgcaaatttaattgcatttattgttcgaaaacaaattcataattgagatggattatgaagaaagaaggcaaattttaaagatattaggactaattttcttgacaatttcgttagcatttttgagggtttgtttttctctactacggagtagcaaatggtgactgaccagtggtttacgtaaataagcaggggaaaaagcagttgttgtttaaaaacagaccaaattcaggtagaaatcatcctgcaactcgggcgcgtccaaaactttgtacggattcttcggcacttttctctgcggttttcgcggtgattttaacagacgttgactgtcttaacaaaaaggaaaatgataa

SEQ ID NO: 18155 - DNA, 1397 bp, Heterodera glycines
agtgaaaatgagacaaaaaagcaatttatgagagtcacaaaatattgatgagatacgtaacggaccgttatcaaatggtggcgataagagagttcaaaatcagagagtttttggggtcagaaactgtgacgtacatataagaaagaaagaagagaatacaacgcacaatttggtggaaaatgcgatgatatgataacaacaatatgcagcaagcatcagaagtcacaaaaatttaaataccagcgaaaccgagagacaaaaaacaaacaaataaataaataatttgtaataaaaaaggatcaatggcactcttacaaaggcaactcgtacaataaaattttacaaaacaaagcataagcttaagcctaggcccaagcaagcctaagcctaaagcttaggcctagcctaagccattgtacgcgttgcaatgacaccaaaacaaaataaggcactaaaatcgagtgtcaaaattcaaagagtcttcaccgctgtcgtcgtccgtttcgtcgttaggctagcggcagtgccattgccggcgacactaccgtttttgtcagttttggtggtgccaacattgcccccgccagcgccgcttgtgctcggctcgccactgcaccagaagttgtcgctgttattattggtgttgttgctgttcatcaccgtgccgttgttgccggcgctgccgccagtcatcggcccgaccctactctgttggggcgtcacacgcttccgtgaccggacaacctgtgaacaacaacgggacgtttttttgccattccgttgctgtacgggcggttttaaaaattcctccgcaaaaaacggagtaactcatcttaaaaatttgaaaatattgttagaaaacaataataaaaaaaattttttaaacatttttttatagaaattttctaaaactttttttgaaaaatttttatgcgaaaattttaaaaattttcgagggaagggaactggcgaggttttcaattcagcattggtgcgcctcccccgaattttttttctcagtacgggcctgctgccccattttgcctattttcggctttacacttattgttagcccagtccagacacctgcacattattctcaaccacagccttcttcgcctccaattgtttgtgcttttgtcggtccttaaaaaatgtataaaaatttgaccaaaaaaaatgatgttaatgtttttccaaaaaattttaattgaaaggaacaccgatgactcaaataattggaacaatttgcttgtgtactgtaatcacacaacaaatgcattactgtagtaaaagcactgtctaattaaaatcagaatgttatggtctcatcattgtcctcggttgcgttcagcaacacaaattttgtgggccgaaaatcggggccaaaaaatgag

SEQ ID NO: 18156 - DNA, 1500 bp, Heterodera glycines
  unsure (1)..(1500): unsure at all n locations
attggccatggacgcacattgagccctcgggcaancaatgcgggggacgcaccggcgcacaatgcccgccccggacgcgacaacagcggcgacagacattcgcttctgcaacggcagaaaaaagggatcagtcagttcgtttctcttcgaagttccgcctccctctccccgataaatttaaaattttttaaaaagtttcctgttttttttttcaaaataatgaattaaaattgggccccgggtcagcttttggggtatactcctttcatagtagacctaattgaatggttttgaattattcaatagctcaaaatattctctatttgtatggcaaaattttgaaaaatttggttgagcttcatagaaattatgaatctaaatgttcggaaaccaattttgaagtcttttggtgttaacttttttttttttttgaaaattaaccattttttctagaatttttcagtaaaatggagaatgggtgatatcaaattcattcaattcggccaactatataagcagttatagacaccaaaaaatagcccgagtgcccaattgttcgggacccagtcgtgccggtccggggtgccccttcccgaaggattgcatatggtttttgaaaatctggaaaattccaaaaatttggataaacaagtcataattactgtttagtaggaaaattaaactaaaaacggacggaccatcctcgcaaagacagggcaacaggtcggcggactgcatggcgcagaacgagacgcattcgccggcacggcatttgccctcgtccgggcacgcggtgccgtcgggcaacgcttttggctgaggacatttgtcactgagtccgctaaaacaacaaacgaacaaacaatacttaggtatatagattttagctaataaaatggaattaaaaaaaaaattatttttgcgccgttttgtttttttgaaaattgcacgggccaaatcccgaaacccggcttaactcatcgtcaatttaaactgccaacctgcaccgtgactcgtccttgcacatctctttgttctgcgcttggcattgatgaccctttgccatgaaagtgcactgtcccgtacaacactcggaatgtctaaaaaacaaaaaatatttttttgttataaccagtctggccaattttcgaattttggcgtttaatttaatcgggtgaactacgtttttgcgcccatgtaacaaaaaagattaaaaaaaaactgaaattctaattatataaattaaaattccataagactggcaattgccaatgccgtccccgcctatcctaaaccgttgatggctgaccgtggcgagcaaaacgcgttcggcttcagacgacagtcagccgtacaacagcggtcagtgcctgtgccgtcggcgttgttgtcgtcgccgccggtctccggcgccgacatgccgcccccaatttgtgcacccccatcacactgttcgccctcctccaaaatngccgttgcgcacaacgagcggcgctcctc

SEQ ID NO: 18157 - DNA, 2786 bp, Heterodera glycines
atcggattgtgctcccgtgttcgggcttgtggaccaatccaagcaagcgattttcaactcgccgagcgtcttctgatcgaacttgccccaagtggactgtaccgatttggccaagcaaagccccgaggtacgccttcgcactgacgaacagggattgatcccccttgagaccagactcggcaactgtacagcaagtgatgactggaaaagcccaattctgcttccggaccagtcaccgatcactctgctgataattcgagatcgtcatgagaagatgcgacactcagaagtagaagccacgctcacttcattcctggagaaattttggtgccataaagccaggggcacagtgaccagagaggtcaaaaaatgccttcgttgccgacgaatccaaggcccggcatttgctctgccagccatgccatccctgcccactgaccgtgttgtgcgatctgcaccctttgagcatgtcggcattgactacttgggccctacaatgacgagaatcgtgaccggtccaaccaccgcaacacataaggcctggatcgtgctgataacctgcctggctactcgtgccgtctatcttgaaccggtcctggacctaacggcctcgtcatttcttctcattctgcgccgcttcacgtgccgacgaggcgtgccaactcggatccttaccgacaacggaactcaattcgttctggcatccaaagtttccgcggctctcgaagccggcagagtgccaacttcagcactggaccgattcctggcacgagaggcaatccattggcgttttatccctcagttgtcaccttggcaagggggagtctacgaaagactcgttgccttggtcaagagctgcttcaaacgagagcttggccgcgtaatgctctcatgggaagagctggtcacatacacagccgaagtcgaagcagtactcaaccaaaggccgctctgtcatgtctctgaagagcctgacggaatcctgccacttcggccaattgacttcctccttccaagagcaaaacttggcattgcattcactgccgatactgacctcgatgagttccgaatttcttccaccaatcaaagagatgcgcttatccagcgttggcattccgtgtcatcatcaatcgaccatttctggaatcgctggcagaaggaatacctgctgatgcttcgccagagattgcagtggaagttcaagaaacagaggaaccaaattgcgcgagagcccatggaaggagaagttgtgctgatctctgaagaaaaacttcctcgcaactgttggccgatgggacgaattgtcgagttacaacgctcacacggggagattcgaaacgccaaaattcgattggccacaggaaaggtgctaagccggcccctaaatcgtctttatcccttggaagtggcttcccctgccggacaagatgagagccaccagcagctcgacaaacccgccgcttgaggaacatcacaacagaacccaaacagcggactcaactccaatttgccaactcgcgtgcccggcgcaattcacctggcccgactcattctatggtcactcgctcaaaaaccaaagcactggcctccgttctgtccattctgatgtgcctatttctgattggcgcttcccaaaccaacgccagtagcacgaccaagccaaagtgtgggaaaggacttccaattcgttgccgtggatgcgaactgacctgcacaaaaaccggcgttgacatttcaataccgaatgggattgtcaaattcttgctatgttgtgccggtggaactcagtgcctcactcaatccggcattaggaaatccttccatcgcttgcccaaggaacaccttttattcgactacgattgtgaagccacttattggacgaaaaagaacaacaaaagaatcgggagcgtccaatgtccaggcagagatgcgtgcgagctcatcgattgttgggtgtgcctcgaacgactggcaaatcctgattgtcgtccagatgtgaccttcggactcattggtggagcgagcttcttcactttcctcttcgttttttggattctgccactgatgtgccacgtcacaatgttttggatcctacagcatctctttgccctgctcgtccgcttattgtgttgtttttggtcaagccaaaacgcaccgcagagagaagaatcccctctccttgccttccaaagtctgcctactccgcgcaggcgccaaatgagtcgcagtcgttttcgcccttttccaaaacttcaaacgacgctcctgttattgaccctctgtgcctttacttcatgtgccagggcacaagttgtctcaatcaccgcctctgctgagaaatgccaaaggtccgatttcggctcggtgtgccatctcgagagctcgacaacagttactcttcttccatcgggtctgccggtacgtctactccttcgtcaccctgacgagagagttctcggcacgcttgaaatcagcatgcgctcactgactttgcattgcctgccaaaatctgagcaatggcttcgatcctaccacatcgagacagcttcggttaagcggtgcccgagccgtggaaattgtacacgcgaattctgcgacgacgtcaacaacagaagaaaaacagaagttcctgagcttagcgagtgggctaagcatcccggattcaacagatgctcagcatcttgctcattttggtggtgtgcgtgtgtgagtgccggtgccagctgcatctattacccgtccacatgccattgccaactcgccaactgtctacaagctgatctcct

SEQ ID NO: 18158 - DNA, 3217 bp, Heterodera glycines
  unsure (1)..(3217): unsure at all n locations
gtagagatttaaatttaataattggattaacgattttattaatttcggggcacatttttaaataaaatgggaattaatgaaaaaaacatttaaaactaatcattatttacttaatatttgccaatatttgttcagtagaacaaaatttattaaatcttaataatttttattttacattaaataatttttttatattgtaaaagcagaagatttagatttatattatttataaaaataaaaaattaccaaatttatttttgagaatntaagaagaaaatgaaactccacctattattagttttaattatatttttaatcatcgaaattgatcaaattaaaacggaaaaggaaaaattacaacaaaaatcatttgaggaaatttttggagaaaaatgggaagaaaaagaagaagaaaggcgaaatgaactcaaaaaaagagaaataattgcaaaattttataaaataaaagagaaaatcaagcaaaaaggacgaaaatactcaacaaaagaatgtaataaaattgaagaaaaaataacgaaaaaattggggacaaatcgaaggaaaatttatgaatggattaaagaattggggcttcaaaaacaaataaagaaaagctataaatcaaaaagtgatgaacaaaaacatgaaattgttcagaaatttattgaaatgacaaatgaatacaaacaaaaaggaaaatattcgcaaaaagaatggaacaaaaattatgccgaaatttgtaagaaaattggagtaagcaaagggacaattatcaaatggaagaaacagtttggcattagtcttaagagaataacggaaaaagaaaaaatggcaaaaatgaaaatttattggcaaataaaaagagaaaatccaaaaataagtgaacagaaaattgccaaaatgaccaacacttcggcgaagaacttttggaaatggaaagccaaatttggagaagcgaaataatgaggaagaaatgaaagccaaaaaagaggacaaagaaattctcgaaaattcggaaaattatattttatgtgacttttgtttttgttcattaacagggctgcaaaaaatatgcaaatgcataagtagtaacccctgccacaccttcgccgcttgacgctaattagaagtgacaggtggcggaggagggtgtcaattagtcactaattgggggggggggtgtgctaattggtcagcggtcaagagggcactaattggtcagccgtagggtgtggggtggtgtcaattaattagggaaacctaaacctatgcgaggggtgtgtaaaattttcatgtactttttttttgacataaaatttgattgatttaaaaagtgacagccgagggggagggggaatttgattggtcagcgaagtgacagatgagggaaaaattcaaatttctgatgggcggggatcggaaaattatgattgatcaacaatgtgacatttgcgggggcattcaaatttgcggggagcggggtgggagggtagagagggatatttctcatcttttctctgtccacccctgtccaaacagagcaatgcatatcgatttgacgggggaacgccgtcactttctcaccgctttactcattgccattaaatgaccaaacgaccttttccataattctcccctatttttaggtgtgttatttttccatatttttctcaacatttgttcaacaccaatggcgcccgggggcaaaacgtatgctcgacttaaaaatgtgagtaaatgaataaatttttgatttgtatttttcgtaagtaaatgactaaattttgttatgtcgttaacatgtttaggcatcaaagcccatcggctcgtcaagttcatcgtcagaggatgaacttcccagcaggaaaaaaaggccactgccaaccatgaaagcaccaatggtcagtttaagtgtttaaaatttttgaaattttttcgtccttttccgccagtgaaaaggatggattttaatgagaaaaatttgtaccaaatgaaaaaaaaaattcctttttttttcttaatactttagaacgttgcgaatcgaaccggcctgggcaccgacactgcactggtccaacagccagcaccaaaaaaattgcccattacacgcaaaagcgtgggtttaaaaaattaattaattttatcaaaataataaatattcctttttttttaataatttcccgttaattttgtaggccaagggaaatgccgccgcaccatcctcctccgtttccgtccgcaatccaacgcgccgcgctccttcaacccgtaaagctgttgcacaacaaccgcaacaacgcaaattagaaaagcgaaaagcggtaaatttgtgctgaaattttttatgtgatttttcattaaaataaaaatgacaataattgtattaattttggattttttttttgaatcaggcaacaccgcaactggacgacaattgcccgggggaccaccggcacccatcacagaccctgttggagcagcagaacaatgcgttgtaccggctcctcttcgatggcagcaacgagaactacttcacccatttggagcgagcccgtcacccgtcacctcgtccacacatgcgccgtgtgtgcgaagaagtacgagttcgtgttggtgcggttcccggacactggagtcgagacgccatggcatcctgtgttacaaaagcatcgcaacattcgtgatggttggacgttgctagacctagcaatgttggtaagcgaaatttgtttcaattttttgaaattggtcatcgaaaaaaaaaatatttgaggagcccgacacaatttacgcttttgacgcagcatggcaacaatgtgttgcacctgatgaagcgattggagggaatgaaaatgatgacggtggcgatgatgagaacggcagaggaaacaacagcggaggaagaaacaagaagaagggtggccaaagacggggcggaggaggtgggcaaaaagacggaggagggagcaaagacggagtgaggaggacgaaggaagaggcgaagaagaaacaagagagagaggagacgaagaggaaacgtaagaagcaagagaaaaattgaagagaggtgaagaaaaaggaggaggagagaaaggaggaggagaaaaggaaacgaatggagggaggcgaagcgaaggaggaggaaaagccaaagaaggacgaagcgaacgaggaggaaaagccaaaggacgaagcaaaagtggaggaaaagccaaag

SEQ ID NO: 18159 - DNA, 1315 bp, Heterodera glycines
ttagagaaaaagaggaaaagaaagggagagagagagccttctgggtggagcgaggggtgggaagggataagaagagaacatagagatgcacagacattcttcctctgggttagagtgtgaaagaaagagagaaaaagagggaagaaattgagggattagagaaaagagaaatattaaagggacaagaaaggaagagaggggggggggtaagagaaaagagagaaaggaagagaaaaagagagcattaaagacagagaaggaagataggataagagaagaatggatccacagatgcagacattcttcctttgctttttcatctctgtatgcccacaaaggcacgaacggaagagaaaataagagagagagagagagagagagtcaagagaatgtctggaaagacagtcagacaaaatgaaataacaaagaaagcgaaagagataaagaatgaaaaaatagtgcaaattgggggaattggtaattgatgagaaacatagaaagagtcacataagtggccttccagcgtcccaacccaagcgaagcgacgatgatcatttatatcggaagaaagtgaacggcggagccctttcattcctctccgttcatttcgttggtatgtataatatgcagaaagggaattttcacgaatttacgatttaaaatttctagaaaaacaaaaaattttgaaattttccttgtaggatttttatctggcatctgtgtaaatatggctgttgtcctctaatatgtacatagatgagacagataaaactctcgatttattcgagaattgtattcgcaaaacaaaatagtaatcgaaattggccactcgacctacctaacttgcttttcaccacactaagcatatgtttttgttacatgaagtggtcatataagccaaaataaatgacttgcttacggtacggtcaaagaaatgaaggtggctactgtaattgaccaacattgtggatcaaaaaacacaattttatcgcaaaatgtctaaaagtgaaaacccggatcttttggacaaaaacagacaatttaattgcaaaatatttaaaaaatgaaattcaccaaggccgcatattttttaggacgaaaaccaactcgtactaggccaatttgtactgcgacgactcgcgtactaaattacctaccccaatttgtggtaaatttctgcttttttcacagtacgtacgaattgggaaaattaatatgagtcggggtaatacgagtttgatttttccatttttctaaaattatacagtaccaatatatttttttaattcacacagttcttcgcttcttctttccc

SEQ ID NO: 18160 - DNA, 2146 bp, Heterodera glycines
  unsure (1)..(2146): unsure at all n locations
cacagatttattagatttggatttttaaaattatacatttatttaaattttttcagataactcaaactcaaaaaaaaaattgccttttgtttcctcgattcctcgtcattttgcttcatatacaaaaaatttatacgcccttcgttctttcgtcaacaaaaaaaacacatttaaccaaacaattatgacttgcgggttggctgtgaaacgtccgttggaccttggacaggacggcagtttggtggacgtcaagcggccgcgccatggcggcgcatcgccacagtgttcaccgtttcgaccacagctcggcattctggccacttcattgatgcaatccgtgccaccaaaggtttttcgcgctccccaaaatcatggattctcatggcaattttttcaataccaaataaggaggacccttttgggttccaattttttttttgtctcataaaactcggggaaaccatatttctgggagttttcggggtcgctaattattttaagacgtacaacaactgattgctcttcccgtccaatttaagggcttttctagcaattcgcatccattcggcccgggctcggcattttgagtccccgaaagcgctgtcgggtagttgacagtatgtgccaaaatccggttttttctaaaatgccggtccggatactggcgcaaatctggctagtcctgcgctctaataaaattattgtgtctgcataaccgccgccctctcatttttaggtgcctagtcctcctgctttcactggtactgcttccgccggcgttggccccatcggcaatccgtcctcaccatttgcggacgtgtccggccgttgtcgcttgtccagcacccagctggactcgtacttgcgtgccgaaatccaggcgctgaaacggcgccggctgatcccgcgccgtcagggcaattttccggaggaagggttcccgttgagcaccaccaacgttgtcgtcaatgccaacaaaggcactgccaccgctgtggcggcgtccaccggtggcattgttggcacgccggtgagcagcaccagtggcaacgcgtttcgcaaggcgacatctccgtcttcatcaaatgtaagcggtgccattgtaaaaacgggtttttagtgtgttcgatattccgagaattaaacagagcaatggaatttattggaatctcggcactcgcatagatatagtggccccgaaaaatgttgaagttgggcgtacatttttggtttgcaaaattcctttctcttaaaaaaattaaaccaaaaacgcaaaatttggtcattttggacggttaaaaattaaaagattttttcgcggcttattgacgtagctccggcgcagcaccatttgcgcatgtattaaccaatttcgaatccttaacatattaaaaaaaccgaaatttgaaatgaacttttgacctagcatcccagcaaaaaaataaaaataaattttcagtcctcaggactcggagggtgaagcaatgcggaccggcaacgctgatgaggagaagcgtgccatgctcgaagcgctctaccagaatccccaattttcgctgcgtcaggtgaagctgatctgtgaacgcctgctcaaggagcaggaaatgcggctgcgctacgagtgagtgggggcgttttggtttgtttgttgttcaaactggaattttcgaaaaaatttccggttccaaatttggttttttcgtccgcatccgaaatttttatggcaaaaaatgtattttttgctgaaaattttcgattttccttcttcgtgttccctccaaagcctacccccccccccnctcccccactaaaaaatcttcaaaagatttttacaaattgcattcaaaatttttctcagcgatagcgatatggctaaaatgtacgttgaatttcatgaccagaaatgcgctttctctcgatttttattttgtatgtgtgattttttccctgcacagatatgagaccatcttgaacaagaaactggaggagcagcatgaccaatacgttcagtttgccaaggaacagttggacaccaatttggcgctcaaaggcgacgatattccatgtaaggggcaacaacaaacaaacaaatgttttacttacgataagtaatggacaaatgttgtcaggccaggggaatggtcaa

SEQ ID NO: 18161 - DNA, 2212 bp, Heterodera glycines
agcctgcaaaagttcaaaaaatttcgttcaattaaaaaaattgtgattcagaaaaccgattttttgaagttttttgtgcataacttttttaaaactaaaagaaatttttaaaattttttgcaagctagtagagagcacttggggctatcgaatggtatcaaattcattcaattcaaacaactctgaacagagttataccccaaaaactgacccggggccttggatttcaaaaaaaaaaaattttttttaattggaaataggggggagggaactttgtccacctgtacatctccaactggtgccgactctgaggctttcggcatggaatgtgccgtccgatgaatgttggctccccgccaatcagttggccaatcgccgtccgttcggcggtgccaattgtgccgtcgtcgccattttggctaacactgaccaacaattcggtgccattgacgcgcttcaaatgctcaaattgggccggcaatgggggcaaaatgcgcaacagtgcagagaagaggctaaagcaattgaaaatttaaaattgattaaaatcggtggcttagtcggtaaaatttctgtttttgggcgtcagggttcaattccaccttactgcatgcaatttttcttttgtatattaattttttttgaacatttaatatttgataaacatataaaaagaaataattacagaaacaaaacttttcagaaaatttcaaaaaaatcatgaaaaatttggcacaaaaatttcaacaaaaattgactcaattaaccgtccattaaagcatttttatgcaaaaaattgcactgttcgagaaactaaactcaacttttgtttgtaacgttaagcacaaccgcttcagtgagttcaatgtgttctgtgtgaagtgaagaaggaagaattggccgaatttcaaagctaaaaattaaataaaaatttttttgttaattatattttttattactttcgtaatcgttgaatttttgtgcttttttgattttcgtcaagcaaattttcatctttggtgcttaacatctaaaaaaattgaaaaaggaaataatttttaagttttaaaaaaattctgatgtgtaaaacaatttaaaagaacaaattttttgtgcctccggccatttcaaacaaaatgccaaaaggcaaacatttaaatccttttgaaattgtaaccgcaaaatttttgaaaatttgtgaaaattcatgcctaacaataagaggtattcatggtaaaatgtaagtcattagaaattagtaaaaaaaattttcaagcaatcgaagttatggtattaaaaatcgcattatctttataaataatccgatccccattttttcatttccgtacaaatttgctgagaatgaatcatcatcattatacataccaccaaccattatcatcatcagcaaatcagcatcattcaccaaccgagccataattatacatatttagtatgccttaaatgcatttttatcatcatcaatcagcaaacaaacaagttggttggttgctgtgttgattttgtggtggtggtggtggtgctgttccaacttccattcattccccccccctcccctcccattccttccgtttttgatcgctttgcagtcacaggtgcggtgggccccaggaccaattgggccccatctttactctcttctgctgcttacctctaatatatgctccttggtatcattcgacagcactgaactgttttgtctctatcaattagactgaacccaaaatggctaggacaattcgaatacgaaaaactcaaattttttgctcgatcgatttttttttcatttaaagcccggcgaactaaagaatgccaacaagtggacgggtcggttttctgttttgcataaaaacatgcaaatttacaaaaatgacttggtggtggtggtggtgctgttccaacttccattcattccccccccccattccttccgtttttgatcgctttgaagtcacagtggtgattcatcagttttgtgggtgcgttgggggatttggatcaaatgggcccatctttactctcttctgctgcttacctctaatatatgctccttggtatcattaaagcatttgtctctgtcaattaaagaccggaccccaaatggcttgatcacttcgaaaatgaaaaactcaaatttttgctcgatcgggggggttaaagcccgaaaaatattaaagaatgccgatggacg

SEQ ID NO: 18162 - DNA, 2244 bp, Heterodera glycines
  unsure (1)..(2244): unsure at all n locations
cctatcaattccctgcaatttgcattttattgttttcagctggtagtcggccgaatccgcagttgtcccgattggtcgggtggggaggacgaggacgtgctcagtttgggccttttcccgggcacttacctcgaattctccatggacgacaggtggatttttaatcatattaaatagattaggtaattaattacaatttcctttttctttcgcagggttttcttccaatttgaggccgcttgggactcttcgctgcacaattcgccgcttctcaaccgcgtctcgggctacggcgaaaacgtttacatgacaatttcggtacacaattcaattcaatttaataattcaattaatttattcattttattaattgtttaggcgtatatggaaattgaaaattgtgcgcagtcggcaattatcaccaaagatttgggtctgattgtgtacgcacgggactcgaagatcagtgcggccagcagattttgccggtcactgatcggcggaatctcaaaaagcgcgggtaaatgggcgacaaaaatggcaacaattggcctaccaagcatttgaaatttttgggtttttttgacgtgccgtcatcgcccccttttttgtcggactttccaatgccaaaaatgcctatttttaacattttgccttcttctgcttgcaatgcaccgcttttcgatgccttcagaaatgaaccgtgtgcccggcgtttaccttctcaccgtaatggaggacagtgaggcgaacaacagtcccggcacggcacggagaaagcggcgaattttggacacatcgtcaacatgtgggaagacagctaacaaaaaagagccatcggttcattctttcattttccacagatgtgcgaggcgaagaaaatcttggcacttggaggttggcggaggaaaagcgaaaattccaattaaaaataataattaaattaaaattatttaggccccgaggggactcaatcattttggagcaccaattggagttggagaagctgagcaaacttcagcaagtggagcgaatgcgactgttccttatggtcagtgcttcgcatttggaaaaatatttttaatttagctgagaaagtcgcgcaaaacgggcaaaggcgacacaccggtgggaaaagtcgaaaaataaatatttaattattatttttggaagatttcaccatgtttgcccaaatttcccattccgaattctgtgaaaatgagtgaaaaggaacgaaaattggccacaaaagtgttggaattgatccgactgaaaatcccagtgaacaaagacccaccgacgggcaaaaaagtgggaaataaatgcaaatggaaaaatacatattcaattgatcgtcagacttttctcggagggatgattcgaacacttttattcataacaaacggcaaaaatcgaaggagaatgatgaacttattgtactcccctatcaattcattcttttgtcttccaatatttcccccaaaactccgtttgtaaaagcaatctcaagtcaaaatcagtgaacaaatgcaaaatcgaagctgccaaagtttttagttttgttttatatgaaaaggaaagactcgaaaaaataaattaaaagtgaaagagacaaaaaccaaaaaaagaaatagtcattgacgttgaattcaccgtcatttgctgagtaatggtcgattacaaaacgcaaatagaaatgtttctccattagtccaatctcttcccattcggcccatttgttctaatctcgcgaaatcggacaacggaacagaaaaaaatagattaaatatcaattcgttttctcagaatttgtttttttctgtcaagggcattgccgggcgcttaccgagcgacgacctttttttgctcgggcccgcataatctttttgtcgcgcttttttcaaaaaaaaaatggttaacggcagagaagcgaaaatacttggctctagtgcactttgggcgtccaatcttccgtttctttggccaaaatcttacatgggcaagcttacattcttaaaatgccaaggccaacatcttgcccggacccgaatcctacactattaaatttattctaccggcgccgggggctcaaaatctagcttaaaaaacccaataattcgaactcgtggcctggattacttcaaaacttggtactctttaagtttgggtcccccttttgggtcaaattttttcaaaaatgaatttcttttttattatcangaaatgctttaaataacaaataaa

SEQ ID NO: 18163 - DNA, 1025 bp, Heterodera glycines
ttttgtgttgctgctttaaatttgaataaatcgtcaagagtgaaatttttaagcgtttccattaatctaaaagcatttctgataataaaaaagaaaaaaaaatttttgaaaaaatttgacccaaaaggggggacccaaacttaaaagagtacccaaaactttatggaaaactcggaatcaaaaacttcttggggtcggaataaaattcctggcacctatcagcgattttaagcacctaaaaatcaggtctgctaatcggagacataaaaaatcaagtaacatttacatatttatacatggcataatttgcgcgattaacaggacatatatatcaagcacagatcagacaaaacaacacatgggaaatattataataatacgatacaatgtgtacatatatctttggggacatacagtaggataaatatttcaacaacaacaacaacaatacacgtgattgggatatcattgggttttcatgtcactaaacggtatttcgacatcgatgtcactaagagctctccgatgaagacgatgatgcgtccgaagttttgtcagaagtggcgtccgaagtcgaaccctccgatcccgagccagaggcagatgacgatgccgagccggagccgctttcggaagtctcaggggttccagaagtttcgtcggtcgtttccgtcgtttcctcagtcgtctcttccgtggtcgccgacttctctccgccggtctccgcggctgcctcctctttcttctcttccgctgccgacccgccctcctccttcttctcctcttcagctttgtcgccactatgaaagaaaagcaacaaagttcgatgaaagcaccaaaatgcgcccgttttgctcacccctcgtcctccttttgctgctcatcaacaacgcgttccgatggcaccgccacgacgtcaccagcagcagaaggtggagtctcctttctgaaaagggacaaaaaccgttattcctcttccaattgttgacaaataaaatcggacttatcgtcgtccgctcccttct

SEQ ID NO: 18164 - DNA, 1466 bp, Heterodera glycines
tcttcggctgctcgctgcaccaaattcaaaaaagaaatcgagttgggaagaatgaacgtgatgctttggttgatatttagatgttttattttttttactagtttggttcttaatacgttgtccaaaaataagtgtcaatttccgtcttttttatactatttcttgtaaattttcacaaaaatcactatttttattggatttttgtaaaatgagagtagaaaagctttatttttgaggtttaaggttcttttacggctctgctattttcttggaaggatttcgaccagcgggatttagacagcatgtcctacaaaaatttatattttttggggaaaaaaatttcttttttttggggggggggggtgtaattcagagggtggggttctaattccgaggggagttctatttcaataaatacggtatattaaatttaaataaaattttgcgataatacgttaattgttattgtgatttataagatttaatactgaataatgataaaaataattggtaacaatgaaatactaatgaagaagacagtatttacaaaattatagaaattgtcaagttgatgataacattttgaaactcgttttagggtcgctgatcatgaatttggcaataatcttgactgaccaatcactaacgtaaactagaaaaaagtcaaatttaaattttatgagttttagtttttacattagaaaagggattcgaaattgattgacctggatgttagaatggtaatcaaggacgatcgacgatcggagtacggtggccgggcagcaacgccaaatatcaacgagagaaaaagcgagggttgggtggattacccgaaatttgcagagctgacacttgcggcgccgacatctgcggcgccgacacttgaggcaccctccaaattatagcagaacatgccttaaattaaccggcattagtgccataactttcaaataaaattgataatcaaatttcatttcttgataaaaacaaacaaaagatacaataagcctgaaaatcacaataaatgctcgaaatttctcccattggccatatataagcaaccatgcgcttccgaaaaatggcagtaaatgtcgcgcacaatttctgctaccaaaattggattttcgcaaagtttggtagatttgtagaccagatttcaagctatcaaaatgcgaccatatttaatttgactaattgctgtataattttatttttcttattttcaatactaagaaacgcgaatgggtggcagtttgggtcggaaaaacccttttggcagtttttagaaacgcactggaaaatctttgtagtttgttttgttttttttgagaatttcatagcaaaaaaaacggtttcaacctagttgcctctaatatgaattttgaaaggcaatagaaaaaatttagtatcacaaatgtaaaattgggagatgcaagtgtatttttgctgctaatgtgcattttgac

SEQ ID NO: 18165 - DNA, 1826 bp, Heterodera glycines
  unsure (1)..(1826): unsure at all n locations
aatgcttccgaccagcaattggacggcagttgtgatcagattcgttattggttgattatgatcatgcggtgaagatgttgtggtggcaatataaattgggatgatcaactgcaaatagaatttttgattgcttatgtattcttaatgcttaacaaaattttcaaaaattccttttggtgtatttgaatttgaagatactttttcgttataattcgttatcaatttggcaattaagtctcaattatctcaccgcaatagacatccacacaatggtgaacagatggtcccaattcttttcatatgttcggacaaataaagtggacaaaatgcgttcaacgatcagaacatggggcacaaaattacgagcataaatgccaatgaaatacatttttaaaagtgacgggaaaaattgcatagattcggcaccaattggatcccaaaggaaaatttgaacagatagatgacaaaacgacaggaaccacgcttaaattagaaaagttataattttttgttatttttttcgtttaaaaattttgatttaattgaatttgatttaccaagataataaagaaactctggaagatgagaatggctttcatgttcgggtggatgaccgatgtgcgtgccaccaaaatcaaattgacagtggacaacggaatgcaacaaaatttatcaacagttcaatggcaccgccgaagaacaaaagaaacagttcaaagtcaattggtgcagttgggttcaatgatgacatacctatatgtaaatcgctgcttatttaattacaaataaaaattattttaaacaatattaattatttcaatttaaatgaatctatcccacaagtaacttcttatttcaattttaatgaatagcaaaatctttggtaatagaaataattaatgaaaagtgacaatttaattttgttcagaatctcttttgtttccaggtgtaaaatgaaaaaaatcttatgaatctccgccaaatntggtcgattgtcnccgacggtaaagacgcaactcgttttggtcaaatttgtttttaccccaaatcgttttattattccaactcttttataaaattgaaacgcgaaaaatcgaggccgaatcaattagaatttttaagtcaattgcgattcaccttttttggacgaaatttttatttttaatagaacctgaaaacatatttcctgctgttttctgggtagctagcttatcacgaataacatacatttcttccgataacaattaaaaattctcaaaaaacaatatatttctttcgaaattcaaatctgaaccttaaaacattagttcaaaatcgcaaaaattggtattgttgataaaaaatctgttaataaatttggggaattggagatgggccaaatatattttgtccagtcaacactggaataaaactttattcaagtaaaaattgggaagcgacgatattttagaaaacaaaattgagggcagtataaaattaaaagaatttcagagcataaaaaataaactaaaagcgaatgatgatgaaaaaagggatggaattgtgaactagtaaagggatgcttccttgcgatcgagttgatagttagttgaccatgatccagtccggaaggttgtctccgatgttaaaagggacattgtggcatgcttccgctgtgaattggacttcaagatttttttttaatgctaacatggcgatttgcctttactcacaaagacaaaaaaaggcacctgccaattttgacgatgaaactttgccgttaattttcgttaattaaaaattgtttatcaaatcaaatgaatgaataatttgtgattcggtggcgt

SEQ ID NO: 18166 - DNA, 724 bp, Heterodera glycines
taaatatttaagaaaaaagtaaaatatttaagaaaatattgatcaaacagctagctacccaacttttgtggatctgcaacttggggaccctacatttggggatttaataaaacaaaaagatatatttaagaatttaattttatgccaaaaattagacaaatttacatttgccttagccagagttaattccattgcaaagaaagacaaatatttttttactaaaattaactttgtttccggactaatatgttaaaaaattaatttaaagttccgaacaaagccacccgaaagataaaaaacagaaaagatgatttcggcattgtttctgtacgcaagtaggaagcaaagccgttaggaactttttgaatgcccttgatgaatttcggttcccgttggcccttgggaaaggcgttctataaacattggaaaaaggtgtactgtatataaaaaatttattgcgatttgtatattgtgttgtggttagtataggctcaaaattctgctaatttttttttttggtgaaactatttacagatttagtcaaaaaaaattatgcatttttagtgttttaaacctaagtggttccaacatgcgccgccggggaaattggtggattttaacctgagttgtgaacagttttgcaccaaaatgcaatttttaggttttagcctatttttttcctgagctcccagttgcctgaaatgcacgaaatttttttttttgg

SEQ ID NO: 18167 - DNA, 1787 bp, Heterodera glycines
ctctgctctctctcttattggacatacgtctcgttttttgactcggtgtgtataaggtcaagaattttttcccatgcacgaatcgagctgaaattcgtcaataactcttcaaacattatcaaatttttttaaaattttgcaaggaaatagaaaactttaagggctatcgaatgttaccaaaatgtttaatttgattgaatttggttatgactagttttttggcgaaaaacagtacgagttcggtatttaccgttaacaataagtgccaaatgcataagatgacttttttctaaaatatttgattttagaatttttcttttattattgtacaatgtctattagtcgagaacatacaaaagaagatgaaattgaaatacgactgctgaccaattcgttgtgggtccaccgactcgtccgaaccagcaagccgtgcactctgttcgagttcaaaaacgaactttacaaggtgctttggacgcgtgcagaaggatatgagtcggttgcagagatcgctaacgaattgtagtgagtttgttttgttttcttcacggttcttggtacatgggaaattcagtatgaattccgggatttgcgcgatttatttttcacgagaaaggggttacgatacgtttgaggagatggtgcattcggaggaactcgaaaatggtgatttttcagactgataatttaaattttatttttcccttaaagtgatcacaattgagagaattccttggaaaccatcctacattatgtaactactaaaattatctttggagaattcatttacctaattttgttaagttatcactaccgtgcaacgctaaacaacgaagggatcttttccgatattcgaaagcgcaatcaacagaaaaagaaacagtcagcagaaaaggggaattttatttgtttttaaaaattttatactacaaatttaattttaaacttttgttgtagaaagtcttgaccatttttattttgccttcgtttgtttcactttcctaagcaaaaaatgttcagttacaggaatgcttcgttccaagatttgaatcgcaaattggctggactaccgacggaagcggagcttcggatgagtgcgagaacggctgcgaagagagcacgcaaaagcaaacaaatttgtggggaaataatctcttacgaaatcgatgttggaagtgacaacgatgacgaactgaacgaagtgacggaatttattggggacgacggcgacgaatggacagaaggcagagaggacggagactcttctggagggtaagcggagaacgaaggagggggggggggggattagcagaaagtaattggctaattagtgaaatgggacaaaaacgaattaaatgcaataattttaggtatttgttttcatagaaaattaaaaattctttttatgatacaaaaatattttagttctgtgtttgctgaaaatattgccatcgtggagaaaacgaaccatcacaacgaaaaaaggaaaagggacaatgagaaagaatacgcattgaaaatgggcaaatgcttttcatcagacttctacgagatttgatgtgatggaatgtgggatgatcatcagaaaccctatgaatgatattcatttgcgaagccttttgttcattttaattacaaagcataaacctcgacaatcaattagcaaagaatgtataaagagaattggtttagcacctttttctgtagcagatttaaagttaatgtgattcaaatacacatactaggaaggtatacatacatattacctatacacaccgagtcaaaaa

SEQ ID NO: 18168 - DNA, 2611 bp, Heterodera glycines
  unsure (1)..(2611): unsure at all n locations
cgtatttattttagtttcgtatttttcgtattatgcattttttttcaattcgcaacaactttgatatgtatgtacatcaatcgtaataatacgaatctttaaaaaatcgcaattttttagatttatttcacatgaaaaatatcataggaataacgcaacaattgatgagcaagtcaattgaaaatgaaattatttcttttttttattcatttatgtaataatttgtaaaattagaagcaaaaaaataataaaatatacaaattaattgactacaaaaattaaaaaatatccattttttgtaaatttttatttattttttaattggaaaaatcaaaaatttcacggaaaaacctttaaaccgcgggaccctagcaattaaaaaaaaaaaattaaacttgtatttcggcatgcctatcataaatgttgaatttaattttacaactttcactattttacttttttggcactttaaggtttcgctttttgtggtttttcactaaaatttgtatttgacacaacttaaaaatgtgtgtctctaaaaattaaaagtcgattctttttttcccttaattatttcacgtgaaaagtgtaatgcgcatgagataaagcatcagtggatgaggaagtcatttttattggaaaaagaatgtcttttattttatatttgtcatttattaatttattgccaaataataataaaaaaacgtaaaattattttgaaaaaaattttttaggaattaaaattaaaaatgtttgaatttatatatttgtttcttatttttccaattttttgtggcggaatgcaacattattcaccttcatcatttaaaggaggaattataaacaaaattattcgaattccttattcaccaggtacaaaaaattaattattaatatttgaataaaattataaaaataaataaataaaaaacaaaaattcacgaaaattcacgaaaattaagaaaaaaatgaaagctttttgttaaacaattaaaactcagcaaataaattatggcgtaaaatttgtattggcgcaaaatcaaaccgaaatttgtccacagcaaataataaacgtagaaagacaaaggccatacgccgaagaaaagcggcaatttggcgacctaaagccgacaaaactccgatggcattttcctttgtttttttttgttggttttacgctcggaaggggaataatccgttgcagcaaaaagccgaagaaaagaacggacagaaagaggcagagcagaactccgaccaaataaaaggcggcgacactccgcacaaaggcgacgcgggtataanntttagatggtatgacaccctttttgaaaaatttttcgtgcaattttttcagcgagaaattccgaaacgcttccaacgcagccatattaattaataagctggaaacataaaagagaacgcaaaattatctttatgcgtcttttcgtgcatttgtattgctttagttgcatgaatgtgaattttgatgaaaaatgaattttcgactttttgttcgaattcgggtccagggttcggaattggtcgaaatggatgtcagattcgtgctcagcgtacctataaacccctagaaacatgtttttaagacttttgaaaaatttttcaaaaaaggtgtcataccatataaactattaccgcgacgcgcacttagaaaaacgaaaatagcgccaaaacaaaaggcatttggcacattcaaaaagccaatgggcaaaaaagacattgcggccacctcaaaagacctgtttttgagaaagactaattgacaatgcaatggaatcagctttttttttaatttgaccgctacagaagcaaggaaacacgtaaaaagtcattaaactcaaaggttttcattcaatcaaatgaagcaacaattcgaatatcgtttagaggagatcaataagtcacatataatccgaaaaggacaaaacaaatggaatgacccgtgaaggatgagacacaattaagagaagtgaagtcatcaaaaattagttaattctcgtgcattattacgttagttcgggggtttatttattgtgctcgtttttactcctcaattctccgttttctccacagcagccgatttcccatcagacctccgcaatttgtaaatgtacacgttgatgccatgcgcacacaagtgttgatccaacaattcccgaacttctcgctcttcgatctcgtcaagatcggaccaaatacgagacaaatgaacgctacaggcaaaacgtcgcgcgaacaaacgaattcttaacagacactgctccagagcttccaattgcgtaccaactgcaagaagtaaaagtcatatattgaaaacagcaaacattaaaggcgatcgaccccgtcaaatgcaaaaattaggaggtactcatgcagtttacatggtactttttacatacattttcagatgcctacaaatgtgtttcagaaatgaatgaaaataagtgttaagggggttctcgaggtctctgatcacaaatccgggctcagatcagcgctaccgctcatcacatgagctgaacgtggacaaaaaattgataggcttcctgcaccaataataccctcattggtatgatacccatgagggtaccat

SEQ ID NO: 18169 - DNA, 2527 bp, Heterodera glycines
  unsure (1)..(2527): unsure at all n locations
ttaaatattaataataataanttgaaagaaaataatatacaaataatatatgctgtttttttttatcataagtataaaaagtgaataggaaataaaaaaatttatctctgattttttaaataaaaacattaatggtaaccaaaatatcaccgtggcaaattaccaggtgcccaacaatggtacttcggtggagttgaacgcggcagtggaaaatgttttattgtacccgtggaacgaagagacgccgacacattgctaccactcattcagcaactgaactgtacccaataaacacataactcgtttttatttgtcattatagcaattatgatataaaaattaaaaaaaaaattttttgaaaaatttgaccaaaatataggacccaaaccaaattagtaccaacattaattaccatcaaattcatataataacatctatctccagccggaatcagaaaagaaataatagatttcaaggtaatatgaatgattttaatagaatttctaataagtatgtaaacgagatagtaattaaattaaataaaactacaaaaaacaaatatatttagcaatattataaattagttcaaatattactttaaataaaaagatgagtaaaagtttacaaaacactcggactacctacaagaaaaagagaaaaatatggattgtgataatgagaaaatgacaccgtcacatttgaaacgtaaattaaattaaatcaatcaaagccgtaagacttttcccaatatttttcacaattgatataataaaatgttaaattattttactaaaccaaaatacattgaatgaatgaatggatatttgattctaacaaatcaaaaaataatacaaacaaaatttcattaaaattggaaaaaatcataaaaattcattcatattatatgcaataactgaaaaattcaataattcatcataaaattgattagtttttggtttaaataaaaaattacattaaacaaacaaaagctgaagaatatattttttacgatgactccgtttactacgagaaaatgaagtttaaataacttagatttaaatttccttccttttattttaaacaaaataaataacagtaaaaaaataaattaaattaaaaataaatatttgaatgacatttatgataataatatatatttttttaattagaaatatattctaggttgaaataatagtaaaaaataaaaaattctaatacaacttataaaactgaaagtttaaaattaaaaaaaaaataataaattcaaatggtaatccttaaaggagctactgatgaagaaaaatagaaaaaaaaaattgaacttaaagaaaatccgttaaataaaaaagtatagtgagaaaaggtaataaccgaagctctacctagaagtaaaagagaattaaaaaagggtaaaccaaaagggttaattttttctaaacctaaaggggtcgaaaaaaaacctaaatctatattagttaccaaaactaaatcaaaaaaaaatcaaaaaaacctaaaaaaaaatattttgacggggaccgggactagtcccggtttttcccgggtttcccagccaaaaattcccggtttttcaatccgaaaaggtccggtcccgatttagcctaaaattcccggtcccgctctactcttaataaatctgttaaattggggtaaaaatttcaaaagcaatttttatctgtttaaatttcgatttattttttccgtcggttcccaaaaattaaaaaaagacgccgcaaaaaatggcgtaaaaagtcaaacactgaacttttaatatgaaaaattaattttttacaaatatacaaaaattttcaaaaaggcgccgctcgtcggcctcatcttttcccaaaataaagaaaattaatttaaatagaaaattttaatacaatgaaaagaaaaattttttcattaacaaaagattcgcattaaaactaacctaaaataagttaataatatttgactacttaataaacattaatcccaatataaaaataaaatttgagacagaaaaaagcataaacaataaataagtttataaaaaaagaaattgaaacgtaatgtaaatatgtattaaattaagaaaaatttcaaagtttttaaaattaaattaaaaaataggatttttagttcatcaatgactaacggtcggttcaacgcaataagaaacaaaatatattaaaaaattgaatcctttaaatttatatttaataaaaacaatttaaattaaaaatcagattaatataaatatttacaatttcaatattataaattgcttctataatatattgagttattaaataaaacgactttaaaataaactaaaccgaaaaaaggttagtatgaataagttcgaaatctcctaagatgctaagattaaaaggaaaaatagaaaataaattaataaaaggtacagagaaaattacaatattaaaacagtatataattttaaaataaaaaattaaatagatatataaatgatatgaagaataatttaatttaatttaataaacaa

SEQ ID NO: 18170 - DNA, 3081 bp, Heterodera glycines
  unsure (1)..(3081): unsure at all n locations
gcccacaaagcgacgaaaaagagatgatgatgtggagggagacccgaaaatcaaaaagtctgcatgcgcactctgagcgccgacaatcagttcagccagaagttccaagtgcagaggtaacagtcgactctctcattgaaaatctgcccggcaacctcgagtcactgttccgctcatagttcgctccctgcatgtcaatcgccctggtcgagtcacagcagatcgggatcaccccggatcaattgggctctacaatctcttctgatgtgctaaatccgagcatatggattcccatcccccgcatttgagacaactcccctgattcaattatgaaccgcttcctttaggtggcacagtcaaagtagcgggaggtctatgtgtgggtctcgcccttcactgtgtacatcacaacgcatgatgttatgcaactttttcattggcaacaggtgtttgacttcgggtcagggattaggaattgatttaaacgggccctggattcatgatcagcgaccccgaaaaccccataaaaagtgtttttatgacttttgaaaacataaaaaaaagtttcgaaaaagtgggggacaacaaactgaactattaccgtttttttaccatagttgcaagtcttgtccccactttttgatcacttacaaaagtaccaactgctgacccggtctgatccaactcaccgtttataaatgcaaaaaaagaagcattggacaatgtcatatgttggtgagaggataaaatgagcataataagtgagaccaaaatgcggaattgtttttttctcgtaagtgcatttaaaagcatcaagacggtcactgttccgggctttctgcgtgaattaagttgagcacttctccgatcaattcatcatccaactccgaggcagtgattgtcccatggtctgctcgaccttttccgtcactaatggtttctttctctgcagcattctgccccacggatcttcgaataaaaaaaataaattaaataaaattagagaattaggaattaatgagacaattttttataattaattaatgttgttatttgatcacattcactcatcgtatgcattcgtttgtccccatttttgtgtacctccgtggaacttttgtcagattcctccggccctctgcccagcgtttgcactccatgcgtctgctgctcatcgtttctcccccatcgttcatccccctcccgccttcctcctcctcctccctattctcctcttcctcctcttttccataggctatcttccgccgtttttcttcttccattccgtcccctccatctctctccccctcttccctccttttctcctcctctttcccccttgtcttttctccactttctcccactccccctttttgtggcgcaatttttctggngcttctcgtggacgaaagagtgcaaaaaacgcgacgagtcgacaacaattttggagtgaccaataacaactaaagtatgaagaaaaggaatcattgatgaacaattaattaattaaccttccaaatttctatataaaaagaacttggaaaaggagtgcaaaaaatgcattaaaactgatttggatttcagaatttaaagtatggcatttgaatcccccactttgtcatcggcaggcgatttgcttttggtcggcgttttttgagcggaagggggcgttttgaattcgattcgaccatgctcaagcactttgaccgtcgaggtggaatagagtggagaaatggaagcagcaggtgaagaagcaccggaagaagataatacggcgtaattattggattaacggggaaaaatcagcccaaaattcctttatcccccggcactttttagcggggttcgaacaccgccggcgccgctttgttgggtcggctgttgcggagttagcatccaattcggctcctcctcctcttcacctccttcgttatatgccgtcgatgttccctctgtttcgcatcttttgagcattttccagcgaaagtgaggcgaaacgctcctgacaaatgagtggtgatggatggcattgtaaatttatgccaaaaatgaattaactcacggtgaaacgatagatgatgcagcggaggagcatgctgccgactgtgaagtgggcctcgtccgttttcgtccgattgcgtcaattacggtagcatttggtggagttacggtagtcggcgactgtactgctccctcttctccgtcgtttcgtgttggcaattgtatggcattgtgctcatcgtccggatcaccaattacagtaaaactgttcgtgtcaaaacaatcagaaacaatagaacattcgttgtcccttggtctgtaactaacgaatccgaaagaattttttggcggaaacaattccctggagagttacagaatggctttggactgaaccatccaacgtctaaaaacgcatggaatttacgctcactaattcgcttgtgagttcgatatttcagtccttagcctaaactcattaaaaataccaaaagattcttaaactagagaccgaaaagaaatgtatttatattttttgttgtagacattggacggttcagtcccgggtctgtaactctgtttagaatgtccgccgacacctaaaaatagcatcattcgacttgcctcatcgagacgaatgacaaaatcgaaaattttcttcacacatttaaccctttccccgagcttccaaaattacccaaatttatttgccttcaaccgctatacgatttttgaaaatgtgtgatcaaaatttgtgcggtccaaaaaatttctgagctattcaaaaatggctaaatttccagtctataggcgtcaaaaaggccaatttagcttcaacttttatgggcccaataggctcaagaatttataaaaacaagaaaagagcaaatatttgcctcaaaaagaattataacgagaaaaataagaaattcagcctcagatccaaatttattcactgtaaattgtttatctcgcagatgcataatacaatataacttatacatttacggaatcatattgcgaacaataatcacagcacatacaaaaacgctgtcacataaagggctcgggattgacaacaaa

SEQ ID NO: 18171 - DNA, 3567 bp, Heterodera glycines
  unsure (1)..(3567): unsure at all n locations
accgttgtcagcttgaaattgtgtgagaagtgcacgaccgacaactgttgtgcanccgatatttcttgtcattcaagccaaaganatagaccaagtgatggaagtcgaaaatacgatctttgattttttaataataatgataagttcgataattataatgataaattcggtatttcaatatttgtaatgataatttcgataattataatgataatttcgatattaattgtatgcagctaattgataaatgttttttttataaaatcttttttatttggtcatctcgcaacttctcgcccctaatctccattacctcccaaaccccctaaaaaaaaggcaaaattttgttttgtttgcatagcaacaaaaaaaatgccgagcgcggaagcaatttgaccttttgctcattccttacttgatttaacggctccgcactgcaagggatgtgcttattcattgccttgttggggtaattggcggtagcctaaaagaaattgcccttccaacagttcaagcactttaatcgtcccaatattcccccctaaatgcacaacggagaaatatgagatgtggcgtaaaatgttatggactgttggtgggcgggattaagatcgtcatttattctgtgagccccttttggcatcttcctttttccctttttttacctgctttatattttttaatttttttagcaataaaattaattctgaaaacatggactcggcggcagattccattcgacagctacaacgtgcagtgcgcgaacagcagcagatgatctttttgctgagaagtcagatcgttgatcagagagcagtgttgcttcagaatatgacgcggattgaatcaacggaggggtacttggccaatgtaagttcaattttcaaacaagtatttaaaactaattaatttcgcttatttttataaataatcatttgattatttcagtctcgcgggaaccagagattcagcccgagatactctcccatggcgggagtggagctttcgctgctcggccgtcgacttgaggaacgagaacgccgacaacagtctcgtttgggtaggctgtaattttttttattgaaataacaaataattcaagtgcaagtggagaataataataatgctgcgggtccaagtgatggaaatgttcggcccataccaaatgaaaaccgtaaactaggaaatttttgtttaataaatttcgatttttttttgaagagcagctgactccgctaagttcacgttcgggaaacaatggggctctgcaaaatcgtactaatggtgtgctaattttgaaaaaaaaaacaaattatttttgttttttttttagagagcaatgtggctggaccaagtacggcgagtaatggtggtgacgatgaacgtgaaaacggtgagatgaacccttaataatttgaatcaaataaatgaatttttgacaggccccgttctaagcgctgtgattgaaggccacatgaaccgttcgcggatgcgtctaattcgggacgagatggttcatcgtgctgtgcagcagcaacttgagcaccagcaccatctgttgcttcagcaagcgcagcagcagcagcaacgggaagaacgcgaaagacaacagcactttgatcaacaaatggaagaagcagagcttcttcacgaacaactgcaggcagcagagcaggaaaacgacgagaacatcgaaccacagccccctcagcagcagccgcaacctcaaccgctgattcgtcatccgcagctgcagttcgaacgtaatgttcgactgcagctgcgcgagtcgcagcgatttgaaaggggagttgcctcgttagtgctcgttccgccagcccagctctattgggagaccgaatgcatcatctgcaccagcaaccgcgcacacttctacagccgtaattgcggacacatctacctgtgctcgacatgtgcggtgaacgcggtgatccacaagatcgcgacttgtatgctgtgccgtgtccgaattgatggaatttatccatttgtacgatgattgattgatgtatttgataactctcgaacaccctttatcattttgtccatcctatcattatcctattatcacaatttttaaacgatcattgattgccacttggcatttgcaattctcactcattatttaaactcatccaaccaatccaataaaccttattaattgaaaaataaataaacatcaattcgttatgcatttataagaggggggacgggaatgaatgagtgaatttttttagaaaaatttagtgtccataagcacggggttgggcactagcaccgtatccaacccttcgccttaatgcgtaggtcggaggccgcaagccgtgaccaggcactagcacgccaaccccaagcacgggttgggcactagcaccgtatccaaccattcgccttaatgcgtaggccggaggccacaagccgtgaccaggcactagcacaccaaccccaagcacggggttgggcactagcaccgtgtccaacctttcaccgcaaaagcgtaaggccggaggccacaagccgcgaccaggcactagcacaccaaccccaagcacggggttgggcactagcaccgtgtccaacctttcaccgcaaaagcgtaaggccggaggccacaagccgcgaccaggcactagcacaccaaccccaagcacggggttgggcactagcaccgtgtccaacctttcaccgcaaaagcgtaaggccggaggccacaagccgcgaccaggcactagcgcaccagccccaagcacagggctgagcactagcaccgtgtccaacctttcgccgtcaagcgtcaggccggaggccacaagccgcgaccaggcactagcgcaccaagccaatatcaaaacaaaaaacataaaaatgaatgaatgaatgaatgatgaaaaatatttagacaaaattcaattcagtaaatattaatgcatgagaaaggtcagagaattgctggacgtgcaaaagaaagagggggaggagagaacggggggttaattatctcataattcagttctgtacgatttttatttaaatattttttttataaataattttaaaaaactttttagatttttaaaaaaaaatgttgtgcaaatgcggcgaatgcttcgagtgcgaagatgaaaagcgccgcctcaagcgcaatcgggagctcaatacccgcaaagagcaaattaagaactgcacaggcaatcatctagcaccggctatgatggacctcaaacgccggaatatggaactgtttaaaaaggcttataggccggtgaagggcgtcatcaataaaataaccgggggtgagtttaaaaaagaaattgaaaaaaaaaaacaaaaaaaattttttaggcccttggaatgtagaatgtgaggtctgccatgagaccttcacatacttcatggtggagtgggaaaactcccggaccgacttctcgtggggtcccgggaggaccatggtcgaagcggataacatagtaaaaatttttgaaattttataaaaaataattttagaatcagaaagaaattttggctcactatgtaggccaaaatgat

SEQ ID NO: 18172 - DNA, 2167 bp, Heterodera glycines
cttattcttttgtgtccatattccctgcaccaatctttgctgatcgccccgagccaaacaaagaaagataacatctgtatgaccatttctacaatgaaaagacgacaaattgacaaaagaaacaaaaatttggagaactaaagtggatgggaagagggggggggggttaagcgatcgggccatactccgctggtcatttttccgaatattcgcgccatgcagtggattaaatttaactgcacgctttgtccgatcggtctgcattgtttttatccgcgcaagtacgcaaagcctgtgctttgtgcgcatcccagcgtccgtaacatcacggactttttgagcaccggtcagcttgacgaagctgcaacgacaacaacaacaacaaccgcacttccgacaactgcggaggtgtcggcagcggcagaatgcgcacctccgcccgcgcatttgaccgcgtggatcgcggtgtgcacagcgctggtggcgcttttggtgattgcggaggtctgttattaattttggtcatttatccgctaaacccctattcctcaattaagcttgtgcgcgccggattcaaagtgcgcaaatttttgaaggaccgcgccttcaaaaaggggatgctgcgccgacatcgccagcgtgagtttctcgctattacattttagcaaattgtaattaacaatttgtacaggaatgagcgccgcaaggcgcaaccgccagccggcaagcgcgccgactccgctgattttgccggctatgttggccggcgtttctctgcgcccgacgggcgtcaatttgactgtggaccgggtgggcaattttaattaaattaaaatctttatatattttaatttctcactcattaaaattacaatttaaatttaaaggcagcggggcagcgccgcgcggatggtacggacgaagagcccgtgtacgatgaggtgccgcttgacagcgacatcgcggtcgagatgcgcgatggagaaaatggggaggaggatgaggaagatgatgacagtgatttttagtgattcggcaagcgatcactcaccatttaactaatcgatcgatttttcactttaaaataaaattttaaaaatgtttgaaaataggatcgctcactcaaaaaatgggtcataaaaagtttaaaaaataggtataaatccagcaaataaaattctaagtaaggatttagagtaatttaaaaatgtgggtgggcgctcgcgctatataaataagtgcgcgtgtccccatcggcccatttcaatttattcctgtcaaacatttggccatcagtttttcatgtcggataaaaaagcattgtttaagcgtgttatcgcagaggtggacctcactataagcacgggcggcataactttgagcggcccccgcctgtctgttccccgtttcattccgtttgaggaaaacgggcgttgccgagcatgtaaaggaactgaggctgaggtggacacaatggtcaccaaggagggaatcaccttatggtgcacacgcatagaaaaagcgcagtttgtcccttttgatgttgtctacgagctccccggtcattgttttttccgcgtaaagaataaggcaagggtgttcagcgttccatacagcgaactgtcgtcctcagacaggtgcgcccagcctctaccaccaccaccaccaccaccaccaatgacaacagcaaaacatcaacggacaccggacgacgaggaggagaaaaatttgaggcgtaaggcaaaggtggcgcttgacttagtggaagctggtctagcggcagacgcaatgatgcaggatgggacgcgttggaagaaagccaaaaccgcgatcaatgtgctggccaatttgcttttggcggaatcattaacagatgtctcgccaacttttgatcaacaacaacaacaacaacagctatcgtcaaaagaggaggagaaggaggaatgcacaaacagcagcagtgctgcagtaacaactgaatctgcttccgatgctgatgtaatggacgatttcgtcaatagcattcaagcggcgacaagcaatatgcaatagtaaaaaaagcttaaacgatggactcgctctgccctatatataaaagttgttgattgctcaatttgtagttctccatactattatttcaagttctaattttttaaaatgttaaatt

SEQ ID NO: 18173 - DNA, 659 bp, Heterodera glycines
  unsure (1)..(659): unsure at all n locations
catacaatcattctaaaatgttaacgaattttaatttgtcttctgggttcagagaaaataannnaaaaanaannaaagaaaacttttaaaaaggaaagngaagaggggggnngttgtgntgtgatttaattanatagattataaattaaattnattttccagtgaatataaaattggattngtttttcaaattatttattttaattaaatgccctattttttgcatttctgaacaaaaagatttaaaattctgatttggcctaaaatttaaaatttgcatcaaagttaaaatttgatggccttttcaaaaaaatataaaattcaaaatttaaaaataaaaatgaaacaaaaaggctcaaactcgtcttttgtcatttccaaacgaaatattatatttttagatcgatttgttaagaagaattattaatttaacagcatattttaccaaagtaaaagcccaaacgattcgctgttcccaaaataggtaaaaaataatcattaaaaatatttttgttgcttttttcgggggccggaaaattggacaccaatttatatattttttanattataagaaataagaattaaaaaaaaatttatgcttagggaatagtttaaaaaaaataaaataaattccaaatgcttctgggggtttttatact

SEQ ID NO: 18174 - DNA, 1148 bp, Heterodera glycines
tcatcggttggtgtttaaggctcacacaaagacttcaaatatatgatgctgccccttcgcgagaaagggctgcgttcggtcgcattcaattggccagggatgggctacactttgtgtaaataattgcaaaattaccctaattaatcccccggccccttttaagtcgaccgtcgtctccgacttaccaattccgagagaaccgcctttgctcgctctttgatcgatcagctcctcccctctccaactgagttgatctttgtaggccattcccgcggtggtgagaatgcccttcgattggcccgtgaataccccgttggcattccgttcttttcccattttcattccaacttttgaagggaaggactaaggcacttctcttgctcaattcatgcggctttcgacctcacaaaggcgttcgtccccatctgatgatcaaaatcgcagcttggctgtgggctttggattcgcgattacagcattgtttagcgccgatatttcacaaaagtgataaattcaatcgatcggaaagcattggctgatcattgcttttcagtttacagcttttcctccggactgaaaacggataacggattcattgcgggcatttcgacgatcactcactgcacttatgattttgacaaattgaaattgttgactgatgacctgcagaaggagcagccacagctgaaggtgttgttcgcctattcgggaaaggatcatctgatcgagacagaaatcagcgaggaattctcgcgggcactcggaggaccaattttggtgacaatggcaaaaagtgattaaatggcacatttaacgatgttcagatatcaacgaccaatcctaaggaagaggacagtgaactgttagcaaagtttaaccaattaactgctggagagcatggacaaaatcgactttcaatattatttaccaaagaggtacggtgattgattaatgatcgataaattaactcattatgatatgggtattatattaatcaatgaatagtagtgtaatctagaaatgggtactataataattagtaatttgcaatgtaattaattacttactgatagacatactataattaattgacgcttaataatataattaattgaagatgagtactgtaattaataaatacagtaatt

SEQ ID NO: 18175 - DNA, 1110 bp, Heterodera glycines
aattttgtttcttccgctgtcgtagaatttctgataattcgtgaggttcgcattcgttaaaatcgcataaaatttcaatgagagaattcatttttgagcaccagtaggcattttcatattcggtgcaaatccttatataccgttacctcaccgccgtatgatgaatttttgccttttctctttatttttaaaattctgagaactgaaatacagatgacgaccactaccaaatctaaaattgacaaaaaatacacccaaggatttgaacttgaaactctaattttctcaaattctttgaacacgacaaaattaaaaaattcactatctgtgtctgaaacatatttgggaagtatctcgtttgagtcaaatcggtctttgtatattttcttttccttaattagataaatttgcccctcatttattaggaaatcggtgtatgccgatggcattgatccgatcggtttactaataatttcggtttcattgtgttttgtccataaattctctattgttctaaggtcaatctcgtctattcgatcgtctctgattacgaaaagtcgaccatcaatatgatcaaatctaaggtccccaccgggaaaattcctgacaaccatttcttgactccctcttgttatagaagtttcatttgtcttttcgttttggaaaattaaataactatgatcgttgtaataaaagcacgctcggggctttaattgtcgaaaatcctggtaaagcttaacattagtgggtccgctcttttctattgaattaatttcttggattgataggctccaccctgaaatcagattcctatttatcgtacataatctcgagcgatcgaacccgaactgtctttcattgaccgaactctttggcatagtgagatacttgtcgtcaaaaagttgtgtatcagaaagaatagtaactctttctgcaatcacttgactggctatcgttaggagaacaattaaattaaacattactgacaaattgcttaactaaaaatcggccctcgggcgaaccttatatagaccgtcaatgacctcacaataagggattccggagcagcgctgtgtcaagaaaataatgcaaattgaccacacgcatctg

SEQ ID NO: 18176 - DNA, 1404 bp, Heterodera glycines
agaggtcatcgggataacaaagaaacaccacccgtttacaaatttttgtatatttatcgacattgtcctttctccgtcgtccatcccgagtcctgtatacatgtcaacaaatgctcgaatgtatttgtttctatcaaaattaagagaatagggtgacccggggaatatgtttccattcgcttcgacaccgatagagcgtatttttgcatgttcaaagacgaagggtgactctttaggatttccggtatacgcaccggttgaaacaaacccgacgattaaacgtctcggaacaatgctggtaaaaacattgtgtgagagatcagaagtgccccgtgggatgaaaaaactcctgatctcaatttttctaaccgggtatttggccggggtggtttgtagctgattgcttattacgttatttaatgactgggtaatgtcgactgtttttacataaattctaatatcatgtatgttaatacgatatgtgtgcgggttcgctatgactgcatttcctgaaacatatggcggtgccataattagaaaatcatcggtgttacggtgtatgctaaaaatgacatccgagttattaagcaaaagattgggctgacggccgagatcaaaattaagtttcaccattgtttcacattttgcaccatcagcaaaacgtgacgctctgtttttaaagccactgtttgtataatcatcctggtcgacatcgtcgacataatagcaggacgcttcacagagaccctttttgacatcttctgaaaatcccaattcattcatcatatatgccctaaacgcatagtaaatgccggaatcataagattcgacacctgaaattgacacctttaaggttttgacaaagctgtgcccaaaattttgaatgacaccgacgtgttggtcagcttcactgtccttggtaatcggaatccaattgcttttatcttttctctcaattgaagttgacaaataaagaaaagttttattgaaatcacaaaactgattatctgaaaaaagtctaaagatatacggtccagattgatttattgctgaaagagggagtaattcccgaatactggatttattaattgcaacgttcgtcggagggatgtcgaaaagtgaaaggcctccctcgagaccgtcctcactcgccgtgtcgattttcttgagagttgtcatttttaactttttatattatttgttctatttatacctttagatgaaacttaactgatcaaatacccgttttcggttcttattagtgatcagggccttttttcctttaccacattgttgtaacttgtcggtaaggttagtcagcccctgtcttgaatgttccctgacggcatcccttaaatcacggccaagagcgatgtcactcagaactctctgccccgcggcgag

SEQ ID NO: 18177 - DNA, 2906 bp, Heterodera glycines
  unsure (1)..(2906): unsure at all n locations
ctcacacaggcgccgctcctcacacattgaacggtggggccgcccgcgacggcggtccgcaaacgctggcgcgacagcggcgtcaacagcagcaactaaagaaacagcggtcgtcaccatctccacccgttgcttcctcaccaccgtgagggacagcgacggcggcggcgacgcccggaggcggtgccggcggaacatccacgcgccggcggtgcgcctcaaagcagtacgctttcgggaacacgaagcggcagtgttggcagaacgtgccgctgctaccatcgccgccctggcgccggcatgggaagcgcagctcgtcgtagcgcatgcacaggccacacacagcgcgacagcccagtggatgcgtgcgccggtcaaccggatgctcgcactcaacacagaactgcttggcctgtgcaataaaggcacgattgaatgatcaaaaaaaatgcatacgccatacagacttttttttgctgttttttaattttttattaaaatttcaaatcggtatgattttgttcacttgattttccatttctctctttctttcattcatatataattaatttttgctttttgcatggatttttaaatcactttgcccttattttgattttaatttaaatttttttttacttttttgtctttatttccttttgatgaaatgaattttgggtaaactatttgtattcttaacggttgcttgacttttctttattatttgtattttttcttgagatttgtttgacttttcttaattacttttatttcacttttgcacatttttcttttcatttttcattttgtgtttttcttttcttttctttaaatgaataaaagcttttaaagaaatttgcgtagactttcctgtatttttagtgtgtgtgtgtgtgtgttttccttgacatttgcttggcttttctttattattgcatttttttcttgaggtttgtttgacttttctttattattcttttctttcctttggcacatttttccttttcttaatttttcaaagtggtgttttttcttttctttgctttgctttaaatgaataaaaattttaaacgaatttgtgtaactttttctgtattttctataagtttgtgctgtttcgttgacatttgcttagcttttctttattattcttttcactttgacacattttttcttttctttttattttttctttttatgtttttttctttgctttaaatgaaaaatattttttagatgaatttgcgtaaatttttcgataatttagtgttttttttggcttttcattattattttgtgcgccctgctgcagcaacaagcagatgttgaagtgcgcacgcagtgcgcctttccacagcacgcggcatccgtgctcccgctcgaagatcacgaggcgcacctgctgtgcgcccagccgcgtgtccagcgcctgctgtagacgctgcgcatcagcaacgccgtagtctggtttgtcgagcggcagtgtggccatgtggagcagctgccgggccgcctgcgcaccgccaggcccatgctgtgccagccagaaggcgcggaattgggccgccgcctgtacgcttccggccccgtattgcagctgggcgcggcggtcggccagcccgaggacgatggcgcgcgccaggcaccatcggtcgcccgggttcaccaccgggaagaaggagcggcagcgaacggtgccgcgcgcctcctgctcatccacggcacacgcccccgccccactttggcctaaattatggccccatttttttccttttggaaaattcggcacatccctcactgtatcctgcacccaccccgccaccctccgccccccccctttcacccaccgctggcatccaggggccaaacagcactgatgcggaacagcactgtgccgccgaacaagtcgaccccgccggccgactgggcggccagtcgctccagctcggcgcccattgcggccgctgtgttctgctccggcgcgcgatgcggaatgtggtagggggtcgcgaactgcggtggttggcatgacaacccgatgcgcagcggcggcgcacggccggaaagcacacgctgcagcagatgctcaatgcagcgggccaacagtgtgtcggggcggcgcgcgccctcancaaccgcgcagcgacacctcaaccgcctcacaacgcgtgttgcggctacggcactcggtgcgctcccaggcgccaatcactttgcagaaacggttcagtcgctgcccgtcggcttcgccggcatcggcttcgtcatcgctcggcgcaacgttggcactttcggcggcacttccactgctgctgctgctgctgcccaaattagacaccggcggatctctgctgtcgcgcatcggcggcgctccgctgacgtgctgttgatggtcggagcgattggtgctgctgctgtcgtgatcagactgatcggtgaacgagggccggcctcgcccaatttgacgccaggcattacactataaatgcaaaaagccatttttgcgcatgtccctattttccaattttgtgaaagcccttccaatataatggcaccatttctctcccccaaagctctagcgcttctcattttttacaagccccccccccccggccttaatcacatcaaaacacacacacacacacacaaagaaaaatgaataaatttactgaattttgaaatataaaaatgaataagttctattaaaaatggcagaaaaaatatataaaaattggcaacaatataaaatatgatagaaagaatggaatgaatgagaaatgatgaacaaaaaaaagcaaaaatgcgaaatgaagaaaaaattaaaatgttttttattttttaattaatttattttgagcggtcattgacatcctccacccgaaatttggccctaacgactcattctt

SEQ ID NO: 18178 - DNA, 2630 bp, Heterodera glycines
aatttataattaaattttaatcgttaattaaattcattgacaccgatcaatcactgagttttttttggatcgacctagcactttttgaaatgggccctaatgcttagaaattttcaaatttgatttatttccaagattgtacttggaatcagcaattttctgaaaaaggacaaaaattataattaaaagtcattgtaacggtaaattataaactcggagaccgaaatgaattttaatttattatttatttttagcacattttttgttttttttttaaatttattatgacttcaaacaaaagaaaaaattttttcaatccgaattgggaaaataaataaaccagcgcctgaaggcacataaaaactttcccctctacacctcgagaccgagactctcgagcagcactaatgctcgctattggcgtcggggttggatttttagaaattctacccttgtttctagtttctcaaaaaaatgacatttttttggcttttttttcaaaaaaactaccgacaaaatcatatgaagaaaagcatattgctgtaattttgagaccagacgctttttatgggggggggggcataacggaattaattaatacaattaatttgccgtttttatattccattcattctcatcgattctctttttttcatctctattctttatttatttttatttttttgcattataaaccgcgatcacttttaggaaaatgagaaaaaataggcataaattaaaaagcattttagaggcattaattacggataaataaacgatggctttaaaaatggcttccataaaacaaatttttattgtccctctgctggtggtcgtcccattagcatctaattattatttttaaattattcctcctccaatgcttttcctctgccgataatttcttcatcattttgccgttgtgttcgttgttgttgttgttgttgttgttgttgttgttgttgttgttgttgttgttgtcgctgatcactgcttctccgtcttctccgtctccttctgatgctgctcaattccgtgatggcactgatcagcagccaaagtccgagcagtgccagcaacacagccaagcaaatgccgacagtgaccagtgctgacatgggcaccgcttgttccacccgagcgctggcattttgctttacaaaatatggggggatgaagacttgatgttgcttgtttggaattatggacctggcttgatcccaaatttttgtgaatttcaatagaatgggaattgccaacggaaatgccatttttaattgattttgaaatcggtttaactccttttttgccgaaaaacctgaaaaaggttaaaatgagtcttcaattttattgatactaattcactgagattaactaacaacaggcgaatttgtggattctaattttggcaaaaaacttttttgtgaccccaaatattttagaagcaaaacaaagtaataaagaattgaaagtttgaatttaagaaaatgcctgaaatttattatatttttcctttgcattttccataatttgtttttctcaattaacccttttaaaaaatttgagttgctaattatcttagatcagcgtgaatttgcatttttacactacttggacgacgtcgaaattttccgtacgggaaattatgtccatagcacaatgattttcaatcggggccgtgaacggggcgggaatttaaaaaatgcaaaattttgagaaaaatatttttagttaaaataaaaattgttttaatttttttttgcctttcattatgctcctatttgagtgcccactttctgcattgattgtttggttgtaatttttgtccgaaaattatcattaaattggtttttaattacgacaacgtgttgcacatcgctttgaatggcggcaaaattggcgtcgaaattggccagcgtttgttcgccccgggcgccgatggcctgcactttgtcaccagcctaaaacgaatggcactttgagatgggcagcagcagtagttgcattctcgagtttaggggttgcttagaggtgctcaattaaaaatagtgatttacccgacatttttgctaaaatacccgaaaaaaccgaacttttttctaaaatgtcaagaaccaagctcttcgagttccatgcttatatatattctgggttttcataatttaggagcacgagaatctcgactcactcatctgccagttttattttgagttccgaaaaatccgaaacttcctttggcttttcccggttccaattattcgttaataaattatgactctcgaattcgtatcggttaatttttctacgatccaagacataagccagcgctggttatcagtgactccttaatcataacaataattgatcatttttcataaatttttgtctgttgactagtttttcaatcaattttcgcattttttgggtgtccatttttaatcggccaccgtttttatttttcgaatgtttaacggtgccaatttgctgtggccctttcggcggcagcagattatgccaactgctgtttttggttggtccgcttactgaatgggccaagtcatggattgcgctggccaacccgtgcactcggtcaatgaccgcgtcaatggaatgcgtttcgttgttcgcgt

SEQ ID NO: 18179 - DNA, 1207 bp, Heterodera glycines
  unsure (1)..(1207): unsure at all n locations
actgatcattttcttatgatttattcatgatttttttattttctttttataaattgtcattgacaaaattttgtttggcttctttaatttcgtccaacttctattttagagcatatttatttttttagaaatattttcttttgttcgcccaaggaccggcaccgcaatttaagcaacgaatatagcaaaaccagaataatacaatcaataaaaaggagaatatattcatgaaacattttaaagaaatatttgctcttttttatttgatcattagcgcgctccatcatcaattttttaattaatttccaatataatccgtcgattggcattctgtgccgtttgttgtgcgtcgtctccgttttgttgacgcggtgcaattccgcgatttattttgtgcggtatcgttttaggcaccattttaatgcaatctttaaaaattgattaaaaaggacctttttggcatttaaggtaaattcataaagataaaaatttttaaagttttttgaaaaacgaccaaaaatttttaaaagttgttttaactgaagaaaattcttaaaatttaaaaagctgcgccggaatcctgcgtcttaccagggattggacaaacgctgtggcacaacgtgcaacccgtacaattctcttcattaactttggccaaatgtgtatgtttgtcaaatgaaattgcctggtagcccgaatcattgcatgtcatatagctaaatgatttgtttttattattaacagaatttttaagataatctaaaagattatttaaaagataatctgaaacattatctggaaggataatgttttaaagataaactaaaatatactataaaaactataaaaatactaagcatattactagtaattaaataactatacaattactattatcgtttaccttttagattcatctaaagactaaagataatattttttaaatttaaattttcccaccattttccacaattaatgcataagtcatcatcaataacggcgaccacctaaatatagaatcgtttttttatcaaatttattaaaaagctgcaacatttaaaaaaatttgaccaaaatgcataaaattgtctttttaggttaaaaaaacctcaaaaaatgctaatattatttttctgcaatatcttgggtagaaaaaataataaaaattaaaaaatcacattanatgatttattttataaatggaaaa

SEQ ID NO: 18180 - DNA, 1431 bp, Heterodera glycines
taagtacaatatactaaactcaaatatatttttaccgataaatcagtttaggtagttttgtcaaaaataccaagaagcttcagataagtagtctgtccggaatcttagtccgattaatttttttaaaaagaaatcaaatttacaattttgctttgccgacatttggccatgcagtgccatctgagcccagtcccatcagtccggacacagtgttcgttgcggttacgccatccgctccgccatcccttgccgcttgtgccagaacgcgtacatccgttatatttggtgtcattttgacaaagaatgggatctaattgggtaaaaattaggaaaatttaacaaaaaataaaaacggcacaaaattatttaaatttacaaatagcggatcaatcatcaccttgactgctgaacggacccattccgaaatttgtttgaccatctcgggattcttaaacaaaaatttattttaactgatcgcacaccaaagtgtaaataggtatgtaaatagaattataattgtaaatttccaaaatatttatcaaaaatttttcaatctttttggtcttaattgtctagaaaataacttacttaataattttaaattctattactgacttttaatatttaaataataaaataagttgaaatattttctacttttgttcagaatgaaaaagaaatatatttaaaaattgaaatttgaattacttggccacaggcaaggcccatgccacgttcgcccatcccatgaggacacgacaaattaagttccaaagcatcagcgcctgcttcttcagaacgggatgccaaaaattcccaatcttgctataatttaaaaatattttattttatttccaaataataatttaatttcacttggttaaacgatgccatgattgatgcaattacaattttttgtgaaaaatcacgttttaattccttcacgcaagtcaaccaatactaaagcaatggaaaatatttattttttgaaaatttaaattttggtatttatgggacttgacaaaagtaattagataaaattaaaaatagttaattgttttattataaaatttttaaaaaaattgttttggtgaaaaatctagaaattaaattaacaaaacaaaaaaaaatttgaggtcgattttttgtacattttttggtttgaaattttggcatttttgcacaaatttaatgaatatttttccattttgagaatattaaataatgaccttttttctagtttaaaatctcacctcagctgatttctccgaaatcaattcaatgttgagaaaagagccctgccctgggccgaatattggcccactggtcgtcccacgaacaattcgaggcgaaacatttgtcaccaagtccttaccaagaaataatttttaaatatattttatattaatttcggattttcctgttctgcaa

SEQ ID NO: 18181 - DNA, 1131 bp, Heterodera glycines
cgatgacattatcggaagtgaattgggggggggggacgttctaaaggggtgaaacaaggatgagaagggtgatgtgaaatacaattggggagagagggtgtgggggagaaagaatggtggataaatgaaaaggggtgacggaaagagagaggggaaatgacagtgattatatgaaagtgagagggagagagagagagctagagagaaagtagagagatagagaaaaaaagcggagcagagaaaacggtaactaaatgctaatgatgctcgtaagtcttggtcttgaatctcgaatcgagaaaacattagtttttggtttctctgtcttgggttttttagcccggtattttcgagacagagacttttttgtacttctaattatgttgagtcattgaagcgaacacaaagaaacagaagaaaaaaagaaaagaataaccatttgaagaaaagaaagaatgtttggaatttggagaaaaattttaaaaatcgaaaaagggggaaaataaagacaaaaacgaatgcaaaaagttaagtgttgacgaatggagaaagtgactgaaaagcaatttggcgacgtggggtgagcattgaataggtaattaccctaataatccctccctcggattatggcagccaattaaagaaaatgataaatgatgaatgcacgcaaacaatgagtgagcaaattgacgccaattgtcaaaattagcaaaagaccagacaaattaaatttaagggcgggaggagagatcgccggagagaatgccaagtgattgaagcgactgatcaatggacgatcaatcgacttttccattttttgccattcatttcgttatcgctttccgcactataaaataatgtttccccctctcatcagtgcactttgccccatcgatgaaataataaaattatccgaccatcgcccgtcgtccttcgccgctgggaatgacaaaatatgaagcgaatgcccccaccccctttccgaaccacacagatgggcggcgaagaaaaggcagaaaaaacagaaaggagccgagaagattaaatggaataaggtgaagtaagtcggaaattaagaaaaacgggtgggggaaaatggacgaggtaaatacggaggaggggggggggggg

SEQ ID NO: 18182 - DNA, 1262 bp, Heterodera glycines
ttaaaaaagcgtaaaaactttggcacgtcatatctcggcactcatgctcatttggcaaaaatggttaaaatttcgcaatagaaactaggggtgatttacccactcaccgaactgtcataaaaaaacaaaaaaaaggtcacttttcaaaaccttcttttgactaagtagttttatttgtgatttttaccaagttgaacatcgcccttcaagagtaatcgatcaactttttgcaatcaacatcgaaagaacccattttttaaagaagtttagtttccatagataaatatagtatgtagttgctcatttttaattttggacccatagttttaataacagcaaattacggacaatttttgagaaaaagataaactattttagtttttgtttgttaatttaattggtttgacatgccggaaaaaattaagctctcggttaactaaagcgtggaagtgaaacaagataaaaaattttcttggtataaaattcttgaactgacttttatatttaatttagctaattttttcgccaatttcacagtttaattataagttagaaattctataaaaaagaaagaaaaaagttatgtcaaataagacttctctccaattgagacagatcgctttgcatcagcttaccttcactaatttcaatttgggaatattgaatttattaaaatttcttattatttttttctttatttagacagttctatcgagaaataatggtccgcaaatgtcggtccgcaaatgtcggtccgcaaaagtcggtccgcaaatgtcggtccgcaaaagtcggtccgcaaatgtcggctaaccgtcactgtcatccccccccttccaaattttggaaaatattgatcatagggcccagagccgaaaatggccaaaatatataccaatcgatagctctcggtctgtaatggatgaatccgaaagaattttggatgaaaaagaaatttaccaaagttatgagtcctcaaaaccggttcagacaaaaaatgacaaaaattcgtcaaatttgaaaaattgaatttagcttattgcgctaaaaaaccgccgcacacttgactttttcaatttctttttcatccaaaaattctttcggattcgtgggttacatgccgagaggaatcgattggtatatattttgtcgcaattccatgcgtttttatctgttggacggttcagtcccaaagccatttggccatttcagtctcgggtctgtaactcttcagggattggttgccgcaaaaaagttctttc

SEQ ID NO: 18183 - DNA, 1538 bp, Heterodera glycines
cttgaacaattctcgatcatatgcgtcattaataatatttatacactaataatttaataaacttgctaattaacaggataaacaaaatatagaagacagaaatataaacattattgaaaacatttcaacgtggaatacactttcctagacgatagcaagagataaaagcccgaataaatataaaatataaaaacaaaattaaataaaaaactgtaattgctctggattttaatgaatcaaattaggtaattaatatttcaaggaatctacattttgccaattaaaacaaatatattacaaacagttataacacttttagttaatcactgcactaatacaaataataaaaattatttaaaaataatagatatattaaaaagactatacttataaaataattaaataatgaaacatattaatgtattgtaaaataatttaaatttccaatttctgttaatagaacaaggattaataaagacatacaaattgttcatgccgggttttttggaatttattttaacaaattacaaataaattttaaaattttctcccttcggttccgctagcggagtctgggtcgttacggcaccagctcaattttttggatgataactttttttttctttgttaaccaaatcgaacaagcaaaaaaagcgccatttttagagttttttcttaagaaatttttacaggcgagtaaatcttttagcattttgtaagcataattgagcacgtgaagggctttcgaatgataccaagattgtttgttttggataacacgtaaaaaagttatagtccaaaacatgggatggtgctgaaacgacggcgccaaaacaacctagtccccccgctcccccgctggcgcccgccatcccaataaatttttttttgaagagcggcgtaaataattattttttcatttttaataatattcagtgcttttcatgtgaacttgaaccaatttgataagaggattaatgatcacaaatcattttttttctattttcgatttatgtggcccaattcgattagttatttttgttttattacccaatatttgaaatattacctaaaaatcgtaaatttaaaattgatcacaaaattattattttcattccattcacaattctattcaaaaagcaaaaaatttaataaaattcaatttaataaaatccacaattttttttaataatttatgtttattttgaaaatttctgtccaaaaaaataaataaaagcaaaggaagaatcaaaaaaaaatcgatgaataacaggcaaattaaaataaattactaagctaaattatcgatttaaataataaataaaggatattttattaaattgaaaatttaataataaatttaaaaataaacatttgaaaatattcctcaaaaaagaatcatatgtgaaagatatatcaatgaatttgaagtaaaaaaaataaatatattcgggtaaagaattcttagaaaacttagacattttaatatatccccagttaaaaggaaaatgaagtaataaaaataaataacatttttc

SEQ ID NO: 18184 - DNA, 1595 bp, Heterodera glycines
  unsure (1)..(1595): unsure at all n locations
catacacatttttgcncatttttcattcccccataaaaaaatctagctatattttaaaaatttctggcggcggcctcaatgataaaatgatatcaatttgtaaaaaaagaatctgaagtaattaacttttatactaaaaaatagcaaaacaccattctatttttgatgacctgaatataaaattaaattaataaattttatttaaatggcttttaaatatctttaaaaaagtaatattttgttatcagcagtaaaataataaaatcatggctcactaaccaaatcaataaaaaaataaataaaacttacaaaaaaaattttactgctcgcaacaaaaaagaaatattatttaaaaatgaaatcaaccaaagcgataataatgaagaaaataaagctatttatattttaattaaaatatatcgccagaaaggaggtcgaagaaaatcctctgtaaaacaagataaattaatacgaattatctttaaaagaaacagcattaataaagcatatagataataaaacttaattaatttaagctaatcacaaaacattagaactattttacaaataaaatattattttataaaatatacttcttaacctaaaggaacaatttatggaatattttattataaaaaatttaaaaaagaaatttccacaataaataaagatttaatgtaagataaaattaattaatcattaaggttttcgaactaaaaatattgtatcaaattaaattaataaataaaatgaagtgaaattcgttatgattaaatgtgctttcatgaataagaacaaaaaatgataaatccttctaatatttctgtaagtaaaatacaattcttataaataaatacatttaaagacttaagtttaaaataagggaaatcaaataattttaaaaatatttaaatttataatagaatatttaactaatctaacaaaaattttaaattaattattaatttaatcaaaatctagctgcagacctacatttaaggaaaatgatcaaaaaaaggcgccattaatggacttttgaatttaggtattatcaaaattaataaaaattatcccattttaaaataatttatccattaaatacattccttaataatcgcttaattttaaatttagaaataaaatattcagaaccacgaaagaacatttatgagcgaaattagaaaatatcaatattgcttttaatgtaatttagaagattctgggttcatctaataacgaaaagcagtcaaatttatattggaaattttctcacaagatcataagaattaatgtcagatttgaaatatcaaaatatgaaatttttttatcaaaaaatctttaatgaaaaataaatgttaaatcatctccaaaaattaatgcattaaatatttatttttagacaatcctaaagaatgggggtcccaaatttaaattattattttttatttgagctcaaaatgagtatttggggggtttcgagggcactgatcacgaatctgaactcagatttacctaattccgaaccccggaacccgaattcaaacaaaatgttgaaattttttgcacaatgtaaatttttctgggtaaaagcttcg

SEQ ID NO: 18185 - DNA, 2043 bp, Heterodera glycines
  unsure (1)..(2043): unsure at all n locations
aattttaaagaacctttaaaggggtgcaccccaaaacgtcgccgtgacactttttggaccataactttgttcatcgtcaatcaaattaagcattcttggtgttcttcgatagctttatatgtttattattaataggcaaaatttcaaaaattttagttaagtttcaaaaaagttatgaccagaaggaactcaaaaacttagttttttgaactttttgccctgatttctttttacatgaataaaaaattttgaaaatttgcaggtttatacagttttttataagtttttaacaataccaagaatgtttaatatggttgagaaggcaaaaagctatggtccaaaattcgcccggcgacgtttcggctggcgacgagttttcctagtccgcctttaaaaagagcagccccgtgtatggctgtaaatttgatgaaattaccaaaataagaatttaaaatttaatatgtctaatgtttatcgattttaattgttggccaaggatcccttaactgaatttctttgcaaaataaaacaaacaacaaacatacaataaatttgtccttttctgtgatattttgcatgagaaagcattaattaattaatattactaattaattattaattaggataaaaaattttaattcctttcattaaggtgcaatgactaacgaaaactttttgattggatttttattttattttatttattgttccacttcatcccattttcaacaacatattgaatattgtattgttcttttatttcttttcgcccaaacataatattgttatttttatttatttgattttattttatattgaatttttatttttctaaaagtaataaaagacgtcagtgcaaaaaaaaggctcatttaaatatttgtttatttatgcttgataagtaccttaatttgtcatatttttgttgaaatcgtcaattcacctaattcaatgtcctttgaataagggcaaatcaattttcggttaattaattccattactgagctcaaggtagttgaaatccatataatctctgctgaagtgatgaatgctttgactggccaataaaaggcaaacagcgcaatcaataatttacgcgaattaatggtaattagctaattagtgcagcaaccgcccacacatatttatttatttttattctaatagggctttgtattgattatttttatatggaaagagaccaattattgacaaattaggcgctgaaaatgcgtgaaaacggggtgggccttatcaattgttattgacagccgcccccactgtctgtcggctgtctgatcaccgcccgtccaattccatcgcattattttgataataaaaaaattcatttttcaaaaataaaaacataaaaatccatcgattttttgaagtaaatttgggaggacccaaaaaaagtttgtgttgaatcgagcagagggaggaacatcttcaacttttattttttgttaaatttaattcgtttcaaagccatatttgttataggtgtttaaattatattggaaaccatttttttttttgatttatattatgaggcttaaacaacggaaattttcaaaaactattaaaaaagaactaaaaaatttgctttttttatttatctcaaaaaatatataatcttattatttttgggtagttctttaaattgtttgtaatacaacatcatctaccactttatgggattctatttaaatttaaattttaaaaatatatttagcaccactaagcttttttttaaaattttatccaatcagtgattatgtttaagaaagttttcaaaggaagcaaaaactttagattttggcacatttgtttacacaaagtttcactatttgtagaataataattcaggaaatcacttggctaacaatttcacgcactcgtgcaaaatcggcaattggtgattcggatatcgcagagagtgaaaaggagtatcaatctgtagaggaaaagataaaggatgaggttgaccaanttaggtgcagggaaaaaagtgaatttgagtgtttattcgtgatcacagta

SEQ ID NO: 18186 - DNA, 1061 bp, Heterodera glycines
tcttctcttctcttctcttttctctctctctcctctctttctctccccaatccgggtgatttggcattttgcgaagatccgccgtctgccggccgtcctttacgctgactcgcgcaaatccgactctcgccagctggaggtgctgctccgcgacggctacggcctcccgctggtcactttttatgccgacaaaattggtcggttggccgcggtggaggcaaatttggccaaactgaccgcccatcgggaaatgccattcctgttcatctgcggaacgttcattggaagtcagtaacaggaaacagacagcaagcagtaatttttgtgggcaaaacatgggacaacgagggagtgaatttccaattcaaaaagagccgaattagatcggtcggacccagggctgcatgcaattacaggtttccgtaattacggaggtttaaaaactcgcgtaatcacgtattacggctttccataattgaaaaccctggtcgggagaccgatcagggttttgaatttagaattttttggacagtgatttcaagaaaacccctgttgctgctgctcccttatgaaattaattggacggttttttgtggccctctcgaagcagtacaaccaattgtcgagatcaaaaatccctcattcacatcacaggcctggagcacatcaagaagtaccatgagcagaaacaaatgccacgactggtggaatttgaattcaataattaatcatttttctggctgggattgctcactgatcagtcgatcagtgagcaaagatggagaggattaattgtctatcggagtataaaatatatataaatggtgatcttatattgtacgctaatagtatagatgaatgccattttcattttgtaaattcccttcccaaaatgttatgtaggaaagcaaactttacttactcataattaattctctgccatattctaaacaattttttcgtcgggaatataaagaaggatagaaaaagaaatagcattagttagaagtgaaaagtaaagagaaagaacgcagagacagacaacggaagaaaaggaaaga

SEQ ID NO: 18187 - DNA, 2037 bp, Heterodera glycines
agagtgccacgggaccgggccgggaattctcggtcatccaaggtcccggtcccggattttgaaaagctcaggtcccggtagggcaaccgggaaaaacaagcactggtaagaatgggggtctgagtgaaaaattagtgaaccaaaggaagaaaattttaaaaaatatgaaatattctttaaaagtgacactaataattgtgaaaatggcctaatggctagtctccttgacttttcccttctttggtcccggttcccggtcccgaaaaaaatcgaggtcccggtcccggcttctcaggtcccggcaagtcccggttttgtcaaaaattcccggtcccatggcactctaattgccaaccaagtgaaaaacatccgtttttgtgattgtttaaaatctctgaaattagtctttttttttgttttttttctggtaaatattattgatcatgatcaatgatcatccgtccccaattttgatgattagtttaccagaaaatttaaaaaataaataacaaagttcgaagaatttaaacaaccataaaacgggtgtttttctcttggttgatatcactttccaggttattttgccacaatcttatattttcttgaaaaagtgacattctgccataaagtttcaaaattatgagtatacactatgagtatacacaccgtccgaaaaaacgagatatgtaccaataaatcgtgtccagacatttgcgccccacacatttgcgcctaggtctaaaatcggggtcaaacataaagttttttcaatccctgatagcttaaacagctttaaaattaagaaaacatagtcttcttgtttccaagattgttggtatcattcgaaagctcttcagatgctctattagcaccgaaatgattttctagcctggaaaaaattttttaagaaaatcttcaaaatttcgactaatttcgaccttttcgcaagtataacttttttggtaattgtctaatcgcgaagtgatttatcgatttttcaagcaacttttatcacaaaattttgccaaaaaattttcggctgcccttacgacagattttgggtaaaaccatttttggagaagagatgactttaaaagacaatctaccaaacaattttataagaaaaaaatttaaaaaaagggtaaaaaatggttttaaaaaactggaaaaaatgcacgatccgcggcaattttttgcacgatccgcgaccgcggcaaattgaattcgcgatgcgcgatccacgaccacgggatttttttgtgcgcgctccacccctgataagtaccgacaaatgtagccggaagggaatgctggcagaaaaataacatttaaaaattgccattttgtttttataaataatttaaaaatttttgtaaatgatggaaacaattttcggattattcgtttgtgcaattactacatagtatctagtagttagtttttcttttttcattgtttaccaaatctaacaatcttggtatcattcgaacgctacatgtttctaagctattgcttcgcgatagacaattaccaaaaaatttataatatgcaaaatttttggggttttttcttaataaatttcttagatggtagaaaatatcaaaatattttcgctttttgtaaggctaatagagcacgtgaagaagggctttccaatgatatcaagattgttagatttggtcgacaatgaaaaaagttagaatctaaaaattcgggctggcaccaacgttacatattcttgcattttttattgcatttcttatttagataatgagtgaaaataccggcttccaaaagcaacttcttgaaatggtaaaggccctccgtgaaaaagtcgccgtcgattgaaaaaagcgtcgccgatcattgaaaaaaacgtcgccgtcgttgaaaaaaaagccaccgtcattgaaaaaaatgtcaccgtcattgaaaaagaagtcaccgtcattgaaaaaaatgtcaccgtcattgaaaaagaagtcaccgtcattaaaaaaacaatcggcataaaggtaattgctttgacctgccagg

SEQ ID NO: 18188 - DNA, 3584 bp, Heterodera glycines
  unsure (1)..(3584): unsure at all n locations
gttgagtaatttgcgcatttccgtggacgcctatcactgcccactgctgggctcgatttcgtaaatgtcctcgtgcccttgttggtggatcattggcaccagaagcaataacagatgatggccaagaaggtggagccaaccctcgggacggattgcgtaatgcgtaatgagactaaaacgaagaataattaaatgattggttggaggcggtgatggggcaggtagtacaataatacagtgctgggttatttcgtaaaatccgccattttagcattttgaaaaatatggttacctttgcttaaaagctattaaaacttttgcattcttggtattgttcaatagccaaatattttctcaattagctgaaaaatttcaaaaagttaatcagctttcgaaaaagttgtatggaaataagtaattaaattcaataattttatttgaaaaatggcggatttacgaaatgaataataaaattatgatctgaaaacaaaaccgaatttagaatgactaaaatggcacttaaaattagattaattttttagctaacagtttgatactctaagcgggtcatttaataagatcagcttaaaaatatattattaaaatagtaatagaatgtgatttcatttaataaacattttctgtctctttgacaagtcattcttattattgtacttaaataagcctttttaaaaagcactgacccgtgccattgttggcggatggtcacgagaagcctcaacaacgggcattgctgngccgccttccgaggggagcggagtcaattcacaaattgngggctgtaatttaaacggcaaataattagtattaaaaaacaaaataaaactataaaacttaaaattattagtctttgacattatttttatgattttgtttgctttttagcgcttttaccattattaaaataaatattttaaaactttctaagatttttctttttattatttttaagacaagttttaaaaatttattatttcgtttaatttctttttacgaacggtgatcccctcacacccattctcacgcttgtcgcacagtgtaatttggcacgcaaaatagacaatcatttggtcggcatatttaaaggtgctacaaaaatgcaataaaaaacaattaactaattaattgataattaaatatttttttaaaaagtgtttttactttattggtgtagaggaggaattcagttggctggtgtaagtcagtggggccaacaatgatgaatcggtgacacatctgtgcaggaccaaaaaataaattcgaactatttttaataaagagagctacaaaattttaaaagttattttaattttctttaaattaacatattaatttgcattttttttaatttttacccagcccgcgttggtccaacagggaaaaactgtggccaagtccgtcacggataatacacgaatggaccagcattccaagctccactaaaaactaattgattaatttcaaaaaccaatcgatcaatattaatgcgattatttaaaatataaaaatcgtttgttttttaattttggcgtattttcgcctttttgtcgctgaactcttggttttaaagcaaaggacgaagaattaatatggcattttaccatctataaatttctgcactaattgagtcaatggcttttaattgttattttggttttggccattttaagtcgccgctccctcacccgtgtcgcaactccaacgatggaccaacacatcgccaacatttgcatatcgaatgggttcgccatctttgagcacctcataagtgcataacggcgcttctttggtgccgttcacatcaaatagcgacaaatcccttcaaaataatttaatatttgtcaaactcgttggttcactggcgacaaaacgtcggcgaccaaaaaggtgccggacgatttttggaccataacattgtcaaccaaattcaacattctttgtactttcggaagcaaccaacaaactcaattaacataaaaaacactaggctagcgaatgccgagaatactcaatttggtcaatgaattgatcaaaattatgccccaaaaaaattcgtccacccacgtttcggtgtgcaccgtcacggctccgctccccacatggaacactgttccccaattctcatcactcagattagtgtgtgggtgccaacttttactcacccaacttccagcttgcgttcaaacagtccctttgcctcatggtaaaaacagttgaccgcgtacgccttgtcccgattagtcacaaacaaacggtggtgcttaattgattattgattcatatgaacacagtccatttaagaatgggtattgaaataagttaattaatgattaatttattacctggacaatcacaatggtactgtagctgagtccgctcacatttctgccgttttccccctcaatggaccgctctcttttcacctaaaattcggttcccttcgatccgttatcagctgtttttattgatctgctgacgtcatatcggtctgctgatttggtcaaattgtgttacgacagaaattggataaaaaaaacttctaatgattattaaaaattgataaaaggaataagaaatgtgttatgatatttaaaaaatggccgagacaacataattttttaaggtttaaatttgccggaaaactggagaattttggcactaaattcgcagtttgagaagcataaataagaaagaagtatttctaattcaaaaaactaaaaaaaaaaaattaaagaaacggccttttttattttctcgggaaacaaactaaaaatgagtttttcttggcacaattttgtcaaaattacggtacatttaaattttcctacgatataaatatatttttcgacagttatttgtggcacgcttgcctggcaatcgcttcgaaacggaatgtgaaaatagaagggctgatcaatgggttgctttgtgtagtccaaatggcagtggtcagtgaagaaaaagcccttcaggtacacgtggccaccaaacggtggcacatttgggcccatttcgggcacaaaatggagacgaattgcattctccaaacattcctttcaaaaaatgcaaagtaaaaattgaaaacatattttaaaaagtaagaaaaatgaattaatattttttttaaaaaaaattcggcacattttaattttaaaacccacgatgcttttactttagactccacgaaaaaaatttttataggggttttcgggggcgctaatcataaagctgatactaattttgacaaatccctaaccaaaactcaaaaaaagtgaaaaactaaaatttatgtgaattttggttgttttttttcaaattgggaaaagcattcggaattaaatatcagaatcttaatcaacgtcatcaaaaccaattatggactaaagtttttgaaaatattgtccccctttggtttttcggggggtggggggcataaagtaaaaagtgtcaaaaacttccatgcctcgctgaaattattgaaatgaatttttcataattcaattttaattttctgtagtccccgccggctcccgngtaaattggacacaaaatggaaattggag

SEQ ID NO: 18189 - DNA, 1289 bp, Heterodera glycines
  unsure (1)..(1289): unsure at all n locations
gttcctagaaatgttttgaatnttctgaaaaaatttaaaaaatttttttgagaccaatgaatgatactgattgcccccttttttaaatatttggataattgagggtcaagcggtgtgctatagttgtaaccgggaaatttttgtttttttttcaaatttattaatatgtgcaatttttttattgcctaatcttgaagactttgacgtcaaagaactgatattttctggttgtggcggctatcattttagataaaattttgaaaaatttttccaccttaatgaaattatttggccatcttttgctactgctgcttcctttgccatcattatttggttttatttgttgcttggatttcgcattcgttgatgctgttaataaattcagagatcggtcttcagtttcattctcatttggaatatattttggttttatatttgtagagtccaacgattttcttccctataatttgttaaattaaaaaattggaaataattataaaaataattgaagatttgactattaaattttccgctcgaaacaatcaaatttctgaattttgttgttctttgtctagaaatattttaaaagcgatttttaaaattatttgaaagattgagggtcaattggtattgacaccgggaaattttgatttttttatatttactttaataatatgtagtttttctctaaaaatactaattttaaacatattaggggtttttgttattctaacgaaaagaattggtattttccgttggttgcggaagtcacttgtgataatttaaaatatttcccaccttaaaaattttatttggccatctgttgctgttgctgctgcttcctttgtcattattttctgttaatgactcttttgttggcactatttgttgcttggatttcgcttttgatggttctgctaataaattccgagaccggtcttcattttcattctcattctgaatataggtagtttcgtttttacgatagtatttatgtgctatttgtaatagttagttttatggctaaaatttttcacttttttcgaaaaagtcaatttaaatatttttgaaaattttttgttcgttttaatcttttgcatctttatattctaatattttttaaatgtgaaaaatttccaaaaattcaccaaaatggtgatttttaattaactctattgccattctgccaaaattttctaatctgatcatttcccgcacctctacaatttattaagcagaagatttacactaaaaatccgtgatcatttaatctatttttatcttattat

SEQ ID NO: 18190 - DNA, 3374 bp, Heterodera glycines
attatggacctcaaaccgatataatcccaaaataaatattttaattttgttgatgatttttttaatttccatttttccttgccttttgctcattgtgcaatttgtccattttttgttttgcctgtttttgtttctgcactgatttgccggatttgctgctgttctcattgaacatcaacaatgtttttcgcacaatgtcaatgccttttggcgatgcggtggtctttgaccgttgcagttggtgattctttttcgcacttaaacccgccattttttgttcattgctaattgactaaatgttctttcatcttttcggcatttagggtgcgaagattcttagggtttgactagtttttctacggctttgtttcgatgagaaaggcacgaaaaaatactttttttcgtccggaaatctcatcttccttttaaagccctattcgtttatagaaaattctatttatttaataattattgcccaccttcctaattttatctttaatcacagttttatcagcgtggtttatttttatgccatttgctgatgtggtcgatgaacgtttcaacaacggcgcttgttgcagttcgccactgcttgctgccgaattggatgaacgacgttcaaagtccaatgaacggcgagccttttttatataaacaaaatttttgagtaaaaatttttttaaaaattatggccgtaaagcactgagtctaactaacaaattatctaaaaattgaggtaaaatttaatatttatattcttatgtattttttaacctccagtttttcgattagtctgtaaaatttcaaaatttcacaaggcttaaaatcatctgacaaaaaaaataaataaattttggaagctaatacagagaataattcgattaataattgttgcatttttttataaggcgaatttaaaaacaactcacaaaccaacgccaagtaaagaaaaacctttatatttttgaatatccttttttactgttttcctttttttaaatcaaataccaatttttcttttttaatttaataatttaatttaaattcaaattgtaatttagttttaaaaccaatacctgaactaacagttcaatttcgcattttttgcgtgctcccgccgcctccaataaagtatcgtcaagtttatcgtcatacgcatttttttcaacattctttttccgtttactcaagaatattttgttcaacccctttttcctgttttcatttttgtattgcgaagaaacacttatttgctgaattatacaatttcgaaaatatttttcacaaaatgacccataacttaatttttctcaatttagaaaattgttatgaggcgaacttatgaaaatccagaattaaaagcccttttattttgttaacattaaaaacccaatataaattttatttaagtgaagtattttttaaatttttatttctattttatttaattatttttattttattttttaatttatgaccagcatacttaaacaatggacatttggacgaaataaattaaaaataaattaactaataaataatttaaataaaaatactaaaaaaaattccattaatttgctgatattattttgaaaattttaatcaaaaataatgaaaattccattaatttgctgatattgttttgaaaatatttgtcataccattgttgatttgaattattttggcgttttgttttagtttttgtgaccctttattttattttgttttgtttggggtatgtgtgatatatgtgctcttcctaaatttgtaattgattgctgtgtgctgttttattaattggaagtaaaagaaagcagtgaaaagagacggcgatttggttttggatttgggatacaattcccctttcccattggactattctttttcctacgacgaaacaaaaacttttattttgctaatttttatgctcctttccggaagcctctctaattacataatttacatgagtaaaacaggaaaatcaagaaaagttttatcatggaaacttttgaatttcaatcttgttagaataatttaggttaaaattgagtggatatccattaaaaaattttcgattcctaacttgattaaaatttaatatgcttttaattagatttttgcaatttatagacaattaaaaacatttgtattttttaaatccttaacctcccgattcaacaccatattaaattataggtcataaattgcttttgaacggatcgtttttggttggatctgaattggaagggtccgatttggacttgatttgtgttgtgtccaacaaaataattgttcaaaatttttatggatcagacgacggaacattatttacaatcctaaaaaaggttagaaatgaaaataataaatagggccgagatttatatgaaaaataaaatataaaaatgctaatatgaaaaacttacttagtgaaattgttaagtgttgtttcaacctaaaaattgactttttgatttaaattacgaaattttattatttttttgaacaaatactttgtaagaaatagaacaggaaaaattttttataacaaataacctaaaattggtatttttgattttaattttcccattttattgtgtattttttgatcgaaattacgcttaagtaagtgcttttttctattaatttaggcctataaaatattttttaattatctaaataataaacattaatttaaatggacagaaattggcaaatgccaaagtcaattgcatttcgggaaggattcagctgcttagaattgagcttgaaagtttcgaaattgatctgtcttttgtgccagtgccagaaaaatatttagaacaaaatgacggcggtgatttatcacgggaaaaaatcattgaggaaattaaatacgaatctggcatttattcgttggcgggtgaacaaaaaataataattttaaatgaaaattcaaaatttaggttatcaatcggcacattttcaactctcaattttgccggacaaaaatgcatttgtgaatttattgaaaatcgtcaaagtttgggcaaaaagtcggttaaatactactaaaattattagttcaatttaaataataattttataaaaaataataatttttatgcgaaatttgataattttttttcagctcgcctcatttattcgggcatttttggttattttaatggcatttcttgttcaattatggcatccaaaatttgtctgctctttccaaatgcgcctttgtcatatttattgtaccaatttttctcgatttactcaaaatggtactaaaattaaaatttgaaatattaaattaaaattgcctaatttagggattgggcgcgtgttccgattatgcttaatgaattaactccaatcacaaagaataaaat

SEQ ID NO: 18191 - DNA, 2325 bp, Heterodera glycines
  unsure (1)..(2325): unsure at all n locations
cggagagggtcggggcactgaaaggggcggggataaagggaatggataaagggcgaaaatgccaaaggatttatttggctaatgccctcccttctctccccactcaccgttctgcagtatcccaccacacatttgcgttggtcgcccttcagcaaattgatgcactgttcgtacaccgactcggcccaacttccgttctcgtggcattgtctgctcgctttgtacacttcggccaccttctcacagccgggcacagtcggacaaaaggcgaaagggcacggcctttggccggtggagcccaacgaaacattaaaccaacagagggacctgtcgaagtcgggcggacagaaactaaacgggggaagggaatttggaaagtgaattcgagacaaataataagcattaattaagccaatttgaaagagagacgaaaagcacggaaaaattgacaaaaaacgtaaaattagcaaattattacccctgaaaagcttcgacttcttctggtgtttcgtacgaagtcgtcgccctcagccaaagacaagtcgcattttcccgatttttagtgatggacattttggagaaaaaggtcaaatgaatctgagtttgatcaatgaattgatttgtaaaacaaattgcaaacggaaggaaaggaaactgaagggaagcgaagggaaagaaaggggaggagaaaaaaaagaggggggaaagagtcggcacggcacggaatgccattgccggacaaaggcccacgagcaatggggcgaccgcctaattgggaagtcgggcggcccttttggcgaaacaatgcccaaataaaattggaagatgggatgggccacacattttcctccccctcccccacccattcaatcagcgattgttttgcccttttcggcagcaacaattttcgcgattcgtttggcgtttcgttggtaatgggcaaatgagcaggccaattaattatttaatgcgctgtcagctgaattaatggccaattgaattgcgttgggaaatccatgaaaaaaaaacatcggcaaaaaagaaaaatgacacgcaatggaaggaaaaatcagaagaaaagtcgaaaagggaaagaattgtgaaaaatggggagagatggaaggaaaggaaaaaagggggacaaaaccaaaagtgaaataatttggccataattttggcagggaaaaagagagttgagaatgggaaggaaggaatgactgactcattcattcattgtcagtgcattcggcaaaaaaatggacgggggcaatgagaagggggagagaaaggggggggggggagccttttgggcgggaaaatgaaanttaaggcacaagcaaagcgatggccggggaggcataggcataatcatgccaaaaaagagacgggaatattcattcattcgaccattcactcctatcacggcacacccaacaaaaaaccaattcatctgacgttgccgtccctttcttccgccactgattattggataatgaatgcaaatgccaagggggcgacaaagaaacgaaaggcattttcgcgaaatgtcggccttttttgggaggggcaccaaaaaggacattggtggaggaatgaatgatgggcaaaggcaaggaaaaggcattggaagggcatgacggcgtttggctatttaacgatgtttaaattcttagcttttgatagagtgccagatttgttgcgtataaattacaaataaaaagttaagcgccactgccgaaacgtgggcaaatgggcgaccgacgaatgaatgaatttgtgtcggtcgccaggttcactcggcacacaataaactctctaatggattttacaagcgtaaacagagcgggggaggggagcaattcgcattcgatggcctttttgtgcaataattctctgctcgctgagattgccatgcctccgcaaatgccaataatttttgggcctttgccttttattgaaaagtgccaattttcactcccatttaaattgcttttgtatcacttatttgcataattcaaaagcattttatttaatttataaatgggacagaaatagaaatataaattatcgcccccgccccttgcggcagcaaaattagtcaattcgggggtcctttctttgacgatttattgccgcaattttattagcgggaatttatgggctcattaagttgaaaagaggtgaaatggaggcaacggagagaaaaaagcagaagttgatgaagaatgagtgatggcatttcagcccaaaacaatctcgggcaaaagcactttaacagttggggagggcaaaacacgaaaaagcgggggaaagggggggggagag

SEQ ID NO: 18192 - DNA, 2791 bp, Heterodera glycines
aaaaaatagtaacgcccaaaattttttatggtgcgtcaactttcttacagattagcaaatgctttgaaaaaggtttcctcctcttcaagagcttttgtgattgtcaaaattagttggcagaaaagatcaaaaaattttgaaaatctattttttaagatcatcttttttcttaaaattaacgttaaacaattttaattggataaaaaagaaatactgtgttataaatgcttctgctgaacaccaacgcaagaatgaatacatatatattgcatgcagttttggagaaatttctcaaattttgatttaagcgaagctttttatgctgcacattttcagatgtatggtgtaacatgcgcaatggtattttttgggacgaactcgttttatgtgcatttgtaaaaaagcacatgagtagtaaataaaaataccaaagtaattttgtaacgaaacaaacatatgagcaatcaacgggtgaatgttggccgatgaataagctaactgataagcgtgatcagttttgatggtcataagttgtgatgatgacctttgccttattatggcagtgaatgatgagaaatagcgaggacattgaactgtgagagaagagatggacgaagatgagtgggagaatatgggaacaatttcttcatttgaaagttggagagtgggcagagacacaaagacatggccgaatcagcgacggcagtcagtgcggccgcaaaagatacgcaagggtaaggcagcagagcaatcgttgctcaactgcttcggaaagggccaccgccagcagctggtgggtggtggctgtccccgaagggcttgacacccgcgaacgcacattttggatggttttgtgggcacacttagagagtgagagagagagagcggtggggaagagagagtgagtgaggagaggggaaagagagagagaaagagagaagcacactgttggtatgaaaggagcgatgacggagaaaaatgaggagaaaagggaaaagagacgacgagaaagcgatggaaagagaggatttgcccaagggcaaggcgcaaactgtgcatgatggcgtggagagagaagggaagagcaggttttagagacagaaaagggaggaggaacgtgtggtgcagcaccccttaagctgaaaagctcatcccaaacatcgcaataaaactgcgcctccccccgccttttgtgcctcgggggagagagggagggaaaagtaaaatccagctgtaaatgtagacaaggaatatgatgaataaggggaggaggaggaggatgaagtgtcgaattcggcacaaaaggacgccttccgatgataaggaaagtaatgaagcgagaagagaactcgtcgcaaaggcaaggcaattaaaccaaggggagaacaccaccaaagtgcgaggaagtacaacagaaagacggaaggcaattggagaaaccgaaccaacagcagaatgtgcagggaatcgaattcctcaaattcctacgacccccgccccatttcacccaccgaaaaccgcgtggactgtctgaattgtttatcagcaaccaaacagtgttaagttgtgcactgtatttgcaatggtcgtgtcagccgaaaaagtgtcctcgtgttcaaaacagtgatggctattagaaaattaacctcttacttcctccgggaatttttacatggttgaatttcagtaaaaaagattataattttattgagagaaatacatactgtcaacaagtatctaatgagagagagagaggttgtgagacaaaatcaaaaatgagttcagccaaagtccagaagaaaaatgtgataatgggagattaaaatggcagaaaatagatagacttgaaccagaattataacaacaaataaagaccaaaatgaatttaaaagcaaaacgagcaaacaaaggaatagacgaaatattcatataagttaatgttttgaattatttaaaacaattgcctataacaatacgtagtgactcgaataggtctgttgggttcagtcggtcaaagatcaaattccaattccgccaattactgtcccttctcgacatcgttggcactgtcgaaaatcggcaccaatcgttcacgcatccaaaacattgccaagacgaaagcacttgtgatggccaagaacagaaaagagaggccgaaaattttgaccgttgagaattctttttgctccactttctgacaattggcccggttgggaatgaacaacggattggtgtccccgagcggaggcgaacattcgcgaaagtcacgacgatggcgcaaaacagaagagtcgtgggaatcaagcgacttgaaactcctccggaaattatgcatttcttttggcgagagaagtcgaatgctaaaaaatgtaagtacaaagcaaaatacaaacaaatattatttatattattgtattacaaacctctcggaaggctcgtcatcgtcatcactgccttgctcattgggggcaggagtcgatcttggagtcggttttggactgttctaaaacaacaaaaataaacattccgtaataagggggggggggggaggagggttcgtcttggtggtatcaataagcatcagacgggaaataatgtcagtagaaatattctctaagcccacatataaccaagcctaaccttacggcaaaaaagatggttgggccgcccttttggacacgtatcaaataagggaatgcaaacgagtttttggtaaacattagaaaaatacagcataaaaccgggttctagtcggttttacgcgtcccatgacattttacgcgtcccatca

SEQ ID NO: 18193 - DNA, 786 bp, Heterodera glycines
  unsure (1)..(786): unsure at all n locations
ttgcatnngcctgcannggtctgaattantttgatttgggccaaagcccaattttgaagtaactttaatttaaattatgtgagtgtacaattaaatattgaatttgtaatacacaaaagaagggaaaataaaacgattaaaaagtccaaataaaattggaaattgattgaataataatgatcagattatcattggacggcccaaaaaaaggatacggtatgagtgattacggtataagtgattagaaattcgatttgggaagaaaaaaaaataatgccatttgatctgggccctgacccaattttggaataattatttttggaaaatcgcccaaaatcgaggagaaaattaaatgtgaaaaaaataaaataaaaatagtgatcagaaatgtgaaaaaatgtaattatttctgattaaaaatgcatgaaaataaattgggtataatgaatgcataaattaacacattttaggccaaagcccatttaaggaagggactttaactcaataggcaaattaaattgaattattagcaatgcgcgcaaactgatcagaaatttttgagggagataatttcaaactgggccataacccaaaataaatcttctaagtgttcgatcaggcacttttctgatcagttttaaattatactgtttttagtgcataaatattaaaaaatgtaaaaacatatttaaaaatattttanatcataaagccgcaaaaatgcataaattaaatgggatgggcaaagggcgctgaagaaatggtggcgtcgcttcgcaggagaaa

SEQ ID NO: 18194 - DNA, 2571 bp, Heterodera glycines
  unsure (1)..(2571): unsure at all n locations
ttcttagcctccggtattcattgtttagggccttggccctttctcggggtttttaaatcgcgtttttcattggaccgccattgagtgcggaatttctttttctctttccatttgccggcatcggcattcttttttttttctttgccggcatcgatattctctttttttcttatttgccggcatcggcattctcttttttttttttttttttattatttgccggcatcggcattcttttcattgccggcttcgaccggaattgatttttcgtntggccagcatacggccaaaattacattttcttatttagaccggcatcagccatcacttttttcttttttttgtgtttgttggccggcatcggccggaatattgagctcagggccaaagccctccccggggtgatcagcaccctttcaattccactccgaaccaaatccttgggcccaggatttggtcagaaccatccggtgctaccagttagagttgtgccggtcccacggatcccctcttgtccatcccgggccgtagcccgcgcgctgagctctccctgggctggagaagggggacgagatcgatggatggggaattgaataggatatagctgatcgtcgcgactcaactgcctgggaaggaattcccgggcttataaggaggggccccgggagtgaacgggaggggcggcccttccctccgattggctgatcccttttacgccttacaaatcttttcgattcgctcatacagacctaaaggaaccggtgctaggtcgatgcgaaaaaactcaatgattgataaattagtgtcaatgaattaaataatacgattaatattttaaatttctatttaaaaagaatgatataaaattcaccattttatataatagcttatattttttaagattcatttttaaccatgtcgaatttgcttgttaggtaaattcatataattattatactcatcaattacatagaagtattttttaaattaatagataaaatgtttacgaaaagaataatattttatttacttcgaggttattcttgtaccaggaagattagaaagaataaatcgtggtttatatgacttgcttaaggcctaattaaaaatctaaaagtatttaattttggacatagtaattaaaaaatggcaaaaaatttggaacgcttcacgaatttgcgtgtcatccttgcgcaggggccatgctaatcttctctgtattgttccaattttagtatatgtccatttggaatgaacgaaagcggcgggagggacatttcttatatatgatggaagaaaattttgagtaaaattagtgatgggttataaaagcagttaggcactttctccctctgctgccttcttttcgtttactctttttctttgtccaatactatctctttgcatctctcatttctttgctttctttctctcatggtctcttccctctttttgccatcctgtgcatcatcatctctaactgctgctgttgttctttctaaggaaaagaaaaagacagcgtgcaaaagagtgcataatattttagccaagtgacagacgagcatgggaaggaaatagcacacgtatcattgggaaaagagacgagtagtcattgggagagagtacccattcatccctttttctgtccatctctccccatctttccaccccgtctccccctcatccttgcatcgttcctttccttggacttgctgccgctctttaaacttacctggctggggagttcctgcgatcaccaaggcagggctcctgtggcgaggctccaccattgcactttcggtcggggctgacccgcagggcggtcccgaactgggataggcccacagctaaatttttgagtgcggggacggcgttcgcgcctcccctttaaaagcattgctctgcttcgttcatttgttgttttgtggctttttcaattctccgagttaaattccataatcatgagttcgaagctcaaaattgtcgcaagtttccataactataaaatgcatttttgatgcaaagtctgttcacaattcaggctaaaaaaacatcaaattccatccttgataggttcttgaacatttatgaaatattagcagttttttgtttagtttatttgcaaattaatgtaaagatttttcacggtgcataaaatgcgaaatttcacacaagagaaaaatgctattttcgagtttgacgtttttgctatttttctgactgaatcgatttaaaaaattgctagaatttgtttcttttttgtccaaaaattctttcgaatccgccatttactgaccgaggggaagcgttgctaatggtttagatttttgcctatttttttccctgagcttctcgtggcctgaaacgcacgaaaaacaagttttgcgttttgcccaaatattaacaaaataatacagccataagaatcgacccaatatttctgaaaaaataatgaatgatctggatcagggatggcacggaattccgagttccaaaatctgttaacaaatcgcattaaaaatcactaaaaatttctctgcggcgcctataggcaccgccgaacccctcccc

SEQ ID NO: 18195 - DNA, 1270 bp, Heterodera glycines
atctctccactcttctctctctatctatctttctctctctctctaagtttcttcctgttttctctcactttctctgcttctctcatctgtctttatcaccagattctctctgcctttctcattttttaaaattctctcccccccccccccaccagtgccatttccctttccattccgttccaattccatgccaatcatgtcacacacacattgacctttctgtcatccgcttcacctcatcctcctcttccaccttgtcatccttcaacacgttcttcccccttcctccccattcttccaccccaattcttccgtttccccctcccccctccgttcccatgctttgcctttgcccccctattacgccaattcagcgcccaattttccgctggatgaattttgtgcagcacacagatgagaaagatggaggaggagggaggcgctggatgaaaggaaaacgaaacgacgacaaatggaagaaatggggcgggggatggcaattaatggccaaaatgaggggggcggggggagacgacggcgctgcgttttgaagaagccgacaaagggcggaaggcggcgggagggaggggagggggaagaatgaacaaaatagggggaagaaattgatggaagaacggagaaagaaaggatgtgatgatcggaatgggaaaacggatgaggaagacggaggaaaatgatgtgattggaagagaaccagcaacagatggggaatgatgatgaggaagaggaaaagcattatgaggaggaaaaggaaaagccttgcttgggcgggcttaataatggcgcccaccgaatttgtacggtgccgggtcggttcgatgccattatcaataactttataaaattgagaccatatctatgtcctgcaaaatttgaaaaatcccaaaagttatggccaaaaaacctcaagaattatccttttcgggactttttcggcgccccgaaagaatttagaatatttcaaaatttggtggcgccgaactgagcccaacccatttgggaatacatgtactggtttctaagaaaaatactactggtctcaaaacatcatcccaaatgtttgtcttattttgaataatttcctgaaaagcataattttgcatttttgaacaagtaaatatttaaatttaaaaagctttataaaaaaaaaattcataaaaattattttcttttttcgcgtttagtttttctaatttgaattatatttaaaagatttacagtatgacagaaaatatttgaacagcaaaaa

SEQ ID NO: 18196 - DNA, 1316 bp, Heterodera glycines
  unsure (1)..(1316): unsure at all n locations
tttttaagttattttttttttgcaacttgatatattttttaattttacatattagcaatgccattaggcaactgtcaagactctcggggtttaattatgtggaactaatcatttttgtgacaggatcatgcccaagttttttaatgccaggaagatgccaaaaatgcatatgaaatccctggcaccgcaatgccatcgtttgttggcacacctctgactgtggccagcatgaacacgtgctcacgacggtcgaaccgtttgattgccgtgcgcagtgccgtctcgtacactttgtacatggacaaacacttttctaattcgtcggcatttaactgaaatttaaatttttaaatttttaaaattttttaggcctacgggaggtgactcgaacaagcacaggttggcccccttgaagatcagaaatcgccgttcccatctctgtttggcattctcaaagtgtccgtccggcatgcgctcctccacccaactgatgtaactgatctggccaaaaatttactataatataaaatattaaataaataaataattcaattttaactaaatggaataattttttaataaaaatttaaaattaataaaaataattatttttcgaatttatttcagtttacttgttaaaaatattgtattaatgtatttaaatactaaatgaaataaattttttgaaataaattttaaattaataaaaaagattttttataattagggttgtaaattatatggactaaaaaacgcgaaatatggacattaaatatggactaaaaaagcccgaaatatggactaaaaaggccaaaaatggccaaatatggaccaaaatatggataaaaaatgccaaaatatatgttgtaaacccccaaaaatcccaaaaaaggtgtgcatatttaatatttgcttaaataaacctaaaaagtacaataaacaaccaaaaaatggggtttaaaacttaaaaatgcatattttttattgttgttcgttgtatcaaaaacacctccaagtttgccaaatttcgaaaaaattctcattaaaaaaaaaagaaatgttcgcaaaaaaatgacgaaaatatttattgaaaatgccaaaatgacgacgaaaactcaaatttttcgtgttttgtggggtgtaatttttaaaaatttccaaaaagttgatctttaggggtgtatttttcgtttttttttcatttttcttgtgaaaatttccaaaaaatggccaaaatatggactaaaaacccaaaaatgtcgaaatattgatttattcccgnaaaacccccanaaatatggatttatatggactaa

SEQ ID NO: 18197 - DNA, 1621 bp, Heterodera glycines
atttggttaaatcccgccctcccctattgttttctttttgggtgaaaaaaaattatggacctaaataaaaaccacaattttagaaaatttctttggattattaaaaatctacccctccccctctgtagacctatgacattttttagtgcgggaaatcaagaaatatgaaattgagcgaaaaatgatttttattactatttttctcgtttttatatcatagaatttctagtaaaaatattttcatttccggtgtaaatcgttttattgtcaattttagacagttcacgccctcagctaagctaagcgctatatttatttttgttgtttaaattgtttaaataaataataatattatgctcgagaaaacaaagaaaagcgattaaaatgtaaagagagccccggccactaaaaaacccagcctaatggtattctcaggtatgcttcgcatcactgcgcggatgcggtgccgtttttttgttatccccaattaaacggtatcaacggaaattatcgattgtgaattacaacaattctaattcacacaattatgaattgaaaaataaataatttaggaaattttttaaattccttctccccttctgttttctgttgtcctacggtaatttatagtgcgggaaataaggagtatgaaagtttttataaagaaaatgctttaacgtggtagatttgctaactaaattatacattaattaaaagtcgaaacgaaggatattatttaaaattaatggaaatgaacgattaaaatcaacatcacatatgtaagaatattgtcctctcacccaaaggaaactgtattggttttattaatcgattaaatcagttgtaattttttagggtgtaaaaattaaaaggaaattctctgaaaagattagaagaaattaaaaaataattgaaaaataaaatgtgaaaaattatgacaatttcgcccataatcttgtaacctgttcaaagaaatcgtatccgaattaatctaaaaatactaaaggatcaaatgaaatttgtcaaagttttattaaaaaatgattagaaaaattacaattttttggaaaatcaaaagatttatcgtctgtattttagcgaaaattatttaaagttaaaaatattgttatatatttagaagtatattaacggaaagggaaagaaaagcaaaatgaataaaagcaaaaatgttgaaaaaaatttgaaatctgaggatggaaaaaaatctattactaattggtaaaaaccacattgaaatttttagtaaaaaaacaaatgaaaaaaacggaaattgaaaaattttttatctccgttttaaatcgggcgaaaaataaaatagagttgcggtaaaaataatatggaaattgaaatgaaaataagaaatgataactaatttaagttacaacaaaaaacaattttcttttgtattcaaacctcaaaattggcgcgttaaatggacctaattatttccacaaatcttggccgtgctaactcagctggcaatttaaatggattgatgactcaaaatgggtatttttttgcatctaaaaacaccacgtgactgggtcaggtgactcttatttcacaataagcatgggactcagcgggcactccgtgcgag

SEQ ID NO: 18198 - DNA, 1475 bp, Heterodera glycines
  unsure (1)..(1475): unsure at all n locations
agtcatatagtgcatttgatctgtgccatgagcagatctcatgcattatacgactttacagtacacccgtgnggacaggtaaaaaataataattaaaaaaattatatgtttttaaggattaaccctatgggattattgtgaaattaaagaattggggagaattaacgttaaaaagtcggataatttttgtaagttaaacaaaataatattttaacaacaaaatttttaggtttattttatgcattaattttgagccagttttaccaactgatcgatacgaaagaagatgtgtcaatttctagggaccaattcaaaaaaataattaaaaatgagaaaagacaaagggaagcagtgaaaaaactaataatcgatgcaaaaatttctatggatgagaaaaattatggtcttaaacatttacaaatagttcaggattattgggtatgtcaaaataaaattatggacgaatacctttagaatatttttaatgaataaatttaggactcaaaatttctggggaaattccggattgttgcattttcaagagatgttggtttgcgaccgatttttaaggggaatggaccccgtaaatataatatttgcgtttttcacgaaaataatcattgggatggtctgtttatatagttttttagcaatcaaaaatattttaaggaataaaaagtatcggccagttttttcctataaaaaataaatattgtataagctgtgaaaaaacctatcaaagagaagaaaaatacagcctggaatgtgaagaaagatgtaaaaaatgctgtcgaataggtaatagttatgaaaaaaatcaaaattgaagaaaaatttaggctttgggttcccgtgccccccggaaagaaaaacattaaattgcgaaaattgtaacaggactttttttaatgagaattgctttgagcatcacaaaaataaaatatgcatactttatcaaaaatgtacgaaatgtcaaggagaatttagaactgacacagaacatagctgcggtaggttttaaacatataaattaaaatatttataataatttagatcaaaaacactgtagaaaatgtcacttaattcatgacccgaaaaaactgtgctttatgcaaaaattgaaaattaaaaaaatggctccatataggattgttgcttatgatttggagtgcacggtaattaaaatgctggtcaataaataatatatttagtttagacgaatacaattttggatgaaaattcacggagaaaagaaacgattcataagccgaattttgttagcgtgagatttacttgttcattatgcgacggagaaacaaaaaattgtgaaatttgtgggaccggaccgcggcatttaaaatggtgtagcaaggatggagttaagccgctaaactgttttattaaatggattattaattttgaaaaatatgatacttatgcatacgcacattttagcggtaagaattaaaaaataa

SEQ ID NO: 18199 - DNA, 1968 bp, Heterodera glycines
  unsure (1)..(1968): unsure at all n locations
cccatggaatttttgattttaattttccgtctaaattagtccgtgatgatgacattccgtgccgatatttcgcacgcgcgggacgaggccaaaatggcacagtgggaaatgcgggtgtacgaattttcgcgccagctcaacaattcgttgattgaggtaattaactgcctagttaattaattgcgggtaattagttaacagtgtaattattcccaattaattaatacacattacgacatttttaaaaatgtgtagttacattaggcgctcgtgttgggcagcgaaattgtcgaccgcgagatggccaaagaggcggaacggacggtcccatactttgtgatgggtacggttttggcaccgtttccccaggcattttgggcctcggacatttctttcgcccgtgcccaaaatcggttaaaaatgtcacattttttaattcgagtcaacaacaatcagcaagaaattaattagctgacagaaaaatgtccggggacaaaatgttgggtaaccaaacgattttggcactgcattttatagacaaattgggaaattagggtccataaaagccccccccctctccaccttttccaccgtggtttttgctttacaaattgtttttttaaagttttttgcggctttttcgggtcttttaagagacaattcctcattttttcaaatggtgacttttttttattattttcaaattttatttttttaaattaattttttccaatattgcttttgttgctgttacaggctttttcttcatgttcggctttgcggtttacacgctgctttgcggcgcgttcatctacggcgtcatggactgggctaaaccactgctcgcccttgngatatcaaaaaatgtttgcctgacatgagcaatttcaattaattaaaaacgagttttaaaattactccattttttgccagcatttgcctttgccccgtgctgtccgtcacttccacctttggcgtctgcacaattgcgggccatcgcacaaactcgttgatgctgataatgccttttttgtgtgtgccttttttagattttttgcattttaatttaaaaattgcccttttttttgcagaatttgtggaattggtgtcaatgatgtgagtttctaaaatttgagttacacggaatttgggatttcatttgggattgacattcggggacccaataatgcttttccccctagggcaaaatcggtgtaaattttcaactaatttcacgacaaatttgcataaaaatatgcaaattttcttaaaaattgtgccaaaatttgattgttttggcccaacaatcgctctttccacccccgaaaatttgtagaaagctgaaaatttttagttttttaactgaaaaaatgccaaagtttacgggaggaagtaatgtttcaattatttattactaaaaaaaattgtgagttttataaatcgtcaacattttccaggcctttctgatggcccattcctggaatcggttggcccatcaaaaattggcagcccccaaacggattggacttgtctttgaagaggtcggcccttccatcaccatcaccacggtgcggactcgttcgactatatttttgatttcgtttattgaaattgaatactttccaaaaataaaacaaaacttttgttcgattatattttttagttgccgtatttcttaaaatagagcgccggagggtttattcaagcccctttagtgggggataaagctgggtggggggagggctcaatttttcanacccctggggctctatttcacggngactctanatttagggggtcggctctattttaggaaatatgctatttaaaatttactcatttttcatttttgcagttgactaacgtggtcaccttcgccatcggcgccttaacaccaaccccgggtttgtcttgtgattgtccgccgaagagaagaaggatgtgcgaggaataattttttgccgggga

SEQ ID NO: 18200 - DNA, 1750 bp, Heterodera glycines
agtaatgaagaactgtttggtgttcataataatattgaaaaaaatatattaattaaaaattagcattatttattaaaataaatcgcttagctaaaaatattatggcattaattaaatctaaatgtaattataaaaaaaaataattaatacaaaaatcggggctaaatatgaaattacaaaatagtttaatatcatttttaaacactaattcgcacggaaaacaaaagcactcaccgcgtcatgaaactaaaagaaaaaattatcaaaaagttggagcgattggctatgattttattaaacctaaagaaatatttaaaacaaatagttgacaaaatatttttcatgttcaataaacttttataatttgaataaataaaaattgatcaaatttataaattcttataaggaaaaaaaagtaaaactcctgtttggaacatgagtgataaaaaaagaacaattattattttataaactgaatacggtaaatgaaaatttagaagaaaatttataaaatgcaaatacaaaatttagtataattaattcaaatcgaaaattttaatttttttattaacaaaggtaaaagaatttcatttcttaaactttaacgtattttcataaatttttgggttgatcttaagagtgtattttattattgcatttttgttaataattttggataaaacgcaaacataggtcatgtcataattaatagggcttctttttttaggcaaatccctaaaatttttgcgcacttaatacgcacagataagcacgaaaaacgcgttttccgctttgtttggggtgtctacgatgacttttataatgcctatttttgcctattttggactttttgtgttaatgcatatttgcctatttttgtgcctatttcgccatttttgcgccttttacaggatttttggaaaaatctttaattaaatgcaataaaaataacaaatacacccctaagaatcgacctgaaaaaattcagaaaatacacccttaagaattgaaaaaaatttcacaaaaattcgtcccaaaaattaaaatttttttttcataaaaatttttggttaaaattttttttttaccgaaaacaacattaaaacaattgaaatataggcaaaataagttgcttgattaattttttcgtgttttctacctaaaaagcgttaataaaattttttttgcctattttagtgcctattcgatgatttttttgcctatttaatgcctattttgcgattttttaatgcctttttaggtgcctatttcgcgattctttgtgcctaaaaaccgcatccctaataattagtgaaacgaattaaattaattatttttttaattaaattaaattcttgaaaagttggcgttccgttggccgcaaatgcccgatttacagcaggccgaaagtgtcagaaatggcctttaagaaaccggccgtaaatgtcgtttttggctgggcccacaaatgtaggaacaccaaaaaaaaaatgaaagaaatctcaaattgtctagcaattttttaaggagggggttggggtgatacttttgaaaatttttcggaattttattttctgttcatcacaggcaaacagttcaccatcctctggctgcgcgagtatgccgagtattttgagttggcacgtcagtacgactttgactacttcgcctccgacaacagcaccgaggacaccgacacggtggaggcggcaccgcggtccgagaccgggctggatgtatgtgccagcat

SEQ ID NO: 18201 - DNA, 2199 bp, Heterodera glycines
  unsure (1)..(2199): unsure at all n locations
acagatttnncaatgaaaaatcattatttttaccaaaaaaatcaattcttaccagtgaatttttactcccgtttttgggtaaaaatttccgggagcaggagcgggatcggagtttcaaatttccgggacgggagtcccgaacgggattcccgtaaaaatcccgctcccgttaaaaatcccgttcaccgaaaaaagcgggagtcgggagcggaactcccgtaaaatcccgcgggagtcccgatcccgccggactctacaaaatagcagagaaatttgaagaatatgaaaggacagaatgccaaaaatatcgcaaatatttggacattttgtacgaatatttgtacagagaatacgtcggaattccaacagtgaagcccaaatttgggtttaaaaatgaaattgaaattgaaggaccaataatttatgcgataaattgcctgaaaagaatttcggatttttattgctggaataaaagtgtaggcaaattagatggtttgttcatttttaattttgaaccaaaattattgaatcatgggcgattaaattatgaattaaaattgaaaaatgaacaaaaaatgccaattaatgaaatgattttacaattacacagcgaataaatgccaaacaaatgaaaatttagacggaataattcgacaaaatttaacaacaatttggaagaaatgcttaaaaaatcggaagaaaggacaaaagatgcttatttttggagtttctataaaataatcagggccaacattttttaaatttgggttcgaaattcaatgattcagatcattgggtgatcttttattaaataaattattattttttttaaataaaatcaaatttaacttgagcacgctttattttcggaatttgtgaagagattatcgacaaattttgagaatttttttaagctaattgaaggaatcgataaatttgaaaacgtgaaaaagcatttggtgcaacaatatgtggaacttcttggcgttgtgtatttgtgcgaaagaattggcaatgttactatattttgaatcaattaaatgcatatgaattggaacaatgccaaaagtatcgcaaatatttgcacattttctactaatatttattccgattatatgccgaaggtttgtttttgagttaacatttcttttttctatttaaatggttttttcgcagattttgccgaaaaataccaaaatttttcattttatgccagttttttaagaaaattagccggcgttgccgatagtcccctccgggaaaaactgagttttttgtacgatttgataacagattttgcaccaaataatgccattaattaataaaaaaaatatttgtataaatttcaaaaaattgtaaaaatttgaatgtttttttctaatgccgatttccaaggacatcttggaaatcggcactctttcaattttccaagaccctatgcccaaatccaaggacgtccttggatgccaaggacgatggcagccctggatttattcaattaatgcttgcttgctaattgattaagctaaaaatggtgaggaatcgaaacaattggcaacggtgaagccaatattttttcacgtaacaacaaaaatttgtttaattgatgttgtcagaaaattgaatgaaatttcaaaatgtttatgggaaaaatatcaaagcaaatctttgaatatcgatgctattcgcaatatcaatttggaaaatgaggaggaattaaattttgaaattaaagaggataaagatgggattaacgaaaatgtacaaaagaggagaaaacaaattaattttgaaaggaccaacggacaacggaaaacttcggaaagaatttgagaaaaaaatggaaaaattatttgaaaatgcaaaaaaaaatgccaaagatgaaaaggcctaaattggaaaaagcaaaagcaaatgcggcaaatgatgaagaaaaagtaaatctagaaaaaagaatttaatcgcaaattttgcatttttaattcgtcgccatttttataaaaattaattttattaaatcctatctcttttgattatctatcaatccttttcatttttctctattaaaatgcttagcgcccggaaaatgtgtcagtggaaaaagtaagtggaaaatgcgtcattaaaatttattgtcacaaaaacagttccttgcgttttagaggtaactctgaccacgatcaggtaacccatttctgc

SEQ ID NO: 18202 - DNA, 1832 bp, Heterodera glycines
  unsure (1)..(1832): unsure at all n locations
taagaaaaaatctttttaagggtttttgaaaaattttcccttgaaattttttcctcggcggagttatgtctcgacggagtttcgcggcgggagttttgtcctgcttcgctatggatggggtcatgcaaaataaaaaataaatgtcttttcaaaaacaattttttctacagattactaataatacgtaattttatgatgttttcctaaaaatgtgagaatcaagcacgggcaggtcttcccccccccctgaaacattttttaagaaaattcaaaaaaattttcatttttttccatcagatgcctttgcgtggatcagcccagcggacattggcaaccgaatttgttgatcgaatcggcggcggcgcttgtgttattgccaatgatccgccgttgccattggcacaggcgtcacccgtaatgccgtggcttcacattgcacacatttctcgggacatcagcgacgcaatggccttcatgcatggcaaagggtttttccaccgtgcgctgaccagcatgctcaactcgtcctcaaattgacacttctatcgccacgtttcaatgcactggttgacaaacatttccattgaattacaaattgaatgccgtaagtttcaagcttttaatcacttgtgtaaattaaattttatttatgatatgcaaaatgaaaatttctgctttatcattttctgtttttttgtttttgttagattatttaacattcaaaaatgttttcaaggggctaatgatgtttttgatattcaatgcataaaattgaccaaagaatcatatatatataaaagcagaaatttttattgctcttttaagtcatcgaaaaattttcagagttcgataaattttaaattataccttgctatatatagaaatagttttttctgtcccaaatctgaggatagaataggtaatgcaatatagcagaggtacgctataagttctttcatagaatacttaagaacaattaaactgccaatttaaaaaatatatattgtgcaaattcttggcgtgcttaattgttctgtccttaagtcacctttttgattcacatttctttatggttcgctgactggcccttcggggcatgtgtcgcaccaaagcggttcgctgactggcccttcggggcatgtgtcgcaccaaagcggttcgctgactggccctttgggcatgtgtcgcaccaaagcggttcgctgactggcccttcggggcatgtgtcgcaccaaagcggttcgctgactggccctttgggcatgtgtcgcaccaaagcggttcgctgactggcccttcggggcatgtgtcgcaccaaagcggttcgctgactggccctttgggcatgtgtcgcaccaaagcggttcgctgactggcccttcggggcatgtgtcgcaccaaagcggttcgctgactggccctttgggcatgtgtcgcaccaaagcggttcgctgactggcccttcggggcatgtgtcgcaccaaagcggttcgctgactggccctttgggcatgtgtcgcaccaaagaggttcgctgactggcccttcggggcatgtgtcgcaccaaatcggttcgctgactggcccttcggggcatatgtcgcaccaaagcggttcgctgactggcccttcggggcatgtgtcgcaccaaagcggttcgctgactggccctttgggcatgtgtcgcacaaagcggttcgctgactggccctttgngcatgtgtcgcactanagcggttcgctgactggccctttgngcatgtgtcgcaccccaagcggtcgctgactggccctttgggcatgtgtcgcaccaaaagaaggtcgctgactgg

SEQ ID NO: 18203 - DNA, 1237 bp, Heterodera glycines
tgatgagcgggtaccaccagcaggaacgattcgggcaacgtacgcaaattcggtcattttgggacgcagaagggacaccgtgtgccatgcgtccgactccgtccgagaatatgaacgtgaagttaggatttggttcgaggaaaaagatgttatcgacgggtattaaaaacaccgttttttacatttttttatttttgtttttatttgcatattttattttggaaagtgtaaaaattttatttttaaaaatataaaattgcccattcatccgttattctaaaaaatagtgattttaactattttagtgacgaactcgccaaaatagtgatttctagtgaacgataatgacattagaatcgaaaatttttaatgaatgcagaaatgcgttttttgagctcctttcttcaaaacaattgagcaaaaaatttagttaaaacctaaaattcacacccctagttattaattgccttggtatgagtcgagggttctagtcggttttatgcgtcccataacagattatgcgtcccatgaatgaccatcctcagtttcttaggccataacttttttcttactcggtcattacctatattcttggtattaaacaaaagcctaaggtctatagaagcttttgcataactttatttttagctaaaggcaacagacaaaaaaattatactcgggaaagttgaatttcgttttttttcattgtaattaaaaagcgcccatataaagtcaggggtgccaaagtgagaatctaaaacggagatgaaacgctaatagtaaaggaggaagcagaagatgcttacgatcaaaaaattgtgttcatgtcttaagaagctttgaatgagttgacgccattaaagttaaggcacttttttataataaatggctaagcgatcacagaaatgagaaatgctgaacaatggcacattcagaaggacattgaaaagaattcaattcattactttgtatttaaattgtcattgtcactgaatgtgccacgaagtcaataacaaaatgatggttgacacaaaaagaaggcaagcatattgtataaacataaaaagttgttctttgctgggatgcgttcacgtcgtcggcatgtcgttgccggaactgtccatctgtggcggttcggctgactgcggtgctgcggccgcgtccgtctgatttttcgattgggccattctcgcatattcgtcacatccactaatttctccaacagccaacagcaccg

SEQ ID NO: 18204 - DNA, 405 bp, Heterodera glycines
cctaaaaataggaatttttgacttcatccccaccccccccccccccgaagccaagggtctggctacgcccttgacttttactggtcccataaaaaagaataaggcggttttttatgattcttcatccactcgggggttattagggccgctgatcatgaatatgacaccaattttttaccaattcctaacccggacccgaattcgaacaataaattgaatgtcaattttgaaatttggatttattttcggaaacggcttaaatgacggaaataaacttaaagcatcattcctgtaataaaaaatcacataccgtattttctttaattaaggccccgggggaattatttttcaacctcttcagaaagggggacataattgaagacagggcctttaatggagacgggg

SEQ ID NO: 18205 - DNA, 3325 bp, Heterodera glycines
  unsure (1)..(3325): unsure at all n locations
ttaaaaatttaagcaattaacgagagaaaaccccttttaattaacatatgtttttataaaataaaataaaaatttaaacaactcaacaaaagagaataatgaaactgacaacaaaaattaaaagaaacagattctttaaaatgtcgtgccattggttgcgtgatgtcgtgaaagatttcccgttaatgagaccaattagtgagtcgcatgaaaaaatgttaagcaatttaaaatttacctaaatattttgttttattaggaaaaaacccgtgaaattggactcatttctttttaatgataaacaaatataaaaacgaacattttaatgaattacaaagatttttgtaaaatttaagcaaaaagcttgcacttttattttatggagtttggatacagattagcaaagaagattttataattggtaattaaaacaaatttatcgaaaaaataaataatatttcattgaagacagattatgagcatgaacattaattaaaatgattaatcttgttttttcataaatcaactaatttcacctgttaatataatctacttaattaatcaattaattcatgccttcctctattccgtttaatttgccaataatttcaggatttgtttgactaattaatggtttggagcaactacatttggctgtggttcgacttgattttggtttgaaattccttttaaaacaaatgagaactccgcttggaatgcctgtcgatattccgtactaaaatataattaaaaaattcaatttaattttcaaaaatgccacctcgtaaaatataaaattggtccgttcgatgcggcgccaatgttcaaaggaattgcggcaattaattgcaggaaccaagcagtgatcggagacgaaattgtcggattgatcagaacggtgtagaacaaatagatacaatagccgccaaaattgacactgacaatgcaaataagtgcccgaaaagcgcgatgattgatctgaccagctgatggcaaacctaatgtgacgaaaatttgatcattagagaatgaatttttgcgggttttaattttttttttaaaatttatttcgtatgcaatatgtaaacgtatccataaaatcgtgaattttaattttattaatgctttttttttgtttttagtcatagatttaattgtttgaataaacttttttagaatttgaatacaatgaaatttttttcctatattttaactaattaattcatatttaaaatttttgtccatataaatcagtccccaattaattagagagcagcacgggattgcggggtcccagtccgaaatcccgcattttttaatagttgcgagtttagtcgcgcaagatcccatcccgcaaaaattttgagtactaatctctgtatttttaggaagttgcgggattttgcggataaatcaccccgggacccggtcccgcaaaatttagggatctgcaaattagaactttccgatcttcactattaattattaataaataaaattctgtaaatttgaaataaaaaattacctgctgttttcttttttatcacaaatccaacaatcaaataaacaacacttgtcattaaaacggtacaaaaccgtatgattttttcataagaatagccctaattagacaaaatatttgaattagcgcgttcagcaattgtcccagtgatcatctgatcaccgtacaatgacatattttggtaaaaaatatagcacaaatttaagccgaccatacaacaaaaaattgttaccatagacaaatagagtcggattttccgtgtgttctgcctgtattctgatttaattaattaattaaaattaatttgctttttaattttcgctatttttccgctatgccgcagccccctataaatggcatgattcaaacaaagaaaagcacgtttctagcataattttaggcactaattaagaatcgggcgccaaaactgcaaaaactctatgattttagctatgaatcatgaaatttttagaggggggggggggtgcggcataacggaaaataccctttttttcttacatttcatcaaaaattattccgatcaatcgatcaatgccagtgaaaaacattgtcgggtaaattccaccttaattttatcaaaataatatatataattttttgatttttgaaattatttgccaagtccaaacgctgagacaaaaatcagttttgtggccaaacgaaattcgatgaaattttggccagaaaatgcggtgtacacaaacaaaaaatgtccttgttggtgaagcaattcaaaaagagagcaaagcgccaacaggtaattaacggtgccgcgaagtgccctaacaaaaaagtaatttaaaatttcaataattattaattaggctgtgaattttagtcacgaaattacgaaaagtcattaaaaacgattaaaaagtcagaaaataatgcaaaaaagttataaaaaattaaaggcactaaaagtcataaaaagcgctaaaaaggcacaaaaaatacagaaaaaatgttctcaaaaaattagcaaaaagtaaccattaagcaaagtataaaatatttttaactcattttaagcacatttaaagtcagtaaaaaaaagttatttgacataaattcacagccctaattactataaataaatttaagaatttccacaatactttgtcctaatggttacataaatgacagaaaaattcaaaatgattccaaacagagcaataattccaacaattgaagcgcatccaatgagtgaccagctgggattttcatttttgaatgtcaaataaaactaaatatttattaaaagtttaaaaatatattgaccatttaccgtattgttaattgttgtgtcagtcattagagccaattatttaatttaataataaatttttttttaaattaaataaaatatgaaaagctgtctctccttttacttctgtcgatgctaataagcagaatgaatgaagcaaagtgaaataatgggctaggcttattttttgtttgttattttttgttttttaccttttaattaaatttttgtcataacgaaaaacacaaattggtacctatttactttatcaaattccggcatgtcacctgcagctacttactaatcaaagataattanattttttggcgagtttattacatatttagcgcattttttcactttagtttttgtcgctttgatttttcattccctttttttgacattttaataccaaaagcacttaattaatctgcccaatttcacatgcccaactaaataaatgaatatggaagaatttttttctttttagggnaaatanactgattttcataaac

SEQ ID NO: 18206 - DNA, 2481 bp, Heterodera glycines
  unsure (1)..(2481): unsure at all n locations
cggatgatcaccgccgcagccgcggcggccgctgcagcgggcaccgcttccgggcggcaacggtgtcgcgacggacagtaacaacaacaatggcaccggaagtgccacaacaacaacaacgagggcatggcaaatggaggcggaggaggagcagtgaactttggcaccaccgcgccaacatcgacacctacagtaaacccatcctcaaacaacagcaacagtacaccgtccccgattccaattgcaccataatttgatcaattgatcatttacaataatgcttaattacattgttgttcaaaatatgtttttttaaattgttactgattgtatttatttatatactgtgtgtaatggatgtacagtatatctgatctgttatattgtaagtctatggaggaaacattgatgacatacacacacacacgtaccagcaggggtggaagttcagagacccgagaaaatttgggcggtccgaacccaaaaatgtcggaattccgcgccatcccttacacgtaaatattaaagatgggagccgatatggatttccggtacttttggggtcggcaggcacaccaacaattctctagtttttttgatgcccagaaattccaattcccctgaaaaattttttttttgttttttcgcatttgctttcttccctgatacacaaaatcctattttaatttcatcatcatcatcattatcgtcgtcgtcatttaaatttatttttgccttcatttgatgcgcttttctcttccctttgcgcaccaccgccacatttttgtatttatttgtcatcatatggttgtcatactgtatcatcgtcacattcatttcatattcacttttgtgtttcctttccaaatccgtcgtcacagcagaaaaagttcaaccacacacagccaaaaacaacaaaaagcaattaattaattaattaattacctactaattatgcatgcaattcattcacttattaatttctctcttctccccaattttttcgattaaaaattgctcctatttttctccaatcacttttaatcaaatgttcaattattaatttttcattaaatttgctgcaattccaaagcatatgtttacctttaaaagtttacttttaccattttaaagtacgaattaaaaatgtgcccttttcaaatgttaattaattaattgtgcaaagtcaaaacaagatacatatttttaattatggttatactttttttaaaatcaacattgggaaggataaaagtgtttagggtcttgtattttggagtcccactcgggttggatcccgtgcctcggttgaggaatccagaatttcgtgcatatggatgtcaaaattatttgaaaagggatattaaattaacttgtgttgtcgtgcatatagcgcagtcggtagcgctgtccttgcaagtaaattacatagaagttcgaatccgctcgaacgcacgcaaatgtttttaaattttttccatcgcattttcttgtacttattttaaacatttaagtttttctttataaaattatatttatttttatggaaattccttccagcattgacaaaattgaaatttaattgacaccgcaccgggtgtgaactttcataaccccacctttaatcaaagacgtacggttgactccgtcactgacaaatgagccattgacccttaaaattttaacaggaaaaattgtacaagaaacaattaattaaatacaatttttttttttcgttacactattaaatatcattgaaaagggatattaaattagcttaatctgtcgtgcaaaatagcgcagtcggtagcgctttagcagtcaattaaatatatgaaagttcgagtccgcgcgaacgcacggctaattttttaaaattttttccatcgcattttcttgtacttattttaaacatttaagttttactttataaaataatatttaaattccttccagcattggcaaaatttaaatttaaattgaaagattttttattggtccctaagaatttgatgggtttccgtgtgaaatttttcaataaattggcaaaatttggaaacttttttggaaatttaaacaaacaattttcttaacaaattgcattaaaattattttaaaagaatttcatgggagcttaacggcatcatcggaccctttgcttatcatttttttttgaaaacttgcccccaaaaaggcagaaatagtcgtttaaaaaatgtttttgactactgacgacacattggttcaaaaccnnngncnnngncccgcacacgcgcccaatataataatccatctccaattatgaataaaatgaatgctctattttaactgcccttcaaaaaatataataatccatctccaattatgaataaaaatgatttttgagccaaaatctgggatcaggatcatttgaaactcgggaattacacatccgggagcggggtttcttcgaacaaaaatcattaaaaaattggaccaaaa

SEQ ID NO: 18207 - DNA, 3572 bp, Heterodera glycines
  unsure (1)..(3572): unsure at all n locations
atttatcaagatttgataggctgcggactgagctaaaatntaaaaaaattgactcaattatcgtntacagacaaaatccagtacttttaaagttttgcctacatctcaaatttaattttgtttaataaattaataaaagggcatacaacagaaagcataatttttttttgtgagtgtggctcagattgtggtgatatatatagccaaaatagtggtgcctaaattcatccctttgctcacctctttttaaactatcaagtgttggaacaaaaatctgttaacagatcttctaatagaattaaatctattttaataaaaaaaagttgcatcgtaattttaaatttccgtgccctatattcgaattttcaaattttagacagccattttttctattttgcatttgaaaattcggtgtgtccacaatatgtgacggagaaattttggaagccatttcgagcgttaactgtgccggttgtgttgcaccgctctgttctcgaaggtgaaggggcactgaattgtgcaaatttttaaaaaaagctaaaatctaatgataaaacaaaaattgtcctcgaaattattaagtaagtaattgaacaaagtctaatatttaaaaaatttatctaataattataattaaaatatataaatattcttaaaacttattttcttaatagaataaaaattgcctattaattatgacaattaaaaaaatattttttttgaaaaaattttctttatttttgctttaggccttgatgtccccccaaatgctttcatcgcagccgatgactttgacacagtggaagaattggctgattacttaacgaaacttcgaaatgacaccgaacgatatttaaagtaaaaatgaaaatttataaaaatgctaattacctaatttaaaagccaaatttttagattttttgaatggacaaaaacttaccaaaagaatcatttcgccattatgcattcgccgttttgcaaattgtgtgaattcgcccaccgacagtatgacgaagacctgaaaagtacggtggattttagcaaacattggacgacgagagactgtataaaaggatttgtgcagaaatttttaatcgaaaagaaacgataaaatgttttttttaataaattttattttaattttctctaaatcaaaatcatttaatcagtacacatatggtaattgacaaaaaaatgttcaaaacataggaaaatttcgcaatgagcgcaccggattaaaacaacattggcacattcattcttttggcattgatgtggctgcttttttgcatcaaaacaatatttaactgggtgcgtaaaaattgggaaggagtcattcccataaaatccagcttttcgccatgcgaaatttatccaagcattaaaccggcttgcttggagctggttgtgtatcagtgattgcaatttaatgatattgtcccgagtgtgcaaatttaaatcaatttcacaaacaataacaaattgagtgactttccttgtaaattctttccacatactaaatttaaactttttatctgcattttcatcaaatgcgagatcttcaacgatttcaatttcttcttcatttttaaggcatcgttcaatgattgaaataaaattattagccatttcaatctcgacaggcgaaatagttgaatcattaaaattattcgaaaaatgtttttgaagtaaagaaataatattttggggattaacttgcattataattaaattatctaaatatgtaattttattaaaaacaataaaaaaaatgtttgcgtaggggggactcgaactttccattacaaaaatgaaatcgtgacacacaaccaccctgccaaccggtcgcttgttgcttctccttttaaatttaatataatataattattaaatatttaaagcctcatatctcggcacagaagcttattccgcagctagaaaaaaaatttggcaatacaacccaggggtggtctacccacctacaaagtttcatttggaagttccaccataacccgaacactctcctttgttagggacctcaaatttcataaagtttgaacaacaagtatcaaatcggatatttgaggttaatagtaataaatggacaaaaattgcctctttttggtggcccctaatttggaaaataataaattttaatttttaggcgaagagccaaaaaaagccttaggattttgcgcccacctttgattttttcctttctgaatagggcctggccttgggaagtgataactgacttttatttgaaccattttatcgcgaggaatagccatagctaatcatttcagaaaatggcaaatgcaatgaatgcggaggaacggagaagacccggaaaattaggagcgattgggcaacagtttgatgaaaaacccagttccggaagcagttttttcccgtaatttaaaataaacccacgcctctcaatggtgtgaatttgagaatatgacaccgcaatgatgacaattttgaaaaaaaggatttagcggagcaatgagggggaggagagagtattattggcccacttttgccgtgggccgacgccgttcccccgcccctaatgacaaacacttgggcgacgtccaaacataacacaatcaacacataaaatacaattcattttgttcctccgcccgcccttttttcgttccaaatccgggggaataaagacgggggaagggcacaaaatgtgggacgatggccctccaaatttgtgtgctatatggcggcggccgtccctgctcccaccaccgcttttgctgctgatgagatgagcccccccccccccccccccccgctccattctcattgggctttttctctgtcacgggagaaaggggcactcattcactcttcacaccgcccccaaaaaagtgatgagccggccaccatttttagctccttttttcttgaaagccaaagggcggaggagaagaaaattttggcaattaaatgccaaagtgcttttgcattagagaaaagggagtgagacaattagtgaaagtttgagaaaaggcacaaaatgccctacttattttactgttgttgttgtttttggatttagaaaatttgtggctttttaaaaataaatatttgacttcaaatagccaatacgcttggcgcgttacgccgtcgaattaaattaagcgatttttctattctttggacaaacaaagtgtgacgaaagtgactataatcgtgatgaaatgtcattagaaaagggcttactattgggtgacattcgtcacttttgtatctcacgcccaatgacggaaactcagtttataaatgacacatatagcaccagcgaaagggagagaaaagttcgtgaatcaccaatgaatgtgtgaatgtggtgctaagaagcgatcacttatccgtacaaagagttggaggaggagagaattaatgcagaaaaattggaaggcaaaagttactattaaaagggagcgaaacgagcgaaagccaacactttggccacaaagtaggaataatttctcaccttgttcctttacaaagtataaatattgagtgaaaagatcaaagagacacgcctg

SEQ ID NO: 18208 - DNA, 1264 bp, Heterodera glycines
  unsure (1)..(1264): unsure at all n locations
gggtcatggcatttttaaaagggtacgacaaaacgcgttagtaccccattttcttttcccccacggctctttcacctgaaatccgacatgaattgtctgctccaacgtcctctgaatgtaaacgcgcaatgtccgctgttcgggtgccaattccgcgcggcatttggcgccgttgtcgctgtagccggagggcaattgggtgattagcatcatcaaagtgcgcagcgagtacagacaggcggtgatgaacagcgtacgacggatgaccaacacgcggtgtttgtgcaggacgaaaaggaaaatcagcgacgcggaggaaagactgacctggcaaaaaaggggagggataattaattttaaataaattaaaataattatcaattaaattcaattataaaatcaacaaatggattaaaacaatttataagcattaaataataatgaaaataataaaataatcaacaaagcaaaaattggacagaattaaaataatacaaaaataaatctaaattaaaaaataaataattaaaataaataattaaataattataaaataaatttattttaaaaataattaaaattaattaccaattaaaattaattgtaaaagcaataaatggcaatggtcgaatggaaataaataaaataagtcaaacaaaacttaaactggtgaattaataaaaaaaaaataaaattttattaattagattcattaatatgtaattaaatagtttaaaataaatctgaaatgtcagtcagatttaaattgaattcaaattttaattgctttgccaaccataaaatcgcccacggggtgtgcccacggctgttcatcaatgaaagtgaacacaatgtccggaagaggtgatctgaaaacattcaaagctttttgagaagcaaatgccaaaggatcattcggcccatttaattagtttaaaaaagccgcgatcgataatctcggaaaaattccctcaaaaagaggacaaatttccccgcttaaaaagtaataattttgtggttatttaattgatgaaattggaataatcgagcaaaaactaaccgaccgatgaagtcatgcacataggaaagagctgcccaattggagagagcagcaacgacgagaaaaaggaggacgaaagagagtttccgaggttcaagcggaatatttgtctgttggaccatgngaaagggaggaggagagagaagaagaggaagaagaagcagctgaacggacggacggataaagccaaagatcggacaaatg

SEQ ID NO: 18209 - DNA, 1742 bp, Heterodera glycines
  unsure (1)..(1742): unsure at all n locations
tcctgcttttcaagtttttccctcccctcccctctcgatcatccattccattcaatatcattatcatcccgtttcctcgatcagcgtttttggtcgacaacgcgggcgttacactgccctccagcgtcaagtgcaagctgactaatgacccggatggaggggggggggggggtggaggggaagggatggcttttcgtttggtcagtattttgctgtgctcatattagcctggtgagatcaacgctgaacaagcctctgatcagtgttgatcaattctcttggtcacttttcctccatttctctgctcactctgtcccccgttgacttgggaatgctttcggctttctttcgccgtttcgcctccactggtccaactccaactttgcttctgctgctcgtctccgtctttttcctctgctttttccgtgttttaattgctgaaaaaggtcacattttacccaatgaaaaatgcctgtataatttctgagcattggccaaaatgaaaatgatgatcaaggcaatggcaatggaagggacggcacaattcgccggagaagcacaggggaggagcagcaacagacgacgggggacgaagcattggacaccgcaccggttaagagggggggggggggaggaggcgaaggggacacggcacggagtcagaggccgacgattattttgatcattaaaatgggcccaattaatcttaatctagggggttctttgcttaaattgtattgtccgttggtcactttgcccaattatcggagcaattcaaatgatcatcccaacattttgtttatacgctggtctcacattatgggtcaagcttaattttagacaaaatgactcaaaagccaatttacgaaatttgcgcaattttgcgtgttaattcaaaattaatactgattggtgcttttttttgtagagatagtacgccaaagtgagagaaattacaacgaaaaagaaacgatgagataatactaagcttttctctgcacagtggagttgaccaatttgccaacccattagcccataataaattttgtgatcaattatttttttaatcaaaatctgatcttttgaaattccctccccattcgattaaactctgatgaaacttcataatcaaatttcgctttttagcctgatgtggcggtcccgcaattttcgtcggaagaggacggacaaacgaaaatttcggacgaatttttgcgccaactcagcgcccagcaggtggccgaccgccgggcgcgcctccaccggggcggcaacaatttgcggaggcccgtcgattttgaagaggcgctcaaaatgacagtgccataccaaacgaagaaaaaactgtgacgacagattcggacggtgtttgatcagtttattattactcgtgcaaaaaggacaaaagacacgcgagggaacaatgagtgatctgtccgattcaacgaaattgggaaaaaagtgaatggacggagtgattcgaattgaaaaagagggggaaagatcgggccaagcgatcggatattggggaaaagtacaaaagcggggagaaatcggacgggaatttagagtgatcagaattgacactgattgagtcaagtgattggaacaaattaaattaggatgggctaagtaattaaggaatagggggtaatttgttcaaaagtaaataatttgncctggtgattagaattaagctctataagatggtaaaaaagaacgggccattggttggaatagaa

SEQ ID NO: 18210 - DNA, 2215 bp, Heterodera glycines
ttcggtgagtcaaccaattaattaattagctaattactgttttgattagccaacggatgaccgatactaaacagcatcataatctctctccgtttaaaggtgcgcgaccgtcgcacaggtcgctgcgtgtgctgcgtggacaacgaccggttggcacgccttggcgaactgctcaacaccgagttccattccgtcgtattcgcccatccgatcgaattcgatgttcacgaacgcgagttgaaactgctggtgtggcgccgattcacgcaaatgttggtgaccatgtgggcggacagagaacggaatgagcagcagcaaagggaggagaagcaatgagcagaagcggagcaaatggcccataattaatattggttaatgaccaaattaataaatgacaaaggaccgatcagtcgcccccgcccctattccccgacctattagcatttaattgtccatttcaatccccgacatattattattatttgcatatacattatttatagaataataatttaatatatatagaattggttctttttctcaaattcccaccttgtgctggtttggtcgtccgtgtgcgtggctctgatcaggacaaggttcagtccggccaatgccatcatcaaatcctcccggctggccggtgatccgttctgatgttcaaagttttgctgcacaaaagccgcatttattaatgatgcgtttgcattgtggttaattgcctcgtaagtgttgacggaaatggtaaagggctgtcccggcacgaactgcgcctgttggtcggtcggtttgtgcacgagtgttaccccattgcccttaatggacgcaattaacgcattgatcgatcggcactgatcgacgtatggcttgctgcctacttggatcacgacaagcggctcttcccgaatttgggcttgcccatcgtattgcaactgaacagtgaaatcgcccccgtaggcggtcacctgcaattaattagttgtttacattgataggctcaaaattatttactttattcccgaggaaacgtttcggcaatttccaatagagcgtttgtgaaaagtgcggctccgtgtgcgtcagatagccgtacttttcgaattcgaactgaacaccgggctgagtctgtccctgcacatttgacagttcaacgccttgtgcatcgtcggcgaagaagagcttttgctgaagagagtaattaagcaaaaacaattaatttattatttaattaattaatggttttaaaaaaactgaaaaatgttatcagcaaaatgaggaaaaagcaaacaaaagtgattcgggtgaatttgtgaagtgattaatggatgaaagaggtgaaggaaagcgactcatttaacaataagcatttaggcagcactaattggaaatcgctaatttaattgttttttttattttaaaacataatttaaaataattataaaaccaaaaatgttaaaaaagtgagaaaggcggagggaaatggccaaaaaccaaacaaaaagtaaacttattccgattagcaagcaacttacacaagcaatgtcctgaaaaggaagaagcgaaagcgttaaataagcccaaaagttaaatgaactaaaaataaacgaaagaaaaacgaaaagaaaattgggaaagaaataaaattgtaattaattaactaaagaaaagcttttgaggaaattcaaaatgttttttttggggggggggggggaattataaattgtaattgtccacctttgtgcggaacaatccgctcgaatagcattggtcggtgacaccgaaacagaaacacttcagacacccctggggggcgcggtcgctcaaatggtaagcgcccggcacacattgggcacatgtcgggccggaagtaagcggctgaaagccgtgggaattttcaatcaaaatcaattatggaaatttaattattgcgaatgcatttttggaattttcccacggcatactttgcattggcattgcccccgcgcgtcgctgtacgggctgtacgcgccctgtgaattgcaagccaatcgttgtggctctggcggtggtggcggcggaggttggggcgtctgcggcgcgggaatggacacaatgcgcacgatgcagtcgggagtggccaacacgcggcccttgacattgatgggctcgcaggtgtacgcgccttggcccattggtctgatgggcgggggagcaattagggtaattaaggcaataa

SEQ ID NO: 18211 - DNA, 2997 bp, Heterodera glycines
  unsure (1)..(2997): unsure at all n locations
tggaattcaatcnccatttgacacatgacnaatntaatcagctccatgccccgacgtatcgaatcagttattaaatcgcgaggtggaccgacgaaatattgagttatatgaaattatattttgtgttgttaaacatatgaccagtgctttttgaggataaaaaattttgagatcaaatattatttgctacagaaaacggaatgtgatcatttatatatctttggatagcccattaaatggtgtatcaaaaacataaaaaaaggaaatcgatatttgttttatctaagcatttttgcaaacatttattttaaaattctttcattttattggtgttgttaaacatatgaccatgactgtatattaaagtcaagaaatatttaaaaaaattacaatcacattttaattcaaaaagttaatatagtaaatttctaatttttaaatgaaataaaaataagaaaatttaataatttttgatttaatgtttcaaaattttaaataattcaacaaaaattccgatatttgaggatttatgctttttatggcccattaggaattttggtgttttttttttttgggttttcactcaaaaatgactagaattttgtttctggtccaaaatttgttaacaaatcactttgaaattcaaattttgactcggcggcgtttttcggcaccgttcgctcgtcaattatttatttttacaaatattttggtttctataaataaattcaaaaatttcgacttttttgcaatttatgtataacttttttttagaaattatctaatcgcgaagcaatatttaaaaagaaacttctaaacatttccgttatgccgccccccccccccataaaagatgatcccgacaaaggaaagcacttttctagagtattttcaggccataaccaagaatctagcgtcaaaactacaaaaggctattctcattatcctataattttcatcatatgatttgatttgtgatttttctctttaaaatacggaaagttgaaaagcatcatgcggcttgaatgttgaaattttccgagacttgaccgaaagctgaggccatggcctcaaaaataaaccgagaaattaaattcgtctttagaatagagaattgaacccgaaaacatttactgccccccgctccaaaaaacaaataaatggttaaaaaagaataatttactgttctattttttaaatatatagtttcggattttggcacgaaacactaaattttagggggttgagaggaaaatatttttggaaaattggaagaaaatgaaacattttttagaaataataaattgatcatttcttttaaattaaattttttttcttttcaaaatatagccggaaatcaaaaaaaaatttctaggtgcaaaatcgtaaaattgtaacaaaatttccgaaattccggatgagctatcggcacctccggccctccctcacccaaaaaaatttgggaaaatagtgcggcaagaaaaattgaaaataaaccaaaatttcaaaataagttgatttcgagtatttttttttgattgaattaaatcttgagaatgattcaaaaatgttaaaatttttcatacatttaaaaaatttcgtgtttcgtttgtaagtctcggtcttcagaaattcctagtttatggagtctcgattctcggcggccagataaataaatattttattcggaaagaatcaccaaaatttatgagcaaaaatgagcaccaaaaatgatcagtcaatttgtccattcactaaactccaaaacagccgatcatttctcatggagaataattggtattaatgtagtttgggtccacattttcggttaaattttttaaaatttttttggtttagtcttgaaaacaagtatatactcggtgtcgctgaccacgaatccggaatccatttcgaccaatttgggatgccggacccgaattcgaacaaaaaatcgaaaattcaaattttcgagtttttagtttttaggttgataggcctaaatgcattaaaatgaacttaaatgtcacataaagtgctaaaaaagattttttagacaattttttgggctaaatgtgcaagattcgaaaaatttgaattttcgactttttgttcgaattcaagatcccgaattggtaatagtggtcagcgacctcgaaaatccacgtgtgcttgttttccggacttttaaaccaaaaaaaatttaaaaaattttaccaaaactgtggacccaaactacattagtaccgaataattcacttccgcactgttcgacgcccttttccgtcgccgctttggtccgcctctaatggggacaatggcctaaattaagtgcagttttaattcgataaaaaaactttggcaatagcaaatcaaattgaaaacattttgagttttcaataaaaatggtaatctgctgaggaaaaggccatctttttttgaaaaaatattcaattttttaatgaaagaaaccgagtttttttttgttaaaactctggttcgcgttttaaatgggaaaaaagaatgtcgaaacctttgtcagaccctgaaaatgccaaagtctattctttctcgaaaattttagaaaaaaatttttttccttcaaaaattgaaccaaaattggtgggagatttataaaaaaaacttgtaaatttatacaatattgttttttttaattcttttctgtctttttttactaaactcttttttctcacccaatgcgtttttcgtcgccacttaaattaatgatgactctgttcaaattgcttgaatttccgtcctcccactgaaccgccgtcgtctccccaattgggcatcgcttcagcagccaataaggacaatctaaaggggcagctcatttcctctcccgtcattttacccaccccgaattaaaaaaaagtaaactcggaattttattaaaaaaaatgagaaaattttttataaaaattttaaaaaaatgaactttactagctttttttcaaaagaatctgacgaattacc

SEQ ID NO: 18212 - DNA, 1399 bp, Heterodera glycines
  unsure (1)..(1399): unsure at all n locations
tttattgtaaaagggctcttgtgtttttgtatttggcttttaattttaatgccattcccttttttcttttttgcaattgtccctttgttcgctgcaggcggacgtgccctcctgctccaccgccgccggcatcagtgacgaggcggaccgggacgagctgctctatcggccgggctatttgtgtgccgagacggaggtcaaatacgtgaagatggcgcgcgctttccgcaccttttccctggatcaccaccaaacgcatcacaacgctggagaaagcgacacgacaggcgatttgtgctgacgacgcattactacgctgcatccgtggagacgcattgtggaggaaaacattgtgatggattaacagatgcaagggtgaacgtgaggagagacatacaaatgacttcatttccggcacagncaatgggcaacgacgagcatctgacctcggatagctctttcatgtcggccgacgatgtgaagaagttcgggaagggcatcaaaacgtacgggaaagcctttaacaaaatcaaccgggatttgcttccgcaccaccggcgcgagcaattggtggccttttattatttgtggaagaaaagccgagacgcaactcggccgaagccgctgagcaatgcgatgaagcgcaaccaagctgcactgatcgctgcgggcactgcggcggcacgtcgcatcaaaaatggaaatggcgacaacggaacggtcgcgacgggagccgcggcgacgacgccggacggtgtgactggggcagcaaattgtggaggaacaattacaggaggggcgacgtggcggtcggaaatgagcaacggcggattggacggcatcgaaaggtgcggagagagacatggcaattggaaaatatttgagttatgaggagcattcagtttaaatgccatctcgctggatgatctcatggattatgaaagtgcctcagaaattgaagccgaacaaatggaaagtgccgaacgcatgccgagccgtgcttgccaccattgttttggcataagtgcgtcattcttcgttttattcaatcggctaaatatttttctaacagctattttaattgcgcttccttcagagagcaaagattggcatcatgtgggacacgagaggctgctgatgtgcactgattgccggcttttctacaagaaatacggacaattgaggccggtggatcgaccggtaaaatttgaaaaagaacggttcggcctttaggggtgccgttttaaatatcccagttatcatgccttcaaaatcgactgcctttttagcgcactgtgcctccctgtctcctgtcgaatacgccggcccgtacgaccaccaccagcccanacggtgacgacganaacgaggaaccgtcggcacaaacattgcccgtcaa

SEQ ID NO: 18213 - DNA, 1533 bp, Heterodera glycines
  unsure (1)..(1533): unsure at all n locations
cagcagcaacaacagcaatcgttgctgaacggacagcacccgaacccagtgggggcagggcgcagtaatggccaaatgcagcagcaacaacaacaaccacatgctgggcacgtgttaatggcataagtgcgcggcagtcggcggcgcaaccatcaacccagcaacaaccggtgagagaagaaagaaagaccgaatgtgataaggtttttgttttcagcaccnagccaaaggnaacaactgcaccccgcagcaacagaaccatccagcagatgctgcaacaacaacanccagtcacagcaacagaacgcggcggtggccgcactgatgggccaattgttcggggcggcgacattccaacagcagcagcagcaacaggtggggaaaggggggggatagcccatttatcttgtaattaatcctcattaggcggctatatttgccctccagcaacgtgcggctgctccgcccgctgttcagcaacaacaggcacctccaccagcccatcccccgtcggcactgccgtcaaacactgctcagcacattggcaccgcacaaaacggaccgaacgtggctcaacaacagcagcaggcgatgatgcttttggagatggccgcagcggcggcaatgaacccgcagcaattgatggcactgatggccgggagcggactcgatgcgaggatacttgacgaattaagaggtcgagcgggaaacgaaacatattacacacaaattcaatttgacgcttaaggacatctgctaaaccagcagcagcaacaacagctgacagcgaatgctgctgcagcacagcaccaacaacagcagcaagcattggcagcacagcagcagcaagctgtacatcagcagcagcagcaaatgttggcaatgttagcaacttcaggtgctttgacgcctgaacatctacaaatggctgtcattggccaacaacagcaggtgacataatcaaactaaaacacggcacagtgtgtaaaatggacattcatttcacagaattctgctcctgcgcttcatatgccgtcaacttcgtcgtcggtacagcagcagcagcagcaccaaatgcaacagcaaatgcagcagcaaatggcactggccgcaattcagcaacaacagcaagcaatggcaacgcagcagcaataccaccaccacaaccatcagcagcagcaacagtttgtacagatccagcaacagatggaaatgctgcgaaggatgcagcaacaccaccaagaacaacagcagcagcaacggtgacacggcgggaggacaaacgccgtgccgacgacgacggccaaccaccgttgtgtttgttgtgtgccgctgtgctccgcaactccccattgccttcccttccctttgattttgcattctgatcactgattgatctccgctgatcgcctgtcagtccgtcccgtgcacttccccccccccctccgctcatcagatttttcattttcatccttttgtttgctgattgttgttactataatgaaaaactgagaaccatatactggtattttg

SEQ ID NO: 18214 - DNA, 2461 bp, Heterodera glycines
  unsure (1)..(2461): unsure at all n locations
cgccgtcatcactttcttttcgcttctttctcatcgtcctctttttatcttctcaaaatggaattgtccactcataaacttttgttgcttcctccgtccctttctctcctcgtcgttttctttttccccaattgaccttttccacgccaattcaaattccgcttttccaaaatcgtaaaattcgcgttccatccgataaactttatgctgcttgaatttgcgcaatgtttcaatggttggcggaaacttccgaagagtgtgccgcaaagattttctgtcctcttaaaaatttaatgtttaattgcgctaatgaggcagagaatccgggaataataaataattgtcgtcctgagacaccttacttttctatgtctcaaaatcataaaacatttttggcattttttgtcgaaatttaagtagatttttattggccataattttcaatagagagcgtgtacgggcccgggcccgtatacggatttttacgggcccgtaacccgtatttttttcggctgatacgggtttttacgggttaagggtttttagcccgtaacccgtatcgatgtcaaacccgtaacccttatccgtacaattacgatacgggttttacgggttattttattgggttgtttaataaatgaatagaaagtggaagaggaagagaaagggaagagtttttaagtggtcatattaaaagttagagtttaatgaaaaaattaattgaattccatgccaaaaaatccattgccatcttataaaggtttttggcgcgtagcgccctctagagacagtgtttaatagcgaagctatttcaattttaaaaataaatttaaatcagttactttcagtgcccgtaggaaaaaataattcacatttaaccataaattttcgtatcttacaaattaacggaataattaacaatggaattggtccaacaaatattatgagggaatatgtaaaaaaagacaccatttagcaagcggaaatgttcgccggcgccaaggaaaaaggcgggcaaaagttgctccagcaaaaggacggtctcttcgatgcgttccgtcagcccaaccaacagaaaatggtccagcaaattgcgctttgccaactgaagggcctgcgcattgccgggaatgcttaaaaagggaagaaaagtgaggaaatcagaaaaaaagaagtcgtaaagcctaccaattaaacaattagttagtgagtgacaaataatggaaaagggggggggggtaaattccgtattttgggtgaaaaagcccaaagttcagcatttttcaataatgtaaaaaataaaaatcaaattttgtgccttgtaaaaacctaattgctcattttttgagaaaacccattagaaaattttgcttttggacaatacggcgataatttcgaaaatagaaaggatttagggccggagaaaaagcctaattttgtgaatttattaaaaattgttctagttttagtgggtggattcattcaatggcggccaaatggttgggttttctttgacctgcagaaatgggcagtgccgcaaaagtacggaatttgtagccaaattgcgcttgggtcgcactctctgccgccgcgccgaaagcattcgtcaaaagtctaagtgaacccttcaaaatttggccaattcaactcactaaatgttcacaatttacctcgttgttccccgctttgcttctgcgaagtccgacccgaaaattgtcgccgtagcgaagaaaataaaaataagagacaaagcgatcgaagggctcgcgaagcaaattaatccaaatgggagggggaaggccgaatctgaaaataatgaggaatgcagaaaatatggggaaaatgtattaatgagaagggacccaaaggcgaggacggacagaggcaatttgcataaattagtgattttggacattggccgacctctcaaaatcaaagaaagcgaagtgtccgtggaggaaaagcggatgcatccgttgccaatttgtgaggttttggaccagccgcgcctggtcaattgcgttcatttggtaacggtttttcgtcaagttcaaatgggcgacatggaaaccattgacagtactcaaatcgtaggcaattgcatttacaaatgttgtcgaacccgttttgggtatctgaacagaaaggaaaagcgaaacataacgaaatttagaaatttaaatcctctggtaaatccaaaataacaaaatacaagcgtttaactgtttttaatgttttaacgcttgaaaaacttactctgttgtaaaaaaggagaagcggtcgaagagaaagtccattcggacctttgttttgtggggaaagaaaaaaccaaaggaaaacccaggcaaaaaggaaaaatatggcgacgaataacgcatttttgcgtagaattttcatgtgtgagcgaacattcaacaaatcattccgtgacttttatattcaaaaaaanattttttttaaa

SEQ ID NO: 18215 - DNA, 1134 bp, Heterodera glycines
tttatggaaaatttttgaaaaatttgaaaaaaaaaatttttttttttaattcttgaaatttcttattgcgttaaatggttaaatgaggcccaaatttgagcacggtacattattgattgtatattactgccacattagattctgttttttattttattttttcacgcaggtatttgttagagctgtccacgctccattacattgcggtgtatcgccacttgcccagcagattagctgctgccgcatttgtgatcgccgcggcatgccgcccgacgacggtgccaacgacgacgaccacgaccaatacgcctttgggcgaaacggcggctcaacagaaacaaaatgtgccaccaccgtcggtggctgaggtgcgtgtgctgtatgtgtgccgtgccatatgtactagggatggcacggaatattccgattcagaaatttttttaggccatggatttatgattttaagaaaaattttagggcctcggaaacgccaaatcctctgcatgtgcacaaattttttatgcctatagcacaaaaaaaaaattctaaccagataagggaattcttggaatatttttttgctaatcgttccgatttttgcgctatttaaaaataaataaattttttcttttttttttactcatttattttaagaggccttcccccccccccccctccaaaaaatggtatttgatgggttgtgctgtcaaaaatgaccccttttatttccaaatactggcacataaatatttattttggaataaatttttaaaatgaaaacattttaatttttctgacctcctccccccccccttctttttccctcaagcaaaagcgtaaaaatggggacgaaaatgcgaccgaattggcaccaccatcagcatcattttcatcatcggcaacagcagaggaacaacaaaaggagaaggaggggccgtttaagacatgggagccaatggagcagaaaacgcaaattttgcgcaaggaactgactgagcctggtgggtaccaatttaaaattgacaatttttattcttatttaatacggcattttttaaattaaagcgcactcccttaaataatgcatgctcctttttgaaggggttgaaaaattgcggactgcgctggaaaaat

SEQ ID NO: 18216 - DNA, 1968 bp, Heterodera glycines
  unsure (1)..(1968): unsure at all n locations
tttatgaaagaaaattaatttntgttttaatattttcagatagtcgccggagacacactaaaaaaaagttttttaatgaatcttattgtaaaaaattgtagaaaatttttcattttgaaaaaattagtaatttaccaaaatttaaaaaattcagacgtaatgaaccgacggagataaaattgaaatggcaaaatttcaaaaaaaaaaaattaattcaatgtttcagtcaaaacgctgctcaaaatccatcggcaagcatgcgcgtccgcgccggacaccaagctgaaggcggtgcgcaagaagttcagtgacgcgcgccatgaccgcgtggcgcgcatggaattgccgagcgcattcgctagtcaaattgtgtgattgaatgactgattaattgactgatcgatttaaaaaaatcaaacttttaaagaacgcattccatttttgtttttcattcaaaatctcatctcaattttcttgtatccatccatccgactgacttacacaacatataatttattaattgtcgagaagcgcccgagagtagttgatttgattggccttctttcaggcgcccgtaaccaagaaaatgggtcgcatttttttttaaaatttgaaaaaccaaatttatttacaaattgcgtgaaattttgcaaaaaaccaaaattcccataaattttgcaaaaatataaatgaaacttttaaaaaaaagtgaaattttcgcccatggcgccgcgccaaaatttttgttaaaattacacacaaaaaaattttcggagctgaaggacaacaaaaaattttctggttgcgggtccgccttctcccgccgatatatattttttctattgtacaagaaataagtgtatttttgcttgcctctccatctctctctatgttttccgttcgttttgcccatttattgtttttcatcaattcacctgcttttccattctctatcctatgaatccatgcatcagcccccgcccccctacagaaattacaaaataatgacgtttggatgactcactcctcagcaaagaattaaaataaataccgtattttaaaaaatttatgaagaaaaaatagagaaaatttgggttggccccacacagaaaacggtgcggaagtgcccgtaaggaaacagtgttcccaaagattttcaccgtgctggccttgttggtcaataaaaaaaatttgtgatttcaaagaatttttcgataatttattttctcaaaatttagctttgtaaattctaaaaataaaaaaatggaaaaaattgtgctatctcggatttattcttcaaaaaaagcatgaaatgaatgaatggcttttgagaaaagaaaagcacacgcgcataaaacaatttcaattaatgaaacaaaggcgtcaaatgtgtaaaaaaacaataaaaataaattgtgaaagcaattaggcgataataatgaattgattgatcagtttagttgctttgcaccatcattgattagtcttaaaaaatcacatcatatttcattcaaacatctttcttttttggttcatcacccatcgattaattaattaattgcaattcattgcatctgacggccctccacaaacgcttgctttggcacaatgacgtcactctgaccggcggtgcccgaacgggagcgcattccctgccgaacaacacctgcagcacaagacacaaaagttaaaaaaaagtgtcaacattatgtcaggcaaaaaaaataaaataaataataacgaaaaaaataccgtcacttgagagaagaattggaccttacgtgtgaaaaatcggtggtaatactagtttgccccccccccatttttcgaaaatttttttttgttttcaaaagtcatgaaaaatgttttaggaggctttcggggtcgttgattacgaatccggcatccattttggccaattccaaatcccggacccgaacaagaagtcgaaaattcaaattttcgaat

SEQ ID NO: 18217 - DNA, 1479 bp, Heterodera glycines
tgcaggtcaaaaaatgggtagtgggctcaaatattacattgttttgtgcctccctccgatgattttgccctctcctttgaatccgatcgtctcaatttacattatacgccattatcgcaaattgtttgtttatcagaggcgtcaagcgatgcggtaaaattttttagaaatgacggcatttttcttagttatccttgattaattagaccaattcatcctgctgtcctcaaatacaaaatatgcttttataaataaggtgagaaattttatttttccttttttgaataaatttttaatgccttttttaaattccaaaaagcgttgaaatcgaaaagctttttaatcgtaaaaatagataataaatatttaaacaattaattaccagaattctttattaaaatgcatgaaactttttgtttagttttatggatttcaaaataagaagtaccagtggcggttttctagtgccaccggtagtggtgttaacctggtaaaatttgcattggtaagaatgggaattcgagcataaattattcatgaaaatttggaaatggtgaaggaatattttcataaaggtcggacatttacgccaattttaaaacaattcttttctttttttaattgtttattcttaggaaagcaatgggcgtgtggtggcacaacaaaagtatatattgccactacaatttttgacaaattagcgtaagaatttcaaaaaaatatacagtaaaacaaattacacatttttctttgccaaaaatattatatttgatgattgatttatttgtataagcaaataaaacttaaaaaatggtataaatctgaaacaaaaaaaaaatacagtagaaagtgtacataagcaatccaaatgctcatctccaatgttttttcgaatttctaaattaaaaaatttttattatacttaattaaaccgtcttaaatttaaatttctgcaatttttcttaatttacttgtgaattggttgaatttataatggttccataattgattaatttctgtgttagctaatatccattatttaattataacgccgaaaattttgtcgttttagctccatttagtaatagattttggcaaaaaatgccaaattttgaggatttttggtcaaattttcgaataatttaagaaagagtggtccttagccgagacagacgccgccataaaatttgctaaaaaaaaaatttgaagaaaatgaccgagcctttctaaaaatttctataattataaaaaaacataaaaattaagtaacaatttaaacgatttgccttttgcctattggcgtttcgttgcgtttgaccaatcattaagcattagccaatttgggccccgccccgttccttttttttgtgtcccccgccctggccaacattcttctgttcgggagagggattggcttagccaatcccccaatctctctcccctctcccgctaatatcccgagaccgaactgggagtccc

SEQ ID NO: 18218 - DNA, 1196 bp, Heterodera glycines
aattaatgtaaaaaataaatccatgacttataaggccccattatatatacagtggcgaacaccagccatattatgaccgaacaactgatggttgaatgggtggacaaagttctttgtcctgctcttcgcccaaaccaaaaatcgcttttgatcgttgacagttggactgggtggaacaattttcatccaaaaaatggaattgaataaatttagaatttggaaagaatttaccagaaaaattacgcagtttgttttgtttatgacataaatatcaatctccacgaccgcgacaacattataaaattacattcattaatacacaatcagctccaagcaaaaaatttaacaattggcttaattttgcatggcgcaaatcagggttttatggtgatgagcctttcccagaattcattcacccagtaaaatattgttttgaagtgcccaaacacaatgacgaatgccaaaaattaaattgtgacaataacattttgctccgttgtgctttttgtgaaatttttttatgctttaaacatttttttaatgattatcatttatgtgaaaacgaataaatttaaaaataatctaaatgggaatcaattttcctcggccaaataatttgcataaagtgcaaaaataaatgggaaaaaatatttacataatgaaaggtcagaaaattgaaattggaaaaataagggtaataaaagtgtgaaattcccacccgggaaacattcttttggcaatcgacagtttttcaaaatggattatggcaaaggctatttccgatcagaaggcagagactattgcaaattcatttgtcgagatggtgatgatccaaatttggaacaggaggaggcagaagaaagtgaagaagaaggattcgagattgtcttgagtaaagagaaagaaatgagtggggaaatgattggcaaaagatgagggtcccgaaattttctttgaaaacagaaattttgtgttcgaaaatgacgagacaccaactttgttggcagttatattgaacggtaaaatggttacggtgtgtacagggtggttaaatcccaccataattccccttacttcatcggtccctgagaaccaagtagaagaaaattgggaaatttatagtaatgaagacggtgagagatatgtgacgtgttggatttttggagagaattttgaaatgtacattagcagtatta

SEQ ID NO: 18219 - DNA, 2551 bp, Heterodera glycines
tcattggtgccaaagacaaatggcaagctgcggttgtcctttgactacaaagtcacggtaaatccttggttggatatacataaataccaacttccacgccccgaggagctgttcagcatcttgaatggaggcgaaaaattcacgaaaatcgatttgaaggacgcatatttacaacttttgcttgacgaaaaagccaaaagttgtctcacaatttgcacgcacaaaggacttttccacttcgctcgattgccattcggagttgcttcggcacccgcaatttttcagctagtaatggaagaagttctgcagggcattgatggcgtggcagtttatctggatgatattctgatcacagcagccactgatcagcaacatgtcaaaagaatcgaccaggttcttaaacggttgtcagagaacggacttcgagtcaagcgtgaaaaatgtgaattcctcaaaccggaaatcgaatatttgggacacattgtggacaaaaaaggtcttcatgcgtcacctggcaaaatcgaggcaattttgaaaatgccgaagccgaaaaatctgaaagaattgcagtcatttctgggaatggtgaactactatggaaaatttgtgccatccctggcaacgctttcagaaccgctcaatgaattaaggcgaaatgacgccaaatggacatggacaaagagccaacaaaaggcattcgatgggatcaaaaaggttttgacatcaaccgaagttttggtccattatgacccgcaaaaaccactttttctggccgctgacgcatccgactatggagttggagcggtcatttttcacatagatgaaaaaggaaaagttggtgattgcgtatgcctcccgaacgctaaattcttcggagcgcaattactcgcagattgaaaaagaagcgagggcaatcatttttggagtcgacaaattcaagcagtacttgtacggtcgaaagttcgtacttcaaaccgaccacgagccactaaaaaagatttttgggccaaaaggagagctcccgattgtggcggcaaaacgacttcatcgatggtcactgacattgatgaacttcgactttgcagttgtgtactgctctacaaagaatttggcaatgcagacggtctgtcgcgattgccgtgtccggaagagacaaccatcgactgtgttggactggaacttcagcaagttcaggccgaaaatatttcatgcttgccggtcacagtcagtgccatcgcaaaataagtcaaaacggatgaaattcttcgaaaagtgaaagaattcatcgaaaaaggatggccacaaaaagtcgaagaaggactaaaaagttttcatgtcctccgaaatgagttcgccttaatggaagggtgcatcatgtttggaaatcggacaattaaccggaaagaccgtggaaacgaatacacatcgatttctgcggaccattttggggataaatgtggctgatcatcatggatgccaaaagcaaatggcctgaagtggtcagaatgcgaacaacaacggcattggccacgattgaggcgctaagggttgtcttcacagcgcatagacttcccgagcaaattgtatccgataacggaccgcaatttagttcaaaagaattcggtgattattgccaatcacggggaattgtccacacattgatcgcgccatataatccaaaatcgaatggagccgctgagagatttgttcaaaccttcaagcaaggcatgaacaagctcaaaaaggaggagatgaagcaagaaattgcattgtctcaatttctcctgaagtaccgtatcacgccgcacgcagcaacggaattggcaccttcagaaattctcttcggccgcaggcttcgaaccttgttggatttggttaaaccaacagcggcgaatgaagttgaagcggccaaaatgcaaaaaagttcctacacggaacgaatgaaaaggaatttcgaccgtgagacaaatgcgcgaaaaaatttcaaggtgaaccaaagagtttacgcgagaaattatcgcgacggatcaaaatggatccaaggacaaatcacccgacaaattggcacggcaatgttcctcgttcgaacggcgagaggaatttggaagagacactttgatcagttgaaagaaaatggaccgaagagccttcggacaattctggttccgaaagtgcggacaattcgtattcggaagacgaagtgccgatcgaagcgatggacgacgaacagcagcttccaccgccggaggaacagcaacaaccggagcagccacaacagcaggccaacgctgaacctagacgttcaacgcgcaagcgcaagaagacacagatcttcgacccctcggcctgatcacggcttcaagaaggagggacgaatgtggtgttgaaagaccaatcaataagtggagtgaactttgttcactcctttcccttaggcacataccccctcacatataagcgctgccttccctccctccctcgttcattctgtcatttattcctcccattgcaattcccttcgccttgaccattttattattttatttgtgct

SEQ ID NO: 18220 - DNA, 2326 bp, Heterodera glycines
  unsure (1)..(2326): unsure at all n locations
cagcagaagttcatcagggtaggcacaaaaaaaatgccttttaaagagaannngngncggaanngnnggnaaggngggnacctcttggaggaagaaaacacaaanaannnaannnaannggnnncagaagaagacannncnccnccaagcnangangaacgaanccaagacaaggggncncaaaangaaaaacaaanaccaaacgaanaaaaaagcannanacaannaannnnnnncacnnnnnaaancggaataaaagaatcgcaaaacgggatatggtatcatagttaaattgtttgagaaagaatttatgcttgtttggcaatgtttttttatataaagcaaattggtaattaaaataagaaatgggcaaactgttagaaagtcgtgatccccaagtatcgtaaaaataattggagttttttaaaatgatggtccgtttaaagaggaaactatttattatcaagatttattaattgattaagacaattaaatcttacataaaccgtttaattctttaaagaaataatgatatttgtgaaagtcattttcattttatcttcttttgatctttcgtcatcatatttcacaaaacattgaattgttgagtggcgacaattagcgcatggaccgcacaaagaatgcctaattagcaaaaaaattatttatcaataaaaacttattaattcaccaatcattttcaaataacaatgcacagcattgctggcgcgaacaccatttcctatgaattatatatataaattttgttaaaccagggtgcgcatttgtccttgggtgccaaggacgtccttagattagggcctcgccgattggaaaatttaaaactttttcaaagatgtccttggaaactagtattcgaaaaaaacattcaaaattttacaaattttttgaaatattttatcaaaaatgatcagcagaaaaaaaaattgaaaaaaaattcattccggcaaaaaacgcaaatcttttgaataaaaattaatcatttctcattacatatgatatgagttttgcgcgtccatggattttataaattttccccttatgtccttgggaattagttagtatacccgtccttgtaagccaagtttttccaatgcgaaccctgtgttaaaacaaataattaggtaatctaattgcaccctcattaatggttgattgagccaattccaccaatgttgcagttgtcttaggcttcgttggctcctccgtggtaactgtcgtggttgtggtggtagtggtcgtggtcgtcgtcgtttcctccatggtcagagttgtcagggtcggagtggtcattacagtcgggatttcaattgtgagattttcattagagaagtcaatgtccttctcagcaaaaagacacaggcatttgtccttaaaattgttaattcgaggctaaatatatttgaatcaaagcaatttctatttaatagaaaggcgaacaccttcgattaaatgaatttaaatgaactaattaagatattttattagaaatttagaaattcctgaaaaaaaccttttttttttgttttgaaatgaaaactaaactaataatttcaagaaaccaaaactgaaatgaagatacgaaaattttaaaacctaaaagtgaacgaattttttacggtgaaaaacgaaaacactgccgaaaaagaagggacaaaacgaaaacgacagttttgtttagctcttacccgaagccatgggttcgagtcaatggcgagttaacatttaatccctaatatttactgtcaaaattaatgcttttaaaattttattgggttgtttatttaagaaaaccctcactcatacatcgtctcttttggcactgacaaaatcacaattgccggcaacggtagaacatccccacttttgaaaaaatttcctgcttagcagctagctatcttttgatgctgaccaaaaaagtcttttattcaaacttgaatagatcacttcatggtggtcagaacacctcaaaaaagactgaaaaacagaaattcttgaaagaaaaattcatagggagttgggaaatttttttggaaaaaaatgaataagcaagcaaaagagcataaaattctctacaatatgttcaagaccgaaaatctctacgatttataatcgctgagatatgggcactcagtttcggtgtcaataaaatattaaaatatgaccatgactatgctttacgtattttattttttaaatttccattcactgtcgtaatgtccactgtccaattgtccacttctgtccaaatgaccttcactgtcctaatgtccactgtcgaaatgtccactgtccaaatgtccgg

SEQ ID NO: 18221 - DNA, 812 bp, Heterodera glycines
attggatttttttgtttaatttccacaaattttttcacatattccaatttcagagcatcggtgtaacagtttctttgtcctaaaaaatttaattatttttgtataaaattaaaattcatttttagtataataataaaaaaataataattaatgctttttcatatttttttacttttaactaagaaatttttcaataaaaaattttgaactttccttgacaaaatcatataattttaaattgattaaaaatttacgtctgattaagccgaattttcttttccatttataaaatgtaatgaatttaacgccaactttttctgctattttttcattaattttcaaatttggtttcaaattgaattttaaagtaaattctgctttcactttttcaaattgttttattttttcaattttctgttgggttgaaaatattttctctctaccttagaataagtaaaattcatttatgccattcgtttcttaccaaattccctcttccatttgtaaattatatcccgattaatttctaaatctttagcaattcttctttcaattacatttattattttcttgtcatatttaaatccataaattttttcttttctcatttgatcaaattttccgatcaattcgctttttgtgtccttatttatgtccatatattcgttgtaattccgggtttgtcctaattttttcttcaatttataaattttgtagcgattagtgcccaatttttttgcaatttcaccttcaaatttattaataggcattgttttataattgtaccgtaattcccttttcatcaaattaaa

SEQ ID NO: 18222 - DNA, 1256 bp, Heterodera glycines
  unsure (1)..(1256): unsure at all n locations
aaaattttntcgtcaaatttcaataatcttaccttttataataaacgcttttaatatagaaaaaattaaacgatttttccttttttgttatttcgaaaaagaaaattaatttctgtgacaggattttgaaaaattttaggcagaaacagtgacttaaataaaatgaaaaaaattgattaaagggagcattttttatttaattataaatataaaaattatttttataaaaaataatcatcttacaagaaatagtctttaaaaataatccggatcaaaattacggaaaaatcccaaaaatccgtaatccatcatccgtaacccaaaaaccccgtaatttccgtaatccgtgattacaagctcctggtgccaatacgagttgggtttcgtccttttttatctgtgtattaccttattattgtaatcctcatcatctgcagaattgctatgatcaatagaagaaacattctgatcagcttgctcatcaaactcattcctaaattgttcttcgttcaattgtttcatttcaatttttggcacttttatttttaaattatcattttgttcctccaatatttcaagggcagacaacatttgttccaaaatcatgttaaatccgaacggcgcactggttacaaaaaaagaaatggacccttgttcacagcttttacagagtattggcaattttttgtgtaccaaaacatcggatttttccattaacgttggcaattctgtcctttttgcgtgcaaaatttgctctttgcaagtccaaagagttttttctctgatcagcttgtacaggaatatagcgatattatgacaggggaggtatccgtccttgaaaggacgtcaaacgtttaaattttaccagttaatattttatttgatccgtgcctttcttgaggggcagacaaccaatgtcgttttaaaaaataattttccaaaaatttcttgtgtgattttatattatgtatgaatttctcatttaaaaggcatattaattcctaaattagttttattttcaattccattaccaatatattcgagtctacacaatgttgcttaatcaatattctttatttgtgtattaatttgttcttttagttttactggaaaacttttattttcttagattaaaatttaatcgaattaatcactaattttataaatagaatttcattaatttattttcacatgttattttcccagtttagctcgcctttcattggaccatttttattttgaattttcgattttat

SEQ ID NO: 18223 - DNA, 984 bp, Heterodera glycines
tattattaataaaatggatatggaagtaaattaataatatatttcatagaaatgaatatataataaaaatagcatttaaatagcaaataaaattattttttatgggatggttttttataaaagttaattaattcgtcaggaaatcgaaaagttgaaaaagttatgctcttctgtgatgagccggcatttaatgtgaataaatgaacgatttatttgcttgtaaaggtcatttgttctcagccaatagatggaaaacggatatgcaaatgggcagaaaaataataataatgacctccaaaatcaaggagaaatcggcaaacaatcaataaaaagaagcaacggaagactttcaaatgccaaatttgggggtccaaaatcccatttaaaaaaatgttttacaattagattataaataaatgaatttaattttatgggatttaattaatattttttgtttgcttaaacaataaattctttaaaggccaactaaagtgagtaaaaccgacaatgctgatcagaaattgaattataaaaaaggataaaatggaaagaaaataattttaatcattcaaataaataaatgtttttaaaatttttcattaattttcaaggttttacattcgactcattattcttaaaccacagatcgttcgtcaattccccaaatactcatgaagcacgggaaaaatccaactcgtagcagaaattgagtgagtaaaaataaaataaatcatgaatgaaaattggataggaaaatgatgactcaattaatttcttacttttcacgtttacaagcaaataaacgtttaaaaaatgaattttaaaactccactggctcggatagataaaactatctcattagccataaaacttgaccaaaacactaattaatttataaacaaaattgtgcaaaataaagcattgtaaatcatttgtatgaattccgttttaaatgaaatcaagctatttaaaagacaatgtcac

SEQ ID NO: 18224 - DNA, 1359 bp, Heterodera glycines
accgcaagaaaagctgggaccggaccaaccaggaattttcgaagaaaaattttttttgaaaaaatccaaaaattttcattaaaatgcatagattaatgataatttagacacttttaaatatttctctatgtaaatgattgagtatttttttaattaatggtatttttctattgttttaataattgaaatatcttaaatttttgaaaatataaaaaaatttttgttcagttggggaattgaacccaatcgaaaaagaataaaaggcagaaggtttagtcaacagaccacatttgaatttgagttatccaaaaataatgttctttgattttaagacattaaggaagcagagaaagagatttatgatgtttttttgcgtaaatttgaatatttttatgactgctcaaaagttcaatctttaggggtgttttttcacctctcgtaccaaaaaacgagaggtgggagtacccaaaatggcgagagttggcgagagacgagagttgtcccacccctgtgtgggtcttttaggaaaatgccgtggtgagccgaagtgacaaaagtataaatgtggcgaagtgacaaaagtatcaatgtggataagaagccaatggtttcgagagcagtgctgcgtgagggggaaaagctagttatcacacagtcccaacataacccggaatgtaaagcagaaacaatggtaataataaaagctgaacaagtagatagaaaacaaaaaaaaagaaaatcttcaagtgtaatacggatgttaagacaatctggagacaaggtcttgaaaaagttagggaagaagatgctacaagcacaaggatcagaagcagcagacccctttgatgtgccgccaagactccagctaacaaagtttggcgctataaagctcataatgggaaaaacaattgctggaagtgaatggatgatttataaaaataaacaaattggtgttactattcgcttccaaaactcaattggaagcagcaaaaaactgtcggaaatgtcgccgacgcgacattcgaactcacaccaaaaggtttcagacagatttggctcatccatggcttggtatatatttattatttaaacgaataaatcggttgttttttattcagtatgcgacaaataacggggctgaatgggttgttttcgcttttgtctttgatgaaaataaaagaccaactttcatacgaaacaattttaaatgagcttcacagccattggggcagtgaaacagttgaaataatcgagaaaattcatctcgatttatttattacattatattgtgctctttgattgggtcattgactaccgccatcacatcctggtcataatttggcgttccagcgattatca

SEQ ID NO: 18225 - DNA, 1503 bp, Heterodera glycines
ttgaggttccggtcgtagttggattggttgcatatttcttgaaattttttaggtgaattctcaacaaaaaaaatagctcaaaaatcatttgcgctcaaagggtggcgccgaaaaattttacggcgcccaaataatctctcgcgctgaaaagcggcggagacgcgcggcgcgcccggcccaacattttccatcggccaattgcgcgcggcgtcgcgcgatttttcgcaaatgttccgcgcgacagccggacggacagagtgatccggctccaatatttactcaccgcaccgcagattttcccacccatttgagagccattaaagggcccccgggggacggataaatagggaaataaaatgctcagtccggtggccaattggtctgccccacccctctcagcagaccgtcgtcgtcatcattcggtcaacacttttctcatactcttttcctgttcctttttttctttttccttttccttttcctttctctcttttcccttacatttttcctttttctctttttctcccttctctccttttctctttttctcttttccccctttttctttgtcctttctccctttcccttacatttttccttttcaacttttctttttccctttttttcttttcctttttgtcctcccccttttcctttttctttctctcttttccctaaccttttttctttttcttcctttccccttctctttttgctatttttttcttttccttctcacacctttttctcctttttcccgtttttcctttttctttttctccttttcacccatttctcttcctttttccatccgttttcctttccaattttatttttctttttaaccaaggatgtgacggaatgccgacttcgattgcccgattgccgagattaaattaagatacgaaaaatttcgtcatgcttccaagtgtacttatttttatttgcactgattttaacgatccgaatttagaaattaaaatttgatccaaaattaatatttttggtgaaaatctgtttacaaatctcgcaactaaactttcaaaattttccctggcggtttgacaccgccggcaaaaaaaaaagtcaaatttcactatgaaaaagttgaaaaaattacatttaaattagattattcaattatttaatctttactcttactcttccccatccatctgatcagcacagatcacctctgctgatcttttaatgtatacgttgtgtccctgatcaactttttgatcacttcccttacaccccttccccgccgccaccatctctgatcactagagacgattttccctttaagagagagaggctcttctactgttagttggttgctgttgcaactgatcacgatttttttatgtgtttgcacaacccccccccccccccccccaattccaattccttatgaggtaaaatgcgggggggggggatgaaatggttggacgaggagtgaatgacgactgatctggaattggaattgtgggggcggggggg

SEQ ID NO: 18226 - DNA, 1780 bp, Heterodera glycines
cgttggcattgtgccaacttttttttctgtaaaaagttttagcggcgttcaattgccatccaccaaatccaaaagctttgctgttgctgcacctgctccatcccatcccacccattctttgtcgctttgttttgtgtgtgtgtccattcaaatcggtcggcgcggctttttgctgttttacgccgactctttctttgtcttctccatcaccacccacccacacaatccgatccgttttatgttaattatgcaaaatcacttttaaccccccggggcaggggggcaaagtccgtccctttttctgccccggggggatgacgacggaggtgctgtcctcctcctcctcctcctctgccgttatattcactgctccaccggtgcccaccactttatctgaccctgtcatcttttgtgtgtttgtcccccgtttccccgttatgacttttctttgtcgtcgcccggggcaaaggcaaatgcaaatggattacatataattacactccgctgaatgccccccgggcgggcaagcggccgctaagcgcccggagggctaaccgatcggacacagcggcggaaagagaggagttggcgaagcgatcagataaatagatgtaaattgtgctctcgggcgacgcggaggacgggagtgggataaaatgggcgattattgcccccgggggacagagggcaccaccgcctccatgaagtccgaagatggactgcgacttgctattactcgtcgaatcgaaggacggtagaaacgagggttgagcagtttacgacatcgatgatgatcgacggcatgggctaaaaacacgacagcagcagggacgagggacgggggtggtactgaatttaacggggcagaatggggtggagttgggcgcggtacggattttattcacacgacggaatgggtatggcaacaagagcttggcattttgaaaaaagtctgggcctggcctggattccatattggacctgctggttcattacaaaaacccaggaatatccaggtccaggaaaaatccaggcttgacgagacctggatcaaggcctggacctggattttttaaatttgtttaaactaaattacaacgtctaaaatcaaccttaattgttaaaatacttttaaaatctatcatttatcaatttaatagaagttgttgaacaggcgaccagtgatttttaaaatatttcagttgagaaaattgcttaaaaatttttatttaccaggggatgagggtgccaaatttgccaaaatttcctctaaaaacaatcattttccattttgcccgcaatgggcacggcatattccctgctgctggacacaggcacgcagtctaggctaaggctggactgatttggcaccggcacatggttgtgacgcccgccgggactgaatttgccgggctggcacagacaacgaacttttgcccccaggcgtgggggggggggcggcgcggggcgggggcatcaccgttttacatcattttaaccgatccgatcggcagaaggagcaacaacgaccccggcgacaacatttaccccccgccccctccctttttcgagaacggtgtcaatcccattagccgtgctttgccgatcggtcggtgctcactcatagccccgtggggggggggcacgcacactttgtcctcccccgtttatgtgccctccgtgtcttcacccgtcccttgggggataaaagtccgagagttgagtcgagaaaaatgagggcgggacgagaatggacggattgtggcgttgggggggggga

SEQ ID NO: 18227 - DNA, 3610 bp, Heterodera glycines
aatttgggtgagattttcgttttgatgctctattaaaaacccaaattattaaataattgtaaacattatgccaatttatcaaaatttaaaaaattttgaggattttccccaaaagcctcaagaatcctcaaaatttctcaaaaagccacaaaaatcctcattttccaaaaaatcctcattgacctatcaaaaagccacaaaatgaggataaatcctcagatctgggagccctgattattaccttgttcattagtaaagttgagaccaataaccttaaatataatgaaaatctctctaaattgcttcaagacatgaattccttagaagtgtttatgtcagtgttttataattatatgttcaatcaaagaattgagtcagcacttttgagacatgccatattatcgaaacctcattttcgaatcaggaaaggatttttagagggaaaagttaaatcggaaaggatcttgggaggaaatgtccatcaggccaaatagaattataagttttaagattttaaagtttaatcaggcagtaaatatatgcttttttgtcagatataaacttgttttcttttgaaatttataactaacttcccttccttcaatgctatccaattacctaatatttcagggatatcagataatcaacaacaggaacttaattttgtccataaaacagattggacgtaatttaagcaaaaatgacaaaataatatcgtgacaataaacaattcttacttgcttatgctcatttcgccactgatgaaaagatggagtggccctaaagagaaatgaaaaggattaaaaccattcacaagtaaaagattactctttatatttaagacgatggaatatatgttggttgacgagtcttttgttatccttaaagatttagtatagaaacaatcctttgttatccttatactaatgagtaaagaagtgatttagataacagttgaaagtatgaacttaaaaataccctatttctaatggccacaattctgaagaccaaattgacattgctcctcatcaattgaatgtttgataaatgatgcgaatcgggtaatctaaaaacttaatgaaaaaaagataaatgagaaactctaactgttgaatgttattgatagcatcaggtcgaatccattgagatccatcgtaaaacataacgtcagcagttgcagaaagaagaagggattcactaaaacccatttgtaaatgtcctattgtacatagtcagaatgaaccacctcattctgagtttaatttggagagtcaaaaattcaaaaaggctgctaaaattgtgcagctcactcccagtcgcttataatttaaatatataagttatatcacctaaataaattgtatgcatagaaattgtgtaaatgtgagacatctggacacaaaataaataacaacaaatgatcgcgaccctgaactatacagcttaaaaactacaaatcaaaagtcccccgaaatttgtatgtactagcctattaggcttatttattttcatttggtttttttcacttcataagtccaaccaactaaatcatcgctcggacaatcagtaacttgaccgacccgactttttgctagaacattttttgaacataaaatctatttctgattaataattgatcagaaacctcaaaagggccgacaagaaaagaatgtaataaatggagagttcctccgatagctaagcacaaggaagaaaagctgtcacaacaagcattcgaccagttagccattatcgaagacaagctcgaagagcaatggattggtcctcaccattttggcaaatggacgttactgatgtgagggagagtgtgaggagaaatggcgagagaataagacacaattgaaggagtttgttgtttgaatgggcacgagaatgtaagaaatggaagtgagtgtgggagtgagtggctgatgagaggtcggtcagtcagtcagtctagcagcggactcacattgagtggactgtgtgaaatttttctgtttccgatggatggaggggactcacatacaatgtgtatattatcttatgagggaaatcgaacttccatttactgaatccgggagtgcatgcacaaaaaataaaggagaaatggaaagttgacagtaatacaaatagtccgtttgtgaggccactgtaaaaaagaaatatcaattgatagaaaattgtttaattaaggtatgtaaaataggctcgtaaaaaacaaaaaacttaacttttcttaacattcaatagctaattccaaagctcttgttgagctctacacatctatcgataagtttttatgcccgattaattttcttaaaatttttaaatttatttttaatcgggaccgcaattctgcaaattaccgcattttcattaagaaaattttcaaaaaaatactgaaaaaggcatgaacaaggcatcaaaggtcaaaaaagattacaaaattacgtgcccagcattaggcatcaaaatcgcaaaaagcgcaccaataagttaaagctagaagcttcaaaccatgttaaaaactcgtttttcgtctgtattaggccgtagcaagttcgcaaaaaaggcataggtatgcttcaaaatccggtcgctattgataacctaacaaatattctgataaaataactgcgttgttttcgcaaatcccactagcatatacatatatatatttattgtataatcttttgctaaactttagatcaaaaaataataatttatgatggctgctcaaaggattttaggcgctcttggacaaattggtgttggacttactgccgctggagttcttgctcaagctgcactttacaatggttgttttcgagaaatctaaacttctaatttgtacaatgtgtgttcagttgacgctgggcaacgcgctgttattttcgaccgttttaccggagttaaaccgaatgttactggcgaaggaacgcattttttgatcccatgggttcaacgtcctatcatgttcgacattcgctcgacaccaagggctgttaatactatcactgggagcaaaggtaaagcggcacgtcttacttattttacttggtgcaaaatttagacttgcagaacgtgtcgatcactttgcgtatcctccatcgtccagacccatcaaaattgccacaaatctaccttaacattggcacagattatgctgaaagagttctgccatcaattacaaacgaaattctgaaagcggttgtggtaagtgtttttaattgaacgaggctctcagctacatttggatgtaaagtacaaactttgatattaaactccaattttagctataatatataaaatttagagtactcattcgttttttaccgtctatataggcacaatttgatgctcacgaaatgattactcaacgtgaatcagttagccaccgtgtgtccgtcgaactcgcagagagggccaaacaatttggattcattcttgatgacatttctatcgtattcttttgattttacctttctttttgcagaattagtctgattctgcaaaacttttttggggtctcaatccttcgcccgggtcgactattaaacaattattcatattgaactaattttagaacaaaaatttgaaaatcgaa

SEQ ID NO: 18228 - DNA, 2898 bp, Heterodera glycines
ttcccatgattttttggtgagaattcatcgactcccctagcatccgtttcaaataattgaagcatcttttttccttataaaagtgcccagtaatgcaaaaaaaggttagtgtcgtcatgtgccaccacctccccccccccctctccgaacggcaccgtgcaaagtttgtgacgaataaatgtaaccgaatccaccgccgacctttgccgccccccacgccccctattgtccctattttgggcacaagtaaatattgtaattttaaatgcgttttttcttttgttcgcgactgtaaaaatgccaaaaaaacctttaactgatctttatccattcactagcagaattgcaaaacaaatttcatttcaatgatttttaggcattaatcttcagtttgcaatccaaatatgtacttaagaaaattgtccattttctatataatgcaactaattcgcttttggctactgtatttattttaacagagattatttttatatttttttatattattattttaggaaagcattttaatttttttttcatttgttgtggctaaaatggcagtgcttttcaacggcaacaattttcggctttcgtgtaaatccgccgggtgccgctgctgctggatgacatttttgtgcgcaacaattttaagcattttttttgcttcaaatcgtgcggaagggtgtgttttaaatttaaattcataaaattttcttgaatttttgtacaattcttaatatttgttaagagagggtatgcttggtaaaattttcagctttatagggccatggaaatagctgaaaaacaacccaaaaaaaccctggcgctataattttgttacatactgtatttattatcattgtcccaccatttcctcacctttctttgagtaccgttgcctttttgtcaggttcatcatgctaaacggcagacaacttgaagacatgcaaaatgtgttgaacactcagccaaattgggcttcaaaagaggttgcggaaggaagtgccgactttccccgttttgcacccatcgccaaaaaggcggctgccacgggggtactgaacaaattcggaggaagtggggcacggaactgttactttagcccagtgagctgcatgcttcttcatgtaagcatttatttgcaaattgaaaaaatagtaatatttataaataatattttaggatgtgccgaagtacaaaaagctaatcgaaagcactcccaacggatgggctccgcttcatttcatttgaattttgaagccaaaaagaatgccaaaatttttttctctcacaaaacaatttgcgaactgtttttgaagataaaattaatggtttaaatgttaaatttcgatgtaatggcaattataattttggatgcaaatttatattttaaatagaatttaatgaaatattgtggaattattggattgcttgatcccctttcaatttaattagatgtaattccgttaattccttaattatttgcaattttctttttggtttctaatttagtaattttttggataatttcaaaaataataaaattttaaaatgtaaaataaaggaaatgccataagattaaatatcttataatgttttaggttattttaaaaattaatttttgacttccttattttgaaaaaaaaaaatctatttatacatttttcaaaaaaaagttcttatcaattttcataagcagaaattctcaaaaccttaaaatattaaaaaaagaaaatctttgttacaagttgtgaaattttgagttttaaattggacatctaagaaagatttccttgaaaaaatcccaaaaattgcgaaatatacaagaaaaactgcaaaaaataaaaaaatatgtagaaaaataagtacctaagtaatataatagtaacaacagaaaatatgtaaaaatactctaaagaaaagtcccaacttttgtttgcaaggaaaagaaaatcttttttattttatattcagagtatggagagggaaaataatatatattcccatgaaaatttacatccttattaataagataaattaaaaatcaatttttataggtatcaacaaagataatacttattgaagtatttaatatcaagaatattttgattgggcgaaatttgtacttttcatggccaattagttgaacgtataattatgtccattcattgggtgctaagattttttttattggtttttttattttcctttttttaatagatttttttaaatatttttttctatcgatttttttcctttaattattttttttaatttatttttttaaattttttattttttttaaataggacgaagtccgaatagtgcaagtgtgggcgaagtccgaattgggcaaataattaaatttaattaaaaaaattattatattttataaactgttaattttcatttttttatattttaaaacatttgaatatacttttgagctttatttttatttaatgaagttattttaatatgttttaatgtaaaatcattgtcatatgtctacgacacacccattttattccgtaacttggtcaagtgacggtcaatcttaacgattttggtatcaaaaaatagcttaatcgaaatctcagttgaattatttcgacatttcttggaagaattcagttaaaccaggttttaaaccggtttaaaaagtatgtcattttgcttaccaaaggaaaacatttttggtatgaaaaaaacttgttgtttctacattgaattctctacaagatgcatataggagccgagttataaatagagagatgggtaatttaaaaaaagtgcaaatatgcacctaaaaagtcaaaaaaaaaacccgcaaaataggcacaaaaatatgcaaataaaattttttattaaggctttttaggtagtaaaacacataaa

SEQ ID NO: 18229 - DNA, 1201 bp, Heterodera glycines
cagagagaacgggaggagatgaggacgaggcgggcagaagatcgacgacgcccgtggaagtggaggcaacggccgaagaatggaaggacgacgacgacgaccggtcgagagaggaggagcaaggcaagtcgagcgcaacgtttgggttggaggggggccggtggtgttgctgatggtgctgggacgacgctttggaggtggactgattcgaagagaagaaacggctgaaatgcaataagtgtaagtttgtgctgttgctggccctttttagtttggaccctcaaaatcaatttaagaaaaggaaaaattttgaaaattgcctcttgagaaaattggttcctcaactaaaaaggtgcttgctttaacggcttcacacaggcagacaatgcgaacaattgtgtccaccacattcaggaaatcgcttcttattttgttagttgtgccaatggaaagccccgtttcgcttgcttttcatcggccgtccctttgccccggcgatgcccccaacccgcggttcttctcccccataaaccattcacaacaactactgaacaaagaaagaagaatacggctgtcgctgtcgagtgggtcgagaggacttagccgtgggcattgaacgcacattgccctaaggggagggggggggggggaaataaggcaggggaatggcagagagacggagggagggagggaaagggaggcaataattgttttctcgccagcagcagaatgctaatggcccagtggggatggatggtgatgatgatgtcccacgccctgtgggaaaagtcgattcgtaagaataagcggcaattttataaaggagacgacttggaaaatggcaaaaaagggaaaagagagggaggaaaaggtggaaaaaagggaggggggggagcaatgagaaagacaaacactgaagatagaagaaaagagaagagaggggggaaatgtcaaatatttattcaaaaaataagggaatgaaaaaaagtccacattatttgggtttcataactgaggtgcgaacggactgcacagcatctattccattcctaaaaaggaatatggccatgtttgtccagcggatggacttccgttgggaaaatggcaaacgaagggaaagaaatggcgcggggggagggaattaaaaaaggcagcgactcattcagccggctgaattaagcaaaagaggggaagggggagg

SEQ ID NO: 18230 - DNA, 1390 bp, Heterodera glycines
ggcaaaataaaggcgaaatcaaattatacaacaacgtcctcccccccccccccctccctccctctcccctttttctccaccttacgacgccgtcgaacggccggtccaatgaagaggcaaagggaaggaaagggtgggaaaatgacttcttcaccaaaaatgtgattggcttgcataccgaattccaatttgtcctcaaaacacaatctcttcccattcttttctacgtttttaaattccaaaaaattcgattaaattgggaaataaattttaatatgttaaaaaaggcaatcccatttattgaaatttgcatttacatttattctaagaaaattttatggaaaccaattccatttatgaccgggaaaatttctatgattaaattttaaatttatcaatgaaattttgaaaaaagcaataaaataacgcaccgaatcgatgtccgtttggcatttaaagagttcgccattgaatgagtttcatccgccggagaatgagcactgacccccgatggcgagtctgaaattgggtaaattaatttttggacaaaggattataaaaatacgattatcttattcatttatttttttaattatgcaccgtttggaaatttttttggcacccatcattgattagcacctttttcgggattaccaatggacaaaaccaccgaaggcaactccgaagtgctcgtccgacgagaactttcagtggtggtacgtccgttgtgctcggcggtggtcgtggaagttgaaaaccatttcttgcgattgatcgcgaaggaaaaacgctttggcaaaccgaagccctccatttcggaggttcccccctttgaatggaaactttttgtggatttgagcacctgcagcaagaaaattttttgttcgaatctcaacaaaaatgagagaagagaaggaagacgtgccttgggagtggagtaacaactaaactcttccgcacttttctttttgaccgactgttgttgcggggagaaaggtggccaacgaatgtacgagaaggaagactttttgacgggattatgacgtgtggcaaaatttgccgcctcgctaaatccattaaagatggctgctgcagacctacaacaaggacacattttccccgttttgtgtgtgtgaatcagtgtttaattaagggcgcacaatttctttcgctgttgatgaggctccttcttcgcgcagctttcgttgttctttttatggtcctcttcaatggtttgggaacggccaaatttccgtgtaagcattggcggacagaagcaattgctggtgattaatcagacaatttagcacaagatttgtaatcagatgaaaattaataagtaaatctatttataaaattaagtaatcaaataattaaagacatgagtgtg

SEQ ID NO: 18231 - DNA, 943 bp, Heterodera glycines
gtagtgtaattgtaaatttgacgctaatttagcaaatttgtttttcgcttaggactgatcactccgtggaattacccactaatgatgctctcctggaagatggccgcctgcctcgccgcggggaataccgttgttcacaagccggcccaagtgtcaccgttgacggcgttaaaatttgccgaactcagccatcgagcagggttccccccgggggtaattaacggagggaatacaaaaattgaaaaattaattaggtaattaacattgtgaccggcaccggctcggagattggccaggcaatttctgaccatcctcggatcagaaagttgggcttcaccggctcaacagaaattggggcgcatattatgtcctggtaattaattagtcgctgtttatttaatgggttttcccattttccttttctctgcttacatttcgctttttcagttgtgccaagtcaaacgtgaagaaagtgtcgctggagcttggcgggaaatcgccactgatcattttcagtgacgtcgacgtggacaaagcggcgcgaaaagcaatggacgcggtgtttttcaacaaaggcgaaaattgcatcgccgcgggccgactatttgtggaggagcgaatccatgacgaatttgtgcgaaaagttgtcgaaagtgggctaatgggcaagcaattaaaataatcattgggatggccaattaagagacttcgaaaattgtaattggccatccgttggacagacgcacccaacacggcccccaaaatcatttggcgcacctccaatcgctgcaaaaatatgtcgagaaggcgcgtgggggacggcgccaaattagcacacggtgcgaaaagatgcgacgcgaaggattatccttcgagccgaccgtactcactgaagtgagacaaaacgacaaaaaaaaaaatgccaaattggtagtgggaaaaa

SEQ ID NO: 18232 - DNA, 1496 bp, Heterodera glycines
aggagtcattcggaccggtgatggttatttccaagttcgacgaaaggtgcgatggcaataccaagtgctgccaatctttagtgccagcttttgttcagagacaccgaattggtcgtcgagcgggcaaatcgcaccgaattcggcttggccggcggagtgttcaggtaagcgtagttaatatgtgccgaatctccccccatttgatgacatatgctaattcagcagtgatattccccgtgcgcttcgtgtggcgcgtcaactccgttgcggaacagtgtttctgaacacttatcagaagactgacgtcgccgcgccgttcggcggcttcaaacagtccgggttcggcaaggacttgggggaagaagcattgaacgaatatttgcaaacaaaaacgatcacaatggaatattaggggggggggggggaagacgagggattggaattaattttcaaaatgattttttctgctgattcgaaataggtataaaatgagacactgtttaaagcttctaacatgcattgaaagggatgggtttgtctctacacatttaattatcaacatatatcaaatgttgcacaattttggcaccaacgcaatagaataaattaaatgttttcaaaatgatcaacaatgaaatcaacacatcttcttcactccattatctatatataatcaatgcgtatttccatctttgtcctccttcgcgagggaatttgcgagttcggccaatgtgctaaacttagagcaggagaaggcggccgagttggcaattccttcattgccggtcccaattttgggctcagaaacacttctcggctgtaattagcagttaaacggttttgaattcatcgcctcctttttaccacttcgtcttccttttcctcggcatctttcgatgtttggccgacgagtcgaagttttgagctcaactcaatgcgcatgaagcccgggtcgccactgtccgatggtgtcaatttaacatgacctgctgcaaaaggcggaaatgctaatgccttagtgagcgaattcaccgccatcctcagagtcccaacaattgtccaacgtcttttggactttcttcgaattttcccatctcctcgctcctcctccttcctcaattgagttgcctagttctagcaatgtgttgaatttggtcgaagaaagggtcaattttgcactttccgctgcaattttattggccaccatttgagcaattggaacagttttcgtctgtcaaaacgagttaaaatttatacatttttggttcctttgcccttccacctttttctttttttcctttttgggtggatttagccaatgcggcggcacaatcggatgcgggtcgggcaatcccaactcccgcgccttcagttgctcttgcattccttcaggccaaatgtccgggggcggaatgacttttgatcgctttggctcttcttttttcgtccgcaattgctcgggtttgtttttaaactgaaattaggcatttgctttt

SEQ ID NO: 18233 - DNA, 3077 bp, Heterodera glycines
  unsure (1)..(3077): unsure at all n locations
attaaaacatttattaatcaaaaaaaataatttaatataaattaataaaacaatattaaattaattagagcaaacaaataattaattttaagacaaacattttttcaccaaaaataatttaattcgaattaaaaattttatctattattaataaaacaaaaatatctttaaaattaattaaaaacatggaaaaataacaaaaaaatggatagaaaataatgtacaccgtccggatccgaacctgcccccccccctcaaaatgatgcctcagaatccccaatcacacagggatcctgaggtctaaacgatgtcaaaagtagaatctgatcacgtattcgtgatcagcggcccaaataacccctatagacatgtttttggaagatttttggtgaaaaaaatttttcaatcaaaaatcctatgctcacccctttggtcccgaatctcaaaatcacttttatttttataaaaattcttaaaaaagtgataaaaatgccaaataaaatttatataatagagcaaaaaactgcggatttttgtagtattttatttttccagaatatcttttcagaaccgagttatgaatttttttctgaaaattcgaatttttccagaaattctggaataacttttttccttttttagatagaaattccaaataaagtccataaaattctcctgatttttctctatttttaaggctttatacctgtaaaattgatcaacccttcgatttgttatgaattttcaaatattaggccaaaatcccgagggccaaaaaattgccaaaaaataaagaatttttaaaaaattccaaaaattatgaaacttaaaatagacatcatattcgtactcagcaccttattttaccccagaaaaatatttttcacactctttttcgaccccaaaaaattttttgaaaatttctagggggcctagctcgaaaatttttgaaaattttacatcatgtagtacaccattcgatagcatttaaaatgctctacaaaaatgttctaagacaatttttcgataaacttaactcctgccgagttataggcccgggactcaaatgtcccgctcaggccaaaaattttttctatttccggaaaaaaaccgaatttttttcaaaaaaattaccaatcgatagagctcgaaaaactatgttttggaagtggtcttcgtttctctgggaaaaatcgttaaaaaatcataaaattaaaaaacacgaaaaccgttttttaggcctaactcgaaaaattttgaaaattttcgaaattttaaaatttggaaaaatcgggcttttaaagctctacaataagtctgctggccaccctgcgctcaggtcaaagcctaatgagttattcgcctggtactgaagtggggaaaaaaaattaactgagtctccgtgtctgtacaggtccgggatttggtctgatcaaaaaataaaaaataccggattatagaggacacttctgcggagtgccctcacagcgggcactttttgattcgggttttagaaaaaaagttacgggccctaaactgcaagaaaaagtgagaaatcgctcctcgggactcagttgggcgtcgagaatttttttctatagttttcccgaattctcctcaaaaagttgtaagacccttccactactttcagggcgctcccggccttcggccgggagattttgttttttgaaacgaaactccttgtcaatataacatatatagtaactagcgggtgcgtgaaccgtcggatctggcacagggataaagcgcttcgcgcttcgggagcttcgctacctagactgtgaagcgattcaaattgatcgaattggttggggaggtttttttgaatttttaaaaaattattaggggtttttagtccacatcgaggctcaagacgggcgcttcgtgcccgtttttcaaattttgttggttcatacgggcgcttcgtgcccgttattcaaatttttttggccttacagagattagaagaggtacaacagtgattaaaagaggtaaaaagtgattaaaagaagtacaacagtgattaaaagacgtacaaaagtgattaaaagacgtcaaagtgattaaaagaggtacaaaagtgattaaaagacgtacaaaagtgattaaaagacgtcaaagtgattaaaagaggtgcaacagtgatcagaagaggtacaaatttgatgaagaggtacaaaagtgataaaagaggtacaaaagtgattagaagaggtgcaacagagattgaagaggtacaaatttgatgaagaggtacaaaagtgataaaagaggtacaaaagtgattagaagaggtgcagcagagattgaagaggtacaaatttgatgaagaggtacaacagtgattagaagaggtacaacagtgattaaaagaggtacaaaagtgatcagaagaggtacaacagtgattaaaagaggtacaacttaaaatctgattacgtattcatgatcagcggcccaaataacccctaaagacatatttttggaagatttttgcgaaaaaaaattttccactcaaaaatcctggtcactcccctttgatcccgaatccaaaaatcacttttattttgtatctttttttaaaaatgcgataaaaatgtaaaacaaagtttatttaatagagctaaaaattgcggatttttgtagcattttacttttcccgaatagcttttcagaaggcagttataaatttttttctgaaaatccgaatttttccagaatttctggaataacttttttcatatttatgttacaaaagccaaataaaacccataaaattctcctgatttttctctatttttaaagctttatttgctcaaaattggtcaacccttaggctagatatgaattttcaaatattcacccaaaatcccatgggccaaaaaattggaaaatatttttgaattttntaaaaattctaaaatttccgaaactgaaaacaaacatcagattcgtgctcagcacctcaaaataccccagaaaaaaaattttcacccccattttggnccacaaaaaaaaatttgaaaatttctagggggnctagctcgaaaattttt

SEQ ID NO: 18234 - DNA, 1620 bp, Heterodera glycines
  unsure (1)..(1620): unsure at all n locations
caatatacaaaagaagaattgcacgcaaaaaatgcnnttgttcgaataatcttttcttataataataatacactttttgattccaattgtcataaatattgaaaaaaaaatacagttatttattgtgtattttttattattacacatattacacaaaaggcttaggtgttttaactattaattaaaaaaatatttcgtgtaataattcattttattttaaatatagaaactacgattcaatttcataaaatatacccatttttgatttttaaattgttgaaaaaattattcatttaactctttaattaattaaaaatatttattcatttgtgaaaaagacatgtaattatagtaaacaaatttatatatttttgagtcaattaatttgttgttgaaactcttaatcaaattattcaattattaaaaatgttaaatgaaatattgtatttattcaaaaagattatggttaaacaaaatttgataaatatattccaagaaattatgactatttatttatattattcattaattatcattataacataatttctgaattaattcttccgttcttttacacttgctcaattagccgggaaagtgccgttcagtttgctgacgcaaaatgtcggcgagcggagaacagcaccgcaagcagtgccgttcaacaattcagcgggcaaaatttgaaaaagccggacacaatgtagcgacggactcaatgcattcacctttccctccctcttcagccaatcaccaaaattcgaattgattttttggaatttcatgttataacttttttggtaattgtcaatcgcgaagcaatagcttagaaatatcttctaaacatgttaagctttcgattgataccaagattgctggatttggttaacaacaaaaaaacgcgatagtccgaaaacttgggctggcgccaaaacgtcggcgccaaaagccaaaacgatacggaccccccgcccggcacccactcgggaagctcgtctaccgtggctttgttggccaatgcgcagatgcgcagatggacatcgcaaccccggccggtccgaaacgcgcgatgggcaactggctggaggaggtccgagcccagttgaagcagtgcagaacgagttgttgcgcctctcaaacgcgttgttcatgctgccaccgcccatcgaaatgatcaaccaactccccaagaattgacgcgcatggggcggcatgtcgcggaagcgacgagggggtgaccagaagcccaattttattctttttttgtcttgtcatcgttccccacttttcagtaattttcactgttttctcccctctccgattttctgtcccttttttcttttgcttttcacaaattggacttttagccctcccccccccccgggttggccaacattttattttttcatccgcctattatattttggatgctttccccctccattttgatcatcactttgagcatggcgatttggtgatgttgcacggttaataaatcaggacgaagttacaaaatttttccggcggcacctatcggcaccgccggattctcttccctcgcccatcgaggtttttctcaacccgaaacccgaacccgaaatttttctcaacccgcgacat

SEQ ID NO: 18235 - DNA, 944 bp, Heterodera glycines
tttttctttttttcgttttaggctaattttctgtctccagcactgttcagcctgcacacaaaagggcatggcattgaaaggacaatgagtttgccaaatttgatgaaggaaggggcccaattgttggacagggaccaaaacgaatggctgaatctgatcattgaagcatcgggggtcaacgatcaagtggacacagtgaaggtggatgaaacaattatgcaaaaacatttattaaaaaggaaacttttgtattccaaaaacatcatgtccttctaaagggcgtacttgaaaaaaggacattttatttttctgatctcaaatcaatgatttcaaattttaattcataaactaatttatcgcgtttttaaattctatttagcttttcactaattaccatttttgttttggacataaagcgtccatttggctgaaatctcctcgaattaaataaaaagtaattcactcacaaatgccttacaattctcagcatttgttgtcctctgctgatgatgggcatggcactgatgaggagatggccaaaaaagtggagaaacgatacaaacgcgaatttaatggcctctatctgacgaaggaaaatgtgagggaaatcggcaaaataggcaattagttcgctcattaatttgaaaggtgcgcgaaatgtatggagagaacgaacagcgaaaatcggacacaatggaaaaactgttgcaaaatttgagcaaggatcaagtaaatggaaaagaaaaaatgatttaaaaattaaaagcatttataatttccatttcaagttgacagcaatgaacagaagtggcattgtgttgatgaatgccgaacagctccgtctgatttacgggcccagctctcccttcaacgactcgcaaacattgcggcgcttattgacaattgtgaagaacggcacttccgtcagcaaagtggccaaacaa

SEQ ID NO: 18236 - DNA, 1639 bp, Heterodera glycines
  unsure (1)..(1639): unsure at all n locations
gtcaaacagcttngagtttgaaagccatcggaatccnggaccctctggacncaaatgacgacgcattggccttggctcttttcaatgattcagtgcaatttaaggggggcagatacgaagtgggttggccatggcgcccgggaggtagagacaggctgtctagcaatttttctttggctttttcccgtctgtcggctttatctcaaaggctcagggctaatcccgaattaagggaaaaataccaagcggtaattacggaccaaattgaacggggaataatcgaacccgcggttcggacaggggcaggtgagcatttcatcccgcatcatgcggtcataacccctaaaaagctgcgggttgtcttcgatgcttctgctcatgaaaagggaaaggcatcgttgaacgaattgcttcttcctggccctaatttagtcccggaactggcgggaattctgttgcgattccgggcctcggcgtaccccgtccttggggacatcgaaaaggcctttttggccgtcggtcttcgggaggaagaccgagaagtggccaagttcttgtggccaaaagacccttcccaacccctaaaccccgggaatttggaaatttaccgatttaagagaatcgcgttcggcatcaattcgtcgccttttttgctcgcctccgttcttcggcatcatttgtcatccctgggagaccccctggggatggctcgaaatttttacgtagataacttgttaatttgtagcgagacgcccagcgaagcggccgccgccattcaaactgcccgtcggaccatggccaatgccggaatgaacctgcgcgagttcgttgcagctgatcccttgattttgtcggcactttctatcgatgatgtgttggtgggcgacgtccaaaaagtcttgggaatttcttgggacctaccaagggagaagctaatttttgggttccctaattcgtgtgatttccctccaactcgtcgaggggtgttgagtgctgtggcttcactctttgacccattaggactttgcagtccgtgtctggtcaaagcaaagctctttttccaatccctttgggacttgggaaccggttgggatgagccaattggagaggcacacaaaaagacatgggcggtaattacctccgaatgggacgcaccccccttgactttcgctcggttgaccccgtgtagccaagcagctttacaattacacattttttcggatgcgggtcctaattcctttgccgccgccgtttacctacgcgccgagcgtaacggtcgggccgaggtttccctcctttttgccaaatctcgcctacggcccaaaaaattcaaaaatgacggcctaaccatcccccgtttggaactgctgggattggtcgccgcaattcgggccaaaaattttgtggccgccaattttgacttgtcttttgagaaaataattttttgggcggattcccaaattgccctttcttggttggctagcaatgccccccaacccgtgtttatagccaatcggctggcagaaattaggagggagaaaaatgccatttttaaatacgtccggtcctgtgacaacccggcagatttgggcaccaggggaaagccccaaacgaattaagggatcttagtctttggcat

SEQ ID NO: 18237 - DNA, 735 bp, Heterodera glycines
aatttttcctccgggccgggcccccaaaacttctttttccttaaaaaaatttgctcaaagtcgaaaaaattggttatttttggtgaaaatcagttaaaaaatgcattctaattctctaattttcaaaaatttttcgcggcggcgcttactgacactgccggacccttgttcccgaaaagttttttgtttttcaaatcatttttttgcggcgcgtttctaaagacttttaggagaaaggggtccggcggtgccgcggtgccgatagacgccgccgggaaaaattttgaaaatttggatagatctctaacagattttgtccaaaaattataaattttttcgattttgagcaatatttttaggttttttggggtgccggcgatgccgataggcagcgccgggcgaattttaaatttaaactttattttctaagagattttcaccaaaaaatttatgaatttccgtgaaacttttatttatttttttatattttgtcaaaaatattttgaaaaatatttacttttcatgatttagtcaagaaaaatttaactttttaatttcaacgaaagaaaaattgtttttaaattttgccaatgatgaccaatttttatgggtatttttgtttaaaaaccctattaatcacaaaaaaaaaattaattaaaaaaaagtcaaccaggatagaactcttgacaaaagtagtgttagtgttaacgcactaactaccacaccactatccct

SEQ ID NO: 18238 - DNA, 1351 bp, Heterodera glycines
caaaatgaattgttcgtcctgttatgtcgccccaacccgaaaaatccgccagctaaacgacgaatgtcatttttgaacgtctgaaacacattacaggcacaaacacaagtgagcagggtgatttctggtctataaaaattaaatttataatgaatttaaggcgtacaaacatcgcaagacgatgacattgaaaaagaaattaaggaattttcaaagtcgcccgtgatgtttttgattatcaccgttccaaattatcacccgaaactgcagaacaacttatttttttgaacaagtctctcccccagatgaattacaattattgaaaccatttatttgttcattttattaaacttataatatttagtatttgtacatataattgatgaaaattttgcgggtttttttccaaattaacacaagaaaattaaatgtttaccaatccggttccggatccggcaatatgaaaatccgggttgaccggattatgagagaccggatccgggatccggtcattttttaaaataccagtccggtccggcccggagaatttggaaatctcggtctctactaaaaagggtaaattgggtatttaagaacactaaaaagtagctaccaaattttattaaagttgccaaaatatttatggttgtgttttttatggtcctgtgaactgcaatagccgaagaaaatatttggccaattttatcaataagcggtttattttcgaatataggatttgttaatattagttaaagacgtaaatgaaatttcctttaatagtttaatatttggcggtgttcaattttcagtgccaaagtttcgatgtccatttttctgttgttttttccagtacctttttttaattaaaccatttttgtgcctgtaaattcaaattttcatcttaataatttcgattttaaaataatttttaatccttttttgtattgttttaatattgattttagcaataaataaattctttattatttaaatggtgcataaaaaacaaaacttcaccagtgaagaaaacggagagggaagtggcgataaaaagggttgtacgctcccttcaaaagctgctcaaaaggttcaaagctcctttcaaaagcggttagaaactcaaacccaagaacaaattgttattaatttggatgattctgaaaatgaaatggatttgtctgaaagtacaatgaatattcaatcaacaagttgattgattcttggggatacatttgatagaactggttttagagaaagagagaaaataagagctgaaacttggagaaaaagaaaaattgaacagtcagttaccgatttagagacacatagacaaaatgagaaagaaaagggt

SEQ ID NO: 18239 - DNA, 2499 bp, Heterodera glycines
  unsure (1)..(2499): unsure at all n locations
caaaagttggacacaattcggcagtatancagcgcgacatcattcgtacaagccgccanaacggcaattgaagtgaatttgtttttttcgaatcgaattagcatttcactcatccgtagtgcgcagatttcaggaattagggaaagactcaaaaccgggaattcggggggtggggtgtccgtatttattagactgtctaataatcgtgggcgggaggnatatgtggtggattagggataagtccttaatagtcagaagaattgaggaggctactgggttaagccttttttaacagattccttttctatatatttttttgaaaatcctctaatgaattttaacattaaaaatttttagtttaaaaaaattttccttgactttggataacagagtaggataaaaggtcgctgaacgattttttggatcataactttttctttctaaaaaattaaatcattcttggaactcttttaaatttcgtcatgtacttacaaaaagttagggctaaaatacgcaaaactgaactgactttttctgactatctttgtcatagaattttagttgaaatttaaaaaatcgtccagcaataatttttgatttttaaaagttttaatattattatttttttcaattccacaggaaatttcaaaagtacgccgacccaatgctggactgctggcgacagtgttttggagcggcttaaccggcactgacaaagcaaacgaattggcaaatgcaatgaatcagttcaacgaaataaatcgtacacaactttttgtggtctcacttaatgcaaaagccaatttgacaaggcttaaggtgattattattgatactgattataattgatcaaaaaaatatttttaaattttgattatttttgagtaaaaaaacattaaattatttaaatttatgttaaattgttaataataaaattagttaaaattaattgcataaataaatttgattagtcagtgtaagattggaataaaaaatttaaaaaaaatatattttaaggaattggccggagatcaatggcacgtttttgtggagggacgcgccagccaatttattggagagggtaattttttttgtttcttaatttttgatcatttgttttatttatattcttaagttattctttgaaattttatcatgaaatttcctaaaaattttttagtgtttgatagagatgccattttttgtcatgataatttcataaatcaggattttttaaaaagttcttaatgtatgagattttatgaaattttccaagctgataccttcatgcaaagttaaaaaaaaacccttttttcaatattttttaacattttttgtttgaagcttcacaacatcttctcgactgtgtgctgcctcccagcggtgcccaaatgcactcatcaaacaacaatgacgagccggaactgctggacacccatgagccattgaccagcgttgaacgtgttgagcatctgcaagcggctgctcgtgcattccaaaaacatccgcttggcaattgcaaagatggtaataattagagcatgaatttttaatttttttttttttaattttctgtgaatacgtcgttaaaaatttcagggaattagttgttttttaattttatataatatcttaaagaaaggatgatttatagtttctgatagatatcatagatttgtaacaatggcaatgaattattaatatttattaagttttttttttaccataaattttaaatttgtgataataggtcttaaagtttctgtgtgattgttttgaatcagataaacagataaaaaaatttaataatggattcttaatattcgtaaaagttttcattaagtaacatagattaataatgggtgtttgtatttgtattgtttagttgtaacaaacaccaaaagtttgtaataatcatagattgtaataagtggtattaatgttttgaatgtgttcatttgactgatatcatgttttgtagagtttgtgacaaacatcatatttaataagttgtattaatgtttcgaatgctttgatcagacatttcatgatgtgtaagttgtaacaaacaccaaaagtttgtaataatcatattctaataagtggtattaatgttttcgaatgtgttgatttgactgatatcatgttttgtagagtttgtgacaaacatcatatttgtaataatcatagattgaaataagtggtattaatgttttcgaatgtgttcatttggctgatatcatgttttgtagagtttgtgacaaacatcatatttgtaataatcaaagattgtaataggtggtattaatgttttcgaatgttttgatcagacatttcatgatgtgtaagttgtaacaaacaccaaaagtttgtaataatcatagattgtaattagatagtaataagtggtataaatgttttcgaatgttttattagacagctatcatgctttgtaatttttaaacgaaacgattatatttgtaataatctaagttattt

SEQ ID NO: 18240 - DNA, 853 bp, Heterodera glycines
cgtctcaaactaaaaatttaaatatttcaatttttaaaatttaattttttattgctcataagtttgataaaaaaacaaccaaattttcaattcatgatatcattcaatagatctcgaaatattctgttttcctgtcaaaattcaaaaaaaaaattgtcacttttccaaaagttagtaaaaaaacaattttttttttttatgtttttctggtcattatttttttgaaaatttacgaatttttttgaaattttgaagcctcattgtaaacattttgagctatcgacagggacggtcccaggattttggcttggggaggtacctcagcccgggcgacgacctttttttcacaccaaacttttttgcggcggtttttccaaaaatttgagacaaaattaccaagaattatttatcaaaaattttcaatttttgatgttttttgactaacatcccaccacccccttaaggctatcgactaaatttttttttttaataaatattttaaattttgttgaagtaatttggagaatttttatttttaaaatttgtccacgaaaagttcgttttgtttgaactttaattgaaaatttttagggggtagaaaattagtaaaatttaaactttacccggcactccgtttttagtcgaacaaattccttggcaatttcgtccgtttgccgttggctgagaatgcgcagcaaaatcagtcccgtctcgtcaatgtgcaggcgacggccgagttggacccaacatgcgcaggaacctgaaaaacaggggcaaaaatgttaatgactgtactgtatactgtatgacaacagaaaatgatacagttcactctcagctttgagcattttga

SEQ ID NO: 18241 - DNA, 2262 bp, Heterodera glycines
cagcgacaaggcatatttcaacgattggagttcgggcgatttttcgaaaaacgattttttcaggccctgccctccggcgtggaaacactgaaaaaacaaccaattaaaggtaattaattaattaattaattaattgcccggacctctttgattgcatccaatgcggcgtcgagcaccgcgcactgtttgggcgtcagtgaacgttcgctgtcccgggcaacttcctaaattttttttccaaaattaaatttgggttaaacacaaataattttggccttttgatggaattattgttattgtaatcctttgatcagagaatattgtataaaatttttgaacagggctctctctgttcatcggtctgtaaatctcgtgggaggaagtttttgggaaaatgacttagaactctggtggcaacaactttgatcagtttttcgttttcgtttttagttttaattttgggttttggcatttcttcgttaggaatacaatacaatcattgccatttgaattcggtttcggcattttcttaattcgatctgtggatcagactacaactttttggtactttcaaatgaaatttgggcattttatttccaaatttttaattcagttttggaatttttatttgaatttcggtccattttctaaatttaaatttgagttttcaattaaactttggcatctcaaccacaaattgtttcattatttgatcgacgaaccgaaccctgtcgagcttaccatcatatctttgacggagctcatgctcttcacgccctccttcagatgggtggacatcagcttggtgacgccgccaatcttcgcatttggcaactgtttgagcaactgaaattatgccaattttttgcaataattaaataaaattttaattaaatttaaattttaaaatgataccgctttttcggatgaacccaacgggggaagcacaacaaatttttccatgctaacaatggtgattttccaaagttcctgcataaaaatatgaagaaatgtttaagaaatcatttaattaggggtaattagttaaataattaaaattttaataactgtctaattattgacaattagttaataattctatatttttaattaggggcaattagttaattaatgaattaggttttaatttttttgcataattatcgagatataaaattaaattgatggaggacggcaccttcaaaatatatttgagcacagttttttcgcattgtttggcgtaacgttgcagcgaaccctccaacaaatccatcaacggttccaacacgagatcaacctcctaatattattaatttgcaatttaataaatctcgaagataataaaaacaaattttgaaaaattttaaggcacaaaaaataaatgaaaaattaatttaaaaaaattaataaaatttgcttaaaaccaaaataaataaattttaatatgagcaaaaaacaaaaatatattgaatataattttttggcaaaaacaaaggttaattaagcctaattaagggcaattaatgcggtggaataattaattaccccggccatttgactcttctgcaattgtgggcctttgattttggtgagcaaaatgccgagtttgttgatctgctcctgaatgccatgctcaaggctgaccacaaattgggctgacagtttgtccaacacattgttaagcttaatcaaatttttaattataaaaaattattgtaaaaattatatttttttaaatttttttaaataatttaaaattatttgggattcacctttttctgcaaattgttcaacactttgtttgaatccgcatccaaatttgttccacccatattctcgtaaattttctcaagttgtaccctaaaaatttcaaaatttaccctaaaatttcagcaaaatgtcaaaaagaaaattttcaaaaaaactaattgtaagaaaaaattttataagaaaatttcaagaaaaaaaaaatttttgaaaatttttctaaaattttatgatgaattgctaagcttttccaaaaaattgctgaaaatttctcaaaaaaattttttttttcttaattttcttatattgtaaaaaaattcatggatttttttgaaaaatttctaagtttggagaaattttttttgaggaaaaatgaattgcgcccattttttgtttttacctcaattgctgcacattgttcatcaaaatgcatgccaatttttcactgctcacaaatttgacaaaatctttttgcaccatatcagcataagcgag

SEQ ID NO: 18242 - DNA, 1333 bp, Heterodera glycines
atgaaaatgacaatgggaaggagcagtttttctgttctcatttccaaagaaaaagccaaatcccttccgccggagggtctcagggactaacaatgcctaataagctaataacgaaggggcagatgggcttaaacttgataaagaagaacattgtttatacattcgatttctttttccttttacactttctccaaaaagttcggagcaattaattaacaaaaagaaaaaacattgaaattaattgaagaaacaaataaattaacgtaatgtgcatggctcagcccttggccgaatttgttcatttcgctgtccattcccttaaataccgtatccatttggcagaaatttttggatggcactgcaaaaaaaggacgaatttggtggctgagaaacgaatgcgaatgaggcaggggggagatgaattggcgtggaggggtgggagttggggtgggaatgactctttgtgttggccaacgaatggcgggggaggagggcactttttgcgatgccacactttgggataattgtccattttatggagtgaaaatcaaaccaacaaaaaaaaaactgatgcatttgcctcttccgtcgtgccctgtgccattaatttaccgtttccgttggccacaaattgtccaaattggagactggcggcgtaggcacaggccaactgatggtactgcccgtagttgggggcgactgtcggaaaaacggcggcacaattcgcatttggatgagaggggccgagaccttaatcaaaggcatttcgaacgaagtgtcaaattgggaaaatgccatctgatcggtcagaaaagtgaaaagacaaaagcaatgggaaaggaaaaggagaaaatgggacggaacaatcaaagggtgccttttaagaagggaattgggggcgggacaggttgaactttgcggtgaagagatgatggtcagttcagtttagccccatcccataaaacgagaaatggcggggagggcacccgtccccccccccaattccccccaattcccactcatttcgtcccatcccccgtccttaatggcccttggcgaatgggatcgatggattggtcggctggggacgggcaatgaacgaacgaatgaatggcagatatccccgccgccaaattgcccaattcctgacggaccgcaacacttcccgccgaggtgggcgacaggcggcggaaagggcacataaatctcccaaaattggccctttctctcgtcaaaaagcgctctcctccctccctctctgattactgaccattctccggtaagttgctaatttgctccaggcaatgcaaagggttggcggccgacgcaaaag

SEQ ID NO: 18243 - DNA, 1598 bp, Heterodera glycines
tttttgggcgacggcgtcggaaggatttgccccatgggatgcaattttgggaagcggcgaacggaagaggaagaggaagagaagggagggcagggggagggggaagagtccttcttcatccatcgtaaatcagcaccaaagggttgttgtgagttggccttgaatactttgggggggggggggaattcgaattggcggtgcgaaacggaggaaaggcatggaaaggggggaaaccgcacgaatggcatcatccgacaaattggcaaagaatgaaatgtctgataacgatcagtcacttttgacttgcttctattgactgatcggtcgttcttcgaagttcgactttttgcctgaggccaaaaaacccaaaaataaattctcgccaaggcgacggacggacacattcccggaggggaaagtgggagagatcaaaggataggccgactacttaataaatcacgcgaaaggactgagggagaagaaggggggagaaagtgtggtggaaaccaacgacgcaaaagtgagaaatgggtagggaaagaaggcgggggatgaatcagaatcagaaccagaagggagggaggaggaagaagaggaagaatggaaggtgaagaagagaatgatgaggaagaggaggaagaagggagggagaagaggaagaagagagtgatgagaaaaaggaggtagaagggagggagggagaaaaggaagggagagaaagagaggaaggaagagtgaggaaaagagagaaaaggaagaagagcgtgatgagggaggaagaggatgaagaaggaaggagagggaaggaggggaagaggaagagagagaaagagaggaaggaagagggaggaaaagggagaagaggaagaaaaaaagcgagggaagaggaagaggatgaggggagtaaataggaggagagaagcagacgaagaagcgaaaaaagcaaattgaagaggaagaaaaagagaacgagaggaggcaaaagaggagttgaagcgaaagacacgaccagttggaagggaatctgcagagaagatgaaaaaataacaaagcattcgaattattttaattagacacatgcaattaatttgtgagttaattgagaagcgctcgagcagagggaagagggaagagagtccgtcgcgttctcttcccatccctttgctcgttcctccctcttttgctccgtttggttcgcacatttttcggctccatcaaaggggccggggaggaggagtccccccccgggggggggggggggggggttcccttactctcttccccccccccattcagtcagccgctctttccttttgctcctcaacaaattcgacgcaaaaacgactgcgggaagatgggcagacggcacacttcaaaggcaaacggaaggcgaaaaaagggagaaaaaggctgccgaagggcgccacacacgacggaagaaaggaggaagaagaagaagcaaagctcataaaattggagggattcaaaaagtgaggggaaaaggggggagaggggaggggggtaactctttgggagctttgggagtgatgcctttggatttgaaacgccgtcggcggacctttgggaggaaatgggcg

SEQ ID NO: 18244 - DNA, 1141 bp, Heterodera glycines
  unsure (1)..(1141): unsure at all n locations
aaaatggaattttataaaattnttcataggaaaaaaatgtttctctaattgtaagagcaaaaaacaagaatttgtagccacttttcgccaaaaaggggactattttttgggaggggggggggtagtttcgccatgaaaaatttcgactttttgggggtctgagccccgaatttacggcatacttccgaccctttgagtaccaatgcttttcgaaaattcgtcccgtgacatgagcggaaaacgaattttgtaaagtgccgggccgagcatttggcgtcgattttcgcctgtgcattctttgccatttttggcacattgctcatccgcccaacggagtgcctaattaataaaattgattaattaattttaatttgtcttttctttttcaatttttaccgcattccaaatggcaatttcgccgctgtgcttttgcggaagattgtccaaaatttcgcacaaaaattggttgttaactttcaagaactgtttcattgtgagctcattgttaaaattgatgtggtccaaacatcggcaagcgaaggcctaaaatttttttttttatgaaaatccaaatatttcacgcgttttggttttaacattttttaatacctaattggacccaggccggtatccagaaaaaaaaattttcggctgaggcacctgatgaactttaataactttgccttaaaattcttagaaaatttcacattttcttgaaaatttattaatttttattcacccccatccccatccccgaatatgggcctgtctggacctgtataatgcaaattgtctgctttttttgagtccgagatttttttcctcggaatttgaactttgatatcattcgacagacctatgttttctctattagactgcaaaatttcaaatattatagtaaaaaaatggttcatttttggccataatattttgaaatttaacgaaattttttgagttttgcagactaacaaattggttaaatttggccaactatgaaaggagttgtaccccaaaaacacggcggtctgtcagtcgaccaaatgtcccgcacatcgtcgggattattgtatgatttttgattgatgaaactctttcccactccctccccataaattgtgcttggataacgcatcaaaacatt

SEQ ID NO: 18245 - DNA, 1336 bp, Heterodera glycines
tttcatttcgaatagttccaaccaatgctgttctgctgtttgactgcaaatccctaagctcattctcttataatgggcatggggtcttttgttgccaattattttgagattctcatgacaatcagtgacatcccaatagttttgtcggaaatttgaagatgccttaaactacttcattggcaaattaatggattacatatgcaattaatgaaaatactatctaaaaatatatttataccccttaattcacctttctttgctctggttctgtgctcaaatgccctaatttagctcccaattatcttgtgatcatttcgtatttgtgaaaatggatccacagcgcttaaaaatgaaataaatttccgaatatcaaaggtaacatctaatacgacagaaagcacttctagttttaatatcgcctcgccttacgtctataattcacgcatgtctttacacttccgagattgtgttacaaattttcatgtggatcttccttgaatttctgagaatattgttcttttaccacaatctttccatttattagttccccccccccccccccccaatgttcccaaaaagttttttggaaccgcccacaaaaacgcgatttaaaaaattaatagattgttaatttattcaaaaaaaatccagaattttgggactcagaaaatccaagattcccccccccccgcatgaaaatttaaaaaaaaatttctatataatggaaaattcttcgaatgcctcccccaatgagtacatattttaatataggcaattttcgtaacaaagtgcagtcaaattttcaaattttttttcaaaaaaactttcacttgggaaaattttattgattaaattgaaaattttgtttttaaatgcgtggtccgcggccgcggcaatttgaatgcgcgatgcgcggccgcggtttttttctgtgcgcgctccagccctgatgcacataacgccaaaatctcgcgcacaaataaaatttgataaatacggactcgcgccccagcggatttttggctatgttcgggtgggacccgaagagacatttatttaaattaattattttcatttatgtttatttgtaggacgaggatttctagttttttaactattttttctgcagctttatttagacgggaattgcacgaaaaacacatttttagctcggcaattcttcgttttaatgccactattcatcactaggaatcactattttggagccttgtcattatttttgccactattttggcatttttggaaaacttcccaaaattgcaataaaaacgaaaaatacacccctaagaatcgacctaaaaatttttcaaaaata

SEQ ID NO: 18246 - DNA, 1378 bp, Heterodera glycines
taaatttggaaaaattgcatttaatttcggtttctaattgttaggaatttcttcgtgccctcaccacttcttcggcgagctatataattcgacttgtactatttgatgaatcaacggaaattgggccatttgaattggtgaatgaacggaccaacgaaatgctaacattggagaaagaagaaaacaatgatgaaaatgtggatgaatacgacgaagatgatgaatatactaattgcgattggctgttcaagcgatggcagattgggaagacaattcaatgggaggacaaaaagacggacaatttgaacaatgtcaacatttcgatttgtcggtttgggtgagtggcaacaacttttaccattgttaaactgtttccagctgattcaactacccttaggccattgactccaccacagccgggccaaattaatgcaaaagatcttcttgaaatgaaacccgggcccagcggacagcagaagaaatgaatgaatgaattattaggaaatgaggatattctgatcgatcattatggatggaaagtgatctgataattgctcctcatatttatatgttcctttattcctttgaatgcagtttaattcgtttgggttttgggacttttacaaccgaaatgattattcggtactaatgtttaaattttcattgatcctaaaatcaaattgtgtagaatttgccagaggcgacaaataaaatgtaaaccaattgattttgttgaaaaaaatgaaggtttatgcattgtttgggtgaactttaatcaaggccccagaaaaaatggcacaactgatatagctcaaaatcggtaaacctataaagaatgaagtgtccctttcaaaaagtggatccgaaatctcatccaaatttaaaagtaaatacggaattataaatgtttcgaatagaaaatattcagccaacaaaataaacactttaaaagaaaaaattataaaagcaacaattttcattgaataattcaaattgatagccaatttctccaacccaattaattaatttccatataattaggcgccattttcgctgctttgtaccgcttcttctttggtggcggatacaatggcctaaattaagcgcaaattattcaaaattcgattaaaaaaataaatgcttttcattgctcaccacccaatacaatttgcggaattggacagccaaaaatggacattgttcaaatggttcgaattttcaacctcccactgaacgatttgtccaattgggcatcgcttcaacacccatcggaaaccagaagcccaggcacaatatttcgtttctttctccaaagtcagcttttcgttggtccgttcgttcaccaattcaaatggtccaattcccgctgacgccaaag

SEQ ID NO: 18247 - DNA, 815 bp, Heterodera glycines
tcccccccccccttcagagacgcagtacaaatgtgtcaacaaaaatctgtatgtacattaattccaaaatatatgcaaacttattcttctccattttctctaattctttgctccgttagacatttatttttcatttaaattttatttttaaaaaatattttttgcggttattagtttatacgggtgtttttttaaacggtcaaatttggcatcattcgaaagcatttggcggtggaggacaaatgagcgccagccagacttttggagtataactcctttcatagttgtacgattcgaaccaattttttattatttaatagtccaaaaaattctctttcagcctgccaaattttgaaaaaatttcgtttagtttcaaaagttactgtccaaattggttatagatttttgaaatttatcgggtttttgaacaaatagaattcgtatttgttaggacatatccaattcatatgaaagaaatactccaaaaaccgggtcaaaaaacccaaaaaagccaaaatatatgccaacatttaaaacaaacttgctcaaaaagctgattttttatcatttcgctataaaaatcccaaaaaatttattttgcgataggagccgacagaaattttgaacattatgcgtgccaaaacgctatttttgaaaaaaaaatcaatttttttttaaatgccaaatgtgccaaaatataaaaccctaaattgggcgcgcaggttgggcgccagcatgtttttccactataactttctataacttttttctttgtcatccgaaatccaacattattagtgtcattcgaaagctta

SEQ ID NO: 18248 - DNA, 2496 bp, Heterodera glycines
acaatataaaacttgatcagatttgtgatcagcgatccccgagaaaatatttatataaacagcatcgtataaaaagtttgcaaaaattatgtccctctaattgacccaattggataataattaaccaattaggcaatcattttattatgtccaggtaagttcaattctccctaaacacctttatggtcactgtttgcatggcacttcggtcaatcttcggcttttggtgacgagctttggccaacaattttcggctcggatcactggcctcgcctggtccagctttgttcactgctttcacacggaattcatattctgaaatgtcagaaaatcactcttgaataaatctatatttttctcgaatcttcccaaattctattaaaaaatcaataatttatctaaccttctccctccttcagtccctgcacggtcgctttcgttgtcggtccaccaacacgggcgcactctttccagttccgatcatgcttgctcttccgttcaatgatgtagtcctcaatcggtgctcctccgtcattctttggcggctcccacaccagatcggcacggttggcatcccaatcgacaatatccggcacaccttatgaatttaatttaatcaattaattaaaattattttaaaaaattattttttctctacccggtttgccgggctcgtcgtatggatttttggcaacaatttcctgctctgtgctcagtggctccgatttgccttccttgttcaccgctttgacacggaattggtattgctggcccttcttcagccctttgacttgtgccgcgcagtccggcacttttgcgcatggcacccatttgccaccctccaatttctccacctaaaattcaaaaaaatgcgatttgcaaagataaatcggagtggaaattactataaaagacctaattataaaaaggaaaaaagaccaaaattaagacaaattagaaacataaatgatataaaaaatttcataaaattaattttcattcaaaccattattttttcgggtgggttttcatcaaaaaattgactttttataaatttgtaatcctttgtaaattagtaattcgtccatcctaaattttattttattttttaatttaaaattctgtcaaataggactaattttaataataaattttgcgttttcgcctatctgacggtctcaaacaaccaatcaaaaaaagtcttatgacgagaatgaaaaagtgcctttcttggatatgttatcgtgtcccccccttattcccgatcacttttacctcgtagtgatcaatcggcagtccaccgtcatcctcgggcggcttccaactcaacgcgcagccgtcctccgtaacgtcgctgacttccagcgggccgcgcggcttgctcggcttgtccagcacggtcagatcagccgttacggtgtccgtgccgctgctgttcttcaccaacaatgcgtatgcaccgcgatcagcacgtacagcagccgggatgcacagaatggtgtgatcattctttttggtgtccacctgggaacaaatggataaatgaatgaatgatcagggaatggctaacattgatcggaaaaaatgttgaatggtcagagaatagctaatgggaggcattgattgaaaaaattttcaatttaaagtaaattttcaattaaaattaagaatggcgacaatactttgatgacaaaatcacaaattagcggtaaaaaaaaaaatttttttgtttatttaaataaataatttttgattaattttaatcggaattctaaatattaattgctcaaaattttgtttttgtttgaaagtaggcgttgaaattaaaaatgttttaaaaaattgaaaccattaagaaattcgatgaaaaaatgatgaaggtttaaaataagtgcaaattgtttgaaacaaaaattgccaaaaaattaagaaatgtatcattaatttgaagaattattttaaaattagcccacttgtattgatccgctcagatcagtgattggctgttgattctttgaccatgtcacttctggcgccggtttgccgccaaacttcaccacccatttggcagtttgaccagcgcgcacaaccaaattcttcatgtcgtcatggttcagccatggacgaactgaaaaaacaattagaaataaattatgatgatcactaatggtttagctaagcattgaaagtgaccggagagaaaattgaaaataaaatatttaattgttatttaaatataaaatttgcattcattctattaactatttttttctaaatgaaatgaaaaagttaatctattcaataaaaattgaaataaatgcaaattatttatttttaaaaaagcaattttattttttagggcactggaattttgaaaaagtcggaattcgggattggcataaggcgggataatctcgggccttttcaaaaagccgggatcgagatcccgagaaatcccgtttcgacgggattcaatcccgtcaggctccaattttt

SEQ ID NO: 18249 - DNA, 655 bp, Heterodera glycines
gtgcgggggtttgcctgcaagttgttttggtcgggatgggatttccttaatcccctctcccatttattttttatttttaacccctcctcccacttttctattttttaatcacccctaccattttcctatgttttaattaattaaaaaaaattttttagtttgggcatatttttagagatggcattccgcactcatttgttcatttgttgaggttctttctgatcaatcactttttaaactgttatgaaaaatgaaaatttgctaaaaatagtagtgaaaacctaatatctcgacaagtcaaaaaattcaaaatcattatttctatgtcgcctttatgcctcctattaattaattaccctgtttttgcccacctattatctctccaaaatttggtgtgattctgatcacttttgaagagtcttgaaatgaaaatttgaggaaaagagtaaaaaaaaaatttcaatttaaattcgaaaaatccaaaaaacatttatcgtttaattcttctttgagggattagcctcatttttgctccatcattgtgattggcccctggggcaatgccattttttacttgcctggcactgtgtaagggtttttggcgagaattgtttcaccagtcaatggttcagattcgccaatttcgttgaatgct

SEQ ID NO: 18250 - DNA, 1998 bp, Heterodera glycines
gaagtcgtcaacgcatcaccaccgaccacttccaccagcagcacaaccagcggaagggccacgacggtccatcagacggcggccacggcggccaatccatcgacaaacgccacgggcagaagcagtaccagcaacagcagcagcggctgcggcggcagcaaattccatttgcccgagttgaaagttggccgaccgcaacagcagcaaagcgcggccggcgcatcggccggcggcgatggtaaggggaaaaagtgggagacggacggaggaggacaaggagatgaacacatgaccaaacttggttgggcatttaggacacgaacggcacgccggggaaaaaatgccatcgctaaaaatatccaattggagaaatcttctttttattcttttttgtctactcatcagattttacggtttgtgaaaaaattcgtcaaaaatgaaaaacaaatccgagttggaaaaatgaggagataattagacaaatagacacgaattctttccttttttgttgttgttacagattgaaaatgccaatgtcttttgttcctttagcgacttctgccaattcctacgagcgcaaagcgaaaagggaaacgaacgaagcgaaagacgacgcaaatgcgagggtttctttttcaatttaaaaaactattttttgtaaatttttaattttcatagaatccccaaaggcattaaattcgcgattatgaaaattatcgtttccggaagcaaccaaattcgaaatattcttagtggcgttcgacaaccgtacaattaaatttccgtcagcaaaatttaatttatttcgtttttcaaaaaaaaagtactaatgaaaaatcagtttcttaaattttggccataatttttggagtagtgaatgataccaagaaaagttgctttcgcttctttttatgtgaaaatttttgtctacccctcaaagaccaatcaataattgtccctttttctctgtcttccctgttgtcggttttttgcgtgtctgtcccaaactcaatcaataattctgccattaatttctctccctttctctgctcagattgaggatgccatagcgtcggcgatcaatggcggcggaagtgcaacggtggcggacattgcgctgctgcgcaacgggcgactgagcggcgcgtcgtccgtcgtcgccgcgggcgccaacgacgactttgtgcggcgactggtggacctcgtccgacgcgagccggcactgtacgacccgagccacgagcactacgggaacagacacgccagcgcacactttcgaaccgcaatttggcaacggttgtgcaaggagttggactacccaggtgaaaagcggattttatgggagtggggaaatggataaaaatgaaaggattaaaacggagggactgaaatggtcgaaaaacaggggccaaagcgaacggaaggggtcaaatgcgtcccagggaactttaaaaggcttaactttttttctcatttggccaaattttccaattttggcagcatttgaaagctctatatgtttagaagctgctttgaaaagctattttctaagcgattggacaattttaaaaaattgttacatgaataatgaatgattgggggactaaaaacagtgccattttcagatgatccgcaggcactgcaaaagcaatggaaaagcattagggacaaatacatcaaagagaaggagcggagaaaagggggcacaacaacaatgatggtaagcatttgagaggtttttaaattttgtagaaattttactgacattttcaggaccattccgaatcgatgacaaatggcacacgaaatttcaacggtaaaatggacaaaaaatattcttaattgccgcaattggttgattttcctgccatttttcaagagaccaaaacactgacaactttcaaaaattggccaatcccctcaaattccattgtttttcaatttatttattttttagtgttggattagctggacgattacatcggcgacagcgcaaac

SEQ ID NO: 18251 - DNA, 1895 bp, Heterodera glycines
ttccaaaatatcgtgccatgagatggtttccattcacatcgtatatgagtgaaaggttataagctgcttgtcttcgcaggtcatatcttgaaaacaaaaacaaaaatgccaatcaattccaaccaaaatgttaggggagagggagaagagcagcttcccccccccccgggtcagttccccttactccactagaaaaaaagaaaccaaaaggaatttttcaagtaaaaaaatcttagaaatttttttataagaaagtttcaagaaaaattttctttgaaagattttccagattttttatttattttttttattttatggtgaattagtctttttctaaaaaaatttcaggaaatttagatgaattgctaattgtaagtttttccaaaaatttctaagtttagaatttttttaattttcgggagagtgtaatggggggggggcgagggggggagggataactggcaattttggcctcaccataattgaccccccccccccctccaccctcccatcttgcccatttatgcccacctggtcgatcgttccgctcgcagtgtccccgtggccgggtcttcgctccacaccaaaggggctgggcattcgtaaaggacacgttcataacatttgagagcattcgcgaaaagacccatctgatggaacatccggccccatattgtattgaatctcttgagttggcacggacgaacgaaagtcggcgtatttcttcataaaggtcaatgcctgaagagaaaattatttgccgacggagacagtgaccaaaccctcagggcgaccatgtgacgggaagaaatgtcctttttgcaggaaatgtgagtgaatgtgagggcgatgagaaaagcgacaagcggattgcttttatcacgcaaatacacagtaaaaaactcgcctgttttttgagggttttaattttggttaactttttttgcgtgtaatttcttgccgagggcgtgtcgataagcgccggtgaccaaagaattgttgccagaaattatgtgcagaatttgtgagtccgactgttttgccaattgtcgcataataaaacgatggtaattgacacctaaaataaacgaaaaatgatgggaatggagaaatgtgactttggtgctggcaaaaaatgtaattcattgccgaataaatacgccctaattgccatgactcatcggttcttttgcccttttctttatttgcaggtgttaatttaggctgtaaaatacaaatttattggcagtcaaaggtttctgaaataccaaaatgtaagtcatatgaaatcgaagaaattcgaaagcgagttgatggtaattggccttcagactggcgaaaaacagcaaattgttgaaagtatgtgaacttaatggaaaatataaaatgaaaaaaagaataacaaatacccaacctaaagtttttggttttggggtgcagaaaagcgtagctaacgacgtgaagcatttcttcaaattctccagcagaataaagtgcttcagacaatttgaaagcaaaatcatggaactgaaaaagggaagagagagcatggaaggagataaactgtcaattttgtggttttggcatttctgcacgcgttatgctttatttatgcattattgctcacttcattggggctaaggtcagacaattgtcgatgagccgaatgcgcaatttgtccaaggcgtttaaccatcctctccagagaactgcccttgacagcttccaaagcatatttctttaacgaagaatgaataatgttgtctaaaaaattgatttcatatggtttttgatttaaaaaaatccagagggaagagcttaaactgtacgtatacttgtagtactcccataaacgagttcccatacttttaattgaaggaccaacaaaacacact

SEQ ID NO: 18252 - DNA, 1934 bp, Heterodera glycines
  unsure (1)..(1934): unsure at all n locations
atggtagcagaaaatccatcgtaaaattggcaccagaatattgggcacaatttcacggaataattgctagaaaatgctctattttttgctccttttttacaaataataaaaattttttgaatatattttggcaatgtcttaaatgccaatttgccctaaattttttggcaatcttcaaaatttgtgagggagttggtacagaggggggcggcaggggtggaggatgagaaaaactcgataatgacactttcagctaacattcaccacccccccccccccgccccatacccaccgcccctcggcgggggagcggtgggaggtgcgcggagagagcgccgcgccgcccgccgccgggccggcgcatcatcggacggtcggcggatcaccgacggacgacggttgagtgaaccgccgccgagcggagctaattggcgcccagcaacagcagccaccaagcaccatcaccaccatcatattgcatcagtgaatatagagcgtgaaatacatgatgcactttagacacggttgtgtgctgattttttttttttttgaggaattggccctcctcaaattttggaaaaatttggcaaaaaagggagtaaattttaatttttcataaaaaatttcatttcttgggtgatttttcctcgatttatatttttttttgtgaaatttcattgatataatcgtaaaaatgcttttttaatgtggttgtgtgctgattttttcggtgaattggccctcgtcgcattttgaaagattgacaaaaaaaaaagcgtaaattttaatttttctaaaaaattttcatttcttctacggatttttccctgtccttctctccccacctatcgcagttttgtaccctgcaattcagaattttggaaataacacttatactcgctgtatatcaccttacaaattagcatattttcttgggcatttctttgcgtctgtctacaccggagcatgtgttaattatttggaattaacgttggattagtgctaattaccctaaatttagaaaataaatgagtcagttggattggattgattttgtaaaacaaaaaaaaaactatttatgtacatttataatattgcggttctgctgtaaaatggagcattgtgaggagagggcgaggcatagcgatcaaaaatttaacgatcacaagactcgcgcagctgcgagtggggggtgagagtgaggttgggcagaggttggcagcgatagccggcgctagggggtcagtgtagaatggccaatttagtacgaggatcgaaatctaatacagtaagtatgtacggtatgagggtagtttcgaatattcattgcagtataaggctcattttagtacgcaaaattatggtattaatctaatacagtaagtatgtacggtatgagggtagtttcgaatattcattgcagtataaggctcattttagtacgcaaaattatggtattaatctaatacagtaagtatgtacggtatgagggtagtttcgaatattcattgcagtataaggctcattttagtacgcaaaattatggtattaatctaatacagtaagtatgtacggtatgagggtagtttcgaatattcattgcagtataaggctcattttagtacgcaaaattatggtattaatctaatacagtaagtatgtacggtatgagggtagtttagaatattcattacagtataaggctcattttagtacgcaaaattatggtattaatctaatgcaataagtattgtacggtatgagggtagtttcgaatattcattgcagtataaggctcgttttgtacacaaaattattgaattanaaggcaagtatagtaagaatttttttaatgagagtgaatcgtattgtagcgcccacccaaaatcgaaatgaaattttggagaaaaaaaaattgtttntggtcaaaaatg

SEQ ID NO: 18253 - DNA, 1726 bp, Heterodera glycines
  unsure (1)..(1726): unsure at all n locations
ttttatgtaggactttttatatgcatatttgcaattttagtgcaaaatttacatgcatattttgcgattttgcatgcatataattatatgatctattcataaaaacattactgttttctcaaaaaaaaacagtagatgatgtaccaatacaaaaaaaaaacgcaaatgtactgtataaaaaagagagtgagagagaaagatgaattttgaaaaggaaagatattatggaatgtgttattttggnngtgaaggccctctcattaaatttccgaaactgcttgattgattcatcgggcggcccaaaccgattttgcccatcgccgaaatgatgacgggccggcgaaaatagtcaaacttttcgatgattaattacatttggtgtgggggggggggggtgggcgcattgaaattatatattatgtattatttcaaatatgaaggaccaacaagtttttgtcacccaaaatcatgggatcacgagaaatgtgttgaaaataggaggcccgacagttagagaaaaagacgagagtcgacaaagtttagcaaaaacatactagcaaaaaaaaaaatggcagacagttagagaatttagcagtgtcaagagagtttagcaaaaaatagaggacagatagttagagagtttatgggaatgtcgagagagtttagcataaaagaaaaggacagacaattagagaatttatgggaatgccgagagagtttagcataaaagaaaaggacagacaattagagaatttatgggaatgccgagggagtttagcaaaaataaataaaagggcagacagttagattagaggttgtcgagaaatttttcaacgaggtacccaatattattaaattatggtagaaaaaaatttcaatgacatctttttggacgggacgaatgcctgcccccacccatctcccaaatgatggatgttgtttttatcagaaatttatcattaacaatttttgagcgatgtctgctgatcagcaccgcctatcaccgccacaattaactaattagccatacggtaggggggcaacgccgtaccgcaactatgtcctgatcacaccaaatttgggactgactgcagcctatttcttttaaaatagcgatacaatttttggcatttgtcttggctccattgtgccctaatttagtgattttttctttttggcacagacttcaaaaataagtcgaaaccctagaggtgttatggtgacacagaccctaaaatatgaaaaattggcatatatctcaaatgatatgaatatatatgcagagagttccaaaaatggcaatatacaatattgatcaataaaattagctaaaaaataatattgttaaattatggcaaattgcaaaaaaaaaaaaatatatatgtcaaaaggccattaagctgatgaaggctgctcgaatagaaatttttggaaatgtcaaaatatggacaaattggacataaagcgcgaaatatggaaactgatcccatggtcccataaaatttttcaaacctactcattttcaattcacaattccgtgaaattctcacagtaacataaatatgttattaagtgaatgtgtataaatgcaaaaaggaagaaagaagtgaaaaaaagcatttattattattttaaaacgtgataattaattaattttataatcagtttgagaaaatgttggtcaagaagaaaaaagagaaaattctcttttttttccacctccgat

SEQ ID NO: 18254 - DNA, 2183 bp, Heterodera glycines
atattcactttttttttgaccctttacttttccttttttaattacatcatcctttcaattttaattaaagtacttcaattacatcttttttctgccttttctctgattttcacacattcattccttttttttggcttctcccaaagcttattttctgcatttccattaaaatttcatcgaattatgcattgtcatttattcagtaaaaccaattttggcattaaaaacggttcaacatttaaccagttaggcatcacataatacaaacaataacaaaaaatcacacaatggctttatgccttcaaattcacaattcatttttgtcactaagcccttggcacatagtcattttaagcacacagcgttacctgccattttcgcttgacactaggagcacacagcttcgactagtccatggcttacgctcatttcacccattaattggtctcttttctgggagcacacagcttcgaccagtctcgtggcacacagccacaacggcactcagcccagctaggagcacacagctgcgactagcttttatcttttcatgctcaaaaccgttgcacttatcctttcgaaaacagccaaaatcacgaaaattaacatattatcacattaaaacacaccgcattgatcaatcaatgatcacaaaatatgccataaggtttttgtattaccgtactcagccaaattagccacagaaaatttgccaaatttcttttgcaagacaatgcatttttgttggctcatttgcgttttactgaaaaatagcaatttcccattgctttagtcctttttttttgttgccaaaacgtactttaatttactcttcctatctccaacaaggaatcaaaatttaaccagattaaaactgcttttgggtctgcgtccctttttaagtctgcattgttcaaattagtctttaatagcctcagacactttttgtctggaatgctctggaattttaattctctctctctctctttcttcaaaagaaaatttcacgcgggtcgtggcaccaaaaaggtgttgtgtccccgggtttaaggcttcaagccatttcaaattaccgttttaggagagaggaatttattataaggaaaagcattgacaaataattatgaattgaaaaccaggaataagtttgagtcaacaacaacctcagagcattttgggtgggtcagtgcaattggttatttgggaaaggattgccaaaggcaaggaatgacacagactgacccaccgcagacatctcgcagcccccgagggggaaattggatggacttatatactggtacaatggggatggactttggataggatgaggggtaatgacggaaaacacaaaagggaataagagaaatggatggcatatgcaacagaggtgaataggaagaaatggcacgataacattggaaatgagagggataggattggcttgggatgggatgaacagatggataagtttacgacgggattggtcgggagaaagtagggcaatgtacattatgcacaaaatatgaaattttgaatgctgcggatacagcatttctctcctcctcgaaaaaaaagcctcctggcttttgcctcatcacttctgatcagcttctcgcgtccatcgttctgatcagccttcgggcgcccattgatgaacatcatcatccgctgccgttcagttgaacaagcttcccatttgcttcattcacttatgtcattttctcttgacacccatctcgggttatttcgctttcacgttaatggcaaattttgcttttcctttcttcaaaacagtctccggttttttaatttttaatcttcatttcatagaagaaaatatccgcttacttcttacttttctttttatcaattttatctttgcatcaattttctcaaaatgtgctgctttaccttttcgaaggttttttattccaaaatattcactttttttttaccctttacttttccttttttaattacatcatcctttcaattttaattaaagtacttcaattacatcttttttctgccttttctctgattttcacacattcattcctttttttggcttctcccaaagcttattttctgcatttccattaaaatttcatcgaattatgcattgtcatttattcagtaaaaccaattttggcattaaaaacggttcaacattaaccagttag

SEQ ID NO: 18255 - DNA, 2172 bp, Heterodera glycines
tccatattcttgcattgttttggtgtcctcaagcgcaagaccaaatgtgttgttgagtctcagtgtttgtagagtgagattaaagcccctcccagtatattttctaatgttatccatgattttctccttcaatgttgccacactgtccgtgccctctatgtcatcaatggtgattgttttttcttgaacttgatcagaattaactataattttaatgccaccagtgggcaatggctttatcatcagcacaagcattgtcaatagacaagcagcagcgatgccaacggggaacagtgacatttttggggaggatttagtggcaatttgaaggcaaatgggagggtgtaattaggatgaatgtgcgggatgtgaagaactgttattcatcaatgtcaaaggcagccttttatggagcagaattctgctcaaacattgtattttgtagtatataaatgtagatgatcatatttgttcgtaaaatgaatgaattttaaggatttacatccatgtgtgtaaatgaaaatcataaaaaatgtaaagcaatattatcattgaattggtcgataaaagtaataaaatgacaataataataataattattattattataaatttgtgtatcacaggtgacagtttgcgggatattccggggtgagaataaaactgggatttgcgacatacctaaacattatcatctttcactcatcaaacgaagaaaagttatggcctaagaaactgatgatgaacatcgattggacgattaaacctcaaaaccatttttcaatgaaaatctgttaaaaaacggttaaaatttctattttttctcccgcgacgcctatcggcacagccgagcccccaaaaactcttattttttcataaaaaattggctcaaaattataaaaaactagtcattttggtgaaaatatgttaacaaattgcactcaaatgttcaaaaaaaaagtgatcacatttgttcgtcacaattctgatttctccataaataattgtgttttgtagcataaattatttaaagatttacttcaatggatcgaaatagaaaatcataagcaaaatgtaaagaaatatgaaaatgctcttttataaattggattggtcgataaaagtaataaaatgcaataattatattattaatttttctatatcacagctaatagttacgggacattccggggctcgaaaaagctgggatttgggatgtcatggaacgtcctgctgctgtgtatcgagtgcggagcgaatgggacacggactaataaaagaagaagaaatttgtaaatttactaaaaactctgcagttgaaattttcaaattttacaaaaagttcaataaaattgaaaaaatacactcctaaaatcaatttttcatatttacaaaaagatttatttttatttcgaatgatgaaagatgccaaatcgaattgttcattaattggtcatttggatttacgaaattccttgctggaattattcaactgacaacttttctatttataaaataattttatcagaaaaatgaacagttttaccctcgaacacctccaaagcaaaatttcatcaaatacgtcaacatttcgctgttttggtttacttcagttgggccccacacatttgggctctaaataaatcaaagaatttttcaaagttccaaaaaatattttattgaaaataacaaaaaatgttgacaaaaggtcggttaacataatggtgatcatcgttgttgggaatgtcggcgtaatagttctgaacctttgcaaaattctggcatcggcatgatacggtattttttcgttttttgaggcgaggcggctcaattccttattgacttgtttatgattgcaaaaaactaccaatccagcatcggttacattccggtaaatttcggaactcaatccaatgcattgactgcctttgtgagctcgccaatcgaaacaaaagtaatcgatgtcagcatttttgctgactcagcaagaattggcttaatattaaaacgtttaaaatgaataaaggttgagaatattgaatttcaaaattgattacaacctgaatcaaattttgctctcccaactttttcttcatgttacgcacaaaatgaaaaaaacaaaagttatggcgcaattcccattgaataaattttgtatgccattctcagttg

SEQ ID NO: 18256 - DNA, 1669 bp, Heterodera glycines
tagttaaatttgaagctgaaatggttcgtcatcaaaattcaactccatcaatccccccccccacattgattctctctttttcaatgtgaaatttgtagtaattaaatgcaaaaaaaaatgaccaacattcaatttggtggccacgtcggacacgtaaatgcgcgaatatgtcgtcgaaattttgcgaattgcggtccgaatgacgctctgatggatgcgctcgacaagcgcagcggtgcggtccttcacaaagatgggcccgtgctcgcgcttcgtctggtcaaagccggccacgtcgccaaggcgtacagctgatgagggctcagcaatttttgtacattttaaaaaagaaaccacaccttttctttttaggaggggggggggggggggggggaaatttatctaaaaaattgttgcccttggaaacatcggactctaaattttcgtcgggaatggatgacaattagagacaacccggactcaaatgtccaaatgtgcgtttccattcgccgcgcataaaaccaactttgggtcagcagcaaatacggcgccaacacgtggcgaagttcggccgtgtggaagagactgcgctcggggatttcgccgatgagcaatttgaccagcacgacccatttgttcacctgcgaacgatttggggaaattaaagcccaattgaatgtggcatttctgcttgtgttcacttcctgtttgaagccgacggcgccgttttgtggggcctttcgaagtgcgacctgagaaatatttggaagggaaaacaatgcaatttcaaagcgaattgtttgacccaaattttagatgttacaaaaataattttactttttcaaattttgtgtacaacccttaaaaattggctcgtgccaaaacctcaaaatgtttctctgccgctttgtacgtctcggcgtcggtgcccttcaacgcttcgatgcgtcccaaataataaaaccaccgggcccaatcgctgttggaagccgactcgggcaaattcttcaacgcctccacaaaatcctgggcagcactaaaatgaaaccaccgcttttcatgcaaaaaaatgaatttataattttaaatgtctattaggaaatgtgaatttgcttaaaattgtgaaacctgaggttgtcgcagttgacaaaaaaggccaacactttgaccgccaaagtggcgctctctttgttgttcttctccgctttaagcgcaatcagtcgctggttaagttcaccaaaactaaatttacaatttttaaacgatcggattagtttaagaaacaaaatgttaaagggaaagcggacaaggaatccattttttaacaaaagtcgcgccgcgcacctttcgttttcggtcctttccatgtcgacgtcattcgccccattgacgtggttgttgatcattataacaaaaaaatacttcagacagaaatactaagcaaaaaaaaacaatataacagagcaaaacaatgaatttttaagcaagtacaactgaaaatttttgattctcgggcaacggaaacggaataaaattgatgattttaattttagttattttttggcgtaatgtttgttgcatttaatttaaattcaatgaaaaaattttaaaattaaatctggaatttttcgaatgtacgcgtaagggatacaccgctggacatctaaac

SEQ ID NO: 18257 - DNA, 2645 bp, Heterodera glycines
  unsure (1)..(2645): unsure at all n locations
aatataaatgatatttatcatttncatcataattattatnncagttaattgacaaaaaatgctgggaaanagttggacaaaagtgtcaaaaggttgcactttcaacggcactaagctatgcgtttggcttaaacaaaaatacttgtccaaaggtggcaaacccttgagcgactgttcattttgcaattcaatttccaactggcgttgcaacaacaaaattccaaacggtttaattgaatttttattttgaggcatttcatttgaaaattttggatttaaagagattgttgtgtgtttgaatggaacagtgaatcatggcgaggaaaatgacgaagcattcaccgaaataatgtgaagaaattttgtgggaggttgagggaaccatattagcattaattatactaattatgtaaattcaaagagggcaaattaaggtgtgaagatgcgcaatgcttctcagtgcgttgcgttgggacggacaattcgacgcttttccacaccaaaggatgtgttaccatgaaaacattgtggactgttagactgccatttaatgaatttggactaaatgaatgccaagcgatgaatgggccgacggagcacaattcttgtgatgggaacagatgcaacggacgcaatgaaaaggaaagcgtaagccatgcttttaaagcggactgacagatgagatttttcgattgtttttgactttatagagtcctttttaaagttgaatggactgggacggcattcactgttattgtggtgccatttttgaaaaaataaaaatattccctctcccaacatccgagcccagtcggtcgggccatgcccaactgaaaaacgagtacaaagatattatttaataggtaattttaattaggaaaattaaatttgataaaatgcacaaatttaattatataattttggttctttacggcagcataattaaacataaatttcccatattagtcatttgaagcaacaaccactcgattcttcatccattattatcgaatgccattgccgtccgtcgctttcattcattgcgcatcaccacgttgtgtaatgttctcctcccgacggcactgtcgacgacgccttcacttttgtctggtctcctccgagcattgtcgtcgtcttcacttttgtctgggccccgcctcgttccattgttgctgttgatggcgctggtcgtgatggtccaattgagcgtaagctttccggcatcagcattcgaaataagaacggctgcttcgtcttcattgttggcatcttggacatcattccgctcggcaccgccgtcatcgcaccaccaccgcttcttcctccacgaccatggccagcagctgagggcggcggccagtccatcgaatccgttggtccctgccgcgatttgtagtaactgcttggcactgatgtcgaaagctcatcgttgtcctgctggccggcacggcgtttacggcacaaacagcaaatcacaacaatggcacacacaacaacgaggctgaaaagagggggaaacaggagaatgattgtgattgatgatggcattggcaaaatgaaagccctggaaaactcacacgagcaaaacagagacaccaatgatgatccataacttgacactgaggccagcaaattcatttgtcgaagtcgtctcatcggttggtttcttgtgcttaacacgagtcgaagcgctggaaaaataggaaaatcagaaaacggaattgaggcggctctattgcatttttctcgacctttaaaaaattgcacgggaaataaattaaacggaatttaaaaactcgtttttttcacatttgtttcttttttttaaaacttggagaaaaccgaaagttttaaggtcgtggaaattgcaatagaacatccgccgttgggctgtgctttttgtttacccatggcaacagttgaaaacgatcagagtaatgaacaacagacggagggcattttgaaggacagtggaggacatagtgggagaaatgtgaatgaatgaatgttaatgcaaaaaaatgggggagacgaaggcgcttttatagcggagaaaaaagagatttagcaaaagcaatttttgaaaaataacggattaaaaagctttttgttcgaattcgggttcggggttcagaattggccgaaatacatgtcatatttttgattagcgagcctgaaaacctcggaaaacatgttttagtatgattttcataaataaaaaaaaaatttgcgaaaaatgtgggaggggaaagaaaattttgtataaaaggacaatttttcacgaatgcgaatcatttgcccaataaatttgctattcaatcctttttattcctcgccattttctgcccaaattttcttcatcgccgccgctaacaacaacgtaattcaatgtcttcgtcaacaaataatgatggagcccaaaacaacgccaaccccaacaacacgcattcgcctgggcgttcatgcaactcgcacaccatggccattctgacgccgatcaaaggacaaccgacggaacaatcgcatcagcaccaccaccaccagcagcagcaacaaccgacgcaacacgtgcccatccagcgngaagacatcgcaacacagacggaccaacaagcggacgaagaagcggcgacagcaccagcact

SEQ ID NO: 18258 - DNA, 1821 bp, Heterodera glycines
agaataaatttctgggagaataataaaacatcgaataattcatattttgtacaaaaccaagcaaaagtcagggagaatttgagttcattgaaattgcgcacaattaataggaataggaaatattgtaatatcaaataaaatagaaaataacataaaacaaaatttaaaaataaaataaaaatgccaattgcacatgcaaaatgtcgtagagaagtgttactttaagagaaaacgaagaagagattaaatgataaagaataaacaaggaaaagcggagaaaagagagagagaaagaatcaccggaaggaaaaagaagcgccaaattaagcgatgccaattaatattcaaaaatgatgctcaatttgattaaggaaaatggggcgaaaataatgcaaaagaaaggaaaggaggcgtaattctgagaaaatgaaaaaagaaatccaaagcaagcgaaaaaatgtaataataaaaggggcagagaggagagagagagaggggcagagaggagagagagagagagagagagagagagagagagagagagagaagagagagagagagagagagagagagggaaaatgagaaagggggagagagaccctgccaaattagggtaattgatcgagtaattaacatttggcaatgggttcgttttttcacctgtcgcaccattccaatgcttgtttatccatccaattcatctgtcgtttgtgaatggaaatgtcaacggtccctcgccctttcgtccgaccaataaaaaagtgtccattccgccgtcgacgcctttcacctgagcaaaagcagcttaatggcgaaatgagcagtgattatggcttttacctgtatcctatcgcggtattcgaagtcgtatcggtcgatgagcaaatcgcgagtgtacgaagagacctaaagacgacgaattcggacaaaagcgcacccaaagcgaacttggatacggttttttacgcccgtactgtacattcgactcgcaatgttcacagtgtccccctgtcaaatggtgaatatttgcaaaacattgccatttcaaacgcacccaaatgtcatagtaaagttttgtagttccgatgacaccttaaaaatgtttatttattggaatgaaattacaaaggggcaaaaaaaagaaaacacccacagtgacagggccaatgttaaagccgattttggcctcgaattcgaagttgagaaggtctgaagggggggggggcaatttatgatgaaattaaaacagaaagacaaggcaaatttaaattaatgccgatggatgggtggagaaggcacaacaacaccttggttgaagaaggccaatgcattttgcagcgcaatggcaaattccatcaattggtacaaatgttcgtaggggtgcagggaaaggcgacgccgttcggggttcagcccggaagcggccatgtaacaggggccaatggtctgaagggaggccgaaccgtagaagcaccagcagaacgacgcccaccttgatcttctccacatgggcaaagtccgctctgtccagcaattcgtcaaagtcgccgatcacttcgttgagaactctcagaaactcgcggcccccctcgaagttctcctcgtacatttcgtgccaatttgtaatctgacagagaaaggaatgccttggcacaaaaggggcggggcgaaccgaggcgaacatcactgcggtgagcttgtggttctcgctgtacttggtgttggtcttcaacgactcgaccgcatgttgcggaatgatgttggtcagcagccaatccgcttggtcccgcatcaaagtgcattttggcggtgtccctgcga

SEQ ID NO: 18259 - DNA, 1183 bp, Heterodera glycines
atttgattgaggtcacgctaatatattcataagtgcatttattcaaatgcatttcatttatattatatttttatggtttcaaaatttatttttattaaaatatttctctaaaaaaatttttgttttataatttctattaatagcaaaaaattattaaacgacaaattcccatttatttatgaaatgatgataaccatagattgggttaacaaataatgaggggtttaggttaaatttataattgctttaatataatatttaaaaaaaatctaacttttagaaggccgagaaatgtgcaaaatttcctcatttttaatgatttttttcgctgtttttttgtccgttgcaaaagttgacggaatgagtgatgcgtttaaatctaccaaagaatgggtgaagaaaaaattatcatcaaattcatcacaaccattatcatcatcatcctttcatagaccattattagatacatcagattcttcttcatcatcattttcctttaatcctccaatatataaaagtaataaattcataaataaaaaggtcgaaaaagattaataaattagaaacaattactataatatagataatttagaggacaactcatcttcgtcatccgtatttggaactcatccatttcgtaataaaattaaaaaggaatattttcaaaatttgttaatttaagaagctaaatcttccacttcggcgtttggaaaaaacagtaaaatttaaaaatattaaacaattaattcaaatttaaatttgaagttaaatcttccacttcggcgtttggaaaaaacagtaaaatttaaaaatattaaacaattaattcaaatttaaatttgaagttaaatcttccacttcggcgtttggaaaaaacagtaaactttaaaaataataattttaattccgtcaatttaaatttaaaaaatatttgaaaataataattaaattaaataattgcttttatctaaggtggcaattctgactcgtcatctacatttagaactcagaacatcaatagtaaataaaaactttaagcaataataaaataattttaaaaaaaattttcattcaatattagtttaagaataattaccaatatagcaaatttaaagggaaattaacgtcatcatctgcatttggaaacccgccttttttgataataaaaaataaaaaaaaaaaa

SEQ ID NO: 18260 - DNA, 1004 bp, Heterodera glycines
aactggacatctcgccaactaacacttcgccaactggacatctcgccaactaagccaaatccggacgtttcgccaactaagctaaattcggacgtttcgccaactgacatttcgccaactaaactaaaacaaattttttagtcatatattgattcaatgataataaaaagttatataaatgtgtatatgctctcttaacaattcagagtagtgaattttctatttcttgggtcagagaatcagaatcctgtgtacatttcatgtcagaacagaatcgaatgagttgtttttttgcaggacacgatgatacatagagattctgaattctctcatcaaagaaatacagtcactgcgatgaattgataagtgatatgataagcagaaaaataattgagcccctggttttcatagatacacatttgcatgaaattatattactattctctagcaaaaaataattttagagtagttggcgaaatgtcagaattatggttagttggcgaaacgtccgaatttggcttagttggcgagatatccagttggcgaaatgtcagttggcgaaatgtcagaattatggttagttggcgaaacgtccgaatttggcttagttggcgaaatgtccagttggcgaaatgtcatggagccgactgaaaccttctttaaattggtagcgagtgtgtcgactaaatttttccaatttgatttagcatcgtacccgcgcaaatacaacggtagaatctgcgcgcattgaacaggtgtccatctgtttgccgtaacaaaaagattaaaagataataaatagttgtgaaaatccgatgctctatctaaagtccccggagtcagtcaatcagcgccaaatcgccgtttttagtcgcttaccgacttctttaattgccttttgtccacagcagcaatcaatcttttttttcttttcctcaaatgttacgattgcccaatcttctcagtttttcttgtcaaatctgttttccctcccttgatgaatt

SEQ ID NO: 18261 - DNA, 2192 bp, Heterodera glycines
cctatttctggggccaatttcggttttgggagttttttgagcttggtacaacctccgccccacctcctctaccgtatctgcccatttttgccttccgaatttaaattataattatttaaaaaaataaaaataaattttagaaggaaaaatggaattaacaatttttgttttgaaatatttagaatttgaacaaaattttatatttttaacatctttttatttccgtatttttaacatttctttatttttatcaatatttcaacattttcacaaaaaaaaatatatgaaaaaacaccccactaaaggtcaaaaatttcagttactctcttagagatggaaaattctgaaaaagaattcgaaattgtcgaaaattttcttgttaaaatataaacaaattttatttgaaaattacttttttttagtttctaaaaattaatggtttaattttttcaataattgaaattttttttgtccatatttctgaaatttttcggcaattttaaattaatttttgtttttgtttttgtccattaccggtgtctccattaatttctaaagaatttttaaaaaattggcacggatcagatgttacaaaatccccccccccccctcgcagtgccatcctgaacatgctgttgaccgtcaaaagtgatctgatcggctccatcgcggtcaccatcgtttgcatggcggtcgtctgttccctgttcatctacagtcgacttggcgtcggtgccattgcgctgtgcatcacctcaatttgcttcagtcagtagtcgtcaatgttttttattttacggcattttatgccattttgcgctttttgtctgtcattcatttcaaaaatcgctttttcagcgctcgtcggtgtactcagttggtgcggcgctgacttggacccggtgacaatggtaagaagctttaaacgctgatcaaaagttaacggatatgggtttgatcattgatcaatttattgcattgatcaaacaatgcgtcagtcatcgattggattacggctatttgatcaactgactgattatagttttcctgccccttaatgacggatcaatgattcatcatcaaaccatttaatctttttggctaaactgattgattgggctgcttcccctgcatcgttttcaccacgaaagaatttttaaataacttttaacgaggacataaaaaaaaattttcattgaaaataataaaataaaaatatgttttcgattgggccatgttttgatcccatcgatttgttcctccgatcattactgatcagaccagttatgattgcttgaattcgtgtgctcgttcaaatgcctttaatgtccccccccccatcaggtggacgtgctgttggccaccggatttagcgtcgattacactgcccatgttgcgcaccaatatcacaccaagaagggcacaagcactgaccgaattgcgcacagtctccatggtaagtaaatgatttgttttcttgacaaaagctctctctctcgagagagagagagagagagttctcaatatgggaaatttttatcttaatttccaaaagcagaaaaattagtttttcaaatattaagtccaacattttaaaaacaaaaatttactcaatattttcaatagaatccggactttcaggattagagaagatttgactcggattggtggatttcgagattaaaaatcctctttttcaggactcctgatccaggtcaatttttcaaaatatacccggatcaggatcagcaggagtcttgaacaaatgctgacaaggtccggtcctgctgtccgtgctctaatattcatgccctcgggggcaatgttggctttcaattgcgactgaattttcattttatcatgatttagtttaattaattaagccccccaccccaccccttattcatgccctcgggggcaatgttggatttcaattgcgactgaattttcattttatcatgatttagtttaattaattaagccccccaccccacccctgttttttttgttgaactgatcattataaccctttgttcttttacagaaatgtgccctccaatgcttcaagccggttggttggtgtttgtttggttgacacgagtgggagggagtcaagggccttttttcaaaaaaaaattttgaaaagggtgtagggcagggatggcacggaattccgacttccgatttccgaa

SEQ ID NO: 18262 - DNA, 508 bp, Heterodera glycines
gttttagcacccacgttttccttcagacgttttggcgcccatgttttggcgcccaaggtcgggtttttaaagtttgtctatgtttgaataatatgaaaatatatattctttggttttctgggtcgctaatcacgaagatggtattcattttgacaactgcgaagcccggactcgatttcgaactaaaagggtttttgaacatatagatcagggattgtatctgttttgtttgtatcagaactgttttaatttggagggtccaaatcttggggtagtgaccaaattttgttctaatttcttcgtcaaggttatgtttataatcacaaacttttttgaaattttaacagaaaaaaaatttttgtctcatcgagactaatcgaatatatatatatataatttatattaaaaatcaaaatttgtagtattcttcaattttaccaaaaaaaaatttatggggttgggaatttttttgaaaattagagtaagcccattggaaggtaaaattttt

SEQ ID NO: 18263 - DNA, 2012 bp, Heterodera glycines
  unsure (1)..(2012): unsure at all n locations
aagccatttgagcaganagtccatttgggcgggtgccatttcggaatgacaccaaagcttaagactaagaaatatggaatcgaagagagtgaattatggtcgaattagttttaaaatttttttttttgcaatttaaatggaccatagcttttctagaagtatccaaatcaaacattcttgataccattcaatagccccaagaatcctctattagtctgctaaagttctaaaaatttcattgtgtttaaaatgtcatggccataaattttcaaaaaattggtttcctaaacatttcgggccataactttctttaaacgcaacagattttactgaaattttacagacgaatagaggactttttggggtaccgaatgataccaggaatgtttgattttgatgcttctagaaaatcactttgctttattcccccgaaacattggtcccccgtcgtgttcatccgcagcagttaaatttggcgccgttgttgttgctttggccaaatgaaaggcgtaggtggaggaaatgtgtgggtttggcctccttttgccatactcacactcttccatggtcatttcgtggtcaccaccagccgatgactcacaatcagacgacggcaattgggcggaacggaaaactgcagcaaattctgagaaaaaaacactttgtaaataaccatttacatattttaaatttaatacttacggaggtcgaccccctccccctccactttgcccacaaagtgcctcaaaacggataccccccaatttttctttaaaaatttttcaaaattgcaaaatgtagtcattttttggacaaaatcattaacaaatcggaataaaaattacaacaatttttcccggctgcggcgccgcatctccctgttgcgcaaaagttttcggaaaaagtgcgcccccaaaaaaggcagttttcaaaagcaaaaaataaaaaaggttgtagatttaaatggccggaccctttgcaaaattggccgctgaccctcccccctcccttttttactgtatgatctaattagtagtaatttgtaaatttaatctgcccccttaacctttttgtccatctccgccaaattcggctacctcaaagcaccggtcgttgaaagtgctgtggaaatgactcttcgggatcagttgcaacacggtcggactgcgccataattttgcaccaaattcggagggaattgacgacaaattggcaatgatttgatcaagcagctcttgtggagcattttgccggtccacaaaacgcgtgcacgcaattcgacggttgacactggcgcaaaaacgccaccaaatttgggccaactaacaataagcgcaactttacattttaatgctattatgctaataaccacttaaactttaaataatttgcaatacttgtgaaatgacgctggcacatgattgtgtgagccaaaattccgtttcagcaataattttccattcgaattcagacgaaaacatcggaaatatcgaaacaaatacaaattttcaccaaatgtcgaattgatgcaaaaaagaaatgtgttatgccacatataattttggcacgacgacatttcgcctactcacctaaatcggacattttgcctgagatattattattcccatccctgttgtgttcccacagctccaccaatagagatggattttacaatggaagaggggagggaaaggggtcggggtcactttgccgcggccactttggcgcggtcgttttggcgccctatataaaatggcttttttggcgccgtaaaagaattttttaaaaatttcaaaatttagaactaaccctgtcaaaatcaattttttcctgctgtgcgctacattatcgatgtaattttgcttaaaaaataaaatttttatttttgaagtcttgtgtaccatcgaatccataaagaaagacaaactaaaaattttttggagatttttcaactctggcgccaaaaaagccattttaaatagggcgccaaaatggcccgcgccaaagtggcc

SEQ ID NO: 18264 - DNA, 713 bp, Heterodera glycines
ttttgccccaaattttcaaatttttaagcatttttgaccgtccttttaagcattgaactccttcttctgctggcgctgcttccaccccctctctaagctggtgtttcccgttcttctgctctccgaggtcaacaaaaactctttctcgctctctttttctctatctccactctctctccttattttctcacactatttaaattttttgttctcaaatggccattttcagcccatcgctctgtccctcttctcctctcttcatcgtcccgtccattcgacgcctctttccaccgtcagcagtttgcctttttttgatatatttcaatcgttcttgacctttgatgggtttattttattatgccattttaagagcaccattttttgaaattatttttgtcaaaatgatcgatcagtcgcattgaaatactgtaagggacaaaccgccgggagaggagtgacgggagggtttgctgaccgcgtgggttccattcccaccctgccatacagtactcttgctcatatgctcttcccacccacccccaacaatcgtaccccttattaccgtatcctatgattgattgtccatttcatctgtgtaaatccccccccccccctcccaaagatgatcgattggatcggaatcctcggctgttctctgatcgtcgctttgctatttgacaccgctctgacccgttcattccgttggatttgtg

SEQ ID NO: 18265 - DNA, 1210 bp, Heterodera glycines
  unsure (1)..(1210): unsure at all n locations
gttgcgtgcgatgaataataataaaaaagatggaatcaatgtggcaccccgaatgagtgttgtgtgttttatgtgattttattaattggacaatgccctgtcaaaattgaatcaattcgttccctttgcatttccctttgcctttccctttgtccatttgtcctgtttcactttgtctctttgtccgtttgtccctcaccttccggtgagctcgccggttggtttgggtagagaatgtgttggtgatggccgttgtgatgcgcatccgcgtacagctcagacggaccggcaaaaccatagtagaagccgttgttggggtaataagcagaggaagaagcggtggagggaagggaactgacaaaaaaggcggagggtaagcgaaaaatgataatgaccatgactaatgagggcgggggataggggaaaagtgataatggccatgactaatgagggcgagagtgggggaaaggcattcaatgctaaagtgaacttggacataaaatacaccagttttttaacaaaagatatttgttattaaatgaaaaacaattgctcaaactaggcgggagtgaagccaaaggcatttatttggtgccgccaattgcctcaaatgcccacccatttgaaatcagaaaagccgtctccgccgcggccattgctgcggcggacgaagtgctcggaaacggcttctgatcgaagctgttcagatggtcccccattttgccgtgctccgccaaaaggggaaaagcaatgggcggcttttggtccacggactccgtgccgccggcaaatgcaaccatcagttcggaggaggagggcgcggacgacgaatagtcgcctgcagcagccgaagccgcagccgacgcaagagcgtcgactgaggcggcggtggcggcactgacaatggcggcgtcgagaggggcggcagacatcgaagggggcaatgatcgggcaattagcctggaagggaggcaattagggagtgggccaatctgctggatgagaggggaagggcaacaattatggagggagtgggggagcaaaattggaggagatgggagcaagcggagaggtggggagagagaagagggggtaaagggggaggggagagagggaggggaaagaggaaaggggaagttgatgattgttgagggggacgaacaaatacaatgtgtacacaccccatttatttctctcctgaccnntgcag

SEQ ID NO: 18266 - DNA, 1060 bp, Heterodera glycines
ggggacctctagagtctttattttaattttgcataaatgtggttcttcggcacctactgggaaaaataacggccaaattataattaaaaaacaaatagaattaaaaataaataaacaggaatatctttgttataaattaaatgatttttcttactttttgatttacttatggcaacaaaaattaagaaaagtaaagaatccattgaaaaaatatggaaaataataattattcgacacaattttgaaaccaatgctttatatttaattaattctaaagtcatatttatgaattcaacttaattaattcatgaacatttcatttgttccataattgttgaagcattttgaaatgagcagccatttcatctcctccgtttgttggatttgcaacggtaggggccaattccatggtatttgttggcacatcgccaatttgattttgattcaaatgaaatattttcttgagaagaatgatcagtcgccgtttcaataatgggtggtgcctaaataagaaaagaaatttaaaattaaagaaatttaaaatttttatattgaatattgaaatttaaaaaataggataggattcaattaaaaaaaagcagaatcatgctgtgaaagaacaaatcaagtgccctaagaaatttttttttgggccgtttttaaaagtttttaaacaaaaataacgtaacaaatagacaaaaacaataaggtaaatgctgaaaaatgaggcactcaaatcggaacaactaacaatttggtgactgctctagatataaaaacttgaaactaatgctacaaaaaatcaaaaaaataatttaaatgttgaaaaaaaattaaatttaaattaaattaacgtcataattgtgagttctgttgcggcaccaaaaagtgcctcagtccatatgcccaaagcaaacatgaaactcataatggcgttatcattgattctgtaaaaagatgtggctatgaataaaatatttgcgcctaaatttgtcaaaataagcataaaaatggttggtgaaagttgattggccgttttcacattgtctgagaccttaaa

SEQ ID NO: 18267 - DNA, 1764 bp, Heterodera glycines
  unsure (1)..(1764): unsure at all n locations
atcatgaaattggcgatatgctttaaatttatggaaattttctcacgcaaattcatacgcacgcaaattttcaacanaaatccagggactacttttgaacctaaaaattaatttgtgagtatcataaatgtaccaatctntaatgaagtaaaaaaagtgatattttaaaaatattttaaatttaatttttgacctttaataaaaattctggaattaaagttttatatgtatgttaaaagccaacttttaataaaaactaatcattttagtgaccttgcaaattttttgtttgagttttaaattaaaaattataacaaataaacgttgctaatatgatgaataatttaatgatttgtgaaaattttatttttttgatattttattgaaatttttttcaataactttgcttaaaaaccaccaaatttttaattcttgtggtcattcgatagtcctaaatgttctatattaaactagcaaaaaatttctcaaggtttcaaaaaacttatgaacattaatgttggaaaaactgttgtgtgttattctggccataactttcttgaattaatgtacccaacatatatatgtttttcacacagagaacagaattggtgggtaacatgccaaaagaaaaaatgtggaattcggaatgaatttttttaggagagtaaataaaaaattttggtcggaaattgaagaatttcatatgaacagagtaattatttttggattgtaattatattttgaataaatattatccactgattgacgacattaagccaaaaaaagttaaggtgcaaattgatgctaatgaaaactagtaactaatcacttcccataacaaacttataaatcagtttaaaaaaatctgtatttttaaatccgtttgattttgagctccaaattaaaataacgccaaagaattttttcaattattttttgaatacaaaattcattagggcattttttgatttttcttttgttttttcaataacattcatttttatcaggaaacttttggtttttctttttgttttttcagtaatatttcagttttagaaggaaatgcaatacctttatttttaccttccacaagtctgattatggtaaaattgatcgaattttttattatttgatcaaattttaatgacaaaaatttggttaaattgacattattggtcatttaggtcgaaaatcagctgattttaagttcacatttaggttgttcttaagaaatattcattttttttttaaatttggcgattttttttgctcttgcactttttctttgtactattttttaaaatttctatgaagaatgtgcctcatgtgccgttaagaaaaatcaagaaaagtaaagaatcattgaaacaatatgggaaataataaattatcctacacaaaattatgggaatttgaaacaaatgctttttagtgttaagttttgaaattaattttttgaatgatcatcagtttttggcctcagaaatttactgagatttggaaaattaaaactgaactcaaaaagtttcaattggattaaagtttaaaaaatgagaaaaatttggcaattttatgttctttttatttggttttcaatttatggaaattctgaaacttgggtcaagattaaattaacaaaaatcaaaatattttacatatttttgatggaaatttttgatgaatttttgggtactcttatttttgagaaaaagttactaaacgacctatttgaaatgcttatttaccgacaacganncnctgcag

SEQ ID NO: 18268 - DNA, 1211 bp, Heterodera glycines
tacacagattcgaacattaaagctaattatgaacgttcgactttctgttcgaattccatcccggcgttcgaaataggtcaaaatggataccggattcgtgatcagccacactcgaaacccctggaagcacgttttcatgacttttgaaaaaaaaaaaattttcatcaaaaaaggggggcaaccatcggcagtattttcccccttttgctcacacaattgccagcaaaaggaatcattgcgacctaacaacgctatcaaaaatgcaaaattactaaaaaaatcaaaaaattcacttttctattatgaatgcatttttctacttttattatggaaatttattcaattatataaaatttcgaatatgtgaaagaaacaacaaatatttttacacaacattcaatcgattgtcccattcaatttccctcctcaggatttccatcaatcgacggcaatttgttttcgccggaagaattactcgaggcagacgacgacgcctgaggtgttgggctcggaattggactaggatcttgattgtgttgaatctattaaaatatttgtaataataataataataattagaaaagatggttgtgtttatttctacaattttgaaaaatggtagtttgtggtttctgcgaaaataattttaaattttataaaattttcgaggctaaaaaagctgaacacgatctgagcttaagcttagcaaaaccataaactgattttttcaaaatttttaaatttcaaaaaattcaatcactcaaaagaatccgctctattttttccatcatcttgcgccacttattcatcgaattaacgaaggttttaatctgaagaacatcccagtccttaagtgtttagtttaataaacaattattaaccccaaaagattatttaattttatttttaatcattctttctttaccagtgaatttaatggcatgagtgtgaactcacacaagtacttctgattgaacttgacggaattcacaacgaaatagttacgaacatggagtcgctgaattacattttcttttttactaacaaaaatcgctttcttatttggggattcccttgtcatgggcaataaaaaataaccagaaatttccaattaccaagatttttaacgaacatatttttgcatgggttttaatttttgtccccatttagcaaatatgacggatcttatcctttttgcaaccccttgattt

SEQ ID NO: 18269 - DNA, 599 bp, Heterodera glycines
gattacgagggagaaaaggacacagagtcacatttgaaaaggtgtacgttgcgttggcctcccgttcctcgaccaacttaaaaggcattgcactaagtcataggaaagggacaattattagagctcttttaaataaaactacattttaaaattaaaatttaaaagtgcttaaatttgctaaataaaaacatgctcaaaaacttgatgggttttcagttttccatacttttgctttccatttgttgcttttttcactcctccgaatcaaatcataaaacaaaaaattagagttagccaaaacgcttcgacataaaaactcgggggcaaattgaagcaattcgttgttcaattctgccggaagtttgcggacaattttaggtttcattagtaaagggccaaagggttaacaaggggaaagggtttccgacaaaacgtcggaaaagcgatcaatctgttggattattctaaaaaatcattttaggtgagagttcgtattaaatttagcaaaatgggaaagatatggtgtatacaaatcaaacttttaaaacaaaaaacaatcagttaaaaatagtttgtaaatttgtaaaggaatcattttt

SEQ ID NO: 18270 - DNA, 363 bp, Heterodera glycines
cttaaatgcgtcgtcccccgtcctctccctcaatttccctcacaatttcgcacttttcggagcgacccctacgagccgattaatccaattcccatgcacaggggcacataattgagtggagaatggattaaaggagagatttgagggggggggggggcataatgggtacaattgggaaggaagagggggggggggacggatgcaacaagcaattgtaagattttgtcccttgcggggattatccggaactccaaccgaaaagcacataaccaattcacatagatgactttctccgaagagggggcttattaccttattattcttatattggggggaggcatatgaaaaactgaagaaagaatt

SEQ ID NO: 18271 - DNA, 880 bp, Heterodera glycines
tagataaattcgcttttttgtttaaaatcctttctaaatccaattaattaattaattattataattaattaattgccctccctccctttcctttccctccaaattcccatctttcacccctctcttcgtccatttcattttcatttcgttcattgcctttgccatatggcgccatccttcgcatcgcaaatgttaagaaaatttatcaattagcgcaaatatttccttttgcctggggaaagtgtcgtaaatttccttcaacaattttttcgaattttaattagcgatcgcttgcacttttctggccaatgatcacataacaataagcttcattcttttccggtgaatttgtgtcattgcttttggggcaataaaaccaatcccttccctcgggtaacaaaagaaatctgacaattagcatatccaccacccaattgctggtgagttgggcagtgaataacgccgggggatggatgaccttgggatgaatggaagtggcgactgagaacaaaagtgccattctttttccataaaaaccaaaccaatcaattacgaaattgtgcaaatttaattccatgggatgtaattatgtaatattgcggcaaattattctgtttttcatcattggtgcttcttttgccgacttctcttcatcgccgcttcttccctgtacaattcgtccatttttttcctcctctgcttgaacatatgtttaatgagggtgaaaccaactgaaaagcaaaaaaaaaaaaaagatgaatcattggacaatttcacagatcaagggcgtagccaggacccttcgtttcggggggggggggggcccaactcaaaaaagtcggtgcttaggggtgtatttttttcgtttttgtaaacctca

SEQ ID NO: 18272 - DNA, 1359 bp, Heterodera glycines
cttcttctttacatacacactgatcgatttgtttctgcagtgcttctcgtcaaaaggcattggacgggagtggtgaggtgactgtgccgatgaccttcacattgcgcaccctccccccccccccctcccccatttcaccaccccttttatccacacgccaatcgccgattgtctgccaccgccaaatagtacaaacaccgccagccgccgttagtgaaggaggagcagttgaggagaacaaacgcgctaaaaacactaatggaaaaattccaccaattttaaaacacaaaaaacagctttaatgagacaaaagtttgtcggttggcccaagacaattaataaatgaaaaggaatgcgagaagagattatgcgaccaatgccgaaagtgacaacattttttgtggaaatttagagatcaatcagtccaatgctccgatcactcgtcactgttatgaaagtgagcaaatggcagccaatatgccactcccaactccttttggcgctcatctcttcccgtaactcataagttgtccatcgtccgcatcaattacaattacggaccgttattcctcgggcgactgaaggccgcgttgggagcgcattatggccgatgccgaagagccatcgacgccgtagagacttcgtctaaagcgatgaagccgcacatttcgagaaaataaggcattcaattcgcaaaattacctccggatgacatttaaaaggcactataataggcaccaaaaaattgaaaaaaaggcatgaaaaggcacaaaaatcccgaaaaggcatgaaaaaaggcatttaaaatgattattaaacattttataatgtttttcaaataaggaaaatttttaaacctaaagtttttgatcaagaaaaaaaatgaaatttggcgatcaatttttgagaaaatttttcaattcttaggggtgtattttctgaaactttttcgggtcatttcttaggggtgtattttcccgattttattcatttttaatggaattttttggaaaaacctgacaagaaattttaggggctggcgggatgcattaaaagggcgactaagatttttcgaatgggtcagacggtaaaaagagatcggaaatcaaatctgttaatggtcatattttttgcttttcaaaaatgctttttttcggcgcaattttttcaaaaactaggaacaaaggggtccgtccgtctatgcagataggcgccgtctgactttttttttttatttattcaaaaataaaaataaccaaaagaaggatgtcacaccttttgactcaattctacaggattaatgtcgatccagtggtgtcgataggcgccgggaaatttttttttgcaaattctaggtga

SEQ ID NO: 18273 - DNA, 746 bp, Heterodera glycines
  unsure (1)..(746): unsure at all n locations
cgtccggtgtgaagtttcacaccttnggtgtgaaaccggccaccgtccgtagggtttaggacctggttttcgcgcactttgcggacggtaattctcccatttaaaactaaaaggtttgggaccaaattttcgcgcacttgggggagggggctaccgtaataaaaattaaaaaaaaaaccaaaaggtgtggagccgaaatttcagagggttaccgtaatcaattctaattaaaacgaatattttagggaccaaattctcgcgcattttttttttgcggtgggggtacagtaatataattttttcaaatgaaaacccaaagtttcggaatactttttcacgctctttttaggtataattatgctacagaaatgtaaaaattattaataaaaaataactaataaattataataatttaaatttattgccctcagcaattttttggcaaatgaaatatccccccgttccccattcacagcgtctcttttttgaatgtgttggaggatcaatgatgagcagaatgggataagggtcaacgaaggtgggggggagtgagggagagtgcagaaggggaaaaggattacaaaatcaattataaaatgaagtaaaagtaaatatttattctcttcataattatgaaagtattttgatgaattatttttaattttcatttaaatttaaattaaaaattattttcctttttgattaaaagacaattcacttctaaacaaatcgtcgcttccaaattg

SEQ ID NO: 18274 - DNA, 2383 bp, Heterodera glycines
ctgggattcggaattgatcgaaatggatgccggattcgtgatcagcgactccgaaaacccccggaaatttcgattcaaaaaaaggaaatcttgtaaaaaaaaatctagtatttcccagaaaattatctcaattttttttatatttatatcacaaaaacttgaaatcaaattaaatttttttgtaagcataataaaaagctaaaaaatctaagcaggtctaactgatgatgtcaaagagttaggaatgttgagttgacctttttgttaatcggaaaaaatgttgactgtatttaccgtatttcctgtatttgaaggcccccccttggtagaaggtccccctctaatttaaggcccctttttgtaggggttgaacaatagaaggcccccctctggtagaaggccccctccaattaaaggcccctttttggaggggttgaaaatagaaggcccccctctaattaaaggcccctaaaaaagacttcatggggcgatcaattttattaaaaaagaaaataaatttgatcaaaatattattcattagcaacgtcgacagagacatcgctttcatcttgtcctaaatcaatttgttcaagtgctttcacaacattttcttcattgcgacgttggctcaatttcctccgtaattccacatgacaggaaagatttgccgatcagttccttcgagagtgagttccaggcggtgacaatccatgcagatacgtctccattggcggaggagccttcatatttccggacgccgttgtttctttctctccattcaccatccattcatcgtaaatttgcctgattttgtttttaaacggtgcgttccaacacacgtctgggggctaaaataattttccttgatttaaattgaattgtctagtacttgaatgtatttcgtagtaccaccgggaatgacagcagattcaatagataaccgcctgagtgtctgctttgtatcgtcactgatatgacaacgaaagctgtcccaaataagaagccgtctcccgaacgcaaaattgccaagcaccttaattacatacctaatttatttaaaaatataaataaacattcgcacttcctctaaaaactttgttgttagttcgttgtccatccatgtacggccacaccaacacaacactaaatcgttcttaaaacgtttggcaatgtcaggcacaggtctcttcttatgcagtaaaacaaagggacgcagcttcgtcccgtcagatcttgccgtcaacatcaccgtcacccttgccttttcatggcctgttgttagcaccgtaacggacttggcacccttctctgaaacacaatttgcgcctgttgggtcaagccaaactgctgtctcatcgcacgcaaagacaccagagtaactaaaattataatctgcttaacactttttccgcttatcattactttttttcgtgccataatttttgaacatagacaataaaattgacaattgctttggcataatcatcgggtggtttttgtgcaagtgttgttggttttcgcaacgaaaagctgtggcggctcataaagctttccaaccatccatgacttgcctaaaaacttaaaatatgatttaaattactcgaattcttacagaaaaattttccaaatttttgtagttggggctggtttgttgtgcccttgaaaaaaccatggtgcgcgtcacgcgtaacttcttctgtcgaagttcgcgcacccaattcgctagagcatcatcgaaattggcgtctgtcaatttccttccggcaccaaagaggcgcttacgcttacacgattctgtccttaattacaatcaatttaaaaaagtagttaggtatcatagttttacatttttctcaaatttgcttcttctttcttccaacagcgaatgttgtctcggctgactttgaaatgtctgctggcagcgtgaattgatgtcttttttgcgtgttcaatgatgtccaatttttccttgatggtaaatcctcgacgctttcgcgaaagttgtgaaaacaccatatcctcggttgttgctttgctggtagattgtgccgagctaacggcatttgcatttccgtcgatgtcactgtcaccaatgaggtcgcatccgccacagatgacttttgatccgtatcctttttcaccatcgcttgagagtgagcatggtggaatggcgtgacaaggcctggagcattttcgacatcggtgagcaccagacgtgggtttgttgcaaaagcaacagaccttaataaacattattcgagagcaaatgaataataaaaggatgctttactaatttgtcggcgtcgccacatttatttgatgggtccattttataaagaaaattatttaaataaatttgtatatctaggtaaataaattttat

SEQ ID NO: 18275 - DNA, 2430 bp, Heterodera glycines
ttaaaaagcacacatatctcctacctatatctgcatatatgttatagagaacaagagctttcggatgagctattgatatttaatgtagttgggggcattggaattttttagagcataccacgcaacatcgtagttattactgttcgttctttgtttaatgtcaaatctttttagcaaatcgatcgtaaaacataagaatagacaaataatctagcacttcaatcacttattgtttttttcacatcttttttgcagtgcatccgttttgtttattttatgatgggggaggagagagtgccagccccgaattgtctaaaaaggcaaatcattcattttgagtaggaaatgcgcttataaaactttaaaaaaattctttaaagttttttactaattttcagctgattttttttaatttattaaattttttgaaaatttaagtgtttaaaaaagtttttctaggctaaaaacccatttagatttttttaactaaaaattctaaggtcattttccaatttcaacagataagtagcataccattggatagcattttttatgggctttccaatgataccatatttgcatttgtgacataaacatttatttgatttattttaccatattcacaatttgatcaaaatataggtggtcaaaagtgttgtagagaaagaaattaggaacaaaatgtaagggtttttaagagcaaaaaaagggttaactaaaaagttatggagtgattaaaattttttgcattactttttctctctttttggcgtactattttcatgtctctaacacatggaaaaacataaattcgtaaatgctaacaattttggttataagggtacaaaatcgctttggacatttagaattaatagagaaattaatagttttagcatttttgctgaaaacagcagtttaggacttgagttataacgtgataaaaatttgaaagtatcacaacttttttctgagatgtcaaattgcttagcattcgtttagaaaaagattctccttttcaaaatctttttttagataccaaatttgttcagtttagttgagaatgaagcgagttatggcagatcaaaataaaaaatacaaaaaaggcgttttccagtgtaaattttgaaatagcgcgcaaaaatttacgccaaataactgcgtcttggggccaactgcgtctgagccaagtgcgtctcgccaactgcggctggccaactgcatcttagtagtaaaagggccaactgcgtctcagtaaaaaaataagacattttcaacgaaattttaaaaaatacatccctaagaaattaattttctcaaaaattcattcgctagatttattttttattatctccgttttatccaaaatgtaataaaaaggtaaaataaaataacaaaaaattaacaatccatttgataattgctggaaattcccctaagcatttcattaaacaaattcgggttattttgattttggccgtattggtgatcattagggcagcaacttttagtgaaaaaactttttttttgctcaattgtttgaagaaaggagctcaaaaaacgcatttctgcgttaaaattttttcatttggacgtcacttttcgtcactagaaatcactattttggcgacttcgtcactaaaatagttaaaaatcactattttggcgttttgtcactattttttcactatttcgacattttttggaaaattctttaacaaaaatgcaataaaatcaaaaaatacacccctaagaatcgacctaaaaaaatttcaaaaaaatacacccctaaaaatcgagctaaaatttttcaaaatatactcctatgaaatgaaaaaaatttctcaataatttactttcttggcaaaaaatttttaattttaaaaatttttttaggtaactattttgggttttttggtcttaaaaatcccagtcctactcatttgcaactgcaatcagtgaataaaaattattttggcttattttttggctgaaaattatgtcactattcgtcactattttggactttttgtcactatttcttcactattttgggatttttactcactattttagttaaatatttcgggatttttcgtcactaaaagttgctgccctagtaattggcgtttaattcaaaaaatacactggtcaataccttttttgttattgtttgttttgatcagccataactcacttgatttcaaactaaatcgaacgaatttggtatcaaaaagtttttgaaaaggaaataatttttctaaaagaaaatttcatgatttttaatgtgttagagatgtgaaaatagtacgccaaaataagaggaaaatacatatatttttttaattacaagttttactaaaaattgggatagaaaatcattaattccttatacattcaatgcaaaattttttctctatcggtatgcaaaat

SEQ ID NO: 18276 - DNA, 973 bp, Heterodera glycines
  unsure (1)..(973): unsure at all n locations
tgtcagctctcgctttataacaaatatacaatttaacatcatcagcatataatttaattcttactcctgatggcaaagcatcaggaagatcgttaatatagaccaaaaataataaagggcccaggacagagccctgggggacgccatagcacttttttatttgaggataaagcatcctcaattttaacacgaaaagtcctattactcaaaaaatcctttatccaaattaaaagtttgccccttataccaattttttccaatttgtataaaagtaattcatggggcactgagtcaaatgctttttgaaagtcaatataaatacagtcaacatttttccatttataattgcctcataccaatcttccacaactgttattaattgacttgttgtagacctatttctaacaaaaccaaattgatattccgaaatttttttgttttttagtagaaaattgtaaatatgtctgcttgaaatctttccattaccctgcaaagtgagcaggttaatgaaattggcctatagttttcgggattatttttgtcaccctttttaaaaagcggaaaaacaattgattccttccagatgtctggaagtgaaccagtgtctaatgagatcctaaacaagtctgtaataacagttgacagagaagaatggcaatttttaaaattttatagctaatattatctggagaagtgccatttttgttcggaagttttttcataagattttgggtctcgatgatgttaaaatttatatccgatataaagcattgataaatttctataatattacccaatcatgtattgcttgggtctgtttgacaattattaaacgaattagcaaataacttggcaaatatttcacatttctcagcactattatgatagcatttatcttcataaatcagattaggtatttcaaagggatgacattnaattttggatatanttataaattgatttcttccctttg

SEQ ID NO: 18277 - DNA, 1965 bp, Heterodera glycines
  unsure (1)..(1965): unsure at all n locations
tttataatccaatttctataaatttcatttattgtttatgtaatgatntaaatnntatattaaaaataatcccctatagtnaagaattaataccattctttntaaaccatcataattaaaataaaacttttattaatttataatatttgaactttgcaatcacatcgggtggcaaatccatttgaacctgttcgccccgtaaaacaattttggtcgcctttgttattatttttcttttaaatttaatttttttttgtattgttaatatcaattcagattatttcaatataatgaaataaataatacttctttttattatatcagcttcatttatttgcaaagtttgcgcaattttcattattgaaccccatttttattcattttcaatttaccatttaatttataattactttttttatataattttttagggatgatcgtagctttccgtgacctgaaacgcacgaaaaacatgtttttttttgtctattttggcattttgcccaaaataattttaaaaaatgcaaaaaatataggcctataaataaaagatttctcaaaaattgatttatttattttcttcacaagaatctgtcctttaaaatttatttaacttaaaactgatttggcctattttttttaacttttaataaattttatcattttacacacctaaaaataaggtttttagtgccaattttagggtctttacagtctagagcctatctattttggcagtttttagagccaaaaatttaatcactagtcgataaatgaattagggacggaggcggtgcttaaaagggagtgaagctgcttaataagcaacttggcgtagtcgggaatggagttgtctgtgtcgatttctttggggatttgtagttggtcaaggtcggacagaaatttttttggggcagtgttgtcagaaggaggagaaaaattcgccataaagaattgttaaaagcccagaaaaataagtgcgtaaatcatattctgtgggtgaaacgaatcgatgatgcatgtacgaacatttgagaaatttttagaaaagagcaataatgttaagcattttttttttggtttgccatcagaaaatttttttgcattattatctttgcttctttttttgttcattacatatatgttgtctaacttatttttgctgtttaaattttcattcattttgtagaatacgtgtttaaaaacgttccgttactgaatatttattatttttgcaatcagtttttattttatggtattctgctaaatggaacagacgatgactgaaaacggaacatcaaagcaaattgctgatttggaaatgcacgaagttgagcaggggtcgcgcagcttaccggaaaaccaagaggcgtacaaaaagtgagtttgtaaattggtggcggtggtggttatatttgcatgtcatgaataattattttgcctttgctttagtttcgattgttatttatattttgcttattaaacattgtaaaattaaatgtaatgtttgaattttaactacattatctctaaacagaaacatggacaaaggacataaattgatgttggctcagtcattttacgatgcgtccgttgtgcttcgtaaggcggccaaattttcgtaaggctttgcacgtcaattattttaattttgatatattagttcaaaagaggtggttttggaagcagacgatggggaggccgagcaagacggagacgaggatgacggtcaaatcgcatgggaaaacctcgaagtggcgcgaaaaatttgcgaaaagtgtcgatattttcatttttttatatttaaatgcaaattcagtcaaatgaaaagctaccacgcgaagttatggacggagcgaaaatcggatgtgttggtggctctaggcgattgtatgaccgtttcggagaactttccgcttgcgttggaagaattcacgagcgcactggagattcggaaggtcacta

SEQ ID NO: 18278 - DNA, 2089 bp, Heterodera glycines
atagaaaaaattttggcctgagcgggacatttgagtcccgggctcataactcgttaggggttggttttagccaaaaatggcctaagagcaaaattgtagagctttttaagctctatcgaacggtgtactacatgatgtaaaattttgaaaaattttcgagctaggccccctagaaattttcggaaattttttttcggacgaaaatgggggtgaaaaatattttcctggggtaaaataaggtgctgagtacgaatatgatgtctattttaagtttcagaatttttggaattttttaaaaattcgaaaatatttggcaattttttggccctcgggattttggcctaatatttgaaaattcataactcagttcagatcaggtctattttggcgaattaaagctttaaaaatagcaaaaaatcgggaaaattttatgagatttatttgaaatttatagcacaaaaacaaaaaaagttattccagaaattctggaaattttcgatttttcagaaaaaaattcagaactcggttctgtaaaggtgtttttgaaattttaaatacttaaaaaatccgcaattttttgctctattaaataaattttatttggcatttttatcacttttttgcgaattgttataaaaataaaagtgattttgagattcgggaccaaaggggggtgaccaggatttttgagtggaaaattttttttcacaaaattcttccaaaaatatgtctttaggggttatttgggccgctgatcacgaatacgtgatcagattttacttttgacatcgttaagacctcagaatccctgtgtgattggggattctgaggcatcattttttgggggggggggggtcaaagttcgagtccggacggtgtaacattatttttctatttattttttgctattttcaatttttattcatttaaaatatttttattttattaataataaataaaaaattttcatttgaattaaattattttttggtgaaaattttatttaaaaataataattttttaaattaaagaatttaatgtttttttaaattagaaattgtcaaaaaaattattttcaatacaataatacgcaatcattgtaaattcaaagtttatttttaattaataaaagaaagcattttttaataattttttaaaaaatattaatacattttttaattctatttttcataaaccatttactaattttttaatcacagttgtacctcttctaatctctgtaaggtcaacaaataattaatttgaagatttcttttaaattatttaaatttattttttttaaattaaaggatttcattatttatttttgaatttgtaaaaaaattaattaatttcaaattaaataaatattcaattaataatttccaacgttgtttttaattaataaaaagagtttttattataaaaattttttaaaattaaaatgcattgtatttttaattttaataaaacttttaccttatttatttaatttcaaaccatgttgtacctcttccccaatggtagtacctctcctaaccatggtgtacctctcctaatcactgttgtacctcttttaattacttttatacctcttttaatcacttttgtacctcctttaatcactgatatacctctttgaatcacttttctacctcttttaattatttttgtacctcttttaatcacttttgtacctcctttaatcacttttgtacgttttttaatcactgatgtacctctttgaatcacttttgtacgtttttgaatcacttttgtacctcttctaatcacttttgcacctcttctaatcacttttgtacgttttttaatcactgatatacctctttgaatcacttttgtacctcttttaatcatttttgtacctcttttaatcacttttgtacctcctttaatcacttttgcacctttttttaatcactgatgtacctctttgaatcacttttgtacgtttttgaatcacttttgtacctcttctaagcacttttgcacctcttctaatcacttttgtacgttttttaatcactgatatacctctttgaatcacttttgtaccacttttaatcac

SEQ ID NO: 18279 - DNA, 1243 bp, Heterodera glycines
atgctgcagtcgccgctgctgtacgcccacgcgttgctgagttagggtcgagagcggcatgaaaaaagacaaaaaggaggaaaatgaaacaaattcgcggctttgctctcgcgttggagaaagcaatgcgcagaataactggggagacttagggttaacgcatcaattatttttttcagaatgtgatcggggtacaaaaaatacgggtccaaaaatgggtgtaactccgcttggagatgcgttagaaaagaaagaaaaatatgttcggacagcttttgaagagctgcattgaatgctgcagttgccgctgctgtacgcccacccgttgctgagttagggtcgagagcggcatgaaaaaagacaaaaaggaggaaaatgaaacaaattcgcggctttgccctcgcgttggagaaagcaatgcgcagaataactggggagacttagggttagcgcatcaattatttttttcagaatgtgatcggggtacaaaaaatacgggtccaaaaatgggtgtaactccgcttggagatgcgttagaaaagaaagaaaaatatgttcggacagcttttgaagagctgcattgaatgctgcagttgccgctgctgtacgcccacccgttgctgagttagggtcgagagcggcatgaaaaaagacaaaaaggaggaaaatgaaacaaattcgcggctttgccctcgcgttggagaaagcaatgcgcagaataactggggagacttagggttagcgcatcaattatttttttcagaatgtgatcggggtacaaaaaatacgggtccaaaagtgggtgtaactccgcttggagatgcgttagaaaagaaagaaaaatatgttcggacagcttttgaagagctgcattgaatgctgcagttgccgctgctgtacgcccacccgttgctgagttagggtcgagagcggcatgaaaaaagacaaaaaggaggaaaatgaaacaaattcgcggctttgccctcgcgttggagaaagcaatgcgcagaataactggggagacttagggttagcgcatcaattatttttttcagaatgtgatcggggtacaaaagatacgggtccaaaaatgggtgtaactccgcttggagatgcgttagaaaagaaagaaaaatatgttcggacagcttttgaagagctgcattgaatgctgcagttgccgctgctgtacgcccacccgttgctgagttagggtcgagagcggcatgaaaaaagacaaaaa

SEQ ID NO: 18280 - DNA, 1567 bp, Heterodera glycines
  unsure (1)..(1567): unsure at all n locations
agactttaaaatgaaatcattctttntggttggcacaccatcagaatatttagcacacctgcgaaatgagcaaatccaatcacatttttcagagaacactcatcagttagaacaaatgaacaaataaaattgacaaaagataccaaccaaaaaggcagaacatttgggagtttggtccctacagcaaatgtaatgcatttatttactttcaaatggacaacttttttattagagctacacctgctgctgctggacctggatacaggcctggatttttcctaaatccaggtccaggttcaagccatttttcggcaacctgggttttcctgctctttgaaatgatttaatatgtatatgtatttcaaaatattttattattgtaaattaaatattttagttgttcctaaatgtttgctttgtaaagtaatttcaaaaaatccaggtccaggccaagctctattttttattaatagattcacatttcttgataaggcccgggttaacatttaaaaagcgaaaatcatcgacttttaacaatatgcaagagtggcacagtccatggccggaaaatggaccagtggataataaatacgtcagtgaatcagaatttcttgaaaaacgatatacggaagttgcgccaaatactgtatatattactgacgtattttcagcgatttaaaagattagatacggtcgtctcggtgtggacaaattcaattgaatccaaccaaaataagtataaaaaggttccgttaaaaaatcacccaaaaccaatttcaattaatctcatcatttttgttgagattcatccaagtagaataagaaccgtaaaactcaagataatcagggtttcaaaggacatcaaattgactcaaaatgggatgtcaaaatccaaggactgataggaaaactttaatttaatgattttaatttgtaagcgagggttatttgttgtctctccatcactgtcgttaattttatttaatttcttttttataatctacgccgacagaaactgggaatcagcagaggctcccaaaataaacaaatctcaaaactttcacttccactgaaaaatccaatcgatcacaagcagaaaaccgaaagcttacgaactttggtgccggaacagcttattaagagagtgagtgaaattttaacaccaaatcttagctccaatacaaaaaatgtcttgggtttactcgctgaaaaatcacatataaaacccaaaagtaaatttagcaaaaattttgttcacataaaatttgcacaagaaaatatgaaacattccttctaaatgcgagggtttaattgttttaccacatccgatgaagaaatgagggtccaataataagagatggaaaactttcgctcacccaatgccggaaaccggctttcttaaaagttaaatttatgaacttgaagctaaggaccttttaagaaagtgccatttaattttttatagaaaatttctgaaaagggcatgcgaatttcaacttttaatcgccgctaatttctctttaccagagaattcggctcgggcgagaaaatgtcgcttatgatgggt

SEQ ID NO: 18281 - DNA, 1626 bp, Heterodera glycines
caagagaaaaaaaagcattaattaagatgtttttgctcgttttttcattttcttttttctgatcagttagggaccgaggccaaaaaagagagaaatttttacattaccaaatggaaaatgttctacacgatcagttgttttactgttcgatatgttcccttgtgagagccacgaattaagaaccacgacgttgcgatcaaaacgaaccgggaaatgggccaaatctatcggtggttgaacggagcgaatgacgtcgaagtgaaaagaggtgaacaatgaaacagactttttacggcattgtaaggtcacttggctgcccggtggccgcgtgaacgaatcgatggattggactttcgaaaccattcgaatgtttcgcaacggttcgaaatgcaatggtcggagtgttcaactccattcttttcttagcaaatcgcaattttctgaacaacggcggttttccaccaaaattggtcttctccaagggttacgtggagagcagtctgagccgaaaaatggccgtaatatttaaaattattggacattatgaaaagtctgtcttttaaggagtttatgctgaacgatttggacttgacggagactgtacgtcgattggaaagcggcggcttcggcatcgacgaaattctgatcccttctctgcacgcttcagatgccattggggcaccgggcggattcactagggaatgcatcgaaagaaaggagggaatccgagtgcagcacataaccaggcaatgagaagccaaacatcgcggggcgggggagtgcctaagtttacatgaattatgccaaagtttgctttccttagggtgtcgatttggtacgacgtgaaaaagtgcggctcgggtcatatgcgacatgcaatttgtattttcggtcagcttttcgatttttaatccatttggtttatcttttgttaattgtacaaaggcttggaggatttgggggacaaattggcgacatggccccatttgtttgccaacaaattgcttcccgaattcgactttggcgctttgctttgctggtgggaggaaatgcaccgacgggcccacttcgagagtcgagaacggtccttgggccgactgaaccgcgccatttacgccgatttgccccatgtaaatgccatctgacaatggataaaatgcatttttccgttttcatttcttaaggttcgtttccaaaagtttaccattgaattgaaaaaatttatcgaagcgcagcgggggacgaaagatggcattcccttcagaaaggcactcgcatttttcaattgctccaccgacgagagaaatatgaactgaagaaaaaattggaaatgcgatggaattgaaatttagtttttattttgtatatttatcttatttattgtcacagcggcccaattttgggctccaagtacaattatgctggatttttcgtcctagtggtctgtgagttagtcaccaaaaggggggtcccaggttcaagtcctccctatgttgtgtgttaattttaatttcttcttttaaagaagaaggcagcattattttttattaataagttttcgtgtcaaaaaaaattattttcaataagagttagttacgtacagcatcgataattttcatgaaattt

SEQ ID NO: 18282 - DNA, 1371 bp, Heterodera glycines
  unsure (1)..(1371): unsure at all n locations
agagtcggtcaaagtagaaaaaattaggcccaaagaaagaaataaatggcgacaaaagtcagcaaaagtgagtggaaaatggtaacaaattgcgatggaaattgttggaagagcagaaaaaagtcgaaaattgataaaatagcgcagagagaaacctaaaaattattttaaaaattaatttttaataaaataaatattaaaaaagtcaaagcaccaaaagggaatgggaaaaaagaagaggacggagagaaaagcgcagaacaaccgactgatattgcttatgccaagagaggagccaactaaaggacggattaaatgccaattggcggataaaacattggccgacctcgcggaaagactgtaaaagttcaaaaggcacaaaacggccgatggcacagttaaaagccaaaagggaggcgaaccaaccgaaggatggcaagctgaaagtgaggggaaatgctaattacactaattaaacttagtgcactaactgtcttttcttagtgacagcaaaaactcggagacaccgacaaaaaggggcaaaattaggccgaaggaaaagtgccgcatttgactgaacaaatttaaacaaagacaaattaaaagtgtcaaatggaaaatggcaataataattttattggttgattaattaccaagtttcgctgacattgtgcagaattaatttgcacaaatgaagagaatacaaaagtaagcaggcgaagagagcgcaaagggaagaagccaaaacggaggagagaaaaacgcacggaaactgccaaattggggagatgaaagaaagaattaattacttaattattaatttaaatttataatttattaattattccctttaaatggtttcactcactccgccgttgtcaaatgattgtgcccttctgatcagttgcaccgaaagggcattcagcgaaaaggcgacaattgccgaagaacggagcagacgaaaatggtaattatcacttaatgataaacattgggtgaataaaactatttttgccattggcccaccggcacaaaacaatggaaaaagcaacggcaagcagtgcaaaggtgaaaagtgtgcacagtgtacaaacaattgggatgatactgtcgggagtactgtaatggactcgattgtcagcggagaaagggaaaaactaaaaagtggcgattagcgtataaaacaaagtgccaatgtttgggaccattatgccagatgctttttngattggaaattgctttgaccaacaaaggcaatttccaattggcattgcccggtacaatttggcattgaatgtgcgtccgattgagtcccgccaaagcgacggtttgccaatgaccgccgccaaattttgccaaacattcgtaatg

SEQ ID NO: 18283 - DNA, 1901 bp, Heterodera glycines
  unsure (1)..(1901): unsure at all n locations
tcgttggccattggacggccttttccatttgtgaagggcaccgcccgtcgattggcacgcatttcagcgaacgccgttcaagaagaagcggctgcttaattaatattaattaaatgccncaatttctctctcaaatttaattaattgccgcttccttcaaattttccgtctcacttttctcccaaatttttgttcgcatctgtcgcattggcgtccaatcgcttcaccaatgcattcgcattgccccgtcaggcgattgcaacggtccaaagtgccgggggcagtgccgtagccgcaatggcacggcacgcagcggtgatcagatgctaatattgggaaaaatgatcagaaagagagagagagagagaagaacgaaccattgtcactgatcagaaaagtgccttctcggcaaatgcattggccattggtgcgattgcattgagtggcaaagccattctcaagcggacaatggcatcgtttgcaccttaaataaaattccaatcgcgaatttgcatttaataagacattattgcctcgggaattggccaaaccatccctcggggcattccgagggaacggcgccattctcacagtttgcgcctgtccttccctcgggacaaacacaacttaaaacattaatttatatcaacatttgtaaatttgtgaaattcactcatatcccctcggcgaattgggcgaacggacgcaaatcgcattcggaaaggggccgcaaatgtcgggcagagaacacacgtcaacgcaactgtcgccgacaaagcctaattagggggggggggggggttggggtaattagcaaaggtttaaattaatttaaaaattaatttcaccaaaattgcatttgcaaatgtgtctgtcccagtcgcgcatgcatttgctgttggccgggcactgagtgggagccatttggcaaacattcggtgccaaacaactttgcctaaatgtgctggtcttttcccattcggtctcgagttgtttgtcgagagtggacaattaatttttctttttaccgtgttgccgattggttggccaggcgaagtcgttgcccgttccattcaacgttgcgtaagcatccgaagaaggcggccggatgggcacttgacggaacggtgccggaatggagtgaccggggagtgctcagtgccatcaacggaattgactggacaaatggacaattaattaattcaaatgggttttcggcacttttttgtatagtacatcgacgccaatttccaatgcttcggcagagaaacgcgcctcgacggaatgccaatttccgtcggaaagagtcgccggaaagggcagcaaatactgctcgctgttcactctgatgatgctttgaccattttcaagctgaaattgaaaattaaatcccaatcaaattaaatggaaaaaacaccgaaaaaatgaacatttgggccgaatgctcaaagtccaaagtgatcacttggccttttcgctcgcgggttcgaaattcgaaatacagcgaaaagggcagcgaaaattcgaggggtaagccccaaacggcgaaggaatcgtcggccaaagtgagggcggggggctctaaaagggagaaatttttaaaaaagtaaaattttttaataataaattttttaattttaaattgaccttgcacaattagttgcgacggacaattgagacgaggcgaatgaacgcgaaaagggcagcgacaatggtggccaagccaacggtccaaacagctcaaattgacggattgtatatggaaattgaggaaagagtgtatggaagcaaaaacaatacagtgtccaagaaacgggtactttataagtaaaataatcttttttaattatttcaatttttcatttcccattttaaactatttcatattctattaatattaa

SEQ ID NO: 18284 - DNA, 2350 bp, Heterodera glycines
  unsure (1)..(2350): unsure at all n locations
gtacttcaattacctnttccttcagcctnttctctgcttttcacacattcattcctttttggctttctttcaaagcttatttnctgcatttccattattcattcgctcgaattggtgcattttcaattattcagtaaaaccaatttaggcctttaaaaacggttcaacagttaacctggtggcatcacataagcaaacagtacaaaactacacacatacggctttgtgccttcaaattcataatgcatttttggcactaagcccttgacacacaatcattttaagcacacagcgttacctgccattttcgcttgacactaggagcacacagcttcgactagtccatggcttacgctcatttcacccattaattgatctcttttctgggagcacacagcttcgaccagtctcgtggcacacagccacaacggcactcagcccagctaggagcacacagctgcgactagcttttatcttttcatgctcaaaacctttgcacttatcctttcgaaaacagccaaaatcacaaaaattaacatattatcacattaaaacacagcgcattgatcaatcaatgatcacaaaatatgccataaggtttttgtattaccgtactcagccatattagccacagaaattttgccaaatttctttcgcaagacaatgcaatttgcgttttactgaaaaatagcaatttcccattgctttagtcctttttttgttgttgccaaaatgtactttaatttactcttccaatctccaacaaggaattaaaatttaaccagactaaaactgcttttgggtctgcgtccctttttaagtctgcattgttcaaattagcctttaatggcctcagacactttttgtctggaatgctctggaattttaattctctctctttctctctgtttaacaaaaaaaaaaatttacacaacgggtcgtggcaccaaaaaggtgttgtgtccccgggtttaaggctttcagccatttcaaattaccgttttaggagagaggaatttattataaggaaaaacattgacaaataattataagttaaaaaccgggaatatgtttggctcaacaacaacctcagagcattttgggtgggtcagtgcaattggttatttgggaaaggattgccaaaggcaagaaatggcacagactgacccaccgcagacatctcgcagcccccgagggggaaattggatggacttatatactggtacaatggggatggactttggataggatgaggggtaatgacggaaaacacaaaagggaataagagaaatggatggcatatgcaacagaggtgaataggaagaaatggcacgataacattggaaatgagagggataggattggcttgggatgggatgaacagatggataagtttacgacgggattggtcgggagaaagtagggcaatgtacattatgcacaaaatatgaaattttgaatgctgcggatacagcagtcagttttaaaacgaatgaaacctaccaaatgaaacccaacaaattttatttcatttctaaaacaatttttttttaattaaaacaaagtttctttttgttatggttggtcctgtttgtttctgttttacgcgcacgtaacaaacttcaaactcgtagaaagaaaattttaaagaaaatttgtatttggcaaagaaaaataccgtaatgtaatttttggctcagatttaataaaaaatataaatcccccattcattcgcacacagaatggtgaccgaattgaggcccagcgttattacgagttgagggagaaggatgtgttgcggttcgggttcagctcgcgtgagtatgtgctgttgcatgagcattcagcggcggccggcgtcgaagaggcggaggaggacacttcggccgacgaagggaggaggacgaagtgatggacggattggtggaccggacggggggcgaagagcgaattgcggcggcggaggaggacgacctgttctgataacgatgataatgatgtgatcagtgatcagagttaaattcgaaatatacaaaataaaaaaaacaggccatattttcatacgcttccaacttgtataaagttggtctccgaaaacacaaaaattgtgagtggcgaattcgaacgattttttggtttgttagcaaagggccaactgaagcggctgttcaattttgtaattattttgacaattttttcctctgtgtttactgtgttatttatttatttatttttcttgtgccttaaagggtaattgtcgggtggaattagcgaccggcggcgcattttgttgacgacgacggcctattggagaaattgttggcatacggtagagtgttttgtttttttc

SEQ ID NO: 18285 - DNA, 2503 bp, Heterodera glycines
  unsure (1)..(2503): unsure at all n locations
aaaaataatttctcaccttgtctgatgtgaattttgtccttgctcttgtactcgcaaagtgccatcaccggcagcggttttgaaatgggttcgccacgttgccaaagcggtgaaatttgggcacaccttgaaaaaaaataaatttaaaaaatgaaaatgccatgcaaaaaacgtgccaaaaaatgttaggcttttgctcacctgtcggtcagtgaaaggagtcgcgcatgcaattgttggatgtattcacggacagagtcaagctgtcgcaacatctgttcaccatcgtccagcgaaaaatcagtacgagaatattcacgatcaagatggtcctggaatggagtcaattgcgataatttaggggcccaatcatttaaataaattttaacggtttggattttggcactttttcatatattcagcttaaagaggattaaagcagaaaccatgtttttaaaaaaggagattttgacaaaattatggtttaatgagagaattgaattcaatcataatcatactctttatttttttaatttaaaaaatttaaatttttttcagaatcccgaaattccaaaattttctgagccggaaacccccccccccccgctgacatacatcacgcaaaactgaccaactgttgctgcatctgctgctccacctgctccgactcctccacaaatgccttggcattgtacgcgtcgcgcaggtggccctccaggcacttgctcaggttcagcatccaatcccattggttctgcatggtgcgcaggtacacctcgatcacttcgcccgccgggtggcgttggttgatcagcgcggcgccctggttgtgcacgtcgttgaactgcttctcgtgcagctcaatctcatggagcagctaaatggttcatgatcataaatcattaaatattaatagttgcatgagtgaggttctcggcatttaaatccgagtgaactttgtaattttctactttgaatttttccataatgggatttaaaccattattccttccctcaaatcattttattcctctataaaataatatcattctaaacatatttataagaattttgaaaattaatcaaaactttaggaaaacttaattttgcaattaaaaaaaattaaatttattgaaaatttatgaaattttagtaggtttgactataaaataaattttttcattttgcatccgatgataagttgttgttctccattgataatgccgacgacaaacgaaataaaacttaaatttcgaaaatttgatgactaatcgacgaaattgtcaataatttttaaaagctagatcctgaatctaacaaaaaaaacattttttaaacattttattttccggccaattaaacctaattagtcatgcgccattcgcgcctattagctgtaatttgcgcaaccacctgcttgaagtagttttgcagcatcggtatgtccaggcgctccaagtcgctccagttgcgtgtcacttccaattcctcacgctgatggatccaaagcaattcaagctgagcagcacggatgaaggcgatcagcgagtcctgtgatcagagagagagcattgggctgatcagtagtaaacaggacagaaaatatgatcaaattaagagaccatggcaaaattaaggaaatggctaacgcataatttaattgccctattaaaggacctaattaagcatggtataaagcccaacccaccaaatcgaccatgcgcccggcagacagttcgcgcaactgttggtactccgactccatcattttcaacagctcacaataatcgtatgaatcttctgctgatacttcagcctgagaaagtgaaaagtgatcagagaacgcagacattggaaggaatgaggaaatgattcttgatcatagtcatcttggtcgagattattatatgaaatatacggtagaaccaccggttcaatatcagagatttaaaatattccaatattttgactctaacaatttggaattttgtaggccagaaacaattcaaaatatttttatcacattaatttggtgtctcaccttcccccgatcaaaaaatggattgtaagatcactccaattgttttattaaattatttttggcaattttttttacttgtctggcaatgcattcgtccaccgtttgtcgaaagtcctgaatatcccggttgtccagcttgtgctgttcaaagatttgctccaacacttccagcgtctcgctgaattgcatcgagttcagcttatgctgaaataaatgggtttattaagcctgcgaccatataattaggagtcctaattcacgtaaatgattaaaacactgctatttttatgatcaattcaatatgggggatcagttaaaacccgaaggaaagaattgatcagaccattttttangtctgttaaaccctcgagntgaagtgatcacagcctttataaatacgtcagctcatangaaaaatgataatgatcagntgatatatttattgnngtaaaaatcaaaaca

SEQ ID NO: 18286 - DNA, 2177 bp, Heterodera glycines
cttggaattctgggcaatagtacttagtacgttcctacctatcttttgccctcccttgttgcgtcgtactataaatattgtgcccccttttcctcccttttcattcactcatttttcttttatgagtgttttactctgttttttgtgaatttcataaacttcactgtttcaaaaagacatatttcttatcttaaccagtaaatacccaacccgaattccaaaaattatcgacatcgacctgaaagtttatcagagtttccctggcctatactaccaaatttgaacctaaatttatcaaatttttttacaaaaactgcaatttccctatttttaaatttataattcatttcattatgtattgtttttatgttttttccttttttagaacagaactatttgcgtttatcatcatcatcccttcattgtgcaacaacaacaacacttcaaaagcgacctcatcgccgtttctcatcgttcgttcgttcgtccgtccttcacatcaattcgctcgccgttttcgcaatggcacttcgacgcatcaaacaggtggcgaaatgacaactctctgatcagccaatgctttcaatgttttgatccatttgcaggaattggcggagctgaagcaggaaccgatcacgggttgcaccgcggcaccgatggatgacggcaaagacatgttccactggaaggccaccatcaaaggaccgcccgagtcgccgtacgagggaggcaccttccatttggacatcgttttccgtcgcgactacccattcactccgccaattgtcaaattcgaaacgcccgtttaccatccgaacgtcaacaagcagggtggcatttgtctggacgtcctgaagacgacgcattgggcgccgtcgttgaccatttcgaaaggtgaaagcgacgcgggaaagagcagacaaaacgccgacaaaatattgagacgacaaaacgatccaattcgaaacgaccaccaaaaccggactttttggaaaagtgtcgatattttgtcgtgtgaataggatttttcaaattcggaaatgccgttttaattcattgtctcccctccatttcagtgctgctctccatctcttcgcttctctgcgacccgaatccggacagtgcgctggagatggacatcgcgattatctaccgcaacgaccgcgagcagtacaaccgaaatgcccgtgaatggacgcagaagcacgcgatgaaatgagacgacaaacgaccgatggatgggagaggatacagaagacaaccgccgaagagggaggaggaggaggatacattcaactgaccctattcccatatatgccaactgtatagattgtattattgtatctcactgtatgtacagtatttgtcgcccggttatcgtttaagcgaccataattgtctgttgttggttgatcaccattatcaatgtgttgtatctctgtgttatcatttcaaccaatttgtgatcaattgttgcgcctaatgtgtgtaaataatgtgaagaatccaaagatttgtttgtgtttttgctccctttttcgtgccttttcatgacttattcaattttttggtgcctattatagtgccttttttcccaggcttttccatgctctaaataagtgttcggaccccgaccccgaaccctactgattttatttatttttttaaactgaggaaattctcaagcaattagtgagttttcaagaaaatatacccttaagaatggcatttcttgggataaaaggcaaacaattatacttgtatttttttaactttttaaaccacttttgataaaattttatgtgataaatagggatgccaaaaatatgcacataaaatcgtaaaatatgcacataaaaagtgaaaaatatgcacaaaaaattttccaattgagggtgtaatttctcaaaattactccccttttaagcaaagcaaattgagagaaacaatcaattaatgtgagaaaaaaggaaaaacgacgacgaatgggtcgaataatcaaatgaaaggaatgaatgaataaaaggcaaatgagctgattgtttgttgttttgtagttggccgatgagatgaatgtatctgttgatgttgccaataaagcactttctgtttgtgggaaagtgagggacggacggcacaaaattttgggtaattaatggggggggggtaatgaaaag

SEQ ID NO: 18287 - DNA, 1701 bp, Heterodera glycines
agtttcgtaaaagttctgagcaaaaaattcggatctaagactttttgaaattttatgacaataactttttttacacttaagtaataaatttttaataatcatattctgatatagaacaattaaagctattaaatgatcgaacgaaatattaatttgttttaaattgagccaagctatgaatttatatatattacgcattttttgttttcatacccattggcggatttaggaaacgcgcatgggtggcgtttttaggaaatgcaccagcaccataatatttaaatttaattatttttcaaattttttttgctgaataataaatcataatttatctccaacttagcaaattaaataaaacattaacattttcaaataacaatcaattatttgaataaattcataaatcagttttttcgtgatatttgcgcctatgtgcttaaaatctttttcttatccctactaataaatattctctattgctgatctttttcactactaattgatccgagttcaactgatccccttgcactttttctttttatcatttctgtaattattatttttgttctccctcaattccaattccaattttattatgattttattttcatttgcctttttaataaaacataaaataatttttgttttgtaaatattatattttgaattaacatatttatcattccgttttttctgatcacgatttgatggacaaaatgaatgaatcatcacaaaaaaagaaggaaaagcgatggaaaagcagcagaaattccgatgtaaattaaatgcagaaaatgaattatcagatcagtaacagaaaataattggagagaattaatgaattttgattgattaattaattaattgatatggaaaattaaatgaaaataaataaacatcgtgaacagatatttaaggatagaaggacttcgatgaaaatattaaggcattgaattattagagcgaggcacaggataatcgccttgcggattttgcggatctcaaccaggaattcagattttttaagaatcggtgaaattgcgagaattattaagaaagttcggcaagcaatagtgtatcacatagcatcacggaatagaataagacagcagaataaaaatatgataagaggaataacgctgtgaaagaaattcaaaaaaattcatcatctgtccagcggatccgaacccatgacatatggtcattaaaatgcaagaggaaaaaaataatcaaattaacaaatttttcctgggattttcatttgatcacttttttcagatcatttttggggtcagggccaaaaaaacccgaaaattggcaatagtaaatcgaatatgctctacaagataaaagtggtcttaaagcgatctgagcagtcacagttcggaaagttttccccctgtagaaaattttcaaaaaaatttaaaaaaaaaattttgcatttaatttttttgcaacagatgtgctccaaatgcgcgccattggccgacccgtggcgcactgctcgcttcccgcactgtgagcaaattcgagcggatcaaccgggcgattgtgcgagtttgagcgcacgtcgaacgccgtgcgcgaaatgttgaaccgcgaaattcgactgaggtctgtccgtaaactgattttgttccgttaataccactgcttgcttgctgataattgatcggccttaagatgcttttttttgtttac

SEQ ID NO: 18288 - DNA, 3327 bp, Heterodera glycines
tttttagtgatataactgagtatttcgtaaatttcgaattttgacacaatttctaacactgtttttttataccattttagccctaatgatcttcgaccttttacagattggaaagacaccatttatctttttataattgctttagccccattaagactgttttcgagtgatattaaacaatcggggacgattcagtcagtccctgttgaaaacggacaattcagtatccgattttttacatgaaaaatggcaagggcgcgccctaattcgcctttttttcatcattttggacgccgttttaaattgattccaatcgtttttgagcaattttgagttgggatcacatcaaaccgataaccaaattcttcaatgaaccaattccaaattttattaaatcattgaaatataaaaggacaaatgcaatgaatactgatgaaaggggaactaaaagaattttgattcttttttaatggcgaaaatatgtcgtgccaccggtgcgtaacccatgggttcggacagtctcgggtctgagctccttcttccatttttcacatatttttctccgttttaactattctatgcttacatttaattgatgagtggcgtacaattaactataaattataaatttataaattacaaaatatgataacttatcgaatgtgtttatcggtgcgtgacgtctgaatagcgtcctctcttttaatgagtccaatgaattaatatttgaggacaattagttaatatgaactgtaaagaattcgaatcgttttattcatcacacgaattccaacacaaaaaataaactaatgaaaggagaatttctcaaattttatatcttcttaaatacccatcacggaaatcgtgagaaaattaaaaaaagaagttttatacaaaggattcatgaaacgtttaaaatgtacccaaatattttgtttacattagcaaaatcatgagaattacggttcagttcttaattttttaaagtaattacattttcaaattttaaaacagtggcggtgtttgttggcctcaacgttttttattaagttaagaggactttccattgcgttcaacacaagttgaagatgttgcgattttaatgaaccaattaaaaaaattcgaatactttattttttaatgtctaaatttttaatttcttgtaaattttaacccacacgacaattaaatgtaagcataaaatagttaaaacggagaaaaatatgtgaaaaatggaagaaggagctcagacccgagactgtccgaacccatgggcactgaaaccgtcaatgccaaaaaaacaaattaaggtttgacgacaaaatagccaaaacacccgcaaaatgaacctatcgagtcagcctgtgcatttttttgagaggacacctttttgacaaatcgcaaacttatatttaacttgtcattaattttgtaattctttctcttatttttgctgtcgagattaagcgcttgtataccattctttcggtataaaaagttcaattaattttttcgtctcttcttccctctatgaagaggtaattatttaattccgaatacaaattaaaaatatgaaaaatctattttattaagaaagaactacagtataacaatagaaataaccaatgagacaccgaatggtgaggtagcaattgaaagaggtacagaaaatttggaaattactaaattgggggacctaatttgaagaaattttgctcagttaaattgctgaggtagccaatggcacgtgagcaactttttgcttatagcctttcagcaatttattggccaaaagcagaaggatgaagccgccaatgagcaaagtcaacagaaaagcaacctaaaatacaatacataaaataacaaattaaatggcatgctaaatgatttatcacttgagcccgggcgatgatcccaatatttgagattaatcccacaaatccggtctagcaaagaattttgaattcaagtcccccccccccaaccaaatccgcaaatttgaattccggtctcttttaattatttatgcaaattttattttttttactttaattgtgtccgaaagtgttgacagcagtccattttgggcactttccaactgctcaatgtgacgttcaaaacggcttaactgttcgctttgggcttccaacacagaatcgacctaagcatgaagaaaaaattattttgaaaaaatattatataaaatgtatttatatatttattactctatcaaaatccttggaaaattgctgcccaattctttgcattagagaaattaaatcattggccgaatagtcctaaaatatgatatacaaattatatttcttatggatctatagcttaatatgttataaattcgtcagttggccaactagtgaatgtgtgaaatttatttgaataaaaaataaggtaattgtttacctttttaattgtttgtcaaattattttaatgattacaaattaaactcaacttcgatttaagaaagtcagttatcgaagccggctttgaatgtttaagaaacattttcatggcgggctttggttcctctccaggaactgcttcatttgtttgggttggcttttttcatttaattaattccacttcctataaaaacacagcaaatcaaatgaccttcaatttttaatttatattcattaaaaataaataaataaataaaacaaaggaaagaaatttcgaaggttttgttgtttatttattttcttccaatgcttttaaatggtttcaaattttcaccgaaaattgtgccggaagatttttcctcctacagtaaccgaatgcccaaatatggtcatttggtcatttataaacttatcttttttggttggaccaactcaacttggaccaactcaacaagtgaagccaacttttaaaggcgtgccatttttctgtccattttcagtgctttttcacttgcacggattattataatttaaaaatataaaagtatacatatgcgttcaacagaattaatgaattaattgtggcattgacaattttacgggggaggtaattattaaaataaaaatgaatatatataataatttcatggcttttcatgcattattttttgtttgtttttacatatattttatttataaatgtttgcaagaatatactcacatatgcatatattacatataacatgttaatatacaaaaacttaaagcgtgtctaccaccaagcaaatgaattaatggattaatgaattaattaaatgggtaatttgttttatttttttggtttgcgctgcatttccttgtgatgatcgcccacctcacttaaaataaacggaaatataataccta

SEQ ID NO: 18289 - DNA, 1824 bp, Heterodera glycines
  unsure (1)..(1824): unsure at all n locations
gcgcccgtttctaaattttgttgaacttggacgggcgcttcgcgcccgtatttaaatgttgttgagctcataagaggtacaaaaattgttggaagatgtgttggaagaggtacaacagtgattataagaggtacaacagtgattagaagaggtacaacagtgatagaagaggtgcaaaagtgattagaagaggtgcaaaagtgattaaaagaggtacaaacagtgattagaagaggtacaaaagtgattagaagaggtacaacagtgattagatgagtccaacagtgatagaagaggtgcaaaagtgattagaagaggtgcaaaagtgattaaaagaggtacaaacagtgattagaagaggtacaaaagtgattagaagaggtacaacagtgattagatgagtccaacagtgatcagaagaggtacaacagtgattagatgagtccaacagtgatcagaagaggtacaacagtgaaaaagcgatacaaaagtgattagaagaggtccaacaatgattagaagaggtacaactgataagaagatgttcaacagtgattagaagaggtccaacagtgattagatgagtccaacagtgatcagaagaggtacaacatggtttaaaattaaataaataatgaaaagtttttataaaaatcgaatacattttaatttaaaattttttttataataaaatactctttttattcattaaatataattttgaaaattaataattgaatatttattttgaaatgaaattcatttttataaattcaaaaaataaataatgaaattaaataaattcaaacaaaaaattaatttaaaaaaatttttcacaaaaaaataatttaatttaaattaaaaaattaattaaaaaaaacaaacactcttttaaatgaattaaaaacattaaaaataacacaaaaataaatagaaaaataatttacaccgtccggatccgaacctgccccccccctcaaaatgatgcctcagaatccccaatcacacagggattctgaggtctgaacgatgtcaaaagtaaaatatgatcacgtattcgtgatcagcgtcataaaatagccctaatgacatgtttttggaagattcttggtgaaaaaaattttccactcaaaaatcatggtcacacccctttggtcccgaatcccaaaatcacttttatttttgtaacatctctcaaaaaagtgataaaaatgccaaataaaatttatctaatagagcaaaaaattgcggatttttgtattattttacttttacagaatgacttttcagaagcgagttctgaatttttttctgaaaaatcttaaatttccagaatttctggaataacttttttcatattgatgttagaaaacccaaataaatcccataaaattctcctgatttttctctatttttaaggctttattcctgtaaaattgatcaacccttcgatttgttatgaattttcaaatattaggccaaaatcccgagggccaaaaaattgccaaaaaataaagaatttttaaaatattccaaaaattatgaaacttaaaatagacatcatattcgtactcagcaccttattttaccccagaaaaatattttacacccccattttcgtccgaaaaaaaaattccgaaaatttctagggggcctagctcgaaaatttttgaaaattttacatcatgtagtacaccattcgatagagcttcaaaagctctacaattttgccctaaggcgttttttcgataaaaccaacccctaacgagttatggaccacgggactcaaantgtcccgctcagnngcccaaaaatntttttcta

SEQ ID NO: 18290 - DNA, 940 bp, Heterodera glycines
gacacgaaggccaactgaacaagcaaaaaacagtcaattaatgcattttaaaatgcccaagttatgccgcaattaattaattagcactaattagctaattagaactactcaccaatgtgactgtgctgagcacagtgagtgagaaggcaaaaattgtgttcgctctactccaaattgaatgcattttgagtggaacaaattgtatttccttttaattcaaaaattataattatattttaattgggaaatgccattgaaaatggtgggccatatttttgtgtgatgagagagaggatcacccaaatcatagaaaatagggggaaaattggaaaatataaatatacaaaatcaatattgatcgtcgtcattttcatttttcacgacagtcccttccttggcgcccgcccattttccattcaaatgaacacacagaaatatattatgtatatgtaatgcggtggcgacgcacaaaggcacaaaccattaaaaatacgtgtaaaaatttaaaaaaaaggcaaaagattttttgtatatggaaacaacaacaacaggaaaacattaacagcaacaggacagacaatgtgcaatatacaaaggcctaccaaaaagttaactttaagagggatggtcggacaaaaaatccattttttttggggggagggagggggtatttgagtgatattgtccaaaaaagcgcatttaactcgaatcccagcggtgccaatgaaaaaaaaattttttttttttaattgaatatattttgcacaaagttggtgacagttttttaaattttttttcgaatttttccctggacacggcgttggcatgaaggtaaaatatgataaaagcagagaacacccaattattatttggttgacaaaaagagcaaatcaaatgctgcgcatttttgatacaaaatcaatgccatttgtgaattttg

SEQ ID NO: 18291 - DNA, 1483 bp, Heterodera glycines
tggttcacttgcgttgggccgcccgtctgatgccctcctcgccagcgcattcatcgtccacaaaatgggggtggcttaaaaatgacagcggcgattatccatgtaaaaataacgtaaaaacttggggttttccagggtctgcggggacggggaaaggtgggggaggcctccgaaacgaaaaaaattttaaaaatttcaatgaaaaatgaaaattttaatggaaagtttattgttttcttaagattttggaaacaattccaagaaaaccatgtgcatttgtcgaattttgagcaagggcattgcgatacccaaaatcgagacttgaaaagggcattaaatttccgcacggccacgataaagagagaataaaaacagcaaaatgggagattttctgacactttttgttccaaaaaatttccactggattatgcattgatttttcgaggcaagggtaaaaaaaattttaaaaacacacaatccatctgggttaaattgttggccaatgtttacgattttcagtaccaaacctgcaacatgtgttcgtccacaggccggggaatgtgatttttgtctgcgacctctgctgcaaaatgagtcggttgtccgcatcgaacatgaacacactgaacgcgcggtggagaattgctgtaaatgaaatttttttgagggatgaaaaaaacagaaacagtaaccgttttaaaaatccgataaaattgaaaaaacgtacgttttgcatggcattccctttttgacacagtgcctgaaaacagtacagcaattaatacaatgttattgtccaagaaaaacatgatacaagggcgtaaccaatgggtagaggcggtccaattcaaccctagcacaaatgatttttttttaatttgagtctaattaaaaaaatccaagggatgccaaaaaatcagtcatccatagtttttctcgatgctgataccaattaaaaaaagcaatattcttggtatatctaacgacaaagttctacaaaaaatgacggttttgcgaatttcacaaaaatccttagttttttatgggcctcccacaatggcattgtcaaatttatgccaaatcgatggttgataattgtccaaaataaacaatggtcataccgatgggttcgtcccgttcattgaccgcaatgcatggctcctccaaatatttggcctggattgggcacatccgcgcaaccgccgacgatgccgccgacgccacagttgtgccaccagcggtggcccgccgcctttgctgtgccaacaatggacggcaaaagcggtgaatggcacgcttttgtgccaatgccaatgcggacaatggtgacgagttacggatgatgaaggaagaagtgtgcattgtcttttaccactttttacaataaatacctgaaaaaacggtaatactggagaattgatgtcccgacgaaatacaaagttaagaagtttctttacagtttttctagggtaagaaaaaacgc

SEQ ID NO: 18292 - DNA, 1063 bp, Heterodera glycines
  unsure (1)..(1063): unsure at all n locations
accagcacaacagtaatcagcattcgcattgcccgctggcgatcccgaaggtggcgagagccgatctgctgatcaaaagtgggattaaattaaggcaattaatttataaatgggaatttcaatgaataagcacttggctatcggaacgaaatgtcacaaaattggggggacgaaaattggagtataataaattaattacataatttaataaatttattttttgggattaattaattaatagccgcaccaaatcattaaagactaattcgaattcattaacctatcagctggctaattgtttcacaagacaatcaaagttaattagataatgatcaattaaataatttttcattcaaatgacgactgataaacctaataactgaaagttaaaagtgccaaacactaattgctttcataattggaaaacccgtgactaattggtcccactaattgaccacctgcatggctttgttgcgcaatacaatgctcatgtgaacgcacaatgccgaaatgattgtgagcggtgccaaaaaaagtgccaacgtttggatcaactgatacttttgttggaattcgggggaccaactctctttgcaacgggtgccccactaaaaattggcattttgaatttaaaaatatttccaacaattttaccgtcgtagtcaaatttcgcgcatattcagccggataaatgcgcaaagtgaacggttcgggcaatgacagaaggccagagactgtccaaatcagcagaatcacctgaaaataggagaaatgtacaaaagtttgttgtataaaattcaaaaaaattttggcaaaatgtctcttgatttaaaaagaaaaatttgccaaattgaattcttccgctttaatcgggtcaattgcatacaaatttttagtttaatctttaagcaaattgcctatatagctcaaatcacaaaaaaataaaccaaaatgggattggctaatgaaattggttgancaaatgtccacatttgtccaaatggactaaatggtttgtcaaatgtcccacttggcacgttcgtcggaatggcatggcgcgtga

SEQ ID NO: 18293 - DNA, 1546 bp, Heterodera glycines
attttaaaacataaaaaaaattaataattaaaaaatatactctcttcatacaattaaataatcctataaattacttaattaattacttattgttaatgaacaatgattaattatgaagaattaaagattttaattttattttaaaagataaataaaataattttccttttgtaaacaatattaaaatgacaaaaaaaaagaaaataaaagtctttcaacaaataatttacatggataaatacatttttaatatttttgtaataaaataattaataaaaatggtaaaaaattattgcttaattattaaaaacaaaattagttttttaattaaaaatatattttattcaaaatgtcctacctgaatgaacaacatggccttgcaaaattctgctgatagccaaaatgttttctaaagatcaaaaaattatattttttacaaaattctcattaccgtaatgtcattaattacagtcggcggaaggcaaaaaatcttaaattaattgcttttattttaaaaaataagagaaaaaaggcattaccaacactaaaaggtcagacaaggccaaattggtgaggaaaaggttcatcgaagtccactgaaagtgatttaaataaaatatttttcaatttaaatgtttaaattaaatccaaaaaatttggtggcattaaatttatttttaaaataaaattttttttttcatattttacccattttatgccatcattcctccatttttctcaatgctcattatttttcttctttcccctattattggccaaatttgggccaccggaaaagcgggaatttaaattggcacgcataaacaaaacgccaatatccaattgcatggcaattcaattttcttggaatttatttgcccatttgtcagaaaaagtcaaagaaattaatttaaaaattaaattttttttaatatttaaaataaataaattattattttaccaaaattttaaaaaattttatgattaaattattaaatttaaaaaataaaagacgaaattcagcaaattctcaccatgtgcctatttcttgagacgacgtaaaccacgaggcctaaatttccgaaaaaatggaatttttgaaaatttcgaatccctacaatttccgcagactccgacagccattaaaatggcaaaaattgcgacgaaaacccattcaattggggtgggcttcagaaaatcggccacaaagtccacgtattcgtcgtcatttagcctaaaaaattcatttgaattgcggaaatttttagcgaaatttttaatttttcgttttaacaaaaataaaatgccgtaaatgccaaaaatggaaaaatcacaaaaaatgcgaaaaattcaaaaaataaattgagaaaatcacccacctgtccaattcctcttcgctgctgtaacctcctgccgttttgaatttgaattgttggcgaaatgtcattctccaataaaaatggtggaattgttgttgaaagaaaagtggtcgaattaattaacattttaaaaaattaaatagcgcctaaaatttattgggtaagaa

SEQ ID NO: 18294 - DNA, 1728 bp, Heterodera glycines
gcggcatcactgagttcagcgactagcgcactaatgttaagtccctctgcagatgagaagcataatcacaaatggtcgacagtttctcggcctcaacgcccaccggcagctccgtcttccgttggttgggctgtgcttgcgctttcgttcgaacagatcagcgccaacatggccccagtcatttcttcgccattcgaatctgtgcacgttgatccgatgatctccaacactaccctgtcaatctgagacaccctttcgtgccgtggcatcgttcgcccattcatcccacctccgtgtacaccaccgtgtcctcgcccaccatgcgcgctttgttcactttggccattgtgtcgcgtcggatcggtgcccacacactgtcgcgaatctgtcaacgacggaggggtcacttttctgaatgaacgcgtccaattcacttccttccacgatttgcgtgcgtattgcaccgccccttgggcaacggcttgttgccggatgaactcccataactcctgtttgttttgacgagaaatttgtgaagaaacgggggagaaaagcgactctttgtagtcgcgcaccaatttggcaatggccaaacgatgggaacacattaattaagtgattattattaattggtgggaaaagaatggaagacgagctaagaaaaggaaacatacagcgaaagtgagtgactgtttccaaaatttgacaaaatttaaattaaaatattatttttttaacaattttagttttggtaaaataaatgtgtgaaatagggtggtatttataggttttagcctattttttcctgagctcccagtggccttgaaattatttggcctaattttttttacttttttgaatagtttttgtcattttacaccaataaattttaggctttttagggcctattttccattgtttagtgcctatttttgtagttttttagagcctaaagaccagggatggagttccgaggcactaaaaattttcggaagtcggaactcggaattccgaggccccaaaaattttcggaagtcggaactcggaattccgaggccccaaaaattttcggaagtcggaactcggaattccgaggccccaaaaattttcggaagtcggaactcggaatttttgaaaaattttacagaaattttaaaatatttcataagttaactttaaagttataaatcaaaattactaaatataaatgtattaaaaaattaatattaaaaattaataatcaaattcaacaattgataaattggactgcaaaaaaatcaatttcctaacattgtctcccttaatccggtttcgcaaatccgtacaaatgagcccggctttagaaaacaatctttcgctttcaactgatccacaaggtgcgctcagaaattttcgggcaacacgacaaagaagagtccattttccatgttcttctttcaacttccagtaatagaaaatacaaacagaaattaaaaattctcaagaaaattaagtttttttgagtccggcggtgccgataggtgccgtcggaaaaaaattgaaaatttctatgcaatttattaacataaattgtacaaaaattgctaattttttgaaaaaaaaactcaaaaaaattccgaaaaattccgacttttcatcaaaaatttcggaagtcggaagtcggaattccgaggccccaaaaattttcggaagtcggaattccgaccccaaaaatgtcggaagtcggaa

SEQ ID NO: 18295 - DNA, 2289 bp, Heterodera glycines
ctattgcagttcacacgaccataaaataatttggcaattttaatgcaacataacttttttttatgagcatccaaattaaacatttagtatcattcgatagatcaaagagtcttctattagtatgaaaaatttcaaaaaaaaaaatcgttgtgtttcaaaaaagttatgaccaaaaatgtttgaaaaccagtttttgaagttttttggccgtaacttttttgattaacgaaattctttgaaatttgccgtcaaatcgaaaacacttggggccatcgaatgatacaataacgattaattcgaatgctcatagaaaaaattatgttcattaaaattgtcaaattattttatggtcgtgtgaactgaaatagagccagattgcgctttacgaaactgaaaaaagataaaagatgtaccattttcatcacaattcgctgctaaggactccttcaaaatgcgaaatcgttcctccagccaaatgaaaaggcgttgttcgttgtgtcggaatttgaagttttttgtgggcgaatccgtagaattgtctgaaaagcttattcaaacaatttgaatataattggtccaccattctcaaaattggcagcaattttcagtgtgtcgatcagtttgacactctttgccaattctttcaatgacggaaagtcgtcatcttcgagcagttcagaagcagtcaaaaaatgttcagatgcattccgctggagacattcaatggccaagaaaaaaggatggacagggaaaaactgagaggcaaaaattaagaatgtaaaaagtgaagaacgaactgacggaccgaccaaatgaacggagccattggccacgacggaatcgccgaagaaaaaagaacgctttccattgtcaagtcggagcagttcaaagagttcgccatgttcattcaacttaacaaaaaatcacacatcacacaaacaatgttaattaccagtctatttgaaattttgtttatttgtataaatttttttgccaaaatggccattccctccgcttattattcgttcgcttttctctgacttttccttgtccgttttcgctgactgaccaaatacaacgcgcgttccctcgaggcggggtgaggcaaagcaaaaaccttccccggaaaagagccctctgaaacaaaggattgttcgtttatttgttatgattttatcattttcgtcaacctttcattacgaagaattttcgctcgaattccgtgtcggattcgaccgccaatgtttcttcgtcaagcccaaagtccaacagagagccatccccggcggccgttgttgcgacacttccgcacaatgaaactgaatcatcctctttgactgtgctgtgtcttcgccgtttatttccaagtgattcgtccattttcacctcaaataaaggcttaaattcaaatagaaataggaaaagttaaagaaatttaatttttgattatctataaaatttaaattttaactaaaataaataatattggcgcaaaactagaaaataattctaataactcaaaactagcttaacaactcccctaaaaaacatgtttttcgtgcgtttcaggctatagagagctcaggaaaaaatagtgaaaaaactataaatataagccctattcataatgtacgctgtccgatcgtaatctcactgctcactttacggcttaagtttttattaggtaggtcgaggaaaataaatccgaattcaacaatattcaaaaactgggttggggtcaattccatttttcgctgatttctagacttagctcgccaatagctttcggatgataccaaatttatcaggattcgattgttttaaaaaaagttagaagtgtcaaatctctgaatttttcgaattttgaaccgagccaaaaataggtttaaacccaataccgcaacttccggggaacccaaaaccgggctcaaaatcccgaagctttagggacttcggattcttacagtacctgctggggttaaatttgaatagttaaatccgggtcttacttcctaattttcgggcccctggaagccctacaaagcgatttgaaaccaattgtaaattcgggaaaaaaaattctcgatccaatttaagaatccggggaccggataaagctggtaaaatttcgtttttttaatatttattaataacggacaacaaaatttaattttttttttcattaaatttaaattattttaactgaaaatatttttaaaaatttttacttcggcttgtaaaaaagtatgaatggtcattgttttgaagctttgtacggttcttttttgt

SEQ ID NO: 18296 - DNA, 1123 bp, Heterodera glycines
tttcagaaagggttctgaaacgcaccaaattttatttacatgttagtttaggcactctgatgctttttctatcaaaaagggagatgaataaaatttttaaaaatttttaattcctttttaaacaggccaaaaagtttaggcttaacttttttttcagaaactgatcagaagcgcaccaaactttgcagggatactgaaaggaagagaaataacctattttaaatattatctagtcagttcatttaaataatttttatccaaaaaatttttttttgggttttcggggcagtccccctgaaccgatgcgcccagatttatggggagaccgaatccttcgggaatagcttccctatagtctgtactttaattctgcgttggatttttgctccccataaatgtttgagtaccccaaacggacacttgaaaaaatcgatttttttgttttcggggcagtccccccgaaccgatgcgcccagatttatggggagaccgaatccttcgggaatagcttccctatagcctgtactttaattctgcgttggatttttgctccccataattgtttgagtaccccaaacggacacttgaaaaaatcgatttttttgttttcggggcagtccccccgaaccgatgcgcccagatttatggggagaccgaatccttccggaatagcttccctatagcctgtactttaattctgcgttggatttttgctccccataattgtttgagtaccccaaacggacacttgaaaaaatcgatttttttgttttcggggcagtccccccgaaccgatgcgcccagatttatggggagaccgaatccttcgggaatagcttccctatagcctgtactttaattctgcgttggatttttgctccccataattgtttgagtaccccaaacggacacttgaaaaaatcgatttttttgtttcataaatatttttttcagaaagtgctctaaagcgcaccaaattttatttacaacttaattttagcactctgatgctttagtatcaaaaaggaagatggagaaaaaatgttttaaaaaatttttccttatattttggttatatcgttttgcttttggtggggtgcttggaacagtggaatcatgcgca

SEQ ID NO: 18297 - DNA, 2186 bp, Heterodera glycines
acaaaaagaaagtcaataaaatacaatatgtatgaaatgcaaatatttatttggcattgaaaattgggtatttggccattgctgtctcccaattcattttgcctttcaccaaatgcccgacaacttcaccaatttcactaacctataagcaataatacaaataaatgaatgactaggcaatcaattcaaaactcacagaaacacgaatttgttgcattgttggcgcatttcgcaaggtcacagtccacggctgcaactcagactcaaagtccaccgtaatgccaaatggtatgccaatttcgtcagttcgagcatagcgacgaccaatggaaccagaactgtcatcctaagtcaaacaaacaaattgaaaataaaaagcaaacaaactatttacaattttagaagagatttctcgagaggtcagttggtcccgaacagcaaagattattgggtcaagtcgctcattagaagaaatgggcaaaattgagcatttgatcggtgcaattaggggcggaagttcaagatactaaaaagttaaaccaaataagtgccgtctctgtcttcttacgcatcgcttttcgtccccctcacgttgccgaaaagaatgctccaacacagcgtaaaaaatacgaccaatcccaaaggaaggctcaatcaccgaaggagtcacttcttcaacatggacagtcttctcgaaacgcttaacttccaccattgacgagttcagctcaaaagtttttccctcgcgcaaagacaagcgatatttactgaaagggatttgattattattggttgagtcaattaaaaaatattatgttgtttaaatttgatctgatttgagtaaacaaacccattgcttttgatttcccgttccaattcctcgatctgtgcttcagttaaatcgtccaaagctgcaagaatctaagcacgaaagaagtgcctattcctttgaccttcctttaaactgaatgctaatgtgaacctgttttgaatcggatttgaattctttgcccagcaactgtttgtttggcactgcttcgaccacttcgatttgcttcggcgcgccgagtttcttctccgctacgagcttcactcccgatgccttttggtgctggtgcaagtcatagcaagctctgtccgcatttccaacacattcgatccatccgtaagaggtaaaacactccgcgtcccaacagtccttgaggaaacacggacagataaatgaaacaatatgattaacaacttgagcgtaatgggccatttcattggaaagatgttgccgaaagcgtagtttatcgggcgaaatgccaacagaaagaagaaacaaatgagttcgcgccatgtaataacccaaagtttcattgtttacgatacccaatttgactgcgtttccaattgaaatctgaaaaattagtaaaaacttaaaattggtattgtattagaaaaccttttggggattttttgattccatttgattgcaagcaggaaacaaagtaagttccaaatgtgcaattttctcgaatttgggatgtctcttgtcggtcgggtcaacaaagtgttcaatttcacacattgtaaactcccggacgcggataagtccttgtcgaggcgaaatttcgtttctaaagccagaaccgacttgggctgcagcaaaaggaagtcgtcccttaacagaaaaaataaaaaattacatcaaacaccaaaatacctggttaaattctaaaaggcgtttgaagttgataaagattccttgagccgtctcgggtctcagaaaggctcgctgatcacaggtaggtccaatttcagtgggaaacatcagattgaaagaaacgggttcggacaagtcaccgccggttaacggagatttgaaattgaatttcttaatgacttcgtgcaagtcatcacagctcatcccatcaagcataacaagcacattcataagttcggactttgctttttcatcagtttttttgtccttaaataaatttttagcaatgatggcttattttgcaatatacccgaatcaaagtttccacttgatttttaaccaagtgatcggctctaaaacaagcacccgtttgtttgtctttcacctaaataaatgaaatatcaagtcaatccagaacaacgaaccatccagtcgataaaccggtcaacatggccagaagctctgaaatctatgattt

SEQ ID NO: 18298 - DNA, 1964 bp, Heterodera glycines
  unsure (1)..(1964): unsure at all n locations
aattccgactccaaaaagttgggacattgggaattccgactccaaaaatgtgggacatcggaatttcgcctccaaaaatgtcggacatcggaattccgactccaaaatgtccggaaccggaattccgtgccacccctgcgttatatcaaccaaggggaaaattcataacatgacttaattttaatgttaaaaaattctggtttggttcaagattctttgaaattttataataaaatttttttttaatatatttttctaaaaatagttttagcataaatattattaaagataaccttaaaaaaattttaattttttgttctcatatttcagaaggccttataaacaaattgtaattgaagaatgaagggttgtgcggaaaattatgctcaaaaatggccatttttcatttttgaagcacattataaattccggcttttcttgtaattttgtcaaaaaatctaggtttccggcctaaatggccacagggccctgtttccatcagaaggactgtatataatggatttcacgaaacccgtaattactgatgtaatttttgttaaaccacccgcagatgacagtccgggctttgtattgagtgcatggcgttgctcttatcacaacgatgaaacatatttatgccaaagaccagaaggtgattatagtaaatttcttctcactcaataatcaaatataatcgatgccgcaccgattagctaaaaattagaattttctaggctcggtaccaatatttgtcgcgcatccctaataagcaaatcctctcttaattctttaattttttaatttttaaaataaataaaattgggcgacaaattaagcgttggggtccaatattcacggcggtgtcgaaatttctgtttagtttcaaattttctggtgtccaaatttccaatgtccaattttcgcgcatcacctcctctaaaaacttaaaatttaatgttattctccaaaatttcaataaagtacagaaaatctatgcgtaagttgacaaaaacccaaacattttttgtgaatattggtccaatcttttttgtatatgagcgaaaatttaaattttgtaaatcatataaaaatgatccgattattgtttttatactgagaccagaattttacgaaaaaatgatcaagattaacacactttcaatgactagttgtctatcttttcaaacataaatacaattgacccatgaaccctggaaatttcctctggcggggagtcatttaggaccgtaatttatgtaattaaaaaaataaaagctttgatttgcatgcgtggtacttatgacgaagatggatacggttcgcttgaggacaaagaatgcgacaaaggccaacagttttgctacttggcaaactgtaaaaccggtaatgacattggaatgcgttatttgacctgcttaagaaccccaaatttggtactaaatacaaatgattgtcaataatttttaaaatatttttataaattttgctcaaaaaactaaactcaaaatttaagttaatgaaagattttctagaaatgactttttattcttttcaaaaaaaatttttaattaaaataattaatttattaaaatattatttaaaaaattcattaaaattaatgcatttcttgttcaaataacttgtagacatggtcagctatttgtcttgggattgtgcgaaagacacggattgtgccaaaatttcggctgattggaccatgaacagaggcggcggcaattactcgtgcgagtgcacatttggcgcccctggattaacttgagcaacgaaaagctgcacattccgatggcacgtacgattgtgttcacccaaatggaaatccccaacagcggaatttcttcatgtaatatgcaaattnggtggtgccatttctttgggtgctgngtgattaatgatgcatgagagtgtcattggggactatcatctcaaaaagccaaaaagccggc

SEQ ID NO: 18299 - DNA, 1990 bp, Heterodera glycines
gtcagttaattgtgcctaattagctaattgccttctatgtttgctcatttggcatggcttccggacggcaatgatctcaaagtgtggcacaaaacaggcattttaagcccgtgctaaatgccctcgttttagctggataaaacgggcatttctatgggtctgataaatgaatgagcccgggaaaagtcgaagaaatcagtaagcttgactcgagccttccaaaggggctttttattgggtcaagaaaattcagtagggatcaattcttgaaattttcaaaatccctcgaatatggtgacaaaaaattttccacgggtctcaaatgtgtcacacattaataccattgagattcgccgtcatccatacgctcattttcaatgtttaaacaatttttttgtgtgtgtgtcagtgaggttttgttgttgttggcgttttgtcgttgtttttttcatcgcgtctggcgcactgtctctgggcctaattttgaaaatgttgtttcttcatccgccgatttcaccgcctaaaggtggacatcgccggaggccattgctggcgggcggcaaaatgcgacgacggcaccggcaccatcggcgatgccattgtcgtcgtgcccggaggcggcagggtcattgtattgccaccgcaggatgacatgccgtccagccggatgctgatttcgccacccgcgtcattgtaacaactcggcgtacggtagcgaccgtagccgcccgtgtaactggcacggcgtgccaatacagtagctgccgctgctgttgtgcgtggtgcaccaaggcacatgcctaaaagacggatcaatttgaatacagagtattaaatggatatggatggagtcattgttgccacccgccgaatcccgaaatttttgctcgtcccatggcaacccataatatgtatactgcatatgtcgcgactattttgatttactctttgtataggcaactactgtattgttgcgccaaataatcattttccctaaagatactgtaagtattctgtagaatgagtattgtataaaatgtacaaattattttggaaatttgcaaaaaaacagaaaaaaattgagataccgtatgtatttgccccttgggtgttgtcaggcttaaaccttactgtcctggtcacagaacaggacagaactgatcactttctgaccaggaaaagcacagtaccaactgagccccgcctaccaattccggcgctgagttggccaccaccgaccggcgacgaggcggccgacgaccgattgcttccggatgagactgatccagacaccgccgaatcgctcccgctcgttaatgtccattgaccgcttgtggtggtggacgaattgttgttccggtttttaccgttcccgccgatgttgttgtgctgctggaactgctcgccaaccgcggcggatacggtaggcactacggtagctttgtgcagttgtttttgctgctgttgcattttggtgccacctgccgcactgatcagaatggaggcggccgaataggcactgatcggcgcattgtcaccgcaaccattcggcggcgctgagccgacaccgccgctctcaaatggctttttgcgactggcgccgggtgagcgccgacgagtgcgtcgggcgcgcagtcggcaacacagccacacaaaagcaacggtctgtagcagggcaattgcgagcagtaacagaacccaccagggaagtgctgtggaggggggaggggtgacggaagtattttacgatttaatgtcattcatctattggcggtattggcactaagtgaaatcctcgggctaatgaccgtaattaattggtaattacgggagacaatccctgcggttggcattatttttcaatgggtttctcgatcccttagctattagaaagggtttaaattggcactaatttttgggacatttaatcaaattgccaaaggcattgtaaatcccgtcttggctaacttcttccatcggatggcggcat

SEQ ID NO: 18300 - DNA, 2687 bp, Heterodera glycines
  unsure (1)..(2687): unsure at all n locations
atttttaaatttgtagatttcgtcagcagtgccatcgcgaacccaaagaccatagggaagaaaaggcgaaaaacgaacattttgtggcggcgaataatcggagcaaatgttctacagaatcgtcggtcatttgtcgcttttcgaatggtcgcaaagaaacgcgcactttcgtcgacccggccgaattcttcgcgcgtcagtctctgaacgcctcgcgaatggcacggcgcacaaacacacgacaccgttttcagcagcaaaacgcactgttcgaggatttgctgttagcggaagcggaaagggacgcggtgccgacggcgcttaccattcgcgggacgacggcacccgcggggacaacggaaagatgaagcaaagcgcagggataaatgaaaataaagatattaaaacaaaaactatgacactgccgaaagcattcattggacatccaaattgaacagctgcggggaatttcaatttctgatcaaaacttaaaaaatatgaaaattttggtttttaattggtcaaaaagagaagacatccaatttatataaatcggagattgatttatccaaagctttcaagttttgttaaattttttgacttccctctcctaacatttcactcattcaaaatttaattggaattttaattattttttattttaaattaataaatctcctcaaaatctggttcagaaaataaaatgagttcggaatatgcattctttctttgatcatttttcattaatcagagtttgtacattttttcgaatatattaaatattgaatataatttttcaaatatttcacctttaataatttaaattattttccaacgaataactcccaatacttaaataatacaaaatgaatttaaactcttcaaattttaatcttaaacttagtctttttatcaaaaatatttaaacatatttttaatacataaataaataataaaaagtcattattataaataataacatattatcaagaaaaaaatcgaaaaatattggaataaaacaaataaatcagaagaaagaagtgttcaggtagaggctggcaatttgaatggcgaagctgcatttggcacaatttgggcccaaaatcctcaggccattctcatccaagaaaaattgccttttgaaggcagcaactttctgaaggattttgataaaacaaatgcacgaaaattgaaaatgtttttaattaaaaagatttaattgtaattaatgggaataaattttcaattacataatattctgccaaaaattgcgttctttacttgaatattcggaatccgaagcaaaagttcggccattcgcttgacactttccattgcatttccgtccttttttctattcaaatatctctgcaaactctccaaaagtttttgttgcttttcgtttacaatttgctgagttttttcgcccaatgaaagacaatctgaaaatgcacaaaaatattaaaaattaacaattattttaaaataaaattaacaatccttttcgacctgaatcaaacagaagcagtgactgtatgaatacgtattccacttcgttcagttggattcgtcgtattggtgccttagagtaattaagactccttttttggaaattgtccctaattgcttcccatttgttaccaaaatgtggttgatcaccgccactatgcctctgatcagtccgttttgcgggatacaaatgcctttggaaaagttcctggtcacttgaagtccgtcagggtaaaccaaacgatcagaaaaccgttcgggtgtttcaaaggcttcgcaaaagacgagcaaagcgaaggagcagtggacgattaacgactggaggtcagaaagtggaatttcctttggtgggcatacggtatgaacgagttacggtaaaagcagtggcaatttacggtacctggagttcggagaacgattttacccattgacagcgactgataaaatgcgcgcacgccaatcgtaaaagtccaattgaatgccttggcaaatggcgaaatgacttttgaattactaaggctcgaattttcaattttttaacttttttttgcagctttggctctcattaactttaattggatttttgactatttttaatacattttgcggagaaacaggtgaaatataagattttgattcaaaaaaaaaattaatcaaaaaaattatcaatattaaaaataaataaataattgtctaacggttccgcgaatttcatcttaaaactcaatttaaaacaataatattccgacgatgcctataggcggcagtgagaaaaacttgataatttttggacttattaacagattttgccttttgatttatcacttaattaatgtaataattggttcgtttgctttgcttttcggccgaagatttaaccttttctttgttggataattaaattttaaatgaaatattaccctttttgacttctcaccaggtctcaacttaaaattttcaaaaattttcatgggcccgtcaaaaacggtgcgctgctgaaacgcatggtcaattgtttcgaaaattggcgtggaggaagaggtgagcaaggtgcggaattgcctcctcttggccaacaatcggctaatcagtgggtcctcttggccccggtcgaatgggtcccccaaagatgaatgctttggcccatatttaccctgaccnntgcaggcccatgcaag

SEQ ID NO: 18301 - DNA, 1172 bp, Heterodera glycines
tttgatcgcttcccgaaggggaaggtggtcgcctgctgggcggactgaaagtagtcgagacggggcgccaggtcaatcagcgcaatggcaaccgctgaacggaggacgacaaatgaacgcgcaaataaaaaagtttttgattcagaaaacgagtctgtggtgtgttctttccgcgtaatacgttatttcccaacaccaaattccatttaaaattaattcggttaaaatttttgctttgttccatttcaattcgaggatgtttgtacctttgttcatgtcccaacagatgcaaatgagacggagcagcgtgaacacgttgaacatgttggtacgaccgccagctttacacacttccgggttttccagaaatttacacacaattgagagaatgcaactaaaaatgttaagaaatatgtaaaaactgattcgccaaagaataacagacacacatttttaggttgtcctcactttgccgatttgtccaaaggtaccggagggcggacgactgagtccgagagggttcgtcgccaacggccgcatcgttgtcctccgcggtaacactcatcgagattaaattgtacagtgcctgacaaaggggacatttttgaataaaaaaatccatgaaaattaataccgagacttaaccatttcattttcttatcaaccgtggcaatgaatcccaccttgatcagcttataccgcctgtcctgcacatcccaaaactgcacgattgggtcatcctcggaattgtcaaagcgcataactttgcgtttgcctcgcgttccaccgggcgttgcggtggcgacagccgaacgagttctatcagaaattatattcattttttgtccccctataaaatgccaattttcaaaataaatggccgcatgttcaatttgtaataaaagggattttgtaatgccaggaaaaggtgcatttttctttggttatttcaacacgaactccatctgaaccacccaatcccaccgtttgttcaagtgctgttcaaaatggttggtcaggctggataacaggtacacgtgcatcagcaaacagttgctgtatcggctgttcaacgccgtggtccgtccgttgcgccgttcgtccgcattttgtcgcgggtgtccgtcagtgtcggcggtaactgcctcctcctggcccaccatcgtcgccgt

SEQ ID NO: 18302 - DNA, 1705 bp, Heterodera glycines
  unsure (1)..(1705): unsure at all n locations
agcaataaaatacgatttcgatgacaaagtttggcactttcattgccatcgctttcgtcgccagggcatttttggatttgttgctgaatgactgcgagtccgcncaacagcaaacgatcggacggaaaagagcaaaggcgacgcgaacggataaaatggtggtctaaaaagtgggtgatgcactgcacaaaggccaagtcgtcgacatccctgaaaagggggcaaaaatgaaaggaaaatgacagactaaaggaaaagacattcaaccaatgtgattagaaagtgtacggtttgcatggaattttcaaatgcccgggccaaaactcaaacaaatcaagtgtgaatttgaaaaaagtacaaaatggcaaggcaattgactgtcaaatgcaatttgacattttcaattcccctcatacattgacagaatttgctgggccaacgcttcagcgaaatgtgtgcgcgttaacgcctcgccacagccggacactgaaacggctaccgaaaggccaaagtcagagttggcagcagcagaagaagaagaagcagcgcattgttcagcccaaattgcggcaccgaattgggctgaaaatggaaataaaaagtggaacggcaacaacaaaagataaattttcatgttaatacaatttgacctgaatgccccatgcgcccttcccgcttcaaaagaatgccgccactgctaacgcacgcctcacacattccatcgggctaattaagtcaatcaatcaggcaatttactattatcaacagcatttctcacatgaattgccactcccccgacagtgtccattcgtcggatggcattgtccgtgcccaaagccattgccggtgctgccgacttgtccccattgtcaggcgcagccaatgccatcatttgtttggctctacgatgctctttgacggcactgcgtgtcctcaactgatcattcgatggcactgttccaatgccgagcgaagcgcacagtttgtcggccccgggcccagccaaaaccatcggttggaccaatccaaccgcagcagcagacgaatcaaagcaactgttgctgctggcgtacggttcggccaacgctttggatgcacaaattggattcacacagttggtgacctgcactcgcgagaaggatggacaagatgattcatcggaattgtttaaatcggcaaaccgacaatagcgacagcgccgtaggccatctgccgggaacacatgtaggccgcctcacactccaccgagccggcaacggtcagatttgagccgagaccgcagttgagcgccgggcaacgctccagaaactaggggaagaaaacttttttagcggaattgatttaatcctttggcttaaaagcagagaagcatttcatattgttgtataaaaattttgaagagagaaagcagaattatccaaggtccacttttttcacgcaaggggaagaaaatctcgaaacactgtctattacaaactatggaacatgagattctctgcgagaaggtgattataatagagaggcagcagaaaacaaaccatgaccgcagccaccaggggaccatcaccagcaagcccagagtaagtaatggcgtcaacggccaggcccatttccgattgcttccattgttcggtgggcgattggtgatgtcgacggcatgcttcagcgcttcttgagaattttttttcagcagattcggcgaaaa

SEQ ID NO: 18303 - DNA, 1852 bp, Heterodera glycines
cgattaaattctccgatcattcgtcctcctttctacactgtgtcggccatctcccgttgaatctcatcctccgtcaaaaatttcgcccatttgacgttgccctcgatccttcaaattaaaaaaggagtgaaaagctcaggcaccaaaatgccaaatgtgactcactttcctccatcatggatggtcacgccatcggcataattgaacttaaattctcccttacgcagcgcatcaatgccaaggcttcatgaaaattgggggaaaaacaatttattaattctaataaaaacgaaataaaagttttaaaaatcatttactcttttttaaagtaaaacttgaaaaaatttttttttttttctgatacttcgttaaataactttttagttttttctgatctattgtttctaaaaataagaactctgccgcggcgaaagaatgagtttctttgcagaattttgaattcaatgaattatttttgggggtttttgaaggtgaccaaatatcatccgaatggaatgcactcgacaattttatccggaattatttgaacttacatcatttggggcttaatccccgagccgctaacaccagcatcactcataaagacgtcgagtcttcaaatgaaaaaacgcgcaagcaatgaaatttgaaacaaaatgccactctcaactcactttttttgcgaaaacgaaatggacggctttcgagcagttttgctgaccctgcaaatgaaaaattttaaaaagcgcataggctccaaaatttgcagacggtttaagcccactttgctttgcatatgtccgcgcgaatgcccaaaccttcgggcaagctaaggataaagccaacaccacccagcagatccaagccgaggctttaggaaaggggaaaaaagtaattagttcgagttcggttgggtcattagtatccccctaattcgtaagtgctctgactacatatcaaaaaaccactttttcgttcaactattcaacttacagcatgtcgaacttcttcaagcagtaccttaaataatgatttcaaatccgtgaaacacaattttgaatccgttgaaaactgacaaaacgccaaacttacatggagagagacttgtcgggcatcaccgcaaaacgatgggagaaggtcagattgatttcttccatgtgcactcgaacattgtcgatcctgcaaaatccaaattattcgggccctcaaaatccattaaaagttcggcaattgtttaaaaaattcgactccaattcgggttaggggatttagaaattagcaaaaaacggaagccataaaattttttgctccacgacttttcacgtatttttcgaaacgaaatatgaacacgcaccacccgagcacttgcgcgccatcgtcaagaaaaaaactatcagagaccaccgcaacacgttgcgaaacgctcgtatcgcccattttcaccgacacatcgtcgaccctggaaaatttggggataaaaatattttgaaatcacaaaagcactccaaaattttgccaatttatttggacgggcttcgaaaagcgccatctttcacatatatgttccacttgaaacaccattacggaccatcgttccacatttttgccctcggcgaacgctttggcgttgaaagcgacgaacaatttgtcacggttggtacggtcgaccttccccaacagtttggctttgcgcgcgaacgattcggacacaaatgaagtggtacatcctaaaaattgagcaacgaatttcaacattctagtcggttttatgtgtcccatgaatgaccgaccatacccagattcttaagatataaattttttcgtacttggacaatacctatatacatggtat

SEQ ID NO: 18304 - DNA, 755 bp, Heterodera glycines
ataaattaaccgaaacatttaaattcacattaatgattacctatttaaaaaaaaaaatttttcaacaaaaatggaaattttttgaaaattttttattgaagtttttttaataataaataaaatattactgattatttgtttaatttttaataatattacggatagtaaacttaaattataatttcaatatatttaattcaaataaaaaaatatattttttaattttaggcaatctttttggagatattatccccagctacatttcaagcaaatttgctgaatccgtatatgctcgatttgcttattttgtcgccacaagcacttgttgctgatctgctatcaccacaattgattcaaccaaagattttaagtcctcaatcattctcagccggcgtgcttagtcctcgtaattattaaattaaaattttaattacaataattaaacatttataaaaaaaaacaaaatttttaagggcatcataaaattcaagaaaaacaatgcaaaagtgataccaaacattttaaattaataaaatattcaacaataattaattttatttttaaatggccaaacttacaaaaattgttttttatataaaaaaagatattaaaatttttagagcttgataattgggacttatacgttgaaaaaacaaaattaaaaaatggtacaaaaattttaaaaataaataaatgcccaaaaaaatattttagccttattagcttttattttttgcttgattaatttttaaatg

SEQ ID NO: 18305 - DNA, 1469 bp, Heterodera glycines
  unsure (1)..(1469): unsure at all n locations
atcttcataaaatgaaatccaagccctggatgaataaaatttcctgaaaaatctatatcatggcgagagaaaatttaattttaaaaatttaatttcgtattttctttttaataaaaattttttgtttcagattttgtcacccgaaattggcggtggccacgatgaaagtgaatttgagacagagggtgaaaatgtgtttatttggcccaaaactgacgagcccgacgaggaggcttatctgggcgaaaattcggcacatccggacaccagtgcgcacattcacccgaacatccttcatcccgatgggtcatgaaaagtgcctaaaactatttgaaatttttaatttatgtgccattgtggtaattgagctttttccaagtgttgtaagctattaatttacattttataattgttaaaatgataaaaatcgtgctgagacgaagtacgaaaagtgcaaggttgggcgaagcacgaaaaagtgcaaagtgtgctaagtacgaaaagtgcaaggttggacgatgcacgaaaaagttcaaatgatcaaattaaaagcaaaataattctgttagttatatttgtataacatatttaaatttcgctacataattaaatatatttttatattaatggtgagccgaagcggggcatcgttttcgtacgggccgttttcgtacgagcacaagtttttggctataacttttttatttgtttaccaaatccaacattgttggtgtcattcgatagccctatgtatcctctattttttgaaggtttgtctaatttagaggtggctaaaaaacgcttagactttaaactttattttattgttgaaattttcaaaatttaatttccaatcgataaatagataattcaaaaatgaaccagtcaacaatgggtaatactataaattatgaacattgtaaattttctatctaaatttttgcgaaatttcaatattttttatgaaaatttatttgaaaataaatttcaaaaataaatttcctttcttcaaagaattagtccaatttgtgttcttttttagtaaaggacaataaagccaactgatagttaccgcatagaaacaaaatttgcaaattataagtcaaaaattccttatttgaggccaatatttattcaccacaattgatccaaccaaagattttaagtccttgttggatagtgaataatttgaatttatggcgaactgacttattgactttatttgttatttctatgtccatccgccccctccctcgtccataaaagtggacacctcctcccactttttgttctttcctttcatcattcatttatattttatttcccaatttgccctccgaccgaatcaataaaattatttatttatttctttntctttgtgtgttctaagtggaagaacacaacaaattgggcgcagtcagcagccattcttcatcactgaggacaaggacagctgcaaattcacaaaa

SEQ ID NO: 18306 - DNA, 2206 bp, Heterodera glycines
  unsure (1)..(2206): unsure at all n locations
taatcacttattacttactgtgatcgatnacatcccctctgaatgtttcactttctctcccatcattgagcaaattgtccattttctgaaaatgcaattccgacaaaaattcgtcccttcgtgtattttttcgcaatgttttgcccacacaaatcaaaaaattgcattgacattccctagtgaattcttccaattctccatttttggccgacgaatttggaaatttttttccaaattcgtcgatcgctccattggcacaaattgcgagggcacgcaaaaggaaagtgtcggtcggaccattgtcccaccaaagaaattggtcctaaaaacaatatttattattattttttatttttattttataaaaattggtgcttattctgtaattctattactgtgagatgaattcgaattcattttttttgaccaaagtgatattaatttttattatttaataattatgaaatgaaatatttcaatttgatttattattttaattccaaattccggagcttttttagccagggttccactgtttttgagactcccgaacaccccagtgtatattttccattaatattttttcaaacaaaaaaaatctggaaataaaataaagaccatttcattgatagactgtgccaattcctccaattgcttttgatgtgccgaaagtgattcacttgcatttttcaatgcttttcctttcattgtttcttttaaaaaactctcattttttatacgaattattttttcgtttgaccaaaagttttgtgtgtataattgccaaaggtatttcagttcacttaaaaacatcgcttcgaattgtatggccacaaaattcgctgaatcatttaaataatttaaattaaaaacacaattggtacctttttgtttgcttgttcttttcctttctgtgctgaatgtttttgtggcccattcgtcataaaggaatttggccaaagtaattttatttcgccaattggtctcaattaaataattttcatataatttaaggtaaaaaccgttataaaatagagggactgaattgaaaagattaacgaattttattcctaaaaaacaaacccaaaaatgacaattggtcggagtattttttgcaaagaattgacatcctcgaaaatccaattaagttaataaatccgattctcgcacttctcaaatccccttttttcaatttaatttcactaaagatttatttatttttttattatttgttaactaatatttaataatataatttttcataattccctactcaaagtattgcaaaagttttttccgcgttggtaaaaagtgaaaaatgtcactgaagatccattccttaatgttctcttcatttgcgacaatggtctcctgaatttttttttaaatacaaataaaaataattaatttctcaaaaatggcacaaatatttgtgtctgcctttgtcacaagagtcggagcgggctgaacccttagggctcggcagcccggcatggaaacactgaattgcttcctaccttaatttcctcgtcatttttgcaattcggccactctttttggcgtgccattgtaaccctttgagtgccattggcatttattgttgtcaaaagttcggctttaagccttaacaattcgcagaacaatttgggcttttgaaaatgcgtgtcaaataattccataacattaaaatccaattgcagacggttgttgaacatcagactatttaattggttaattaattaattaataattattagcaattattaccgtaacattcgcctttgatagaatgcttttgctgtgattgtcggttttggtccctttttcatcgcttttgtcccttttttgttctgcttttcctcctcctcctcttccaaataagccaccaaaatattcgccaatttttctttgttttgctcaattttgtacgataaaaaataaatatgaatgtaaatttcaattttttgtgccgctttttttcgttcgctttcattttcagcggtaaaatattttttgtagaatctgtccagcaaaatatgctgagagccgccaatttgattataaatgaaacgcatttcggtgaaaaatggcagaatgtcggcaactgaatgccggtaaaatatgaataaaatgccggaatcgaacagaagcccaggaacacccaaacgagggctctcgagaatcgaaatttcctagacaaaccgat

SEQ ID NO: 18307 - DNA, 991 bp, Heterodera glycines
ccccccccccccccccctctgtataaataataaaggcgatgaatgattttcatacattcatttatttcctcgtcattggaaagggcaaagtgaagaagtaacacaaaaataatcaaaagcgacaatttcaacatttttatcttcaaataataatggtttttttaataaaaataaattgaattattaaagaaaatgaatttaaaaaaataaatgattaaaaatgcagcaaaaaaaaaaattgatataataatcgataacaatacaaataaaaaatcggatgagattaatagaaataaatcgcaaaatattgcccattagttgttgactaaatcagggctcccaactctactgaattatcagcatttttctgatttcatgaggtcaaatctgattttttttttttttttagaaaacatttactaatttatgctgatttttggaaaaaatcctcaaaaatggcaattttttattagttttttaaatttggaataagtttcaaaaatgctgatttttgacttcaaatgttcatttcgaaaattttcaattgggaaccctggactaaatccttaaaaattcgacaaaagtatcacaaaataagggcaaaattttcaaaatttcagcaaatacattatctattaaaagctttaaaatggctgatttaattatactaaaaaatttcattaattaaacaaattattcttgaacaattttatcctatatgagattctaataatcttcatccaattattcaatggtcttttttaaatttcttcagaaatttattatttttttccaactggtttaagcttgctgaaggctcaaatctgcttatttgttagcaaggaaaaaacgcttgcttaagcaagcgtgcatatcacaattaaataactgtctaattatagtcgtatcgcggcttctaatcacctctatgaaattttccaacaggatgacttacttaatcaagaaagattgaaaatatattagaatgaaa

SEQ ID NO: 18308 - DNA, 2754 bp, Heterodera glycines
tcaagcggagaagacgacagaaagtgaaaacaatctccgaaaagtaaccggagaagaagcattggaaaatgcctaaaaaagaatgaaattgttgggaataatccaccgctttgagctgttcaatcgttgacgactattgtgcaacggaaaagtcatggaaatgcaacacggcgctatatgaaaagtgttgctttgtttggggttatgtcgcgattgttactgtgccatttttttatcaataatagatagggctgggatttttatgtgctaaaaatcctgaaatatgtaataaaatatgtgctaaaaaacccaaaatatgtgctaaaaacaaaaaaaaaaggcctaaatatgtgctaaaaaatgcaaaaatatgtgctaaaaattggaaaacccaagtgtatttacgcataaaaaaatcatatttaatatcagtctttatcaattttcgcccgacctccaatcaaaattttggcgatatcaatcaatttgtaaagtcccggattaatttttccatcaattgaataagttccttccgggaactttgaaattcagtgttaacacagcgtttgatttggctgctttaggcatttaaatatataaagaaattttctaaatgcttaagaaacgtaaagtagtcaatttttagggtgcattttcagattttcttgtattttttttacgatttttctcaaaaatgccaaaatatgtgcaaaatatgtgccaaaaccccgaaatatgtgccatatgtttttatgtgccaaaacgccaaaatatgtgtttttatgtttttataactcgctctaaatcaaaaattgttcggagaaaatgctatttttgggcttctctcgccataactaagccgcaaaaaaaatatgttaaaacataaaaatcccagccctactcattagtgttaattaaatttggcataatgtcttttttcgcgtttttctcacttaaaattgtattctttgtttttttccacctttcattccaattttattatctggtaatttttattgttttgtgccgtccaatttcttttgactttaaaattgatattcgtcaaattgtttctcatcgatatttgtcttttggaattaaagtgtttggatttgacattggcctactctgtgtttggtataattgcgtccctgtcttaagtcagtagcaaaagtacaatttggcgctcccgaggaaacaggtacaaaagcggcgatttttaaagagtttgagggtgagatcgggaataaaaaaattttcggacgggttttaatttggagtgtattaagtatcagtccggaccggacgatatttaagttctcaagtggaaattgactattccggatcggaaagttaaaaaaagcgacaaaaaactccagcgcaccgaaaaatttattgtttatcagaaaatttgagttcgggccgaaccttttttgctgtctacatcgccgtataaactattgacaccgggtcggtgcttagtttttctccgtcttctcgccgaatttttacatttgaccttgttggatggtcatcacacgcagtccaattttgacacggcaacgagcgttgaatttggagattgccgttgacagaagtggacatcagattaatgtcggtggaaatcagcagaactcgctgcaacgccaaaatcacagtgctggagaaagttttccccaaaatcagcaaattgaaaactcgccaatctcacccactgaactcgcgggctttaatggggaaaatggtgatgacagttctcttgttttagaaccaaatatgaccgaagaggaattgcgcaggcgcttgttggtggtcagcattgaacgtagccagccgccatccaacggaaatgccggaaatggagaaaacgccgaaggtttgcgaaacgcaatcagggaaaatgatggacgaccgaattttggagtaaatggtcaaacatttgcccaccaaaggaggccgcatgacactttcttatcaaatttgatgaataatggaataggaaactttcctcaaaatttggtccatgtaccgcgtacttcaaccccaactcgaaatgttgaatttgaacagcaaataggaccattcccgtttgttgttgaccgcaacaacagagcaccaaccccacctttaaacatacggcaacaaattttccaccccatcccactgaatgcacaccgcattaaccaagtgtcggttaacgcgcaacgcaacattgacgttcagtacgtaccaaataattgcgttaatgtcccgccaaacgtacagcgtcattgcgacattcagtacaccgctcctaaccttgtcgccgcgccaattcctgtttcatctatcatgaacgtatttttattaaattaaataaaaatgatatcaaaattcatttattcagctggctgttacaattagttgaataacaataactgctaaaattgtttgattttttttttgcaaaatttaagaatttttttaaaatagggttgggttttatttatgagattcgttattatacatctatttatatatatatggttttgtttaatttcattttatatgtgaatttataaaattaaaatattaaaaagtataccgaaaataaaaaaatttatatgaaacaaatctttttttaaattttatttcactaacaaaaaatttattaaacataataaaaaatttcatttttgtttaatattttcttgagttaacctaattgtcaaaatagataaaattaaaaaaaataacaatttttttgataaaatt

SEQ ID NO: 18309 - DNA, 2551 bp, Heterodera glycines
  unsure (1)..(2551): unsure at all n locations
aaaaaggggtgttccggagggcattgtaaaattttgataaaatctgtttcaaaaagtcgttttaactactgtatttctcgtaaaaaattattagcttttcaattttcagaagaatttaaattccagcgaaaaatgattgattataaaataggaatatacgccataaaaaaagaaatatatataaatcgacaaaaaaaagaaaatctactctactgtccaaatgcccactgtccaattgtccttggggcggtgttaggcatttcataaaatcccccattttagcgaatttttcgataaaaaaatttgtatgaaaacaagtgctatttctgcataacttgtgttaaattttataattttatttgaagttttccaggctaatagagaaaaagctgggctatcgaatagtactaaggatgtaaaattatattgtctttagcaaagttacgccatgttttgtcgaaaaattcgctaaattggcggcggattttatgaaacgcccaaggtggcggattttacgaagcgacctagcaccgttccgctggagggcatgaagatttctgaagcgagaagatcagaaaaactccaaaacccgaaattcatactcaagtcaattttaaaaaattaatattcagaaattttcattaaaaaacgaattccaaacctacaaaaatctccggagtccaaccaaccccgccctggttcaaatgtggtatatctaaatgtaagttaaataaatatccacaaatgtaaattttgataaaatctgtttcaaaaagtttcgttttaactaatgtatttctcataaaaaattataactattcaattttcagaagaattaaaattccagcgataaatgattgattataaaataggaatatacaccataaaaaaagaaatatataaatcgacaaaaaaaaagaaaatctactctactgtccaaatgcctttttcaaatttcacttccttcaatttcgcccattttttaaatttctttcgcaactttttcgaaatttctatttgaattgttaaatgatacttcaaattctgtcttccattccttgtataagttttcaatttctttccattttttgccttctccaattttcaccagttgtcgccaaagcgactgagaaaatggaagaaaattgaggaagagaaatttaattgatttaaattggataattttaaatattgtgattaattttattatttaatttgtgatctttgaaattgtgattttgtccctccattgaacattttgtacatttttagcattagtcactctttttgttgttgatcgctctgtccaaattgctccacctacgctttttctttctatttaaacacgcacatttctcactcctcacatcttatacagacatcttattcatctttattttatatttatcaaataaacttctttcttatttgggaattattttcccccttattccaccccgccctctctccctcgcgccttcccatttttgcccccattttgccgtccgagccaacaagtggtgccgctagcaaacaaagatgtcttcagctcgatgccggatggctttggggcccgcgctgttccgacttcggcaacatgtcactacggccgaaaatttgctggacgagcccgtgatcaatgccgagacgaccgaaaaccttgaacaggaacgggggcacatcacccgtatcctgtcaaggatggaggtcgagctggacgcgtggggtgccatcatgaacggactgcaaggcccagcgagagaggcggaggaagcgcttttcactgcctttattcgagatgaccggcacttgacggagtggttggaagatgcgcgagaaatgctggctcacatagcagcagaactcgcagatgagcacaaccagccaatcgcggcgggaggacagcaaccagctgttgctgtgaatccacccgtgccagccgtgccattcgtcaacaatgccgtatttccaggcggtgccaatgctcaacagccagctgctgttgccaatgttgcaaatcaaccaccaccgatgccaatcaatgccggtggtgtccattatcaacagccatttgctgttgccaaccctgccaatctggcactaccagtgccaatcaatgccgcacctgtgccattagctactgcacgccttccacagctcagtcttcccattttttcgggcgaaccaatggaatggccagcattttggcagagtttcgagagtgccgtcgaccgtgccgcccttgagcccgtcgacaaactcaactatcttcacggttgcctacgcggtaaggctgctcgtgccgtaaccgcctaccgtggaggggacaattatgcccatgccgttgccgcactcaggcgactcttcggagatccacggaaaattgccgaagcacttcagtccgaactgatcaatctccggnctgtggacgatagcgttggatcactgcaacacttcctcgagactntgnagcgtgtgtgccgccaacttttgaaccctcacatgccngatgacagcccattcatgtaccaaatcatccgcagcaaattgc

SEQ ID NO: 18310 - DNA, 2042 bp, Heterodera glycines
gattaaatttcatcattaacaaaatattttatcagacagaattatgaaatttaattgtttgttcatctgctgattctcaaatctcaaaacctaccatttaattaaacaatgcgcttggcaaagccatgtgtcgaaattggttttatgataatttaacaaaaaaatcggcaatggtgaaacatcacgaggacggaagtgaattttaacttttaattccatcgggaagttgattttggtttagaggaatttaaaaccgaaataatttaaaagtttattgtgcaaaaagaacagcagtagaatgagttgatatcaattttacaagaattcaagaatatttaattttttccataattgcacataaccaaatgatcaataaataattcccagtctcgattaaatgccaaatgctaaatttcaagttaaaattaaattttaccattaatttacataggttatataatatatctcatatcaaataggcagaaaatttgaattctttttttggaaaaaattcgtttgtttttttttgcggggcggggggatttatttcagaggggggatctaattcaggaggactttatttttcaagcttttcaaatttttaaatccctaaaacgcagaacatacttgaattggaataatataaaatttattcattaacctttaaaatttcaaatcaaccatattacagtatcgcgttttcaagaaatactgtctcaatgacacattttccacttacgctttttcacattactatttttttaatattttcgggcaaaacatatttaatgattagtaaatttgagttgaaaatttttaacagatttaacttttgcttttttaaaattaaaaaacaaaagaaaagttaaatcttataagttttcaattaaataaaaattctttttaaaaatcttcaaatcccgcttcgtaaacccggatgaaaactgatgctgatccgctttttaattccagccaagttccccctggtttaggttttccataaattctcagtccagactaacttttttttctcctaatgctatgtacaaataagtcagccaagagttaaaaaattaacaataaaaagcataaaatttcctcattcaattcaaataaatgttgaaactcagccacgtatttgtgttgacgttggttgcttttccatgtccacgtcattcattggcactgcttcactcattcgaatatttaattttgaattaaatcaataaataattcccagtctcgattaaatgctcagcagatttctcttctttcctcggccagattgagataaacatgttggatttctcagcaaaagactgcaaactcagccacgtatttgttttgacgttgattgcttttccatgtccacgtcattttcattggcgctgcttcacatcattcgaatatttaattttggattaaatcatttataatttttaccaaaatgcttctttttcttgcttttccacttctttttacgttggctttgcattgctatgctttcaatggggcgaatttggcaagcggagacattgagccactgctcaatgaattgcgagaaaacagcaggtcgaatatttaaatttgtatttttatgctgttcgataattagtgtatttaattgttttgttttggtgttgaataataaattttagggacaatacaaataataaaatgcccgacttttcggcatgaataatttggtgccgggtcgttcgttactcaaaaaaaccatcaaatgagaatattttttgatatgacttatgctaaaaagcaaccaaatttttaattcttaattgcacatcgaagccctaagtgttttctatggtcatgcaaaatttcaaaaaatttcgttaagttaatttgaaagaaagttatgacaaaaaatgttcaaaaaagaaattttgcaggataatagaaagcattaagaactatcgaaaatatatcaaaattttaaaatttgattcatttttggcaaacttatgaataattttctgtcaaaaattttccatttgaagtaacgtcatagtaacctgtgc

SEQ ID NO: 18311 - DNA, 2864 bp, Heterodera glycines
cttttttgcattgtttattttgatcagccataactcgctttatctccaactaaaaggaataaagtttcccgttgttttttttcagcgtcctccaaaactaaacaattgtttaatcattccatgttaataaataatgacatgtcatgccatatttctccagctgctgttcttcctcccccaccgtttgcctttcccttccggcgtctcttcctcctttctgttcctagacggagtttaaccctaccactgtagaaaaagttggaaattttgactgttttaatagattttcagcgaagctttctttaagtcaaatttcaaaatttcacggtatccaagactaaaagcccgaaaatttcccgagtcgagaatctcgcacatcccttataacaactaaatttattttgagcgcaccatatttatttttatttgttcttatcgttaatgaattggcatctattgcattgagcattttgaacacttttgaacttgggatttattcactataatatttactcaaaattaatcatttcatttcaccaaataaattaaatttatgcaaaaatatgacaaacattgcctttgctattaattaatttggagataacagcgacggaactcaacatcaaaaaagtgtccatttatgaacgaaaaaggagaattaatggttcagcggtgtcgagaaacatcgtctgggagaaaatatcttgaaatcatagcgaatttgctaagaaattgctcctaagttttaaaattcgtgactgtttctttttaaaattttatttttccgtttttggagtgggtcaattacccccccccccccccctcctgtttatgggcctgtattttccaccctaatgaatgttttttattctccatcggttggattgcgaaagtgttccattcgcatttcattcccccgcttttccttctttgcttccgccgtcctttctcttcactttgaacagcgattggcgtagcgatgtccgtgcgtatttgaagaacattgcgaacagaatggaccagccgaggatgagcatgaacgcactgaaacaatttggacaaataaattcggaattagtcagttgatttcttacggcaaaactgaggggaaatgaatggccacgggcacgtgttcacgagggtcaatgccaagtcggttctgcgcgtcctcaacgccctgcagaaaatgggagcccgaagcggcgtaagagtccaaacggatgagaacagcggacccatggtactgaaaacgaacaaaaatgaaaatgtggtatttaagtggtcatttgccaaccgaccggttgtccccggatgacagcgccggggtggagaacggccacggcgacggacttactcgggtagaagtaaatcatgcgaacctaaagtcaaaatcacattattatttgaaaattcggcccaaattgagccgccccattctttttgacctccccagccgccaagaaatgctgcacaaattcatcgtaagaaacggccgaatgttgctgagcgacaatggcgcggtgttcgggcaaaatggcatttcgagagagcaaacggtaggcaatgaacgcaccgagaaaggccaatccgatgccacccaaaaatatgttgggcataaagcgaacggattccgcagctgaaaaaaagtgaaaatgaaagagaaaattatgaagggggccggaatatttttgcaaaatgaaggttcttgaaaaatcagagctcgtgatcagcgcattttttccacggtaaaacgttttttggcaattttaccattttttccgatcgtgccgaaaatttttgcatttcctttgtttttcggagaaactcgtgttttgttcactttctgtttatgatgatttttctttgaatatcattaaaaaataaaccgcagccaagcggataattaaatttaaaaaatcgaaaaaaattaattaaaacgcactcctttcaacttcgaattcgggcggcattttcttgttgaagtcgcggatgaatgctttcattcgctcgtcgaattcgcccggctttttgtcacgggacataacgaattggcgcataaatccgctgaattctttgttgaattcgcgtaggatttgctcggagtcggaagagcggccgaaattggcggatgaaaatgaactttggtgtcggtgttcgtccccttcttccttttgcttcgtctcctttccgtcctcatattctgccgattgtcgacgtgtgccgcccccgcgacggaccgtacgaaattctgaacaaaaaaacgttccggattaaagcgatggaatttaggaaattgaacatcccatccgctttttgaatgcgttcaatagaaaactttataaacaagcccctcccgctgatcccattgcaaaacgcacgtgtcaatgccgtcccccccattcggtggaacggagaggagtgccatcgattcaaaaaaatgccaaaattgtttattgtggcaaaacggtgggcggcagtgacgcacatcggatggaccattttgactttttgttttgcttcacttttaaaacaattggttagacaaggttgaattgtttcatacaaatagaattctaatgcaaaaaaagcaaataatacgaatacaaaaaataatgcttcattctgaatgcatttgcaaatttacaaaataataaaacttatgacagaattaaatagggaggtcggcaatcaaagggccaaaataaaaaaagagaattaaatgccaaatggaaaaatgccaattccgtcgtattatccgtgtccattcgttcttcgtcccttttgtcccccgtttttttcattggtttcgtacgccgagcgtcgcttccactcaaaacggcgttgttggacctttgcataactga

SEQ ID NO: 18312 - DNA, 2543 bp, Heterodera glycines
aagacttaaaaaaaatttattgggcggtaaaccacataagtaccagaaattttttttaatcaaaaattttcgaaattattgtgttcgaatgagcaaaatttaaatttggttatagatgctaattgtttgtcctaaagatttccctccctttttgtgtactaattcgtttcttaaattggttccgaattttttggcattttgaaataaattgtaaaaattcgaaacaaaatactctgaagatttgtaatttcacgtcaccatgcttttaagtcccaccgcgaggtgggacagttccaaaattttgtaccacattttaatgcggaaattccaagtaccttaattggacaacttcttgtcaacgacaacagtcgcctttggccccttatggaacagaaaaggtggaatatcagatggggtgcgtcccttcctaaaaagttctcttttcgtctacccctcccatccttgtgcactatttcttttcaaaattggtccaaatttttttgctttttttgaaatttaattgtaaaaaaatatacaaaaattcttttctatttaaagttgtgcttctcattgcttttaagtcccaccatttccagactcaaaattgcataagatgactaaattgatcagaattttcattgccaaaatgtccttttttggtgaaaatctgttaataaatcaggacgaagttacaaaatttttccggcgtcggattctcttccctcgcccattcaataaaagtcttttttttgtaaaaatgcgccgtaaaaatattggtaaaaatctgattttttcatcccgaacagtgatgccaacccgaacccgaaacccgaggtttttctcaaccagaaacccgaacccaaaattttttgagtgaattggacggagaaaacgcaatggcagtgctttacgcaggtaaaaattttcttttagggtttttgtggtaactaatgaaattttatttcgaactagggtctggctggccccgaccccgaacccctacatttttctgggttaacacgacgcttccgacccttaaccccgactcgtggtcggggttaaatatacactcataagaatggcattttcgaaaaggcaaaagaatttataaaaattttgaatttttttaaactattttgccaaaattttattaaataaagtaaatttactatgtttagtcatatgtagagcccggacatgcacgaaaaatgtgaaaaaaggcataaaaaaataacaataacatcaaaaaaggcacgaaaaattgaaaaaggcagcaaaaatcaacatttttctagcaaaaaatctttcaagaaacctttttttttgctcttcgggcctaatttttttttctccatgttatatcaacaatttcagcaccggagcgaaaaaaaaaagaattttttataaatggggtccggcggtgccgataggcgccgctgggaatttttttttggaaattgtaagaaatgtgataaaaaaaatagcaaaaaatttaagaaaaaggcatatgtttcaaaatccaggcttagtcatatggattgtggtgtagtggttagtgcatcaacacttacattcctttctgtcattagttcgataccgtttgacgtttgctttttaattaatttttttttgaatagctaataggattttttaaacaaaaatgcccataaaaacgatcatccttggaataatttgttgacaaattgaatttcaaaaaattttcttttcgttttcctcgacgaaattatgaaatgtttagacaggccaccttttttgcgggcgtcgcgctttcacctaaaaatatcgaagaaatttttttatcggaattcataaatattgaaaaaaatactccaaattttcaaaaaaattttcccggcggtgcctatcggcacccaccgccggaccccgtattcctaaaaaactcgagaccgagaccaaaaaaacccgagacttttctcgagtcgagactcgagaccaagactctcgagcatcactactacttaccctgaaatattcgtttgaacgccccaaagtcacttgggtaacctatcctttgttaggaacaccttttcggtgactttgaaaattaaaatttttcagaaaccatctgcagaattacccaaaaaaaaatttcatttcaattgcggtgagtgccaattcaaataaataatggccaattaaataaaagaatcataattaagcaattgatggacccgagcaaaaaagctttctacaacaaaaatgaggacaaagtgacgttggccatcgatttcactgtaaatgaagtaaaaacggacccaatatgatcttgtaaagacctcatcgttgaattaccatcacatggacctgtattttttgtaatattttttattgtttacatttttaaaaaactcatagtcaagagaccaaatcaaattttacatgctaacaattcgtgttaggtcgtttcctaaaaaccgccaagtggtaggaaaacaaaaaaaaatgtaagacatagattcataacttggtccattttcaaccaaattaataattcttggtat

SEQ ID NO: 18313 - DNA, 2178 bp, Heterodera glycines
tttttttcctttttcttttttgtccattgtctttaacttttatttttcaatatttcgtgacaatacaattaattattatttgaatttttcataaaaaatttaaatatacagtacaatatcaaattaactttttaatgtgcttaaaatagtaaaatacgtttctcagcaaaataaattcggctttttcacaattttcacaacaaatgaaattgaataagctcattaaagtattttagttaatgcattttctgttccaattcagacaaataaatgaagcttttcgttctcattgcttaagccttttatgcaaaaatttattttaccattttcatttttataggaattatttattcttaattataatatatctgtgtaatgagtagggctgcaaaaaatatgtacaaaaagtggtccaaatatgtacataaatatgtaagaaaaatcccaaaatatatatgtacaaaaaaaccccaaatatgtaaataaaattttttttatggtatttttgggaaagaaaatcccggtaaagtatgaaatagccacaaaatgacataaaaattactttttatggtatttttaggcaacattttcaaactattttttctttataaattttcaaaatatgtaaaaaaaaaatgaaaatatgtacaaaaatatttgccgaaattttgaatttttttttttgaatatttccaaaaatttccgtaaaaaatcctcaaaatatgtaaaaaaatgaaattatgtaagaaaaagtccaaaatatgtaccaaatatgtaagaaaatcccgaaatatgtaaatatgtataaaaaccccgaaatatgaaaaaatatgtaaataaaagtcccggtttttgttcgcaaacacaaaaaagaaagtgtttttcctgctatttagagcaaggagaagccaggaaaaaaatatgtatttacataaaatttgcagccctaatgataagaagctttttctaaacaaatattaagcaattataagcatttgaaaaaagatataagcgattgaaaatttgttttttgaatctgggcttcaaatatttctcatatacccaaaaaagatatttgttttttctctgcactctctctttattgacacatgtctcgttttttgagtcggtgtaggctaaaatacgaacataggcttagatgagcactatgggtacgccccagtgtcagacaaaattactcataacgccaaatagcgtaattggcgtaattttttgcgcgctaattcaaaatttatactggtaaatgccttttttgcactgtttattttgatcagccataactcgcttcatacccaatcaaattgaacaaatttggtatctaaaaaaagattttgaaaaggagaatctttttctaagcgaatgttaagtaatttgtcatctcaaaaaaaagttgtgggagtttcaaacttttatcatgttataactcaggtcctaggcagctctttctaaccaaaatgctaaatttatttttttctattgattctaaatgctcaaagtgattttgtacccttataatcaaaattattagaatttgcgaatttatgtttttcatgtgttagacatgaaaatagtacgccaaaacgagagaaaaagaaatgcatttgtatgttttattttgttacttttgaactaacagataaaattaaaaaataaacatagaaatcgatgcagaatttttttctctatcggtatgcaaaatttgaagaaaatctgtaaggcgaaaaaaaagttgtatagagcgaagtaaatgttgtttttcacataaaatgagtaactttggatgagaaattgaaagagattatgaataatagaattgggagccggaaaatgcgacaccggcggaaaatccgacaccgagagaaagtttttcatttcaagaaaatgcgaggcagtactgctcttttgggaaaagcagactgaaacaatttaaccaaaagggtccgaagcgatagatttttataaatttattgccgagaagagaagacaaaatataaaatcatttttaaaagatcaaagacgaagttgtagaaaattgtgtgacaaatgaaaaatgcaaaacaaaataaaaagataaaattggcgaaatgtaaaatataatttaaatttaaaataaatgatgaaaataatgtcaaaagggtctccgcactcgtatgacgt

SEQ ID NO: 18314 - DNA, 1781 bp, Heterodera glycines
gatttggttgacaagagaaatatattatagtaaaaacattaaatgggatagaactgtgcggggccgaactgaggtatagcagccccacccgtttgccggacggaaatggcattagctcaggcagtggcaccgacggcgccggatgcgtagcgggtgagaatacctcataaaaattagacatttagtcaaacgaccgtgtattatcctatttttaggacaaacttctatgtccattaaaattcattctcattttttaaaagaaatctttaaaaaaatacctttttcaattaaaaatatcaaaataaacatagaaaataataatatgttaaattttatgaaatcatttgcttattttatgaaaattggtaatgcaatgaaaaataataacaaagcgttaaaaattaatccaatttatttacactccactaattttaggatgcttacaaaaattgactttttctctcactttaaaaataatttttacggaatttttaataatttaaaaaataaggaccaaatacctaataaaacaactaaatttattgatattcaacaaaatttagcacttgttttcaattatgtgccaactgatgaaggcgtgtccagcggtaatgagcaactattcttgccacttcatcaacaggtagcaaattgagacatttctttttgtctctattcaatttttactgatcactgatcactagtgatcagaaaaatctcggaattttttttttgcaaatatccatttaaaaaattgttaaaaatcccaattctggcataatgtttttaaatcaaccgaaatgttcctctctcactaattgtactgatttctactgctgttcgagaatctcgatttaaaattctaaatttatcaggtttttgggtcgctcagggtaactcctccgtcttgagtctttctggttcaattctcgacggagcctaggaaaatttgggttctagaacagcccactaattaaccttattagttaactaccacccttttcacgcgtattatcaacgcagattgattatgtgccacttttgcgactcgctgccgatgctcgacttcggcagcaacaaaacggcaccactctttggtggaccgacagatgtggcggtggtgccgatttggtcattgatccgacactttgggagaataattcgacgaattggggacgtatttttctgatggacagaagcaacaacgaaggacttttcaatgaacaaattttttcgttgtttggaaacagtgagtaaatgattgactgaatgactctgacagactaataatggcataattaacattttaatcggctaaaattgtcattttcattgagaataatttccattaatccggtcaaatagcactaattaattaattaattaattctggccaataattaaattttagacaataaaattatttatttgtcgcagactccgtgtgggccgcacgcttgtctctgctgatcaccgccgcactgatcactctcattctgatcgctttgctcctctacggcgttgaggtgatcaaacgtcaccgtcagtaccgtgatggttccttcacaatttgtcagtttatcactacacatccatttgaaccgcgctacctcatttcggccgctccccggttcggccccagccaattttttgactataacttttttctttgtcaaccaaatctaacaatcttggtatcattcgaaagcttaatgtgtttagaattgattatgtgccacttttgcgactcgctgccgatgctcgacttcggcagcaacaaa

SEQ ID NO: 18315 - DNA, 2989 bp, Heterodera glycines
  unsure (1)..(2989): unsure at all n locations
cccctaagaatcgacccgaaaaattttcaaaaacacacccntgatgagaaatgaaaaatttctcaaaaattcatcttcaaaatttatttatttattttcttgttagaatttttgatatatctcattaatcatttggcataatatctttgctttttgaaggaaattttcaattttacacccctaattttggaactttttggcacctattttcccatttttagcacctattttgggggtttttagaacctaaaacctacctattttggcagtttttagcacctaaaaatatcatccctacttataatagaggaggacacctaaagctatcgctcaagatctttaatttgacaaagtttaagctaagttatgatttattattcagcaaataaaattaaaatattaattaatttaattattattatcattgatacttttttaggctcgacctaacaccgaccctttttcaaaaatttctttgctagaaagtcgtatgagcgtcatcagacgggcgtttcgcgcccgttttttagcttgttaggccgcttcacggcctcagtcgggcgcttcgcgccggtttttcaatttttgttggccttggacgggcgcttcgcgcccgttttttaaattcgttgaactcatacgggcgcttcgcgcccgttttttagcttgttaggccgcttcgcggccttggacgggcgcttagcgcccgttatttaaattttgaggtacaaaagtgattaaaagaggtacaacagtgattagaagagtgatcagaagaggtacaactgtgattagaagaggtacaaccacggaagggaaaggcacaacagtgattaggagaggtacaacagtgattaaaagaggtacaacagtgattagaagaggtacaactgtgattagaagaggtacaacaatggttagacgaggtaaaacagtgattagaagaggtacaaaagtgattagaagaggtacaaaagtgattaaaagaggtacaaacagtgattagaagaggtacaaagtgattagaagagtttagtgattaaaaaaaagattcggacttatttaaaaataaatttgtaacatttttaaattaaaaaaaatttactgcattccacattgaaatttcttcacggatttgcaattcgtcgcgttccaaaatttcgcacaacattttttggtcaatttgcaaaaatccatccgatttgatcaaagtgtcggcattttcgtcaatgtaaaataaacaatggcaggcaaaattctaaatttgaatgaaaataaagtattaaaaaaaattggctcttgattgagaataaaaataagtgaaaaaaggaacattatggaaaaaatagatgcgataatttccgcttttaaacacaatttagaaatatcaagttaaattgagagaagtttttctctcaaatttccttactatttttctcttctctgcccgccgctaaaaatggtagcagcgacgagtcagagaagagaaaatagtaaggaaattgaagtgaaaattttattttttttattcaaaacaatttagtgattaaaagaggtacaaaagtgattaaaagaggtacaacagtgattaaatttgaacaaaagttgaggccgagttgggatgggcaaaatgggaaaatgtccattcaaaatttcattacatacaatgatgaaatgtaaaaaaaaattactaaaaaagccaaaaaatgattatggatatttttaaataaaaacattttttgcaaaagaaaaaaacaaaggcattgatgaatttaatagatacttgtctcagcaaaaaaaaatttgcggcttcagaattataaacagaaataggaaaaatggttgatttatgaaaaagatttaatatgaattcaagcaccggactcttctttgcactcgacataacaatgtcctggccctttaaaagggtacttgagtgcgtatttaatatttgctttgttaccatatgcaaacagtacattatggtgtactcggtaacgtagcagaatataaggattatacggcacgacatgtgagttgtcgtatattaggccgtttacctctaattgggcaccaccatcagttggtgaaggccggaaatacatcgcgggcctgtccgggcgcaaaatcgtacattttgagtaaggggctgggaaccccttcttgcaccgcccgtaaattgggtcgctaggaccacaccaactgtcactgcatctgtgcagttgcatatgcattgtttcgcggatttcgcgatgcatttttgcaatgggcgtgtcgtcatctttatcaggcaaagatggaatgtgcgcccatatgtattcctgaatgacatatggaactgcgtccaggtctgtttgcgccacaatgtgggcatgtgggcctcctcggccttggaactccattgattcaccgtaaccaaggattgttccgaagaactttttgtcataaagttcttctcggaactcagcgattttgctgctccagacacgcatccacatgtcaaaacggtcagtaaatacttgaccgtttttgtgtaaattctctttgaactcaggccattccctgttgttcgtgaatgtaatgaagagacgcgctttcttcgcgtcatggcaccgtgcaaaaacggtgttgcaatcttcatacattttcttccaatattggagagaatttacgttgtgttcggaaagccgaacaacactgccaatgtcatcaacagttttctgttgggcattggggttttgccgtgcttgctgcctgttgtattggttgaccaaatactgcagcagattttttggagtgctgatccgcagatccatgtcaggtctacgcaaaaatgttgctatttgccaatcaatttttgcagcctggtcaaggatccagcgctgaccaagtcctccaccacatgaaagaatgtggtggtattgcaactccacattttcatcccttattgcgagataatacttgcaataatctcgcagggagataaatt

SEQ ID NO: 18316 - DNA, 1917 bp, Heterodera glycines
  unsure (1)..(1917): unsure at all n locations
ggaggaggacgcgttggcgcttcgcatggagcatccatgatggcggaggaggaggagcacaaccgagcgcagggcggcgcggaaagggacggcggcgaggcggacgaacgcgtttcatttgcggcgagtggacacaaatgagtggcacanatttaaactggagaaggcagccgacggacgaagtcgataatattgcgaggagctcgggaacgcgtttatttagacgtacgacgtaagttgcaacatatctgtagccagaaacatgcagcttagtgcgagctcacttgaccacaattgctggcggggttggacacttacggacgaaagagccgccatcggaatgcacggtgtggtggggggcgaggaacggtggggggcgggcgggtggcattttgaaacgaaggcatggaaatggcattttttggaattaattcttattgtattgtacactttcttggctgttatttgcggatggactttttacggcgttcagatttcttgcccgatggtgatcatacgcttttgcgcgagttgatcaagcgttcaaacacaacaggtgagaagcaaattaagaaaaaaaatcctcgttttgcttcagccgcaccgccggtgattccgcctttggtcgaattggccgcgcgaagggtcgcctcggcactttcctttgagctgatcgaggccacctacgcggggttgcccagcgaacagcgggcacatcggggcgagcatttgcctgagcatttggtgctgcccatccttcgccaatgctttcccaactcggcagacaacattaggctttacaggcaaatggaggcgaattccaacgaatttcaccattttctcccttttaagctgtctaacaaattgcagtgaagggccatttgtgatcggagaacaggtgaaaaaaatgagaaaatcggggtattgtctaattaattaaatgcattttcagcttttccaaaatggcgctgtttccgaactcttccaaatcggttcgtttttagaccaaattttgcaaaagaaaatgccaacaattgaaggctatcacttgtcggccgtcgtcaatgaccaccaacggtttggcgatgtttgtgggagcaccggcggagcagcggcggcggggcgacgaaggacggcacttttcgatgtgagcattcgagtggacaggtaaagcggcttattgttagaattttgtttagctgttgactggtgaatccctattgtccgttgtgctttttcatcgtgtttttctttgcaggtgtcgggtcgtctcctgttcctgttcctgctccaactcttcctattggtgtcaacatgtcgtcgccgcgtgcctccaacgcattcaccggcccgactccgttcagtaccgcgtggccatttgggactcgatcaccgcactgaaggacagggacctgaagaagttggcccagtatttgatcaacgaattgccgcgagaagtctgtgaccgcaagaagacttttcgcatgatcagtgaattggatgcccattttcagtacattccggtcgcgcagaaactgatcgacgctttgcgagaccccacttcagcgatcaattgcacacatggagcaccaggtgatcaaagggaggggggagcagcttattttgattatacaaataaaaattcaattccactgggaaacacccggttaaaaaccgataaattttataaaaaagccattcgtttttgaattttcgaattaagattcaaaaagtttgtctaaaaatgttcggtatcgccccttacaattagccccatccgccggtctttcgcatgcgcagcccgccgtttggtacatggacgagaccgcgttgcgcgacgaagtgcacaaaattctgctggactttctgcgcaagtcgtgctcactgagcgtggtctgcgagttccaatcgctgctc

SEQ ID NO: 18317 - DNA, 2794 bp, Heterodera glycines
gggggcgacggcggtcatcccctccccctgaagggatttgaatggatcagcagataaaatctaaaagctgggcgaaaaagcgctgaattattggagagccaatttgttactttggaacagctaattcaaaaagtctgctaaaccggactatagcaccaaatcaaatctaattctgttgatcaacagccaacggactgctgatgagagtgaatgggtttaaaaatttaatgctttttaaatgattaaatgaaaaaaatagcacagactaaggatgacattcctaggcctcaaattttttggaaatcggattccgaggcctaaaaatttttcggaagtcggaaatcggaattctgacactaaaaatgtcggaaatcggaattccggccccaaaagaaatcggaattccgacccaaaaatgtcggaaatcggaagtcggaattccgttccatccctggcacaggtccaagcaaatggcacaatttaaatgtaaatttaatcaattaagggattttagttaaattcaacacaaaaaattatgcagcagccagcatttggagtgatttgcataaatttttgtttttcttctaagaaatgctcccccataacctataaaaatgtccgtccgattttggggctcgcacttttgcgcatcagccgaagcaaatttaagaaaacgcgttcaattggcggtgcttttgaacgagtgatgagcaatgcaaagaaatgggaaatttgagtaaatggcgaaatttggtaaaacgcgcggcggtgaaacggacgaaattttggggaggggaggaaaaagggggacagctgagagcggatgtttgcgcaagagaattattataggaaagaacagagaaccaatttagcagaaaaacaaatttaattaaatttttaaaaatatgcaaaaaaacaaagaaaaaatttagtcgaatttgcaaaatctttagcatgttttaaaaattcattaataaaagttttaattttgttcttcgttttaaagcagccaaaaaccaaaaaattagagactattttttacaaaatttttaataatgcattttgaaagttttaaattcggcatcacaaaatataaatttttcttttttttttggggggtggggactgtgccatatttttttttctttgccaatttcacactaatttgaatagtcacactgttggacattggtggggcattaaaattcaatttcaaaatttaaattctatttcgaaagtcggctaatttaataaatgcgcactgctttattatccgcaccaattttgagtgtatggataaataaataaacgaataaattgcgaattttgggcagcaaaatgcgacagagcgtgaccaaaaccacaacaaaacggcaggcgggagaaggagcttatgcgggcgaaaaagtggtcggttatgtgcagcagcaaagagtttactgcaaaagcaaagggcgaaaaaaggggggaaaagtccgtcccaaaaagggaaggacggtgcggctcccggtaaattggacactattggataaaaaataaataagttaaaaataaataaacaaaaattttaattgaataaataatgttattattatttgtagcatcagctgcagaaagtcatcatacattcataaagaaaaaagttattttttttgcgcattttttggcacattgaacaatcatcgcctaatttcgtacattttttttgccacatttgatcaatcattgtgcatattgaatgtttaagttcctgggtttatattttaaaagagtaatttgatgtccaattttcctttggtgtccaaaattccgacggtgtccaatttaccggtccccggacggggacggtgctgggacgttagtcaaaaaccatcaaatggatggaaaatttttgaccagaaaattcttcataacttcgctaaaaagctaccaaattttatgatcttgatatcattcgatagccctatgggttttatattatcctgcaaaatttcaaaaaaattcattaacttttaagaaaattatgagcttagaaactaaaaaaaaaacaagttttttgaacatttttggtcataactttctcgaaacttgataaaactttttgaaattttgcagcatgataaaaaaacacttattttttgagggaatttttaaatttatactctatcccagaaaaatggctatctctttttttgataaattttatacacatacaaatgctctcgagcatgatagggagggcggtgcgcaatcgaccttttatttttgagggaatttttaaatttatactctatcccagaaaaatggctatctctttttttgataaattttatacacatacaaatgctctcgagcatgatagggagggcggtgcgcaatcgaccttttatttttgagggattttttaaatttatactctatcccagaaaaatggctatctctttttttgataaattttatacacatacaaatgctctcgagcatgatagggagggcggtgcgcaatcgatcttttatttgagggaatttttaaatttatactctatcccagaaaaatggctatctctttttttgataaattttatacacaacaaatgctctcgagcatgatagggagggcggtgcgcaatcgatcttttatttgagggaatttttaaatttatactctatcccagaaaaatggctatctctttttttgataaattttatacacaacaaatgctctcgagcatgatagggagggcggtgcgcaatcgatcttttatttgagggaatttttaaatttatactctat

SEQ ID NO: 18318 - DNA, 2292 bp, Heterodera glycines
tgaaaaatatttgaaaataaaaagtgaatttatgaaaaatgagaaacattcactgaaggaatggaaagaatttagagcaaaaattaaacaaaagtttggtgtgagtttcggtggcgcaaggagttggaaacagaattacaactgccaataagtaagtgagtagtataaggccacaaatgtggtggtaaattttacccccaccattgtgcccttcgcagcgcgcgccggcgttcgccccctccctccccattgtgggagagtgttgtgcccttcgcggcgcgcttaaccccttttttttgcacgagttgcgcgcaaatattacacaaaaccgtgcgagctataatttaattagtcgcgattatttggttttgtaagattgattttttattaaatatacttagatatagaataaaatatttctctatttctttctattctaaaagggctaaaaaatatttctttttcaggtttaaacaaatgctttactgcagttattctaattttattgtataacattctcatgttaaaccgataattttgcacttgtttttcgaattcatttatctttgaaaaacaaaggtccgatatattctctgcttcttgacatttaaatatatctgtttctttgatgccaatttctagtttctgcatagctaaggcctgttttctatattcactcataataagaccgggtaatttttgaattttttcgagcatttctaagaatgaaaagtataaattttcgattccaggtgcactaaatgctgctatgtagaaagttttcacacctttaaaaagtttatttgcaaagatttcaagattatttgatcgtttaagtatattcccggctattttccaattttttgttacattattcttaataaaatcaatttcttgaattactgtagacatctgggattatagttacttctagcgttataacaccatccaaaggataaaaaagcgaatattgttcttcttttaataagacgtgttggaacaaagcctcggccgtgttttcgttagggtatcgaagagggcaataaaatgattcaaaaccaaaagaaagcttcaaaatgcttctgaatttcccttgctcatttttataattttcttcaattaacgatgtgaggatatctttaaaattttcctcagcattaattatgaaaggatttttaaaataaaatttagttttatattttgtaaaaccaaattttaagtcttcatgacgaaatgactcaattaaagaacacccttccattttgagtgttgcccttttagtttttatgttcttatatacccatatgctcccaaacaattgtttggagcctattttcataatttaacatttggctttgcacccttcgggactcgaaatgtaatcttcgggcttctgttaaagaattttgagattgttcctcaagctttgttgcctggtcaaaagttttgcatctttcgaactcacgccacgcagattcagctttttctgactccaaattgatttggtccaggattttaaaaatttcccaaattgaatcggacattttaaggtacaattcccgaacaccattagcgtaaggagctttttctcttgattttattgcacgattaagagtttctcgagaagacttggcaaaatcgcttacatcatccgatagcacaacgacatctcgccatgctctctctgtctctcttttagcagcttccaacaaaatggaattagctttttctaatttttccaaattcattttttattttttatttttctgtttttcttttatatatttttattatattttatattcaatgaattcgtctctaaattctgctgagggtcttggcttttcaaattttatttgattttcttgcattatttcttttattttattggccatatctccaattcctaaatctggctgtgaataagagttacgataagtctgtccaatttcatgcctatattttttagctatttctattgattgtttggcatcttcggctaattcttggcacatcactgggtcctttctgtctagacatttttccatgccttttttaatattttttatattcttttcctcattttttattttatcaaattgtgaatgtatttttcttactccatttaatagtttttcatgccaaaatatgatttcagattttcccgaattcctatcattaataatttgagcttcaaccatggtattatgagcagaaaatgaaaagtctttggcctcattagttaacctaattatatctttaattacttcttcacaacccttcgggggcatc

SEQ ID NO: 18319 - DNA, 2211 bp, Heterodera glycines
atatttaaatttgaccatttcacaccaaatatttgctctttcaattgcatagcaaaatgaacaaaaaaccgttcatttagtgacaaaattaagcaaataaatcaaaaattaattaatgtccaaatgaatggcaaatggacaaaaggcattccgccggaggaaaatttgcaaattaattaattaattaatggaaaaatctttctcatatcatttcctgttttgttgtctggccaaacaacaaacgcttcttctcccttatcactttttctgtttggcataataaattaaccaattgtcactttttggtttatcagtgagtgattaaaatttgttatatttttttgattgctttctcacattttttcccattatttttcagcttttccttttttttttatttctccattagcttccaattgaatgatgttttttttctttttttttgtcggcgaaaatgggaaatcaatggaaaaaagtgaggtgacggagaattatttttgtgtattgtacccatggaaagtgagcacaaaagaagagaattatggtggtgtaaatttttccaattgtgaatgaaatttaaattaatttaaatttaaattcattccagctttgatcggttgttttaattgtttgatcgaatttcggccgatttattccgtgctgtgttttaattttaatgattagccatccctttaaaatgtccgccgatcaaaggaacaaaaattcaaaaaaaagagatttgcttcatttgcccattgacatctttcgcattttatttttccgattttacccccgccaaatttggccaaagaaagcgaacagcaaaaaaaggccaaaggattttgtgtttttatcgcccgttgaaatggcctaataaaaaatatttgtgagttttgcgattgtttcgcctttcctttgccttttgcgcttttcctccatcgctttttgcttctcccccaattttcactttttattcgtcatccttttttcttataaagaaaaaatttctattttttaatcaaaaagtgttattcaatcgaatttctttaacactttttgaccattaaaataatttatttattagatttatggtttttattttattttattccgatttatgtcaaaaaacgagaaaaacaacagaagaaagacaaagaaagaggacaaaagggtttgatcatttgataaacgaattattattacagtatctgaatttaattttttcaagaaaaccaagaattcaaacagtccatcaagtccgagcagtccaccgacttcgcctgcactttcactgcctttgcccgcccatccgttgcaaattgcgcacttttcgctaacgacggagacaaattggaaggaggagaaaaagcgaagaaaagcagcagaatcacttaaataaaaaaattattatttaatattggctaaatatatttcttctattttaaattcaaaaatcatcaaatatattgggcgagaatgagggtcccgttctctcgcttttgcttgaatgtacagttttgttcggaaacgaataatgcgggatttccgcaggggattcccttaccgcgatttcttaattccattttccgcttctgcatacgtttttaatttattccagcttcttttcttgaaaagtagtcaatgaatttgcgcaagaagactaaggtttaaggatgttctttttatttaaatagcttacaatttgttatccaatttttaggtcgaaccaatagaagatgagattcctgagaatgagcagcaaataaacatctctacccgttcacataactcttcttataacgcaagttacatctttttaactttacgatttaatatttacagtctgatcgtgtcaatgaaaatgatttggttaaatcgctgtctcaatgtcttctggcaaagtatgagttgcttaaacgcacttcatttaaaaaagaattcagcgtttctaaacgagggtttgttcgtgatgccgacattggagaaatgttctcagaccgaagagaacgcgagttgcgagcgaatgttctgaagaagagtgagaaattgctgatggatgttcttggataccgagtcagaggaggaatttctgaccgttttttattcttttttagttagatcgagatgaggaagggaagcgtttttacctctcgacaaatttatgtaaaggaattgcaatggctatggtgagtgattcttttataatcatgt

SEQ ID NO: 18320 - DNA, 1994 bp, Heterodera glycines
  unsure (1)..(1994): unsure at all n locations
gtgtgcaatttatttaagcatttcggttttattttattttgatttttcccattttgtatttatttaataatatatgtataaaaagcgcgttaaaattgctataattaatcttncgaccaataaaaaattagtcataaacagaattcacaaaaaccgggaatatttcaaatatcacattaattttgacattttttcagtaaaatattttaaataattgatcaactaaacgatgatgtgcgatcaatgaagaacttcctaaaaaagtagggctggtcgggaccggcaattttgacaaaaaccgggactgggacttgccgggaccagaaaagtcgggatcgggaccgggaccaagtttttcgaccgggaccgggaccgcgaganaagcctggaccgggaccaaccgggaattttcccaaaagaaaattttttggaaaaattttgaaaatagcattataagatggaaaaaacagttttgtgaagaaacttcgtcgaaaaaagaatgatccaggctatttaacgcgataaagaaataaaaattccgatcaaatttgttttcccatataaatccaacaagaaattgttttattaattttggttttttgaggcaatatgtccggcggtgtatgttcggtacataattttatgagatttattataagattatacaacaatatttggtcatattttcccaatgtggcattttttcattttgtaatttttgacggtgtcgtaaatggcaaagattgacttgaatttgtaaatacctaacaccatttttcatgttcttatgagcaaatgtgatagcaaaatctagtctaattcgaactgaagctgaataatctccaaactgtacaataattctggttgatcagataaagtgccacagagtcaacaggtatgagtcctccttaatcgccttgatactgtgattgggttattgtaagttgtttgcttttcaagtcatgtttttatttgagatcattaattaccgtcagtttttcatgaaatttcaattttttgaactgaagctgattaaagaattttaattatttttaatcctttaaaaatttctccaacaaaatgtttctaccaattttcagcagtttacaattgccaattcattcatttttgctttttttatttgccaatattttttccattttttcttttgtcgttattctttcactgctaatgccaaattgtttaatccggtacttttcggttttgtgacccccccccctggagttttcaaataaaaagtcatttctatggtaatttggggcgctgatcacgaatatgacatttatttttcaaaattccgaatcccgaacccgaattcgaacacaaattcgaaattaataaattacacggaaatttttaaatcttttcgccataaaatcattaaggcatattatttcttttaaccacttttattaaatattaaaaaaatttatttatcaaatacaaatacaatctttttgaaaatttatataacaaatctattttttagagcgcagataattttttaaataaatttatccaaattttcataaatttttccgttttttcaatccttcaaaatttcttccccaaattgtttcttccaattatgaatattcgtttgggaaattttcacaatttttgcaatttccttttcattcatttttggattttcttttttaatttcccaataaattttcattttttccattttttcttcctccattagtcttttcttgctaattccaaattgtttcttccatttcctaattgtgtcataaccaactccaattttcttacaaatttccgcataattttggttccattcttttcgtgaatgttttcttttttgcttatattcttctgtcatttcaatgaatttttgcacaatttctaatttttcttcatcagtttttgatttnatagcatttctttttttggagaccaaattctttaatccatttttgaatattttttgcgatttgtccccaatt

SEQ ID NO: 18321 - DNA, 1479 bp, Heterodera glycines
catttcaatcactgggcactcaattctcctgcatttctatcactgaaactcaacccaccagcatttcaatctctgggactcaaatctccggcatttcaatcactgggactctattctcctgcgtttcaatcactgggacaacccaccaacatttcaatcactgggactcaacccaccagcatttcaatcactgggactcaacccaccaacattccaatcactggcactcaacccaccaacatttcaatcactgggactcaacccaccaacatttcaatcaccgggactcaacccaccaacatttcaatcactgggactcaacccaacagcatttcaatcaatgggactcaacccaccaacatttcaatcactgggactcaacccaccagcattccaatcactgggactcaaccctactgcatttcaatcactgggactcaacccaacagcatttcaatcaatgggactcaacccaccagcatttcaatcactgggactcaacccaccagcattccaatcactgggactcaattctcctgcatttcaatcactgggactcaacccaacagcatttcaatcactgggactcaacccaccagcatttcaatcactgggactcaattctactgcatttcaatcactgggactcaacccaacagcatttcaatcaatgggactccccaccaacgggtcaatcacttcgaccccactcaccaaatttttgcgtcaaaggtactcactcggccgcttcgcggcctcgtaactggggccttcggctccattccagtcactcaaaattcaatctcaccaattcttcaaaacccaataaccggaaatgaatgataaaaccgacagcggctcgaccgcttagcggcctcgcattcttcttttggcattttcttatggcataacagttcttccttgtttcttgactttttcttacgcacaacatttttcttctatacaaatttttcaaacaaattctcattcattcatttaaaatttcattaccatttacataagcaaaacaatatctttcatatcaaaaccaaatcaatttataacacaaacaacaaagaaagaaaaagaaacatttttaagactgttttttacacaaaatgacaaaagaaaaaaatgtaaaacaaaaacatttcatttttcaaagcatttatacaacacaacacaatgttaatattataggattttcttagtgaacaaactaaggagtgtcctctttcttttgttaaatattttatacaataaaaaatgggttataaataaggaagggatgcgagagaaatttcccattatctctccctttcctttcttttactctcttttcttttccattgcaatttactctctttttttcccactccctccttctcccacacacacgcacgcgtccaacagactactgctgcacagcaacacgcgtatggtcactgtctgcccctcccatctgccgctgcccgcata

SEQ ID NO: 18322 - DNA, 2975 bp, Heterodera glycines
attttacctgtaaattaccaattttcagtgaaaatctgtttaaaaattgtcaaattttccaatttgcccccggcggcgcctagcggcaccgccgggcccccgaaacttatttttcataaaaaatggctctaacgcaaaatttatcatttttagtgaaaatcttttagcaaattgcactcaaattttcaaaaattttcccgacggcgcctaccggcaccgccgaccttgttctgaaaaaaattttttttggaaaaaatgcgcctttttattgatttttttcttcatttgtaagaaattttcaaaaatgctgattcttgaccccaaataatgattttttgtttgaaaaatgatgattttgaaaattttcatttggcaaccctgatttaaatagttgttttccgttttattagattacttaaattacctttttaacattttattgcatatattatttcatatataaactttacatttttcttcgcttatctttttgctgtatataaataattgttatataaaaacatgataattctcacgatattttctaactattttaaattatcttttataatatttgttagtttattaaacttattttaataattatttaatttattcttttatattggtttttttaattaagtaaaagtgttaatattctttagctataattttatttatattttgaatcgatttatttttgacgaagtttgaaaattcttattcttcttttttttcataggtgccagaatatttgaatttcggtttggttttcttggtacaacgattaatatggacattttaacaaatgaacatatgataattttatttctattctttttttaatattttaaaatgattaatgttatctgattttttatgttcctcaatttatttttattgtcacatttatgaattaaaatatgttagtttcaatcaagtgaggaagtttataatttgatttcatctctttttcacaaaaatttgaaaaatttgttattgaattcatatatatataagaggtcttaatagttggtttaagtatttcattaatttcagatccttaaatggttagataaacttttgtacaaattaaatatttatattttgacaaataaagctattactaaaagaggttataggttaatctgagtaaaacaatttttattatcaatcttgggttttatttcaacctgaggatttgcaattacacttgttttaatttattttttcttagtcatttatttttataatcaggtcttttttatatttaaatattatttattttatgtgttgcatatttttggaatatttttcattatatactataagttttcaaaataattcaagccttttatggatgatttgttttttttcgagccagtctttttataagacggtttatccgttgacccaaatctattaagtgtcctattcaaataaaatgataattaataaatgttttaatatattgctagtgtttaacgataaataataatatttaaaactttattatcattacggtgctaatttcatatctttttaaaacttttttagttatttagttttaaaataggaattatataatataataaattattaattatgagaaaagctaattcgcacaattattcaaagagtatcattttaaatttcatccccaatttttatttaaaagtttgaattattcttttgttttattgacatttttgataaagctttaagaatatttggttacattttaataatactatttaaaattattttgcaaattaataaccttgatcaggatggttgtttactgagaagtgatttttgcaaattaacataaaatgtttgtttgatattttcaattatattacatattaatttattattttttaatgagtttaattcaattttttttaatttgtatattatttaaaaaattgctgagcactttttattgcttaaatttcaaccgcccaaaacttacattgagcaccacgcgccgactaggcgtcaaccaaggacgggcattgcacgccctcttgtgacttgaaaatgattttaattaattatttagaattttaagttaatttattaaggttatgggataatatgtttaaatggtagttcataattaaattttttaatttgatttattcttatgtcgaaatttattattaaatccctaaaatttatgttaaatttatttattaaaaatcagttgtagtccgaaaactcaataaaatttttatttttatttctgcaattgatattgattgaatggtcaaatttgttttagtaatttaaatttttacattaatcttaatatattttttaaaaaatggctgttccgtgacaagataaaaacagattaactataagtttttttagcatatctacattgaatttgattacctttttcaaatattatttaaatgttttaaattagaattcatttaataatctaatttaaattgatcgtttatatccacacttcgttttcgcatgcaacttttttgaaaaaaattttttgattaaaaattcataaattatattccgctgccgatagtatatttttatttatacttcttattattatttgcactttttaatttttgtcagattcttattcaatttgcgttgatgaatattaagaatagtaaatccgtattatttagtctttaattgtatattcattgcttgtctcaggagattcgatcttaagaaggatttttacagaaaatgaatatgaatcagattttaataaattttgtattttaaaatgacttcaactgttatttttccagagctttttattataattgatatggcatttaatcattttttattttaataattgtcatataatcaaaatttaaattaatccgcttttatttttatactttactttaatactttaaacaaataaattttaataaaaatttttatatgtaaattatttataatatattttaataatcctatct

SEQ ID NO: 18323 - DNA, 2974 bp, Heterodera glycines
cctattttataaaagcataatgtgccctatttgttaccgcgccgaatcctactattatttcactatttaattggaaatctatatttttggcactcatttgcaatttaaatttgaacattggcgttccgacaaatcttgaagaatgggaaacaaaagttcaggaaccgatcacaattattgagccggaaggcaagcttttttctatacaaatctcaattattaattctgaaattcataaaataaataatccacaaaaatccacgtctaattaggaaccaaaatattgaggtttttgaatttttaaaatcggataaaatcccaacgtctataatcagccggttctattttatcccatttttttccaatagtttatttcagcagatctgcacgttttggaaggccatttacagaaattgatgtcaaccgtgcatgagttcccaattgatgagcacggagaaattgcgacaaaaattttcaaaatattagggaaacggcttgtaactcaaatactccgcgcaatggactactgtgaacaggcatgtgatgaaagtaaagccaaagaatttttgtataatttttagataaaaatattcgaaaatatcgggtcagtctcgctctcgagaaaaaagcgtcgttcgactggacatacatataaataatataaagtctaaaaatgaaaataagctctccaaaatttgcagggaatacttttcagtacaggacaaattcgttttaatttgaatccttaaattattctaaaaaattaaaaaaaaaattaaatcgatatttttcattaattttcctatttttttaagtttagtcccccataaacattcgaaaagtgataaaccacacaaaagggaataatgctgagaacagttcgaatttaaagaaaatttatgtatgagtgggtgataaaattttacaaaacaactaactaattaatggggaagaattattattctaaaataattaattttaaaaacacaaaaaaagcaatgggatttcctatatttttaatttaataaataaaattgacttggaattgtaaaaaaaatcattataattaaatttaatttttggacagttgcggcaaagtgttgacaattttggacgagttgcaaatgagcaatatttggccactttaattgccaaaaagcgaactatcattttgggattaagcacagaatttaatacatttcttgtcgaagttgaacatgaaaagttcgcaaacaatggatggacaacagaaaaattgacacttttaattgaaaaaatggacaaattttttcacaaaaataaaatttattgtgccaatgccggctttgaacatgccaaaaatgaacacaatagactggttcgtggtaaaaaagcgatggaaaaccatcaccaagatggacaaataatggatgaaaatggtaaagattatagatgcacatacaaatttgctaagattttaagttcattcaagaaaagcttgggttaggttttaaataaaatttttttcaaggactagtgattaattaaatcgtcgctgatctgacggactaatataggcgttattttaaaaatataactttgctcaaaacaaccaaattttaaatacttggtacaaatcgataggcctaaatgttcactattatcctgaactatttaaaaaaaaattatttaacattcaaaaaagttattaccaaaaatgctcgaataacaagggtttcttgagttcttttgattacataacttttttgaaacttacgaagttttttgaaattttgcagactgatagagaactcttattgttagggctatccaacagatacgttttaatgatttttgttccactaattaatgaaaaattcactcattagtaaagtgccaagaaattgctgtccgcataaagctgagcattatggaaggtgaaatggaagccaaaattcacgtttattcaacacagccaattgatggcgacggatttatggcatttgcacgcgattttctcaatgaatccaaggaacttcttaaaatcattgaaaatttgtcgaacccaattcaagaaaatgttcgtaaaaatttgaaaaatttggccagtgttgcgcaacaaaagtccaaacagttgcgccagagcattgcgcaacaattggaacaattggtggcaaatgccgcaaacgaacttgccaatttgcagagccagacaggcaagttcggggacaacacggcatccgaatatttacgcatttttaggtgtaagtttggggaatattatgaatatttttgctaattaattaacaagggcttagattaatgtaagataaataaaatctcaaaaaaaatgtttgacataggaaactggaaaattaaagttttaaaaggtcttataaaaatagaaaaatgactgtatttttccaaaaaatcattaatttgcttgataatttcgtaaatttatcagtatttttatgaattttaatcaatttttttgattgattattagatgcaaatcaacggcagaaaattgaaaaattttgaaatttaaaaattctgttttttatattttatgttttacattcatttaataaaatatttttaataataattttagtcacctgttttggaaaaactctttaatttacgttatttaattttaattctaaattttttcataaaaataaaaatgctcgaccagttctattaattataaattcaaacccctaaaaaacaaacaatcaaaaataatgaattgcatttaattaggcaaaattacaattcataaaacaaaaagggcaaaaatatggccatattctctcattgcctctgacgaagaaaagatggtcaagtgagaatagtgcacccaactgtctgtcttacctcgcccattttacaccccatccaaaaagcattccaaatgctttccattaatataaaaataagataacaatacgcgaaaatatgcgatttgcttgctaggcctgttcggcca

SEQ ID NO: 18324 - DNA, 2202 bp, Heterodera glycines
tttaaaatttttgattggtcttcttaagtctgttctacttacgggtttctcttcgcatttccgatgcttctcttttcgatgctttcttagaaagaattggtactcaactgaaagctcttttattggaaacagtcgatggaaaggtgccgtttaacttttgtctgtgtcgtttcacaatttttaggtttcagattctcaaaattattgccaaacattgtccaaatttagaacatatttcctttgacttcttcccgtgctctaattcatttcgagttggtgatttactacgatttatgggttgaaactatgggccttctcccttctaatttaagcatttctccactttgcaactcgttctccaattgccacggcttcgctccgtttccattggctttattcgtgaaattagcagcaaaaagtcagctgcgctatgtgcccacattctgtcaatgtttcgagaattggtttcccgaggagaattggaagtccgtgcgttgtcgccgctgtcattttaaccttttcttttagtatttgcaaatttcgcgcgaatttcccttgccaatgtcatttgttgctgaattgtgtcgaaggaattccgtttgtctcgttttgttcatttttttattgttaaccaaaataaacaattttagaaaatctccaaaatttcgtgtcgaattagcagggaatacactcaaatcgatctgggtgagtttaacactgttttgagcaaattagcagacagcacacatcggttgatcacattgaatttctttggcttttgcccggctttaattgagcgaaataatctcaaagttcgtttggtcaaatttcgcgaggacattgaccagtcgttgcttcatcacttttgcgcacattctatgaattcatttccgtatgtttagtattataaatttccggagcaggggggggggtcaggcggtgctctcgggaaaaaacttgaatgtagtttgttaacagattgtccaaaaattacaaaatcaagttttctctttttccccgatggaatatttgagttttagatcaatttggaatatggacgaatgaaaaacgaagaagaaaatttaattttattctatttgttaatatttcttagaattaaataatgaaaggagcctggattaaaaaaattccactacagtttaggtcctatttttagttgcattccaaaaaaattatcttttaagaatttgcattttctggacaaatccgggaaggaaattttaggtcaaaaaaccagcttctttttgcacgttaaatctccttcaaatttatgtactttttcaattcattttttacttttgttatatgtatttttcaaaggaataattaaataaatgtttttttcttttcacttttgtttataaaacacgaaacagtttagtgtttttgcacgctgttattttataaaaatacctaatatcattcattcactaacacagagagtcaattttcggctcccaatgcaaaatgaattgaaatttatttacacacaacataaggaggctttgaaccttggaccctctttttggtgactaactcagaccactgaaacgaaaaatccagcttatttgcatgggagcccaaaattgactcgctttgtgttaaattggttatttgcactttaagcatttttttggcggtgaataaactgagtcacatttgaaagtgcggtgggggtcggtttagtctggcaagctgtttttgtccaaaatagattctactcagatttttttttcgaaaaatgtttaaaattaacaccataacatatttatcagtgtgttttcaacgaaaaaataacaaaacattgaagaatgactacgggcgtatttcataatttttgagaaattcaacgagaaaattgaagatattatcaggattaacattgtatggtaattttgatcattttggtaagcagggttgatgttgttgatggtattgtaaccctgtaagagtcgagaattctcgcatcgacggcacgatatttgcgcgttttttgaggagggacttcaccagcgacgcatcgtgcaatgtctgcatcgattgacttatctcatatcaaattgtgttgatgaagcggaagacagttggatatgaacaagcataagcccgttgaagctttatatgggaaaaaaacgtgaaaaattagggttttactttgccttaagaatataaatttgactg

SEQ ID NO: 18325 - DNA, 2088 bp, Heterodera glycines
cattgttcgcattcagttcaccaatttcctgtgagtctcgcttttatttacccaaaacaaatgccggatttgagatccctcccccatttgcttttttggcattgaatgtaattattgaaaatagttttttagaacctatgaccacgtgactgtgaagccgggaccgcacattaatgttgtaattggcccgaacggaacaggtcggaagaggaaaagcccccgacttttcctacattttcacttggatttagagactttggaattttactgaatttagtataaattctccgcaattctttgcttcttcattgcccattcattcaggcaaaagttcaatcatttgcggcatttgtttggccgtcggcggctccccgaaattgttgggccgttcggatttgatcggcgattttgtaaagcacggcaaatgcgagggaagcgtcgacctttttctgtatgtgttaaattcattattacttttactatctgacagacggtcgaattagatttatttatttttagctttttcttttgggaaattccatgtaatttggttttaaatttcccccttttttcatcaattcaatatatttatctgttgtttttcattctgcaattgtgtttagtgcatcttccgttggtttccaataagtgagcattttcagttgggacagtcgacgaagacgcgaacgctgtttcagcgtgcacataaaattgccaaactcggcctccttttttgtggacaatcagtcgatgaagctgacccaattgcgcgagctggtcaaggagtacaacatccaggtgacttcgtttttttttgagtgttccaatttttagaaatatcaaaacgacaaaaaaagtcggacttgggtaaaaagtgcgatactaaaaaaaaagtaaaatataaaacgataatttattttcattgaaatttgcttcgctcgtcgtttaattttgctccttttgtcaggtggacaatccttgcacctttttggctcaggacaaagtgaagagttttgcagaacaaggcccgcaaatactgctgaagaacactgagaaggttcaataaaatggaatttaggaatttctgttcaattagaaaaatataaaaacgctcatttttcaatggaaatcaatttttgtgactcggaatttcgtttctttatttttgggttttaaaatttctttgcttaattcccattttaattgtttaggctgggcccactgaactggtccaacttcacgaatcgctgcttgaaaagtccgaagagggcaatgaattgcaggcacaatttgaccggggcaaaaaacgcatggaccaattggagttggagctgaagacgaagaaggcccgggtggacagctacaaagaatggtccaatgtctgttttaaatattaccgacgaaaaaataggaattttttgggccctaaaacaaaattaataaatctaaattcctccccctccgacagaattttccgtcggatttttttccaccccattaattttttaacccatttagcgacacaaagtgatcgttctgttacggctcaagaaagcattattggttggaacatttattacttttttcgttagaaaacttagaaaattttaggaatacgaaagcgaattggacgtgcagcgacagcaactggtcgaattggacgaaatcagcacgcagctgaaaaatgtggagaaggtggagaaaaagcgcaaaaaagcggtggaaaacattgggagaacagccgctgaactcactgaagagttggaacaaatggtgggcagtttagaaagttgtacagttacaaattaccaagcaaattatgaataaaggtcggaattatttaaattgaaagacatccggggccggcaaattaaaaaaaacatttgcctggcatccccctgcctaacatttttcgaaaggcaaaagccatcatgtggcgcccgagtcctccgatttcccatttaaattatgattattaattttactttttgtcattaatgagttatgattagcaacaagcgaatgggtatttaaaagaacggctaaataaaacattgtattaaatcgaacaaatatttacaatttaaa

SEQ ID NO: 18326 - DNA, 1963 bp, Heterodera glycines
aataagcaaatttgtgttaggtgaactttacctttgatgaaattcattctcttatagacaagaaaagaacatccgaaatatgtcggtcattgcccacgttgaccatggcaaatcgacacttaccgactcgctggtgtccaaagttggcattatcgctggtgcaaagtctggtgagacgcgcttcactgacactcgcaaggacgagcagaaacgttgcatcaccatcaaatctacgtttgtttttagagtgataattgtttaaaaacttgtaaatatatattaaatgggttagtgcggttgttcaacatcgacacaattcaataaccacaaacaatctgggatgtggggtccttttgttggtatttggaattggttgcaacaattagcgactcaggaaaatccccgtgtacaagttttcatgacatgacaaaatttgaaaaacaaaatagtctcccctttggaatttttggcggtggaccaaccgttttacaatgcttttacttctcttaaaatttagtgtcatttcgatgttctttgaactcgagcgcaaggacttggagtttgtcaaaggtgaaagctttgcgtatcactgaccgtgcattggtggtggtcgattgcgtgtcaggtttgtcatgaaatcgtatgctttttttttggttggcacaaaccaacaaattcgcggttgcatttctatatcaatttggcttttagtttcaatttctatttctacatccgctctttagggtgtttgtgtgcaaactgagacggtgttgcgtcaagcaattgctgagcgtatcaagccggtgttgttcatgaacaagatggaccgtgcgctgctcgaacttcagcttggccaggagaagttgttccagactttccagcgcattgtggagaacatcaacgtgatcatcgccacctacgaagatgatgatggaccgatgggtccgatccaagtggacccgtccattggcaatgtcggctttggctctggacttcatggctgggctttcacaaagcagtttgcggagatgtacgctgacaaatttaaagtacatgtttgccacatcgtgctattttgttgtctcttttcgggttcatacacttacacctttttagattgacaaattgatgaaaaatctgtggggcgatcgcttcttcaacatgaaaaccaagaaatgaaccaagagcccgagaccaagcgaggcttctgccaatttgtgttggacccgatcttcaaaatgttcgacgtttcggttttgacttttgtcaccagtgaacaaattaatttttataaattcaggtcgtgtgtttgctggcagagtcgccactgggatgaaagcgcgtatccaagggccgaattatgtggtcggcaagaaggaggacctctacgagaagaccatccaacggtatacaacaatacatttccgacttagttcaatccctgtttctagcacaatttgataaaaatcaggtagcgctatacgcgcgacggatagttttgctatggccggaattaagagagcccacatgccacgacaacattccagaaatacatttgcactgcgaactcaacttgatcacacacaactgcaattcggtgacgaccacatgcttgtagtcatagtcaatcatcgacctgcatgctaatatattataaaatgatggccggagatttgcgtgcctcgcacgatcaaaccggtcacacagcgaaaaaagcgacctaacgtccgcactgaggtctgaagccttcacgatgaggaagtcctataagtaattaatttcatcggccaagaatgacagagacaaaccgcgctctccagaatgtcaagtctatcaggtctgttatcttcaaacaccactctcactagattcttgtaagactcaattttcatcgcacaaatttgtgactgctcttccgccaaactattcattagcaataaatttatgaagacaactgactcat

SEQ ID NO: 18327 - DNA, 1145 bp, Heterodera glycines
  unsure (1)..(1145): unsure at all n locations
tatcaaatcattacacacacacacactcacccgagggtcgtttatggttnnnnanttggnttttgntnnatgnnattnccctatcatccaagggttccatactgcccatttggcttttcctccccatttggcttttcctccccacttggcttttgctccatgccattccctgatcatccaagggttccatactgcccatttggcttttcctccccatttggcttttcctccccacttggcttttgctccatgccattccctgatcatccaagggttccatactgcccatttggcttttcctccccatttggcttttcctccccatttggcttttcttccccatttggcttttcccccatgcccttttctgctcctccgtcaatactccccccccgcccctcccttcagcacttcgttgttcatttgcaatttggcacttgccgacctgctgttcctggccttctgcgttccgttgaccgccttctcttacgtgtccaactcgtggcccttccctgatcagttgtgtttcgtcactgtcactttgcaatacgtcacttgttacgtcagcgtgtggactttggttctgctggcacacgaccgatttgttgtctgtttttgctttcttttccataattttcctccctattagtgcgtcttttgcaaattgttttttcttttgcaaattgcgccttaataatctttgctaatccctttagtccatcacttcgcccctggcaaatcgcagtttgaagcgttcgcgtgccgtcttttggatttgtttggccgtttggtgcgctgtgttggcgctgaattcgcttcagctgcgccacgtgggcgtgctgcgctttgagtataatgtgagcagagagagggaaagtgcgcaagtcgcaaaaagccattgataaaaatggcatttttaattgaaaagggatttttgtgaatttctatgtatttctttagcaattaagaatcagatttatgtattcttggtaatttgtgggacatattaattagatgtttggcattaattaatttttatttctttttttagttcggttttttagaaaagtcaattcagggtcggagaacttgattctgatatcaattaccgaaaccctgacccgaattctaaaattcagaaaatt

SEQ ID NO: 18328 - DNA, 1815 bp, Heterodera glycines
  unsure (1)..(1815): unsure at all n locations
tattgtataatttaaaattantcggaaatttattttcgacttttggttcgaatccgggtcaggaattcgaaatgggccgaaattaatattatattcgcgatcagagccccccaaaaaccccccaaagcaccacaaaacagctcaaaacgcgtcttttgcctctttttatgggaccagtaaaagcgatgattccgtttaaagtttatgtcttcatagtgttgttatccttatattacattccctcgagtcattttcattaagtagcacctcttaattaccccccccccccctctttccccagggcactctcggctctgcttgtgtcgattcgcttgaagttgcattgatgcgcgcttcactgtctcagactcgcctcttctactggggcttcaacttcggcgcgtatttggtcaattggcatcgctttttcttttcctttcccctttaatttatttgtggttttcagctgcccttggccacttcatgtgctttttactttttgctcgtcaaggaaatatggcgtcaaaagcttgtccaaacaaaatcatcgcaaaagtgaggaaaaaagaagggacagaggaaaagcctttctaacaaatagggattaagccatcaaaatgattaaatgagtcattgaaaaataaacattaaataaacactttcatcaatttgtccatcagaatgaagcgacatgccactcgaatggttttcgttgtcattctcaccttcggcgcttgttggctcccgcagaatttgcgtttctttttgcaaggccttaattacccggaggcgagcttttgggagcgcgacgagaaaacgtaaagccaaatttgaccgggggcgggggaaattcgtacaaagtggcattttggggggttatccagctgccgttcagcagcaattcccaatgtttcagcctcctcttcgtccagtccattgctcaaacgttggcctacgctaacagttgtgtcaatcccatcctttacggtacggtaccatccctttttttaccgtataatttgtcattccttccccattcacaggtttactgtcagaacgcttccgcatggcattccgtcgcactttgggccgtttctgctgctgtgaagcgattcctctttccgcgtctctcccgcaacaattgatctccgggattcaaacgccaaacggcgaagggccaaaaaggcgatcagcatcggggattacggtgtacagctggcgggaatacggtaaaccgcaccactcggaacacattgctgggacgacgaaggcgaaactcagtggcagaggcagtgacacagtggtgacagagtggaggagcacagcaacgagacggtaggaagtgggacgggtgggctacggtagatactgtaacattagcaaaagcgaattgtaaattcaattttgtagtgcatttaggtcgaccatctgtcaccctttggatgctcaaattcattttgatcagcagagcgattacgttcaacaacaaaatgccaacaacagtgatttgggagacaacaaaaatggcaatgccaatgccattctcgtgatgagaatgccaaggacgagaagccaacaacggagggtttggctggagaccctcggcgaagagaataaaatgagcggggaagaggaagaagaggaggaggaagaagaggacgtcattctgttgtgattggctgtgattttgatgccgaggggaaagcgccgatttccgatgattacgggacggaattattcgaattcattttttaattttatttatttatttattttacatcggttacaatattaacaatgaaagcattccatttt

SEQ ID NO: 18329 - DNA, 1648 bp, Heterodera glycines
  unsure (1)..(1648): unsure at all n locations
tatcacttgttgtaccatcttatcaaatttgtacctcttcaatctctgttgtacctcttctaatcactgttgcacctcttctaatcacttttgtacctcttttatcacttttgtacctcttatcaaatttgtacctcttcaatctctgttgtacctcttctaatcactgttgcacctcttctaatcatttttgtacctcttttatcacttttgtacctcttcatcaaatttgtacctcttctaatctctggtgtacctcttctgatcactgttgtacctcttctaatcactgtttcgatcaatttgaatcgcttcacagtctaggtagcgaagctcccaaagcgcgaagcgctttatcccagctaaatagccgacggttcacgcacccgctagtttatatactactaaagaaacagatgaactcattgctaaaactaaaatctcgggaaccgctggcgggaggggctcgggagtgtggcattgcttaagcaactttttgaggcgcatccaggaaaactataggcattttggtccgagggccaactgagcgccagcggcgctgaaatggctttttgggggaaaatgcatgcagtttttgggccataacttttttctggtaacccggagccaaaaatgtctgctgaaagggccctaagttggaatgtttgggaaatttttttcttcttggtcgagaccctaggatcaaagcccgagcctgcaaaaattcgcaaaaatttttttccattttttcggtttttcggttttttgggaataactcgctgggtgttgcgctgagcgtgtttgcgccgctgaactttttgtacagctcgacgagctctatcttgtcaattttttaaatttctgaaattttcagaaattttcgagctaggccccctcatcacttttgaggtttttgaattttagtattttttacagatttttctcgggaaaaccaagaccactttcaagcaaccgtttttcacgctctatcgattggtgtcattttcagaaaaaatttttaaaatttttttggaaatagaaaattttggttgctaggcttcaatttcagttctggcgcaataactcgtcaggagttgattttatcaaaaaatcgtctaagagcttttttgtagagaattttaagcccaatctaatgtgctttatcacatgtttttaccatgagtttaaaaaaagttatgaaattaattgtgattttgaaattcaaaaccataggggggaccccatggttttgcatttcatgaaagatttttttgctcctaaattagccaaaatgcatttttatggcctaatttaaggtgctgaactcgaaaatatactttatttttggtttcagactttttggtaagtgtttaaaattttttgaaaaatcttcaaaatttgagccccggaaaatccagtgaaattttgaaaattcataactctcttcgtttttggtcaaatttagtggaataaaatttgaaaaatagcaaaaaattaggagaattttatgagatttatttggaatttctatcttccaaaataaaaaagttattccagaatttctggaaaaattcgatttttcagaaaaaaattcttaactcccttctgaaaaagtattttataaaaaaaantatactcaanaaaatcc

SEQ ID NO: 18330 - DNA, 971 bp, Heterodera glycines
tttgaatagcatgtaatcggctcggctcctccgccctcctcccacatttgctggctcttcactaatgatgatgattatgatgatgattgctgtgctgtttggaactggttccttccccgcccgccccctcggggtacacaacggcgccgcctgtaactaccacaccgctagtgctgctgatcagcacagcacgaagcgcgcgagttggccaccgaatgaatatgtgtgcgcgacatattgcacttgtccccctatccccgcacaactttcccccgctctttgctgggcattctccgtattttgctgctgatgtggtgatctgctgatcagttaccatttttctatatgcttttatatgttccggtattatgttaattttggtcagtaatgatcaatcatttgacagtgtcactacattaaatgatcagactaacaatcttttttgtcttttgtatagaattctgattccttctcaagccgtttcccccttaaaaagaaattttatttcaatttttttgcgatttaaaattatattttaataattctgacggaatacgttaggtattttattttgcatacctaataatttttttccgccaattcaattcaatgcaaaaaagtacaacataaaaatattttttcactgaatagcgcctgaaaataaaaaatacaaaaaaagaaacataaaaaatatgactttttgttgtacaacgatgacagaaatggaggggacgggacggatgaatgaatgaatgaattggatggaagagtgttgggaagaaaaatgatgggaaaataatgaaaatggggggggggggggagaaaatataaatcgattggcgctggaggaaaaatgacgaggcgcaagccgacggacgacacccatttgatcactgcgcgcgctttttgctgaaatatttgcgacttgcgcaacaatttttctttgcgcctattttaacggaaaacttttt

SEQ ID NO: 18331 - DNA, 2568 bp, Heterodera glycines
ttttcaatggggtaaattttggggaatttcaaaaattttttgaaaaaattaaaaaaaaatttatttgttaaaacaaattcacaaaaatcattttcatttatttttaattgattttaataaaggaaaattgtcgagcaaaaacatttttaatgacatattcacttaaactcaattgaattaaagcgacacttatttttattatttcaaaaaatatgtaaatggaaatgaagaaattcccatcagttgagaaattaaataatgaaaagaaaaatgaaatgattcagttaatctgtgcagaggataaaaataaacgataaaatgagcttaaatgaaatcgctaaaatttaaatggctattaagttttaaatgggataaagaaatgattgttttgttgttcggttaaccttgaagattcaatttgatttttaataaaataaaaaagaaatcctttttaaatttttgatcattgatcatttatttggactgttttttcccattttctcaatttcaataaatcactcactcctccgttcaaatgctactttttctgctgatcatctccatttttttgttccccatctttgtcatgtcctgtcattgtctttctataagttctgtacatttccctcttgtatttttcgtcatttcatagagccatcgattgcccttcatgcgaattatgccccccccccccccattttttgaacagcgaataaattgtgcaaaattgcatcagttccccaaattgatttggtgtaatgtgtagcagatgagttctgctgactttgtatgtgtggaatgatgaaatggtttatttattttactgttcgggagcggcggaaaaaggtattctcgacgatttgtctatgtcgagagtgaattttattaggcatgagaggacaattaaattaattgcattactcactcacttcccccccccccccccagcaaatgcatcgacggacgtccttgggggccggtgggacgtcattatcaaacgctcgtcctgcttaactggcttggctattgttatttctgccgctgtcccattctctccaaaaaatttcccccccccccctccattacataattgggcaatttaatcggctttcatgctttatgtttaaaaatgggacaggtagaaatttggcagcttaatccgtttaaatgcatacgctgcgcagaattttttcatgcgtgagtgatcggtcacagtgatcggactaatgcgaagagactgatcagacccatgattaaattaattcggaaaactgattagaaaagcaaaattaatgaggaaacattgatcaaataagcaaaaacagattagacaaaccacgaatatggagagactgatcagaacacaactgatctatcacgccactcatggtttaatcactgcgaatgagtatattttggaattttgcttgtaattgtttgccagatcacgagagctactgagaatgaatgatctaagcctgatcaagtgaccaatgcatatcaaacaagttttgcataattttcaagtgatggttacttgatcaggcactgatcaagtgatgcccgcaaatattgccgatttgtgtttgcagaattgcaggcattaatctaacacaatttacaaaatatttctagcattaatcaacacatttattatagatcaacaagtcatttagctgaataattttttgttttgcaaacccagttttttgtaattatgttcatttccaataaccgcatttcttagggttgtcaaaatcacaaaattttcacaaaaaaataaaaatttttattatgacttcaaacatttttcttgcaataaaattagatttaaaattattaattgataaatatttcttagtaaaagaccaaaaatgttttatcgacgaatattcgctttattcttgtgcattttcgtcattctcttcacattacaagtaaacaaactatttcattttttaatttaaaaaagaattaagtttatcaattgaatgatttttgagtaggaattaaaattcacaatttattaaatttaattttacattttttgccagtttctccccgtcatcgatggcatgcaatttgatgtggtccaatgtggccattcaaaacggtgcgaattcggcggttgtgcaccaggcaaagcgcaaaacgcggcatcatgtgcctatttgttctcaatggagccggaggggccggacagtgttcgaatgggtcagacaaaaatcaaaaattcgtacaaagaaaatttttcgttaacctgatttttatacaaaaaaaaagcgggagttaaaaataaaaacccaaaaataataaactaaagtaaaaaaatatttcttgaaataattaaaaatttaataaaaattgtttttctttttttttggattactaaaatttttgtgtacaactttgcctatgcatagattgccgctattgactctgactctgaggaatctgaatttttaaaaatcagaaaacctgtatgagaatgccacaaaactccctgcaaaattagtcgggttgggtagcgaattgcgaaacattgtctgggacccagattttttatag

SEQ ID NO: 18332 - DNA, 2059 bp, Heterodera glycines
  unsure (1)..(2059): unsure at all n locations
aaaatccccccttttcaggaaatgcctttgccaattcccccccccccctccctcccattttggcacacattttacggaacgaaatgcaaaaatgaatttttgagagggtcacacaaacacaacgaaaaagtatttataaagaatgtgtggtggtagtggtttgaccccgtcattttgcggagtgacaatgggccaaactgacgaacaattggtggtggatgcttaagggggcgagcgggagagaggtgttaaaggatttgccaccccagcgaagcattgtttaaactccttgaaaattgtttttctgaaaattgtttaatatttgtttttttaaattattttctaatggaattagcctggtcttagttttctttttttataatttttgtcaatttataatttatactatgaattattttgaggggtcgggggagagttggtaaaaaagatcgtgctggcgcgtttcttaaaactgccaatgggtttgaaaacaaaaaatggttaacacataaaaattcatatctttgcttaatttcaatcaaattaaaattctttggtagcattcaatagccttaattgtattctatcagaatatgattttccaaaaatgtttacttaagtataaaaaaagttattgtcacaaaattgcaaaaaatcttaagtcagcattttttgttcagaacttttttgaaactcaatgaaattttctaaaattttaaatataaatagagaattcttagggctatcgaaatataaattaattttggttcaatttcattttaaagactttaaaattttaaatgttttattattatatatgcattaccattgcaaaaaacatagcctgttcaatgctttataacttcttttatacttaagtaaaaatttttgaaaaatcatattctaatagagtacaattaaggctattgaatgatattgaatgataccacgaaatattaatttggttgaatttgagccaagctattaatttaattattttacccattttttgttttcaaacccattggcagtttttaagaaacgcactagcaccgattcaatgatgctttcgctttcgtcactcctccaactttccgattttgctcaattttttccgttcgttgctttgtttgaccacaaggacgaaattacggccaattttggttcggaggaattcaaattcaatcataaactctgaattgagaaacattgactgaagcattgattggttattgattggattgcttgatcagatcattgtttttttctgatgattttctgttttttcttttatgttttctttctatgctttttcttttatacatagaaaaggaaattgctttagcacagaaattctgggaatatcatagaatactgtgcgcttttgggccatataatttggctgtcctttttctgctttgtccttatttttgctatcttttttgtttgtcctattacttttaattttacgatatcatttattatgttcaataaataaaattcaatcgttttcttaaaaatttataaaagtcaatggaaaattaacaaaaaccacaaatgagagtgatctataaacgtgatcagattttgtgaatatttcaccatttagagagcatccaaatcaaatttaaaattggccccgaaatttgcctcaattttgtcaccaaatgagcgcaaagaaacgaatggatgaaaagaatcgtcagcaaaaaatggcgaaacgaaaagaccggaggaatctgtggaaaagagaaaggagttaaatctgcataaattaggcaattaaataaattataattttaaaaaacatttaataatttgtttgttaacccaattgttttccatttttggtgaaaacgatctgccgaataacagaattgacgccgattcctacggtatcgccaacaccgtaggaatatttggcatttgttcttttttcttttccgttaatccaaatcttcccatcactatcanatgcataagtgccattgcgcngtcgaattgtcccatcatntgttctgctgttgactgcaaatccgagctcatccnactgaaaaat

SEQ ID NO: 18333 - DNA, 1031 bp, Heterodera glycines
agtgattagaagaggttcacagtgattagaagaggtcctacagagattagaagagtgattagaagaggttcaacagtgattagaataggtacaacagagattagaagagtgattagaagaggttcaacagtgattagaagaggtacaacagagattagaagagtgattagaagaggttcaacagtgattagaagaggtacaacagagattagaagaggtacaacagagattagaagaggtacaagagtgattagaagaggtacaacagtgattagaaagtgggcattcaaatagagcatttatggtaattaaggaattgtttttactcaaaatagataaaaaatcaatgtgttatatttttcattttttaaaatataatacactttttattaatgaaaaacaaattatgaaatgtataataattgaatagttatttaaattgaaatgaaaaaaattttacaatttaattttaaaataatagctgaaattctttaattaaatataataaataatttaatgaaaatcattattcatcaaaaaatttaattaaactaaaaaaatttattattaataaaaccaaacatttaaatttattaaaagtaatgaaaattaacccaaaaaatacaaagaaaaataatgtacaccgcccggcttcgaacttcgcccccccccccaaaaaaatgatgcctcagaatccccaatcacacagggattctgaggtcttgacgatgtcaaaagtaaaatctgatcacgtattcgtgatcagcgtcataaaataccctaattacatgtttttgaaagatttttggtgaaaaaattttttcaatcaaaaatcatgtgctcacccctttggtcccgaatcccaaaatcacttttatttttgtatctttttttaaaaatgtgatagaaatgctaaataaaatttatataatagagcaaaaaattgcggatttttgtagtattttactcttccctaatgacttttcagaaccgagatataaatttttttctgaaaaatagaaaatttccag

SEQ ID NO: 18334 - DNA, 1570 bp, Heterodera glycines
caaaaaaagtaaaaatattttcaatttttaaaaaattccaaaaaatctgaaacttaaaataacaatcatatttgtgctcaggaccctaatttaccccagaaaaaattttttcaccctatttttcaaccaaaaaaaaatttccgaaaatttctagggggcctagctcgaaaatttttgaaaatttccggccatataatacactattcgatagcattttaaaagctctacaattttgcactaaggcgttttttcgataaaaccaacccctaacgagttatggacccgggactcaaatgtcccgctcaggccgaaaattttttctatttccgggaaaaaatcgaaattttttcaaaaatatcaccaatcgatagagctcgaaaaacggttgcttgaaagtggtctccgtttttctgggaaaattcgttaaaaaatcctaaaattcaaaaacccgaaaaccgttttttaggcctaactcgaaaatttttgaaaattttcgaaatttttaaatttggaaaaatcgagcttttaaaactctacaatagtcccgctggcacccccttgatcaattcaaaccctgacgtgttattcacccgggactgaactggtcaaagttggtactgaatttctccatttttctgcagccctttctattataggtagaggcctggaattttttttgttttttagaaaacacttcaacttagtttcctaccagcggacatttttcgattagagtttcagaaaaaaagttacgggccctgaactgtgagcaaaaacgggaaatcggcccctggtactcagttggccctcggagaaaaaaacctatagttttcccagatgcgccgtcccgagttgcctatgtgtgcaaaatttcagccccctagctattcccggtcttgagatatcctttttgaggatgagttgccttgtcaatataacatatatataactagcgggtgcgtgaaccgtcggatctggcatagggataaagcgcttcgcgctttgggagcttcgctacctagataagctatgggttgtggagtaattgttggtccagaagatatttgagattaatcaaaaaattttatagggtcattcggccgctttgtgccttcagacgggcggttattagttttttttgaaaaaggggcccacaatctacagtataatcgaaatgtgtgttttgtaatggtatttttgtgttgctttgtgaatatcccgcttttttgtgggtgtaaaaactcatcagaaatcaaacccatttaatcactagtcatttttaacagtgcattttacacttgcacatcagatacaatggaagtggacgaattttgcagcaaggaaaggtctaataaatacatacaaacaaattgtattgaacataatattgaaatggcatagtgccaaaatcatttcgatcatataatcgcatcaattaataattaattcatttctgctggtgttgctgattagtgatcactcggaccgagccaagcggaggagagaaaactgtaaaacgattgctttgttgaactcataaagtctaattgacaccgaaaaatgaattttt

SEQ ID NO: 18335 - DNA, 1885 bp, Heterodera glycines
cataatctgccttttgttcgcatgttattgtttctacctgattagcataaaccaccctatatttccatgaaccatctcaattcactctctttgtcagatctctgcacatgattcaagtgccgtcccatctttactatcgcctttttcgctgtttcctttgccaatttcttgtcgaacactggacggaatggcttcccttattcgaagaatggactgcgtaaatcaaaatcaattaatcgatgattccacatgttttttgatcttttttcagtccactcgctccataattggcagtcgtattcgacgtttccgcttggctccggggtctacggccattccatacctttactcggaaggtttagtcccagcagaaggtttaagtcccatttcctttttactatgtatattcttttttcaggtcccaccactagtgaatgtggccaatttttaatcttcgatatttccatgacagacgcacaacttgcgcggtttaaatccgttatgggagcaagaataaaattgaaaaaacttgatgatgacgcaccagcttgatcttttgttttgtgtggcgttcccgttagccgaacaaataccagggttcagaaagcatgattttcaatttagcgataatacatcagcaaatgcgagaaatatattatgggaaataaacgagtgggaatggtttggagaaatttcgcctgaatttgagtggtttaaaacatcagttgacaaccgactgtgacagtgatgagcagtctgtatgattgcaacagaagtgacaaaagcaataaataaacagaggagagcaattgcaatcgatctagccaaaaaatccaatgaatatcagtgactcccaataatttgtcgcgccttacgtcaagaatggttgccccaaacacgcttatgatattcagccggcgccaacatataatcctggaaatgcaattgtgtttcgcttcccgttttccctgaattttcaccttttcaacatcgtagaaatcggcatggtttttactgaggaacatcacgaagtcttgcgcatgacgaataatcgcctccaaagaacgttcgctccattcggtataagccaacttaatttgcgtaaaagtttatcgtgtagagcatagtcgattaactgttgccaattttcggcttttttggccccggtgccaaaaatgctcagaaaaaatcgatcaaatgaaaactccagccaaaatttgttatattttatgcagttatttaaatttgttttatgatgatatttgcttgaaattcaatctattggattttcttgcataaaatatgtacataacatactttattcaatcgtacacatagtcccaatataaatagtgcctcatatttccgattcattgctcgtaattggtcaggatcaatgtcattatgatcagagattcatttctagggcatgtacaaattagtcattgttttagtatcttttttctgtgttcccccattcctttctaaaaatcagaaccactcaaatgctcacacagatatttattcaaagcagagttattgatgaaagttcagatatttgtcaaattggttttggttggctattttgttcagcagaataaacaggaggaggcggagagaataagcaggtgacaaaaaatatttaattaagtccaaagtgtgggtacaagtggaggggacaacacatttggtgacaaaaaaaaggagcggagaattgagagaaaaataatgaaatgggaagaggaggaactgatcatgacagaaaaatgaatgatgaggagacgttaattcacaaacgcttcctttcaccaccaaattctgtcggcaaactgaagtcggtgatcagcgttttattgtcgtatttatgtttcaaaatgcggcacaa

SEQ ID NO: 18336 - DNA, 1437 bp, Heterodera glycines
ctcgctttcattttccgcctcctccgacttttgcttcttcaattcctcgaccaaatcgtgaaaggctgtccgttcgaatttgtacagtaagatggtgcctacggccgtttcaaaatagtccaaaagaccgagcgcggagtgctccaaattctctgaagtagggttcagcagcacgttgtcgcgatccgcgtactcaatgtaaaactcacgcggcgacagtccgccatttccgctttcgcccacaccgaccaccgactcacggtactgaaaagcaaaagttattcgaaaacattattagagaccttttgaactatttcgaagacggtgatccgtgcaggcaatttcggcaacatgaactgtttgttgaccaggttttcgtcgtctatcagaatgcgtcgcaaagggtcggtcaatgtgacttggggcatgtcctttttggccactgcgcttgtttcaattgtcgtccgacgggcgatcttacgttttgctaaattcctacttgtgtatattaaatgacaacttaatcctaacttaatttaaacgcaatggtcatatccaatttgttagagtccaatacttttaaacgtacaacgcaccggtaattgcactgacaaataaatgacttacatgcgttgtcggcgcttcctggtgtgctggagcgactactttcatcatgcgcttgcgagcggttcttcagttccgattgctttctttttttggcatttagcatctgctgagcccttttcacgtcttcctaaaatttgtttttcttaacactcatcgtaaaatactcgaaaaataacctttgccttggttgcctcttcatcggagtaattcttgaagcgaattagtgcttcatgttgtggtacaacttcgtcgtgacggttgctccaaccctaaaatcttcaatgcgataaaatgaattaaattaaaatgaccggataatgaatgccatagccgacatctccgccagacaagtctttcagaaacatcactttagcctcataataaatgtgctccgagttcagataacggcataacactttctccccaatggtccattttttgtccgtcggatgtccgtgcggattggtagacattgaagagctgagatcctttctaaccattagctgtattttctcaaaaaacaaaagaagtcgtactcgacacttccactgctaatcgtggacagttctgatgaattctgcttcttctgaagtttctgttggctactgctgctgttactcgctttcgacaccgatttgggcgttctgctgggtgaagaggtcgactcatcccgaactaacgaattctgttgctttttctttgctgacaaatttcgcgacggcatttctcagatttaaataaaagaaagtaaggcgtttttctaaaaaaaattgattgtgaagaaagtgtgcttaagaaaattacgcataa

SEQ ID NO: 18337 - DNA, 2084 bp, Heterodera glycines
  unsure (1)..(2084): unsure at all n locations
tttcaactcgtttttgccaattttttggccccttttatttggtggcgccaaaatgtcggctacaaagtatcccgaccctctctgggttttcatgcctcctcccccaaccgtaaattgtcattatcttttattaaccaatttttccctattttaggcttttgccaatgcttcatctccagtcaatctcattgccatcattcgctttccgccgatttttggtttctacgttgtgccatttgatctgatcaacgaattgacccgggagcaattgacgatgaagaagatgaacgatatcaaccgtgttcttctgatccgttgtccgattgtgcgcgacgaaagcaaatgggccaaatgggtggaggaagcgattggatggaactttatggaccagtggaatcggatcgacatttgagatgggttagtgaatgaataatggttattcaaatacccaaatttattgcttttcgatttttaggctcttgacgcaatgatcgatccaagtgatcagaagcagaaatgattgaacgatttgttgagaaatgatcatctatttaattgatgtggagttggataatgaatttgagcccatctgatatatataaaattgttgttttgttgcgatgatcactaattgtattatatgtatatatgcccttaggataaattgactgaaattccaggcgcattcttttgacctaatgataaagtcggtggtcactttccctccaataaacgggttttaattaccattaagaaaagatgatgcacagaattcggtaatacgaccgatggtacgtacctccccccccccgtttttctgaaatcataattggctttaatagtgtttaagacaagatttgagaggtcttacatgccaagtattaaaaagtcaaataaaaatgcatgtttaaaccagggttattccgggtcacccgaatcccgacatttttctcgtcccgaatcccgacccgatatttttctcgtcccggaacaacactggtttaaaccttcaaacaacgggtagaacactttttaagtcatttaaaatattttcttttattttaaatgagcacgaatataaacctttattttatgtttcagaaaatttgaatatttaaaaaaaatttttcatttattgagcccaggaaatttaggctaatttttgaaaattcataactcacttcagggttggccaaggctccctgtcatttcgtcactgatcgtttcgtcactattcagttcgtcaccaagaaaaattttttaaaaatttgtttggcagattgtcaaaaattaaaaaaataagctttactttatttaatacaaaatctgtcatatgtataaaattcgaaaataaatgaatacagcataaaaattgcaattaattgaagcaaaaaagttacataggtatctaatttttataaagttatttttggcaaagtttgtgatacaaatctcttaaaaatccgagaaaataagttaaagcagcggaatatcactcttgactcaccgccccttcccctctcggccaatcgtacgtcgtacggggaccctgctggcgaccccttatatgtacacttgtgatcataatcagtagtgctgttcgagcccgaaaatttcccgagactcgagacaacaaaacccgagacttttctcgagtcgagaccgagactctcaaacagcactactaatcagggctccggactaaaattttcaaaatcagcatttgaccgacaaaaaatcagtaattgtggtcaaaaatcagctgtgtccccttgaaatcagcagagttgggagccctctgatcataatgaattatagcgaaaaaagaaatttagaaataagcacatttggagcttaaaattaaaaatgagaagctaaattaatctcttttatttcagagaagagatcccttccaaatctcagaatcaaggcaatttaaaacttttatttattaaatttctttctttctttttttgctagcccttttgtttattanagaatgtttttgctgttcttaaggcaatgtgccaaacaaaatttaaaaatttttgctcagtgacgaaacgatcagtgacgaaatgatc

SEQ ID NO: 18338 - DNA, 823 bp, Heterodera glycines
tgcaaaacttatttcgggcaaaccgaaaacatattagattccctttgaagttgccgccaccataaatccgatttccccaaatccatgcggttgctttttttgcacatccctccccgcgccgcgcagcgacgcggacggtcatcaatcatccgtctgtcaccaaagtgacaggtggaggaaattcaattcttgcaaattaattccaaatcttcaagattttttatcctgaaattaaactatttttgaaaatttgctaaaaccgtgcggttttttgcatatcttcccttcgccgcgcagcgccgtcatcaatcatgcacctgtcactaaagtgaccagtaattttcaaaaattcaatttttattttgcaaatttaatttcaattcttatttatttattttggattttaatcaattatttgatcccccttttccaattctcaattatttttccccctcccccaagcccctaaacctcgcgggtttctcgcgggtgttttcccgcacaatcccaagcctatgggaggggcacacaaacttttgaagatgccgccctaaaattccatttccccgaatccgagcgggcgtttaccgcacaaaccggtgcctatgtgaggcgtcaaacttttgaagatgccaccaagatgcaaaacttattggggcaaaccgaaaacatattagattccctttgaagttgccgccaccataaatccgatttccccaaatccatgcggttgctttttttgcacatccctccccgcgccgcgcagcgacgcggacggtcatcaatcatccgtctgtcaccaaagtgacaggtggaagaaatt

SEQ ID NO: 18339 - DNA, 1491 bp, Heterodera glycines
ggggcaaacgaaaaccatattgaattcccttggaagttccggcaccataaatccgatttccccaaaatccatgcgggttgctttttttgcacatccctccccgcgccgcgcagcgacgcggacggtcatcaatcatccgtctgtcaccaaagtgacaggtggaagaaattcaattcttgcaaattaattccaaatcttcaagattttttatcctgaaattaaactatttttgaaaatttgctaaaaccgtgcggttttttgcatatcttcccttcgccgcgcagcgccgtcatcaatcatgcacctgtcactaaagtgaccagtaattttcaaaaattcaatttttattttgcaaatttaatttcaattcttatttatttattttggattttaatcaattatttgatcccccttttccaattctcaattatttttgccacctcccccgagcccctagaaaattaaagcagtcatgcttttaccccgcttgaaatttaaaccgcaaaatatttccggttcataaaatgcacgacgattttttcgaaactcgttcagttcaatttcacgtccgaatttaaaggtcgaaacaatattttcaaccgtgtgtccggtgtaagaagccccggacaccccgagcccttaattatttctatgaaaatttttatcgcattttcacagtctatcagacttttcgtccccagacatataattttcccggattcccataataatgccgttgctttgatggggtttgtacatttgataaccgcggcattgaatttactagggttatacttaaattcgcattcggtgatcgtcagagagtttagtttaattccggtaccgagattagcgagagcaattatatttacgattatcgtttttgcatttttgatacaatgtaccaatcaaatggtcctttcactccctttatataccccttctataaatagcaaccaaaaataaaattaaattgaaaaaatgaactgtccacataaaattaagtgttgtcattactgcccctgtcattacgagatgtgtaacagatgtaaaaaacacagtcttttgcatttcggtacatcattttttgataatttctggctatgccccaaatgcgcgaaacatgttccctatgaaaatataaataggtcaaataaataagatacattaaaaatgtttcgcggtccgttcactctaattctctcgggggctactgggagtggtaagacccgttggctattacggtttttaaagcatcataagaatctaattgaaccatcgcctgaaaaaattctttattgttatggtgagatgaatgatagtattttaggattaatcggggagggcgttgagacttttaacgggattccggacatgaataagattaaagaacaggaaaaaccccttttactgatacttgacgatttaatgcttaatatgcagaatactttcctcgatctactctttaccaggggctcccataattggaac

SEQ ID NO: 18340 - DNA, 1532 bp, Heterodera glycines
accaggtcatttaaccatggtcatttgacctggtcaaataacgaccaacccatgtgaaaaacggcagtaaaagagggtcggggtcggttcgccgcggccacttcgccgcggccggttcgccgcgggattatttttgaagctagtgagaatgtcggccatacttgtgcattagagattgatagaatttttgcttataagttcttttacgcccagaactcaacccctcctttatattcggtaacattttgaccaaatttttatttaagcccaaaataaagagaaacttatttttaattaatttttttcgttttgtattatagtttcagccttagttataacaaatttttgaaaaataaaaaaaatttaaaaaatttttgaacaataattatggcggcgaaaaggacatttttctatgggcggcgaaccggctgcggcgaaccggccgcggcgaactggccgcggcgaaaaaaccccgcggcgaaaaaaccccgcggcgaaaaaaccccgcggcgaaaaaaccccgcggcgaaaaacttaaaagaagatggtaaattttctgcgggtccactcgcgtttcggcgctcccgtttcggcgctggcgtttcggcgctcgcgtttcggcgccagcgcgtttcggcgctcgcgtttcggcgccaaaaaaaattacaaaaatacaaatacttggttaaaatcaacaaacaaaatatgaaattcaaaacttagttaaaataaacaaatcaaaaacctaacgctttatcaatatataaaaaaacaaaaagaaatgggagcaaaatttggccacgcagcacgcaaaagtgtaaacattctttcgtacgatgtttgcgatttggaagtcattaaggcatggcacaccgggaaaatccatttttcacgcctaaatatttaatttacaattttgaaaaactgaattaaaacaaacagactttgccaagatcgtataaatctgagaaaattgggctggtgccaatgagaaagttccgtcgccaaaacactcattcattctgtccgcaaaacgcccgaatgaatcgcgaccaaacaataaaattctaagaaaaaaagaatttcgcattttttttctaaattaccgttgcgggttttcgtttccattttcaaaataaacaccggagtcgcccaacagaaacagctcctcaacgccttccgtcgacgtgtaggtcctgtatgcttggttgatctcaaaattcagattggttgggactcctggtggtgcatttatttcgtggcgcgcccttttgattaactaaaattagtttgcttgttagtttttaatttgttaaaaaaattctcgtacgtcattcgcagccctttttgtcaccaaaattgcggcgggtgatggcacgttctgcaatgcttctgaacgaatgacagatggcggttccaaggtagtgatggcacggagtttgattgtagttttgacttgttgagcctcaacattcgaagcatttgcgggacaagtgtgtggcgttgaaagacgaatgaagtgattgtttagg

SEQ ID NO: 18341 - DNA, 1858 bp, Heterodera glycines
  unsure (1)..(1858): unsure at all n locations
agggttgaacattaaagccccaccctcgagtataaccccattttgaagggggttttattcgaggaaatacggtataattatgaaaagcccttaatccagacttggaaccattacaggtccaggtccaacaaggaatccaagccaggttcaagcattttcaagatagcaaactctctaatcatcaaaatattatttattaccaacgctttttgtaaaatcctcttttggtatgagtggaaaacgaatgttggacaatattgggtcaagaattttgcctcgattttcagcggaacatacgatgcctttttgacggcactgttcgtcggaccaacggagtgccttaattttagaaaataaataattgtaatttataatatttaatttaccgcattccaaatttcgatttcactgcttctcagctcatctcttttgagaatttcacacaacaaattttgatcaatttgcaaaaaggattctgatttgaccaaagcactgatatttcgatcaatgtagcgcaaacagcggagagaaaaatcccaaaaataaaaatattataaaaaattatataattattactagggattgttcttttatgtaaatacatattttttttctggtttctccatgctttgaatagtaggaaaatcactttctttcttttttgtgtttgcgaacaaaagttgtgacttttatttacatattttcggatttttctacatattacatatgtacatattttggactttttcgttatatttcgcaatttttcgtacatattttcattattcttgaatattttgaggatttttgagaatttatagaaaattttttgtgaaaattaaaaatttttttgaaaatgtattcctaaaaaaacttttttttttcaaaaaatgagatattaaaaataattttaaaataataaaaactgattttaagccaatttagatattttaaggcaatttgtgcctggttctccctttactaggaatttttttccaaaaataaccatttaaaaaaatttatttacatatttggtacatattttgggttttttgtacatttttcttacatattttaacattttttatacatattttattacaaacatatttcgcgatttttcttacaaaaaaaacaatccctaattattactttaactcgtcggggatcgtaccatagaattttaccaatgttttcggttgagaatttatccttaggttatttataggacccggatttatattggcaaaaaaaacacacaccaaaaatatagattataatatagcgaaaaaacgaaaaatatagacaaaaagctgaaatgccaggtcccggtcgcgtatggacaataaatttttatgaaaattgtcttgaatttttgaaaaaactcgaacacccgtaaattttttgtcatttttcagcaatgaataattttatatacatgaattataggatattagagtttattatttgcaaaattagatatttttactcgaatttcggtcataaatttttgtttttcacaattatggtatttttccaattttttcggttttaatggcatgttttcaaaaatttttctttctttaggggtatatttttcgaatcaaatttttcatgagaatctgtgggtctctgtacttgatctttcctgtccgggctcttattattaatcacatttttttgttttctcaccccaaactttcaagtcccattaattagtgttaatgagattaataattaaaattctttcctcacctccatcatcagcaacaaagcctgttcaaaagccataaaaacatttggcaacttttgaattgaaactttggcacanaaagttggcacattcttttaccaggcc

SEQ ID NO: 18342 - DNA, 932 bp, Heterodera glycines
actttgtcatcttttatgtaaccttgcgcctcatccaaaatgtcctgtaaagcatttgtataaagatataaatcaagagaaaagtgagcaactcaccgcccatgtcatgaaacacgaataaccccaatcattctccttcgcagtgtagacatgattagtcttccgtgtaaaatttggaaccccatgtttttgggaaataagtcttaattccgccgaggcttgacaggaccaagatctgtgaagaaaaatttatggaataaaaaaacacaagcatactcagagtacgcgtcaggacaacattgaaggaaaaagccaaggcacttttgggttccctttttctggacaacatgttgtcgtggcataaccattatacgcctgaaattggatgagtaaaaaaccaagatttgtttgtcttaccaaggcacgccttgaatatatttgcaaggtcctctgacggtgtcggacatatgtcgaaagttttggatgacgagttgcagcatcccgtcagacgacgctgagcttgtcgcatcaactgcgttggcagcattcattgcagcggaagcggccgttgcagggacagaggcagacaaattgggcattgaaagttgatgggcttgttgctgagacgaaggcacttcggaaattgcaccgcttgcgttaaaaaagaacggaggatgacccatcatggtcggatcttcgccaagtgcgcgcaagaatttcagtggcggaaactcttcgttgtaatccgtctgcactccgaccgaagacctttgtctaaacctaaaacaattttttaagtttggcgctcaaaggcattttgtaacggatttaatgttaagtcaaaacaaacaattcggaatgtagcatcagctgagaaagagcatcttcgtcgcactgatcactctcatcatctgaacaatgcttgtcagtgc

SEQ ID NO: 18343 - DNA, 1587 bp, Heterodera glycines
  unsure (1)..(1587): unsure at all n locations
tgttatggtaacatttgactccgtccaaaatgatgggtaaatatttttggagtaaattttgattgtcaattcgccaaagggcgcagttggggttgaaaatgtcatcctttggcaacaaaaaagttcccctccttggtcgatctgttggccgttcaaacaaattaagccgagtaagtaattccgaattttctggattcatccacggagaatcagaggtcgtaccctgaagctcactgttataaaacatcgaccatagcaagaacagaaactcttcccgcccaaacaatcccaaaatctctgataaaccgaattaacttaaaaaaatggaatgtgaattttgaaacacctcattcgaaatgtcaccacaactgtttggctggtcaactgtagcgctgctgcagggcaatacaaaagcactgaaatgaatgaaccacaaaaaataaagaaaatcactggattgtaaaaaaacaagataatttaaaactcacctttggtccgcttctgtcgagtatttccgttttttgtgatggccttttctgtgtcctttctctctgtgatgtttgtctttggtccgtgccccatgccattgtttcgtttccgtccaatcgacgtctttgtcccgcttcttccgcttattccccttatgagtggcgtgtttttgtgccgtttgctcatcatttgaagaactttctttttttgggaatcggatgatcaatttgggcagtaagggagtgctggagaatgaatttgaacttaattacaaaaggtatttctttaccattcattttcatttgaactgcaacttctcattgtgcaagttgggattggaatgtccgtgagcacggaatgatcgtcatttgcgatttccgatgaagcaaaaagtgaccgcgctttccttttcattctctcagttaaaattgaatttactgaaaatagtttccgtttttattttattttatgaataaactcaccagaatttgttctctctgtaatttttgcatttgccatttctatggaggatgagttttgtcgcgtgtatttgcgttttggctgaagaattctttttaactttttttaaatcaaccataaaactgactgttttgctgtgttggtcttcttcttttcctattctgttgaatccttccgttgagcgttttgcgctttgcaacacttccgacactgaatatgaagacacagccaacaattcatcgtcctcaaacgaataagcatcgttattccgtttccgacctgcaccaaaaggaggaagcatttgtttttgttttgttatattcggtttgtactctgatggccattatccgaccgagattgactggttttgttctgcaatgaattggaattctgcttgtaaattggcaatttgttcgcttttcttcttgtcatcaatatttctggttttatatccttgggaatcaataccaaattttcatcagcagtcgaagggtatcctaaacatttttaataatttagtatttttttaactgtaatttaggttatccctaattattgctggagtatttcgcactccaaaaggctggtctttaactcccccttgtgcantatatgcag

SEQ ID NO: 18344 - DNA, 2842 bp, Heterodera glycines
attatgctctacaaatcaatgaatcaatgtgccaactatttgctaagcttataatggtgaagaaaaccaaacaaaaaaggcattggggtgtaaaataagctttacataatggctaaaaattttatttaataaatcataaaattccactaaatattaaattttaatcaaacctggccagaatattcctttatattagcctcagcttttcagcaattttttagggttttctttttaacttcacaaaattatggcctcatggatgtttcaactatacaaaaattttaaaattcttcaacacagaggatagaaattctgaaaaacccttttctcaaaaacatttctgtggccaatccaataaagattgacaaataaaaataaaagattgtttattaaattaatttaatttctctataaattacttttatatttgcttttcaggaaatattttagacaaataaaaattaggggctcattagtgtgtcctgaaatttgagtggatttagcaaaaacttggacaatttacggggccatattttttgaagtcaagagaaaaacactaatcaattgatgtctggagttaatataaaaaaataatctggcaaagtttgattacaaaataaatttattatttgaattttcatgttttttaagtaacatataagccactatctaagacttacgttacagctcaatattcaaaagaattttgttttgattttgatcatatttttcattccgtctgttaaactttaatttagcaagctcattaaattactaattatattctcattattctctttttatgttcttctttgcaatatttttattttttacattttttcccattgctggccaaaatttactgaaaaacgaaaacaaatacaaatttatacccagaggccaatatgaaattatcattgctaaaggacaatatggtgagaacctttctgtaacgatcgacagactttcgagactgtaaatatttgtgcctaatatttcaaaatcattgaatttttagcctgctaaatttcatattaggcaaaaactgcagaaaactattagtgactaattctgatgttgtaggatcaactgactggatctaattccttaattttataatttttcagacggtccaaagcaatttggctttttgacaaatcgagatgggaccatcgaatggaattttttggacaattttcacagaaacaaacttatcaataatcaatttaaagatttaaagtcgcaagaaaaatttacaattcttgtgcaaaaagagaatgataagcgaattattagaacattcaaaaattatgcagaaatgcaccgaacaatgaatcaaaaagaaggaacattttatgctcgcaaccaaattttcttcaacaatcttccggtcactttttctgaataaaatttcgcaaacaaaaatttcaaaaaatcattccgttaatggattattaaaatgcttaaataaaattttgttgtttcagaaagcgcccccggatttgccggtcgattggatcggaaacagcagttacacttttttgcctcctagaaaatatcgtatcattgtcgccagtggaccatatggtaagaagcaattgaaaaaagcatttcataaaaattaatggaaacattaatttttgtttatttatagatggtcaaaaacagaccgaatttttaactgataatgatggtaaaattgagcaaaatttcttggggaatttcctcgacaaacgtttaaacgatggatggaatataaatccaccagaatcagcagaaaaaattacaattttggtggagaagggaaatgataaacgtattattagcgaatatacgaattatgccgaattaaagaaaacaatggatgaaaatgacggcaaacttttcaactccaactacatcgatttcgaagcccttacggtttagcgttttgtttacccaaataattcaaatgtttttaaatcataggtagcgtttccggatttgcccgatttggaggatgatttagaattaaataaaacaaacgctaatagtggcaatgaggtgtattatatgttaaaatttttttaattatccatttaatttaaaatatgtattttagaatgtgaaaaataaagatttctttaggtaattaatcaaattcaacaaaatttaatggatgcagcaaataacacaaaaaaggtcaatagcaatgcaaaaagcagtaaaaaaagatactgtttgaaagttttatcaataatttggtgaataaaaatttaacaaaaaattttgtaaaattgttagagaaattatttgaaaatagtttttaaaaacctaaaactcattaaaagataaatagatgaaaataatttcaaattttattggtttaggtgacgaacaatgatacgacagttaatttggaaagctataaaaatgctacgtacactattatacctaatggacaatacagaatatttgtagctgttgggccaaacggtaattcgaaattgaaattttttatatataatatttactatttacttttccattatgcaactcatttttagcgctatgaagaatttggcgtttttttgcatgattttaccaaaaagaaatttttgaaaaattcagaaaaatttctataacttttgaaatccagaaaaaccccctaagattggtggatcccttaaaatttgttgatgaaaattatgggaggcggtataactgaaatatggcataagcagtaactgaatattttgataatgttaaagaatgtgacttgaaaactttaagttttttttaagatggcccaaaacaatttggattttcaactgacaaatatgccaaattaaatcgaaatttt

SEQ ID NO: 18345 - DNA, 2007 bp, Heterodera glycines
  unsure (1)..(2007): unsure at all n locations
tctagaagtccntgaaattgggccatcaaatacgaacagaaaacggtccctctcttgggttggcatttgttcgaatgtttgtaaccaagccaagcccattctttcagttcgttgctcacccccattgccaacaactgctcacttccatttggtacaacatcaattaatccgacaataattaccccacatttcggcactttcgccctttttaaggtacgaaggctttcccctgaagcgtcaccgttcctcctcccttcgcactttgctcatcgctcttttgctggtgctcgggtggcctttgatggccctttgttacattgcctttcccaaaagtcgcgtgggcgaaatcgtccggtcgcccttcatgaaattcctttactacaggtcagtggggcaaaaacattgacaaatgaatgagagaaagacccatttggaagacaatttggagaaaagcaattaattaattagctaattaattaattataacctttcagcacttcctttggctgttttcttgctcttcttacgatggtataccaaagggggggggggggggggaggtgtggagggaattcatcggagaaacgcacaattcaaattccatttgaatttaatttaatttcgaccgtttgcttcggcaccactcaattccgatgcactgttttgttccttccccgcaggtcacttttgaggcgcaccgtgaacaaaccggcgaagtgaaaggcggcacggcgacgcgtgccgctgaccgtggcccaacgcccacactgatcgaatggttggtgttcatttgggtaattggtaagtcaaatggacgggaattcgtacggtttggaacccgctgctgttgagggatgttgtggtccgaaatcaaacaaatgtggtggaggtaaggaagaagggggcgggagggaaattccccaaattttgttcccccgcagggcttcaccaaatacatccaccagtggtggaattggctcgacttcgtcatggtctgtctgtacttgtgcaccatttccattcggtctgtccttcttccctttggcatttcgttcgtctcctctctcttccttttctgttctgtcgccgttcatttctcctccctttcttttgcacagattttctgcctattcgatttacgtgatgcacaacgttggcgagcagttcacaccccgccacgtcatccgcacgcattggaatgcgtttgagcccgtgttggtcagtgaggcgctgttcgctgtcggcaacgtgttcaggttgggtccgggacggctgcagctgcgccattggcactgctggccaagtcctgcacatttcagcttcgcccgcatcatctacttgttccagaccaatccctacttgggacccttgcagatctccttgggctgcatgctggtcgatgtggccaagttctgcttcattttcgtgctgatcatctccagcttctcgatcggattggctcagctttattggtattacgactcgcagacggtgacaaatcacattccccaattgaactttaatttccccaacaattgtcatttccagccggtctgtttgagttccgatcggtgtaaaatcgtgccgaatgccttttcgtccattgcctcctcctacatgacccttctgtggtctttgttttccatcacaaaagtggaggacaccgaggtcagtcaacgactctttccagcaaatcgacaaatcgaagtgatcagacttacaaatcagtcaaaattaggtggtcgaagcgcatcacttcaccgtttgggtgggcagagggtcagttaaagaaggagggggagaaggggggatgggattataaatgccggatcatccccattcagtctgttcatcctttatcacatggtcagtggccaattcccattgataattatgattaattaattgctaattgcccctctcccctcgaagacgtcaatcattgttctgctcaacatgttaatcggtaaaaccgtcccaagcttgtaacgagaaaagattctctgg

SEQ ID NO: 18346 - DNA, 2770 bp, Heterodera glycines
  unsure (1)..(2770): unsure at all n locations
atttgagtcggactttctgatcgcttcttcggtgggcagtgaagaggactttgttgctgcgttgggcccctcccttgacgaatgttctgttttgggaataatctcaagagcggatgcgctaaggtatatgaccgcaaaggttcgaattgaacaaacggttaatgcatggagaaacatttgctgtgattaggtgagacggaaaacctttggcggtgcttccgcaactgtccgaacttcacaagagcatgacgtcctcgatttcctcgccaattcgatgatttgtcacattcaatcgtccggtggaaatatgaaaatgaaggcggtcttcctgggcttgatgatcagacggtatttttcatataccggcaatttaaaaccaaattaaggctaatcgaagcggagaagggcgtttgcgaggcggacgatcgcgatttttacggaaacaaacgcattgagttggctggatctttgctttctctgttattcgaggaccttttcaaaaggttcccaacactttccagcttgtttctatatgtttcattgttaggttcaactccgaattgaaacgaattgccgacagtcacctcaaccgaaatatggccgctccgctggacatcgtacgacacatgcgccaagtgggaaagcaataaatcccgacaaaaaaaacaaattttgtgtccttggttttaaggatttgataacaaatggtcttgtcaatgctcttgccactgggaattggacaattaggcgttttaagtgagcgatgaatgccggaaattactgaaaaattaaccgttttgttgttcagaatggaacggcatggcgtcacgcaagttttgtcacggctgtcttacatcagtgtgttgggaatgatgacgaggatcaattcgacgttcgaaaagacacgcaaagtgtcagggccacgttccctgcagtcttcgcaatgggtctgtttcatgccttgcccatttttgtaaatagtccctttctactccttttagggaatgatttgtcccgccgatacgcccgagggcgaatcttgcggtttggtcaagaatttatcgttgctcagtcacataaccacggacagcgacgaagcggtccattgtttttaaatgactttttggaaccaatatcatttttagcccattttgcaacttctctacaatttcggtgtccaagacgttcgtccgttgaaatttagcgtcgttcatgaaaggtaaatttgattgttaatgcctttaaaagggaattgattaaagacgttatcacatcgttttcctcaatggttccattgtcggaattactgatgacgttgaaaaaatcattggcacggtgcgactgatgcgccgaagagggcatttgggtgcctttgtctcggtcagtttcaacacgtccacaaatgcgctgtatttggccagcgacgggggccgactctgtcgtccgtatgtcatcgttgaaaatggtcgtccatgtctcacgcagtcccaaattcaggtaaaaatgggtgtcactttttgttcatctacaattatttcggttgcaggaagtccgagacggtcagaaaacctttgaccatcttttggcggagggatgcatcgagtttttggacgtgaacgagttgaacagtacgcgcatcgctgtctatgagcaccaaattttgccgcagaccacccacttggagatcgaacccttttcgttgctcggcgtcgtctcgggactgatcccttacccacaccacaatcagagtccccgcaacacttaccaatgcgcaatgggcaaacaggcgatgggcaccatcggatacaatcagcagaagcgaattgattcggtccatctttagcgatggcaaatgttttaacggtttggaaatggtttagctgatgtatctgctcgtttaccctcaaaagcctttggtgaaaaccaaaacaattgaattgtcaaacttcgaaaagctccccgctggtcaaaatgcgattgtggcggtgatgtctttcagcggctacgacatcgaagacgcattggtactgaacaaagcgtcgttggaccggggtcagtcgtatgtttggcttccaacattttaattccgagaataataaatcaaggttttggacgctgtttggtctaccgatttgccaagggcaccgcgcgaaagtacgccaatcaaacgtacgacaaaatcatgggaccgtcgctggacgcgacgacgcgcaagccgattgcgaaacatgccgttttggaccaggacggcattgtttttgttggggcgaagattatgccgagacatgtaaattgtacttttggaatttactttctgccttctttccaggtgctcatcaacaaatccatgcccataatgcaatccgaaatgcttcccgctggcaatgtcgccgggttcaaccacaattttgagacaaaggacgtgtcaattccctaccgcggctcaatgaatgccgtggcggagcgcgtgctattgacctgcaacgacgaggagcaatacttggccaaagtgttgatagcgcaatgccgaagacccgagttgggtgacaaattcagcagtcgacacggccagaaaggcgtttgcggactgatctcgccccaggaggacatgccatttgatcacaacggcactgtgcccgatttgatcatgaacccacacgggtcgaccaaattttgaattgtttgaatgatagtttttttctttttagttatccgagcagaatgacagtngggaaactgatggaattttgtgagtgcaaaatgcgctgat

SEQ ID NO: 18347 - DNA, 1698 bp, Heterodera glycines
  unsure (1)..(1698): unsure at all n locations
ggcagggggaaagcgtggggggaagggtggggagccacgcatgttgtggtacacgcatcgattatggaagccgcgcatgcactagcaacgaagtcctttgcgcgaagcgctcatgtcagcgcccgcccatatataccaaaagtatactgtctacaccgagcattagaagcgcaaagcgcccgtctgaggccgcgaagcggccgaatgcacttgctcatcacttaacaaacgcgcatgcactagcaacgaagtcctttgcgcgaagcgctcatgtcggcagcaacaccacccaacaacaccaagccaactgtctacaccgagcaattactgtgcaaagcatactgtctacaccgagcaactactgcgccacacgctagtttatatactttagaataacagtgcaactcatttccaaaaacaaaatctccttacggtttgccgggtggggttcgaaattccgaccttgggggtaacttttgacggcgcattcaggaaaactatagattttccgatccgagggccaactgagcgccaggcgccgaaaagtcactttttaaaatttttttttgccgtttttgggattcaaaaattttttaaaggcctaaatgaaaaatcggcctcgtaaaggcactcagttggaaagttttgcacattttttggttcttcaccgaacccctagggcttaccagtttttctggaaaactgtggaaaaattgtatacttttttgggccatttcagcgccggccgaataactcgccggggtttgaccggaggaggtcggtgtaagcggcttttttgtacagctcgacgagctctatccaaccatgtttttggatttctgaaattttcagaaattttcgagctaggccccctcgaaaattttccgtttttgaattttatgattttttacagatttttctggggaaaacggagaccactttcaagcaaccgtttttcatgctctatcgattggtgtcattttcagaaaaatttttcaaaaattttttggaaatagaaaatttttggttgctaggcctcaatttcagttctggcgcaataactcgtcaggagtttattttatcaaaaaatcgtctaagagcttttttgtagagaattttaagcccaatctaatgtgctttatctcatgtttttaccatgagtttaaaaaaagttataaaattaattgtgattttgaaactcaaaaccataggggggaccccatgattttgcatttcatgaaaaatttttttactcctaaattagctaaaatgcatttttatggcataatttgaggtgctgaatacgtatatacgctttattttgcgtttcagattttttggaaggtgtttaaattttttgaaaaatcgtcaaaatttgagccccggaaaatccagtgaaaatttgaaaattcataacgctcttcgtttttggtcaaatttagtggaataaagtttgaaaaatagcaaaaaattaggagaattttataagatttatttggaatttctatcttccaaaataaaaaagttattccagaatttctggaaaaattagatttttcagaaaaaaattcctaagtccattctgaaaaagtattttataaaaataatatactcaaaaaatccgcaattttttgctctattttataaattttatttaagcttattatcacttttttgaaaaanagttatagaaataaa

SEQ ID NO: 18348 - DNA, 866 bp, Heterodera glycines
tttatgattgcttgaattcatttttaattgtagagcttttaagtatttttataatttacttcccccaaaaatactccttaatcttttgtaatttataagtaaatttagcaaataggtcttactgaataacaattaattatgtttattttcttcttttattattttttattaatgcttgtatttaattttcttttaaataaatatttaaaaaaggtttacttgtaatcttagataatacagtttttaatttaattttaatttataattattaagtctcataaaattactaatgcatttattggcagttcgatttttatgccttaaaagtattgctgtgaaaaacgtacaaaatagtccagaattgttaaaattatagttaaaatttatttacgtttaaaaaaattctaattttaataatttatattaattctttttaactatgcaaatttttattttttattataaatgtaataaatatttataaccgagactaccgcacttccataaaaataactttatttaattagaaattatttgattttatttttaattttggattttagcttttttatattcttattttgtgtttttatttctatctttatcatttctatatgaaaacaaaacttaatttttttattaaaatgttgttatattaataatttttgtttgttattatcatgtcagattgtgtatttaactttatgaaatgaagaaaattccggaaaagatccgggttccgggttggtaaaaattttaattttcacatatatttcaactccaaaattggccaaaaagcgggtcatgtgttaaatttctgctctatttcacttcaggcgtaaataaatgacatcttccattataaa

SEQ ID NO: 18349 - DNA, 1069 bp, Heterodera glycines
  unsure (1)..(1069): unsure at all n locations
gcgccaataggcgccgccgggaaaaatttgtaattattaatgcgatttgttaacagattttgcccaaaaaatgactaaatttagcgatttttagcaaatttttaaagattaaggatttttaaggtccgctttaattatttttcttactttttaaagaaatgtcaaaaacttataaagtagaattctttgaatggaaaaaattaaccagaaaattgaaaaaaaacaaattttcagccatctctgtttaatatacaaagtatctccttgcggctaataattttggtttttggcagaatcagaattttttattttcattttttaattactaattcttagaaaaagaaaaagcaataattttattttacaattttattttaattttcatttgtgttaaatttattggtttaactttagagatcactttttgttaaattattattttttgttttatatttaaatttttaatgattttttgatttccgcaatttattaattaatctatgctatttaatttattttatgttaagtttctcgccgatttcctggattggctaactttaaaaaaagttatgaccaaaaatgtctgaaaacctggttccttttgtacttttggccgtaaccttgtttaaacttgacgaaattatttgaaatgagatgagctaatagagaactcttagaaactcgtttatatcaaaaattataattttttgtagtcgaaatataattatttaattttatcaaatatattttttaattagtatttctatatcttcacacttcattttattataaaaaattattaaattgttttatcgttgttgtaatgggtgataaaatatgggtccttttcaactattattatttttatatatgaattgttaatatttatttaaaatattattttattttattttcatgtccagttcttgtgttcggtggcggcgcgttaggtagtggcgtcttttcttattaataaaggcatttatattaggtgggtcttncttttttcttttcttgctttttccccataaaagaattattatattattaaaatgttgaacaaccaatt

SEQ ID NO: 18350 - DNA, 2784 bp, Heterodera glycines
  unsure (1)..(2784): unsure at all n locations
atgcaacctttatttttcctcgcctctcttttcgaactgcccagctattagcaagcgtgtttggaccaattctaaaacaaatcggggtaattaatttaatctgactttataagataaatgggaatttaagcgaaggattcatgcaaaataataatctatagaaattctcaaaaaagtagttcctcgcagattcgggaaccgtttctataaagctagagacatatgcgctaaccataaaaaagatgaatcattttttgaaaaatttatatagttcgactaaatttgctaatcgatttatggtgtacaggatgtttgtcgaaacataactcgtcaggcctttaagatagacctgccattgctattcctgcaaatatggagtctagtcagcccaatcgattgctattcgaatggtttggggtcattggcccaaacaaaagttgtgctgcttcttgcaaataagacgtagccaactgtaaacagcaagccatccaaatgcttcaatgtaaaaaatttacatttggatgcaacctttatttttcctcgcctctcttttcgaaaagaaaagctattagcaagcgtgtttggaccaattctaaaacaaatcggggtaattaatttaatctgactttataagataaatgggaatttaagcgaaggattcatgcaaaataataatctatagaaattctcaaaaaagtaaatcctaaaaaatataaaaccattactataaagctagagacatatgcactaaccataaaaaaaataatcattttttgaaaatattatatagttcgactaaaaatgctaatcgattataaaataaacatttctgtcgaaacataactcgtcaggcctttaagatagacctgccattgctattcctgcaaatatggagtctagtcagcccaatcgattgctattcgaatggtttgnggtcattggcccaaanncaaagtgtgctgcttcttaaanaccgaaaaaatataaaactattaataaaaacaaaccttaattaaaataataagaattttacatgaaaatacaaaatattaataaaaataaatccaaaataaaataaacatttcataaaatttttatttttaaaattaaattaaataaataaattaatataaaataaaagtaaaataaaataaataaataaaataaaatgaattcataaaaacgaagcaaatgcttctcgcaataaaaactaaaaataatctaataaaacgccccaaataataaataaatttattccacaataaaacggttgaacgtaaaagcaattaaaattgtttatgaaaagttttcctttcttaaataaaagggaagaaaaaactaaaacgataaaaaataatttaaaaatgaaaaaaccataaaatgataatgtggaaattttgaatgctattaaataaccaaaaaattttggtataaaaaggggaagggttttcagtttaggtatgcttcaaccaattcactctgctagcccatcggttctcttcactcatcaagccggacaacaactcgctctgaatacatcacaactcgggcattcgaagcatcgcggatattgatcaattgtgatcagaaatctaccaaattttccactttgtgtcctttgtcgccccatcccaaataaaatattaaattaattgattggatcaaccagtgcatcccatcaattttggtgccacgacccgggaaggcaaacgacaacaccaccaacaacaacaaaagctgatcgctgatctgagaactggaaaaagccggtcatctgttcaaatagaaaattgttgtgcactgttaaagaaaactgcaagactgttcatcatctaaaactgttcttcgtcaatcaaaagtctgatttagacgtttagttctaatcaagaccaaaatcacaaacaaacaaataaataaacaaaaaattcagtgaaacgaaaggctgagtcaaagcccgatacggagctaaaacacacaaagaaggacgaaaacaaaaccgacgagttcaaaatactctaggtgtattcaaaggcgatcagataacaatttttcaattaatcattgtgatcatactgttaataaaaaaatttgtgttgagaaaaatcacaattaataataaggctggataataaaataaacagtaaaaagccaaaaattatacaaattaaactcgaaagtccttccagcagaaattcaaattgctctaaattaaaaaatttgaaaagaaaagaaaagaaattttgaaaaaatacgaataaacggtcagaaatctagggagcaataaaattaaaacatccaataccaaattttcaatcactttagttaatctttgtgatcgtattgttaataaaaaaaaaattccaaataaacgtcaaactgtgtcggccaaagaaactaatttctgaactggaaaaggaagaagaaaattttgaaaattttgatcaattggaagaaattattgaagaagttgaagaatttgtacctattgtagaaattccggttttaacacccgaagaaattgttaccgagcttgaaagaagggcaaactttccctttccaatagtgcatatttacccaggaatttccaaagtaacaaaccaaattttaaaaactgaacccttcccataccaaaacaaaaccgtatataaattcactttgacaataactatttttccatactgcattttaaataacctagataaagccgattctttggaaagaatatcacaggaagtaattttagaagctgacttaaaagtaagagaaacactcaactctaaccct

SEQ ID NO: 18351 - DNA, 1096 bp, Heterodera glycines
atatgatacgctttcaagctttccctttcactttgtctgtagcaactctttttgcttttctggtctccactctccggcacacatttgaacatttaggaaaaaatccttaattttgtcccgaccttccgttccgtataggttcgggatttctcggagcgtatttgcgtattggtttgacagagtaactttatgtaattccattacaatatcaggaatttgattttgtaggaaattttgctgagggacaaactcgaaattttgagtattcggaaattggtcgggcaaaaacggttggaattgattgggctgtggttcaaaattcgggttcggttgctgctgataattttgttgattcatattccgaaccggattataatttgggaaatttggaccgtttccaaaatctcgtacattttgaatggggtaattcatcccaatttctcgaccataatttggattatgaacatttcggttttgctcaccaattaattctccatacccgggattatgagcattccgaaccggttgtgcccttattccctgatttggtacaaaattttgggaatttcgtgcagaaaactgatggttgttcgccatttgcgagttaacgaaaattcggggattttggcggcggtgatttccatatcggttcgcatccggattccgattttggttttgctcgaaattttcttgttggccattgtacgaaatatgcggtgagacattttgaggggttgaatgagcccggggatttccgaaactttgggcaacattttggttgggaggtcggaacactgcgagctgcatttgttcttcgacattttgttgcactcccacttgctgggggatactgttttcgaaatttcgcggaaatggatttgggtcttgcacattgtccaaaatgttttgaggggccaaattcaaaccattgttttgttcagtgccatttcgtcggctgtggcgagaatgcgacgattcctcttgttccatgtaattaatcggccggcgcactcgaaaattatatctttgctgaaaaccggttgactccatacatttctaaactttgaaatgaaaaggagaaagaaaaaattcaaaa

SEQ ID NO: 18352 - DNA, 1369 bp, Heterodera glycines
acgaaaatttaaatatattaatattttcttagataatattgacattttaaattaaaaattttgtcaatagaaaaaaataaataaattttgggagaaatttttgagaaatttttccaattcttagggtgcatttttgaaaatttttttggtcgattcttatgggtatattttttgattttaatgcatttttgttaagaattttttgaaaatccttaaaataggtaacaaaaatgccgaaataggtataaaagtaggtacctaggtaataggtagaaaaaatcagatatctcgaatggattataataaaaatgaataaatagtagaacaaatagtaaaaatatatagaacaatacgtggataatatataaagttaattatatttaaatacgacctcattaataaaacaaaattaaaagatgaaaaacaaaagtcagttaatgaataaaattcaaattatattttgaaataagtcataacacatactgcttaatgaaagttaaaaattttattttattctttaatcaaaaaaattattttttaattccttctatataaatggaatatttaagtaaaaaagaaaaaaaaaaataaaaaattaccaaatttaccataatttcaaaaagtaaaaccttttgtataatatgctaacatatgcgaatcaaaaacaatttgataaataaatttgactatggagcctatgggaggtaaaattataacatcaaaaaaattttcaaacatattatttataagttatatgtaaatcgaatttgtaaaatttttctgaaacaaatatacattagaaaggaaataatcaataaacattttctagcatataatatagacatttaatgagaataatcaaaaatttatttaacgaaaaatgcaaataataataaaaagcatttaaagtcgatcataatcgactacgcccgtgagaaaaattaacatttaaaaacataaaataaataatttgcatgacttacgacgtataaaacaattgccattacattacaaacataaataatctaaaatttaaagatataaattagactaatacgtaaaataatttttactcactcatgcgaaatgggtaccaagccttagagatgacagtcaattttgagtaaggatgcgatgattataaaaagaaaaatttaatttttccaatacattccattccctgcgtaattaaaaatattttcataatcagtgaataaacttatatccaaccataaatactcacgaaatataatgtcttaatacaagatataagctaagataaacattttatagtagaaatgaaaaaaagaacaaggaattattcgaggttaaaggaacattaaaaaaataacaaaaataaatatattga

SEQ ID NO: 18353 - DNA, 2429 bp, Heterodera glycines
gcattttccgattgaattttacctataattgtaacttcatttccggaaaatgcatattttcagatagaattttacaattgtaacttcattccggaaaatgctataattgtatttcatttccggtaaatgcgtattttccagtagaattttacaattgtagcctcattccggaaaatgctataattgtaacttcatttccggaaaatgcatattttcagatagaattttacaattgtaacttcattccggaaaatgctataattgtatttcatttccggtaaatgcgtattttccagtagaattttacaattgtagcctcattccggaaaatgctataattgtaacttcatttccggaaaatgcgcattttccaatagaattttacaattgtaacctcattccgggaaatgcgcattttccgattgatttttacaaatgtattgtaaaattcatttcatgaaaatgctataattgtaacttcatttcaggaaaatgcatattttccgtccgatagaattttacaattgtaacttcatttccggtaaatgcgcattttccgatagaattttacaattgtatttcatttccggtaaatgcgcatttccgatagaattttacaattgtacttgtttaccatttctgatcaacattgaagctgacgagctgatccgaggcctcatttcactgattaaatttggttgcattttgtcattctctccatttggcattttgtcaatttgtggggacacttaacaaattattgcatgatttcaaataataaatgaagaattttttataatatttttgaaaataaaaattttaatttttaaaaattgcctgattcttcgtcatcattgtcttcttctgccgcctcaatgccaattaagctaaaacaatattttataatcgtctaaatttaagacagcatttcaatttattatttggattttactaaataattaattttaactaattaataaatatttataaccgttgaaaagttgatggagcagcatcagctaatggaccaagcgcagctccgtgcgggttgcgggaacgaagcgcaaaatcagaccaaagcgctaaatacagaaattaatcaaacagtaataagaccacataattagagaccgaatatggacagacccgtatacgggtttttaccggtcagtcgccgataatccgcattttttgatcgatacagatttttagtgattcgggttttacggtttttttagtctgtaagtccgtaacccgtgtatgtgactgtatgtgacatgcccagcccgttttgagaactaatatgttcccagttcaaattaatttatatagtttatagaattgaattaattattcatttaaattttttcgccaaaatttgtttaaaaatgcaaaaaaatatatataaaaaataatggaaaatctcaatttttctagcgtgacgcaaaattaaaattctcatttttaataaattatttttaaaatttattattgtaattaacgaacaacaatccatcagttgtagttgcattgcgttgcgccagccgagcagtgccgaacgggtggaacaaatgcacaaaagatttgccaaaattggctgttcatgcataatgctggcaatgagccgaaatgcggtcggaaaagcagtcttttcaagccgagtggactaaatttaaaaaattaaataaataaactaattttaattaagttttaaatatttcttcattttatttatgagaaaaagcatgaaaaaataaaagctttatttttttatttcaattaataaattttcaaaaatattttgcggttttcattcttttaattttaaattctttaaatgaaatgtaatctttaaattaaaattcgtttattatttattatctttaattataattaaatatttttatgtaaaaaaattttaaattataaaaacaataaataaaattaaatataatttgcatttgtatgatttatatgagggaaaaatgtaaaatatatgactttttgaaaatattttaatgaatataattttaccaaaataaataaaacccaatttaaatttaatttcatcatatatccacataaattagataaaattgaatgggaaaaaaaagcaaatcgaactttgttaaattcacaaaataatttcttggagaaagaaatacaaaaatttgcaccacctcattaattaacagcgttaaaatgggcactttgccgccggtactcaaagtgttcagcgaccaattggacgtcctgctgctgagatttgagctgtccaaagagttggcctccaaattccaacacttcagcagcccgccttgcaacgagcagcgaagtcgttgatgcaaaattccctgaaaaatttgcaaaaaatggaaagaaaaaaattaatatattttaagtattaatactttttgattataacccga

SEQ ID NO: 18354 - DNA, 1213 bp, Heterodera glycines
  unsure (1)..(1213): unsure at all n locations
ataaaaccgaaaaatgccagaatatattttaaatattttttgaataattactaacagtgattttttntatttatctaaaatgttttaaaatttcaatgttttggttttaaaaattttattttattccaaacatttaaaataattaaaataaattaaaaaacaaatgtaaattctctgaattaaaaaatgatgcctttgtctggcataaaaatatccaacgatccttgggccaaggggctaaccaaggaagtgggctggacctgaaaaattataaaaaatagaatttcattaaaaaatttgcaaccaaaatttgggcacaaatactgccataaattggcaataattcctggcgcccaagtgctggtaatttgtccatggcataattgtgaagtcggccggccaaagatgcattttgaagtcggaaatgggcattctgccaaaataaaaatggtttaaatttgtattcaaattaattttagaaaaattataattggacgagaaatgattaaatatgtacaagacataaattaaggtgtttgctttcatatttatttttcaagtgatgccaattcaacaagatagaaattttaaattgtcattctgtctgataaatagggcttcgatttttaggtaaatacctaaaatttttgcgcacttgtaacgttgagataagcataaaaaacgagtttttagcttggtttggagcttctacacccacttttataatacctatttttacctatttcgggatttttctacctattacctaggtacctatttttatacctatttcggcattttggttacctattttaaggattttcaaaaaattcttaacaaaaatgcaataaaatcaaaaaatatacccataagaatcgaccaaaaaaattttcaaaaatgcaccctaagaattggaaaaatttctcaaaaatttatcccaaaatttatttattttttctattgacaaaatttttaatttaaaatgtcaatattatctaagaaaatattaatatatttaaattttcgtttacaaagagatatgtagaaccaaaattttccctctttgtttgcttttttccactaaaaaatcgttaataaaaatttttttttacctattttggtacctattttggaatttttatacctatttaatacctattttgagatttttttttacctatttaagtacctattctgagatttttcttaccta

SEQ ID NO: 18355 - DNA, 1294 bp, Heterodera glycines
aaggggaaaagatggacagacaaaggggggacggggatacgaaacggggatagattgggaaacgatttggaaattatttttgccattttgcgcagattcacacattcgccaccgatgcgggcattcaccgaacggaggccgaaattgacagagacgtggcagagatcatccaatttgagaaggaattcgctcgcattttgatcccggacgaggagaggcgcaacttttccaaaatgttcgttcattttccgataactttgctaattgatcagctgatcccccctcccccttcaggtacaacattcgccatctgtccgaaatggaacgtcacgtgttccccgatgtgagtgactttctgttgcttttcaatttatcccaaaaaataaaaataaattcccgcgtccgataattacaattattacatcatcaattaatgaattaattgacgaattaatacttaattgaatttcgatggggaaagggcagtgtccgtcgttttcccgtgcattcgcacctttcccttccatcggtcgcaaattttcaattaatcaaacggcgaaggacgaaaaagcgtcgaacattcttttaaatttaacaagaaaaaagaaggcatcaaagaataaatttgggaggaaaagaaatttaaaaaacaaataaaaaatagtaaaaaaggaaaatgaaaaaacagctgatcggccgatcaaaaaccaattggtcttatcagccgatcactgatcaatcagtgtttgatcgttgtcagatgaattggtccacttacttcggctggttggtccccgacgaaatgcgtccctacgtggcctccgacccggaagttgtgctggccgagccggcgtatttcgtccgattggcccatttgctgcgccggacggacaaacgaattatcgccaattacgtcctttggcgttatgcctccgcgtggtctttccaggcgagtggcgcaaaatttaaatttaatttaaaaatgcaaatggaattaaattatccaattttatttgaacttatttcgttttattaaataaatttttggtcattttcagatggacgaacgctatgacgacattcagcaggtaaagcaattattattctcgtggaaaaactaattgacgacatttcaggactttctgaaggcctttttgggcaaacagagcaaaagcccgcgatggaaagactgcagcagttcggtgtcccagagaatgagctatgctagcggggcgatgtacgtgcggaagcatttaacaagaagagcaaaacggccgcatggaaatggtgggga

SEQ ID NO: 18356 - DNA, 1160 bp, Heterodera glycines
agtgattggccatgagatcacccacggcttcgatgaccaggggcacaatcgacggcattgcaacctcaaagattggtggacccgaacacgcagcagcacttgtggagcgaaaggtgtgaattggcaaatttgaattgaatgagcaaatggaatttggtaattgcagcggtgcatcatcgaccaatattcttcctttgaagtgcccgacataaatttgcacgtcaatggcattttgacgcagggcgaaaacattgcggacaatgggggcattaagcaagcttaccaagtaaaagggaggggaagggaacagcaaaatgagggaaaatggtaattaaggcttacaaaacatatctgaacaaattgggacgggaggagaagcggttgcccggctttgagcggtacaacaacgagcagatcttcttcatcagttttgctcagacgtggtgcggacatacgaagccggagacggtaagcggaaggcaggcaggcattccggacaaacattcattggcattggcacgctcagctgatccgacaaattctgaccgacccccactcgccctaccgctaccgcgtcaacggcgtcgtggccaatcagcccgaattcacccgcgcctttggctgccccgccggcgcccggatgaacccggcacggcggtgttcggtgtggtgacaaaggacgaacggagggtgacaaagtgcaaaaacagtcaaacgagcagcaacaaagcccaccgattagcaagcacatcccatttttgtacatatttatgcaatgccgcgcaattcgttgcaatattagaacaaaagagagagaaaaagagaaaaaaaatcaaaaataaaaacaattgccaaatgagtcgaaagtttggcaaatttggcacattgattatgccattcatcgttttgctttgctggtcgattaagcctttgccgctctttccttttctcataccaatggcttttccgattctttgggcgattcgctccacgcaaatttgagaaagaaaaggagggagaaaaggttgagcaattggaacacggccaagcagacgtaatcgaacttcatgaacacacggccccactcgcgttcgatctgaaaaagacaccaatcagcagagaagcagagaatgccattcaccttttcccgcgtttgttct

SEQ ID NO: 18357 - DNA, 705 bp, Heterodera glycines
aattttatgagatttatttgaaatttataccacaaaaacataaaagttattccagaaattctggaaattttctatttttcagaaaaaaatttatatctcggttctgaaaagtcattagagaatagtaaaatactataaaaatccgcaattttttgctctattatataaattttatttgacctttttatcatcttttaaaataaagatacaaaaataaaagtgattttggcattcgagaccaaagggggtggtggacaggatttttgagtaaaaaatttttttcaacaaaaatcttccaaaaacatgtgtttatgggttatttgggccgttgatcacgaatacgtaatcagattttacttttgacattgttaagacctcagaatccctgtgtgattggggattctgaggcatcattttgagggggcggggggcaagttcgaatccgggcggtaacacattatttttctaagtatttttttttgcttatttttagatgtttttaatttatttaaaatagttttgatttaatatttaataataaataaatttttaatttacatttttttatcaataattgttttaaattttaaaattcacattgtacctcttctaaaaaaatatgaaaaaaattaacttaaagaaattctcaacaaaattaaaaaacgggcgcgaagcgcccgtcctgaagtcgggcgtgggggggga

SEQ ID NO: 18358 - DNA, 1583 bp, Heterodera glycines
aaaaataataatttcaaaagatttcaaaaatttaaaaagaaattaaaggaaaaaggataaaaaattaaaaatataatcacttttttttaacttttaaagtcatttttccattttttaggtaaattttgtcctttttggtcataatttggaaaatttagttaatttagaagaatcttaatcagttatttatctgtgttaaatttaaaactttcatacatttctcaccgtacggggacactgattcccctatttccgggtcacagtttccggtgtgattaccagttatccgattccgtacttcttgctgttgtgaacaacaaaatggcaaatatccctacagtgtttttgaatttattatttttttttgaataatttaaactaaatgatgagacgagcgagcgacaaaacaaatggagaagaatttttttatcgatttttaaaaataattaaattttgggaagggtggggagccccgcatgttgtggtacacgcatcgattatggaagccgcgcatgcactagcaacgaagtcctttgcgcgaagcgctcatgtaatgcatttcttttcatctctcacaagtaaactgtctacaccgagcaattactgtgcaaagcatactgtctacaccgagcaattactgtgcaaagcatactgtctacaccgagcaattactgcgccgccacacgctagttaatatatacgttatattgacaaggagtttcgtttcaaaaaacaaaatctcccggccgaaggccgggagggccctgaaagtagtggaagggtcttacaactttttgaggagaatccgggaaaactatagaaaaaaatttagcgcggacgactgagccccagggacggatttctcattttttcgtgcatttgggggcccgtaactttttttctaaaacccaaatcaaaaaatgcctgctgtgagggggctaagttgaagtgttttctaaaaaacaaaaaaaattccaagcctctatctgcaataggaaaggctgtaggttcgtggactttttcagtaccaactttgtccagttcagtcccggttgaataactcattagggtttgatctgggcggggagttaccagcagacttattgtagagttcaatgagctggatttttccagtttttaaaatttcgaaaattttcaaaatttttcgagctaggcctaaaaaacggttttcgggtttttgaattttaggaatttttaacgaattttcccagagaaacggagaccacttccaaaacatagtttttcgagctctatcgactggtatttttttcggaaaaatttcgattttttcccggaaatagaaaaaatttttggcctgagcgggacatttgagtcccgggcccataactcgtcaggggttggttttatcaaaaaaacgccttaagtggttgaggtggtggaggcaacgctcgaaaagtaccagagagaaccgaagacaatgcgtgccatagccacatcaacaccgtcttcggcaaattgtgctgcgccatcaacagcagtttccaacaccgatcagcaaccgaaagcgccttcagcggtggtggcaaatggtgggacggcac

SEQ ID NO: 18359 - DNA, 2462 bp, Heterodera glycines
actttattttaaaataaccctttcacaaatttagatctattattaatttaaattattttctttccttgacaatcggaactgaataatttcatgaggtttgattgggttttttaagtaaattttctgatttatattttcttgaaattttaacttaactttttcaattttattaattcaaaaaatgtaaaatgttttttagcttataaagaagttcttttttttaaatattatttgtttaataaagttatatgatcgcgaagatcgcgacgaatttatttaatggaatttaatagttacggtatttatttatttaaaattattcacattttaaatttattgagtttcattttttataattttattacaatgtttactttttaagatcggtattttggtactgttacttatttgcatttctttcattttgataaagataaatgtgaaattttaaagcaaaattgaacatttaaagttcgttaataatggtataattttcatttttctgttatttaataaagcttttatttgtattacaaaattatagagatttattaaatattttgaaataatctcgcagtctccacttaaatagtctgctttttttgttttaattgtgaactaatttaaatataaattaattaaagggctattgctttctttacaattgcttattttgttataacctatttatttgtttattttattttttggtttaaaaatgacaatttatgcggccggccttgttgaagacccattcgcattctttcacagttcctctctggtggcgaagtggttgttttgcctccctgaggtacgctggttgaacgcctaattgagcaatggtatttactagagatcggatacgggccggacccgtatacgggtttttacggacccgtagcagtcaattcgccaaaactttgaaattgggcggtcaatttcgtaaaattttcggtgaaaatcgaaaaagcattggtaaatattggaaaatttatgtaatttgaaaagaaatcaattatttctgtaccaaaaattttttaagttattgaatagctttcgtttaaattttttatgtaattcttttttattttttaagaaattcttttttttacgaattggatttgtaaattcttcaaaattataaatcattttaatgaaaaactgtcagcaaaattcatgaaatcagttaaaaatcgcaaatttggtcaatttttctattaaatctattaacaaattgcaatcaaattttaaaaaatttccgggaggcgcccaacggccaccgccggatgccaattgttgtatttttaaattttgttgcttaaaatttataacaaaagttattataatgtcttgtatttataaaccgatttttatcaaaaagaaaaaacccttacccgtatacggacccgtattatttttgaatacggggtttttacgggttaagggttttacgggtttttagcccttttcgaataacgaaaatttttagacctaaaattttttatcaagaaaaaaaattttggcaatcaatttttgagaaaatttttcaattcacagtggtgtattttctcaaaaattttcaagtcctttcttagggggtgtattttcccgattttattgcatttttgatgtaatttttgtgaaaaacgccaaaaaaggcatcaaaacggcaaaatgccaaaaaggcatttaaggcacgaaaatcccgaaaaagtcaaaaaaggcataataaaagtcaacgtagaagcctcaaaccaagtggaaattacgttttttatgcttaatgtcgtccgaatcgagagcaggtggtcgtccggagcggggttcatcttcgagctgctcattgccttcacgaaattttgtgaaccatcgcttaactgtagaaagagagagtgcatcattgccctcactttcacaaatatttcgaagagcttgggttggggtagaattttttcggaattcgtaaagtaacagttgtcttaggcgaattttgtccattttttgaaaatcgttcgattttgcaaaagtaatggctatacaacaaatgcaaatggcaaaaagatggccaaccgtccgctgattaatccaattgcttgcctccctttttcaatctctttagaattaaatatcattttttgcataatttgttttttcagagggtcagaactttttcaaacccaatatatcgaaacaggtgcgcagaaaaaaaaagcaatgcctcaaaatgcgagctctatattttatatatatcattatgtaaatatcagactttctgagtatatttcttactatttttaggtggtatattttatattgaaatgataaagtgaattaataaattatttcttgtccacaatctggtgtgcgtactacactgggcagtctgtattcagtttttattgcgtaaaaataatttcatgtaaatcaaaaataaaatagttttgcatcacacattcatttta

SEQ ID NO: 18360 - DNA, 1637 bp, Heterodera glycines
tgtataaaatgtgattttttttttgtttcctttattttgacttatttgttcgaatccgggttcggggttctaattgggtcaaaacaggtgccagaatcggttttcccaaccccgaaaacccctaaaacaaatttattcatgaaaaaaaaatttgtgaaaatctgcccacagataaccgacaagtacccgaaattcttttgaaattttgcaagctaatttataagagctatcgaatgatactaagaatgtttaatttggatgtttctagaaaaagttatggtgaattagttgtaaaataattttatggtcgtgttgtgactgaaagaacatttggccttcacaacagagataaattagtgaaataccgaaaatgaaaatagctttcagtttctgaataattttggtcacttcattctcatttaatttgcaattcttttaatcgttttctttatagggattaacacaattaccaaccaataaattaccaaattcggtttattatttgcatttggcgttgcgccggacactttcgatttgtcggtggaattggcattgaaatgtgagaagtccaccggataaagattggtgattgtcttgagaaaagaatttgtttgtagagaatcagaataatgaaatattcataataattgatcattgatcaatccctttctgggaaatttctaactcaaaaaaagtattcccatttctgtcagaatttgacatataatcaaaatgcgttttctcaaatgtccctttaaaatgtgctttcatttataatttaaaacttccttaaaacattgtcaaaagaagaaagtgttggtaaattcgttgccgagatatctgcggattcgcaatggctaatttggccggactcgcagtcgaagggcgaccgtgccgcactgtcgtcccaatccatcggtggcaaaagggcgagtggacggacggcggcggagggaatttccaattcattggccaaacagcgccttaaaagcaaacgctgagcagtagtaaattccccattcattcacttgctctttctcttttttatcggtcgtcgaatggcttctcgggatttttcccaagacggcgattgttcaatcgaattgaaagccgattctgaatactttgaagccatgaagaaaagggtttaaaccgagtgctaaaatacataagtatgtatacacttttataaaaacaagcaaaagtcttcatttagtcccttgtccatttttaggatggaagaggaaaattcaaatttaaaaattgaggttattgtcattttgttataaacaaataaaaatcgggccaggacgttttcgcgtgttgtttcactcttttttctaacgaatatttattttataattaagtgagtttataaactaaattaaagttgtttcgggtgaatgtagtgacgccccgtgaaaaaatgggtcaaattatataccaatcgattcgtctcgaggagctaagcacggaaaaatatgtctcgagttgaggaaatgccaaaaaccggtttttgaaccggtttaaaactcgaaaatttgagtgaaaaggggggttcctgaccttttaaaacgctcaaattcggacaaatttggtatcattcgaaagctcttgatgagctaagtctaaaaaac

SEQ ID NO: 18361 - DNA, 2821 bp, Heterodera glycines
gtcccttctccaattgcgcgcactttctgctcaattcttccacttttgaactgagtgaattgtcaactaattctgtaaaagtgttcagctcattaactaattgattactaattatgttggatttataattatcaattaattaattttattgcctttggcatttggcgtcgcttcggtgccctccgttatcatttttcgtcgtgccaattccgctgcaatttttgcgtcaattgcttttcgctgggcctccaatcgttccaattcatttccatcgtcggacattgcaaaagaaggccaaatgtggtctaaaaaggggacagaggtttttgtggcgtattttatcacacgaataattcattatttgttagcgaaattcattaaaaattcaaaaatttttatccggcggcgcctaaaaatccttacttttcttaaaaatacgttcaaacattgcaaaatttgctaaatgatttgatttgaatggttttgaatagagctcggcattttgtaaaaaaatttggacttgaatttccataatgatctttcgaccaatttcgtactccggacttgaattcgaacaaaagtcgaaaactcatttttcatcaaaattcacattttgcacaaaaactaatcaaatatactgtatggaatagaaaatagtgattcataacgattccattaataaggttgatttttgtgaaaaattaatttcgacttttgttcgaattcaggtccgggattcgaaattagtcgaaatggatgtcagatttgtgatcagcgaccctgaaaacccttagaaacatgttttcaggggcttttaaaacaaaaaattttctccaaaggtgggggggggggcatcggcagtattaccgacgaaaatggccttgacccggatcctcgaataatccaggcctgaatcccggtccaagtcgagaaatatcattgccaacttttataggcattctttgagtgtgatgcctttttccgttactttggtctgaagtgatgtcgccgagtgatgtgtttgatgtgcttgtgctcattgtttgtgtttttgaggcaataaaataataaatcattgacgtaaaaaacaaaacgccaatgcattcaaatgaaaaataaagtgtatttatgttgggacccacccgtttgggcgcgcgcgtttgggcgcgcgcgtttgggcgccagcatgtttttccacgaaagcttttttctttggcatccaaatccaacaatcttggtatcattcgaaagctcttaacatgctctattagccttaccaaatcgaaaggattttcaagcctagaaaaaattttattaagaaaaaacttcaaaattttcgactttttcgcaattttcagtgtataactttttctgtattgtctagtctttgaatttcggcctccgggacccaaatccccctatattatcgggatcatggtctccgtcccttttttagccgggatcacggggaaccgtcgggatcccgaccttgtgcgggttctagttcattatcaggaaaaagggggaaaagatgctttgcattgcgcttgccagagaagcgcaaagtgagagagagactgtataagtgagagacgaaagaataggcgagagatcgcatagacagacactgaagggaaagcggatggaagcagagacatcctccatggattaaaagcgaacgaccactttttcttctctttctgataatgctgggataaactcagcatattccaaattacctgcagcagtggctttcttttcataactttgaatcaattagctaattaattactcttattccaagacccaaattgcgccatacaatggcccctaattgcctgccgcccgaacttttgttcgaaattgtgcctttcatctctcccaaatgcgctattccaaatgtgttctcgtcctgccgactgcttcacatccttttacattctcgtgttgtcaaatggaaagagtggatggaaaaggtatgcttttcaaaaatgcgggcccaagttttagcggacgacgcccaactcgtaatgctacgacgactcgaaaaaaaattgccacgaaatggttaattatgatcattttttggagagttgggcagttcgtacaataaaaaaatattaattaaataagcctaagcttaggcctaggaccaagcaagcctaaacttggcccaagcctaggctaagcttaagcctaatgcttaaggcttagtctaagccctggtacgaactgccaattgtacgaactgcattcaaaaaaggaaaagtacaagtttgttcggggcagtacgagattggtttgaccgttataactttgttagagtcggaaagtattatattttttaaatacataaaaatttacattttttaaaattttatgtggttctaagcgggattcgctctgactttaaatggtatttgggaattgctaatgcatccacaaaatttatttacattttaaattaataaccatatgattggcaaattccgacaaaacttaccaccccagaatttggtcgagttcttgtcccacgacatcgttcaacgcagtaattgcagcagttaaatgctgaattggcacaaatgcgagcgcggtgatcatatgagacgtttctgcgaaagcggggtcacttcgatagcgctaaacgggagattatttcttctttttgagaactgaaacttacattttgaagtccttcggaaatcaggcgcttgtctgaaattcgcatcgccagaatttcatgctgatgtctacattagatttgtcgaaaatgtacaggaaaccctcgttcatcatcttttccttttgtctaatagtt

SEQ ID NO: 18362 - DNA, 2757 bp, Heterodera glycines
tatatggtataaggcaaaaattgaaaaaccccgaccccgaacgattagtcaaccccgaccccgaaccccgacgcttccaaccccgaaccccgaatttcccaaccccgacgtcagggttgcaaccctaattaaaacggacgaataaattggttttgtgtgtcctgatttttcacgtttgtcctgtgaatatgaattttttttttataattactttttgttattgtaaattaatgtagaagtaatttcatggataatttccctggtttttataatcaatcgaaagcagaaaattctcattatattcatttcataaataatttattgctaaaaaatttttcctaatttcatttgtataattattaatatctattgccaattggaaaaatgaaattatgtattttattatttttacttttgatcaatttaattgatcaaattggatcagaaaagaaaaagttgaaacaaaagtcatttgatgaaatatttggagaaaaatgggaagaaaatgaacaaaaactgaaaaatgaatagaagaaacggtaaataataagaaaatattttcaaataaaagataaaattaaacaaaaagaaagaaaatattcaacaaatgaatggaaaaaattaatacgaaaattgcaaaaagtttgggcacaaatcaaacatatattcaaaaattgatcagagaatttggtctccaaaaaattaaaagtcataaatcaaacgtgatgaacaaaaaaatgacattctgaaaaaattcatttcattgaccaaaaaatttaaacaaaaaggaaaatattcaaaaaaacaatggcgccaaaattatgccgaaattttttaagaaatcggagtaagttatgcattaattaaaagatggaaaaacaatttggcattagccataaaattttatttgaattaatttattgtatattttttgttttaaatagcgaaagattttaggaaatgacatctcattcttcttggatttattgatgattttttgttatgaccaaaaaaaattcatattttttaattaacgactccgtccctttatgaaagtcaaattttcaataaatttattcaacaattttcttgatgcaacttcaacaaatcgacttgttgctccttctcacgcatttagccggccggccttctcaaacaaatggagtgccaaagttaacgccttcagactcaattttgctttcgtccgtcccacgacgccatttgaacagtccctcctctccccaactaaataggcattttttggtgaacacaaactgctaaatccatcatggcaattactcggttccccatgagttgacgccaagccaatatttgacaatctcaccgtcctctcgcgtttcatggccccatccaatcaatttgaatgcgtggcttttaaagaaaatgcgctaatcaagttgaaaatatcaataaaatattttgagaaaatcgtaaagaatcctctcaatacttacgtcataaatgggaccattgacgagggtgtcctaagtaaaatttatcaaggaattacagtgtttttgccttaccacgtaaatattgatccgtccattgcttttgccatagtagagcaaagccctattggctgtaacaccaacttggattggtccgttctcgtaaatctccatcatcatgtccgcttcgcggtttttttctaatccattccagcgcgacggctgacttgacagatctatcattttaatttatttaaaatattcaaccgcctttcccagccatagctgattgggatgtccaggggtattggattaacttttgacactcactgaaaattcggccctccctgtaaccgaatggcgattgaccgtcacattcttttttgcagaataacgattcgtcaggttcgctgctgttgatcaaatagggcttgcaacccaaacccgttgtgaaattcgtgccgctgactgcgccttttgtataataccattgccatatatttgttgcagatgcaccatcggcacagcttgtgataaaacaattgtaaatataaattagcattgttttgaattatgcgccctctttgtcgctactttaaaaagtaataaattttttaattacgctttattaatgttaacttttgctactttgaagtacttgcaattttgcgattccaacgtgtcttgggcagatacgtacgaagatgggtaattggaataggtgcgtatgccttttttgaggcgttcaatgcaaaaacggtcggtgagtaccgatgcagcggaaacggacgcgcatgaattacaagcacctttaaatggtagactaatgtctgaatattttaacccaaaattttgataactctgtgaagcatccgatttttttttgtattcttatggcgatattttttttttaaatgatgaaatttctgaaactaggaagccttattgagaagccttgggctatcgatgtttaccaatctttatcgaagttggttgactatgaaaaacaagcttattgtaaacattttttaggttgaagtcttaaaattagacaattaaataaagcccaaacaaaacttttcgcggaaatttattattttttctgcgttcaccaagaatttatataaaaatatgatagaaatttttgtcaatttatatagtcaatagatttcttttccttaccttggtcagttaccattccgatgaaatccgcacattccggccactttttgcgcgcgtcaaattcttttggcaatttgaccccattaggaatgggacgctaaaa

SEQ ID NO: 18363 - DNA, 3366 bp, Heterodera glycines
agtggcggatttataatacgcgtcgacccaattttgatcgctccttataaaatgcgtcagaacgtaaaagcggaatactcaagttggtgataaatgtgagataaagaaaataataatgcaataaatgtcctttgttcgcccgataaggctctttttctcaaaattcccacttttaccccctcttatcaaaaaattcattgatttaaaattgaaaaaaacaatttaaaaaagctgacgcagttatgtaaaatggatatttatttattattcaaatgaaaaattgcaaaaacaaaaattacaatctattattctacaactgcaaccactgggacaagaatggaaccgataaagttaaagtaaaattaaagataaagaaaaatatttctaaaaattggctacaaaaataaaacaaattagtaattcaatgattagaaaaaaaatttaatattcaataaagcttaaaactgttggaaatcatgaaagaggaaaataaaaaaaataaaaaagtaaatatcataaacaatatgaacaagtcattgaaaagataaaatataaaatgactttaaaaaactttaatttcatataaaagtaagttgtactaaaattaaattatctcctaacgatttcctttgatcaagaccatttctaccatcaagaattattattatgataattgaatttgtcaatgggtgcaatttataaattaaaatgaccaaaacaccaaaactaaaattaatttgtagatttagacaacaaaaattttgtaaaaaattattacgcaaaaacaaaatttttttaatatggatgggcgtatagacgaacaaaattcttagatgtgacaaggagcttctattggattaaacaattgtcttgaaaaaaataccgaagtgcattaaataattattttaaattatagaattacaaatttttatatagtaactaaataactattggattacgtaataaaatcccatgaaaagatatataatactacaaaaccaaaaagtataaaagaaggataaaactatttttaaatcatcttcttgtctgcgctcatcttgcatattctcttcgtccacagggctatttgtcactttgttgtccagcgattccgctaaaaggaggtttccgagtacattgattgcggttttggccttcttcaaacgcgcgccgtcctgcatggagtaggccattagtccggtttccactaatgctttgcgtttcaggtccttatcggtttgcgtttcttgttttgataaggtggtagtagtagtagtgatgcacgtgtcagagggcaggtcactgtagggaacagtgaacactagggccttccaatcgaattatccaggcataaaaattataattaattgataataaaattttaataatccatttgaaaatctattgataataaatgaaattataaataataaatttcattaaaacgaattcggcgcaggcaatgccgtaaactagaaattctaaataagtaaacttacttcaatacataaccgggtggcaattaatgaaacggaattcatttaaataaagtgattatttcacaaatcatacataaattatttattgaacaaaaaaaacagatttaaaaataaaatgacgacgactattaaaaatgaagggagttgattgaacatttatttatttgacaaattaattcttctcacacacaaaacttataagtaagtttttttaaactgtaatttttcaaaaattttttcttaagtcgcgtatttcgtctataactgaaaatattatataattttatatgtatatacaattttacattactaaattgtgtaaatatatatatatatatatatataataaaaaagtccaataaaaaagtccgtgaaaataaattaaatccagacattatatatgaatgcacataacatttcgaataaatgaattttttcaaaattttttaaataaaaatatggtttaaatgtttatcttgaaattgctaggtttataagcagaaaacctaataatattcattgtttcaattttgttattttcatcataatatatttaattagcctatgagagtggctaattagacatcgcatttacagctgaaaggaattttttatttataccaaaattcttacataatggtttaccatcaatatctaaaattaaaaaaaacctatctttctttgaaatatatttgatttttaccaaaatatttctttataatttttcaccacttttattcactaatttctcttcagatatttaattcattttttagttgaatgacataaagaaaaagaaatctgcaatttatattatgtttattttagtcagaaaatctttttcttgactcttgatcgagaagcctgctttctttttttaaatttttcctttgaactacatgcgaaactttgcatgtttacttttttatttgtttcaaaacttttatttaaataattagtaaaaagctaaacggtccttttttctctttaaaaaaggtgtatttatatttttctgcatattaattggtgacgatttttaacatttttgacacaaatattttaattaatttatgttttaaattttcattttaaatttaaatatcgcttaatgttcgttctattaacttaattttatttttattttcaatgtttcattgcttgcattcattctttactgattaaatgattgccggaaagaaaaattattaaagagataacacgtaaattttcaaaatattttaatcagtttctgatttggtaatttgtaggcatttttaagctgggtacatttatttatttcatttggctttgaattcttccctccgatttcatgtcctcttttacaatgagttttagtatggcaaattgaaaatgtaccttctttactatattagatctacaaaattacaattattttccaacaagtaaaaaaaggtaataagaaaaaaaattcaaaatttcaaatttttttaaaatttattttttcgtaattgtctaatcaccaggcaatatcttagaaaaagcttctaaaaatgctaacaagggaacctcgtgaactgtaagtcgaaagtgggtataaatttggtaccattggatagaattcatttaaatattaatttccttcctttatattctttgtaataattgatccagtccacgggtgttggggaaggaattcaaattcttctactccccttttaattttcttttgtattcgtgtagcatatcgctcactcttacagatcaggggccttatacccgttttggcagttaaaataggtaaaccacggttaagaatttaaatcaattctcgtcttcatgtttttagcacatggttaggcttaacaacggtacctcgcttaaaggg

SEQ ID NO: 18364 - DNA, 2032 bp, Heterodera glycines
aaaattttattttagccatttgtaagtaccgtacttcctttcttgcctttttttaaaacttttctattaacgagggttgaggtacgattttaactttattgttgaaattgcctttttcgacgaccaattttctgagctgttccaccctatcgggcgccatttcctccacccatcgcgtcaaaaagcccgtctcggcgtaggaaaagcgccgacgctggtccttttgcagttcgtccaccaccgtattcaaaatgtaccgtactccggcattgctaattttgccatttgctgttgaagggacaaaaatgacgttttataaatttaaatgatttagtggggtttcaaaaatatgaagccttatttattcgcaacagtttgtggttttttgagaggccaatgacgaatattttcaaaataaggatatagactttaactatttttttagactttttgtagtttttgggaaagttttcaaaaattgttttattttatcgttaccaaactgaattaaaatccaaaatccctatgcgccgactattggtccggcgggccctcccccccccccccccaaaaaaaccccgttctttaattgactcaaatggatttttttataatgatgcttttaaaatttcatgtctctagtgtagtgttattttttaatacctccggtgtaataatcatcaactgttttcttccagcccatgtcattgtgccttaaatattaaaaattcaaaaatgtataaaataaaacccaaaggagacttttaaaaaaatctttacccactgagcaattccaatttttatgtcattccaatttttgtataattattagtcattttatttttagccataaaagctttattatatattttcattttttaatgtttacgtgtggcaaatcaaatggacattgatggaattgttatcggtcaaccattggggacaattctaaaatttatatttaaaatataaaaaaaataaattaaacaaattatcaaatgcaaaaaaaaacgaacattccaagcacagaattgctccgccccaccattggtgcgtgaattgtcgtcctttctcggcacaaaaatcaacacaatcacagcaactccgataaacagcagaaaaagcaaagtgccaatgccaaaagccaacaattttttgttccgggattccatttcctgggacaatttgtattttttcttctgtgagaatttcatcagaaaatgggaaaatattaaaaataaacggctcttaaatattgcgagtcgggcaaacttttttcggtgtaaccaaagggagcaaattaaattattaaaggaactaattaattatcatcctgagcaattaagcaatctaattgatcaatagtgccaaatcggtttttttgatggggaaccaaaatctcccagtttaaaagtatccgattcacaaaatccgagcaatttcaaaaggcaacttcaacacaataaaaacgagaatgctttagcatcagttgtgaaatgctctttaattgcgtaaatttgcgatggtttgaccccaaaagcgccaaaactgttacccaaataataaaaaataaataaataaaaattttttgtttggccataaaatttttatttcgacacatccaataaatgtgaaaatgtttgtgcttttcctccaccattccctcccttaacatttattttattgccgtgtttcttttgatgtcgcgggaaatgggcgacaaaagcgaacggacttttattacaatttttcgatattttcgcttggattatggccatttgtcagtttgtcggcaggtggtggttaacttgtgaacaccgcggctcttatcagacagagtttgggcaattatcattgttatcagtgaagtgtctcaccttctctctctttgttcctatctcttctctctctctctctcactcctctccatctttttctctctcgctcgctcactatctcatcaatattatattatcatcgctttggcttaggttttgggccgaatggaaattggcgggcgcggaaaacaaaa

SEQ ID NO: 18365 - DNA, 2049 bp, Heterodera glycines
aataacaaaacaaagaaatgaatttaggccataaaataaacataaattttaacgacggagagtcacaaagagaaaaacacacacaaataagaaaacaaaaataattaaattatttgcatatttcgcagagaataattaatgaatgagtcgttgctttttttgttggatttgcgctataaatttgggtatcacaaaacgaacagtgagagaaagagagggagaaaagtgaaaaagtgccacggaatcagtcaattatttcattgaaacgaaacgaaagataagtaagtgtttggccatcagtgatttggcattggcactaaatttggcggtatgacagaaactgaaagttcattaggcaattcatcatcttttattgtttgtcgtcaatcgaacactgctcccgtcatcatcgccataatggtgccatcggttgaagtccacgttgaacaccttcaagcacaaatgatgattggttattaagcgagatcaaagaatgccgcccctcattaggccccccccttaattaccacaattgccccggagtccaagccgccgaatatgagccgctggtttgtgctgagtgccaacgaacggataggactgtcgcattgctgaaatgaaaaaaatgaacaaattttcactaaagttggcatttgtgacacacgccaccacaatgttagctaatactcacggcaaaagtgtagagcaattgcaacgtgaaaagccgaaggatggaaatgcggccattgtcagtgccgaaaacaacgaattctccgtcacgggacaaaatggcacagagaatcttctcggcacatttgtacccgcgctgtttcagcagctgaccattggtcgaaaaggtggcgagggaatcgttgccaatgaaagcctttgagggggcattcaaacaattttaattaaaatgaattttgccaaagaaattaatgggttggcattttgtaggtggatagggcgtggcacttcgccagaaatgtaaatcaacccccatttaaataattaccgcaatgtaacagtctctgctgaacagaatgttgttgattggtgccaatgtgtccgttccgttgccgtttgagcagatgatgctgcgcagcaggtccccctgcgtggaatgcatcagaagggcaccatccgtggagccggagaggacaatgccatgctcagccgaaacgcaaattgctaaagcacaaaaaaaccaaattaattaagtgcctttaaatttaaacgattatgcacccggggccaagccgcagcaaaactgtttgcatttctcacccacccaccactgatttccgagtcgtgtccagtcaaaatggcacgaggcgacggctcttccccaggcatattgtaatccccgacgagtaggcccaagtgttggctgaagtgccaaagcaccacggtacaatcggcactgcccgaagcgacgtaacagtcggcgaagagactaaacggggcggaacgatgttgggagggggtttaagaaaatgagtggtggccggccactctcgatgaaagtctcgaattttgaatccaataatgggtctatctttagcaaatgctgtctcaatccctccccaatgagcgcacctcgtctcggaacgtgccaaacatgtgaccacgttgccatgaccgaacacaacttgccggacttgtgctgaaaaggcgtcgatacaatttgattattgctatattatgcccaatgtccgtcctcaccattgcccgtctcaatcagtcggaaactgtagtcaggataaccgcacacgatgatgaagcggctgtcaacagtgcaaatgaaattgctccatgacactgtcagccgttggtccaattggtcgccaaggtgtcgtttcggcactttctgtgacggattgccaaccgcgagcagcgggtcgacagtgatcggcaattcggaggtggaaatttgtgacgttgctgttgatgaagcagacgaatccgctgcggccgatttgtccgtcgctgaggcggcggcagcgttcaaaacgttggtgccggacgactgagtctgggcctgca

SEQ ID NO: 18366 - DNA, 1789 bp, Heterodera glycines
catatttctgggggttttccggaataaatccatatatatccttaaataaggtcttattgaaattttaaaaatatatcacaaaaaaattcgaaaatcaattttgtatatttacacaacttttggcattttttcacccattttaatcctttttttcaattcatatttgaccatttctcggatttatagttcatacaatggatagccctatttatcaggaaatatttgatgaaatttcagttgaaaaatccaggtccaggcctggatccaggtctcgaggagcctggattttttctggacctggatttttgcccaggaaatccaggtccaagtccaacatggaatcccggaccaggccctgcttttttcaaaatgtcgagtctaataaaaaccaattttttttaatattctcattaataattttatttgaaaggaattaaaagtgcttctgcccactgattgatgaataatcaaaacattcattcattccgacgagtaacggataaaccatccgacgaccaccaccaacgccagcccatttttacataaaccaaattaacaattttattcatcattttcatttttgcacataagcgttatcattttcataaaataataaatgaatttaattaaataattaataataataaatatataagtgcttgacaaatacatattatcccccgaatgggtcggtgtcttcaaccccacggctttccgtttccgtgtcagtttcccttcaaaacagtgcttttcttcttttttccgccggcattggcatccctcctagcttcttttgaacaattttaattccttttataaattaagttaaaaatgcgagtaattattcatctcacttttcttctgttcgcattgtccgttgttctgttggcggatgatttccctgaggctacaaattccgggccgtaagcatttttagcgtaaaaaagttattaaaattttaaattgcatcaaatttgaggctttatctatgcgaagagcgttcgcgggaagcgcatttcgagaccgaatacgtggcattggaccaatgcacgcgctggggcacggcgcagttgcggcacaattcgttcgcccttcgatttcaactgaccgggaaatgtgaaaatgggtcagcattaaaatctgggctccaagatctgaggattatcctcattttgtggttttttgataggtcaatgagggtttttttgaaatgaggatttttgtggctttttgagaaattttgaggcttttggagaaaagcgtaagaatctattaaattttatatttacttttaataaattggcataatgtttgacaatcatttaataatttgggtttttaatatatcttctaatattttgaaaaagtctgcatctgtattttttttactacataggttcaatatcagcaaaacgaaaatttagaattaaatgtgccacaaaacacaaaatgcttattgctaaaaaactgctcaaattgatcatggacaatcaaaaatataacatttgaacaatttaagagtgttttgaatgaattttgtaaaaatgcggctttttgacctaaaatgaggcttttgaaaattttaatctgggagccctgattaaaatgcttaacgattgaaaaatcccgggtcatatttcagcattttaatttgttatctcgggagtttggacccgagcggatcaaattgggcttatggcatgagtcctgaaattcaattccaagtgccgaaccaccaggaagtaagtaaacgctaatcaaatgccgggtacgaatatcgataatgtga

SEQ ID NO: 18367 - DNA, 1030 bp, Heterodera glycines
  unsure (1)..(1030): unsure at all n locations
atgttcgacaatcatttaatattgggtttttaatatatctctaatatttgaaaaagtctgcatctgtattttttttactacataggttcaatatcagcaaaacganaatntagaattaaatgtgccacaaatcacaaaatgcttattgctaaaaaactgctcaaattgatcatggacaatcaaaaatataacatttgaacattttaagcgtgttttgaatgaattttgtaaaaatgcggctttttgaccaaaaatgaggcttttgaaaattttaatctgggagccctgattaaaatgcttaacgattgaaaaatcccgggtcatacatatttcagcattttaatttgttacctcgggagtttggacccgagcggagcaaattgggcttatggcatgagtcctgaaattcaattccaagtgccgaaccaccaggaagtaagtaatcactaatcaaatgccgggtacgaatatcgataatgtgaaaaattaattaaaattttaataaaataattatttactttcctttctcccactataattgaaaaattttgtttcattatcattttttaattttaatgatggttttctgtggtctttgtttggtggcggaaattcccaaggatcataaaatccgttttatggccgagtaaattggcacgaaaattgggagaaaaagtgggtggatttattataaacccacaaatggaaaagcagtaaattatgaaatgatttatcaactcatttgcaaatatttagagcaaagtggctgaagagtgtttggaatatcagaaaaaattcgacaaaaagataaaccaaatcgcaagtcattggcacggcgtccgcgtgagcgcgccgaaagcatttggcggcataatgatcgaattgtcaattgcaaaagaaaagtggaaattaaaaatggagttggaatgggacggagtcgctatttaaaaaccatcaatatgaaaatttttcatgaaaaaatatttataattttgctaaaaccaaccagattttaattcttgatgttatt

SEQ ID NO: 18368 - DNA, 749 bp, Heterodera glycines
tttgagtttcagattctagcaattggagtcaggatattgtgttagcttatggtcaaccgccagatgatatcgaacaatcatacggtaaaaaagattcttgatttgaaaatattaatatttaaaacattgattaataaataatgataattttttatatttaaatgtttcattaaatatgaagataagaagaaattaattagaataaaaaacttgcttaacatttaaatattttttcttcttttttttttagtttatattttaatttttagtattaaaaatgagaaaaaaagtttagtaaaatttgttgattaatgtttagatcataattggtacatgcatcctaagcaagcagttgaatcatcaaaaagttattttttttgttttttttgtgttttttgaactttaaaattaatttatttttaagagaaaaaatctaagacaaaatcggagagcaaacattcagtagtgaaaattacgaaaggcgataaagcaaatgcttgttacgtttgtggggattttttcaagaaagagcgcaaagaaacgttatttaaacttggaggaaaaccagttaccgtatttgctcttttgatccccccccccctaaagaaattttgtctcgccccccggggctatcatgtctctgctgctgctgatgagagggcaccactccccccgccgctcaatcaatttgcggaaaagcacactatccctgctacatcgccgcagggtctatcttcaatcgctcgtcc

SEQ ID NO: 18369 - DNA, 1796 bp, Heterodera glycines
cccctctttaatctctctttctttctctgactctctgtcaattctctctgaattcttagtagcgaatcgactcaaagcgacgcgcacccatcgtaccattcattggcttggcattattaccttcacagcacaccatttggcattgctccattccatctgccgatgagacctccacacccctttttatcgacttcttttcctatttacttctcataccaatttttctcaaattgttttatttttctgaacaaaaagtttttttctttttttgaatttattttcttatgcattttatttccttgcaaaaactaaaaaatttaaccatctgaaaaaaaattatgaacgaaaaaacatacgcttaaaaacacttttgcatatagtgccttttttgtatgtaaagcagtattttggcatttttctaatttatacgtcacctaattatctgtaatttttggacccaatgaaaataattagaatgtgtagaagttcaataattttgcaaacttagaacaatattactaggagatatttatatcgttctaagcagttcctcagtagaaaaaactgaaaaatcaaaaataagataaaataaataaacatcgaaaaagaatgatggtccatggtgaacgtatttttattggttcatttaaaatcaaataaaaaataaacaaaattaaactctttattaaaaattttattaaaaatgatagtctttaatatttttttgttaaaataaatgtgactaatgttaaaattggcaatttccttatttattaaaatgaaaaaataattttttttattattttagaaaattattaaaaaatttctctgcctttttggatatgaattgaaattaataaaaatattaaaacataataactttttataaaatgaataaaatggtctactttggattaaacatttacaacaaaaaaggtatatcgttgaaagaacagatttaaatcttatcgaaagtttaattccttttaataattacgcagtcatccaatagacgaattttttatttgacaaaataaaaatatgtaaaaataaaaaataaatttaaatttaaaatgactaatccgaatgataatttataaatagtcattcctcccaaaatgaataagtcaacaaacattaaatgaggatgaaaaataaatattaatataaaaaattggagcatccataatatttataatacaacagtaaaactaaattttaggcgtactttttcaaaaataatttggaacaagaaaggagggacccatccatgcctataggctctgacggaaaaatttaacaaaaaaagttggctgtagtaaaaaaaatgtccctggattttaaaatctcaaaaaattataaaacaaaaaagaaatcgcaagtagaaaaataaattaaaataatatttatgcatttatcagttattatgttacttgaaactataattttataaacataaaaaaatgaaattaagaaagatttttatttaaatgattattatttaaaaaatataaattttattttttcgaaactgaaatgatgaatgtaatatgaaatttaataagcaaaaatatattataaagaaaggcttattccatattttgtaattgataattaaatatttataaagcaagtcataagactgaaataatatcatatgccaagtcgaaatcgttaacaggtcctattatgaaaattagctaaactttaaaaactctcacgtggatgaaaaaccgattagaatcaattttttattaaagatactaaaagtcttgaaaagtggtactttaaagaat

SEQ ID NO: 18370 - DNA, 3572 bp, Heterodera glycines
  unsure (1)..(3572): unsure at all n locations
tttagcacattcttttattacatatttaagattttagccccttttaattccagctcttacatcctacatattacccatggatggtaaaaaaaccgtcaaaactcattttatttttttgtcgttttgttattttccttttttctcaattttatgttagttctttgtttaactataaaaagaacaagaactttgaaaaagcaggtatcgcttcttcctcttccaaactaagcaatatcggtatcattcgaaagctttgagagcgtgactgtacaattggacagttgacaatccgacagtggaatcctacagtggtggacaatcggacaatggacaacccgacaataaattacactcaaagatatgaaaatgccgtcccgaaggcgatcgattgtgccgatctcaagaaaataggcaataaattatgagtttttggaataaccctaaaaatcaaacgaaagaaaaattgagagaaatacattataaaaactttgtttgaattaaaatataaatttaaacctcaaataaaaaaatattaaaattaatccatataaaaggtttttgaggttacgcacctacttcctcccctttatacacttttgcttgtgttttatcggccttctaacaatgccttttttacattgctgccgtggcggccttgtggaattatgaatactcagtcacaacagtttgattttttgatgaaattttgtaatattggccaaatttaattgcttttccattacggaatataaaagaaatcttcattttctgctgtttcccaaccttcacaataaacaaacacaaaagaagacaaacattggaagctcttggccagcagctgctaattatttcttaaccacaaacgagtcaacaaaaatcacgaatcgatgtcgcaaagttgaaattacatttcagcgtcttaaagcgacgaaaagcaaagacaataattttagtaagaattggcccactaatacgaattgtatatcaaaattaaaaaatttcttctatacataccgtatattctctaatttatccccaatctaatccttttatcttaatcccccagtctccaattatcccgccccttttgaggaggntgaaaaaataatcccaatcccaatggggggataaaagagcatatatttttctgttatttttattttagaattttacttatgaatgaaaaattatattattttaaaaaatttcgaattttttctactagtctgctaaatttcaaaaaaattggctaagtttcaaaaaagttatggccaaaatgttaggaaacctacctgtttcctggcgcacttttggccataaatttgttcaaacttgatgaaatttttttgaattttgcaggccaatagagaactgatagggctatcgaatgatgttaagattaaatttttaattaggcttgagcaaagttatggttagttttttgttgaaaatttccatttgatggtttcttttttataacgccctttttggatgacttttttataacgatatattagagtgccacgggaccgggaattttgggcaaaaccgggaccgggactttccgggacctgagaagccggtcccggtcccgtggcactctacgatatttcgccactaggatctcctggtacttatatggttcgtacgtaaagtcgaaatccctaaaaagtcgagaattcaaacgtgcggcagtgaaattattcaatttgtccatgatttaagtaagaataagtgcttaggaaaattatatatgtcagttgcggtattatatgaattcgaaaattgattccccattattgttgtttctttgcatttggttatattgttgaaaaattttgaattttcgacttattggggatttcaattttaggtcgaatcctttccggggttcgaaattggtctaaatagatgtcataatcgtgttcagcacccctgaaaaccatataagtgactttctaagtaaaaaaaataataatttgtggcgtacgaaccatataagtaccgatctccttccctcagcagtttgggggtataattacaatttactatgacaatttggaaagttacatttttttttttgcaatttacgcaaaattaataatttttataaaataattctcaaattgttaacaaaaaattattatttttggttaatttttcatgacttttctgcactttttcgttactttttgagctttttatgactttttcgtccaaaatttaaaaaaattagtagattcaatttgaatgggtagcgggagagatatgagcgctgagattaaaaatcaaataatttttgaagttttaactaaatgccaaaattttgccgattctttagttataaataaatggctgattcttctgctcctgttgataaagaggagccttgggtcaggcgctttccaccatacaggtgttcgatagaggttgaagagctcaatgaattctatgttcttcatcaacaagtcgtgcccaatcgtgttgtgccatgctgcgtggattgtgtcgaaattacggtaaaattcactcattaaaataaaaaaagacaaataatttttaaatttgtttgatagacatttataacaattttttaaaggacatattcgaataattttgaaaaaaatcaccttaaaataactaaaaacaaaactctcatttatgggattttaaattagattcgatcaaattcatttcattcataggaaattgctgcaattgcggttgagaaaataaacagcgatcggatcagtgaaggaatgaagcctttgaatcttgtcaggatcatccatgcaaccacacaatacgtttcgggcagaagcttttgtcttcaaatactttttaaacagacaaaggtaaatggtgagtgattgaaaatttttataattttcaacaattatttggcttctgaaaattgaagatttaaaaaagatttaagttttacgtaaaaaatatttttatctctaccaaagattttcgggaagaaatcattttcgactaattaactctttttgtttggtctcatttttgactcaacttttgggtttaggttttaacaatcaaagtgtggcctaaataattaatgccttagcataaaaaagccacttttgtacagcattttaattggtgttattcatttaagaattaaaaactaattttcggttcggtcctatttcgctactcaaatgaaatttttctcggtgttgaaaaaaactatttttgaaccaattctcggctacttggaaaattctttttatatttttcgttttctcatgcgtccaatgaagttagcattttcttagaaaaatgttcttctcattgagagcttccgaatgataccaatatttgaaatttgttgctaaaacccacagaattgtaccgtggaaatcactcattttttcgatttctggaaaaaaactaaatattcataaggtccttcagacctgtacctgtatctgtattcccgaatgacctgtaactgtatttcctgtacaaaaacaaaggactgaaaatacaggctctttaacccagtttttgatcaggttcaaagtgcgcaaaaatgaccagaatag

SEQ ID NO: 18371 - DNA, 1040 bp, Heterodera glycines
tgctccccataattgtttgagtaccccaaacggacacttgaaaaaatcgatttttttgttttcggggcagtccccccgaaccgatgcgcccagatttatggggagaccgaatccttccggaatagcttccctatagcctgtactttaattctgcgttggatttttgctccccataattgtttgagtaccccaaacggacacttgaaaaaatcgatttatttttgttttcggggcagtccccccgaaccgatgcgcccagatttatggggagaccgaatccttcgggaatagcttccctatagcctgtactttaattctgcgttggatttttgctccccataattgtttgagtaccccaaacggacacttgaaaaaatcgatttttttgttttcggggcagtccccccgaaccgatgcgcccagatttatggggagaccgaatccttcgggagtagcttccctatagcctgtactttaattctgcgttggatttttgctccccataaatgtttgagtaccccaaacggacacttgaaaaaatcgatttttttgtttcataaatatttttttcagaaagtgctctaaagcgcaccaaattttatttacaacttaattttagcactctgatgctttagtatcaaaaaggaagatggagaaaaaattttttaaaaaatttttccttatattttggttatatcgttttgcttttggtggggtgcttggaacagtggaatcatgcgcacccgtccgatctggcaagttaagcaacgattgctgactagcaaaaggttcggtgccgtgatgaaacgaaccagcactgcttaccccgcggcacccggcacggtcccccgaaggaatggatttaattaaattctctccttcggggatttttttccattaggtcgtccgttagcgttcgattgctctagtcaatttttaaaaatttttgttgaaatatttgtcgtgctctgaagggcggggggggggcgggggggggttttttttttttcccttttttttttgttttttttttttaaaaa

SEQ ID NO: 18372 - DNA, 1849 bp, Heterodera glycines
tctagagtctagtctatggctattatttacggataactttgagctgatattttctgctctgtcttctgtcgcttaattatcaatattaatggaacgtcagagacttagaaattttttgtcttgagggttcaagtcacggaccccgacttaggagagataatcttattattcgctaggatgctctgcaaaaatatttgtgtatattgtcattggaaacattttagacgatatcttcgggatcggtgatttttgaagggtttgggcaaaaggaaagaaatacatagttttttaaagaaaaaatagggtcgattaaaggcattcgaaaattaaacccattaagctaattgggtaaataattttaatgctcgcgagtttcgatctcaatctcgactcgataaaagtctcctatcggcgtgccggacctcaaaaatctttttttaaacacttaaagccaattatgatttcaataattcactaaatttatcctaaaggcatacataaaatacaatttgtgatcaccgcaacaaaatgaacaattttataacgttaaatggactcaaattcattatccaattccatctttcatttttgtttgatcacttctcagcaattcattctgtcacttttggtgctgatcacttgggccaggagtttcgtcaagaagcctaaaaatcaaaaaattatatacctaaattgaatgttagaaaaaaaacatacactgatccgtcctctatttcgccatcatcaattcgaatgtcaatttgattccactggtaaaaacaatcccatccaatcgcttcctcctcccatttggcccatttgctttcgtctcgctcaattggacaacggatcagcagaacacggttgctaaagttaatccttttcaatgccaattgttcccgtgtcaattcgttggtcaaataaaatggcacaacggagtcatcgaaagaataaacgataacaataaaattgacgggagatgaagcattgaaaaatgcctaaaattaaaaaatacattaattaattagttaattaataatggtaagcaccgtttttaaggcttcaatactcggcgacaaaaccccatcacccatgtccataagcaacgagcatttgagcacctttggcacattgtccggacggggagtgaaaagccatttggccaccgcttgtctatccgatgccgtggcattgtcatcggccggaaattcagtgaagaaatcgtcgaagccatataatttgacaatgcgaagtgatggacattcattgagaagtgacggggtgaattgacgcaaacgatgaaaaattccgacgggcaattcaaagccatgaatgtttttttcgatcattggccaaatgttgcgcaaaatgaactccaaagtgcggcgactgttcgtgcgcatggccaaattaatttgacatttagcgaaaagtgggcgaaaatggcgaagaaaagcgatggcactgttgttgatatgtctgaaaatgaaataatggcagacagaaaacacaataaatcattcatttcaccttattaaaatgtcttcgaatccgacgactttctttggcaacggcttttgcggaatttgcatcgatttccaacggcaattggtaatttccattttcttttggccattttctccaattttgttgttaattcgaatatttccaaatgtccatttgcgcgtcttgaaatgttcgtcgacgtaaaagtcaaatccgtggctaatcatcgcaattccgaggccaagttgagaaggcgtaatcaaatcgaacacacaaagccaacaatcggcggagatgaagctgaaaaaagggaaaagcaaaatttaaaaatgaaatttcaaat

SEQ ID NO: 18373 - DNA, 2099 bp, Heterodera glycines
gaggaattttttaattgaagattaatcatttaattaatgttttcacgcatttcagttggatttgccacgatgtttggatggacattttgccattttttcgtcgtcgtaaactcggcctcaatttggcactgatttcgccacgtttcgatgctttggtcgacacgcatttcaatggccaatcagaattggcgatttggaaagttatcagcaggattcactaagacgctttcacagaggtgccgaaattacgtgtgttaatcgattatgacaatatttgggacaaaggcagcaatttgtatttgcatttgcatacatacaaaatcggaagcaatgcccagccaatttgggatgtttttgtccgtcaaatttggccaatttttacgacaataaatgcccattgtttggactttgaccatgctgataatttggacactttgcttcgtctcacatcgccgacaattctctccaatctgaacattaattcaatccagtcttatcgtggtctgttccccgacgcgcttggtgatgaatttgttgggccaaatgcaactccaactgctggacaagcgttgtccaaatggttacacacgccgagaactgatggccaaccgaagcgattgcattgcgttaatcctcctcgaaatcttgaatggatcaccaatttcaaagaggtggtggtgactaaattttcgttaaacggctactctactgctacagtttatgcgtccaaccaatccacccgatgacattgctcagtttcttaggccataactttttgttttcttggtcaatcaatacctacttaattaggtaattacgtacacataaaatacaatggaaatggacgaatttgcggaggaaacaaaagtcaaatacaaacaaacaattagccaatattgaaagggcaaagtgccaacatcatttcactcatataatcgcatcaatcaaccattaaattaattcattcatttcttctgctgatcactcgtccgggagaagcggcgtcgagaagaagactgaaaaaacgatgattccattacactttaagtcaattcaatttttatgaattcaatggcactttatgagtccaatcaactaagcatccgtgttatttttttttatcataattctgtccatttcaaaacaaaccgtacatttttggatacgaattgaaagcacaaagtctaagcaattggtgattggactcaaaaaatcatttaagcattttaaattttgttcacccgtcgtcgaatccgccatctctgatcacaatgtcaattgggttcgttcgagcattcactatttcccacgcatttctccaatttttctaatttcaggcaattggagaacggctgacaataagctaacttttgatgctgatcaaaaaagttcttttcaccactcatggtatcttgaacattccaaaatacactgaaaatcctacaaattgtcaatacttttgtttgccacccccttttttcgaaattttttgttttcataagtcatgaaaacatgtcaccatgggtttttggggggtcgctgagcacgaatccggcatccatttcgaccaattcaggaccccggacccaaattcgaaaaaagtcgaaaattcaaatgttttaattttccatttttagcctaaaaatggttcacaatgagactttttattgaagcacttatgatttttagatcttttccatgtgtttaaagtttaatgaaattcaaaaatttgaattttcgacttttggttcgaatttgtgtccggggttcgaaatggatgtcatatttgtgaccagcgacccaaaaaccatgtgagacatgttggttagcctagactaatacccgctgaggggtgtactatagtcaaccccccggaaaaaatggcacaaatgatataccaattgattcgtctcgaggatctaagcacggaaaaatatgtctcgagctgcggaaattccaaaaaacggtttttgaaccggttcaaaactcgaaaaattgagagatttcgcactataacttttttttaaacgatcgaatcctgacaatttggtaccatttgaaagctcttgacgagcttaatctaaaaatcaggaactaaa

SEQ ID NO: 18374 - DNA, 1333 bp, Heterodera glycines
ggggcgctttcagcagaaaaggcgagaaaaatgagaaaaagaaaaagctgagaaaacattttggaataaaataataaaaatgaaaattattttttgtgtgattaatttgggaatgaatttgaaacttttatgtaaaaaaattccaatgatggaaatgacagaaagaaaaagaatttttgtttggcagaaacaatgcataaaatgacaaatgtatgaatgaatgatgattaacggaaaacaaaacgagcttttgattcagaataaattaattaaaaaattaccaaaaataaaattaaattattttaaatttaacttgtactgctgcaactcaatgcatgaagttggagctgtacaggctcagtgagaacgaagattcaaatctaaggacatatttcgactcagcgtgcctgaattactcaaaattatgaaaattaagttttttttcagatcgcattacaaaaatttgttagcggtggttccgaaaaattccatttttggagaccattttcaaactcggctctccaataattccatcattacaaattaaaaaaatttttttagtatattcttaaagtattagctttgctctatttaatcactttttctctttctctgggtcccttttcgttgccttagaatatgccatcaaaatacctacctaaaaaatgaccaattttactttatcaactctaactccttaatgacttttccattgggattgatcttttgcctgaaaaatggcaacaattatcgataataatggtaattattaggaataatgattgtgtttgttgaaatttgaaaaataaattttcttcaaaaaatgaaggccgacagaacttatgtttcaccctaagtacatacataaattgtcattgcttttttaacaaattttggtgcttttactaagtaggaaatttttcaaaaaataataataagtttacttttttcatttgatatccacttaaaattcttaaaatttatcaatttttaattaaaattgcatattttccttaatttaatttgtgtaattttttggattaattggaacaaaaacaaaaatcggtttaacataagcctgcaacgagtgaatttatttgcttaattctttaccggactaattaaaaagtctgataaaataaaacaaaatatttttttctccctatttaaatggtggaaaattaaaatttattcatttgaacttttggaaaaacgaagtgggaaaatccgacaggaaatgtcattgtcatttggcacacagctctattttgaaattgccattcttttgttcatcgccttcaaaatattcgcctactttcaaaaacccaaagtc

SEQ ID NO: 18375 - DNA, 661 bp, Heterodera glycines
cgcaatcattgaaagatgtagaaaaataagcagcgaaatatgtgaccggaaatccgtcatcacagattatcgcatttgttactattttttattaaaaaaggttggcaaaattcaaaaaacaatggcacgccccaaaatgcgcgaaatgggcttttttaaacgcgccaaagtatagccaaatgcctctcactccatcaaatgagctgttttttctccccattggcgttgtattggtcgctgctgctgctctttccaggcaacgcttttgccaatttgaaatgccaaaatgcgatgacaaacgaagcatacgaagtgccgaatgacaatgtgctggtgaaactgttccaggatggcaaattgagcatcggcgaggagatgaagcagttcgtgtgtgatctaagcaagcagagcatggcgttggaagctgctgacacagacacatcagcacaattgacagagtgccaacaaccaatggcagcgcaacttatcccgaatttgcgcagtgccattcgaaaattgaccactgcgataaatgggggtaaaaatggcaccgtttacaataaaactgttaatccaaatttattttgaaggaattgaagtttcaaattccgaactcgaggcagtgaaaaatcttttgcagcattcactttttttgttggcc

SEQ ID NO: 18376 - DNA, 2312 bp, Heterodera glycines
aataaaatgaaatcgaacaaaaactgagtgccgtcttaactttggcactgcagtgaaacaaacattcaggcgagcatttccacccgtggtgacttaaacccggcaaatgggacgtaccaactgccgggcatgggccatcgcaaccacggggcattggactacaaggggaccaacttcgaactgttcaagcaactgcgtctggaggtgctcacaagcaaatacgacttttgttggcaaaatattcatttttaaggtctttggtgggccgacgtacggaggccccggaaaattgccaccatttaagtaaatgggaaaagggaaggaaagagggaaaaaataattaacattcagttgggaaacgacggacatcgaagcaccgcacgagggacaaccaaaagtttggcaatttgaaccatttgtgacgcaatgggtcacaaaagtgaaggcggaagggatggaggaggaggaggaagagacggatgaatgaatgcggtagagagggaggatagagagagaagagcgatagagagagagagagggagagagagagagagggagagagagagagagagggaggatagagagagagaagagtgggagagatagagagagagagagagagggagagagagagagagggaggatagagagagagaaagagagagagagagaaagagagagagagggagaaagagagagaagagtgggagagatagagagagagaaagagagagagagagaaagagagagagagggagaaagagagagaagagtgggagagagagagagagagagaaagagagggagaaagagagagagagagagagagagaaagagagggagaaagagagagggagagagagagagagagggagagagagagagacagagagagagagagaggacaacgcgaaaacggatgaacgaagagttggttaagatgagagaaaagcaaatttgttttattaaataaaattgtaaaattgccatttttgaattttaataaaaatgaaagagaaatgagaagccaatggtcaaacggcgaaagatggcgattcgcaaaaggcacttttgtccattgcttccattgtaacatttgacgcggcgggagtcacagcgaaaatccaaagtggcaaagcacagcaaatgaaacctgggcatttcttactgtaatccgatcggtacggtagtcgttcggtcctaccgtaaaagaaaaggcacgccctgtccagggacctgtcatttaaggggtctttcttctgcccattctgtcattccctcacattgccatgaatcgccagtcggccttcgcctcctcctcctcctcttcctcctccattatctgttgcgacaaaagcaaaaagtcactgagttctctgaatgaatttgatttgctcaattgtcggtgtttttgcttttaattgcctaagtgtgccgcgcaacaattcgacggtgccaatgtcaaggaaagcgtcgaaaggttccgctgaaaaatttgctcattcattttgtaatcaaaaaatccaacatgctccgatcactactcgttgtttgatcattatccctctctctatctccttaattaccctacttaatctcctctccctccctccctaattttcctttccgtccaatcactccctttcaccccttcgccctcccatttcattacttgtttctgcatggagtaacatgtgtttttcggctgctacagaacgcgtgccaaccagggtcgatcggctggtggtggattcgctggtgcaaagttggaccgggaacacgcgctgatggcattgggcgggcgcagtgcgcaacggaacgcgagcgacgagggcacggcgccgttttcgctttggttttttgaattgtttaccgggacggttcatcaacaaaagccacggaagccattcgagaaaaatagtacggaccttaacagagaaagagagaaaaaaagataatagccaaaggcaaagcatcgttttttgaatgtttggccaaatgtgcaaagggtgcgctccgtggtgggcttgtccaatgaataaacgttcttatgttgagaatggcacaccctttgctcacacttctctgctgatgatcagaacaatacccaaggggacattttgtgggttcgtggagagcgaaagtgcacatttatgatcagcaaagtgaagatgatcgaagagccgagaatgaccatggaaatggaaaagaaggcggcaatgatcggcacggaggtggaggtgggcggagtgatgtcagccacatgaaaaggcagcaaaacagtggccaagcgggagggggtacgataccat

SEQ ID NO: 18377 - DNA, 898 bp, Heterodera glycines
agtaaatggttttgcgacggatgtgaatgaactgatgaaatggaaatgattaaaattttaaaaaattcgctacgaaatgcaattcgacgaagaagtcattggaatcgccatacggaggaagcacttttttgacgggcgttgcttcgtttgttttgaatttgaatggtcaaaaagagaaaaaaccgaccgatcacttcccattctccgttatgcacataataacccaaatctgatcagtaccaaatgtttacaattttattttcacgtgcttttcccattttcccaccgatgctgtctttgaccatgtccaacgaagtgccattgacgcataagtccaacgaatttcgcgtgtgcgaccacgagccgaactgaaaatggcatgccaaggatggaatgatcaagggatgggattgccacgaatttgcatggcaaatgtatggaatggccaagaattggcttgggttagccatccgattgcatttcattggttgcttattgaactgtaccttcagcagacacatttgttcgtcgaatgggaacctaaacaacggcatcaaatggcgtcggcacgtgcacttttaagtttcagcttaaaccataccaagtgatgtcgatttggcacgacgacttgataattgccggcggcgtctgcagaatgcttccgtcgtggtcaaccacaaaatttaccgcaaagcgagcatcgaagttttcatcggcactgtcatcaatttgatgggctttggagtccgaatctgcttgatctgactgtctgtctgtcacctgttgaacaggatgacgtcaggcttccacaaagtgctggagggcaaacggatacggtcgatgccaccgtactcccgcgggtcccaaaccattttgtagtcggaccatctctgcccat

SEQ ID NO: 18378 - DNA, 1793 bp, Heterodera glycines
tgttttttcttgtcccgttaaaatctgtgatgttgctctagattatcttgtataaaagccccttattgaagctttctgcctttagagcttttccaacaatttcgataatgtttttttattcattgagacataataacatttctataaattttcttaatttaattatttatttctaatttttaaattgtcaaatgtaaaaattaataatatgaatcaattaactcttttattcatttatttgcttttattaataattagatctatggttatttatgtcttcaagagccatttgacagttacaaaataatctggattttttgtacaataataataattatattaaataatttctttatatgcttcaatcatatttttttacaattttattttgctcaaaaagcgattagtttttgaattttggttcaaaattttataattgcttaatggaaacgacttatttacattactacacttttttcttttatttaaataaaagatacgattatgttttatttttgcgattttaatggattaaaatgtccaaagacctctatttcaaatgcccattggaaggaaaaaatttatcaaaaataatttcctgtatttttaatgagattaatatcgtttatttttcgtaactacacttacgttctaaaatcttattatgattagcgcctatacaatatcaaaaatattatttcatgattcagatcgcctcgcccgttgagaatatgtgaaattaacactttaatatacaaatttatttttattgggcaaattaaattgacttttagtatttttaattaaaaaagattaaatttgctatattcttatctaattatgtaattttaatatatatttcatctctttaactgaaattgcctgaaaccttccaaatccgcattattattatatgtgaatttttgattttttgcctgtcatcttaagaattttttttttttaatatgtaaccattctatttttaatattttatttaggattttttaattcggcaaatttctcaagcaaaatgagcggttgaaatataattcttgatatattttgatttgaataaattgtaaaataacaaaattttgactctttaaattttgttttaaaaatacaaaataaaattataagttttttattatcaaatcaattttatacaaaaaaaaattaatttagatttgctaatattaaattcacggtatggcccgtaacattttttggattaggcctccaatcaacttttagacgttcaatattcgtttatttggcaataacttttttcttacttggtcattattacctacatttttaatatcaattcataatgtaagaaaagaacagataatgactagggacgtgaattttagtgaagaaaaatcccgaaatatttaactaaaatagtgagtaaaaatgccaaaatagtgaccaaatagtgacaaaaagtccgaaatagtgacgaatagtgacataattttcagccaaaaattgagcaaaaataatttttattcactgattgcagttgcaaatgagtagggctgggatttttaagggcaaaaaaacaaaataggtacataaaaaaataatttttaaaattaaaattcttgccacaaaaatacctttttgagaaattttttttcatttcttaggagtgctttttgaaattttttttgtcgattcttaggggtgtattttttgaaaaaaatttttaggtcgattcttaggggtgtattttttggttttattgcaggaaagttaaggaattttgcccaaaaatgtcaaaatag

SEQ ID NO: 18379 - DNA, 885 bp, Heterodera glycines
aaaaaaattagatttgctcatattgatttacggtatggccgtaaatagaataagcagagacaaaaagccgatgaggaaaatgccgcgtaggaaaagccgataaaaaaggcagagacaaaaagccgatgaggaaaatgccgcgtaggaaaagccgatagaataagcagagacaaaaagccgatgaggaaaatgccgcggaggaaaagccgataaaaaagtcagagacaaaaagccgatgaggaaaatgccgcggaggaaaagccgataaaaaaggcagatgttccgttgcctagacatcagctaaagctttcgttttctttgagtttaaaatgccaactgaataaatttcccagtgccaataacgttttttagataatatcttttttaattatagaaatgaattttttaactttaatcattcttctactgataataccatgtgtatttggtcattatcaatgggttcaagtgttgttacgcctgtttcgttggattgtaccaagaacactaacgctatccgcgagtgtcgcatctgtcagaactgcagcttcatacagaactgcattatcaacgatcggccgtgcggcatctcacggcaaactaaaaattctggcatcaggatcagcgggacttggtggaggagcaggcggtacgatgctcttgatggagcttctcgagaaaaatcgcaacgacatcaaaggcagtcctgaattggacaaatcgagtaaacattaacccgattaatcgaaaattatgaaaattccacaaattaccactttcaagctttcttatccattctcgttcatagtactggtgaaattctttaagatttccatttatatttccttcaacttcaaatgcttttatagtggccatatacgaatt

SEQ ID NO: 18380 - DNA, 2102 bp, Heterodera glycines
  unsure (1)..(2102): unsure at all n locations
tgataaganatttttgatttaaaatcttatttaggatcctttattggtctggcttaattttcttgctttttgaataaaaattgtcattttacagccctaaatttgaggcttttagtgcctgtttttttttggtttttttaagaacctaaagcctaccttttggccgatttttagagcctataaatattagccctactctagaaaaaccaaaaaattttttaaattcattcctgtgagactccaattctccagtattaccactaaatcattggaattttcatgtgaatttcagatgtcgtttcttaatgttccagagattctaaagcaaaaattaatcgaagttgaagggactttgaaagcaatatcgcctcaatcttcgcatggagagagtttgccagcaccagcgcaatatgctgaacctttgtcctttaaaaagggacgtttcttattatggaaaggtgtttgcattgtgttgttttagtataaaccaaacatttgcaggtgtcgagactggctttctttatctcactgggcatcccaaccccggttcattgactgtctacgactataaaaacggaacggctaacgccgtactttgcttcagccatcaatttggccccacagctctcatcatcgacgccatttactttccgcttagcactgaccacccgggcattttggttgcggttacggaccgctctatggaccaacacggcgactatttggcctatttttcgctcctttcacatacccttttgaatgctttttatgtgccacaaccaataacgtccatctgttcaattctcgatggaagtgcacaaagggatcaatttttgaggctgtctaattcattccacaaagtgtttttggaattattggattatgcaataatctgttaaggattggccacacattttgctcgttggttgccgttacggcgatgtcattttagtttatttggacttgcaaacgcaaaagttgtctactgaagcagttcaaaaatccaattcaccatctacagcattgtcgactaaaactgaagagattcggccgattcgttgtaaaaagaatgtgcacttaacgagttgagttactttcctgaatttgatttattttcaaatttagaaattttttacgaagacaaaatgtttgttttccgagccgacgatggaacgaccaaatgtttagcaaagggtaaatgctgataaatggaaaaagccaatgtttaatccagaaaaggtgatggtctccgcattgcattgggaggaaaagtgcggtttggttttggtcggtttcaatttcggcggagtgatggccgtgtcgctgcgcacttcgaaagtctattcgctgctttacatcgatggctctgtgcttaattttgcgttccaagagcccgaagaagacccaaggcccatcctttttctgtggatagctttttcttcccctcggttattttgccattttctaaaccatttttattaattcgtcgttccttatcgtttagcagtggaacttctttgcttttatgcaatgttaactttccaaaagatgaagaaagaaataaactttctctgcaagtggaggagtacacttatttggagccccaattcgcgccatatatgaaggtaattggccttgttttttgttagtaatgctctccatatcgaaattttgatcacaaattgttataattgggtccatttttttgtgataacaaattacaaaatccagcatttttttttaaattttctcagtgccgcctattagcaccgccgggcaacataataaaaataacgcattattttttttttgacaccaaatctttttgttttgagcttcatgttttggttttgaaattcctctgatatgattgctggtgtaccacaaacgggaaatagttgcttttggcatttttttttgtttgtttgaaatgggtacaccccaaaatctcgccgggacaaaacctcgccgcagaaatttcaaaatttttttttcaaacttagaaatttttcaaggaaaaaattcttagaaaattttttataagaaaaattcaaaaaaaattgtttgttaagttttttttgaaaatttttcgataaaacagt

SEQ ID NO: 18381 - DNA, 896 bp, Heterodera glycines
ttaacagataaacaataatatgggtgaaaaatactaaaacttttactagatttggtagatttgatctaaaaatgcacaattttttttgactacatttaaaaaaggattcgattcggaggcgttgaaatttagaaaatttcctcaagtttaaaaaagccatgcccaaaatgtccaaaagcttggttcgatttggaaacattccaaaaactggcccagagccctgttatccgatattagtctagttgcctctctctttcttgtaatgaaaatattatgtgcctttagcaaatggctttggaagaagcgcgagccgagcgtgccaaacaacaacgggtggcggccaaagccgaagcagcggctgccaaagcggtgacaacagtgcaccagcggatcgacaggttcaaacgacttcaatccaaaaagtgcacagggattaatggattttggccccgggaagggtattttatgattgttggtcggtcaattttggggtttgtatttttcttaaaaaataatccgggatgtacatttacctcgttctccaccccctccttgctgcgagttctttcaagggacaaaagttgataccaatgctagatttatgttcaatgttactttcccattttctctccatttagccatggtttgactaccaacaataatgctgctactccccagtcgcaatggcaacagcaaatgcagcagtccatggcggccatgaacaacgccgccgcgtccaacagcttcagtttctcgcagccggcacagcagccgcgtgccaccgcctggcagaccattccgacaccgacggtgctccccatcggacagcatttacagcagcagtcgccacccgtccagcaattcgtccctcctcctccccctcacagcataatttg

SEQ ID NO: 18382 - DNA, 1623 bp, Heterodera glycines
tcggttcgcgattcccgagtcgagaaatttctcgggttatttggttctcggttctcgtatcgtttcccggggtcatttctcagtctcggtttccggtaaaaatcacttctcgcacagccctagtaattgaacaaattaaccaccaagaatttgttggttttggatttattcctcctccgttgtctaactaaaaatttcaatgtttattgaagtgctttcatatccttttttgttttgcttatttgtatttcaaaattgtcattatttatagtatgacgatgaacgaattgaaatgttgactgaaagaatgtataagtcattaaaatgaaacatttttgatttttttaaattatttttttgtgcaggtgccacttgtcgaagacaaatttacggtatggatcattaaacgggtgaaagcgctgaacccatcggtggacgcggaagtgtttgccacattcatttcggacatagactcgccgaacgaggtacaacagcaacaccattttaggcgatggttgcacattacaacaacaaacaaacatttccaacaaaatttaggccgaagactacatcattggctatttgggcgagaaaaaggaagtgaaggagttccatcgtgactttttgcagaagcgcatcgaattgcgcccgcgggcacacccccaggcaccgaaagacgtaagtgctggcgccgttgtgaaaaatgagaaattgctcaaaattttttttaaaaaatgtgcccttccgatttataatttgtttaaaatggatgggttttccagtttgttatttgcatgccttcctattaatagatgtaacatttgttttgcacatttaggacttgtccagaccagccgcagcgctttcggaccagcaccacaaaggcaccggcgggtgggcgtcgtcggccagcggcgtgccattgtcggcaccaaacagcggcgcggcgacgacagcggcggcgaacagtgcggcacagaatgccaacaacaacaacaaaaaaaagaaaggagggctgaaagggcaaaaggtggtgtcctcctcccatcagctttccaccaacaagttcacggttagcgagcgcccgctggagctgaacaaataaaacattcagactcagtggttgtttgttgttggtgtattgtgttgtgaacaggctcgtatccatcggggggagcagtttgacacaatttaattaattttttttgttcataacaagtttggggccaacattgaattgatttaccaatatgcctcggcggcattttggaattcgttgtttttttggatacgggcctggttatgaatgtggaaaagtcgaccctccgagtggggtggtatatctcagaccaggccgcccgtatttaatggacaggaggggggtcaatccccaaccaattcttgtccaaatagacggcaaatgacttgaagttagaaaagaacggttttattttaaaaaatagatgaatttacccgagggaattttcgaaattttttgcctttatctctactgataattattgtttattgactatttaatatactgataaggtagagattgagatgtccctttttgtgtgctgttttgtcgattcttctaacatatatcccacaactttttta

SEQ ID NO: 18383 - DNA, 1735 bp, Heterodera glycines
  unsure (1)..(1735): unsure at all n locations
tcattagtggttgccaaatcnttgtcaatatctaggtcattttaaacaaatttataacgaaaatcctcgttttgaaaaatccagggaaaatccggttcggcttacgaacgatttcgtttcagtaccagaaaattcggtcgcgggctctagaacgtggcaccatcggatagagcaaaacggtgatttgtattatcgaatttttaagtgccctaagcgaaaactcaccgagttatgaggcctcaaaaatcggaaatttggttgcccgccgagggcccatcatttccacaaaaggcacggagagggaacggatccaaaaatgggtggctaaattggtaatttcggatttttgaggcctcgtaaatcgttgggttttcacttagggaatgaaaatttaaaaattcacaaaaatagacccatgctctaaccaaagaaactttcatacccaccctccccccccccccctattttcgactgacagtttgagatttgcccttgtgagacgaagaaatgccaagaaaaggccgagaaaagactcaaaaaagccaagaaaattaataaaagaatttaataaaaatttatcgcgatttttacaacacatttttgttaattggtcttaaaggattggttgtcgcattgaaatattttgccatcaaaaataatgaaaatgtttcgcactcttttatataacacctcgagagtctcgggatcagtctcaaaggaaaagggattatccacttcaattagcgatactaaaaacaacaattctgtgccaaaatttctgaaagtgtgacagatttttgtattcttttatttaattaataatttaaaaatgcctgcccaattagcaaaactaattattattattattattattattattattagtatagttcacaaattctcgtccgagcattcagcccctggacggatgggtttggttgttttttaaaaataagaaaaatggaatgataaacatttttccacaaaataaatttgataaaaatagatttttaaaaatcagtgaaaaatgactgatgtttgacagcccttcgtcacaaaatcggtgaataatttgccccctcgacgacctttccgcccttaaaaagtgtttcttttgcccctcgctttctcgtgtgtgtggtgggtggttaaatgggtgattagccagttcgagatcagtacaaaaaaaagtgtatggagaggggagagatgtttgggcagagaaagagaagggagagaaaaagagagaggggaatgataatgatgttgaagggaaagaaaagaaagaaaaagagggaaagagagagagagagagaaggggagcaaagaaagagaatggagacaagagagaccaaaacagagagacaagaaagagagcaaagctatagaagagaaacaaatgaggagagaaagagagagtaaaagcgagagaagaaaagaaagaaatagaaagaaagaaagaaagagagagagaaggagagtaaaaagtgagagtgattggattaagcgagggattagcataaattaagctttaatcatcaaataggtcactcgaatttcactaatggctggaaacgcggggtcaaatcagcaaaaaaaagtcttaaagactaatcaaatcaataagggcgcttttcagtctctgctcgaattatgtttgtggaaaatgtgaagtgggcgtgcccatcagtgatcaacgatcagagagagagagagtacgcttctgatcagcagt

SEQ ID NO: 18384 - DNA, 1684 bp, Heterodera glycines
  unsure (1)..(1684): unsure at all n locations
aaaaaaaacaatcttggtacagatttcagttacgggtntagttgaaaaattctgtaaaacctaagaaaaaaagancctataatcttgttaaagagctaatgcacattagtcccggatttatgagtntaaaatggattaccaaacattgtattcggagtttgttaagtgcccatgataaagtcccgttctcggcccttttgcgaaatcacgaccctaaccccgttcccggggctcatgatgggatggtcccgagacttccaaatcccacttttgtcgaatgttaatgcggaatcttgaatttttaaaaattccaatgctatatataagtagaacaaattcgttgcaagtgcgaaaacagaaacaaacaattagtctggattggtgatggatggataaaaaaatgatttgaatttaaagagcaatttgcgttttaaaaaaaaagacaaacaaaatgccaaatgcaaaaaacaaaacaacatttgaatcagagaaatgtactccttcctcaccacctcccatcaaagaatgaattgaatgaatgaataacgacgacaacgacaaaacgtagaaaaaattgttaattgtttgtgcaccccaacccaatcaaacgccccccgggggacgacgagaagtgaaaattggtgaagcaaaataaatcaaatcatcactgatgaggaggaaggaggagggacgagtggtggatgagtgataaatgtgaatgaatgaaatgacatttttatgcaatggaaagtgaacgaagaaataatgaatcagtggtgctgagttggtcggcaggtggcccatttgagcgctgccaaatgggtgtcaatgccaatttgtaagccaacggcatcgcaaatatgggaattgaatggttgcaaaaaagtgacaatggcgtaaaagaaatgagtaagtggcgttgaaatggccatgtggcaactgagcgccgccaatgagtgccaatttatatgtcaaaggtcgcaaatatgggtattgaatagttgcaaagctgcgctaaatgagtgccactctgtaagacccaaaggtcacacatagacagaaggtattgagggactgtcataaaaaaatatttggcgcggaaatggtcaggtgctatttgagcaccgccaaatttgggtgccaaatttgttggccaaaggtcgcaaaaggatagttagtggatagttctaaaaaaaggtgaaggaatggcgtaagaaaaacgagtaaaattgtcatgtggcaactgagcgctgccatttgggcgccaagggtcaaagagaataatgactagaagaaatgcacaagggtaaaaaattttaaaccaatttatggaaattatagttttggatcatttaaaatacaaaaatttgagaagcagtgcggtgaaatgggttgcattttttgtgcgccgacaaatcagtaccaagagatgggcgagaggagggggagagggggcgggggattaaattgtgaaggataaatatatcaaaaaaaagcgtgacgcagaaatgggcgagtggacgattttagaattagcattttagcggacgaagcgcgaacggatgggttgagcgggtgctatgacgttagtcgaaaaccgtcgtaatgggcgttagtcgaaaaaccgtcgaatgaaaatattttttgatataattttgctcaaaagcatctaaatttttaattc

SEQ ID NO: 18385 - DNA, 2089 bp, Heterodera glycines
aaataaaaaaaatacatacacataaacaacaacattcctttttcccattcaaaataaaatcacaaaaaatttattaaaattttaatttataattattaatcaaaaataataaaattttttataatataatatttctatattcttataaaataaaacaaaattattttacttttctcacttattctcccacactcaatcatcataaattctaatattttttttcacttcctcagcgatttcatgaaattctgctgtgaaacagttaaaaattacgtagtaatgatgaaaaagcatgaaaacccatctaccaagtcataaaaaagcgattttagtaagaaattggatttttagaaaacatcaaaatttgaccaaaacaagcccaaaacacatttcttggcaaaatttgtatcattcaaagatctcgactagtcaaattctatctacaccaattttaacccttaccattctttttaatgtgcatttgctatattgaaacttcactaaagggattagtgtctattcaaaaactttttgttgatttattggcaattttttttttactttttgatatttctcgtccctgggttcgaaatatcgcaaattaagctcttcttgaggtaatgaatcaaaatttcgccggtaatgcttttttattcacaaaatcgcttcactataccacgaagacaactcgtataagcaaaaatgcacaaaatgtccaagccacgaaatgtccaaaagaataaaaacccacgaagtgtccaaaactcgaaaaagctattaaaaagccggaaaatgggtctaaattaaggtattcggggtcgctgaatacgaatacgacatttatataacccatttcctaaccttcgacccacccgaataagaaaaatctcaaattcggttaaaatatatgctgttttttgtcttcagattttgttattcattgatcgaacaaaatgattcgtaataaacttgaaaatctacaaaatatcgcccttagcagggagggcacggcttaaaaatgtgtgaattatttatttgaacattttcatttttttgttcatatttacaagggacaaatggcccacccaaaaaaagctgtgattaaattattccgtatgtatttgtaatttgtcttccactatttcccgttttttcttcgcttggaccaatttccttaaccaactaacccctgaccgccagcacccgaggcccaatcgtctctcgattcatgtctgacgggtgagtggctaacatttgaaacataatttgctccattatctcgtctacctgaattaatataacacttagagttacagatccgggactcaagtggccaaatgcctgtgggactgaaccgtccattacgaatgataccacaatggtaggacaaagaaaatagctatagtacatgctggggcccaaccgttccggcccaactgagcgagtccgatattttcctctcgacatttaaataacgaatccaaaagcatttttggacaaaaaagaaataatattttgacgcaattccatgcgtttttaccctttgaccgaattcgtgcattgtttcttcccctctcttcccacccacctcctcgacaacactgcacaacaaactaatttaaatagaactaaataattatttgttttatatttaaaaatgaacttacaatttttggttttccgattagccccgggcaattgtcggccatcaaaatttcaaaaaaatcattggccaaaacttttcggccgtccacgccgacgaatgcctcgtagtggccatgggtgagtaccgccacaattgcgctaaagaaatttgtcaaaatctttcaggagcgccagatgttgggactcggaatgggccgggtggggtatctcaaactcaaacttgggtaattaaacctttatacttatttgataaaaatacaattaaaatatgaaaataaaatgggaggggaggagggacaataaaaggggggttggcggtttggcgggtaaatcacaaatgaattgggggtgttcatcgcggtaatacaagatgcgagggaggggcggggggcgatggtgttttgggcaataagcacttttaggg

SEQ ID NO: 18386 - DNA, 2253 bp, Heterodera glycines
acagacgaagcggtttttttttttgccccaggggatgcctttacttggtcaatcgcctggctgatcagtgaaagcgcaacgttgaaagaaaaaacagttagttttttttttgaattactcgggttcttttttttaaacataacggataaattacaaagtgtcggttttttacttaatccttaacttatccgtttttaaatttatttattttttttttgctaagacggtttgttttttttttcacacacccttcaactcagcgccatattaatgtttatattttccaaaataaaaatgattcatcagtaaaagatgatgcttcttttggcaaattttctcacccttggccctcccaatggttccgcctttttcatttttgaaaattgattctttaggctgcttcttttcctcataattttgctctttcattatttataatatttttttatgtgttaaaaatttagtgcaatgtcaaacctttcgggctcggatcagcagcatgccactccaaatcaaccggggggccaacaatttggtgccatccaacagcctttgtggtctcaactggcaccacaaaatcaattttttggagccattccgccgccatcacatcaattcactgcgccaccaccatcagtacagcatgttgctgctggcgggggcgtgcaaccgccacagcaatttcccgggcccattgctggtggtggtgctggtagtgtgcaaccacagcaaccgcagcagcattcgcaattttttggaggcattccgccacagcaattcactgggcccgttgctggtagtgttcaaccacagcaaccgcagcagcattcgcaattttttggaggcattccgccacagcaatccaccgggcccgttgctggtagtgtgcaaccacagcaaccgcagcagcattcgcaattttttggaggcattccaccacagcaattcaccgggccacaaccgttgccgcatgttgctgggggtgttcagcagcaacaacaattttttggcgggtttcagccgaggcaatttggcgttcacccggttcgcccgtatccccaatttggcactgcacagcaatttggtaattgttgtgaactgaaattcaaagttattcggcaatttcagttggacagcacaacccaaaattggatcatcaattttttgcgcattcaaatgcctcgggtgtgccgcaacgcccttttatgccaccaccaccgcaataccaccacccgcaatatcaaagcggagtaaatacacaatttttttttgcaaaaaaaataaataaattttttagggatatttgccaaacattgcacaattttgtgttgatggaacaacgagcactgcgtttctcaacggttgcgtcgacactttcaaccgggttcttccgtaatttactcctttttttggtttaaattatgctttttatattacagccctgttcgtctgtcggttattgttgttgattttcgagagcgacagtcaacccccgctggagaattgccggttgcaaatgttttgcttggaaacgcggagggggcccggattgaggcgtcagcgtggcgccaacaggccgaattgtttgccatgctgcgcataggagacacgtactctttcttcaactgccgaacattgccaccgagaatgattgcaaatggcgtgtggtttcgtttgggactcaacctggcttcatacattgaccagcaacatgtaatgttttttcaaatttttttttaccgtttaaaggacctgacgaaaaaataagtggagtataaaaaagaaattgtttttagtttgtaggggtaaaactgatcaccggcatttattttcgatttattattataagattacaaaaaaaaagggtccattaatctgcaaatgtcaattttttttacatttacaaaaaaaaaaatagtttttgtcgttgcccccaccgccgccgccgcaacaacaacagggaaatgagtcggcagcggagagtcgccctgtggtgaacaataaatcatatttattatgttttgctaattttttattttctctacagccatcccagccggaaattgtacaagtggagcagagtcgtggtggtgttaatgttcagcttggtggggcggctgctctgcaagaggtgtttacgaattgttacacataaacaaaaaaaaatttttcatgcatgtttaagaacagcgaaccagtcacagacgcctcaaaagctgttgagcgcgccgctgaaagacatgtgtgattttt

SEQ ID NO: 18387 - DNA, 1947 bp, Heterodera glycines
acatagggagaggggagggagggatcgagcgatggatatcgaatgatgtatactctctgttgatagtgtcgatcaatgtaagatgatgatgatgatttggtactgagtgagaacagacagtggtactcaccggcctcacaatcaacgggccaaagcgggggagaaggcggggagtggcccccggccaatttcgcttccttttccttttcatttgaatggatggactaagaatttgttttcgtaggcgttctcggcagatgaacaaacaacaaaaatgaaacaaataagtgcgaatggcaaatgaatcaaattggcaatatttacatgaaccatttaaatttttaatggccaaaagaatgatggaaaggcttatatttttgtgacagtgtccgaaggaagaaaaagcaaactgtgaatgatgagagaaaagaagaagcatcagcaaaacaacaaatgcgaaaagtatttgcggacggggggagggacagctgctgtctgctggaagaaagcgcgggggtggcaaaaaagggaggggggggggagatgaccaatgggtgggagaggagggagagggagaaaaacaattggccatgacacaaagttattttgatcagcaaagaatggggcgagggttgagatagacagacggacagacaggcagctgccagcaaaggcaggcagaagaattaatattaaaaagagagaaagagagtgatggctgcgatcggactgattaatgactggacgaaagcagtgccaagttgggccataggcttttcagcgccagccattcattcgtccggaagtgcccattggctggcattctctctttctctatgactgatccgtatcaccctctcgcccactctgccaacccttccccaataagtttcataagtttactctcccccccccatccctttggctaattccctcatccgttctttctcgcttttcttcttttccattcattttcctcgttttttgtcgttgacaaacaaaaagtggattgggaagaattggatggatgggcaaacggaggagggagaaagaattccatcccccccgccaatgacaaaactttcgtctgttagcagggctttcagttgcacattctctaattattgaagaagggcaataacagatgcaagaaattgccaatttcggcaaggaaaaatgaatccgggcaaagggaggggggggaagggcatgggacggccttttggtccgtctctccaaggcaaaaagtgccctccaaactgaatgaacatttcatttcatttatttccttcaccaaccaatccaatttgtttcccaaaaagttcccagacgatcacatttttttagagcgacggggaaaacgcagcggagagttaccgacgcccaacagcagaattgaaatgaaaaatgaaatgggagtgagcggagtggcacaataaatcatccttcccatccgttcgatgacggatcgaagtgtccgtcaccgacccccgcccgatgagaacgaaaatgaaccgaacgcaacactttgtaagaacggtgaaaaccggtggatggagggagggggggggggagggacaaatttggagattggggagaggggacgagttggacatttgggaattcagtcctatccatctccatttggcgagagaggtcgaatgaatgggtaagaggatgaattgggaaggatattttctcctaaattggcggattgccggagatggatgagcaattagggccgtaaaattgccagagggaaaagcccgcccggagggccttttattctcaggggagcctttgttgtgtttgccgagttgtcccccgaattgcttactcggaaaagagaaaaacaaaagttggggtgggacattttgggtgaaaaaacggagcatttcgaagaaagaaattggaaggggaaggatcagtgatcggaatgtacagcag

SEQ ID NO: 18388 - DNA, 1255 bp, Heterodera glycines
  unsure (1)..(1255): unsure at all n locations
gagattcaaaaagtggtgttaaacatatgcaccactgaaaatggggtatggtacataaaagtcaactgtaactcgggtttgaaccgatattttgcttaatgattgatatcattcgaaagccctttaaaaatgctacaaaaaatgtcaaaacattttggtcatcaccaaccatttactttttataaagccaaatttctcgaaaaggctagtggtgttaaacttatgcacctgaccgtaacaaaaaaaatcatttttattatttttttgttttttcattccctaatcaatacacatggagcatcatcaatacccttaattttctcagaactaaaagtcagttttagaaaagacgaaatttgtttattagacaattattcatttcgtattatgactaatttaattggagaagaggaagcgccgacggaaatgcaacggtcgtccagtgaaacatgtaaaaatcacaaaaaataacatccaattttcaattttattttgttttgttttcaaaggctccgaatcgtttcacagcaaatttatgcaaaagcggcgcttcgttgagtaaaaaagactttgtcaagaaggaaatcgttggtttggttgttttggtggccatttccgtcctcctcttcctttttttgctgtttgggcgtcaatttgcggtgagttttgtgattttattttaattttcaacaattttaatggaaatttctcttttttcagtccgaagagacgaaaacatttgatcatcagaaagcatttgacgagttggagaagaacattttggcaaagctggaacaaatggacatgaaactgggctcaaatgcgcaaggatggtcctcgtttttgatgaaaagcgttggcattggcatcggcgcagtgattttcctgcaaattgccaaacggatcattcactcgcacaccaaaaagggcgtccgacgtcatggccaatttctgtttcggatgaccgacttcaaagcgttttcgcagggcaacgggccgaaggaagtgaaaagtgacacgattgggtacatcaacggaatgccatggcaaattgcgattcaaaacaacggagcaagcatcggcctgtttctgaactgttcctccctgaagattcgtaagtgcgatccaattggaagctgattatgaatttggtttttgtgtcttttcagtcattccgttcgtttgccgttgngctgcctttcggctgagcatcgtttcgtgccaaactgcaacgaaatgcgtaaacagaagggca

SEQ ID NO: 18389 - DNA, 1758 bp, Heterodera glycines
atttgacaaaagccttcgtatgcctctgtgaatgggcaattgcaccgattcctcctccgtgttggcataacgtgccaccaacgttttgcgtttctctttctgcactggccaaaacccgatgacctgcaaatggtcgaagttggtattcatctatttgttgttttccaaagggcactgactgattccgccggcaccacaatccaatccgtcgtgtgcggctcgcgcacttcgatgtcaactttgctgtcattttggagcaaaaagaagggcgaaatggtcaccactttagtgaggcctgactgacccaattggacatcgacagtcatctgaacggagaaaggcattaaaacaaacaaatgttttcagattgtgcctcaaattcaaattcgcgctgtccttcggcgatgcctttgcaaataactcgcccactgctgccagccatgtccaaagggaattcggcagaccaatcggactcgtccacgattttcaccttcgcctttttcttagactcaaatttacttttgttcaaaagcaaaatcatctaaaatataattgttggttctagtcggttttacgcgtcccatcacattttacgcgtcccaacaacagtttacgcgtcccatgacatttttttgtgtccatggcggggatggcattccggccacaaattttcggaattccgtgcggcaatctttcggaattgtggtcccgaaaattttttaatttgtatggcactttttctaggcttaaaaacgataaactctcgtaacaattcaatgtccattgctctccaaccctctgctcatgctgcagagaatatgtgcaatgcaaaatttctctcatacaagaggagccacttttctggcctaatcttgaaatttaaaaattctcggaacaataaaatggccattgctctccgcccctctactcatgctgcagagcatttgttcgatgcaaaatttctctcaaaaaagaggagccacttttctggcctaatcttgaaatttaaaaattctcggaacaataaaatggccattgctctccgcccctctactcatgctgcagagcatttgttcgatgcaaaatttctctcaaaaaagaggagccacttttctggcctaatcttgaaatttaaaaattctcggaacaataaaatggccattgctctccgcccctctactcatgctgcagagcatttgttcgatgcaaaatttatctcaaaaaagaggagccacttttctggcctaatcgtgaaatttaaaaattctcggaacaataaaatggccattgctctccgcccctctgctcatgctgcagagcatttgttcgatgcaaaatttctctcaaaaaagaggagccacttttctggcctaatcgtgaaatttaaaaattctcggaacaataaaatggccattgctctccgcccctctactcatgctgcagagcatttgttcgatgcaaaatttctctcaaaaaagaggagccacttttctggcctaatcttgaaatttaaaaattctcggaacaataaaatggccattgctctccgcccctctgctcatgctgcagagcatttgttcgatgcaaaatttctctcaaaaaagaggagccacttttctggcctaatcttgaaatttaaaaattctcggaacaataaaatggccattgctctccgcccctctactcatgctgcagagcatttgttcgatgcaaaatttctctcaaaaaagaggagccacttttctggcctaatcttga

SEQ ID NO: 18390 - DNA, 1273 bp, Heterodera glycines
  unsure (1)..(1273): unsure at all n locations
atcaacaatgatgggattcactagcctttccatatattgtgactcttaaggggacaataaatgaggactttggtgaatgaatttcctttcgagttcggggttcgaaatttgtcgacatgaaggtattgctgatcagcgaccccgaaaatcaagcgttttcctttttgcgtgtgtgcatttttgtagttcattctgaagcatgctgaaatggacctttaaaaaggcatatatctagtcacatcatttttatgtgcgctggaatttataaattctgagaatctcgtaaatttgctaaacttttcacttttatcattggcaacactgctgaattgtgcattaatcagttgccataattctttgagctataacagcaatgggtgcattttaaatagatctgaaccttttaattaatgcctaatatggtgaaagtttgtaaggattaaaggcagattttcggaacatataagcgccccgcatcgtcttatcaagggctttcgagcagtttttcaaactcttttcattgtttgagtgtttttattattgtctagcaattcacgaaagtgagcgcttttggtttacctttagaaattcttcagtacattacaaaatgatttttaaaaaggcatttatatacacgagcattttacgggggctggaatttataaattctgagaatctcgtaaatttgctaaattttcacttttatcaatggcaacactgctgaattgtgcattaatcagttgccataattctttgagctataacagcaatgggtgcattttaaatagatctgaaccttttaattaatgccgaatatggtgaaagtttgtaaggattaaaggcagattttcggaacatataagcgcccctcatcgtcttatcaagggctttcgagcagtttttcaaactcttttcattgtttgagtgtttttattattgtctagcaattcacgaaagtgagcgcttttggtttacctttagaaattcttcagtacattacaaaatgatttttaaaaaggcatttatattacagtgccacgggaccgggaccggaatttataaattctgagaatctcgtaaatttgctanattttcacttttatcattggcaacactgctgaattgtgcattaatcagttgccataattctttgagctataacagcaatggngtgcattttaatagatctgaacgttttaattaatgccctatatggntganagtttgtaaggattanaggcagattttcggaacatataagcgccccgcatcg

SEQ ID NO: 18391 - DNA, 845 bp, Heterodera glycines
attttaaatttcccccggcggcgcctatcggcaccgccggaccccttctttcccaaaagttttttgaaaaagcgctccgaaaaaaagtgatgtgaaaatcaaatctgaatttctattaatattcgatgatttagtccaaaaaatgatttttgaaataattgaagaaaatttgtttgaaaattttcattaatttaatttgctttattttgggttttattaaataaaaaaccaaataattttgtattattttcacttgaaataaattaaaatttgaatttttttttaaatttttaaaatttttttgaatttttaaaatttcccggttggtcccggttcccggtttttcttgcggtcccggtcccggtcccgaagaaaaatcgaggtcccggtcccggtcccggcttctcaggtcccggcaagtcccggtcccggttttggcaaaaattcccggtcccgtggcactctaatttatatacacgagcattttacgggggctggaatttataaattctgagaatctcgtaaatttgctaaattttcacttttatcattggcaacactgctgaattgtgcattaatcagttgccataattctttgagctataacagcaatgggtgcattttaaatagatctgaaccttttaattaatgccaaatatgggcaaagtatgtaaggattaaaggcagattttcggaacatataagcgcccctcatcgtcttatcaagggctttcgagcagtttttcaaactctttttattgtttgagtgtttttattattgtctagcaattcacgaaagtgagcacgtttggtttaccttttgaaattctttagtacattacaaa

SEQ ID NO: 18392 - DNA, 2688 bp, Heterodera glycines
acaaaaaaagagcgaaccgaaggcacgtgtccgtttctgtctgaatttaattttccaattcattgggctgagcaataaaatttcccgatcggatttttcaccagatcagttggtgtcatgacaactcgtacaatttctgagttaggcctaggctttaagctaggcctaggcttaggcttgcttgggtctaggcttaagcttaggccttattttgtaaaatatgagttgccttttgtccgagttgccattgagccgatcattccccgctccccctcaaatcccacctcattctccagcatctgaaaaagcatttgcaatttcgtttactcatccgttaatcaatggttaagacctacaaattcgacaaccaatggcaataatttgtccaccgctcgtggccccgcctccctttgtccgtcttcgccctcgtcaaatccctggaaaatccccgccggcgttgtcatcggacactccttcaaatgtgtggtcggtcggtcacccgtctctttctccattcctttttctattaccgccattttctcaacctttgggcacatttccgacccttcgaattccaagtgtttctgcagcggacaagttggacaaatcgcgtcttggccagctggctaagtgcgcagtttcgttttttggcattaggcttttcccttggcttaccccttgtggcccagttggcccctggggccccggttggcctggctaaaatattggcactttacatgatcaatgccaggcgagtaatgagtgcccacttcgcccgtctgtccccgcggtccctctgggcctgtttttccgacgtcgcccgtggcacccgctgggcccggttcgcctctctcgggcccctcactgtccgtacaaaagctgtgcatttggagacacttctcgagcagttcatccatctgaaagaccacgcctcacctcaaacacaaaagcaaccgatgcggcaaaatgccagaacgcggcaattgtttgtttattttccgactgggtttacaattccaatactttgccgaaacacaattcaaaactttttccggacactttttgatttcacatttaattgcctgaattcgtgaaactgagtgcatccaaatgtccgtcaattggtccgtgccgttctcggccttcaaatttcttctcaatcggcgacggagaaaagtgccgtgggtggatggaaaagagggcaaaattggcgcaaaagtttcggcaagaaaatggcacttattttggaaaagagaaaggcgccaatgaatgtgaagggaggagaaaagcgtgagcagaagcagaaccaattggaagaggagaagacgaaaacggacggacgaagaagaaaagggaaaagaaaaaggaagggggaaaggggggacagaaaaaggggacaattggggggacgaaattttcatagggaaaaacaaatggagggagggggcttaatgaaacattgatcaatttgacgtaataaatgtgaaatttgattaataggactaaaaaaaaattaatactacgaaaacgatggacaaaaaattggccaaataatacgaagggaaaaaagggagggggggggggggagaaaattggggctaatggccaatgtttatgggggaaataaagcgaaagtttattccatcaaaacggaaaacaaaactgataaaaaagagatatttatataataaaagtataattgctaagagagagcagcagcaaaattatgggccaaaaggcaaaggccaaagtgaaaagtgtccgcgcaattttcggaggtggcacagccacgacggcaccacctgaaaaagatatagagaagatttacggagagagaaaggaaaatagttagaaaaggtaagaaaaaaaaagttttagagagtaagaatttggtaaaaaatctaattagatcattttgtggagaggagtattgccgtggcactccgttacctctcaatgggtccaattgttcagtgaattgtgccggcgccaaaccccgcgaaacactccgcctgatttctaaaaaaattcaaaaaaagtgaaaataccaaaatgttgtgccgaatttgtgtgcctaatgtggaagtgccaatggcagtgccaatatttgtgccgcattttgtgcgacctttctcggccaattggttgcgcagccaaacggacggcggcgacgaggagggcggcagccaatgccacccgtccagggacgacgccacgccggggtcgccttgaggatcatcgcccgcctcgtcgtccggactgacgcccgaacctgggggaggagagcaacggaacaatggcaagtgcacgggaaaagtgagggggggagggaagtgggagagggggaaagtgtgttgaatggatgggctttatttgatgctatattttttgagtgatcagtgatcgattgatcaaattgtggaaagtgtcaaataaaaaagaggtccaaatgccaaagtgtcctgttaagtgtttttgtgatttgtgcctttgtgcgaaaacttctcaatttattcaattgtgttaagcactgaccttcattgagagaagcgaccggcgaatggtcggccaattgctggcgcggaacttctgaagggatttggacaaataatcgaacgaattaagtccaattaacaaaatgaatgcatttgaatggaagagttaattaatttgaatgatatactcaaa

SEQ ID NO: 18393 - DNA, 1318 bp, Heterodera glycines
tccctcaaaaacgcacatccaaatcgaatcatccgaccctcctttttctttaggaaaatgctcccctcgccctctcccccatttcttcgccctctctttccctccccccggaggctcttcccaactcactcttcttcctcttcttcctcctttgcctcctcctcctcctcttctgcctctttctcatctccctaaaagcaatgatttcacgtagtcccttttcgacatcggggatcccttcgacaatcatcagcttcgttcttcttttgcgttcattgggtaattaatgttttaattatctttgatacttacttttgaatgatggtcccacgattggggcgggggtcagtccaattttttgatttttgtgccaataaataagacgacatatttcagcatttttgaccgttctttcacttcccaatttcttttcaggtgccgtcgcttcctttccaaagtcgcccttcaccgattggctcccccaacactcacagaacgaagggggtcagtacaaaagggatggccccgtcccgaacctctcgtcttcctctgaattccatttttatctgtcccttccccttttttaatttgtaccgtatccctttccatatttttgaaacggtcaacagttttctctcgcttttgtctttgtttttgccttcccttttccgcttttgttcacttttattgccattcactccttttaatgtcatttcccccaagggcttcttctcctcgaccgtcgctccctcgccgaaggcgaagttttattatttcggaccaaaaagagccgccacagggcgattgctgtgatgactgcgcatcagcagcacaaaattggccaaatgtcctcccgttttgccgatgcgctcactttcaaagaatggctgagaagggtttaccgagaggaaaaaggtaattaattggaagagattaacaacacaacaaatggtgggaatgaatgatcaacagttttgggactcatttggctgctgatctttcgttttcttttctttggccatgcttttgggaggggaagtgtccaacagttcgaaaaggatactctttcacttcaaaattcgcagcatcgtccgtgctgacgagagtgaattcattcgccacccctcggggaatgccattgccgcccccccccctctcctcccccgccgccctttgcccctctctcctccaattcattgtcatcgcattgtttcctgatttgattcacagaaacaattgactctgaatgggcaaattggggtgcaatttgctgctgctgatttgcgtgcagagaatgaatgtggcgactaatgttttg

SEQ ID NO: 18394 - DNA, 846 bp, Heterodera glycines
tttctttgtggacaatctcagaaagggccatttggggcattgggctgccaattattctgaaattggagagttttctttgggggggggggaaggcaaattgggcgaatggggtgccaaaatcgtcggattatctttcctccgctgtcccatgctttctctttctcacccgctctctttctcccacttttctctttttgctctctctctctcccctctcttcgctttgcactctctctctctcctttctctctctctctcacccctttccctctccctaattattttgatgcttttcccttttcttcagctctcaaagtgtccgttcgtaccaccgaagtgagtgctgttcagaatgttcgttcacccaaccttcgcccatttcttctcaggtcgtccgtcccgtgctccaacatttgtacgccacccgcgcccatttccgcgctccgattattatccacgcggtcagtgggccaatcaatgaccaattcgaataagccaattgtcaatcgctgctttcccctccctttggcagaacactttcgaaagtgcctcgtccgcttctcctaagtttccctccgtccctttctcgcgcctttcgtccgtcagcagagaacggcccgtcgatgcgcttctctttgttcaaagtgttcgtgcgctgctccccgacgctgtcatttcgctcggatggaccaaatcggaggatttatcagcagtcaatcggttggattggacgcacagccttccaactgatcgaactgctcaacgaattgggtgatcagccggccatgctgaacatgcgcctcaacgccgccaatcagtcgtccgaagcgacttcctccgcccctt

SEQ ID NO: 18395 - DNA, 2573 bp, Heterodera glycines
ggatgtgcaggcaggcaggtggtgatgaaaggtgagaggggttgggggtggcaggtgggagatgggaagacagggcacaatttggcgtaaaaatgcccatcatcagagaggggggaggggtaaaagtgcccccgccacactttgaccaatttgattgtttaccgaccaaccaataaattataaataacggaaattgaaacaaaacaaggctcaaaccaaaaaaaaaaaacaatgatttttaaacgcttttcaggcggtgctcattaacaatttgctgaagcagctcagactgaaagtgggacaggcgaacaaaacacatggaaataatgacagacacaattgaagaacaaaacaaaacaaaatataaaataaaataaaaaatattatttatcattggagatgggattttaggttttttcgtgtttcttgctgaatagatttccatttatatggaaatggatccattgttttccatatttgcacattctggcatttttaccatatcttaacattttgcaaaactatcagaatgtcagctaaactgaaaccctgccaatcgcctcgctaactgccaatcgaatcattgtggaagaaattaaaaaactggaaaaacatccaaacctataatacctgctatacttattacgataagtgtagtaagcagattcagacgagtacgtaactttttatttaaatttgggtccggggttcggaattggccgaaagggcgtctaactcgcgatcagcgatctcaaaaaccctccgaaaaacatgtaaaacattggctagcatcttctcttatcagaggctttttacaaacccaaataaattttaataaattgaatttcaaaaaaatttatcatttaaaagaaataaaatagcatatgatacaaccatttatttttctaatcaagaaaaaaaaattctaagtcacataactaaattattgaattggaaataataaatatcttttaaatttgaagctctgaacatttttaaattataaatgacctgctgaatccaggtactggttgaactctagtataaataatcttcatcatcttaatgcgttgaacggatcgtttcgacagctgcgattgatggcaacggattggccgagggaacggcagacggaggcccttgtgattgttggtggagcgatgaagtgggaatcacggcagagccgccggaagaaccaaaattggcacggacgcggccgaacagagcgcgaaaaaactttgtgcaccgactgaatgttaaggacggaccaagcacaaggccaagctgattgtgtgtctcgacaaaggaggtggtcagcggagagacgtaaattgggtagccttgaaactcggaatttacacagtgaaagcaaatggaagaaaaaccgaccaattggctgatcggcagaactgttgattatggtacggagcacttgacgagcattttgaatggagcctctctcgggatttttgtttcttaggaagatcagttcctgctgttgaccggcccaaaaggccctcacacactaaaataaacaaaatgcgaaacattgacaaaacagcagcacctcccggttcaatttgatcacgcgcatgtccaaatgtcttttgttcagcattattatctgaaaaagccaacaaaagtgacctctgttgttgaactcgctcaatgtttcgcaccttatagtcgccctgctgtccatcgtcacaaatgtgtctcaaagccaacagcgacggtttgttcgcaaggattgcacgtcgcctaagtgtttattctgtgcaatgaatgggcacgcaaaagccaaaaaccgctttcattgtttaccattccggatcgtgttcatgggagatgaaaagccgttttctgtagtcatcgattagttcaaagagttcggctggctcatccaaatccaccacagcagcaaagtgatcttggtgaagtttaagcgccattcgaattgccggagaaacgacactgttgagaatgtccaagtcggcaaaaacccattcatccgctggatgagctatacgcatatcgccctaaaagcaattataactattatgaatgatgtgttcgttcgtcccatctgcatattggtgccagagtcggctgaccttaaagagtgtgtgcattccgaacaaaaacgattcggctgcgctcgagtggcgattgtacgcggcggtgcccaacgcccttcggccgagcatagacaaagcgaagcaaaacgaagtgacgagagacgcattttgaacggaattgtagccattctcattctcagtgtcagcagacttcctcttcaaacaaaattcaacccatccggcgtaaataagcgtgaaactctgacgagacttaaaatgatctgcagtgtttatgtgctgtaaatgtcagcgctgaccaatccaccaagattaatgtcgaagtcttcatcatttgcagcgcaaaacaccgggtcaaagtcgacaaagcgcggattcctatggattttatccaacgcagttaaaacaatgtcatcggcaagccaaacagagagttgaggcgagtcaatggcgtaaaaaatcatacattgacataga

SEQ ID NO: 18396 - DNA, 2893 bp, Heterodera glycines
  unsure (1)..(2893): unsure at all n locations
aaaaaaaaaaaacaaacccaccaaaagaggggggggcggcccccccgggggggggggcggaggaaaaaaaaaaaaaaaaaaagggggggggggggggggggggggggggggggtgggttttttaataaaaaaaaaaaaaaaaaaaaacccacccccttctttttaaaaaaaaaaaaaaaaaanaaaaaaaaaaaaaaaaaagagggaggggcccctccccccccacaaaaagaaagggggcggcgcccccccccccccccccgcggggggggggggggggggaaaaaaaaaaaaaacaaaaacccccccccccccccccccccccctttttttttaaaaaaaaaaaaaaaaagaaaaaaaaaaaaattctttctccctcccctctccccctcccgcccccacaaaaaaaaaaaaanaaaaaaaaaaaaaaaaaacaaccccccccccccccccccccccccccccccccccgccgcaaaaaaaaaaaaaaccccccccccccccacccaggagagagtgtatataaaaaaaaaaaaaaaaaaacaaaaaaaaaaaaaaaaaaaaaaaaaaaaaaaagagaggggggggggggggggggggggggggggggggggggggggggggggttttttttttttttttttttttttttttttttttttttttttttttttctctcccccccgcgcggggggggaaaaagaaggaggaggggggaggggggggagaatttttttttttttcttttctttctcccccctcccacccccccaaaaaaacaaaaaaaaaaaaaaaagataaataatattttattttcttcttttcttctcccctctcccccccccgggggggggtgggggggggggggggggggggggggggggagagaccgcccccaccccccccaccaccccccccccccgccccccacacgaaaaagaagagagggagtgaattattttatatatttattttatttcttttgtttgttggcgggcgggcgggggggggggggggtgggtgcggccccccccacaacaaccctactttttgttttttttttttttttttttttgttggggggaaaaaaaaaaaaaaaaaaaaaaaaaaaaaaaagaaattttttttttttttttttttattaatagttttttttaaaaaaaaaaaaaaaaaaaaaaaaatttcatattttttttttttttataaaaaaaagaaaaaataataaaaaaaaaaaaaaaaaaatttttggggggggttttttattaatagaacactttataaaaaaaaattttgggggttatttttttttttttttttttttaaaaaaaagaaaaaaaaaaaaaaaattttttgttttttttttttgggaaataaaaggaaaaaagggcttccccctccccaaaaagggtttaaaaaagtcccctttattttttccccgggaaaaaaggggggccccccgggggggtgggaaaaaaaaattaatttattttgccattaaaaaaaaaaattaaaaaaaaaccccaaaatttgggcagggctttgggaaaatcgggtggtttcagtcaaaaaatgttaaaatttgaaattattggtccaaaatggactaaattgggggggggggggggaggagacgatttaccaattttaatttaggcaaatttacggatgaagaaaaaggcgacctcatttttgaacttactctttttcttttaaaataaatttttttaaaattttgttattatataattcaaatcatattatgagaaacatatattataatataatcatatttatttgcatgaaaaaataaatcttttctaatagtgatcaactgggcttcattttctactctactgctcatcatatatttgccatgaataattgctgtcaaattaagtaaacatttattttaatgcttttaatataatttgtttttagaaatatttcatcattaaaatgaaataacacctaatattttctttacttttatttttgatcgtcttaataaaaattaattatgttgaagcaaaaaaggaaaagttgcaacaaaaatcatttgatgaaatatttggagaaaaatggaaagaaaaagaagaaaaacagcgaaatgagcagaaaaagagagaaattattgaaaaatattataaaataaaagaaaaaataaagcaaaaaggaagaaaatattcggcaaaagaatggggaaaaattgaaagaaaaatagcaaaaaaatttgggacaaatggtaattatatttaaaaatggagcaaagaattggggcttaaccaaaagaaatgctataaatcaaaaactgatgaagaaaagttagaaattgtacaaaaattcattgaaatgacaaatgaatataagcaaaaaataaaatattcagcaaaagaatggcatcaaaattatgccgaaatttgtaagaaaattggcgtaagctatggaacaattatgcaatggaagaaacaatctggattaagcaataaaagaataacggaagaagaaaaaattgaaaaactgaaaatttattggcaaacaaaaagagaaaatccaaaaaagagtgaacgggcatttgctaaaatgctgaaaattgatagaaagaacatttaaaattggaaacaacagtttggggaagagattttagaggatttcaatggatgattataagaaaaattgaatagatttgccaaaaaatcatcagaaaaactgtaacccaaatcataggctttatcaaatcttattgtagttaaaaaaaaacttatttttgaaacggtgcttctttttcaattatcttgaattttttattcaattaaattatcttctgtgacccagtgttaatttttataagaaaaattggatgtatttgcctaaaaaaattatcttaaaacattaa

SEQ ID NO: 18397 - DNA, 1055 bp, Heterodera glycines
tctgccaaacaacgctgaattgaatgaatgatgggtcaaagaaggatgactgcttaaagtggaccttgaatggaaccgatagaacaccaccaaaggcgagacgccgacaataagcgaagcgtagggacgggcacgacgagtggaaattgtagaaccgaacactacggcaaaaatgaagaggaaacaaggcaaaagcggagggggggggggggtcttgtcagcccggaaataagaatcgcgggctgctctattggtcccataattctgtaaaagctttcatctctctctttttccatctctctcgctctcttgtctttctcttactttcccttctctctcctaaactcttcttctctttctctctctctcgccctcttctctctctctctctcttcatctctctcgctatgttttccttctctctcctaaactcttcttctctctctctcgctattttgtttctctcttactttcccttctctctcctaaactcttcttctctctctctctttctctctcgcgctctctttttgtctctatttctcttcatctcttccctttgtgacaatctttgatcaaacttttagctgctgatcactcacccgacttcatgccctcaagcgtgtggaaaaagaacagagaaacgttggcaatcagaaggaatgtgacgaactgcttgcccggcttgtctctccgggcccgctcactcaacgcgcacaatctgcgcgactttgccagaaaaatttatttttatgcgtacctccgggccaacagaatgaaaacggcctgaacaacgacttggacaatgcgagtgatgaagacgaagagcatgtaaagctaatggagggaaggaaatgagagaatacggaaaattgggacggagaaatgccaacgaacggctcacctccattttgacagggacgtgctccgacagagtggcgacccaacacatcacaccggctgaaaaagagcattcattccgaaaagaccgagcgatatgactcactcgaactgtggatcaattcgccgaccaagccgatgatcagcaaaatctc

SEQ ID NO: 18398 - DNA, 1245 bp, Heterodera glycines
cggtgtcatctatgttactagatcggggatcgatccccgggcggccgctcgagcaggacctgcggaagctagcttgatggggatcagattgtcgtttcccgccttcagtttaaactatcaagagagggaggggaggggagcggcgcgtaccggcggaggtgggtggcggaagaagaaaagggtggggggagtatgagtatgatgggcgctctggggaatccgagagatgagttaccaatgtttgtttgcctcgggatgcaaatggccgatcagatattatagacctgcgagaataccgccttgggacgggctgccatttgacagcggcaggggtgcgacgcccctgtggcgacaacgaacgcccgaaggaatgaacgacctgcaatcgatgcgcacactcttcccgcttttgtgctccttttgaggctttgtctcgtcacagctcttcccttcactttctgtcctatgttcgccaattgatcgccacaaacacaccatcacagcagcgccgatcacagaatattccttgaacatttacagagaaatgccatggcatggtgtggcactcaccacaatgcaagtggtcaacagagtggcaaagtctccgaagtagttgaaggagtacactttggaagggagcggcgcatttgctgggccgtacgccaactcggccatccgttggggctgaaactgttccatctcttcgctgctcacgccatttgtcaaatcacgcttcagtcgaaatatttgtagcaactgataccaaaaacattaataaatagtcaaattccgctttttctgactcttcggtccaacggtttgtcaagcgccgcattttttgcaattacaaatcgaagccatgtccaaatgttgaccgccaataagtgcatggttccgagttttgcagaattttttgaatcgacaataatcaactgtaaaattgctcaaaaattgattccacttttagaggacctttgaattgcagaaaatgaaatgcatttggatgaaagtgaaagtgccggcgaaaagccaattgatcagctgataattgaagcaggctttatctgagaagcagatgaacacttccaagcagaacagcacaatgccactgctgccaaagcctaaaaaggaaaagcagaaaatagggagaagaagcgacgaaatcggacagagagtgccaagtcggaggtaaagtgagccggtgccccttctgctgggcacttggccaagactctagaggtcccc

SEQ ID NO: 18399 - DNA, 1570 bp, Heterodera glycines
gcataaaagatttggagagatggacactcgctgaccatagacggtgccaattgacgcattcggcgaaatgtgaaggcgctcaaacacatcacacgaacggagttgtggagcaatggccaaatggtggacaaaatgaactccgaaatgcaagcattttcattgaaaatcaccaaagatcctgtagatgaagcaaaaaagcggtgaaatcggagaagaaaagtgagcacattctgatcgatgtaactggaataagaaacaacaattaggtacacaaaagcaattggaaatgtcattttttacgtgatcaaaatgcgtctgaataggatgacttgttgggcaatggaatttgtgggattggcaatgcttttcctccgttggcattgacaattttcatttcagtagtgccattccatccttttctcttatgaatccacaatttgttgtccaatttccatttgcgtgttttgaaatgttcgtccacgcggcggtcaaatcggcgactaatcagtgcgattccgaggccaagttgagagcgtggaagcaaatcgaacactttgagccaacagtcggcggagataaagctgaaaaaaggaatttttatgatttttctgattttttttacatttcttttttgttttggcgtcgtcgttttttgacgtagtcccaaaagaaccaaagaatggagccacagccgacaaccagaagagacacaacgtacgaactgaaaaaagatgaaatgaatgaataaaaaatggaatggaaaagcaacgaaagtgcctaagcaaaaggaggaaatggtaaagaattgtggtccctaatttatttaaaaattttatttttattttgtactcaaaagtagagtgtcacgggaccgggaccgggaccgggccgggaattcccggtcatccgaggtcccggtcccggttcccggtcccgggttttgaaaagctcaggtcccggtcccggtagggcaaccgggaaccgggaaaaacaagcactggtaagaatgggggtctgagtgaaaaattagtgaagaaaattggagtcagggaaaaataaaaaataataattaatatattctttaaaagtaacactgcccgagtgtgcaaatggcctaatggctagtctccttgactttcccttcttctttcccctggttcaatccctctacagaaattagattattttcaattttttttattgtataatcgttggtttcctataaagaaaatatgattcctcatagtttttttttaaattgatacatattttatcattttttaaatgaaaatcctaccaattgagcttaataatcgcaaaaaccaacctttttttgttgaaaatctgttaacaaattgcacccaaatttttaaaatttctccccaggcggcgcctatctgcaccgccggaccccttctttcccaaaagttttttgaaaaagcactccgaaaaaagtgatgtgaaaatcaaatctgaatttctattaatattcgatgatttagtccaaaaatgattaattgtttgaaataattcgaagaaaatttgtttgaaaattttcattaatttaatt

SEQ ID NO: 18400 - DNA, 1022 bp, Heterodera glycines
  unsure (1)..(1022): unsure at all n locations
cagggggggggctttattgttcacccccccccccctcattattcaggggggctatattataggaaatcggtaattcatccagttcatattatgcttaattttaggccattgtcgccaccagcggataaagaagaagcggcgatctcatctcattttaaacggatttgatgctctaattttctctgatcagaaatgctctctcactttcatttgttaatatgttcgaatataaatatgattatttatacggttttatatgccttatttgcaacactacaaccagtgagtaaattttttggcatgttaatgagctatatttacatatttaatcgttttttcaatttctttaatacatattttgtgattttttttggctccctatcatttcgttaccgatcatttcgtcattgttcagttagttaccgagaaaaaattttaaaaaatttgtttggcatattatcaaaacataataaatttcaattacctataggagcaatttttaaattatctccttcaaaaaattttggctataacttttatttgtcatccaaatcaataatcttgttatcatttgaaagcttagatgtttagaagctatttctaagatattgctttgcgattagacaattgattaaagatataccattaaaattgcagaaaagttaaaaatttctgaaattttctaaacttttttatatgctagacaatctttttgttgttttttttgtaaccgtgttggtccaactgacgggtttcgggactgagatgtctaaaaaaccgtatttgtttgttatttgatgatttcatcatttcttgtttttcctataatttttgtttttgtgttcttttgctctttcgtttttcaaatttttgtctctattttattttaagttaacacagtttttttagtatggtgtctctttttgaaaattgaaggaatatggccaatttcacacgtngtgaatgatgttcacattgatttagaaatatccgagttcagtttcgtgatctgcgtctttttt

SEQ ID NO: 18401 - DNA, 1971 bp, Heterodera glycines
tttaattattagagctgtcaaaaatatgtacaaaaagtggtcataatatgtacataaatatgtaaaacaatccagaaatatgtaagaaaaaccccaaaatatgtagcaaatatgtaaataaaatttttaaaatgttatttttttagaaaaaaaattccggaaagggtgaaataggcataaaatgccataaaaatgacctaattaggcctataatcacattttagtattttaaaaattagtttggttaatttttatttttcacaaaaaattttaataaattttctaaaattctcacgatatgtaataaaaatatgtacgaaaaatgtgccgatattttggatttttttttgagaatttccgaaaatttctgtaaaaaatcctaaaaatatgtaaaaaaaaatgtatggaaaaatccgaaaaagtccaaaatatgtataaaactccaacatatgtaaaatatgtataaaagcccgaaatatgtaaaaattagagaccggacaagagggtcggtcggtcggtttcggttaaaaaccgaaaaaaaccgaaaccgaaaaactcaaaaatttgtcggtcggtcggtttcggttaaaaaaccgaaccgaaaaaaaccgaagaaaaattttctgtataccgtttcggtttttttgaatttttttatcttttcccaaaaaaaacaaaccatttttatcaatagaaaaagcgaaagatcacctctgagtaaaattgtagagctattgaagctctatcaatggtgtaaaataattggttttttataattaattatttttattccttttttaattttcattaattaatgttattattttgtttatcgtaaatatcatctttaaataaaattaattagtttttacaattttaatttaacaaaaagttggtttcggtttttcatttcagtttacattgtaatgggtgatatttttttaaaaattgaaaagataacatttaatatatgaagtatttttagtatagttatgaattttctcacgcgaactaaaagaagaaagttgaattttaatttcttaaatttatggaaaatgttatgatatttttttctttaaccaaatttattttcataatgcctgttttcatttcttttaaacttaggttttgtttaaatgtttaaatttatttttttgctaattttatggttttaattttaacgatgaaattaattagataatattaaaataataagattcatatattattgtacttttaaaattaattgtctttcacaaagtaattaattttcactttattaaaatctaaatattattaattttaaactcatgcaccttctctatctcatcgggctctttctccgcttgccagtttaatatgttttttttaattgttaaatatatttatagatttatacataagcagtatttgttttttctgtaattatatgaacatttaaagaataaaatatattttgttttatttgttgttttttgtctttttgtattcatttttttctcctcggtcaatgaattaacttacgtttttctttgtcctgccaaattaattatataaataatttgtatttaaatttttaccattggtgtcagaggacacagtaagttaccggaaatattaggggagggggtatcagaaaaggggatggaggactaaaaataaattcattgattaccagggcttttttttatataaatacatgtttttctggcttctccatagcataatttaagaaaaacacttatttttttgtgtttgctaacaaagttgggacttttatttacatattttgaactttttcgtacatattttcattctttttacatattttgagaatttttgaaattaaaaaaaacatcttgtagaaaaattaaaaaattttaaaaagtacccttaaaacatcagtgtttttcaaaaaaagagataataaaaattaatttttaaatactaaaaggtgattcgaaggctatt

SEQ ID NO: 18402 - DNA, 2497 bp, Heterodera glycines
  unsure (1)..(2497): unsure at all n locations
ggtataaattactattaaaagatgaattcnnaccagtcaacnncaagttcaataatttgccttgtcttttcctttatctgtccctttttgcttatcatntgggcttggatccatcccaataatcagttgcaatcaacctctgtgctgatcaccctaatggctgttcaaatccatctgatcagtcccttttttcatctatttgcttcagtggtacttctgatgctaatcattattgacattgagtctgttctgatcaatgatcaattattatgtttgttcctttttcgatcactgattttccattagcccccaatcagctgatcaatgcctttgtctgtttgttgtcccccattttttccctctttccccccactcactcgctgatgtcattgtgtgtgcctcgcgtgtgcttacgcgtgccgtctgattgccttggtccgtttgtgtggcaccatccgtttgttgttccgcgtccgtccgcttcaacttcggcattgactgtgataagtccgcttgcacttccatttcgtccacttcaacgccaaccgtttggtcatttttgtcgtctctttaattgtgccaatttcaatttgcctttcctttcgcttttttgttctttcattttgccatgccttccgattatttccgtttgcgtatgattttcgcgttggtggaagctgaccgatcgttcccttaagctcgtctcgagtgatcgctgttcagtgttccagagaatttcgtcaatgattgccgactgagcatcttcatcctttgctatgtcctgacagaaaaagttgtcataaattttacataaaaatttttaggtggcaatagagcccagaaacactttgagtcccgagtttatttattagaaattaagaagcatcaaaaattccacacttttagagtatcaaaagttttcagcaaatgaccactaattgtttttttcgtttccaattaaatattatttagcaacgatttacccctcctccctcctgtcccactaataattaattatctctgatttctcactttgtttgcaagtatttcgtcgattgtttcgaattcaaaaatgggcggaatttcaatgcccgactctttcgcctcatcttgcacttgttgcagcacggcacgtttcgtttgctcacttttaaattttttttttaaattttaatgacaaaaaaaatatttttattataaattcttttagatattattaatttattgttatttgatactttttcttatgaaactataaatatattgttgagaaattaaatttagacataaaaaacaaattactataattaaaaatgcaaaaagtgtactggagctggtgggaattgaacccacgacttcttgcatgctaagcaagcactctaccactgagttacagcccctatggggcaataaaaattcggaaataataagtaattttcgatttctttgagtatttatggcgctttgctacactaattgagcaaaaagacaatcgaattaaattgattactcaattagtgttaatcaagcaaagggtaataaaattttttaattatttggtacttttagcatgtctttagcagtccaaatctattacctatatggtattttaggtggaataaatttttaaaattttccttgttttaatttataataaaatcagtaaaatttttatttaaaaaaataaaaaccaccaaaaaatttggtcaaaaaaatgtaaaaaatgtaaaaaatgtactggagctggtgggaattgaacccacgacttcttgcatgctaagcaagcactctaccactgagttacagcccctgtgttagagtggttttatatatttcttatgatagggaaatattaaaaaataaaaaaggagcaataccaaaattaggtaattaattaagaaaaaatatataaaatactcttcttcaattttcttactgatttttttttacctataaatccttttaattacctaattaaattattattatttccaaaattatttcaaataattcccttctgtcccttcctttcccatttgttcttctcacttcgtccaatgcctcctcaatgtttcgtcccaatttcgcctgtctttcgttttcgcctccgttttctctgttttgggcgcattggacaaaaaacgattggacatttgaagaggcattttgttgatggaaaaccaactgaaaacagttcaaatttatgtgacgcaaaacaaacaaaatgaccacaatttgcagatggaattgttccattggcgtggagaatcggttctgttgcgggtttcgaatgccacattcggaaaagggaaacctttccgggggggggggggggggaattgggaaaagaaaatgggacaaaataggaatttacaataattaattaaataaattaaattaaaattcggacaaaattcactgacgatatgttaatgttcggttcgttggtcattgagaagaaacagcttaacttgattaattcgttcgaatttaatcc

SEQ ID NO: 18403 - DNA, 1003 bp, Heterodera glycines
tttttataataaacaaaaataataatttcttgtaaaataatgaaaatggattttcatacgaatgtttaacccaagttaaatttaaaaaatgatgaaagaaaggattttgtgtcaatctaaaaaaactaaggatttatcggttactgatttatttaaaaaaattaaatttaaattaaaccaattattctctattatcctgcgaaattttaaaacaatttcgtcccattaaataagttaagggcaaaattttaaaaaaatcccttttcggcgccgcatgccatgcctttctcaccacctgtatgaatcgttttttctacggtaaatatttcatatagagctttcaaataatgccagttataataaaggtgatggcaaacaattatatttttatagtgtttttcaattttggcggctcaaaagtcagtgccgaactgtccttactcaatattgttaatatgtgctcaatgtcagcaccacacaaacctttgaactttccactttggggtgataaaaacattccgcacaatccgccaccattttgcacacactcactctgatggatgtgttcagaaacgcgaaaagcgaggcgctaaactctaactgcttttatttttcgaaattttgcattattttttttgaaaattccaaaaaaaaatttccaatttaatggattgacacagcattttttagccaaaattttgcatgcctcataggtggcattgccggtcagccgtgcaagctccctgaactcaagttgaatggaagcaatctctgcaagagtcgagtcgacgctccatgttggttgacggaaagagccgctgtgcaaattcacgtcactaaattataaaaaaaaattggggcctattttttttgtagattttgagagggtctgccgataaatagaaaatgctcaaaaaaatttgctggaattttgtcataatccatgcaagaaacggattaaagaaaaatgaattgaaattttttaaagaaaaacttaaattta

SEQ ID NO: 18404 - DNA, 1411 bp, Heterodera glycines
  unsure (1)..(1411): unsure at all n locations
aacattcgatgagaaaattttttatttatataagtctcatttaagcccgattttccatttgcctgtagggcactgcggttggcgactgnctaatggcgggaaacagacgttgtccaatatcctcggctttggtgagaaaaatttgttcgccagacaaatggtaggcactgagaaggcctccgagaacctgaaatttttgttgccactatttaatatccgaaaaaaaaatttttttttaattttttttcggtgagtggcgggtagtagcaaaatttcagaaaattttgccaccataaacaatgactaatttttctaatatttacccttatggtggtttcaaacaggctgacaaaacggttacgatcaaagcgcaattccgtctccacccattgtttggcgtccgcaaattcgtcccgcaaatccatgatcaacagggtatccagtgagtcgacgattgtaagacctagtccaaaaaacccagataaaacctgtgtgctgtgacctagaggctggaattttatatagaaaaaaacaggagcagaattgggaattatgccgggtagaattaccgagaattcaattgcggattttgtcagaactctgattccaagtttttttttaaagtcggaataccaaggtcgcgggaaaatcccgacgagattgcgatcccgtcagagcaaaacggagaaaaatgtatggaatttttttcgggcggggggtggacccagttaaaaaaaattcccaccatcattgcccgttcttcccagttggcttaaccgatgaaataagaccataatatttaccgcattccatccattcatgaaagctgtgcgaaatgggcattagttggtcatggccccaggcatattttttgtaggcattccacgcgtagcgaaatgcttcacgaatggcacgttgatgcgcattcgttggccctgaaaaattttgcgtaaagcattaaatattctaataacaatataagcagccttgggaaaatgcgatttaaaaaaatcagaaaattatctgactaattaaaaaaaattttaatcggctttttctaaattttaggattaattatgcttattttaattttttataaaattattttcgaagacttttttgaaaaaaatactattttttatatgaaatggcgaggggaaacgagttgctcccaatgttcgtatacctccgaacattggcgtttgtttcggcctggcaacagtttcattgtcaatgttttgctgctgttgatggtgtacatttagagtttgtacaccctttccagcaaaaactgctgcttctcgctgtccatctttgacaatgtgaaagcgctaaagaacgaagaaaataaattttgaaaatttggaaacaaacagactttctttttaaattcggcatttcttgcctaggt

SEQ ID NO: 18405 - DNA, 1376 bp, Heterodera glycines
cccgctttatccctctgttctgtctacttcccttttaccccaatcccccgcccgcccaattcatcttttttcatccattttaacccatccatcccttttctttgtcttccctaaaaacaactgtctctgccctatctctttctttcactgtctctgccctctctctttctctcactgtctctatctctctctttctttcactctctcttttcccctctattcctcgccaatcacttccaatcattcgtcttcgctgaccttctgccgttcccccgaagaaaggtctttccccaaccacaaaaagtgagggcaacagagtgacatttctcatttcaaatctcttctcccatgggaaaatgtcaccaccgaaggaaagggcaaagggatgccgtgtcctttttttttttgcttttcgcatcgattgccttttgctcggttttttcgacctgcaccgaaggcgtagccaatgagccgcgaaaactatcaacgcggaggaagtccaagttgcgaattgtttgtccgctctgaacagcgcgaccgcacggaatgtgaggctgatgagccgattcagttgaagaggaatcgccgaaggcggaatcggtgtcgggactggcacagaattcggtggcatcgccgtgggggaagcgaatggcagttgaatttgaagaggatgaagaagcggaggagtcggttttgtcgaaagactgaaaggggccgccgattgagtcggacattaaaacggagccatttcagagagacaatcacctgaaattgaacccttttggccaagtgttcaatcggagctgaacaaagaactaagttttgctgcttatggacggggtgacaattaggggagaagacggactgttgcgatttgcccgaggggagcgaagggaggccgagaagaagccgatcgcccgcctcgccacacagctgcgtttccaattcgagcagttcagagagaattgtgtcgagatcaacttcatctgaatcgaattgtgtcaaaacaaaccgaaccaaacttttgtttatgccaaccttttgcctgtgccatgctgaatcggacgacgtccaactgcggtttgggcggaatggcggggggccgttgtcgaaggatcactccgttggaggacgacggagggggagggaatgtggttgaagaagggggggaagacgaagacgagggaacagcagcggcagaaggggcggacggggaaacggcggcggaagggcgcgcgtcgattcgaccgccggtctctcccgctgctgccgtccgtccttcgcccgccttcgcttcgtccggcgattgaggcggggccatcggccgctgggaaacgatggaagacacaacggacataccctcgggggaagggggg

SEQ ID NO: 18406 - DNA, 1419 bp, Heterodera glycines
aacccgcgtcattttcaagtcgcgttccgcgtgtcgcatttaatttttgtccgcatttctctctgggcttgaggacaaagtaatcacctaataagccaatttgtgaaagaacacttgtaaattaaaacaaattttttatcaaaatttttccttattaagagacgaatatttttttaattttttaattaattttattattttactctttgattttgacaattttggtaaaaatgtttttagtccaatcatttcgcttactaaaaattcaaatcttttgctttttatgtgtatagagcagtagaaaaatagggggggggggggaggaaagaatagacggatgtacaaaactaatgagggccagatgtttttttttgtttgtttgtttggtaaggaatgggcgtcaaaattgggcaaataaatcggaggaaaaattggagggatgaaagagacgaattactaatgacgagggatttgggaggaaaggaatgaattaaaagggccaaatgacaaatgtcttccgaaaatctgttccctgtggcgggcaaaggccatcggttgaccaacgacagattaatgagattaattagcgatgcgcacgaaaacgaaggaaaacggacagaaaagaacggacgatgttttagctaataattcacaacgggatggactcgcacttctttaaaatgcataaaacgagcagtgaaatggaagtgaaggtggaaaggaagtgccgaaaaagaaagtgccattaaattggggccttcgacggcatcgttttgctgccgttgcgtgacatatccccgggccattttttgaattcatttgaatgccgcggcagaaaaaagcgggccaaaacttaaacgggagaggacttgcaatgttatacataaaagcttgttttgggcgttggttttttcttttttgtttgttgtcccatccatcacaaaacccattggagagagaagagaaaaggaggagattagtgtccaaactcacaaacgattagtaaatgtaatccctctgaaaacatttgccctgaaaaagttgcacttcacttttatgtataaaaaaattaagaaaaactcggtttacctcagttcggccccagtcaattttttgactataactttttttctttgccaaccaaatccaacatagttggcttcttagaagctttttcttagccactgtttcgcgattatcaaaaaagttatacatgaaaattgcgaaaagtcgaaatttttgaagttttttctaataatttttttccaggcttgaaaatctttttgcttttttgtaaggctaatagagtttgtgtaaagagctttcgaaagatatcaagatggttggatttggttgacaaagaaaaaagttatagatcgaaaactaagctgggccgaaccgtgcggggccgaactgagc

SEQ ID NO: 18407 - DNA, 2096 bp, Heterodera glycines
aatcatcaaatgtttctatgtgttaaatatcgtttattaataaataatttccgcatataaatatttattttttaaatattaaaaaaagtttgctcatgactttgtccttgaatgccatggatgtccttgaaaatttggtaattttttgaagaaaaagctgtttatatatgcaattaattttataagttttctcattcacttttttaaaacgaaaacaatttggccttgaatagttaaaaaaaaaacaaattttgcttcctttttcaattatttgcagttttttaattaccatttatgcccttgaacagtaattagctgtcctttttgttggatatgatggattttaattattatttgaattagcgccaatacagtaacgatgatgttcatgttatttgtgacgccatattctccagtcattattttctcccgctgttctgtctcattcattattattttattatcattttcagttctaaattatttctgttttgctccttccatttttgccttcctctgactccgtcgtcatcattattttatttgttttgttttattatttatttgtttgttatcatttgtcttttctaaaataaatttaattctgttgttccttgcggacacaacattggcgacgcccgtaagtgaaatgccttattttcatcacaggtttgagcgacgcgcacaaagaacttcgacaagagtgtctccgccaaatggaaaaagctcgaaagtcaacgccgccgaggtccatgactttggaagcacttctggaagagtgccgttccattcaatcgcttaaaaattcggctgccgctttgtctggtcccggacaagttcattcagtgcaggtccgaccgcaacgagtaagcgatggaagtaagaagtctaaccgaggtaaaatggtcaaccaaaagggcaatgtttcggttccaatttcgaaagagaataattttcctttcaattcaaatagaaccgatcaagatcaaaatgtgcagcaaaagtgcaagcgatgtggtcaattccatgtcaacgactgtccttatgcagccgatgtgaattgctaccgctgtggaaaacgtggacacatcagacccgtttgtcctgaacgtacgcagtcaaacgctgtcactgtggcctcaactttttgtgtaactcaaaagtgccacgattggatttggacacatcctctgatcaatggacatcctgtcaaacttgcggctgactcgtgctcgcatctgacaattattcaggagccactttggataagtttggggagtccaaaattgagaaaacaaggtaaaaaagttggtagtttttccgggcataaattaaatttgttgggcgaattcgattgtttggtgaaatttaaaggtgttgaatttaagctcaaatgttcagtagctaacaccggagctccaaacatcatgggacttgattggattgtgccgtttgagaaggctacgcagtctcccatcgcgacaacattggatttgtcaagcgccccaacaaaagtcaacacaattgatgaacgtccccgtcatttcaaaatcggtgacactgttcgtgtgttgaactatggaaaatctggcaagtcaaattggtttgaaggcaaagtcgtcgctggtaaaggtctgatttggaaagtcaaaattccacttttaaatattactgtcaacagacatgtaaaccaaatgcgttcttttgtcccttatcaatcagaaacgacgtttccgaatgatacagttgaccaagttccgcaacaaaagagtccttgccacagcactgtcacgactactccgccgaccaacttgccagttcaaccaacgcaacgtcctcagagacaacgccgtccgccgatacgttactcgccgtgacgacagcattatttaagaagggagatgttgaacttttaatttaagaagggagatgttggatatgatggattttaattattatttgaattagcgccaatacagtaacgatgatgttcatgttatttgtgacgccatattctccagtcattattttctcccgctgttctgtctcattcattattattttattatcattttcagttctaaattatttctgtt

SEQ ID NO: 18408 - DNA, 710 bp, Heterodera glycines
  unsure (1)..(710): unsure at all n locations
aaattgattaaacgaataaggttaaaatttntgaaaatcatatattggaaattaaatattaatttaattgtagaaataaataaatatggaaaatggaaattaaaaattggaaacaattaagaatagcggattaattagaattttaaatataaaataaaatttaaaaaaggttgggtttggttttgaaaatttaaaataaaaataaaaattaaataagttaagaaaaaatggaaattaaaattggaaataaattaataataataaataaaattggaatggaatgaaaaagaattaaattgatattttgaattaaaaataaaatttaaaaaaggttgcgttagaattgaaaataaattggaaatataaaaattgaatatggaaaaaataaaaacaatgaaataatatgggatggaaaaaacggcaattaaattgggtaaataagtttgaaaaatgagaaacgaaaatgtaaatgaaagggaaaaataaattggaaaataaaaatttaataaattttaaaatggaaattgaacattaacaatttattttgtgcagacagtcaattaacgacatgcggggggggggggggtgttcagcgcatgagttgggggcgtggtcccttcgctctcccccgccgatggggaggaaaaagtgggaagcgacgccgatcctgagcggtgctcaacactgccacaatggggaggagggggggg

SEQ ID NO: 18409 - DNA, 1619 bp, Heterodera glycines
  unsure (1)..(1619): unsure at all n locations
agcagatccagaaaataaataacataccaccataaacctgaaatatttctgtaaaataaagtattactntcaaatgaatgtttcataaattgggcgtgatttttaaaaaattatataaaaagcattattttataaactgtatttatttatgaaaaagaaagttattttgaaatttaggctaattgattcaaaaaatataatatttaataaaacaaaaataaaaactttaacaacgaaaaaaaatgaaaaataatttgaaaggaaacatgttttttagactcaattataataattatgtgaaactctaaacatctaaaaatacagcaaaaagtaaaaaataaatgtacgtgccaaagcttatttgctgaataaatgacattaaactttttatttttagtcgattgttgctcgtctttctttttaaatttatttttaaaaaatttaatattaattgattcggaaattcatttattggtaatttttaaaactttatttttaatgggtaaaatttttttctcactttaaagtcatgtctcgtccaaatagcccaaccttggcttgtattctctgtcatttgttaacgcgtagtttcatttcttaaattaattttctattttttatagtagcgaaagcttttatttaggatatcgaccgcaggaaaattcttgttcttataagtagccaaatttaatttataattaagtagattctttgtcttggaaatatatttgctaacaattacttatcatttataaattcaaaaactcgaatactttaattataaaagtattccagatttatttaaactaaaaagatgttgattatttattattatttattttgttatataattaaggtaattgctcttattgtgtaatttttattctcatcgagaccttaaataagtcatgcaattaaggaattattgtaaatacaaaaaataaagggttttctttttacttattatttatttttgtttctttttgttatttcacttagatagttgcacataaagtgttattttttattatcctctagatcataaataagtgatgcatttaatgaatttataaaagggtttacttttatactcgcgctcgtaccaagatatgtgtttgaaagatgtagcgttttaacattttaaatgctaattgctattttggtaattaacactagtatatatgtttttactatttattttcttttgataatttcaaataattttattcagtatattattttggcaatagactcattaaataatatttgaagtttaatttgggtgagcttttgtcattgtttttatatttaaattttagtaattatgaattttatttattatttctttagggataaaattttggaaatagttttttttttaaatttttataagattttgtgtgattttaatttatgtttgtatttctgacataatttattttatatttatagcggattgttcggttcatgatgtggagctgcaaaactgacaagttttgagtcggaaagatcgccgcaccaggcacaattaaacattgtgcctttagggatcggataaaaaaggcctaacaaatttcatttttccaatgttttggttattttggttttataattatttt

SEQ ID NO: 18410 - DNA, 2170 bp, Heterodera glycines
cgaattgctcgctcatatttcaacaatatttttgtttcctttcgcagggacattgtgcaccaatcgttcagcgactttggcttcctggtgcctggccgtgtcgcccgttacatcggcgttcagggcgacttggacccgttgttgaccggcaccgccgtgctcgagatggtgctgcagtttttggaggctcaatttcttcaacagcaacaacaggaggaggacgaggatgatgaagaagaagacgagtcggaggaggaagaaaaggaagaggaaggagagaaggagtcaaacgagagagaaggaggggaagagaacggacagaaaggaggagagcaaagggacgtgcggaacgagaagggggagcaggacgaagtggcgaaaaggtaaacaaaaagagtgcaaaacacggcccaatcccaaatttgaagttcactacatttcctctacccccctccccccacccccgaactggggatcctcctcgtttcggcgccagcccagtttttggactataacttttttctttttccaccaaatctaacattgttggtatcattcgagagcccttctgatgctctattattttgcataattccaaaaaatttgatcaattaagaacaaagttatggccaaaagtacacatgtggcctggttttttgaattcttctagtcataatttttttgagcattaacgaaattttttgaaacttagcaggctaatagagaacacttagagctttcgaatgataccaataatgttagatttggttgacaaagaaaaaaatcacgagagttggcgagaagatgagaggcgagaatttttcaatttttctgtagtcttttttttacttcaaaaaacttcaaaatcgtatattaaattagggttacgggtccgggtatttgggcaaataccgggtccaaccgggttctggaaaatccaaaaaaatcttcgaaattttttcatgaaaataaaagcttatagtttaaaaaattatataaatattttcatgaaatatatttacgagaccgggaccgcaagaaaagctgggaccggaccaaccaggaattttcgaagaaaaaattttttttgaaaaaatccaaaaattttcattaaaatgcatagattaatgataatttaaacacttttaaatatttctctatgtaaatgattgagtatttttttatttaatggtatttttctattgttttaataattgaaatatcttaaatttttgaaaatataaaaaaatttttgttcagttggggaattgaacccaatcgaaaaagaataaaaggcagaaggtttagtcaacagaccacatttgaatttgagttatccaaaaataatgttctttgattttaagacattaaggaagcagagaaagagatttatgatgtttttttttgcaaatttgaatatttttcactgctagaaagttcaatctttaggggtgtattttcacctccctcctttcgtccctaaaaacgagaggcgagagtccaaaaaatggcgagagttggcaagagacgagaagcgagagttgtcccacccctgttatgtacatatttttatacattttttggagtctttcgtacatattttcattttttacatattttgagatgatacatatttctggatttttgtacatattccatatatatttgtgggttttttttatatatttatactctgcaattttttttacataaaattcccatcccgataataatgctacataaatgttttcttttatatttttaatcagtttatttaattatccttttcaatttgatattttagtctcaaagcgaaactttgtcacttgaacatttcgccatgctcaccatgtacatcagtgagaatacgtttaaatttgtcaatttcattcaaaatacacgcggggcagcgacgcgcgtcaaaaaactaattggagcagcgaaaattaaatcaaattttatggaaacatttcagaagaaacttcgaaatccattatgtaagcagcacaaaatgtcattatatttaatggaaactgcaaagaaaaagctaaaagattctcgagggattattttgaaatttaataatttttttgaattaatttataaaatacaatcaaagcctctttaattactaagcgcactgatatataaatttcataatggtgtctca

SEQ ID NO: 18411 - DNA, 2107 bp, Heterodera glycines
ccccgatactataataaatatgttattttcttaaaaaaaatggaaatttatggcaaaaacaattacaaaaatggaaattttcgatttttttattcgactttcttataaattaaaaaaattttagcatacttagctacaaagaattaagtcgtaaatacacgcaataacaataatagcgcagagaaggataacgagagtcgaagctgccggacaaagattttatctttacactgtaaatttttcgtttactgtattaaaataaaataaaaggccaggctttttaataccgattcatctgactgatgaagaaaagttataaagaaaattttacttaaatgctaattttatcaagataattaatttataaaaattttcttataattatcgcaatgttataattctaataataatatttgtgagtgatcaaaaaatgaacaacaattataattaatcgcttaactgcatcacaaaccaaaattaaatgcattttttaagaattcggattaaattctttcagaaatatgacaaaactttgaaaccgtaatacagtaattaacaaaagataattatggtaatccaaattagtcgtttcttatcctttttgtgccccctaaaaattagacggattctcagataattaagactatggtcaaattgctcatccgttgaagagacattgaaaaattaagagaacaaaagtctcccccctcttgcacaccatcacattttttaaatcataatatgggtggcctttcataaaatggtgaaaatggataataaaaacgttgaaaaatggaaaaacatttgaattcataataattaaataaattaaaaattgagctataatttttttcttattgcgaaaaaatttttcaattaaatttattttaaataagaattttcaactgaaatatattttatgaattttttttgttggcatttttcacttaaccaattcccatttatttctttgggccaaaaaattggattattagaaatttaattgataaaatctttttataaagccttgaaaatgagtttcaaaaagcttgtacttttggccgtcaatttttgaaaaaaaaatctgagtaaaaaactaaaacacatttcctgtttttttcagattggcaattaaaaatgagaataattgcgagaaaaaagacaatatgattttaaaaaagtatgtaagaatattaattttactaattcaattataaatcttaataattgtttaaaacaataatattattcaattaataaattggtttattgggtttgtcaataaattaggaaaaattcttattatatgaggaaatagataaaattaaacaaattttttcactttaagcgtgtcaccattttacaaaaaaaagagtgatttttgcttttaaattgaaaagcaattgcattgtgacagggcgggcctcatcagtacagaccctgtcagaatgctaaaaaaaatgtgtttcggccctttctgtagacacaatcaaataaaaacaaaaataaataaatgtgatcaaacctaaaaatggggaaaaaataagtgaaatttggcacttaattagaaagtaatttacaagtgatcaatgggatttactcaaatgcaaacttacgcccaccacgccgatccaatcattccgtcacggcttcttgaattggctggcacgctgtcggcggcacgcagttgacaactcgcggatttgcacccatcgtagcagcacctgaatttgaaaaacaataaacaaaacgccaaaaaagtttacattattattaagatgcttaatccttttaagcagggattaattgttttacgccgtttaaagcaatgatttcattttgttaataattaattatatgttaaagcatttagcacaagagaaaaatggcaaaaaaaattgttcatttaaaaaaaatagaaaaagtcagcgccacatgcgcaggcaatgggaacgcaaattcgcgcgccttgccaacatttcccggaagacgctccggtcaagtcaaagaaagccggcaccgcctcccatgaggtcggccacagcgttatcatttggcttcttggggtgcgacaatttttgaaaaggtagttagggcgaggcttatg

SEQ ID NO: 18412 - DNA, 359 bp, Heterodera glycines
cggtgtcatctatgttactagatcggggatcgatccccgggcggccgctcgagcaggacctgcagaagctagcttgatggggatcagattgtcgtttcccgccttcagtttaaactatcaagagagggaaggtcagtgtctttgaaggaacggaggagtatcatcctcttaggcccatttcctcgccctattcatcggcacagagaggagcacgaaggggaggggagcggcgcgtagcgggggaggtgggtggcggaagaagaaaagggtggggggagtatgagtatgatggtcaatatggagaaaaagaaagagtaattaccaattttttttcaattcaaaaatgtagatgtccgcag

SEQ ID NO: 18413 - DNA, 1961 bp, Heterodera glycines
ataaggacatcggcataatttccgacattcgaacaaatccataacaagggaaccggttggtttacgttgaatttgcggtccccggttttgaggtctttcaacggctctatccgcaccaattgtcgttacgcgatcaccagcaactccaaattggcgcattggtttctgccacaactgttcaagttgaccgaccaccggacttggcaattgggcagtttggactcttcattttgccggccaagcacgacaaagcttcagatcagaaaatcatttctcataggccaattatgggaaaagggataattgaaacccttcccaagttccaattccccttcagtgccgcaactgacattcattttgctgaaaaaggcatcgcagcagcattgtcgtcttgttttcttaaaaatcggataaaaatggaagagttcgccattgagacaactctccacattttggacaataacggtaggacagttgttgccacttttgaacattttcttgacaacaaacgtaagtttgttgatttagttgaattttgggaggaagatgccgcaattcaagcgagattgaaaggggtaagaaaaacttgtgccaatggacagattttagaggtgaataagtatgtccaaggggggatgtacgtctttcaggcaagaattctgctggcatatcaagctgccaaaaatcacgactccgatggcgactttgaattcatttgtgaaggccatgaagttgtacttagcccttgtgaatccgcaacggccatggtcaatcggatgacactgttttattcgaattctttcagcttgatttcgtcggagcagagtggaaccggacaaatttggagagctttgttatcatcctcggatgaacagtccttgcctgctcaaatcacggagacgcgacacatacgtcatccggcattgaagcgccttgaaggtggtcaaaagcagtcggcaatgctcatgcttgatgatcagccgcgcattgttgcacaacaagcgcctcctggcagcggcaaaacttttactttggccgccatcgttgctgctctgctcgaacggcccgatgcaaaatttttgtgcatggcaccattgaacgttgccgtagtaaaaatttgtgaggaattggttgatgctttacgggtagagggggttgccgtaacgccgttagccctattttcaggaaatggtaaagggaaatacagggatcagcttgaccgcatctcggacaatttgcttgaggctgcagccacgtcagaggaattttggaaaaaattgaatgaaaaagagcaaaaggaggtaaaacggtacaaaaacatgcccgaaaaaggccgagaattgccaaagaggcgaaaattgcagaagttgtgctctcaattgaaagcaaaagaattttgtgttgcacattgggttttgcggaacaaattggcagactaatcatggacagaaacatgatagtgcttgacgaatcgggccaagcgccttttgtccaagtctgctcggtcctctcaccccttcaggaagttcagaagctgttcatcactggtgatcgttatcagctggccgtgaacatgaaggacatccctgaacaactccgagtcggcttcggctttgacacagttttactcaacacagactcatctcctggtgtggacaaaacaacgttggaagtgaactaccgttcacatccagaaattgtcaactgcgttgaatatgcggcatacacaccccatggtgaaaggctaagatcgggaccgggaatctttaggatgttgacgagttttgccaaaatgccaattgctgaatctccaattgtgctcattcaccaagattcgccaatggaagcggaagaaactagtttttctgcgaccaattctggtcaaactcggactgtcattgaccttttaaggagctggaggggttttcctggttcagtccgggtcatttcactttactcag

SEQ ID NO: 18414 - DNA, 2559 bp, Heterodera glycines
  unsure (1)..(2559): unsure at all n locations
ttcgaacctggacctccgaaaaataggaatttaaaccactgatcacaccgtttttttaaattttccccacttcaccaccttccctgaaggggaaaacacagccaaaattttgatttttgaggtccaataacttttctatttggcttcaacacaccgctaacattaaaaattcagagtagccggccctgcactatcaaatagttatgatacatgcattttctgacacagttctgacggttcccttgttagatttggcccaagctataagcttaattttgtaaaaaaaatgtattgtacgagttattgcctttgtaagaatggatagaatttcatacttaataaatttatgaataatttaatttttttaaaacatgtgaaacgaaaaaaaagtggctgccccatggggcccaatcggcggggcccaatcggcggggcccaatcggcggggcccaatcggcggggcccaatcggcggggcccaatcggcggggcccaatcggcggggaccaatcggcgggacccaaccgccggggcccaatcggcggggcccaatcggcggggcccaaccggcggggcccaaccggcggggcccaatcggcgggcccaatcggcggggcccaatcggcggggcccaaccggcggggcccaaccggcggggcccaatcggcggggcccaatcgacccggtccgttagtctggtgctgagcctgtccggcttctactagttttgcatttcaaacccataaccgatattcttttttctcctcttttttaccgtttcatttctgtccatccattcgtcgtgcactgcccacactttcacatcgaactgcttacagttggccctgttctgctgcgggttcatcaccaccacaatctccgcttttgtgtaccctttgaattccgccgccctttgctcaccgcccgcgcaaaaaatgtccactcgataaaccatttttgaatttggcgaaagggctggcgaaatgtcaattttgaaatgggtgccaaaagttatcctcaggttttgttgggcaatgctttgctcattcagacaaatttgttttgtgaagttggtgcgcttaacagaattgtgcccagatgtccttattttaaattattggaaattcatttaaaatttgatatggagaaacctttttaataaataataaaataattttgaaaatttgtcatttaggttaaatttttacctaataaagtttaaaggttgtgctttttcgcacatttttatttgacttttgattttatgcagttttctcccaacaaaataatttattaatttttattattttgattttttattttcaccaaaatttgaaaattcaaattctgtctgttgaccattccaatttccaatatgtgcgggtcctttctctctccacgttcaattcggataatttccactgtttcggcaccacgtttaattcgctgtgtgtatccgaccaaatgcgttttgttgccattttgtagcgcaaactgtccgaattatgaattaaaattaaatttatttgcataaaatatgtttttatggattaaatctgacattttattatgataattaaataaattgttattgactcgataggcgtagtctccgattagagtcggcaccagttccacgaccagcgcattttcagctgcacaaccgctgatgagtgctagcaatacgacaacgaaaggagcgaaaatagcgaaatttggcggataggggagcataaatatgtgtattttgaggctaattacaataaattaatcgtaataataagaaataatttaaatggttggggaaagattttaatacaaacattaactaaaattgattatattaaggcgattgacgtggattttattggaattgttttttacaatatcaaaatacaaaataattaaaataattatttcctttccaaaataattcttattcgaaattttgcaaatttatgaaaaataaatttattattggtggccgtggtctcatcactttgtcaaactctgatttttgcactttcgttttattttacggttagcgttgccgaaaaatcgaatttacaggacactatttgcacgtaccgctcaggctggctcggatgcagaatttccgggttcctttctctgtaagtcgacagagataagaaagagaaggagaacagcacaaatcaaaataagcattttagcaaattattaaaattttgtcaagaatgaaaaagaatttattgttttgaaaaataacaaattttagagtaaatttgggtatttaaagccattaaattaggcaatgaataaattattgtgtttattcaccatcgcttattgttaatctgtcaaataaatcattttcactttttatttattctaatatttaatttttattttataaattaatttcttataatttgtcgcttcaaatgactttttcttttgctgtgcttcttttgcttttgattcctccgctgacattggcaaaaaatgcgcgagcggagggacccgtgccggttgttctgtggcatggcatgggtttgttttaaaccgnggtgaatttgat

SEQ ID NO: 18415 - DNA, 2914 bp, Heterodera glycines
aaagcgaaattgcacctcaaagaaaattcaaattctgtgttctgccgcgcccgtccggtgcctcatggcgttcaagaagcagttgatcatgaaattgacttgaccgacttctggaaatcgacgctaatcgctcgattgatttttcacaatgggcagcgccgcagtccggaagaaaaatggagctgttcggatttgtatcgatttcacgaccggtttgaatgaagccttggaacttaaccggcacccgcttccaagaaccgatgacattttccattctcttaggggttcaaaaatattttcccaattggatctcagggacgcttatttgcaattggaactcgatgatgaatcaaaagcattggtcggaattaacactcatcgtggattattccaatatcaatgacttccttttggcgtcaaatcagcgccatccattttcaaaaagtcatggatcaactcacgtccggtattagtggtgttttcgtgcattttggcgatttgatcatcgcttcgccgaacatggctgaacatttattggtgttcaacgcgaactcaaatttcttgggcatattgtttcagcggacggcatacggcctgacccgagtaggtcagcagcaattcgtgaaatgccgcctccgcatgacctttgcacattacgctcatttttgggagcaattaattattatggtcgtttcattaaaaagatgagaaccatccgtgctcctttggatttgttattaaagaaggaaactccttgggaatggggtccaaaacaacaaaagcttttgaacaggcaaaaagtctctcgcagtcggaacttcttctgacccattatgatccggagaaaccgatcattgttgctgccgatgctagccaacatggaattggtgcgacgatcagtcataagtttccggatggctcagaaaaagttgtggaacatgcgtgccgttcgttaacttcagcggagaggaattattcgcaaattgaacgcgaagcgttgggattattttttgcagtccgcaaattccatcgcatggtttacggtcgtaaatttgttttgttgacggaccataaaccccttttggcaatttttggtggtaagaagggtatcccaatttacaccgcgtcccggttacaacggtggaaaatgaagacccgaaacaagtgaaggaagccgatcaaaccgaaatcacacacgttcctgactgtacgtaaaattcagtttgacaatgagcagataatattgaagaagcaggggaaggtaaaatgcagtgcaactaaatatgtgcctaccagaatttccgaagccggagtttgagaagccgtcatttccgaagccgccgccaccgcccgaagtgggactggtgacggaaggacgacgctccgattgaccgaatccgccgccagaagaaaagtcgttgttggagaagccaccgcccccgtcgctgtcctgacgattctgtcgaccgaatccgccgccacctccgcccccgcggcctccaccgcgtcccccgcctccgccgtcgttccaacgattgcctctcccaccgcgacgatttccgtccgactgattctgtgcgtcgccatctccgaagccttgaaatgacaataatcaatattttccaaggcaaatttcaaaaaaatcttatattagaaaatcttttacgaaaattctttaaaaaaaattttttgaaaaattttttagcgattttttgaaattttatggcgaattacatacactaaaacattaaaaaggggtggggtgtgaaaagttttttgcgaaggggggtcggccgctgagatcctgatgaccttttttttcaaaaccattttttgcggcgcactttttccaaaagaaaattcggggacatggggccggcggagccgataggtgccgccgggaaatttttgcgattttgagccaattttttttaagaaaaattgagatttttgggacttcgttgaaaaatttttcaatgatttttttcttgaaattttctcataaaaagaatattttaaaaaattcggggggggggggggggatgaagtgcactattttgatctcaaacaagattgaaatatgattcgaaaggatcacgtctagcattgtgctacttatggataattgaatggtacctaaaattcctaagccggagtttgagaagtcgacatttccaaaaccgccgccctaagtggcactgcagtcctcccgccgacactccaaatggccgactccccccacataagaaaagactgtgttcgagaacccaccgcccccgcaccctgtcctggcgactctgataaccaaagccgccgtcacatacataccaactacagcctaagcatgttatagctttgtccttttcgggctattaacgcgcgtaactatgcattaactaatatacatcactagaactaagagattgaaatgttgccaagaattttctcataatccacgtcataaatgatcaccgatatccgctgacgttgggcttcgacgctttccttgacttcaagttggaccaaatgggctctggctgctaatagctaagaattgaacaataaaaaatattattaattgtcaattttatcacctcattaacatcggctgctgcgccagtgacaaaaccgccattgaccggcagcgtattggcaccactggggacaattgactccaacgagcattcgtcctgttgctggaagcgcaatgcggtcaaatctgttgttaaaaaagcgcagatattttataaattttgaataattaattttctataaataataaaatatttttttatgatattgcgcagagatcaatctttttgagacttattctatgcgacaaaaatgaaaaatatatttttctcctcctttttaaataaaatatccttaattaattttttacgttaaatttttg

SEQ ID NO: 18416 - DNA, 1667 bp, Heterodera glycines
  unsure (1)..(1667): unsure at all n locations
cagcacagctgctgccgtgatcaatgtgggcacattctgcaatttaattcgtacttcgaaatgtaaaatatggaatcgccgcttccatctcncaaatgcattctcgacaataaccctgtttttngcatgtgcataattatattgtgnttgagcagcagttgtggggtttgcaaaaggtgtcattagccagcgacgtgttggataagcactatcacccagaataattccttggatttggccaccttcaaatgcttcccatacgtttgactggcggagaacaaaggcatcgtggctgcaaccaggccattggcaagaaatgtttgaaaatcggccattgtgatcgacaacacctaatcacattgctaatgaattattctgtccattttatatgtattgtaccttggacgttaatcgaggggtatccttttcgattaaaatagtccttttcgtgagcggatgctggaggaataattcgcacgtgtgtacaatcaatggcgccaattacaccaggaaaattagcaacattataaaagcttggtataattatttctctggcctgcaaagggtactaattttttgaccaaaattcattcataattccggtacttgttcataaggagcaaaataaatgaattttccagccaaatttcgtaatgctgtagtaactcttagcactgatcgggacactgtagattgatcaaatcccagcaaatcaccacagatcatttgaaaagaatttgatgccaaataagcaagagttgcaacaacttgcaactctaccggaattgctccccctctcgaacggccgttagactcaacttcttcacgcaccaaattagtaatgtacttaatttacttttctaaatgaatttataaaaatggtacctttatcccttccctgtcaaatcgaaatctcttatagagatcttgatcagacatttgggcgagaatttctgccctctttcggtaaatttttaccgctgtttgtgtctcaattggaaaaaacgcggcacacattgctgcagacaaaaaagtttattaaaataaactgaaaaaaatacaaagtgctaaaacgcaccaattaataaatgaatgtagcattatttaagtttctttctcatttgaatgctttccacgaaaaaattcgcgaccctcagtaaaaaatgtcttaacatcgtcaagaacatcctcaaattttttaaaaatttcttgtttttttgtcatttctttcaattgcatctcgagaacactccgctgcagttccattacatcagcagctgtaacagttgaagcagttccggcacgagatcggaatggcacgcgagaggtgcttgattcaaattttggagttttcaccgcctctccgcgtggcacagtgccaagaacggcataggactttccttcttcaacaacaacttgctgtgaggaaaattcggcactttcctcttgttctcttgcgatcaagcgagccaccatggcttcatgaatcgccgatgttaataattttatgtatgccgccgggaaattgatttgggaaaaatctacttacacattagctcgaacacatatctaccctcttttgatgtgaatcagcaaacaattgggaaacattgcgcgaaacttcagtcatttcgaatttctttccccacgctgtggcacgctgatgc

SEQ ID NO: 18417 - DNA, 1422 bp, Heterodera glycines
  unsure (1)..(1422): unsure at all n locations
ccttttctcaaatttttaaatttcttcctttttttctctaccgtatattctctaattatcgccccgtctccattaattatttccaattgtcaaagcatatttaacaatatatggtccattattgagtcccaaaattcttcgtttcatgggcacaaacattggcttcggcggagttaccacccattggcagcaaaatcccaccgcaagccaaaagcaaacagaacgccaaaggacgcgcgaaaataaatatttagggaaaatgcgaaaattcaatgagccgcgcatttagtctgtctgctgaacaaatagtaataaaataatggaataaattgcatttaaaaaattgtttatggaagagaaagcaagctgatggatgccaataatttccggtatttcgcaaaaaatttaggaaatcaagaatcagaggcttaaaataaaaaccaaaatttcaaggttcaaaaaatggtaatttaccgtagaaattgaaaaaatatcgtaccttttttgtaaaccttgagattaaaaagatgtgatcagacagatcaacaatcacttcttagatcagcgatgataacaacagatcagtcattctatcaaagctcttaattgattaggtcgagtttttaaggcgcgaaaggtgacctgatcaaactgatccaaatcattgaaagcgtttaaaaggtgattgatcagaccaattctcgaacccaatcaattcagagcatatttctcaaaaaaacctcctaaactggacccttctacagattaaacgcaaatgataaattgtaattttaatttataattttttttttaatttaaaattattatttttaatttccacgaaaatttcaaaatttctccggctaaaaatcaaatgcaaataataaaaaattatttttaaaatttccatggaaatttcaaaatttatccaacatttaaattgatcttaatcaattcgatgaacgaatgaatgaatgaataaaagtccttacgctgtacaaattttcgtcatccaattcattcattttgcctctcactttttcactgactcatcgaaaattcatttgggaaaacattttctcagcctttacacaatattttcattatttttttcctaattttcttttatgaaaatatttttctccgacaattttttttgttttggagtcaatcttttcagcaaacattaaactaaaatttatttgattaaattgtaaaaatattttatgttatgaaatttattttcatatgatttcattttttgattttttccttttcctattttttttgatcagaatttattttaaaaattatagtctcccgatttatttaattcccattcctanaattgtatacaaaaactgttggattttgtctagatttttttcgggttagacattctaaaatataaataattttttt

SEQ ID NO: 18418 - DNA, 1372 bp, Heterodera glycines
gaaacaacagcagcagcgggggggagggagggaatgtgtggacagaggggaataggtaattggaaaaagccaaaagggagggaaggaaaggaaaagcatgacgaagggagggaatggccacgaatcgccaaaaatgacagatacatccaatggaagggcgatggactgtgcgatgccaaaagtgggacgactaaatttcaacagaggacagcgaagggtgtgttccataacgtgcggcgattgcaaatgatcagaagcgaaagaattacataaatgtacaattacctatcgtgctgtcgcataaccacctagaacatgcgtgttagaatctagattagagcatcatgtctttgttagtggttgatcacatccaacgacgtcgggatcattagaaagctcttaactagctgtatcgtctatacaaaaatcacaaagacgttccgacatataaaaaagttataaattaaaatatgcaaaaattctgactttttggtagtgttcatgttgcaacttttttataagttgttcaatcgcttagcaatatcttatcaaaagcttctaaacatgtagagctttcgaatgatgccaactttataaaatttgacaaacaaagaaaaaagttatggtgctttatgcttggctcagacgcaactggccagacgcaactgacccctaccgtttttagcctccgattgcatattaaatatatgggatctctaaattcctgtttctaaaatttaaatgcagaaactttttgatattgttttgaataatacgattttattttttgagtgtttccaaattttaatttaaggaaatggattatgcataaaaatttgcaaatttttcatttcaataattttttcctattttttaaaattatttttaaaaaattttctaactcacctaaaaatatataaagtacaaaaatgtttctgtacccccaacaaacataaaaatataaaaataataaaaaaaaaatggcgaattgattggcttgctcattcattcattgacacaaacgacggcgacgacgacgaaaaacgacgaggcggacggacggacggacggacgataggggggagcccacaaaaacctcacatctccgcagaccaaccaaccaatccctccaacaccagcagaaccatcaccacccgagcccaagcccaataaccccccccccccccccccgtcctccgaaatcgatcaccacaaaacgccaaccacacagtgattttcgcgccgcgcttcaaaacggccattttttttgaaatggataagcgatcccgacaatttgttgttgaggctttggtgtgcatctgctctgctctaagaccagagggttctttttttgaactggaccaatgatcca

SEQ ID NO: 18419 - DNA, 2567 bp, Heterodera glycines
ttgtatcaaaaatgcaaagaccgataatcgtaaatataattgctctcgctaatctcggtaccggaattaaactaaactctctgacgatcaccgaatgcgaatttaagtataaccctagaaaattcaatgccgcggttatcaaatgtataagccccatcaaagccacggcattattatgggaatccgggaaaatgatatgtctggggacgaaaagtctgatagactgtgaaaatgcgataaaaattttcatagaaataattaagggctcggggtgtccgggggcttcttacacctgacacacgattgaaaatattgtttcgacctttaaattcggacatgaaattgaactgaacgaattcagaaaaaatcgtcgtgcattttatgaaccagaaatattttgcggtttaaatttcaagcggggtaaaagcatgacagcgttaattttctggaccggtaaagtcgtaattacgggaactaaaaacaattctgaaattgaggaaatgtatcatcatattctcccctatttgaaaatggctcaaaagaatttaatgagacgataaaaatttttatttattgagacggtcccgaaattcttgcagatgacctacttttgaaaaagtttttttttcaatcctaatttattattatttttcaattttatatttaaattgaatttaataattatttttactgtaaaattcattaatttgctgcaattattaattaaatttgcacttctacaattccattattgattaatttgcgcggcggcggcatcgtggcgcggggagggagggcgtggaggaaatgcaaaaaaaaacgcacattggcaaattttcaaaatgagttttaatttcaggataaaaaatcatataaaaaatctcaggatttgagaaaataccccaaaaggtttggaatcaaaaaggaattaattggcaaaagaatttccttcacctgtcactttggtgacaggtggatgattgatgaccttccgcggcgctgcgcggcgcggagagggggagtgaaaaaaaaatcgccagtgcggatttgaggaaataaaatctacaaggcggcagacttcaaaggactgcacccctcctataggcttgggattgtgcgggaaaatgtccccgggcggcaacatcaaagggctgcgcccctcccataggcacgggtttgtgcggtaaacacccgtgcgcaaccgtgcgcttttgacgccatatactactgttgtctctttcttctcctctctctttctctatgttttccatactctctccatttggttgtctctttcttctcctctctctttctctatgttttccatactctctccatttggttgtctctttcttctcctctctctttctctatgttttccatactctctccatttggttgtctctttcttctcctctctctttctctatgttttccatactctctccatttggttgtctctttcttctcctctctctttctctatgttttccatactctctccatttggttgtctctttcttctcctctctctttctctatgttttccatactctctccatttggttgtctctttcttctcctctctctttctctatgttttccatactctctccatttggttgtctctttcttctcctctctctttctctatgttttccatactctctccatttggttgtctctttcttctcctctctctttctctatgttttccatactctctcctctccttccatctgttttaatttaccgttcgattcgttcactttgcgcagtttcccctggttcagatgcaacttcggtgcgtaaatgatgtccttcaccaagttggccatgtcttctcccaattgtccgctgtgcgtccattcgtccaccagcaaatcgcataagcggatgaacgaattggcaccgctttccagcagtacgacgccacggcggaagcagtgtttgagttgcagcaaagggtaaatgctcagcagagagatgtacggcttggaaaggcgcgtgccggcgccctcaacgcactgctccaacttaatccatctgaccgtgccatattagagtgcttttccatgctggataatgccgaccggtgcgtctgttgccaaaagagcgtttgctgaacatttgccagtgccattggactggccgccgtttcggcacttccttcgccactttcgacgactcgttcagccaattccgtgttcaggtaaagcatttcgcagaagagggcattccgatggctgtggtccgtctgcgaatgttcgcccatcgaactgcactcgcagcagccattcgactcgagcaaacgccgcacattgtcaatcggaccttttttcaaaacacattttgccaatcccttgctgttcgagagtgactctcggccacttttgcctttttaaccctttgccaatgtttcattggctgtgaatgcctttcggctttttccttttccctttttgccctacaattcccaaattagccgatgactgactttcgcattggcttcccaagttcacattttgcggcattagcagtgcgtccgttagcatgttgcactcctc

SEQ ID NO: 18420 - DNA, 1296 bp, Heterodera glycines
ttatttttgcctttatttttttggacggataaatatttaaaaatatgtctttcacagagagacaatttttcacaaattaacacaatgatgactatatgtacaacaccttggttccaaaacatcataacctattaattgattaattagctaattagcgcacatttccatggtcaaaccagcgcatttacaatcatgtgaatgagtttaaatatgaagacattcacaatgagaaaatgcactagtccaaataaaggagaagcagaagcaaatttcaattttaaattattaaagaataaaagaggtaaataaatacataaattattcagggagcaaaagagaattttgtgctaatttgggttttggtgaatggctttggcatctatcatttgtgcttttatatgccatgatgtctctgcccatctctgctgttgccattttgtttctcttctctcagattaattgccgttcatctgtccatttgattttacttgggttaatttgagcggctaaatgccctcctgctagtgaatggggacgggcggcattttctttgctcgcacaatggcactttgggaaaggtaacttaatcttcaaccaaaaaatgaaaaacaaaaatgaatgggtttgatttattttctctttaggccgaaagtgatcatttaaaagtgaatttttataaaaattaagcatatgtctaaataaatgaaccggataaaataattggcaattccttagaataagaatcagctaagcttataaaatctattgagaaatatttttttatattataaaattggtaatttaggcaaaatctgttaataaatctcacaaaatttttctcaattttatttacctttcttcttaatcactttttcacatttaaacgccacttttgttcatattgttctcacaaatgcaaagaaagaaattttagtcaagtagacaaaatgaaaacatttaaagttaacctttttattttttcattaaaaatttctttattaaaaactaggtacctacctaaaattatctctttctaacaaattcaattaggtaatccagaaatgtttttatattccataaacaaaatgcataaatgaccttacctaattggttccgcgattgggtggtaattaattcttccatcgtatgtttgtatttgtttttcttttgcttttctccttttggcaatcatcccttcccttttaatttcgtccttttaaccatttcaattgaaatccattcgtctttcatatcagctgctgaccgaagaatggaggtcaaacgctcgagaaattt

SEQ ID NO: 18421 - DNA, 1166 bp, Heterodera glycines
cccccccccccccccgcgccaccaaataaatatttgtaatgcaattaaatttgccccattaatttctgtcctttttataacatttttccccgccttcggtgaattcaattatcctttatcagtgcatatgccaattttcggactcaattacctcattcagttcactaattgaattcactttcacatttttatttacaatttcacaaaacaaagacaataattgaaatcaaattcattgacacaccaatcgaagtgctaatttaatttttaaatcggctttggccgggtgatggcacttacttttatcagaggcacattaacacatcgcattaactcattgttcgatcaatttagaaatatgtttatttcaaatatcctgcaatcaaattcactttttacaaccaaaaaatggattaaaacatttgttatttcattagtctttcgaatccatcattataaaaaatttttaagacaaattcatataaatacatttgaacaatcacattttaaatatatcacatttaaataaagctaactatttattgttttcgttttcataaattctctactttttagtgtgtgggatgtgccaaaaaggacaatggcatgcgtttggtgccaaatttatccgagcaataattttggaaggccaattttccgaacattgctttaaaatttttgtaaaagcacaagcagtgtaaatggagcagatgagcaaacaaagtctgctgctgctgctcttttgcgtggtcatcggcacaaaaaaaaggaaaatgaaaattttacccatttgaaattttagatttttacggcacaaatgaaattcaaataaaagcattttaagacactgctgcaattttactttttacttcttcccgtctagcaaataaaaactgccgaacttttcaaacaaatctctttccattttttcaattttctaattttacaactcattaatttttcttagcgctcagaacaaacatcaattttcgcttgtgctttatccatttgactgtgaatggcaataatccatcgcccgtggcaaaatcaaaaaaagatgccatccgcgcatttccccaggctttagaaagcattccaaatttatgaaaatccaaacagaaggtaaaacataaaaattttatttgtattagagaaggtcgggaccg

SEQ ID NO: 18422 - DNA, 2186 bp, Heterodera glycines
aaagaattaaagaaattctatcatcttctctacattttttttttgaataaacatttaagcaaattttggtttctcaagcgattaaatttgatggtttagggattagagtaataactgttcaaatagttgaaatctcttcatttttatttgtctttattttatacttccatgcatattcatatactattaaaaaaataaaatttgtatatttatatattattcatttatttatttattatgaaaattaattgatttcttaaacttaacaaatttaatacaacaaaaataacgaaaatatgtaaaagttcaaatgacgcctaaacatttgtgcggcaaatacataacatttatttcaacaaatgttgctccttttttaccattgaatcactttaaattctttaccaaatcatatgaatgagaataataataggcatcgctcacttatgtaaaatcgttttttatttgtaaagaaattaaattttctttacaaaagaattttaattggtttcaaatcgatgggcttccaaattcggatggttttgctgtgtttcaccggttttgtactgatataccatttgttcaccaacaaacaaaacgaatgggacgatggaggacggacgacggaattaaatttgacgcaagaattatacgactataaaaaccagagggtattataataataataatggatataaaataactaatacacaaagataggggggggggcggggttggcattggcatgccatttaatttaatttaataactgatactctctcgactaaattacgagttttagaatgatttgaatttatttaggctaactcagaaaattggtctcctgttttgagaagtaaaagtttaaaattcctttttaaaatgaaatgagtgatttggaataatctttaagcatttaattaactttaattaagaactttttggttcggtttaaaaacattcggctgacatatcggatggaatttgcaaatgcgtgtcccaatgacaccaagctgatcatgttgtcgatggcacgaagggacggcttcgacaagcggaagggcgtgcgtcaaacgtggatgaatgattcggtaaataaatttttctttaaatgctaattaattaattaatttttatccccctgttgaaacgattcgttttttggtcgccgatgcggcgaaaggcgaagcgaacgaaacgcgtaaaaagttggaggaggagcagagaaagcacggtgatttggtgtttctgcgcggttttgaagacaaatacaaacacattcatcttaaagtgaggagcaaaaaaatttaagaaaaattattaataagacaaaaaaaactaaaattcatcaaaatcattaataactgagaggtgaggtactttttaaattaacccaaaagctttttggtggccttttttctaatttttataaagcagtgccgacatgcgccgattggaatttgtaaattttagtgggacatattagataattttgatggaaattaacgatttagagaacaggacaaattttaaagaatcataacaaatataaaaaattgacattcaacattccgtaataagtggtacaccgcgctccaatggcaacaatcgttttgcaaaagtgccgaatgggtgatgaaagcggacgacgacgcggtggtgcacctgcgccgtttgtcgcattgggtggacgcaaaatttcgtccaatcgccgcgaaaaatccgctcatttacttcggacttgtcttgttcaacccaaacccaatccgaaacacaaatagtaaatggtaaggaataatcgattatgaaagtcaattaattaattctttaaaagattaattattaattacatagttctattgttaaatttcttcctccatttggttttttaatttctaattttcgattatttgattgatttctcttaattttggcatccaaatcatcttattttcaattatttagctttatgaaattttgactttctttgagttaagtctttggaattctttttccaattataattaattatttaaaaataagaaattttgcaattctttcagcggcagaatattttttatgctggtttaggtacatttcggaggatgtttacccgttggattggtttcccagtttcatgcagggcacaatgtatttgacaacaccggcaacagtccgtgccgttttag

SEQ ID NO: 18423 - DNA, 2851 bp, Heterodera glycines
  unsure (1)..(2851): unsure at all n locations
tcgatagttcgaaaagacatttgtcgactctttgttcaaatntcgggttataccacctctgaaaaccacgggaatacaatttcaaagcgcatttttctaatattaaaaaatggctacccaattttaaagctgggccaaatttttccaattttttttttgtaaaacccaaaattcccccgcatttccaaaaaaaacctgttttgagtccatttgtccgtccgcgtcgatcagactgtccaccagccttggcacagtgcccgctttgatcacccactcccggatggtctcccattggaggtggtccatcgccacggcagaaccatcagtcagcgctaactgttgttggccaagggctaaataaatgacaaaaattgggatttggttttttaatgaaaacccgggaatttagagggaattttaaatcgaattttcaagggatatgtctccgacagaaattaaaacaaaaaataataacaaaaaaatatataaaataacaaaatcaaaacacaattctttttacacattttttggtcggggattagcccaattgtcccacttttcacataaataaatatttgttgctaatccgtgggctctgcccaccatttcccccttttttcattaatccccacaggcattttggtgacttgtactgataaatcgggaagtggtttggcgttcttggtcctgctcatcgccccccccccacggcccaatggtgcccaactctcgccgttgcccgtccatctgttgcccgttgctcctcccaacactgtcgcccacccaccgcttggccccaccaatcaccactgcccgcccaccaacaatcacccgaacactgtggacccgcccatcccgtttggccgtataaaaagaatgaaggatgctcgacaattacttactcttctgggcgattacttttctcgcctttttctcgatttcgccatttttgctctacctactcgccatcaatcttggctttcccctttgcctttctcactttggctttaccattttcaccttgcttatccatttcaattttgccttcgctttaaaaataaaaacaaaaaaaaaccttttctcttttggctttacattaaatttctccgcgtttttggcccctgatcatttctggggcatttctcattttggtgctcttttgaccattgcgtgggcattcccccgtttttggcccttttcatcaccggctactcctgcccgtggtgcctattttgcctttgctttagccattgcccggccattttgtcgccgctttggtcctcgttcgtttccgttgcctttggccagcattccactgactcaggcccctttgtcccttttttggtccccccctttttccctgtgtttaccacaagtaccaaaaaaataatggaaaacgcataaactgaccaattcagactgaagaacgaagcgatttccctgaataagaaataataaattaaacaaattttgcgaaacgaagttcacttggctgagcaatcgactgacgcaggcgaaagtgtcatcaggggaatggtaatggaggaaaacggcacagagcgggtagagaacctgggaaattgaaaaaatcagacagaatttaaaaaaaagtaaaaataaataaaacaaaccgggacaaaacgaatctcgggcttggcgtattcgatgacctaaaagaaccaacaaggtcaaagcgtacaagaaatgatataattgtaatacgatgaattcaattccaaatttaaattttgtaaaacattcattggcttacgatgagcagccgctgcaagttgatgacgccgacctgcttcagtccgtggtcacaaacgacgatgccgggctctgacagaaaggcgggtcggaaattctgtgctgaaagtgtcgtggaaccgatttttgggttgggcgaaagcggcgagcgaaaaattcgaaaatgaaacaatttggcattcgaaattattggaatggccattaacttctgttttattttttggcccatccctttgtgacgccgtgggaaaagtgtcgccgttttaccctttccacgaaacaaagtgtcaatgtgttcgtggaagaagtgccgtgaggagtcgaactccttgtccccgttggagaccaacacgcgccaaaggtccctccgaatttcgtggctgaccggccaattgttttcgcgcagaaagttcttcaactgaacggttagcggacctcggattaaaatgatgccaaattttggagttaggacttttaaatttttaaatttttcatgaaatttttgctaaaacaataggatttttaatgaaaattttctaaatttgatcgtattaatttcgacctttttttacctggcgaatgtgtttagggttcaacagattgagaaggtcttcttttgatccgtacgacggatggacaaatatttcggggcggagatcagtgaaatcggtgaaaggcggaagctagaatttgaaaatttaatgaaaacagaactaaatgaacacaaattatagccctccattttttgacttacgcttaaatgcaaatccatttgtgaaagagaaagtgaaaagatttaaaatggaaaaaataatgggcactaaattttgcatatttccgattggttttggttgcctggcaacaaaaagtaaactgaaaagtaaataaattccgaattacaaaatgggaatttcatggccaaattcattcactttgttaagattctgaagtgagtgagggcccactacaattccaagtgtttcccaggattcgggtgacacataaaacgcaaaacaattccattttagtatggttgaaaaggggcgcggcatccgcgaattcccatccccaaaagtgaatg

SEQ ID NO: 18424 - DNA, 2777 bp, Heterodera glycines
  unsure (1)..(2777): unsure at all n locations
ctcctttggcactctttcctcgcccttggcactctttcctctcctttggcttcctctctcatggctccccccaacccaacttcgttttccttacagtgggcggtctcatcgccgtcagccatcgttctctgtcgctttcgctgtcggcattcagcaatagttccatctgctgattgcccctggcattctgcgctaaagtgcacaatatcaggtgcaaattgctgctgctgctgccaatggcgtgcagtgcgcgcaagggaacgcgcgcgtcgtttgcctcgaggggttcggcgaagacgaagcgccgaagggcgtaatctttgcagacgaaagtgccgttggtccgccctttggtgaccagcaacagatcggagaacagaaaaagcatctgcaccacaacaaaaccaacatatcaatggtagaaatatgcaaatgattgaaacgttaattaatcacttaattaattaagcgctaattaatcaaataatacttaattattaattcgttattttaccaaatgccgcgttttcagtgcgctcgtcccacggcgctccaccaccagctgagagaggcgtccgcttttgacgagataacgcccgctggacaccagcggaacgcggcgcaattcgctgcctctgtagacgaccttcgcgtcgatctccaacagttgctccgtctgtgccattttccttgctccttcgttgcaattgtgcacaaacggaaaagggaagggaatgaatgtgccattgtctccgcttttccgcgccttcgcttgcctggttggccaaagtcagcgcccgcgtggcgacggagtgttggattttgtcgggatggagtcgttctcgaatggcgaaaatgagcagcggatatcgagtgattcgctgcataggcagcatcagaaaagagcgcatgtccaacccttggcattggcggtccgtctcgagacgctgaatacaggccaagaagagcgagttggacgccctgtttgggggggggggaagggaatatcaaggcaaatgccaaagaaaaattcaaacactgtgaccaacttcaacgccttgagggtcctgtcctggtacaccttaagcaatggaatgtaaatggctcaaattaggatgtgggcttgatcaatcacttggttggagcagtagctgatgtatgggctgaaatggcactcgtaatagtagcaaaggatgtcgcacagttcgctcagcaccaaactgtccttcagccgcgtctccaagtcgcacaaaaggcgctcactgcagtcgcgaatcgcaacaatattactgagaaaaagtacaaatgaatgggactatttgtgctaatatgaggaccacctgaacaaatgtttcctctcggaagtctgaaaagtaaaaaaataaacgagaaaatttgacagtaaaaaaaacagtatatattcattcacacgtaccgtaatgatggaacggtcactctttgagccgagcaattcgggcgaggacataaagtgggaaatgagaaaagagagcgatcggagataggaggcctcggaagtgatcacctggcgaaaaagcgatttttaaggaaaacccaaaaaaatcagccgacttcgaaataggcctcctgcaatttcttctgaccgtcgtccaattggtcgagaaggcccgcttctttcacttcttaaaagggaaagagtgcgaagtaattaatggaataaaattgagtattttaattttaaataattaatagctgtaattaatgtggacaattaattaccgggcaattcgcaccaaagtgaccgttgagagccgtatttgctgcccccaagcaaacgttcccttcggaccggcaaagtgttgggagtgctcggatatgaggagatacgagagagcgaatcagctgaaaaacggcgggaaaagaagtgaaagggcaaggaaaagcatttgggaacaatggacaaaaaaaaatcaaatttgggacctcttcccgaatcggcggacgatgaggcggtggacgaatgacgacgaatgttaacgacggcagaggaggagctgacacttgcgatatcagtgggatcattgcaaacgctaaaaaagcataaccaatcacaacgagcggataatcggaattgatggggagaatggcattccccggacccgctaggagatcgaccaatgatgccatcccattggggataaaccgatgatgccatcccataggcaatgatgccatcagcatatagaggatcggctgatgatgccatcccattggggataaaccgatgatgccatcccataggcaatgatgccatcaccctatagaggatcggctgatgatgccatctcatgatgggatcggccgatggacccgccaattaattcagagacaattcccagtagaagccttccgtctgaggcatcctcccttcctctgccgacctgtccgtctcctccaccttgtcctgctcattgcgcgtccctcgtccgttcgtcccccgctgttcttcccctccggcgatgcatttcgattggctgtcccacccgctgagttccgcgatggtttctaatcggagaggcgcaacggcggtagaaatatcgtcgacagtggtgagaatggaggagctcgggtcggaagcggaaatggaagctgagggagaggaggaggcggccagccgaagtgggtcagcagcagcaggacgaaggtagtaaatctgatagagtggctgttggatgngcaattgggaagagtacacgacggagtcggaggggcaccgctggggggaggggacgagcgga

SEQ ID NO: 18425 - DNA, 2468 bp, Heterodera glycines
agaatccatgaaaattaaatatgcgacgaccaaatgacagtcataagtaaagcccaaaactatgaaaaggggtgcaaaatcaaataagccaaagtgccaaggcattaattgcctaggtaattagtcattttcatccaaattgtcccctcccctcgtcgcaaaacccaccgtctttcaacgcattggcaaccgcccgctgtccgtcgtaaatggcgtccttcagctgcatgatgctgtgcctgttgggccctttgagcagcaaagtgaccgacttgggacttttgcactcctccacaaaagtgtatttgtcctcgccctaaagctgtacggtaatccatgttgtatgttacagtacaccaatgggacaaatactgtgacaaaccccggccaagcaacaacggcactgctcccccttaactcaccaccacatgctcataaacactgcctgcccagccgagcacatcgggcgtcaggtcgtccaccgaattgaccgcctcgccgccgcaggccaactgcagccgttccatgttccggcgcttggcacgtcgcagggccaaaatgccgtgctgcgccaacaaatccaacgacggcggatcaatgcccttgggggaagcggggattagttatttttttttaaattcgagagcattcccaaataaaacaagcacacaccttttggttaatcaccacaaagccttggtctccgccggcacagaccgtctccttcagttccacaattttcagcactcgtcgcgtgatgtattcacgctccgcttgcagcaaacgttcacgctcagccgccgtcttgtagaaaaggcccgaattgacctcactgaaaatgagggattcaattaaaaaacaaataaaaatccaggatttggcatttccatggtaaacaaaatttttgtcccaagtcgcttggcatttctagggttcttcaactctttcgacggattaaataaataaaatgtacgttttctcaaactccaacgaaacattgcatgtcaaaatgtgcacgtttcgcacactcttcggcatgtccgggtgtcggccgccgtggtcaagcacgaggccacggatcagctgcgtgtccgtctccatctcgtgttccatttgctaaaggtggaggacttttttacaaattcagtactttttcatctgaattttttggaaatgaaagaaaatcgaccaatatgaaacagaataaacccatttttgcacctgaatttcaatcatatgcaagtcgggctccgtgtcgttttcatcccgacgaattgccaaaacggcgtccacaacacattctgagaaatggggaaacaatgagtattgaaagcagtttccgacttttttttgatttaagtgtcggaacaaagcaaaaactcgttaattacacaacgtctaatcaaattttctgagaattttgtaagggttttatgaggttcgtttgctgtttaagagaccaacccgtgacgtggtcggccaacttttggtccaattttgtgcgcaacgtcgtcctggccacttcgatgagcagcggccggtcgataggcaacgtctttttggaggcggccaacagttggagcaaatggtcatgggccaattggaaaccctcggtgaccaaatgggggtggacaccctgcggtgaaaaagaatgaaaaatcaaaaaaatatcagtgacaccaattaatcgttatttaagcgagtcactaaaaagactacaaagttaaggcgaaactgtatttcgccgtccgaaaaataaaaggaaaatgccaaaagacggggtgtgccgtcgcgttttgtcactaaaccagggttggaccggattccggagtttattgggcaccggaatacccaacattatccgaaacaatccctgccacatacctcgctgacgtaattctcggcctgtttgagcagttcgccaatcagcagaacggtcgacgtggtcccgtcgccggtgacgtcgttttgcgcggtgcacgccttggcgatcagtgaagcagtcggatgttggatttgctgaaacatttgaccattttaaaatgaaggcggtattaaattcatgtacatgttttcatttttagagaattattttacatgcaagagaaaattggtcgagaaatcgtagaaaaatgcaaaaaatgagaaatttactcggcaaatttacgtttgccaaagcaaaacaaaaaacacaccatttcatggagtaaaacattgccgtccttagtcactttaaggtcacccgaaccggagacaagccttaaaaaaagaaaagcagaaagtttggccagattaattgttctcgaaactttctcacattttcagcgtgcccttcggcccgaggttggtcttcatcacttcctgcaaccctttagcaccgctgatgttcatctccagtgcggccgcgtgccgggccaactccgcttttgggttcaaacatgcgatggaagccatttaacaggtaagca

SEQ ID NO: 18426 - DNA, 213 bp, Heterodera glycines
cccctttctccctctatccctcccctttctcccctctactcttccccctttctccctctatccctcccctttctcccctctatccctccccctttctcccctctatccctccccctttctccctctatccctcccctttctcccctctatccctccccctttctcccctgtatccctccccctttctcccctatacccctccccttttccccc

SEQ ID NO: 18427 - DNA, 1530 bp, Heterodera glycines
tcccctctatccctccccctctctccctcccccttattccccttcttgtctcgtgtcttctcctctcttcaccaaaccgatcacctggaaagcactttgcacttcggattggcacgaataagtggggctaatgaagaaagaaattaatatttttatcacagaaatgactgatcaattacgggcaagggttgttgggtccattgatggcacatctaaccgccatttttgaggacggatcgcgatactttgaaatgggacatttttttttgaatggataaccaatttaaccaatgctttgccgatcggacaaaggtctgtagtgaatattttgtgatgaattgaattatggccttaacaaaaagcacctcctgaaatggacgcgcagcagtaatagcgatttttgggcgcgttgaaacggcacaaataattggaggggcaacttccgtccacattaatgagacactcgcgcacactcatgtccaacgcgttcacataggccttttcaccctcgggacaaacgcctgaggggaaatgggaaaagaaaaagccatgaggaagagggaaagatgaaatatccaaggggaaatcaaaacggacaacaccaataccataagaaataacccacgagaaatgaagcaaatccactgaacaaacccatgtttgtggcaccgcagcagacgctgttcgtggacaaagggtcgtaggtgcagacaaagttgttggggcagctgttgctcagcgcggaattgcactcgaatggcaactgaaaaaggtgccgggttgagagggcaaatgccaactttggggtagggggtggggagggcgacctttgtgtttgggttcacataagccacgtcgccgggagtacaagcggccgaaaggcaaaaattgttgcactgttcgatggtgccgaaattgttcaaattgccgctgcatccgttgtaagtgaattgggtgctaaacattcataaagcgaacgaacatctgtcaatttgtgttatgaatgaacggaccgaccattctttggtgacaatgttaaagtaatagcgagacgaagcggacgaactgcaagtggcgccctgctgaggcggcagggagcaaatgtaagctgagggagacacactcattagtggccaattacgctaatgagcacctctggtgggacagcagcggttgatcacgcttgtgccggtggtcaccgaagtgcactgaaaccatttgtgagccttcaacctgtgccgccccccgcccacgttcccttggaatggcactcgcctcgtgcgtggatgggcaattaactcccgtcccacaaacgattaattgtccgaattcgtttctctccggcgtccctccgtttgggcatcccccgactccgcaataactctgccattggtttctcattttttcttccgttctctcttattacctcacaatcgtcccttgtcgcagaaattattcgaatttccgtcgcatccgttgtattgataagaagacgcattcttgcgactgcgaatttaaaagtagcgataa

SEQ ID NO: 18428 - DNA, 3319 bp, Heterodera glycines
  unsure (1)..(3319): unsure at all n locations
agagtgaaattgtcagcaaaaaagcggtaaaaattgataggacagnaaggcaatggatggcagtccggttataatcgaaagagtcttttgatgcaaaatcaaactgcagcagaagcttaacagataaggagtcncaaaanttcaagggtatgtaagacgcacaaatacgcatctcagagcaaaagactggtatacagtaaaaagcctgtttaggctaaacccggtaaatgatgtagcatggtcaatgaccgacgaatcagaagacgattcgttcgataaaattgctgttgagcaaataaatgaatcaatgaaaaaaattcgcgggaattaagccagacaacgtacaaacaacacataatgtgcacagaagccaaactgaggaccgagatttcgagagaaacttcggattcccaaaaggtcagtcaagaaaattgagaacatttacaaatagcaaattcacatttgggctattgagcctttttatgttgttgggcgtaaatttatgtcaaaaaccaatgatttgtcacagaaacgtgccatcaagatttgtcaaaattggtcgaaacaatagtgcctgttcagggatatctcaaatatttgaaagaggtacaaaaaatttagaacttacattgtatcgtcctgaccaaaaggaatacaccttttgggggcatcaatgtttactccttaaacattcggtccaattttggacaaatttactgaatgatccattcgacatcaaaagtcaagaaatgatgccgatttttgccgaagaatgccaagaaatctccaaaaccaaaaaatgcagattcggcattctagtaggtgactcagacggtaccatgataacagaaaataaactcatttatgagcattatttgtggtcttggggtaaaaagtctgttgagacggttaattgcatagtcaacaatataacaatcattggatatcccggatcccaaagaattgattcgattgtcggagacctccaacattgtcaatacgacgacggcagatgcagtttacacgattcgattgtagtttgggatgttgatcggtatcacacatctgaaccatgggcggctcgacacggacattgcgtttttaaaagtttttcaaagaaaaatggaaccatttatcgaataggttggatcagtgacccaccggacttagccctaacatttggggaagatccgacatttattacttcttgtttaagaagattggtagttagccaacaaggattcgcaatcgaagaaagagaatttgaaaaattcaaccgacaattggacagaactcgccggaatgttaattctgatgaaccgttggacggcgaagtccgcacatcacaattagatgctcaactcacagcacgttcgatgtttgcagataaagaaatgagaaaagtattacaggcatattttaaacttatttgtgactccatttttggctctgttttgagcactgatctgacacatctcaatccgaattttttaattcgtcagctttcgaacaaccagctaatcgaagcagaatggatttcaaaaaccattttaaaaatttggccatgctcaccaatttacgaatatgaattcgcgaaaacaaaagaccaatgttacgaaaaaattccagttaaagtgactttggttaggaaagataagccaattttggcttttcttgacccaaaaaattttataatcagtgcggaagctaagaaagtcaattgtcaaattaatcgatacaaacatatcgtattggaaggtcaactttatgaaattgaccaaattatgggtattaagagtcctgttaaggaaataagtgagattgaaatcagcaacaaactttggaaatcagctgtaccatcaacatctctgcaaatctttcgtcttttaatcataaacaatttgacagaaacacaaacacaaatgatgagtgaattaaaagcattaagagcgagtttttcggaatttccgttagattcaacttctgtgcggggagggtcgagtgagtcaagtgaaaatgatcactcgaaatttccagttctggaagtgaatgtcctgaaattaataggaaacaaaattttggcatgggaaaacctggtcaacctggtcatcctgctagttctagcagaatggggggctggaaagtatatagaatggtgataggaaaatggatagagttagaggtaaaaagggaagtaaaaagggcaaccaaaaaggaaatggaattaaatgaattattgaaagggaaacaagaagggaaaatggaaattccctttaaggaatcggacagtggcggcgattctgaatttgcagcggaggcagttatgccaaggagaaaggtacggaggactattaagaggggtcgccaacagtgaaaatcttctaaagcgctgttcagcgatattttcgttttttggtgggaatgtcgaaaatcgctaattctagcaattttcgatttatagatttctatgctttcttttccgaagaaagcatagaaagggggttctctcccattggtcaactatttcgcctggctgtttagccggtggttcgccgcgggctgcgcttaatgcattcatccccttattccccccccccctttttgctttcagccgtacaccgcctcagcgacgccttcacaatttgctcttctccaccgccgtcgccccagccgatccaatcgtctctccgcttacagcacgacggcggccaaacacccccacccccttccttggccaatgcactgttcgtttgcccttcgactcgccactgttccccccgttcgcttgtcttccccctgccactgttccctcgctcgctttccctcgttcgctctctgcttatcgccgcgtcgtcgccctttgtcccgatgatgaccggccatcagataaaacgccattctcaccatttcaatttgttgcgatccatccgcccacatttgtctcttcttcgttttccccccgtttttgcgattctttctttttatttttgctgaacatttaacaacaataaatttgtcttacaaatttcttgtggggagggaaaactttccttgcctaaggcacgaaaacaacaccgagtttctgcccccttaatcaattcgaatcccggggatcggggaatagcctattggtttcggcacttcaaaattgcgggactccccctcccgctgatcggaacaattttctgatcagtcccaaaagactcaaagggacaaattcgatcaatccaattttggactgatcagttgtgaatttcgcctcatttcaatttgttgtctgattggctttttagccaggctccgattgccccatcggaaa

SEQ ID NO: 18429 - DNA, 2887 bp, Heterodera glycines
  unsure (1)..(2887): unsure at all n locations
tatttatanttgattttcaaaaagcatttgactcagtgccctatgaattacttttatacaaattggaaaaaattggtataaagggcaaacttttaatgtggataaagggctttttgagtaataggacttttcgagttaaaattggggatactttatcctcaagtaaaaaagttacctctggcgtcccccagggctctgtcctgggccctttattatttttgatttatattaacgatcttcctgatgccttgccatcaggagtgaaaataaaattatatgctgatgatgttaaattatatatttgttataaagcaagagccgacacggaaattatgcataaagcattgcataatttattcgaatgggcaaataattggcaaataaaagtttcaattcaaaaaacttttgtattatatttgggttccaaaaacccaaaagaaacatataaatttgatgggaatacaataaatgctgtgaatgcaattagggacttaggaataaatattgataataaattacaattttccgatcatgttaaccaaataacaaggaatgcctatttacgtatgcgttccttgttttgaataattaaatccaaatcatctaagatttggattacgttatataaaacctatattaggcatttattggaatacgctccggaggtttgaaatccgtctcttcaaaaaaatattataaaaattgaaaagtgtcaaaaaaattcaccaaaagggtttttttaaatgcagccttccgccaattccataccaaaatcgattagaatacctgcaactgccaacacttgagaataggcgaaagctgtttgatctgttcatggcgcataaaattgcttatggccgaacagatctgaaactattttctatttttaatccctcaacgcgctttaacatccccttttacagatttaactcaaaatataaactgggcaaaaaattcattccctttgctgggagggtaacaaaattgtggaatcaactcgataaagaactaataaaaacaaattctttaaatcaatttaaaataaaacttaaaagttcactagggtaatctgtaagaccgggaaagttagaatgtaattctcgcccttctgatgacttttttattttttatgaataaacaaataaataattggagggggcattctaccagagaggggcattcaaatagcggatttacggtaaattggtttttttatcacagtcatttcataggttttgatggcccataactttttccaatttcttttttatccaaaaattccttcggattcatgattagcagaacgtgaggaatcgattggtgtctatttggtcgcaattccatgcgtttatggctttggatggttcagtcccaaagccatttggccatttcagtcccgggtctgtaactcttcagggattggttcccgcagaaaaattctttcggattcttcaattacagacctagaggaatcgattgatatacagtcaggtgcaaaagttttgcctcaaaaaaatttttttttaactggttttctcaaaaatgaatggtgaaaaaaagtcttatttacgccaaataaacactaattacagtgctaataaatagccaaaaactgccccgataactctctttgtcgacgagaaaattggtcatgatccaattgaccccacattctgacggtgcaaaagtaatgcctcaaaatgtttaatcgaccaaaactcaattttttattatgataaaattctgaaaaaatctctgttagattaacttttgatgctgatcaaaaaagtctcttacaccaacttgatcagatcacttcttcacggtgatctgaaaagacaaaaatggcttgaaatcgggaaaattttagaaaaaaattcctaggggggttaggaaattttttctggaaaatttgagtaggcctaaatttgtgttcgacaagcaatgcgtaatgaaaacgaggtgcagctgcttttactgttgtgaggagaaatacgcaaagaattgccccgacggatgttacaactagagaccggtaaaaaaaaatttccgggagcgggagcgggatcgggagttcaaaattttacgggacgggagtcccgaacgggaatcccgttaaaatcccgtccatttttaacgggagtcccgggcgggagtaattcgaaaatttaattaaaaactcacaaaaatatttttaatgcacaaatttgaaggacaatccttttattcgatacagaaaaattagaatatgcaaaaagttgaaataaaaaaacagattttagggtcgaaaatcagaaaaattttttcaaattgctgaaggagaaccgaataattgtaaatcttttttaaatcttaattgtcgaacaaaagttaaaggagctgatcataatgattcgaagctaaaattagttttttgttctttaagtcagagttgatgcaccaaattcggctagaacagccaatgctcttagttttcgagttgtatgtccaagagttaagtttaaaacgaataaatagacgaaaaatagaaaaaaacatttttttaatgcaaaaataagtaagggaaaaaaagtgagtaagaatggcaatgccaaatgagaaaacaatgcgcttgtgcagcatataagctgcgtcaatacaatttggactcaattagagataagacaaagatttggtaatttgttgagaacctcaaaatatgtaaataaaagtccaataaattattttcataattttccaaataaaattgagtcgcattttcaaattttaggaaaaaatttaaatgccnaacttatganagtaccattngatgcttctcattgtcagttttgttcaattcaccatttccttcaaatgctnnttgtcagccaatgcttaacatggaaat

SEQ ID NO: 18430 - DNA, 3008 bp, Heterodera glycines
ctaaacgagaaattcatcaagccaactctccggccccccacgatgttgcattggtcacatcgaacacctgcaaaaaacgtgatgacatgacaatgaagaaagcattttttgaagcgcataacctccagaaaaatggcacacacataaaattcaactttctgtttttttgattattattgaattaaatttttaataaattgtgtgacagaaaatctaaaaaaaaattgtcaacattttttttcccagagattcgatgctacaaaatgagtttatggcatttatttgactggcccaccaaaatgcacgcgtccgagccccggtagaaagcgttgcccaacgattggaagcgctcctggccgcacgtgtcccaaatttgcatttttacttcggtgccgtccacggtgatggttttggtcaggaaatcgcagccaacctgaaccagaaagaaggaaacgattttgtatttaagtggaaatggcaataaaaccaggatttgaaagaatgccggaccaggaaaaggtttaaaaatgggttggagggttaaaaccatgctaaaagagggaagatcagttgagcaaaacaccaacaattccagacaaatcgggactgaattagtggcagtttttatccgggtttgcgtcggaaaaagacaaagataaatgaatactaataaaaatcgaattcgcccggacttcggggaggtcccagtcattcgtactgcacttaaacatttgcaccgaagagcagtttttaaaaagaataaattaccgtcgctttgtacgcactgacaaactgtcgattcacatattggttcataagtgatgatttgccaactccagcctcgcctaaacagatcagaggcaattcatttgaacaattcattgttttggactagagtagagcgggaccaggacaactgagtactgaaaaaacgggacaactgagtacctgagtcccggttttgaccgggactagtcccggttttcccagccaaaaattcccggttttcaaccccaaaagatcccggtcctggctttgcccaaaattcaattcccggtcccgctctactctattttggacagaaacctaacaaaatgattttcagcaacactttgcgtcgatcactcatttccaaaatgaagtgtattccgtgaaaaagctgaaatatgtaaagggtcagtgtcttcaatgatccttaaaaaataaatcgttctggcattcttctacactttgtgttctcttcccctcactagaaatattcattttaatgggatttaattttaaagtgctcacttttcaatttttattcaaacccaaatcaatggttaaaaaatgttttaaaaaataaataaattttaagaataacttattcctgtataatacaacagccaataattgagaaaaagtcaaaatgtttcgacgaatttatttgaataaaaaacaatgagaaattatgcaaaaaataaccatctatgtaaacatatcaaaggtcacacaaacaaaattctaatcggcgcaccgtcaaacaatggcaaatttcttcagccttaacacatcaagttagaagcattgaaaagcattcaaaatttagcacctcaaaaatggtggaaaaactgctcactaatgggcacagcaaaagcgagttgagtgcccggatgagaagccatttcgctgcgtggctgacgagagtttgtcgaacactcctaaaaataaagcagcaagctttggtttaatgaagaaaaataccgttcagcctaagcaaactgcccattttttcaaagaaatgaccgaagtcgtcgtaaaaaatggctctcagtcttttttgagtaataccaaaaatcaccttcaaaagttggtcgggaaaggcgaaaatggcctccatcttgacatagtgtgcgtcttgcgtgaccaagtgcttcacaaccaaatgctgactgtcctgacgcacaactgtcccgtggcacatgccgagtttatcatgacggaacagcacgaactggccaacagtgaacggcggagaaagtggcggttctttcagagactccaacaaatcggagtaagcgctaaaaaggatgaatgcatttaaaaagataatgataaaaagaaactacctcagcacagactcaattttttgcccacagaagtgcgtaaattgagggatgtcatcagcaggcttgggctgataataataataataataataaaaccagggcctctttcgcaatcctataattattttctttttgacaaaatttagatttcagaaagggaaggaggtggattctgctttgttttttatctgctcacagttaaaatatatggactagtcttcaaaaaacagaatttccaaaaagttagatagagcattttacttgtcctccgccaataggcttccgtgctgttgtgtccacggaatgcgccggagatggtacgttggacggcggttcccttttgatagacgctgaggtggagggacggcttggcgctgaactcaaaggaggagaagcagaccaaaacaacgaaggatccacgcagttgcctaggaaattaattttaaatgaaaaacaaattttgcgaaaaattcatgcctgtaaggcatggcaacaaattgactccgtaataattggccatgcgctcggtgactcgaaataatcccgggtaggccgcctttgagaaggagtccttggcaatgcgagtggcggccggggcaccgagaagacgatttcgctacaaaaaaaagagtattaaaaacgaacgtataattctttacacctcggtggagttcaaacgggtgccgtagttgtccgaatactttttctcgagtagatcaatcttgctgaaagaaccaccgctctgccggaaaatgtggatgagacgataaatgccctcctgaaaatgtgggtgagattggttagcaattaggaaaattccagtttagtgaattcaaaaacgtgggtacctatcaaagggatctggatttttcggggggacccccccccctcgcaaag

SEQ ID NO: 18431 - DNA, 2170 bp, Heterodera glycines
atggtgtaaattattagaagagatgatgtaaccgtaccacttgattggttggctcattcacatacataactaataattatatttactttcaaaatgtaatttttattatattatcttacattaaaaatatctatttttatttatgataatggttcttttgtatattataaataagaatatacatatataaatttatttcataaaggtatttgtctattttagagctaatatcattctgcatatctttttttaaacaattttacaatctcatgagttgtcttttttattctttttttgcttttttatttatattttttaaagaaatataactgcttaaaataaatcatttaaaaattaggatagtattgcttttaaatgaggacattctgttgcaaatttttattttatacattaatcctttttgaaggagtattttattaatattttttaaatttaaattaaactattttaatatctttcaaaaaactcttattattcatttaaattgataataattttttggttgtttataattatatgtaattttttatatattaaaatttaaataaaccattattttatggcctctttttattttggcattttttttcttgtattgagagggtccaaagatttattaaatttcttccatattttatttaatctgttttttttcaaaataacttaatattttattaaagtgtcgaatatagttttgtcattgtggaccacgagtgctgcgaggctaaagctgtacgagtacatggagcaggtctacaagaaggaggggtgtaaactgctctattgtgacacaggtgaaaaggaataaaaagaaaataaacaccaaaattttagattctctagcttttgctcatcggaaggggcgctgtccgttggtggaggggaaatttttggggtaaaacataatttttgaaaattttctataaacatttgtttagtgagatgactcgagagtatgctgacagcgaaattttggagtttgtgtccgcgggtccgaagcagtacgccttgaaacttagaagaaagaaggacggtgtgatttggcacaaaaccaaaatcagagggatgacattggatagacgaaacgaatttaaatatgatttgttcaaagagatggtgttggattacaagaaaggggtcaaaaaagtttttcactacccggagaagattgggccgacaaacgacttccgggttctctcaaaagatgtacaaaaagaatatacgccggtgcagaaaaaaggaattattgacgatcactttaatgttttgccctttggatattattaataatttttgttttgataattttgtctcatgtttataacatttaatattttaaattaatcaaatttgtttcttttttttagaatgtcaaagaaaaacttccaagaaacttcaaaagaaattcgccgctcgaaaaatacaaaaaattatttcaagaacagtgctaatttgggaaaatgttttgaagaagtggagagtcacataaaggaaaataaaaaatttgggataaaagagcacgtgacaactttctattttaaatgccccgaaaatgaagatcccgaaaaaatgtttaaaaaaatcctgaaaaaattaatgggggatgcaatgagccgagaagatgagccgggctggaaaattgagaagatttcagtggacctttattgcagtgccctgtcagacccagtgatcatccctgcccgccccttccaacaatcgaacccagacattgttttcaatgagttcatgcacaggcagcaatcatttggggaagtgaatttgttagaccagagaatttcaataattattgccacttattctttccctgttaaataaaattttttcatttttccctttcattattttttgttcattccattattatttattcgagttttttttctttattaatttttcagttaaaatgtattcgtttcaaaaatattttgtggaggctctcgaaaaagaagattttttctggcagaaaaacagagcagaagtggaggcattgttaattgaggcttcaaattataaaattataatacacagagactacgaaagccgctattctgattatattgccacctatcgccgcaccccactcttctgtttctgcatgattgagagaaatttaagatttttttacgac

SEQ ID NO: 18432 - DNA, 575 bp, Heterodera glycines
tttcgtgaaaatagacgaaaataaaacaaatttattactaaaaaaaaaatggaaaataaaagtaattaagtattaactagtgaaataaaaataaataaataatattggtgcaataaaagaaattttaaaacaaataatcggtctatcatattttttttttatataaaatgataaaatttaatttattcttcaaaattaaaagtacttaaaaaataaacaaatattattgatgcaatgagttaatttttgataaatattttattacacaacacatgaaaataattaaatttatttggaaataacatttttttattccataattaattataattcttcatttttgcctgtcctgctggtggtggcataatgtgccgattatgacactgtgtcgttgggtgatgtacggcattggcatgcgaccgtggtggtggtggtgctgctgtttgatgaagcagatgtgtgcttgaaacatagtgcggcgttgagtacaacggttgtgaggaggagctggtggtcctgcctaattaaaagcttttaattaataattgaatatttaataaataattgaatttttt

SEQ ID NO: 18433 - DNA, 1816 bp, Heterodera glycines
  unsure (1)..(1816): unsure at all n locations
gctgcggtccatcattttcgccccaacaaatcccgggcccataccgtcgccgtcaaatggcacggtcagctgaatgttttcggcacgaatttcggcttcatctcagacggcactttttctcccccgcttttcctctacgtctctgtccctttcatatttcccatgatctgtctcactttgtgttctttctctgcccatcatattcttgttgttggtgcttgtgtgggcgttcatctcctccacctcctctgacgacgcgtcttcgcatggcaccaacgcgtactgcgcctcgcacgcgcgtatcgtacttaaaaaatgatgataaaataaatcaatgaattagtttattgattttttatcgaatagatcaataatagggagctagctgttcattggcctctgcgcaggttagcagttcctcccggacggcctttgcgtagcgagacacttaaggggcaacagaaacttccccccccccccccccccccggcgtcgtttcccccacccccatataaattggcatgcgcaaaagttttataaaaaatctaaatcttagaaattaaaaaaaaaaaattttttttttgtgagaaaatattttaaaaggattgaaaaaaaatttctgcgatttgttggaaaatttttaaaaatttattaactcatcataaaattttgaaaaaatcgctagaaaacaatttattttttaaattttttgtacattttttggctacaaatcacgtaaagataagctaaatgcaaaaggaaaagcttcaaggagaatcattgaattttcaacattttaataaattcgtattaaatttctttggcacttcattgataattcaaattggcgccattgcgcgccatttctttggcattttaccattttggatcggtgacgatttgtaagtcccatttggcagggttgaatcagcctttttgaacacaagcacttgtcgagcgggcaatgccaactccaagcagagcagacaaaccttttttttaaatggcattatgtttttgaaagtgccaaatttgaaaaagtgccaaccaaatgtataaacactccgccaaaccaaacatccaaaagggttgcagatgcttgtaacgggagcacagcatgggaatgttgatgctgtcataaattcaatcaaattcataattaatccaaataaaaatattatttaaacaatcattattttaaaattgaaaagaaattaaataaaattgaaaatgaattttcattcctttaaatgtatattttttttaatcggaaaatggaatttttatggaaaatttttatgaaatcttttatatattaaataaatttgtaaaagttaaagatttttgttcttttaattatcttttttttaaacaaaaatcgaatctaatttgtaaaatttaaaataaaatttttaatttttcttttaattaatatcttccgtacaaataaaattaaattggccaacagagcgcccattgtgacgatcacttggatttttcggcgcctccattgggccaacagagaacataaaaacagaagaaggctgggcagataagctgagacctaatctttggaaaattgtttttttaaaattagtagctccagaatttaaaaaaatttgaattaaaaaaaaaatttttttttaaagaaattatcaaattttaagtgattttgtaacaatttttttgggggattttcctcctacctatttccctttggttttatatattttttttggctttttttaaatttccattcgtgaaattcattcgtctngtgagtttaatcccagaatctatggccatcaaaaagcac

SEQ ID NO: 18434 - DNA, 2090 bp, Heterodera glycines
gtgaaaatgaaaatgctaaagttcacagtttttaaacataggatgaacaaaaatcaatgctttttgcaattggcaatttgttcctcggatttacgcgaaacaatccattcggaagcccgggggaattaaaaaatatgctaattgactattcgaaaagcgaatggtttgaacagaacaccaatgcaatggagacggtgctgcaactttggcagaaatttccaaagacggcactgctggttacggtaatggcaagggaaatattgtagtggtgcttttgtgccgaggacaaaacaatgatggcattttcatgaattaaaggcagagcgattatttatagtgaaaacgaaccaatatgtattatatgaaattaattttagaatatgttaaatgtcgacagaaagaaccgtttaacagccaaagggattttaaattatattaaaggatcatgccaaattggagagttcagagaagtcaaaagttccaaagatttgcgaatttttaattcagtgaagttcggcgaatttttaaataaactgcgaattatcaaactaaagaataaagcgaaatgtttgattgaaaagtatagggaattgaatggaacatacaaaaaaataaagataatggtaaagaaagtgatcgaagagcaacaaatggaaatcgaagaaaagaaaaacccggaaaaactcgacgattgcgaaacgaattgatcggcggaaaagcgaagcacccttcaaaatttatctaaaggatttatttgaagggagtgagggcaaggcatgtgagagggggcggcggacggacggagcctttagaaataatgtcgagagtgtttgtttttaacgtggattttattacaaaaatttcctttatttctaaaattgaataaaataaattgagcactgcttccctattaattaatataaataaattttttagttttttttatttattaatttattacaaaacaacacttatgccaatgccaaaaaacaaaaacaaatttaaaccgcaatttttgtcttaattttttttttttttttgcataatttgcctccattctctgttcagctctccgccgcgttcatcctcacctgcaccttttgttggccactgattttgtgccgaatacgccgctagcctatcgcgtgctgaatttgacactgatcatcaagaggtaaaaacaattttcaataattttcaagatcaatttttcccacaaattcaattatattggaatccatttttaaattacttttctgactcacttcccttccctgatcactcttttataactctctgatcgttttttaactccgctgatcactctttagctactaatctctgatcacgaattgactctctctgatcctttttgtcctctcacccctgatttttatgagaaatttaacaattcgttttgatgctcgattaaaaaggcaaattcaaattaaatgattgtcaaaattatgccaacttatcaaaattaatcaattaatttaaaagatctgacttattttccccaaaagcctcaaaatttcccaaaaaaccacaaaaagcctcaaagcctcagtttgaaatatgtctgtggaatttggaggtgaatgattaagagatacgatttttattttttttaaccaatgttctgacaaatgagctcctcgtggcctgaaacgcatgaaaatttgttttggaaaatattgatcataggccccaaactcaaaaatgctttaaaacggtcagaatcgatgtaaaaaggttcgaaatgggttggaaaaatagaattaggggcgcgcttgccctttttcaggctgaaaaagtgccggaattggagtgccaaactcagctgggactcaagtgaccgcactataaaaagcactcaaaagacattttaaataatttttctatggtaatttttggcgctgatcacgaatatgacctttattttgcaaaattccaaaccccgaacctaaattcgaacaaaaactcgaaatttataaattaaaataaaacattattaaggggttttgaggttgctgaacacggttatgacgtccattttgaccaaatttgaaccccgatccctaattatg

SEQ ID NO: 18435 - DNA, 3311 bp, Heterodera glycines
  unsure (1)..(3311): unsure at all n locations
tgagaaaacatttcaaattccattttaaatggagtgaaagtgaaaataataattatggaaggaagagacacttttcgaacaattaaagaattttaattagtttgtacacatatcaaatcataaattcaaatgatcgggcattggttatactaacagacgatggcataattagtttcacttatcattgagctgtttcggttttacctcggatttgagatcaaatttaaatgcattcccaaagctcggattatttgggcagttaagaaatttcggagaatgccaaagtgttgttttgctgtgctgattggctgattcaccttcccatttgttgtgttatcgccctaactgatgaccttccatttcattcttccacgcttaaacgatgttttcgtcctttgatgggccttttgtcgccacaacgaatcattagagagtttagagagtgagtgaagtggtcatcagtcagtgtgtctccctctaacttctcctcccctcccctcgtctcccctttccctccccctcttttttgccctctttcccttcgtctcccgctttcgctcccctctgatgccccccccccctacgtttccccttttccactccccttcggctcctgcccctgtctcccctttcgttgctccctttactctcgaagccccccccctctcccttcgcccccctccaaaatcgaatttgatttcgtttacttggcgcattccccagaggttttccgctgttttggccgtcacctttcgcccaaggcgcggaaatgtgtcatcatcagtcggcggaaccattcccgagacggggaaatcgcaagagcaccccaaagacgggggaaagaagcgatttctgagaaaataatcatccgaagagattcttttgtaacgcaataaaaagtcggtcactcattcactgactcttgtctttttgtcttttgtgctgcgatgtctcaaaatgaaaatcaccaaaagcggctaatgcccttcccctttcattcgttcgttaattagcctttttctgtttgttaattagcactttttccgttaatttcccctattttccccccaaatttccatgtttatcatttcatttatatcacagttttttattattttcttccttcacattccatcccccaaaggaggcaatgttttcggcaaagtcccaacggagggcgtgggccccccgtgccgccctcaacaacggcaccagcaaaaatggcactaatttcggcgatcgtcgctctttgccggtgaacacttcattccgtggcacttacagttggggcccaacgaatggaaaagcgaaaaacgccgtaaaaggatccaacggaagcgacactttgccaatcggtgacaattcgccaaaagaggcgtactgtacggtggaggaaatccaattgggcaaaaggcactcaaaatcgccgataatggacaacggaatgggtaccacaagacaaattcagtggaggcacaaaacggaggagggcgaggggaagtccgagcagggacaggacgagctggaggagaaccattacgaggacggggacgagggcgaggagagaaacagcggaggaagcagcagcagagagcaagcggaaggagggggacggcacgggaagggcacggcacaaatggccaaggtgggccatttggccaaataaatattgacactgctgtcgagctcattccctattgtatggcataatnttgcaattgtttaggccctccccncacgagtgccgcctcttccgccgccccttccgccacccaaactttttgggaatggaaagagcgagatgaagccgaggccaaagtccaatttgacaagggtaagcccgcttggcttatccaccgcaggtgttcgctaacggcatttctgttcagttttggcccgctttggcatttttggcgttctgtctgattttgttgtccatcgctttcctctctctgtgggtagccaacaacaacagcgaaaagaggcacaaaagtcagataaattggccactgaggctggtgccggtgttaaagccatcgtcgacgacccacgcgacgacgcccaaagggcggggaaaattaatagcgcaaagagaggaagaaaatgaggacgaagggaccgatgaagatggggaggaagagggagcggaaaagggagcattggcatcggaggaaagtgatcagcagtcgaagggagcggcggcacggccaatgcaatcggaaacaccggcaccgcccgagggcacaacggcactcggcggggatcagcagcagcagaacgcggtggaaagctgctcacaaatcctctgttcatctgccaaagaaaacgatcaccaatttgtggcacaacccgaggaattcgtccggtggattgccgacggacagatgagaaaacggctgcggttgttcgaagttcgggaaaggaacaggttagcctgacagaagagagagaatattctgactattttcattttgcttttggccattctgatcattttcccctttcttttttagtcattctgatcactttctgctactctgatcacccccccccccattccttttcattagtctaatcactttcacttattttgatcacttttctttcccattcgatcagtctgatcatttcggctactctgctcatcacctttcttcccctttgatcactttcagccatcctccgacccccgtggcattgccttcggccaaagtgcttcttctctcctctctgtcccacaacggcgtccccgtccatccgttgcaattccaacgacttttgcgttctgaggaggtcgaccacggctctgttgtgctcctttacgacgtccaatcatcacaacaattgtgggcccattatgccatttggatatttcgtgttcgtttcttttgtttcgtttcatttttcctctccaatttccccccttttcagctgttcggtttggaccgttcccttttgctaatgggtggcccaaattggtcggtcaatggcacttccctggccaaactgctcgagggcgtgcccttttccccggcgaatgctttgcccccggggcatttgtcctccgtcggcacttttcgtgcgcagtggcgaaccgaattcattacaacttttgacgatgttttggcgaattttgagaaggaaagcgcaaacgcaaaggcggacattgttgacgcacaaacggacaaagtgagaaaatgagggcaataggccaattatggcagatttggaagttcaaatggcctatttaggcacatttgccaattgtagcacatttggaagtcctaaattgactaattgtggcactaaaa

SEQ ID NO: 18436 - DNA, 835 bp, Heterodera glycines
ttaataaaaccgtccgaacctttacattgacggaacggcctctcggtgcacagaagacagctcaactggacgagggccaacgacggcgaaagggaggcgacggaagtgttcactttttgaagggcaaaagcagagggagaagtccaaccgagaaagggctgaaaatggaacagtaaaaagcattttgacacaatgattctcgatgaattggttttggctaggctcagattgttttaaattttgaaacaaatactcaatttttccttaaatttttttgactatttttccaaaaaatttttcaaaatttgataatataaacgaaaacttttaaaataaaagatggattccaatgtcgaacttttatcaaataaagtctaaaaaattgcgtactgtccgcgccgcctttgccgccgcgttgcatttggacagcaaacggtggcgttccatggcgggtgcacaacgcgtgacaaaggcacagaaggagcagtacctgccgtgaagaaagttcggtcaaaaagaacagattcttatcagacagagaattgttcggtgcaacgggtggtccaaccatggacggactcagggggagggttttgaaaaagttctcatattttcccggcgacgcccaattgttagaggctttggcggcaggggtggagcgcgaccgcgagatttttttgcacgatcctcgaccgcggcaatttgaatccgcggtgcgcgacccgtgggatttaagcgcttagcgccatggttttttagaaaaaaaaatttttatagtttgtaaatgataaaaaggtagggttcgagccccgccccaggggacgggacaggtttt

SEQ ID NO: 18437 - DNA, 1346 bp, Heterodera glycines
  unsure (1)..(1346): unsure at all n locations
tgccgccgcgttgcatttggacagcaaacggtggcgttccatggcgggcgcacaacgcgtgacgaaggcacagaaggagcagtgcctgtggtgaagaaagttcggtcaaaaagaaattttttttcaaaaatatttcttaaaaattgctaaaaacttttttccggggaagggaaacgagctggtcccccagggacaatctcatggggcgggggcgggggggggcagtcggtttccgcacccatagtcgtcagggtgcacttcattcccccgtcgttccgcctcctcccgaaaataaaataaatagaaaatctttcctaagaaaatcaaaaaaaaatttcaacgatttttgcaaaattttatgctgacttatagagtttttcaataatttttccaaaaaatcgcagaaaattaaaaaaaaaattttttcttgaaatattcttaagaaaaaattttggatttttttaaatttctgttttgaaattttttctcttgaccataatttcaaacaatccttgactttctccccccccccaccccgctcaaacggaccgtctctctttgccgaggtgccgggccaaacagcgcaccatctgtccgcactccacacattggggaatacccaagtcgaaggtgaccaacgcgcggcttttgtccggcaccaatgctttcaagtctgaaaaagcatgagaccatcacccatattaatgcaattggacaaatgacaaaagcggaaaatgcttggatttattcttttgtatcgccccgataacccacaaatggcaaaggtatagattattggtccctaaaaatttttttaaataaaatttgagaaaattgtttttaggggtagtcttaggcgccgagcacgaatccggcattattttggctgtttcgaaccccgaaccaggattcgaacatttggtatactgtcgatggtaccctctttcttgaaaaattttaattttttttctaaaaataaagttgtttcggggttttcagggtcgaagaacccgattctgacatcaatttcgaccaaattcgaacccggaacccagattcgaacaatagttcgaaaatataaatttttcaaactttacatttttggttaaaaatacttagggtggagcataatttttgatacccaaattttttccaattttaaaaaattcataactccgttatttctgcgcctatttaaatgattgtttttttattttgttcttcatggtgtcctcttttatatcttactatcgtttcactttttatttgattgatagatttttctgccttttttccctgacaatgccanaaattgaaaattggctaatttttctcagaatttttta

SEQ ID NO: 18438 - DNA, 2119 bp, Heterodera glycines
ttttttatttttggcttggcgcctaacgtcggcgccaaaacgaccctggcgccaaaacgtcggcgccaaaacgacctggtcccacagtggggcgtacccatagtgctcctcccaaacatttcttttacattttctatcattttccattgaatacggtagaaattaatcattttttgaattgtcgaattttttacgaactgtttctctctgggtataggtcatagagctaccatctaaaaggtaaacggtagagaattttgtgctctttccaacgcgcctaactcaaaattttcaaaaaatttttttgatggtttttcgagtaacgcccattgtgattgttttcagccttgggtacactttgacagcgcgccaactgaccaaagtgtgtgtccatttccatgttataaactataaatatgcgtgttatttgactataccatcattcacttgacatttccctttcccttatttggttattttctttgattgtttttccttaagttcttccccaaataaatggcttctattacgcacgtggtcttcgaccttgacggtgttctgatcgacactgaacgtcattatacaacggccaacgagcggacgttggagaaatttggagcaaaattcactcgagaaatgtgggagttttgtttgtttaatacgttataataaagcgaaacaacgacaggaacctcaaaattatgggacgcaaaaagacggaggcggtcacggttttgctgaaggatgcggggatagcggatcgcgttacgatggaccaatacattgcggagtacgacaaacacgtccttcaaatcatgcgcgctcttacggaggtgcaattggtgtgccttgctttcgcttttttctgcttttttaaatttttgctttgctacgcttcgcttcgtttttatttcatttaatgaagtgtaaatgcaattgttaggaattgcctggtgccaccaaattgatcgaccatttgtacgcccacaacattccaatggccatctgtacgggatcggacaacgaggagtttgcaagcaaaatgcttaaatttgacgaatggcttaagaagattccgcttcgtgtgctgtgcggaagtgacccaggcgaatgaacgctcaaattccaatttgttttattgtaactgtttcagaggtacgcattggcaaaccgaatccggacgcatacgaagtgaccattggacgttttgctgccaagccgacttcgccgaagaatgtgctggtgtttgaggactcaattaacggagtggaaagcgcgttgggtgcgggatgtacggttcgggtttaaaactgttacaatacggcacatcatcaaatttgtttccttggttcaggtggtgatggtgcctcagcgtgagtttctgccgaatgattggcccgagaaagaactccgttcgcgtccaaattttgccgccttgctcgattcgcttgacaatttttgcccgaagcaatttggattgccggattatcgcgagggcactgagaagcgcggatgagagaaataaatgggacgagaaattgtgaccaaaaagtaatattgtaatattatgtgataactttttgtgtctatttgtccatataatggggacatattgtatgcatttgtttgtttgtccttcgtgtgtaaaaagagtaactttcattgaaatgctttagaaaagccaaccgacagtaagaattgctttgcttttatcaaataattacactgaagtgattgaaatttgaatcaaaaatgggagggaggaggaaaactacacaaaacactaaacgaaaaaccattttatttgaaaaaacggaagcgacaattaaaccaaaacaaacaaaaggtctaatggaaatcggctaatggcgaaagaaagccaaacattgttgaggtgttgaacgaattggagaaagaacatggaaacaaaaatcggaattatggtcaaatgtcagtcaaacccttaagacaaagacaaattgaaaaaacgaaatgaatgcttttggactaaaaatgccaaaaaacatttattgcacccaaaagcacagatccgaaattggacgagcattttttaatgaatgttgttgatgagtttgaatgtcatttagaaaataaacaa

SEQ ID NO: 18439 - DNA, 1038 bp, Heterodera glycines
aatgtcatgggacgcgtaaaatgtcacggggacgcgtaaaatttcagggggacgcgtaaaatgtcacggggacgcgtaaaatgtcacggggacgcgtaaaatgtcatgggacgcgtaaaaatgtcatgggacgcgtaaaatgtcatgggatgcgtaaaatgtcatgggacgcgtaaaatgtcatgggacgcgtaaaatgtcacgggacgcgtaaaatgtcacgggacgcgtaaaatgtcacgggacgcgtaaaatgtcacgggacgcgtaaaatgtcacgggacgcgtaaaatgtcacgggacgcgtaaaatgtcacgggacgcgtaaaatgtcacgggacgcgtaaaatgtcacgggacgcgtaaaatgtcacgggacgcgtaaaatgtcatgggacgcgtaaaatgtcacgggacgcgtaaaatgtcacgggacgcgtaaaatgtcacgggacgcgtaaaatgtcacgggacgcgtaaaatgtcacgggacgcgtaaaatgtcacgggacgcgtaaaatgtcacgggacgcgtaaaatgtcacgggacgcgtaaaatgtcacgggacgcgtaaaatgtcatgggacgcgtaaaatgtcacgggacgcgtaaaatgtcacgggacgcgtaaaatgtcacgggacgcgtaaaatgtcacgggacgcgtaaaatgtcacgggacgcgtaaaatgtcatgggacgcgtaaaatgtcatgggacgcgtaaaatgtcacgggacgcgtaaaatgtcatgggacgcgtaaaatgtcacgggacgcgtaaaatgtcacgggacgcgtaaaatgtcacgggacgcgtaaaatgtcacgggacgcgtaaaacgtcatgggacgcgtaaaatgtcacgggacgcgtaaaatgtcacgggacgcgtaaaatgtcatgggacgcgtaatatgtcacgggacgcgtaaaatgtcacgggacgcgtaaaatgtcacgggacgcgtaatatgtcacgggacgcgtaaaatgtcatgggacgcgtaaatgtcatgggacgcgtaaaatgtcat

SEQ ID NO: 18440 - DNA, 3199 bp, Heterodera glycines
tcattaaatttgatttgtcacttttaaggctacgggccgtgaacagtgagactgcatgtgcgtggtacaaaaagctgacccaaaaaacgtgtatcgtccgagaacagtgcgatgtgttcgcgttcaaattcttcaatttttgctccaaaatcaaaccattgccttcatggcttcgttcatcaaagcaagggtcgtcagctcatgagcttctcaaaaaggagttcaagtactcttttctttaattactaattgccatcatttgtcagtgtgagtaattaacgcttacttttgtttagtcgtctcaaaatttcaaacacgtggaaaatttcgtcggctaacaaactatttgagtaagtccaattaaaataatgcatgtcaatgtttttgaattttcacttcagaatctgttcgtcataccctcaatatttgattgttcccgcttcagtgtccgacgagaaactgaagcaaatgcgacttggcagaatttattaccgttttcaatttgcaaattttttatagctaaaaaaatgaacgctaataaggagcacgcacataagctattacaccagcaatttaaaaaaggcgaaaaagcggcgcgaaaagtgaatgaatttctcggcgcgtatgtgatctctcctcgtcaagcgcaaaaatggttccaacaattccgggcggggagaaacagcaccaaacgcaaacttgggtctggaaggccgtcgacagtggacaaaaacgttttggcacaacggttgcgacgacacccggaaagttcctgcgcagaattgtcggtgggacattgccataaaacaacagcatggcgctggcttcggaaatctggtcgtcggccgatgaggagcaaatgggtggcacaccgtctgactgatcagcagaaacagcggcggctaaacctgtgtctttcgaacatcgcaagacacaggagaggttatgtgctgaaccggctggtgacatgcgacgaaagctacatctgttacgatggcacagcacagaaaattgtttggagaaagaaggttttggtcccccgactcaacctgcaccaaaaaaagcgcatgttgtgtgtcttttggtcagtacatggcccactgtactgggaactgctggcacctggcactattttggacagtaatagatacataaaccaactgcgggcggtggatatcgcttaccgcatccggcgccagcagggccaatttgacggtcccctactctttcaccatgacaatgctccgccacaccgtctcatttgacaacccagtacatttcccagacattgaattggaatgtgttgccccacccgccttatagccctgacctagccccctcggattaccacctttttctttctctcaaaaactttttacggggtaggcgcttcactgaagacgccgaggtcgaggaagcggtggggcagtacctgacctcaaagatcggcccagattttttccgtcgcggcattaggaaacttccttctcgttggaaataggttgttagggtccagggaaactattttgttgagtgatattgtatttacagttgttatgattgttatttttgatattttatttataaaatttttttttctaaaaaagcgcccttttttatgcaacgaccttaattgtgcaaattgattattcattttttccttccttttttatttttagcacattttcccacccgaacaatcgacggaagaagcagagaaagagcactcattatcggacgacagcgaaactttaatttgcaaggattgtatggacaaatacgcttttttgggcttttatgtcaaagtgccatcgacgaatgaggaggaaatgagcacaagtcagaacagaaatgccgaagaacaaagggacgacgtgtgcaaattggaagcaatgaaaaagaaaggggagaaggaaaccgggaaaagtgtgtggatggaagtggggtggcgagaggagctttgccggtgccaaaaatgcatggtaatgacccataattgagtctttaaatgggagagagtgaagcgcactgtttttcagaatctgtacgaagacttggactgttcgtttctgctcgagcccgaggacacactcgcgcactttgaacaacaaaaccgagaaaaggcatcccaaaaggacggggccaaagacatttaccaaatggtggtggaggagacgaaggaacacgaaacggcactgaaaatgatggtcggctttgagcagatgaagcgccactgtaaggagtttttgcacaagcgagcagacgaaaagagcggactcatcacgggggaggacgtggagcagtgcttcgcggagttgcgggcaaagcgcatgaaactcgaggaagagccgcagcaaaacgagccgaactctgggggggatgggccatggactcaggtggaaaagaaagggtaaagaaaagcatcagatttcgtatttagtaacaaatgtttgcgatttggatgtttggatgtaaagctctcttaaataattttcattcgcatttgcatgtgtgcttcggtggctcagtcggtagagcgtcagtctcataatctgaaggtcgagagttcgaccctctcccggagcaaaattttttgattatattttttatgctgttatatttcgaatttttttctaagtacactaattgcgctgatttgatcattgtaaacgaataaatgattcctggctataatcatgatttcgttatttataatttttaaaaaaacgactgttttgtcgatcagttaatatcggtcctcctttgtttgcttaatttttgatttaattttaaagcagtgactgcttggttctttattcaaatggtttgttttctaattcatttttaaagaattcaaatttataggggcgacacaaaaagactcagaaattccgcaataagcttcagaaactgatcaagccaaccgatgacagaatgttaggatttgaatttttcttaatgattgctaattaatgctggtaataattcagaaaagatgaaatccgcgtgaaaaaacctcccaaagaagatgaaaatgcacttaaaatcaaggaagcgtgagttatggggtggggttagtgaccaatgaatgcgaaatgatagcccgaagatttcggcagcgatgtttctcaaatacaacacacaactcgggccccccttccacgtcattatcgacacaaatttgtcaatttttctataa

SEQ ID NO: 18441 - DNA, 3385 bp, Heterodera glycines
  unsure (1)..(3385): unsure at all n locations
tgacccatctcaaatgtcgatccgattccactggtccataagttccatccaatcgcttcctccacccatttggcccatttgctttcgtcgcgcacaatcggacaacggatcagaagaacacggttgatatcgttcatcttcttcatcgtcaattgctcccgggtcaattcgttggtcagcacaaatggcagaggacgatgataagaaaaatcaatgcgaatgacagcgatgaaattgacgggagatgaagccgtgtaaaattcctaaaatagggaaaaattggttaagaaatacgaaatgataaatgaattttacggtttggtgccccaatttggatatacataattattttgtcagtgcgcgccaaagaccgtaaaaatgccaaataaaacaatcaaatcgcaatcaccgctttgaagtcttcaatctctggctccaaatgccagctaccgtagttcaaccagcatttgaacacctttggcacattgtccgaacggggagtgaaaagccatttggctaccacttgtccattcgatgctgcggcactgtcatcgcatggaaaatcggtgaagaaaccattggaattggcattgacaacgcgaagcgatggacagtcgttgagaattgacggcacgaatttgcgcaaacggcggaaactttctttggacaattggatgccacgaatgtttgtcgcgatcatgggccaaatgttgtgccaaatcgactccaaagtgcggtcatcgaagtatgtgtcgtcgatggtcaaatgaatgggacgggtggccaaaattggacgaaaacggccgagaaaagtgatgacattgttgttgaagtacctgtgaaaaatgatggaatcgttttacaaaacagaaaagtatcaaaatctcgcttcaatgaaatggctttgaatccgacgactctctttggcaacggcttttgcgtaattccaaacgattccaaattggcattgacaacatccatttccttggtgccatccgcttcgaacttcattttgattttcatcgatcccagattccagcgacgagtcttgaagtgttcatccacgtagaagtcaaaacggtggctgatcatcgcaattccaaggccaagttgtgaagccggaagcagatcgtacacacaaagccaacaatcggcggaaatgaagctgaaaaaaggaaaacaaaatttaaaattgaaattttaaaaatggcattttaattttacattgctttcgccatcttttgctccgcttcgtttcggttgtcagacattttgttgaggggaaatgatttagacagttttcgtcagatttcaattggcttagcaaagatgaaaaattatgtgaaatcggccgtttcttttttttaaatgtgtgggcttttgttgaatggcactttttcccggatggtttatgggtctctgatcgcgaaacagatacatatccattttgaccaattctaatccccaaaacacgaaatgtaatttttgactcgattcattaatacaaaaacatcctacagaccaaaagaaaattaaaggggaatggaaaatgaaaaatggcggaggaggagcaatcacttaaggtaaattgccgaaaagaaatgcacaaaacgtacaaagtgatttttgaagaaatttgtcaggtagaaaaattggatgaaagcgacgaaaagaatggataataatgaaaaatgacggagcagcaaccacttttatactaatttattttccaatttttacacaattttaataatcagtcgtagttcgacgccttactataaaagtcatcactagggccgcaacttttagtgactaaaaatctcaaaatagttaactaaaatagtgagtaaaaatgccaaaatagtgaagaaatagtgacaaaaagtccgaaatagtgacgaatagtgacataattttcagacaaaaattaagcaaaaataatttttattcactgattgcagttacaaatgaggtacatttccaaattttgaggcaagaaactcatccggttatcgcataaaattgttttgtaaatagagaaagtccgttcaacatcgcatgaagtgagaggggcgaatttgtagaatggaattacggtgggggaaacatcacaatcaacattttttccggaaagaatttggcaaaatttggcaatttgatcaaacgagggattttaagtcccccatctcgttaaaacagcctttggaggcattgccaaatccggaaacatttggtggtaaatggccgtacgttgaggtgctttaacaaaaacggccttcgtcttcgcgatcaatttgtcggcctttttgaattcatctcgcactttctctgcaacacggtgtaaagcatgacaaaggcacattgtgtgtatgagatttgtataanaaacctgagaaatatttaaaattaagtagtggaagttcccaactaattaccctttagttgttttccagcttttttcatgtaagctgcagcgtccgtgacaagcaataaaacacgattttttgtcgaagccatttgaaaagaaattgtctaaaaggataacatttattttgcctcggttgaattttaccgagtccttcgttgacgaaccgagcaattgccgcgctatcaactttctccaagcatttgacggaaatcaaatgtggggtgtgccatttttgtccatccaattttccaatcagcaaattggccaccgctcttcccatattttcatgcttaatgctgatcatgtaatttttgtgttgaatttagcattttcgtgcttgtttttgtcttaattggcatttttttgtaaaattttgagtaaaacaccgtctcacagcactaaaaacaaaaaatacacccctaggaatcgaccctaaagttttaaaaaatgctcgcctaagaaaagaaatattttttttgacaaactttttgatttaaaatgtcaatttttgctatgaaaatattagaagtcagtgcaaaaagaaaaattgagaatttattcttaaccgctaaaaattttgcctgaaagcaccaagttttatgtttgttttttcaatttttgtgcttttggcattttcatgcttatttcgtgcttaatttagcattttttgtgctgaaaaatccggtctctagtattagggttcgaagttgtatgcactaaaaaatgccaaatatgcgcataaaatatgcactaaaaatcccccaaatatgccctaaaaacccgaaaaaggcgcaaatatgcactaaaatatgccttaaaaattacccaaaatggcttttaaccctcaaaaaaatgccaaaattgtgtataaattaagaattgactttgaaaagaccaaaactagggctaaggagcattttttagacaattgcaaaaatatgaatttccanaatttat

SEQ ID NO: 18442 - DNA, 2116 bp, Heterodera glycines
agaatccaaaagaatttttttgcggcaaccaatagctaaagaattacagacccgagactgagatggtcaaatagttttgggactgaaccgtcgacttacataaaaatgcatggaattgcgacaaaaacagaaaattggctctgacaaaaagcaaaaaaataaataaatacaaaaattctaagaaatttttttacattttggtgcaatttcattaaaaaactgccattttcgccctattttttttgcaaaattttgccccatttgggccttatctcggttattaaaaaactgaattgaaactttcattttaatgcctttgtgggaatgagtgtaaatccatttgtatggcctctgcttatataccaattatgaattcattaacaaaacggcagaggtttaaattatgttcacaaaatcagagagaatgatgtcgatgtttatacagcttaatttctagttgaatttgtcaaatttttaattttcatttgcactctgtgaggaaatttcggcgctgagcaactttaggcaatcaaactacaatacatatcattttcatggttatatgaatattaattcaacccttgtgtgttaaatcgacagaagctgtcgcgtgatggtaaattcaaactacagcgccgaattcatttaagctcaaatactttttttatttactcagatattttgaaaaaagtttgatgtataaattgtgaaaactaactaacaaatattccagcattggctgattggtggaagatatgtgtttatggcagttcctaatttcgaaatagccgggactggggtcgggacttgaaaattgacccgtaaaatgcttacaagttttttattgtcacaggcctttttgggtgaatttttaacaaatgtggtaaaataggggtccagcgttgccgccattaggcctgaagattttagagttctgaatacttcgttagcttttgtcaaaaatgactaaacatttcaattaagagccaatgttttatgaaaattatgacttattgggtccggggccggtgacgcagataggcgccaatgtcctcgatttttcagttgtatcttgtaacaattaggacaaagtattgaaatttattttttatttttacggtcacttcaatggcacagtctaattaccttttgggcattttacttcttttttgaaattgtcatcaatatcgcatcttctggagagaatttcattgatttgttttggccacaaaggtatttttccattaattaattgtgttaatttagttttattatttaataatttattgtccaggagtgatttacaccaatgctttttgctggagtttactgattgattaaatattttttatgaaatatattgatttattcattaattagggatgcaaattatacctaagaaacgtctcaaaatatgtataacatgtaatccccaaatatgtaagaaatatgtataaaaatcccaagcctgtaccaatttttttgaaaagcataaaatagggatttttatgttgctaaaactgccaaaatagttagtttttatgttctaaaaacccccaaaaaataggtgctaaaaatgggaaaagttgctcaaaactttcaaatttagcgtgtaaaatgacaaattttatccaaaaaccaacaaaattaagcgcccaaatcagtaaaatcagtattgcgatagataatttgtaaaatcaaaatttttgtcatgaaaataaatgctactttgtctgttttaatgcgcttaatgtcacagtaatttgatgatcaccggttgtgttagttttttcatagtttaatcccaaaaattggtccccaaaattatttttttttgataaaaattattggtttaaaaatttgtccttattcgaaaaagtgtttaaaatatttaataaatatttaactgatttcgtttgattaaattttttacgtgttttactacctaaaaaatgttaataaagaatttatttcctatttttgtgcctattttgcttatttttctgcctttttaggtgcatatttcgcgattttttgtacctaaaataaaatcagaaaactataaatgttagttttattgagatttaaaaatattataaaataagcgcattaatta

SEQ ID NO: 18443 - DNA, 1155 bp, Heterodera glycines
atcgggcgaattttaaaaacgacgaaatatttttatgttgggaaaagaaaaagaaaataaacgaaggaaagctgaacaatttgtggcagggcagaagctcgcctcagtacaaggcgaaaggtgctcgcaaatttattcattgcgtttcattcattcgttgacaaatggcgggcgaaagcggcggatgaagccgacccccgccctttcaaacgccaaaatctgtttttgtttgctgctccatccccaatttgtttggcaacggcaaaaacaaaacaaaaaataataataatgggccaattggagggccacggaaagcgatggctataaacataataaataaatgcaaattgccaatgcggcgatcaaaatgtgctttcctcgccctattcagctgaacgctttgctaattgcgcgtgtttttcttttttattttgctcaaatttccaccgtaaacacgcaacagcagcagaccattcaaggtactgtagcaagcaaaaatccgttgccattcctctcgagactctcggttaagcttatccgacgttgctactggtaccgttgccggtgtacggcccatcatttgtcggctacgacacgcgcgacgaatgcgtcgaccgccgtcccgactgtgccattttccgtcacgtgtgcgaccatcccgactaccaaaagttcagaagcagaacagcactagcaaatgccatccttttaagatacatgtacggatgttgcagcgaaacgtgcgacccaaaatgtgcccggaggggcgaaagtccctcgggggaaacaaacaaagcgcgggacgaagcgcgggaacgtaggaacgaagaggcaatccgccgcaaatacctcggggacagcgaatattttcacccgaaaaggttttgacacgagagaaaaagggaacagagttttgctatttgaactgtttgttacctgtcaaatgatgatgcgtcttctccaacagagattggcagcagaatgaatgggcggtgacggaacggccgccgtttggaagggaaaagcaccggagggaaattgcggaaggggccaaatggaggggacgatgaccgatgggaccgaaacgacccgtggacacttcgggagaggatgatgaagcagaagaaagaagaggaggaggaaatggactaatat

SEQ ID NO: 18444 - DNA, 935 bp, Heterodera glycines
gggctatcacacattagtgatttgggagagggatgggaaggggtgagagaaaacggagggattaaatcgaaacacaggtggaaattgggggggggggggtgaaaacgaaaatttggatgggaacggaaacggacaaaaaaacaaaaaaccaaaataaatcatttgactgggaaaaagaaggatatgcaatcaaacacaaaagtgcactcactcattgttgaacactttggaggattgcatttgcttatgattgtttggagacgaaacaccgacaaaaagagaggggaaagggggggggggacactcgtggaagaaatgacaacaaagaaaggatgaacgaaagaacgaatgaatgggtgaataatgaatgattgatgaactgatgagagagatgcaacggaataaatgggaaaagccaattattagccataaaagcacaaaatgggacaacagttgaaccgaacgaatgaatgtttaatgtttatccccaaatccaatgctgatggagagcattggaaaaagccatggaaaagggagggagaggtcgaagagggggagggaggggcaccaaacaaacggagggcggcggcttggagcggcaaacagtgatgatgctaattagaagaaagttgggaactcatttgtcagccatttaaagattaatagggagggaaaaaagacggaccaaacggagataaattcaaagcaaatatgccgagaggggcaagtcaaaagtgatcaaacgaattttgagtaaagggcatcgtttgagcagagcaaagaaagagtgagtcgggagaatgggggaaacataaaacaaattacggaatgaaggaacaatttgggtgggatggacattaaatgggctgagatttatgggggacggaattccgggaggggggggggagggattagatcagattagggggggggga

SEQ ID NO: 18445 - DNA, 2404 bp, Heterodera glycines
aataaaaaatattctggcgtctctttatgaacttcgttcttaaattttagattaattccgaaaatttaaagattaatatttaaaagaaatttttcatgtttttgaagaattattaaccaaattatcttgataagatattaattatttcctgcaataaatcaattaaaaattatttatatacattaattaaattgacaattatcaattatttctacaaattattaattttgaattcggtcccaaaacaaaaaataattcttcttcacttaatctttgggctggacaccactctaatcattagggagtccaattatatggaaatccatatttttttcctggactctgggaggcctaaaacgcacgagaaacatgtttttagcttggtttgaagcttctatacaatggctatactaatcgagctaatcgagttcggaagattgtagtgtgggttttaggctgtttaaaaattaaagaaaataatagtttgaatattttataaattttcaatcacagaaaataatggtaaagaaaatattaaaaatattctgtcacagtggggaattgaacccaacagacgtagaaggtttacccactagaccacatttgaatctgaacagatgtcggaattggccaatgagtgctgacccaatcccgaattaaaaccaaattaagacaaaaccagaaagacaaacgaattccaaacaaaagatcgctttcaaattctctttatttccaccaattaagtccaagggaaaaagcgatgaatcaaaggcgaaggctatgcgaaagcaaaggcgagcgaacggcgaagaaaagggggataagtccacaaaaggatccaagggaaagaatgaaaaggcaagagagcaaaaaaccgcaggcaaatcaaagtcttttatggccactcggccgtcgggaacggaaggggtgtaatgaagcgaaaaaaggaggggggataagtgtaaaataaagcaattttatttgtcgggggaacggagggaggaaatacaaattatttcgcaaatcgcgacacagatgctgtaaatgaaaaaaaaaaaatttttttctcaatttcttctcctccattttccatctattttctcacccagacccccattcttaccactgcttattttagtcccgcccggaccggggctggcaaaactggggccgatatttcgttttttcaaaaccgggaccgtgaccgggacttttaggtaataaattatatgtttgcataactgctttattattaataactttgctaataatggtttttacttgttgatatttaaaaatgcggtcctttttgtttttatactgaaggaatttaaaagaaattatttaatattttcacaaattatatagtttattttattttaatacaataaagttaattaaatttacttattaaaagaattgactttcattttagcttgaaataattttattgttatcttttctattgtctaagtatttaatcaatcagaaatttctcattttttatagtctttttaaatttttcatagcttttggtataaatcacaataataattttataattctttttgggttatcaattgaaaaaaactttaatctagttttaactatttgtaaaattttataatgaaataagaaatcattccaaaaacattcacattataaaatgtatttcatctattaattattataaataaactaaattatcaattttaatttttttaattgtataaacataagatttttaccgaatgcattttacagtagcaaattttttttcttttctatatgattatagactataataatgctagttatcaagttctaattcttttgaactttgagaggtctcggcagtcgaagaagttgctttagcgcaaatttattatttatttggaaattatattattttatattttttttgtgtagtgaaatctttttactcagtatcctaaaacttttattttgttttctttaattgaaaaacatattttctattcaatagcagcaaagtattaattggttaatttttgaataaatatttttttagattaataattatacctgttatatattaaatagaatatagataatatttcaattttatatctcttgtctcaaatacataattaattgagttttttttcatttaaatttttaataaaatattttgttaaattaatattacaacattaatattcaacaaaacttaaacaattaattatatttttttggtaggtacaataaataaaatatttattaattttattattcttattgattttatttaatacagttaaaaaatatactataggttctttttaattgattttaatttttttcattaattaattctcattattatttaacgtccttgactttgttttcttgtgtcctttattat

SEQ ID NO: 18446 - DNA, 2376 bp, Heterodera glycines
tttcataattgatagtaatgaattattgcaaggaaaattagaataatttatttcgggggacctcaaattccattcttattagttaaggcatagagcaaagaatcgcaaaacaaaaccaaacagacaaagcccgatgaatgaagacatgagtcgattcgaatcaaatcggttttagtgcatttttttcaactcacgcaccccatcacgaaaacacacatccaaaagtgtattcgggttgctgatcataatccggcatccatttcaattaattctgagcccctgaccgaattcgaatatagtcaaaaagttttgagttttttgttttaatatgggtcaggggtccggaattggtcaaatggatgccaaaaaatgaaggctttgtaccgagactcccgccctgctttggtttccaagccctgccgttcctagtcgatttcaaatttccatccccaattaaaaccttgttctgcgatgttgtcgacatctttctgacctttgcttcctttgcagccgactcagaagaggacaaaacaacggcgttattcgaccctaaacaaacaaattgtttggccggcagtcaatcggtaacttaacgagtcaatggacttggggtatttcaaaacgcacctgggtcaattatcaaaatgatctccgatatggtttttcgaaaaaacaaataattttactcccggccattttaaactcaaaccaatgacgaacagtgtggcgatttttgtggacatggacccctcccagaactcaaaacccgaaaacaaaccttgccccccagcggcgccgttcgccgagtccgtttggtttgcactgtgtcgcttccgctgtccgcttgtcgtctcagtgcgtccgtctccttcgccgccactctctgccgccgttgtcgtcgtcgttggtggcgtaacagcacttttttgatgttttgacatcagaaatttatttgcaaattgttctgtgcgatgagttgtttgctaaatcgacagttacacgtccaatcaatgaccacacttagtttcttaagccataacttttttcttactcaagacatacattcttggtattaatcgaaagcttaaagtctaagttttatgtaagtaaattgttccagaatattctcgaaaagtactgaaattcggaaaaccccattgtaattttggtaatagtgcagtttgttccccaaagtttaaaaaagtcgtcaagcgtttttgttggggttctggggggtctttgatcacgaagctgacatccattttgactaatttcgaaccccggatccgaattcggacgaaaagttgaaaatttggattttcgactttttgttcgaatttgggttcctgggttcgaaactggtcggaactttcgattaataccaagaatgtatgtcttgagtaagaaaaaagttatggcttaagaaactaaggatgtgatgaacgcataaaaaatgaaataagaacagattaaaaatgcgaatgaaaggattcataaaaacttcctcttaatatacacaatttttctttttatttctagtgaaagcaaaacttttgaagccaataggtttggggtggaaatcaatcgataaaaaaagtggtctgttattgtagtaccgtccccaagagctcgtcctgctgcgttctgatcacaaacgaattgacctgatcggctggcagtaaggtgatgattgtggcggcagttccggcacattgaagtcctttggccgttcgggcacagtgacatgcgcttttttgcattttgattcaaattttatgctctttctgtccgccataacgtgtcccatcacattttacgcgtcccatcacattttacgcgtcccatcacattttacgcgtcccatcacattttacgcgtcccatcacattttacacgtcccatcacattttacgcgtcccatcacattttacgcgtcccatcacattttacgcgtcccatcacattttacgcgtcccatcacattttacgcgtcccatcacattttacgcgccacatcacattttacgcgtcccatcacattttacacgtcccatcacattttacgcgtcccatcacattttacacgtcccatcacattttacgcgtcccatcacattttacgcgtcccatcacattttacacgtcccatcacattttacgcgtcccatcacattttacgcgtcccatcacattttacgcgtcccatcacattttacgcgtcccatcacattttacacgtcccatcacattttacgcgtcccatcacattttacgcgtcccatcacattttacgcgtcccatcacattttacgcgtcccatcacattttacgcgtcccatcacattttacgcgccacatcacattttacgcgtccca

SEQ ID NO: 18447 - DNA, 2207 bp, Heterodera glycines
cccgatactttaagcagtcgattaatacacaagaatgtcttctttgactaagttcgaaaaaagttatgccctaagaaactgaggatagtcatattgatattagacgcgtaaactgaaatagtgccaatatttaccaatcatggcacatttccttggctttttgggccacaaatgcagcacgagtattcgtttcttgagcactgaatgatgttgtttggaacagggggctgtccaactggaaatgtaaatttgtttaaaattttttaatttggcttactgtccacagccaatgcaatgagatgggtgcagagaccaaactaaaaatattttgatcatcgtagtgcattttaaattatttatattttcaaattcaaaaaacctttttaaatacttaaacacgaaacattgtaaaaaacggctaccggacttttggggatgagcaacgccatcagaggaaacaagtcgagaaacgggattaaaaagatggaaaaagggtcgggaatgggatcttgccggaattgaaacctcccattttcatgtttcccaatcgactgcattttcattgctaattgcccgtaccgaaacggcgtttatgtccgactcgtgcccggggaatgtctgcttgcacatcccttcgcggatgtcccacagtttggcggatgcgtcgcacgcgccggagatgaacgtgcgcatgtcgggcgaaagcgatagagacatgacgtcaccggtgtggccggtgaacgcggtcacttgctgtcccgtttcaatgtcccaaagggcactaaaatggggcaaaggaaatggacgaattaattggtttttgagtgaattcaatgggaaatgccaaaatgatcgtttttcaatttggcaaatggcccgaggggactcaattggccgtctgctgactgactgaccaagtcatgtcgccggaggaggtgacgatttggttgtcgtccaagaagcggcagcaggacaaatacccggtgtgaccaggcaactcgcgcgacactcgcacatttccctcgcgcgtcttcagcgagtaaatgctgcaaatgttgtccaatccgccgcatgcgacgaacgatccgctgggggcgtacgcgcaagtcatcacccaggaggagcgcagcggaatggcatgtacctgaaggaaattggcaaatcagcatgtactgcttgaactcggactcactttattcgtggtgtacgagtcccacacaattaatttgccgtcctgagaagccgaaaccaaattccgcgagtcggacgcccaatgcatggcatagattttggccaaatgtcctctgagagttcgccggttccgcagctgaatgcgcccgtttggctccaaattagcggccactgatgccaacgtggtgtcattggcttgtttccgcgcttcctgaacccgattaagcactgatcagtgactccgatcactccgtcgtcccaccctgatttggcttttgagctgctccgcctcctgcctcagctgatccaattcgctcattttcgctcacttcgcttgcactgcttcgcgccttttggccgactcagttcatcaacagcgaaagccaccgttgggcttcgggaatgaaaggccgcagaatgaaagaaaaaagtcgcctgtggtcagcaggacaaaacgctgaaaataaaaatggcaaaaaatgccaaaagtgacggagagaaaacgcaccgaaggaattgtgaaggaaaggtatgggataatggggagggatgagggaaacgaggctgatcagcgaaagcaatgacagcgaaggatttaataggaaacgcagaaaagggcgagggaaaagactgatcggacggaggagcgatcgacgcggaaataatgatcagcaaagtgtgaaatctaaaacggaagtgattaatgggagggggaggggggggggggaatggcacaaatgggcaaatgaaagtgccaaaggggaaaatgcgaaaaaaaggcgggaaaatgagataatgacttatttaatatccaaaatgaataaataatgtacaaaacaaatcgccgtcgtttgctgcgtatttttattaatgaatgccccgcgcaaaaagcgataagcgaaaagaaatgatcggagaagggaagaaaatggggggggggggggaccgaagaaaagggaaaaacgttgaataaaagggataatctggcgaatgcagggaaagctctagaggtcccc

SEQ ID NO: 18448 - DNA, 828 bp, Heterodera glycines
gtaaaaaacatgcatttccattctaaaataagaatttaaaatatgtttttaaacacgaaatttttaagaaagctaaaccatttcccgattttaatttcaaaattttgggaaataaaaattaagtaaagttcaagcaaatgattaattcccgaaaatttcgtctcagataacatttctcggcctttctattgactctgaatgagtctcaacttatgggaaaaaattttgggcctttaatcttgagctaaatctggttgtccaatcttgaacaaatttgactctggaacagttatgtctgattagatttttaattttttacccagacagtaattgtggagttgtcaattcatttggtcgtattggggccagctttaggtagccaaaacggaatgtgtacaattcgttcatgcgctcccaatcattcatataccattgctcaacctatgatgcaaataattttttaataaatttgcaaaaattccgttttaataaattaataaagggagaattaattaataattttataattattagcgaaatcctatttttatagattaacaaagagccaattagttaattgactaattaataatttttaattaaatttggaatttccgttttaatagatttataaagagctaattaattaattattttgagaaattaacaaagagccaattaataattgactaattattgaattaatatttttttttatttaaatgtggagaatttccttttaatagattaccaagagccaattaattaattattttttttttgtaaaaagtttggagaatttctgttttaatagactaaaagagctaa

SEQ ID NO: 18449 - DNA, 2256 bp, Heterodera glycines
tgttctgacttacttgtgattgccgaaattggtggtgccaaaatcggccgatgaagaattcgttggcaaagtgttggtgttgtgccgacggcccaaagacgcggccaatccgatgcggccatgcattggaggagggtcccaagcacttgaaaaagttgcgcatttaaaacactcaaaatgaagcggaacggagcggaagccgcagcggacggagtcgagcggaaacacggcctggccaatgaacggatccgtcttcggaccgacgaaatcgccgtcttccacatgaaagcgcagcagtgccatctccgggtgccgcacatggaacacaaagcgttcctgccatatcggattcagaccattggacgctgatggaagaagggaacacaaattgggtgatggaaataagagatgattagccgagcaaaggacaactcgataaaagctaattgataagggacagacaatccattcgataaagccaaactaatgaagaagtcgatcaaattaattaattaaatcagtgaaatgatcagcctataaattttgtttggaagggtaaacgggttctttaggaggcatggggtggctctttaaattactcttcttttattcagaaattggaggtcggtctacctgttggagtagcccagccaaagtgccaacgagtcgagccaagtgggcacttggaggacgaggcgctgggacttgagcaaagccaagatgaagaagggcacccagcagcaaaggaacaccgacatcatcacgcccagcgtctttcgggctttgtcctcacactgactgtgctgcgattttccaaatccgccgccggtaaggacgccgactacggaagaggcggtggaggaataggagcccaactgacggagggaacaaaaatgagatcggaaaagagacgagggatagacagagacatgtgtacggtaggacaagacaacggtggggtaatacggtatcccaatgaaatgctatcccgaaaggtacggtactcattgagttggtacggttctgcagagaaagaaaatggggtgaaaaaaaggcacggaagaggtacagtatggccaagtggcggggggatacggttggttgtgggaatgacctcggttaattgtctttaattgaccgaccaaaggaattcgaattgcaccggtcattagtgaacatgccgatgcccttggtttgtccgcttttcctcttccttctccgtctgcttttgctttgttgctcgtgttgttgtttttgtcctgctcaatgctttgccgttggactttttgccgcgtcgaatttcttaaggtagtttggattaataatccaatcgatttgattggcttcaaagttttgtctttactccgttctgatcactgatcagttcattttcccctaattaattttgcctgggggtatttgtcagctgtgcgtttgctgttgccaacaatgaggcggatgagtgcgaattgttcatagccttttcagcaggaaaaccgtttgagtttggcactgagtcggtattattttggcattgcatcccttgccatcggagaacctaaaaaggggagagggaaggaacaagctttgacattgccaaacaggtgggtatttaatatttattgggcctactgattgaaatacagtgagtttttttatgtttttttggcattccttccttggcatttccttccttaagcatttctttggcacttttcttggcattccctcccttggcatttctttggcacttttcttggcattccctcccttgacatttcttcggcacttttcttggcattccctcccttggcatttccttcctccgtttaccattctgtcctggcgttgcatttccttggccgcgttccacagtttcacataaacaattaccataattagcgcgggcccccaaaaggcaaaaatggtggcgaatatttggaagaagcgattctgcgaaacctgcacaaatgtttatctctttgatttgccgatttttcattcgttcacttttcttttttctcataataaattaaaacttttcacatattttccctctctctcccggtcaaatgtctttttatttctttttattttgcccatatgttccgcaaaataacgccgaaatattttattttatttttatttgagttaaattccgtcggatttattttaggcacataaaaaacattcaaaggcaaaattattattttaaaggaaaaaattcattcgtttcaccttttatttgttgggatt

SEQ ID NO: 18450 - DNA, 2038 bp, Heterodera glycines
tttggctcaattccgaatcctggcccatttagaacatttttagaaaattaattttttttttttgcatacctatattgctaaagcatctattataaaactcatcaaattcattatagactcaagctatgccggattttatcaattttattttatttcgccaatttgaacccatttaattttaatttttatccgagagaaatgtggatgagttgaccgtggatgagatgccttgtggaccccctatcggcatctccggcccttttctgttcccaaaaagtttttgtaaaaagcgcgccgcaaatttttttagacattttgtgtccatggcagggatggcattccgaggccccaaaaattttcggaaatcggaattccgtgccatccctggtctcatggtattatagttgtcctaataactaagagaaaaactattttttttgtcaggtattcagtaaagtttttaactataaatttcgttgttaaacctaaggttatcatgacaacttatgcacaggcaactcgaacaatggcttattgttagactaggcctaagcttaggcttttgtaaatttttttcttatattagttgaatttctgttgacatcaataagtgtgcttagagttgcttttgcacatttcgatgatcaaagtatacaaacaagaacaattagactattcggaaggtataaagtttccgattgacggttcgaaaaacaatttttgacgcgtaaaatatgatgggacgcgtaaagtgttgttgggacgcgtaaaatgtgatgggacgcataaaatgtcatgggacgcgtaaaaccgactagaacccatttttatcaataatgagacgatttgattcttttaaagggaaatagccaatttattttagtccttaaagacgtatttggggattgattatgacaaaattaccctccgttaaacacagcggcccaattttgggctcccagtacaattatgcttattttttatttagtaatcagaacgccaaaactttgcaaaacttaaaattttccggagattttcccttgcaaaaaaagaagagccgatctcgagttaaaaactagacagctaaaaaataaactgtgattcgatagaggaggtcaaaatatgggcctatgcaaaatttcaagaaaatctgacccgaggaaaatttttttgaccctagtgaaaatttcaataaatttaattcttttttagccaagtgcgcaatttaaggccaaatcaaataaaactaacaatattctctagaattttcccttcaaaatgagcataaaatggttttatttgctctagtattcgccaagttataagctaagaaaatttcataaaattgtcgatgttgtacgtaaccaacgctttttgaatatgattttttattgacacgaaaacttttattaatgaaaaaataattctgccttcttctttaaaagaagaaattgaaattaacacacaacataaggaggactcgaacctgagacccccttttggtgactaactcacagaccactgagacgaaaaatccagcataattgtacttggagcccaaaattgggccgctgtgataaataccatggtcgtctctcttattctacgggttaaagttggcactgcataaaagagtgcagagaaaaaaatacctctcattttactgtactatattttttaattctattatattgttcctaataaacaaaaaaacaaattttcttaaatttaggtaatgctgttaaaacctctaatttgtaagatgaaaaaatgtttgaacccgattttacacaggcgcaaatgtccgagacgcaaatttccggggcgcaaatgtctggacacgggaaaaaacatgacgtatttttaacgctcaaatttaatttattttttactcttcgactaaagttattcaaaaccacttttcaaggacattttctacttcttccaattgcttagcataatcttgagcctggtactacaactaaaatcgattttcatcgtataattgtctgaatttcgaaaaaatcagccagccaat

SEQ ID NO: 18451 - DNA, 2584 bp, Heterodera glycines
tgaaatgctggtgggttgagtcccagtgtttgcttttgccggagatttgagtcccattgtttggaatgccggagaattgagtcccagtgattggaaagcctgagaattgagtctcagagattgaaatgctggtgggttgagtcccagagattggaatgtcattgaaagttggtgggttggtcccaatgtttagaatgccgcagatttgagttccagtgtttggaatgccggaggtttgagtcccagagattggaatgccggagatttgagtcccagtgattgaaatgctggtgggttgagtccccgtgtttggaaagcctgacaattgagtcccagagattgaaatgctggtgggttgagtcccagtatttggaatgccggagatttgagtcccacagattgaaatgctggtgggttgagtccccgtgtttggaatgccggagatttgagtcccagtgattggaatgctggtggattgagtctcagagattgaaatgctggtggattgagtcccagagattggaatgtcattgaaagttggtgggttgagtcccagtgtttggattgcgggagatttgagtcccattgtttggaatgccggagaattgagccccagagattgaattgctggtgggttgagtcccagagatcgaagcggccgagccagtcgattttatcattcataattctataacacaatcgtactgcctagcggggggatgcgccgaaggcgctgaccccgctagtattatttaaatagcataaagtttgttattttctaaaaatttggccatttgttcattcagtttgaaaatgaataaaattgcaaattggataaataaaatatgacaaatctaaaatttgattattaatcacaaattaatttagattttttttccttcactgcaatggcacaaccgctgaagaattatgaacgcaaattaatttgaacaaaaatgcaaattctttttgaaatgccgtgcgatattcaaaacttaaaaaaattaaaattatattaataataaattcaatttttgccttgtcaaaaacaaaattgggccacatgaagcagcactaaaatgtaacaaaatgcccataatttgtttacaattccataaaaatatggaattgtgatcaatgtcaattgattccagtaatataacagcgaatattgaaatgatataaccaccaaaattaaagaaaacgattatgaatagtgaacgaaaaattcttttgataaattgtgccgcgcttgaatttgacggtactgaaaaaaatggcaaaaaaaaaaacaaaaaaaaattcgaaatttgctgcagcatttaaaaacctttccgacaatgaattattaaggcgattaatgcataaataattactgtagatacaattgtcattgctccctcgaaaagaacaattaagcaatgtttctaaaataattgaaacaaccaagcaaaacaatgacaaacaaactgactgaatcataaatgaggctgccaatttcgtaataataaccaataactttaatcgcattcattttatcatcataaaaattcaaataaataaatgcctgcacaataatgtgaattacagtaaccatcaaaacaacagtaagaaaaagtgactgattgaatttccttattaaaacgaaaataagtaaaaagattttaaatcaaattttatactttagcggaaaaagcacaacaaacagtcggtcaatagcaatgaaaagcataataaggagggcacagccggtgcttattaaaggaaccacagtaaagcaaagaccaatttaaatgacataaaatactggcctgaaaaagccgtaaaaattgacaaaaaatttccacaaaaattgattatttcaaaaaatgaataaaatgccaacaaaatattcacagagccacgaaatgatctgaaagaaattttgtaatgaattattagttaaaaaataatgtaaactttgtccgaattgtgatgaaaattactgaaaaatttaacaaaattccactgattgtcaaaaaaaacaaaaatatgccataaccaatcattgtccagcaaggattttgattagaacacgtctttattaaaaaaattgtttagattatcaaaaatatttaaataaaagcaccttcaatattatcatttcttcgttctcgtttatttgcgtttcattcattgtaatttaggaaatgcttttacaaaaatttaatttttttattttttggaatttaatataatgaagatttacagtgaaataaatggcttaactcaaactaatcactgaaattttaaattttaaaacattggctcctattcgtgacattgcaaaacagaaatttcttcttttttttgtcagttttcgtttaaaagtgtcacgcaacaaatggtggggaaaatggtaaatttttttctgacttacaacagaaaaggtggaggagctgagatttatgaaaaaaaaatttaatgagaagtattcatgagaaattgagataaattaaagaaaaaaaaatgggaaaatgaacaaataaatgtgaagtggcaaaacattatgagaaaagaaaatttaaaaaataattaatgatat

SEQ ID NO: 18452 - DNA, 1516 bp, Heterodera glycines
  unsure (1)..(1516): unsure at all n locations
attattttgccgttttgtttttttatccccccccaccaacgtaaaaataaatcttcaccaataattaatgttcattttttatttcttgattctccaataattacacttctattaaatcattttttggttagcattaaaaaaatgttgtgttgtgactgggatgtagtgcacttggtcctagtcaaaacagtaaaatcatcaaatttttatatgtttaaaaaaattaaaagtatttcatttaggcccgatgattggtcacgggatgattattgtaattttcgagaaactataagatttataaaagtaggaaaaacaaatctttaattttgctaatataatttgccaacattggtcaaagcgagcagcgttttaggtttacgttggggttggaaatgtcgctgtcatcgaatcagggccgggcttgagtaaatgagccagggataaatttattgaatctcaaataaaataagccatcaaaatgtgagaacatttactctaataactttcggaataaaaatatgccgtcaagtaaatttcaaaccgaaacatttactttacaaaattatgttggtatttgtgctccttttttgcttctttcactgtcaaatcgatgaccaatgttgctttgtcctcacttttgtcgtaaaagcctttgctcgggtccacagttccttaattagccataattgggtcaattaagggaaattttaattgtgactcactggaaatgaaatgaaataagaacccaagattttctttttgttgtcaaaaaagtagtcattaaattcattcttcaaatccgacccatcgttcttttgagagacaattcgaaaagttgcaggacatttgcaactccaattttcgtctaaatggaaattaatcatcgttgtaattagcattaattaacagttaattcgcaccttcttttggagcatcgaaaaaggttaaagcccaaacaattctgatcagtgcttccccatttccttttaatttgtgccaatattctccatggataaaaaatggaatacaatttttaaaaaattatatttcattttgaatgcactgaaaatataagaaaagcatattaaatttttattttatttatttaaattaattattttaaaaagttgacactcgttgttgaatgagtttaaacttggttttaatctcttttttttatcaatatccttcgcaaattccacgtttgacaaaagcggaaaacgtatgttgaaaagtgccggaccaagcatagaacgacaattctctgccgtgcattcaatgccattttcacggcacttcgaatcggcccaaccgagtgccgaaaaccaattaaaatttaatgacgactaattaaatgaattaatttcttactttggtttactagactaatccagcagcaggttaatcatcatacatatccaggccaataaacacgaatgagcgaacggtgaaggatccaaatgattatttggaganatttgaaaatcgcaaaaaaaaaatttaattattttaaaaa

SEQ ID NO: 18453 - DNA, 2775 bp, Heterodera glycines
tttttacgtgtgtatttacatataaatggaagccctctttaagagtaatctcggcattctctcattaattaattgtctctttctgatttgccattccatgctttttcctttgcttttgccaatgccaatgccgttctcatccccccccccgttcagcaggtgcttttccatggacgaggaattaaagtgtccccattgtcggcttttcctgtgccaacctgtcctgctgccctgcgggcacagttactgccgcaaatgcgccctccaattgcagcggcggtgccacccgccgccgtgccctccgcttccgccgctgcctttcgcgccgtgtccctcgtccgcttctccgcttccgcccgcgtgtccgtcgtcctccgcttcgccccatcctccgcctctgccccattcttcctcttccatcgcaattccttcttttccctctcatccgtcgtctttttccgccccgtcaagttcgggtcgtgcagctgttcatcaacatcaacttagtgactttgcgtcacccttttcaggtgcttccgacactctttccttggccccgtcctgcgacgagtcggccgccgactcggccaccagcaacaacaacgaggacagtcgctcgctgctcagcgactccgccgattcgggcgttggcggcacatttcgcggaggtaacggaaagatttttttctgtaaagcgaagcgatcggataaaattcgattataccaaactttccatcaatgacttctctcccacaagaggaaattggtggattttagcagaagccactgaccgttcattttgtaaaacaaacaaaaaagtgagggggggcggtgaaaggcgataagcgacgacaaacgccgcgggggtcgcacagccgaaattggccttcccacgacacttttgtttgcgctaagtctgtcctaatatgtgaatgtatttgctgctgtgatgcgaatgttgacctaagggaacgccaataaaacgaaaaggaaaagcaaagctaacaaatgaaagtgggggaaatttgggtaaggggagaggtaatttaaatgccaaatttgcacttttggccaaacttactgccaaccgatcacttggtcccgttttgctcagtttaaattcctctgatcactttgagtccctttgccaatccgccgatcacttcggcccttgaactgatcactttcagctttccatttctcccccgctccttaaggctctcgtccgagttcgtttctgtccaccaccgcctcggctgtgccactccgttccgtcgtcctttccgcgtccgttccgctcccttttttccctccgaatttgccgcccaatgccgccacttccattctctccccgtccacttctgctgccggtgccgttgtgctcaaatgcgtggcgtgccaaaagtcggcacattttgcggacgaagaaattctgagaaaacaaccggaaaatgtggcagtgagccgattaatcacggcgaggcaacagcaaaaagaggaagaaacagcgcaaaaacagagaaaaaagcagggaaatggtggaggagcgacggatggaacgacgacgacgacggaatgtcaggtgaacggacaaatgggcaaaatgccaaagaaagtgcaatgaaagaaatggacaattccaatgccgaaataactggtaaaagcattttgattggttgtttcagtggtgcgaagggcgagctcagccggcaaagtaccgatgcgacgcgtgcaattacttttactgtgccgactgtcaattggtgctccatccgccgaggggacctctgaaaacgcatcagctgattccggccgacgagttcaacaagtacaaacacaatccagcaaaacttacttgctgataaagactcttacttttgataattatgcttcctctccttaattaacaattaatcccccctaaggcgtgcctcttccctctcccgcgacttcgtcctccccccgtcctgctcctcccccttttcttcgtccgacccaatgccttcgtccaactgcgagtttcatcctgcccatgagttggcattgtactgcactctatgccaacagtcgctgtgtgcccaatgtgccggcgatgttcggcaccaatcgcatcacatccaaccattgcaagcggctgcaaaatcgcataaagtaagtcatgtacgattcgatgtgcccttttccttggcacggcattcattttggcttttcaaatgttgcacttcttttgccaatatgtgccgaattgtactccaaactttgttttcccatttttaaatttggccttttgctgcgtctgttggcccccaaattcccccggcgcctttctttgccattcattcgttcggttttgctttgctttctcttctccatcagtctcttccatcctcaaattccggatgagcgcacatttggcctcatccgcatcaccagaaatccaatctgttcgctaatccctcccctccccccccccctttcgccaactgtccatcccccggggcggcataaatcaaaatgagtcggtgccaaaaccctctgggcgtaattgcccttctccccctccccgaatttccatcctttctcgcctttgccttttaaagagatggccaaaccgatggccatctctgcgcgttaatgcaataatatttatttgatttcacactccaacgactccaaatttgggctcgccgtgggggcggcggtattcgccgccctttcattgtcttttccttcgctaaaagtgagaaaaaaagcatcaaagagagagagaattcg

SEQ ID NO: 18454 - DNA, 2218 bp, Heterodera glycines
  unsure (1)..(2218): unsure at all n locations
ttataaattttcttttggactaattcccaacnttttttgcnaatttcacattcccaatggagaatgggacaaatttttataaacactttctttcgcaaattccttttcatcaaattaaattcgtttaaaatctccattttgtttcttgtttctcgattctaaaaaatcatttatttttaattaaaatcttagaatttatcgattntaaaaatacttattttctaggtatgatattcttttatcggtcatattaccgtattattgtaagcttcttcattggcagaattgctttgttcagcatacgaaatattctgatcaacttgttcattaaactctttttcaaatggatcttcgtttaatttgtccaattcaatttttggcacttttatttttaaattgttattttcatcctccaattgttcctttttaatattttgcaatttttttggctttatatcttccatttttattttattgaaattttgttgttcatgaatttcattattatcaacaatttcttcctttattgcataatttttaccgaatttttgttttttgaagttttttgaggtcgatggcttttggtttttccataaatcatcaaataaatcttcatcaattccatcaattagcacgaataaaaatatgaataaaataatcacaaaattaatttgcggcattttttgatgcaaaaaaaataataaattttgtttttctgcttatatttgttatattataagtggaatatatgcaaaatctctatttatttttaaaaaatctcaatcaattgcaatctattatatttaatggtaaatagttgattttaaaaatttttaatttccctttcctgtttgtaaatgttaaaaaataatttatggaattccaaaaaaataaatatattgaaattaaatgaaatataatcagccaaggaaaagtttattgatcctcgatttatattaaataaaaaattaaattaaattgggcatcagaaaatttgataatggcaccgtcggaattttggacacctaagtcctcttttacagaataaatcctgaaatagacatatgtgcagattaagataatgtggttaatataatttagggtcaatttttagtaatttgtatgtttatatttaacataatttggtaatttatcaacattttattaatttcgctcttttttcaattaattaaacattaatttgagtaaaaagatttcacataaacccaaaaaacgccgaaaatattagagatatgtatgtatgtatattctcagaactttttgaattggaaagaaaattgctaagggatgggataaaaatattataaccatcaaaatcgaaatgaataaaaaaaaactcgatttattaataaatgaaactaaataaaaaaattaatttattagagaattttaatttaaataataaaattctattaactacagtaccttccttcaaggtatttgccgcttcgtcatagtttagtatttttgacatggggtaacaaatagatttattaggcttcaaaattttaaattctattgcaattttaaaaaattttatccttttaattttggccaactatcattttctttttattagataaaaaaacagcgtttattagggatgtgcgagactcgaatttctcggtttgagaaatttgtcgggtttttgcttctcggtctatgttctcggccgcggtttttagtctcggaaactgataaatttgaactaaataattaattatttatttagaatacagaaaaaagaaaagcattgaaattgttccaattcaatttctggcagttttatttttaaattattattttgcttttgttgttgcacatgtaaattttcattttcccttaaatggaattggaatttaaattgattgtcaatattaatttttgcttcaattattaataaatttatatacgatttgtaccaacttttttgcaatttcacgttcaaatttaataattggcattattttataattccaccgtaattcctttttcataaaattaaattcgtttgaaatatccatactaaaaatttatttgttttatttaataaatttcatagatttcagcggtacaaaaataaatgtttatctaggaatgatattgcgctcattgttcaaattcagttttggtctcttttatttttgtaatgattccttttattttttttcaatagttttttggagctaatcaaagc

SEQ ID NO: 18455 - DNA, 2418 bp, Heterodera glycines
atcccgtgtcctttttagaaattcccaaatgcgagcattcagttttaatggcaacaagtttatggtcaaatttgtgctctaaatatgaaagacccttgtggaatgagttcgccacataatcacgagcaatcccgtgtcctttttagaaattcccaaatgcgagtaagcagttttaaaggcaccaagcttatggtaatatttgtgctctaaatatgaaagacccttgtggaatgagttcgccacataatcacgagcaatcccgtgtcctttttagaaattcccaaatgcgagtaagcagttctaatggcaacaagtttgtggtcatatttgtgctctaaatatgaaagacccttgtggaatgagttcgccacataatcacgagcaatcccgtgtcctttttagaaattcccaaatgcgagtaagcagttttaaaggcaccaagcttatggtaatatttgtgctctaaatatgaaagacccttgtggaatgagttcgccacataatcacgagcaatcccgtgtcctttttagaaattcccaaatgcgagtaagcagttttaatggcaacaagtttatggtcatatttgtgctctaaataagaaagacccttgtggaatgagggcgccacataatcacgagcaatcccgtgtcctttttagaaattcaacacatgcgagtaagcagtttgaatgccaacaagaatatggtcaaattggtgccctcgaggagcgacatgtcgggggtcggggcggggaataggcccaaaaatgtcggggatcggggtcggggaccggggagctcggggacggtgagcaaccctagttttcagaatgccggcctcgtcactatcatcactacacctcttaatgcgggtgcagcaattcgcgaaattttgcatagatccatcaaatgcggatatattgagattttgtgtttaattaaccatttataatgcatatccttcagtcattatttttaaatcaaatttaataaactgatttttgttgcaaatctatacaaatttatgtctgttttattaattttgtttttttcaaattgctaccaatttctatgcaacttttcaagcataaatattcttgtatataatcattttttatttatacaatatccaaaaaaatattaaaaaagtaagtgatcccacctcccccccccctcctcttgcacagctatgctaaataatcaattgcaccctactcctccccctcccccgctccgattaatcaattgcatcctcctatgtattcccccgtaagaatggtcatttaatgcttatgttcatgcaatgaaaattttgttgatgaatgtcaaaaaatcttcgacgaagagtttaaacctattttcaaatttttttaaatttttgtcttgcaattataaaatcattaattgcaccaaaaattaattataaaaaatttttaaataaaaattttcgaacaaattggtatcattcgaaagctcttgacaagctaagtctaaaaatcagggaacaattcaccataagaaacccagacccggttgaaaaactctatttttatcagcttgtttaattttttaatttatattttcaagttttcacgtaaataattttcgtcaaatatttttcggttaggattcttatttaaaaatagagtagagcgggaccgggaattttgggcttaaccgggaccgggaccttttcgggttgaaaaaccgggaatttttggctgggaaaaccgggaaaaaacccgagactggtcccggtcccggtcaaaaccgggttcaaatttcataaaatgatttttgttacaaatttatgtctgttttattagttttgttttttcaaattgatatcatatgcaactttaatattttaaaaaaaattttaaacctatttttaaatttttgtcttctctaaagatttaaaatgtttcggaaacagaaggcggcggacgactacttggaattggacattgagcgggaggaacccaactgctggacgatgtgaggggaataaatttcagctggaagagcagctttttgggaaaaaagaaaaatttgaaaataagaaattcatgccaacatattgatgcttatcaaaaaattcctttaaccaacttggtcaaatcactcattcatagtgatctggtcactccaaaatacaatgaaaatcgggggggggggagggggggggggattttttagacattttaagtagttacattgaaaagagcacaaaatgctctacaagatgcaaaagacaacaactctacaacttttacctgcagggatatgggcacttcagttttgatgctgataatttctactataaaatgcgctatcttcagaagaaatacagtactttttgtagacactgaaatcgaagtgcccatacctcatcgggtataaatcgtatagactttca

SEQ ID NO: 18456 - DNA, 2159 bp, Heterodera glycines
  unsure (1)..(2159): unsure at all n locations
aaaaaaggaaaactacaaaattttttgtgtgatagagagagcgaaagggaatcagggctgggcgtgactggatttaattttttgatctaaatcattagcagggatccagtttttagggttttatctatttttcctcagctccagtggcctgaaacacacgcaaaacaagttattttgatggttattcagctacttttcgtgtttttagtatctatttttaggttttttagagccaaaaacctaaaaaaaaatttgaaaaaaaagctcttttgatatttttggaaaattattaacaaaaatgatttatatagttatttcattattgataagaattttcaaaaagctaggtgaggaaaaaataggagcaaaacgacaaaaacgcccctattttctaagcgaaaaactcaaattatgatgttaccttaataatactacaaattaacaagaataagtctggtttttaatccagaagaaatcatgaaatacgggtagtcctttaaatgaagtagaaaaaatcgtttaaaaaaaattatcttgcatgaaatcgtcgaaaaataatccaaaaacacaattacagattaaaattacgaaaaatcccaaaatccttaacccataatccgtcatgaacgggccaaaaaggccgaaatttccataatccgtaattacgcccagcattggttcatataggccttttgtaattttcgtttcttttcctacaaatttcgtctgatgaaaacgaaacgaaaattttaaatttaaaacactatattcaaattcattaatggctttttacaattttcttttggctgtcttcttcataaatttttttattaatcccagcctatttaactgcaaaaaattctataatttattatatgtatgagtcttttgcccattacattttagacttgtaccgtctttgtgaattctatgaggtggacgatgaatggacacgaaaactctgggttaaatgaagaacttctcaatttgaccttggaaattttccacaaatacggcaaaacgaactcagaatctgtcgaatgtttaaaattgcgtccggagaaaatttattatgcctaactttgcctattttagtcttttgttctttatgcctaaatgcctatttccgtacctatttcgctatttttggcgcattttcaggattatcggaaaaattcttaacaaaaatacaataaaaacgaaaaatacacccataagaattttttaaaaaacttcacaaaaattgatccccaaaaataaaatttctttcttgataaaaatttttggtttaaaattgtccttatttgaaaaaactttaaaacaattgaaataaaagcaaaataagttttttaaatttttatgtgtttgttacttgaaaagtgttaataaaaaaatttatttgccttttttgtgcctgtttaatgcctatttcaccattttttatgcctaaaaaacgaagccctattaataacatttaagccttaaatgatatgaatttataaatatgctcatctttgggtaatggctatgatttatctgattttattttgggttactggcttggttctaaaatattgttttaggtcgaataatagcccgacgatgccaattgcatcgccggaaaatgatgacttttagctttttagccattaaaaaggtaatttaagtgtgggatgaacaatttggagagtggcggaagtgaattagattcatttgaatggtcaaaatggaggcttaaatttggcaaacaaaattttgtttctatcgtttttaggaccttatgtgccattttattcacagaaaccgtttgtcatatactttatcgaatttaaataaacatatgaaccgagcatttgtctaactaaactcacaaccatcaatctcattgtcgtccttcgaatggacacgaagactctgggataggtaaatgaagaaattctcaatttgaccttggaatacaataaaacgaactcacaatctgtcgaattaaactggggattccctgctgtaaattcaatgaatggcaggccacactgacagcaaaaaatgaatgaattgaaaaaagaaatttcataaatttggtggcaccggngaaaggcgccgtgccgngccatcgttgcttttgtcctcggcttcccccccccgccatcgcatttaac

SEQ ID NO: 18457 - DNA, 1820 bp, Heterodera glycines
tgaccgggatataagcgggatttggtcgggatccccatccgatcaaagtttcccggtctcccctcctttccacctgttgttgctgttgctggtggtgtacaatttttggtgcagcttgttgctgctgttgttgttgttgttgctgttgctgcctctgctgttgttgaagttgcaagaacatattcgtggcggagtttggcccaaaaatttgttgcgcaatgttttggacgccgttaaaatcggcgtacggaacggaggcggtagaggcgccggatgagcctaaacaggcgcaaaataaacagtaaaattgctaattatgttaattattttaaaaatatagttaaaaaatcaatgggaaaattgttttttgaagatgaatttaaaaattcaatttatattgtcgattatttaaaaaaataataattagttaattaactaatttattcgtttgcaaataaatagaaaaattggtacttttgaaatagataattaaattaaatatgataattaatcccaacattaaatcatttatatatttggacaattaatttaaaagttaaagagatatttaatttaaaatagcataaattgtaagaatttttaattaatatgcaaatattaataattatttttaatctaaaatctcagcttaatgtaattaattaaaatgactttttctttaaatttaaataaataaagttcacttaataaagctaaaaaattatttttaattcaatgcaaataaataataatttttttttaattatccaaattgttttttttttcaagttttggcactcgccttgttgtccgttggcgtactgtgccgcggtcgccgccagcgtcgcaatttgcgattgtgtgaaggcggccgcagtgccagccgagccgctcagtgccgccatttgggaggccaaagcgcctgaaaattttttgaaaatttatttcgattttcaaaaaaatacatttcccaccatttccgttttggtggtcgttagccaattgtgccacgccaccgccgccgccgacggtggcgggcaaagcggacggactcgcggggggactgaagccgtcgtcgtccgagtcggcgccgacgccctgcttgccctccttgcgctgcaacgtctgaagggggggggggcaaaaaatcaatcaaaaataaattatttaaaaacaaattttaatttattttaattataaaattggaagatatgggaattatagttaaaatttccacaattttagcttagtttataaaattttgcttagtatttaacaacgctaagttcggtttcaaaatttaaaacaaaaaagcgaaatttcaaaaaaaaaattaatatttttaacatttcttttcgccgcatcgcttactcacttccataatgtccgtgttggtgcgcgactcgtgcggctcgttgtattccgtgtacttcagcaacactttgtccatgtccgtgctggcgtactgtaaaaggggatggtatactgtacaagtaaaaagtgaatcgaaacgcaatttaataaatgtttaaaattattttgcctgaaaaagccgatttgacgagttgaaaatgatcagcgcaatttcgcagtcgcaaagcaccgacagctcataggcctttttcattaggccgaatttgcgttttgtgaaagtcacctgaaatttagggcacattgatgagaggatgaagcataggcatcacacattttgttggttatctcgagagactcaaaatgaacgagagtcgagactgaattaaacactatcgaaagtcgaaactgagaagcgcactctccggagtcgggactaattaataatt

SEQ ID NO: 18458 - DNA, 1070 bp, Heterodera glycines
gttttattagtggacatgaaatttttatgaatgataaaaaaatgggaaaacaaaaacaaattctgtgttttgtgatgtttttgtcacgggaaattttttttttttttttgggggggggggcgtcagcgaatgaatggaaatgaatggaagggacttcgattgattggagaaaaacgggggacggggagaagaaaacgacgacgacgacaacaaaaatgaaagacgacgagagaggacgagagttagtcgatgttttttgtgagttttgggagaatttcaatggtttttttggtagaggggggggggacaaaaaaaaaagtgcgaaaattttgacgaaaaaattaaaatttaggacaaaaaatggaaatttaaaagggccaggggatgccgaggaaagtgccagaaattttggcagggttaggcagggtaggccgaggaaggggccaggaaaattggcaaattggcagggcaagccaaggaaaaagccagaaaaattggcagggtttggcagggtaggcctaggaaggggccaggaaaattgacagggacgggatgcctaggaagaggtgggatgagtgataaattagatcaaatttaaaaaaatgaaaatttagggggaatggaattttttgggaatgaatgagcaattgaaaaagctttattaataagcgaaaatagaaggaaattcaaacacaacaaaaacaaaagcttataaatcgggagaaaatttaggcctccggaaactgaacaaatccggtggaaaaaataaacaaaaacaaattgcgaaattaaatgctaattaaattaatcgatcgaataatggacagacaaataaaaaaaaagcaataaaaatggcaaattgatgacgaaaattggcataaatagagaaggaaaagcaaaaatagtcttaaaaaacaaacaaacaaaaaatgtcacggcaaaaggaagcaaaaaatggggaaaataaattaaaaatgaaaaatatatttttaaatttaattattattcataaaaagggattaaagatgttattaaaaagcaaagaattattaattttagacctttttaaa

SEQ ID NO: 18459 - DNA, 2885 bp, Heterodera glycines
  unsure (1)..(2885): unsure at all n locations
atctgtacaaaaataattttctttaattttcatttaaggccttaagagagttacgtcaattatcaaaaaggttcggcttaatgtcagatattcgtgtgggttctataataagttttaatcacttaaatataattttaatatattataaaatttttaaaaatgtatgggattttaccgcattatgagtcctttaagaggataaaattgttattattcaaaacacgctgattgtgatgggtttagcctttttagcttttacaacaaataaaaatcaaattttataataatttgggcgtgggcaaactaaagagagagcaaaggagagacggctagaagggagtgtgggaaaataagagagagaaaagactgttagagaagcgacgtgagaccggttgccccccgcactcctttaatgacccccctaattaccccgtctccctataatatcattaaattaatttaattatttataataatttattttcattacattgatgactaactctaattacatttctttttctgtcattgatcagtcaggaatggccagaacagcgtattatggagttgtaccattttatcagcatggtgttcaactgtttgctgtccatacggcactgaattggaccaccgattttgatgcacggaatagcagtgaaatttatctaacggaatgggatttgaagagcaaatttttggattttgctgaaacatattgtgtgccaaaaaagtgagtttggctctagtaatcaataaatcaaatctaagacgaattttttttttaaatttagaattttattatttttgaactcattttattttttgaaaatttgcacaattccttatcatatttcatcgaaatttgcacaaaaaaaaaaaattccggcaccgctggaccccataacacataacattctttattgataatgtgaccctaaactacatattctttttatcaccccggcactccaaattaaaaaaaaaacaacattggataaaaatgtttttagcccgaagagcaacaacaaaagttcttcgggtgcatccccgattttttttctggatacgggcctgattatagcccaattaataccaatttgaactgataaaaaataaaatggttttattcctaggaaatacaatattttaatttattatttctgaatatattcaaaaaacaacaggtggactggcaattgcgacccatacgacccgaaaatgcgtgcctggtttgcggcaaagggttggacaaagcgtttggagtcttggctgcctgtgactgtattttaattacagtaatgcaatcctgaatttttggcctgttggctggctgttactgtatttccgttacagtagtttactcaatttaatgttagcaattttttttacattaagccggttcaacttattaatgaaatagttcggtcagtatagtagtatatgaattttctttcattttccgggtctcattccattgttttcttgcctttttaccaccaccgtttgtctattttacatattatatgtatgcacataattttatttatttttttacgccaattacattgaatgatggcaaatacttattcaaaatggcatatcttttcaaacatttagtctggttatatcaaatctcttattgttacatatgcatatgtgtgttagcttctttgtttttttttcatttgaagaaaataaattattttaagtctattccattgacttttttaatattattaaagaacttttataattttttattgaattttaaaaaaggcttttcattttatgcagcataggtatataatgcttctcttaagttaaaatataaataaaaattcatcctaaagctttaaaccaagctaaaacttaatttgtaggccaaaaaatgtaccatacaaatccgggcccaatcatttgcacgagactctttcaaaaaatcgggaaatcccggtagaaacccgggactagtcggggtaaattcctgatttctactctattaagcacctcaattttattaaaggtattttcaaagccaataattgtattatgtataagcatagtatgtttttgaaagtcccactcgacccaacaacacaaccataaactttttggcatttgcaaatgatggataaattagataaaaaaaatagggggaaggcatttgtttgtcattgagagagaagtcagacactatttactgaggaaaggaagcagaaaaaaagaaaatagtgaattaatatgaaatacatttgagaaaaaagggaatgtaactaagccaccaacaaaatgagcaaaagatgcagagaaaaataaaaaatactactttaaaaatgagaaggcgcaagacggcaaaataattgaatttcagtgaacagtgagtggaaaatagaaggtagagaaaacagacaaaaaaatgtattatgtaagtcagagaaatgaggaaaagcattgaaactgaaaattgacggcacagtggaaaagatatgtgccgtcaagtgacagcagacaacggaaggaaatgccagacactcactgactgggccaagaattgactgacgctcttcaatgccgtggccatataacagcgcccaatccatggagcacagagagaattccttccttttatggacaaatggcagcccgcccgactaatccgaaaatttatgcaaaatttccaatgcgtcgcggtccgtcccgttgctatggcagcagcaattgctgccatatttgcacctcgatggattgattaattccatcatatatacaaaaagttttgttagctttagaaatttaaatttatatgcacaaacggtaataattatttgacaaaaatatgctaaacgataaatttatgaattccaacgggtgggctgntttaaatt

SEQ ID NO: 18460 - DNA, 933 bp, Heterodera glycines
aggcgattgtagaatgaatttgaagcgctaaaattcttccataagggttttgagcgtaattacgatttttacttgaattattttttctaggcttagatcacatgcgattttcggcactctgataattttagcgttcataatgggatgaataaaggcgattgtagaaggaattggaagcgctaaaattgtttgagaagctttttgagcgtaattacaatttttacttgaaccattttttctaggcttagatcacatgcgattttcggcactctgataattttagcgttcataatgggatgtataaaggcgattgtagaaggaattggaagcgctaaaattgtttgagaacctttttgagcgtaattacgatttttacttaaaccatttttttaggcttagatcacatgcgattttcggcactccccataattgtttgagtaccccaaacggacacttgaaaaatcgatttttttgttttcgggctgtccccccgaaccgatgcgcccagatttatggggagaccgaatccttcgggattagcttccctatagtctgtactttaattctgcgttggatttttgctccccataattgtttgagtaccccaaacggacacttgaaaaatcgatttttttgttttcggggcagtccccccgaaccgatgcgcccagatttatggggagaccgaatccttcgggattagcttccctatagtctgtactttaattctgcgttggatttttgctccccataattgtttgagtaccccaaacggacacttgaataaatcgatttttaatttcataaatattttttcagaaaaggctctaaccccgcaccaattttatttacaggtaattttaggcctctgatgctttaatttcaaaaagaaaaatggaaaaaaaattttttaaaaattttttccttatattt

SEQ ID NO: 18461 - DNA, 1596 bp, Heterodera glycines
ccgaaggccccccacgaggccgcgatgcggccgagtgagtactttaagctcaggaaaataattaactggggttcattatttatttattttttgcaaaattaattcataagtattttttcagaaagtgctctgaaacacaccaaactttatttacaggttaattaaggctctctgatgctttttctatcaaaagggagatgaataaatattttaaaaatttttaattcctttttaaacaggccaaaaagtttaggcttatattttaaaaagttttatcgaacctaacgcactaaaatcgatataatctctccaaattttgcaggccttctccattgtaaaggactaacttaacctgaaaaaatgccaacgcttgttgtttttaaaatttttcgaaattctgactttttcattaattatttattattttgcaaaattaattcataagtatttttacagaaactgctctgaaacaaaccaaattttatttacatgttagtttaggcactctgatgctttttctatcaaaagggagatgaataaatatttaaaaaatttttaattcctttttaaacaggccaaaaagtttaggcttaacttttttttcagaaacttatcagaagcgccccaaactttgcagggatactgaaaggaagagaaataacctattttaaatattatctagtcagtttttttaaataatttttatccaaaaaatttttttttgggttttcggggcagtccccctgaaccgatgttaggcttaacgttttttcagaaactgatcagaagcgcagcaaactttgcagggatactgaaaggaagagaaataacctattttaaatattatctagtcagttcatttaaataatttttattcaaaaaaatttttttttgggttttcggggcagtccccctgaaccgatgcgcccagatttatggggagaccgaatccttcgggaatagcttccctatagtctgtactttaattctgcgttggatttttgctccccataaatgtttgagtaccccaaacggacacttgaaaaaatcgatttttttgttttcggggcagtccccccgaaccgatgcgcccagatttatggggagaccgaatccttcgggaatagcttccctatagcctgtactttaattctgcgttggatttttgctccccataattgtttgagtaccccaaacggacacttgaaaaaatcgatttttttgttttcggggcagtccccccgaaccgatgcgcccagatttatggggagaccgaatccttcgggaatagcttccctatagtctgtactttaattctgcgttggatttttgctccccataattgtttgagtaccccaaacggacacttgaaaaaatcgatttttttatttcataaatattttttcagaaaatgctctgaaacgcaccaaattttatttacatgttagtttaggcactctgatgctttttctatcgaaaagggagatgaataaaatttttaaaaatttttaattcctatttaaacaggccaaaaagtttaggcttaacttttttttcaaaagactgatcagaagcgccccaaactttgcagggata

SEQ ID NO: 18462 - DNA, 2821 bp, Heterodera glycines
tcagtttgcctccgattccatcgaaacatatgggctcagtgtgtgcaatgcctattttggccaagccaatcagattaacatccaaacacggccattcaatggccttttaggccttgccctgaacacaagcaatcaaaatgctgacccacttttcatccaggcttacaaacagggcctgttcgaaaagccgttgttctcactttatttggccacccaaggcaacgtgaatggcacattgggaggaggtgaggcgtgtggtatttttatgctcgaaccactgtaaatggttaattatagtttttctgataattttttaaattttttagatttttagtgccaattgggattggctataaatttttagatttaaatcaattaaaaaaaattttttttagtttggaaaaatttttcggtcctcggtaaaaaaagaaaattataaattattaaaacattggaaaatgtgcaaaaaaaaaggcatcgacaaaaaaatgaggcatttgtcatataatatagtatattccagcgctgtactaaatcgaaacacagcctgcgtattttttttatcttgacgcaatttaattggttcgaaaattgtgattataatttaccgtacaccacggcaatttaaaaaaaaatatgattaaggagtattaaatattaatcgagactaatttctggagagttattttttttagtgacaccgattggattccgattgcacacaacagtagcggcttatgggagtttcagatcgatgtgagatagctagaaaataattttaatttataaagtaaatttaaaaaattatagttgtttttggccgaaattttttaaataaatactacaataaaaaaaaaaaaaattatcttttatttataatttacaaaagttgcggccaatttttgtcttttttttggcattttgtttaatttttggtgtcaaaaacttttataaatacttatttatcaatgattgtttcaaagaaaatcacgttggacgacggcacaactattaatggcaccagtgctgcgaccgtcgactcgggcacttcgtttctgatcggtccgtttgatgaggtcaacaacattttacgccattacggcgttgacccggaaaacagcacaatgccatgtgatcaaaaatttggccccatcattttcacgatccatggccaggaatacaaagtggaagaggtgtattgtggttgattgagcgttgcttttttcttgagatttattaagcaaaatttgtagtttatttatttgtttttttgatatttcactaactatttaaggaaaagacgcagatttttcgttttttttttaatatttccttttattgagccctcctgaatttgtgccctcttatgattataaagtttaccttttgatcaaagttggaaaataaagccccgggggatttaatttcaggaaataggcatttaaaaaaatccttataatttcatttgagatcatttggttttaataacaaagacccagtgaattattatcatatttaccataaaattttcctctggaactatttatcaaatactatgaaatttttaaattttccagctaaaaaacatgtgtaaaaaacagtttgaaaaatcacacttttaagtctggtccgaacggttttctaattaagaatgatttattttttttaattatcatgccgttcacgtaaatataaaattttaaaaaatttcaaacaaaattatagaagacgctgctctttgataagggcgatggcacttgctttgtcggcctgcgcaccttgaactcaatcccattttggctgcttggtgacccgttttgccgtgaatattgccaagtaaaatatccacacttttatttatttttatatgtaattttaatttctaaataatttctctaagtaaaaagtgaggagaaataatttttaaataataattattttttaggaaaattaataaaatttgattaattttgcattttcaattttttgctctgtattatatttttatacaattttaatcaattttaccatttaagattcatgacgtcgagaaaaagcaatttgcattgccgcaagcgatgaaggaaaaataaattttttgaaaatttacaaaaatggaaaataattattaaaaacattaaatttgtcaaatgctacctaaatgataaaaatttattaagggtggatattgactttattttgcaataaaaaaaatttaaaagcaaaagtaaatttgtcagctattttattggcaaaaattaatttcccaaactaattaataacatttcaatgttcagcaaataattttttcaaattactttttatttcaattcttttttgttcaataaaatacttttcaactaatgagtcacaattttcattcactaattaattaatgaagtcctctaattgttgaagtgaaaattcacacattttttcgagaccaaataataaattcttaacaaatttaatttaataattttcaacaaattttttttttaattttatttactttttctgcatttttaattatgcattagatttttgaaaaatacttaaaaaactatctttttataaaagaaataaatttaacggaatttttttatttctgtctttcttccattcaattttggagcacatcattcgcattcctcaactccaatgtgaaaaaggaatggttctgtggagttgaaaagcaattcgcattccttaaaaataattaatttaaaaaaaaagaatgaaaatttaagtaataattgtcgagaaaactctaaaaatgccaatcccaaccgattttagggaaaaatggtgctaatataat

SEQ ID NO: 18463 - DNA, 1191 bp, Heterodera glycines
taacatttcataactttttttaccaaatatgatttcgaaattttataaaaactttgaacaatttttcttaataaatttcattaaaagtcaaaatttttcctcggcgacgcctacaaaaacctaattttttacatggcttgatataattttaagctaaaataaaagactaaaaaattttttcgaattttttaatcaaaattcttaaaattttgaaaaaagtccggtcaaaattttggacctggctcggggcgcccggtaaaacgggcttttttttgaccgggcggccctggcccggtaaattttcgaagcccgtccctgtactttcaaaattccgggctctagtgattattagtgggcaaattctatattattttttttctcagtttttttcgcaatttcatgtctttaaaagttaaatttattttggatagtaattattaattaattaaggaaaacagcacgatgatgctgtgggaggacgctccgaacaatgcgaacagagttttgctgttcaatgcgttggcaatttgcatcaaaaaggtaattggcgaatatgacgccaaatcaatgaacacaaatttggacaaattgaaagaatttggggaaaaaacgagccaaaacatgctgaagtgtatggcaagattaagctcaaaaaaccgccaaataaaagaccaatttttggccaaattatatttggacaaaattaccaaattaattgaggaagacgcaattagtgaacagctggaaaaagcgctaagagaaaagagtaatatttttttattgaattaagagaaaaataagccaattaaaaaataagaaacaaaaagagaagcatttttatttagcaaaccgcaaaatttagtttaaaaagctaattgatcccttaatgtttcttgtttgtattttaaaacttcagatgagttactatacgaactaatgggttcggaggatgttgacaaacttgagcaactctataaagtgatttttcaagacttttatttaatatttatattttccattaaattaattaataattttattttcagcaaaatcacagttattttttgccttctgaaaattttatatcgtcggacgaagaaacttttcatgatgcagtcgatgataaatgacatatagatggaaaacagataaaaatttgaaaatgataaaaatctgacaaataacaaaaac

SEQ ID NO: 18464 - DNA, 2416 bp, Heterodera glycines
agttggaaagtaaggaacaatcgcgaaattgagtgcgccttgcaaataagagggataacactggataataaaaccatagaaaatatgcagtagggcagtgtacaaggtaaatcataaaaatgatgaaatattgtgggaaaatgctgcagtatcagagaaaaattcggaaccgaattcggaaaggagcgaaaatttagacgcattttttgctttaaatttgacggacgaaatgaacgaaagtgaaggccaacagagcaatttgaacaacgaaagcgaatggtcatcggaaaagaattcgtcgaaaatttgggagcaaaatttgtcggaagaaaacgccaaaaaaataaaggacgaaattttggggttaaaaacggaaacgaatttgtggacacagacggaccaatacagaaaggggaagagcaaaaagttgaagaaaatttacaaaatggaggacaaaatgggaaaaagtgaggaagaaaattcatcaaaaaaggacaaacaaaatttgaactcaaacgccgaaacaaaaggccaaacatccaaaaagttggaggaaaattcaaatttgaacccttcaatgctaataaatactgaaaaaacacatcaaatgctggagggaaaaaatcaaagcgaggcaaagagtcaaaaggccgaaaaaaaattgaaaaaaatcaacaaaaaacaaccgaaaagtggaaaccatgaggaaaaagggcaaaacattagcaaaaatgacgacatatacccaaccgattgcacaatgttaatgggacaattgggaatctacaaaatcaggggtaatgttgaaaaaggctaatatgttcagtttatggcccaatcagatttatgcgtctaattataatataatttatttatttctgtgcattttaaaaatttcactgttattcactttttatcttttggcaaaaaaacagtaaatgtttgttgttggccgtgttgactccaacccaaggcttgctattaacaaatcacaaaacaaacgtacaaaaattaacatgattctctctctggccgattaagtgcatcattttaagtttcttagattgtcttaaaaaaacaattggacgcataaaaagaattagagccataaataaataaattaattaattaaaaatatgcaaaaaacaatcatttaaattcattaagatttatttaacgattcattaatgagaaaattgcacataagttcattggaaaatgttttttacaatgaatgtgaaaaatatttgggcatttctgcatttgcactcgcaattgaggcaaatttggaatttaataaattttgccatgaaaattatgcacagaaaagtgaatttgaacagttagaaaaaagttgggcaaaatttattacaacagaattggatcgatttgaaggaactcaatttttgttggagaaattatattttgtgctgaatgagctgatcgaattttcatttgagtaagaaaataattaaaaaaattaattaaattaaataaaaatattacaaaatataattctcgttaattaatacttaagcccttctaacaaccaattcattgaaaagggcttagcttttatggaagagcctcagcttagactaattggcaaatgtaaagaaaatgaaatggataaaattggcaaaaattcaccaaattcggaaaaggaaacgccaaaaagggaaagtgaagtgaaaagctcacaatttggacattactcaactgacaaattcgaactaatgattacagttttgcaggaagatatttttaacataataaaagcaaaaaatgaaattgaaaaattggaaaaaaaggaaaatgaaacggaaaaatgggaaaatgaatggcaggaaaaatttggtgctaataaaacgtttaataaaaatttatttgacttatacgaaaaagcaatcaaacaaatcgtggccatgcaaaaattaggtatcattaagcagttaataatttattttattcataaattgacaaattaatgatgctggctggggctttaatgcagccaagggtttccaacgtaaatttttttttaaattaacaaaaaattgaattcacgggtttttttcgaaaaaataagacaaaaataagagatcgtatttggaatttattaaattataacaaaaattagaaacctgcataaaatttaaggggataatttccgttttacattcggtcaacacaaagacttggcctagaaacctaaaaccaagttcgaaatcggtttttcatgcttattaaagctcaacatgcaaaaaatttaagcatttcttcaaaaccatccctatttttcaacaaccaaataaataattttttaattagaaatattattgttggaaatagaattttttaaaatataaatggaatatttttacaatgatcccgttgacaattggaaaaattttca

SEQ ID NO: 18465 - DNA, 1959 bp, Heterodera glycines
  unsure (1)..(1959): unsure at all n locations
gtttgttttgctatttcagacacatcaaatatgttcgtcgtcatcaactccattctgctgccgggcgtattgatgcattcagttggagatacaattgaggcgaacttcgaaccaaattagcaattgcctaaaccatgaacaaatcatactaagatcggaattaaatttcacaattgtaatttttcaagaaaatccaaacattggataaattctttattggcaaatgcagttcgccttttctttattaaaaaaacatcgaaatttcgatgctttctatctttgctagcgaattttagatttatgagtaaattttttcaaaataaagaaggcttttatggtccggctaatcgaaaattttatacgttaaaccgtccttggttctgtaaagtaataacacacagtactgtacaatttttgtggcaactttctcaaaatttctaaaacaggactaaagtggcccattttatatgctgatcagtgtcaataatgtacaccaattttcgggttcgcctaatcatgcataagacaatcaaatatcagcttgataaagagtgattgatgactgttggatatatatctgttagatgttttgaaggttaatttcgaggtggtcgttattttcgggcctgcgtgactctcgagaatgaatgccattccattttcgcacatttgtccattgatttattgcattcgtacaattcgttgtaaatcttttgattatgcttttagtcagtcatttgattcgcattttatttcttataatgcattatcttttttactcacagaaaaatttacaaatgaaaatttggcagcatttaacacttatttttttatttttgttcttacaaaaacccacatcaaatgccacgactgaaattcaggcgaagggtatgttttaaattttgcagattttgcatcaaaacacaacctttctgttctgattccgagtagcgaattggcaaattttaagtgccgttctctagttgtggactttgaactgattattaaaaaatatggaatagatcttatagtagcaacaacaggcgccgccagggataaattggcacggctccttgttagattttgttcgggttaaatatttagaaaaaagtaatttaatgaaccaacgcgctttttaatgaatttgttaagaaaaacgaattaaatttaaaacaatgcactttagtaacaactttttttatttagacctaatagcccaatttatctcgtcattttttcagactcaaattttgcttcaacgataaggaaatttatggagaaaaaccgtgacaaaatgagtcaaatttttgcggatttggtaatttaaaaaaatgttttttattattctttttcatttggcaggaaaaagagaaagaaaaaagaaaggaccaaatgctttctgaagaagaatcgctgcaaattgtaagctcaaaaaatgtatacaaaccgccaggttaagtttttagaatgccttgaaatttgtagttaagattttgccataacgactatgaaaaagtgggagttatttctcaattacaaattaacaaaggtaacatcgatggaaaatatttttctgcatttaattaattttgaaaatactggaaaacgagctaaaaatcaaacatgattgaaatgcttttttaggtttattcatattcatcttttttcatttctcctatattagtcatttaatttttgttttttagccaaatcgttggagtgtaagcaaatcgcaaatcggtttactgattttggagcctgactatcggaaagcagcagtcattggaaatattaacggttaataataaaatttagtaaaacatcaatattcataataagggatattttaatatactgaattgctgtggaaaatgtttgataatgctttttaattacattttattaaaaatatgagaaaggttatttacagaaantattttaaggttatcgaatgttatt

SEQ ID NO: 18466 - DNA, 1888 bp, Heterodera glycines
attaaaataaaatgtttaacggtgttaattgaattttcaaaaaacaataaaaattggttgttagttagtaagcatatttttcacgattttaggacaaacgccgcctggcagtccgaaaggtgggcacggcaacaacaaatcgccaacgacgccgcacagtacaaaacgggaaacagaacttataattgagaaaggtaaccaacagaaccatgctaccggtaacacatttattcagcaatcacaaaatttttatctaaaattaacatgaaaattagaaaattttataaatatatttaattattttatataacatatatatttatcagaatggcataacattttactcaaataaaagtgaaatttctgttatttttttttgtttcgctccaaatgtgtccaggaccaaaatggcggtgcataaatggcaccgaatcattaaaataaaatgtttaacggtgttagttgaattttcaaaaaacaataaaaattggttgttagatagtaaacatatttttcacgattttaggaaaaccgtcgccagacagtccaaaacgggaaacagaacttataattgagaaaggtaaccaacagaaccatgctgccggtaacacatttattcaaatgaaaatttttttatctcaaattaacataatgattagcgtcattttttggagttacataaaaccactaattcaaatctttcttagtttcaaatgtggtgcagaacgttgacaacaaacctcggccatctgctggtgaattatgcttatttaaaaaaataaattgctaatttttcacatcggaaataaaaagccaggctaataattaagctgaaacttttctataagaaaaaaaggtggcattgacagtcattttttgcgccaaattttgttaatcattagccttaaaatgccaatttttttctcgggcatgccttttttggaaaatcatttcgaatgccgacttcacccccccccccccccccctcaatccacgactaatcaatcacacatttctgaaatctaatttatatatgtcacctaattaaatgcaattaagctagattaaaaaagaatcaatgcaaaaatttgtgcaattttgtttatatcttgtcattttttgtgccttttccatgccgaattcacccctccctcctcaatccacatccaatttattgcaccctaattaattgtaattaagctgcttcacaccttgtgccaccaacaccagggaacagccctactgcgcatgacagtcgccacacaggcccaaaagttgcccatgttgccgccgccgccaatttgggccaaggacaccaagaaagtgccaacgtgtcgcgtgttgatgatgtaaccggtaagtgtgtgtttatatgttgttgtatatatttgattttattttaaaaattaatttgaaaattttgaaatataattaaaattaattcattattttttcttgacattctatcaacatttcaattaatttttaatggaaatgtaaatgtatatctatgaaaatagagttttgaaaaaaatcagcaaaagaaagaaacaatacaaaaattaaaattaaaaaatattttattgatctttcacttcctctaaaaaaaattgttatttattttttttttgactcgttatttttttaataaatagaagatcaattttttaacatttttcgttgtaaaattttgttaaataccacgagggttggcaaaaatctggatataaaatcgcaaaaatgtggccataaaatcctttaaatttaaaaccaagataaaaactatttttttatttcgtgcctttcacaccctcccagtgtccagggaaaaaataatggattgctgccatataattaattgccaaccatataaatcacatttttttaa

SEQ ID NO: 18467 - DNA, 2298 bp, Heterodera glycines
aataataattttagacaaaatatcattaaaagaaatgaaattgttcctaatattcgctttaattatatttttgctcatcctaattaatattaattcggtgggatccgaaatgaaaaagctacaacaaaagtcatttgatgaaatatttggagaaaaatggaaagaaaaagaagaaaaacaacgaaatgaagagaataaaagagaaatatttggaaaatattctaaataaaagaaaaaacagcaaaaaggaagaagatattcagccaaagaatgggaataaaattaattcgaaaatagcgaaaaaattggggaaaaatcgtcaataaatttatgaatggattaaagaatttggtcttcaaaaaacccaaaaattaatcattagcacattataaatttgttttcatgtttattttttgtcatcataacaatgggatggatttatttttaaaaattaaataatgctcatggcaaaaggagtaggatttttgtttgcagattaaaaattgattatccataaatccatttaacttgacaaatctgcataaaaatttttcttagattcgcaaagatctttttttaatttgtattagaaaaataaatgaatttttataataataataataattatacatttaatagctctttatatttgttagaaaaatattttaatacaaaaatggatcatatggaagcaactttgacaaagtaaaagcaatattttgaggtttttcacataaataattcaaatcatttatttttttaattcagaataagatgaaccaaagaaaatgccaaagaataaaaggcaaaaatggaaagggcaaaagcaaatcaaccgaatgatcagcaaaaatacttgcgcccatttttttctaatttgagcctaaaaatcacaaaattttccatttgcgatataattattaatgacagaaataattcaaatgtttgcacagttgactttacattttatgtgcaagcattttcctccgccatttaaccaaaaatacatttatgattgacggataattaaaattcgtaaaaacgagtttctcaacgccaaacaaaatagattaagaattactaatgatgtcattaaatgcagcacagattagtcagcccaatgctaagtctccgttcccaaaatatttttcacaaaatttttgctatttaaacggaatccaattttgcaaatttcaatcattgcttacaattaaatccgaaaattatataatttatcttgaatgatggccaattcgtctctgatgttgccaattttcagtctgttcgtcgtgctcattgtgattcaattttacgccactgagcaaagttcaatcagcgtagacctagcggtgataaaatttttgatttaaattttataattttctgttatttatatgtagtattatttaatgaattaaagtgaaaaaaacacgataaattgtgtactttttattattttgaatttttggtattataaataactggaatttaattgaatttttaaattttcaaactaaatttatatttgtcctaaaatttaaattttatgggaaattttttgacaaaaaatatatatggaataaaaattgcagcaattggatcgccaaattagtgagaaaaagcaacgagcggaccaattgcgacaacaaattgcaagtgaaaagaacccggtgattaagcagtcggacacgcgcacattgcaagcaattttggaagagatcaacaaattggaagcgcaaaagaaatcgtttcaaaacacggatcaaaacgcaaggaacaatcttggatgagagacacagcaaaaaatgaaacggagatttggcaaaagtgatcagcagtgagcaaaacgattgaaaatgtctgagtttgatcgatcgattgcgattgatcagaaaagagtgattggtcgatctatttatgtctttaaaatgtttttaattgtgatttaaaaaagttcaatatcagagaatttaaaaatttattatagaaacaaagtaacgacctctaaacattagcatggtttgttacccatacgttaccgtaatggaaaaggacagaaatcagccggtcaacgccaacaaagaaaatgacccaaacggaggaaaacaggccaaagattgacaaaaactgaatgaaaaagtagccaaaattgctgatcatgttctggccaagcaacgaaagggcaaagggaccaaaaatgagagcaaaaagagaaagttaaatgagccgatggccaaaagagcggcacaagtgccgcgctgattcctaaaataataaaataaagcactatgtttccat

SEQ ID NO: 18468 - DNA, 1416 bp, Heterodera glycines
  unsure (1)..(1416): unsure at all n locations
aataattcatctccaaaattttctctccaagttttgacaagattttgattttttttaaaattatgcatttcattaccatttttagcacctatttggaggtttttttataatcagggagcaaaaaactttttttttttgacgactttttccaattttttgtgctgctgattttgccttttttgtgctgttttcatgcttattttgtaaaaatttggtgctgcttacagtgcttaatcggtgattttttgtgctgaaaactgagcactctaataatcatttttggactatgatcgaatattattagaatttagatttgcttttcacataactttttttcggcgcgctttttccaaaagacttttggggaaaatggggggtctggcggtgccgattggccgattggcgcagccgggaaaatttaaaattttgacgtttccctcgatcggtttccgaagaagtttttgtagcccaggtttctttggttaaaggcaagacacaaaaaaagttcttgaataatctctatatcccaaaaagattgttttctaataattttgagtatttgctcttttttgttaaattcccaagactttaaatttatgaaaaaagttatggccgaggaaattgaagattggacgcctaaagtatatgtatttaggcttgcgcaatggagcagctttttcagcaggcgaatatggaccttcatcagatccatctcgaaatgagacatttggagctttgtaaaaatgagagtgaagcgcagcctctttttcagaagctccaccaacaaataaggcatttagttaaatgtttcatatttgtgcttataatatttaatatttaaggcaatctgccgctcagctcgacggcctcgatcgtttggtgaataaagagccttctgggaagcgtcacacttcgaaatatcggtttgaacagctgcgacatgattataatgcccttgaaatggcaattaattcactgcaaaatcgactcacaacgaaatggagaacggctgcggaaagggaggagttgctgaccatgaggtgataatgcaacgatttgcttctattggaaattcacgaaacttggcttataatttgatgcaatttatttgattggctttttgacggtttattttagatttaaaccaaacgaaacgcatttggactttgaggggacggaattgctcgtcaacgaccgactgaaacagtcgcacaacgccgtggacgatctgattgcgcatgggaattcagtgctcacttcgcttcgtcatcaacatttgnggctaaaggacgttaaacggaaaatgctcgatattggtcaagtggtaggcgatagtttttaagtgacctaagtttagtcggacggatatattcaggagctattggattttttagggggtattaacgcaaaatcagt

SEQ ID NO: 18469 - DNA, 1166 bp, Heterodera glycines
  unsure (1)..(1166): unsure at all n locations
cggtacggaaacgcgtccttcggtgnccgcacaatgtttggctgcgattgcttgcgtcgaattgccatccaatgtgatttttttgtctaattctcatgtccttggctgcgttttgtcctttgttaaatgattgaatgaggtccaaaatgtatttaatcaaaatttagtcatttttagacagagtattttaagcaattacaattataattcttaaaagttgctctttgttttgtttgctaaatttcccttcccttttttcgtccctttggccatttattcttttgtcccctcttcgtcagcaatggcccgaccttttggaccgtttggttgccaatgtaacgactgatggtgcggacaacgctttgctgcgcgaagcttccctggaggcactcggttacatcggcttggacatggctgagaagcagaaaattgggcccgttttggctgccattgtgcgcggaatgcaacgcgaggagtcgtccgtccacgtgcgcctggctgcggcgaaagccctctccgaaatcgtcgattgggtcgccacgcgaactttggaagagcacgtggacgcaattgtggacgcaacttgcgcatttttgtgggtgtttttctcacacatattcaacgggtgtctcagacaaggccatacgacggagcttgggatggatgagcagatctgctagggagtgtctcggcagcaaattttcatacggcggtccacttttttctccggcgtcgaccttttctttacttttacaccacttttcttgaagtgcgctttttccaaaaaacctggggagcaagaagggtttgtcgtatccaagcccgtagtcataaaaaaatttcggagggtcgaacccggactttttttttgttgctcttcgggccaaaaaagtgccgccggacaaattttattaacttttatgaattgttaagaaataaagccaaatggtcctctcttcccccttacgacgaatacgagggggggggggggaggaatctcgaaacactccttgtccatgtatggtattgctcttttactatttccattttgactgtctctccgtttatggccctttttttgaagacaaacggccgaactcaatttgtacgaagaagctgcgaaatgcctgtggaaaannttgcctcgcgaanaagtgcgcanaaaa

SEQ ID NO: 18470 - DNA, 2860 bp, Heterodera glycines
caccatttttatacattttgcgttttaattgctttttccttcgatcacaaacggaggcaattgcgcatcgtttggctttgaattggcgaactgttttgaaaaataaaacttttgagggtaaaatattctattttacaagtaaatcatcagaataaagattcgcagtaattgaaaatttatagaaagttctagatttaaatactaagttttaaaaagatttatatttttgtaattttaaagttttagtttactttttaaaataatagttataaaaaaagataattacagaataaataacaaattttttctttttcttttacaaaacctttagttttttccaagtatgaatttggtttatttagtatttatttttcatattaacaaaattttagtttgtctgataaaaaccgcattttccgtatttataagttttgccattttcaccataataatgtccataaactattctcatttcttcgcttttgttataaataccaaaaaatatatttaatttataatttttgatgttgacatgctccaaatctgttatcgaaaaatgatgaaatacataaaaaaaagtcttctgctggaaactctagtcgtgctggcgcgtttcttaaatccgccaataggttcgaaaacaaaaaatgggtaacaaataaaaacttcacccaaattaatttttcttggtatcattcaatagctttatttgttctctatcagaattttattttcccaaattttttacttaagtataaaaaaagttattgtcataatttcaaaaagtctcatgtcagaattttttgtccagaacttttttgaaactcaatgaaattttctaaaattttaaagctaattagagaatttttagggctagcgaataaattaattaattttggctcatttaaagactttaaaattttaaatgcttataatggatatatgcatgaccattgcaaaaaacatagtatgttcaatgctttataactttttttattcataagctaaaaatttggaaaaaatatattctgaaaaagaacaattaaagctaattgaatgataccaaaaaatattaatttggttgaatttgagccaatatatgaatttatatattttactaattttttgttttcaaacccactggcggatttaagaaacgcactagcaccactctagttaataaccgatttgccccttaaattcttcgaattcatgaaccaattctcaccatctaaataatttattttagttgttttttggcacttgaaaaataagataagaaaataaatagttttttcggtatttataaattaaccaatgaataattgtttccttttgtatttgggggctcccggtaaattggacactggaaaattggacactattgtacataaaataaataagttaaaaataaataaacaaaaattttaattgaaatatataatgttattattatttgtagcatcagcagcagaacgccatcatacattcataacgaaaaaagttttcattttgatcgggttcccattttttgcgtatttttggcacattgaacaaccatcgccaattttctacattttttggcatcttaaccaatcatcgcctaatttcgtacactttttgccacatttgatcaataatcgtgcctatttaatgtttgatcgactctaaatgccttaatccatttatccacaccaattatttttcaagctaattcctgtgtttattttttaaaagaggaatttggtgtccagttttccagtgtccaattttcctttggtgtccaaaattccgacggtgtccagttttccgcttggtgtccaattttccggtgtccaattttctggtgtccaatttaccggtccccatttttgggacaagccttataataaataaattaattgtactgtttaggtaattttctaatttttgtgagattataagccatcaaagacttgtctaaaatgccaactaattattagtgctgttcgagactctcggtctcgagtctcgactcaagaaaagtctcgggttttttggtctcggtctcgggaaattttcggtctcgaacagcactactaattatatgccaaaatgtttcagccaaactgtcgtcagtcctccagagacaccaaccaaaacatgaaggcacattacgtaaaaaaacaaattttattgtttttttttactttttaatttaagaatttcaacccgaaacaaaaacgagaacaacaaatgcaaaaaatgtcttggagagacttaaaaagaaaggattaattgtggacattctgccaaagggcgacggaaatcgtacggaagtgataaatgagctaaaaaagctcaagctgaagcagaaaaacaactaagattaaccgcccggagctaaataacaatatttactttagtaagaaaatgaatttgttgttgattattcgaatgatattatttattaaaaataatttgcattttaaataaataatgtaataatattcatgcatatggggctatgatctttgtgatttatcatatttattccttaacgcccattggtctgatacgacatgtttttaggtgtttagttaagctaaatttagagtctatggtcatatttctttatgaccttgctttttaggccatacataaaataatagcttatacacaaaagcatggacaaacatttccattttttcaagccgtccattactgatcagttcagataaaaaaatgttctaaaagcattagtttttccaaaaaaatatatagtttctcatatgaactccgaatagtacgttttgaaaagtgttcgggatcgggatatgactccgaaagacaccacgggagcctcgatcctgcccatcgc

SEQ ID NO: 18471 - DNA, 2097 bp, Heterodera glycines
tttaaatccatttttttggttgtttatcttattttctaagtatttaagcaaatattggatatttaaaccttttttggattttggagggtttaaaacatatattttggcagtttttagtaaatattttggtccatatttggccatttttgagctttttagtccatattttatgtccatatttcgcgttttttagtccatataatttacaaccctaaaaataaaaaaataaaatttttcccaacgcaccaaaaataaaaatctttttaaaaaaagggccgtaaaaatatgttttaaaaacaaaaaaggcatatttaactggcttgaccaaattctaggctaaaataaagattatcattttttcaaaaattttattaatcaaaattccacaatttgcggcgcctaaatgcaccgccggcggttcctaatttttccatattttttttttgcaaaattttgtaccaataagtgaatatcgatcgaatccctggcccaattattatgatcactctttctttgatcagaattgatgaaaatcgtatattatgtattgtgtttcgtttagtctcttcaacgcatggcagcaaagaactgaaaaagttgcgcattattagcattaattagcggaaaatatgaaaaaataataaataaatgcaataaatagatttcaatttgaatttacaaattctcattgatcgcaattcgtcagcagtggtgttggcacaagtgccacaatgggacacaacttcaatggacgataggagcactttgttgacccagtggggccactgctaaaattcgaaaatgcaaaaaacatgcaaaaataattattttaaacggtataaaactaagacaaaatttctgtttttgacctaagtattttaaaatcttaagaaattgatggtccggcactgctggtaagcgccgcccgaagaaaatttgacatttttaaagaatttatttaaaaaaagcattgaaatttgaatttttaaaaccaaaaaacgtatcaatcatcaacttatcccttttttcaagctaaaaaccaataatgaagtttaattcacagaatttgaactcggcggagagcggccaaaaagcagagaagcgtatttgtagcagaagaaaaatgcgtagtcggacagatctaaaaaatggtgtacattggcttttatgtgcattttaaattaaattaataaaatgtagttgaaattaaattaaattaaagcaaatgtaaaaagttaattttacatttttgcagccattgcaaatcatcaacagttgtttgagtgcagaaagcggacacgcttttaaacacctttataagcatcttgttgacctgagtaaattgcgtagattatctttcatacagtaccctgaatgagtccaacttagcatacggtatctgagtatcatatttgaaaatcggccgaaataaaaattaatttatgtttatttcaacacctaaaaatatctattcgtgtacgtagttcgctagccaaatgttcaaaaaaattttgtgaaaagatttatatatgaatttttcaggttttcaatacggttaaatagaaaaatcacataaaaaattattattatttaaacaaccaagttgataattttattaaaatttttcaaaatttaatcttgaaatatcggcaggcactaagttcgttctgcaattgttgcaccgaagttcgaatactaaactgcatcacttacattattcgggtccttcttgttcgacttgaacggcaaaccattaatttcaataaaaagttgagaacaattggtccaacgtacaatggagtaaacagtttcattaatggggggggggggggataattaggaaattattaaataattattcgaaattttatgtaattaatttatttttttgtgctattaaaaccattcacgaattttgaagcttgaaattgtttctccggaagtgagttaagcagcaaattatcaggaagtgatctgatcattttcactatgcttcgcaagaggaacatacatttggcaacctgccaaagaattaaatgatttgacaaacaaattcaaagcagttttatgagcgatttaatgcttaaagagtgatca

SEQ ID NO: 18472 - DNA, 1819 bp, Heterodera glycines
cggacccaactaagtttacgatgtatttatttgtttcgtttgtgttgcttgcccccttttcgacggcggattgggggctaaacacctaagaggatgtggaaggtgttgttggaggaggacttattgactaagctatatgtattgggggattggattgtgcagtttgcacccactcgctcacaacccctgccctccagcgtcctatgccccccctttttacacagtcgcctcccggtagggattggcgcataatattttgtcaagaggctttgggcggtacagtgaccgggatcggaagctaactcaaacctgctcaagctaattccgtactaaatgattgctgaaaaattgagttggggaactgatgtgtgcaagtgtgagttcccatctcagtttacggtatttgactttcggtggcacaaatgggtgtttataggccattagttcttggcataatgcaaagaatattcccattatctcatacatatttctccaatcccaacaaaatggcacaaatcactcccggtactcaaacccactaaagtcccatcctcatgccgacggtgcttacaattagttaaccgaccattcactctccttggtgtactcaatatcattcccgtccggtactaaaatcactcacaaatttatctcctcaactgatggcgctgagccgtccgtcccacattcgagcaattttctagcaggtgctctctctatgagctggggatggtgttttgtgtatattatttgtctatcagcttgttgtcccccacaacaagccaatccccccggaggtaagaagaagcatttgctgtgctgctggtgctgaagtggtggcggtggtggtgggagacggattcgcgcctcccgaagtgtgattatcccccggggggacgacggtggagggggggaggagggttggtggccccctattgtttgcccatttgtacacacacattttttggtgatggtggtggggtgccttaagagaattaatggacttgggccttaaacaaaaaaatttttttttgttcccaatgatttttttggggggggggggtatatggaaaaggtgttaaaaagtttttttgttgttttcaatgtttaattaatggaagaaatgttggattggatgaataaatgtgctgctacagtgccattcattcattcattgtccaagcaaacaattttgacacaaaaaaaagcattttttgggaatttaattcaataattgaaaatcaattaagccataaagtaaataaaattgcttagaaataaaaattttttattttaaatatttgattttaataagataattttggtaaaaatgcaatttaccaataattatataagctacttcagttgtctgacgtaaagctaatttagaatgtttaatttaaattattttttattcatcttagtaaataattatttaaacaaactttttcattggaaaaagattaaaaaatttaatttaaaaatttttagaaataaaaaacatttttggcacgaaacatacttatggatttgcattcgaaagttaatgcagagggtgcagaagtgccatgccaaaatgaaaaagcgaaaatcggttttgaatgttttggcacgaaaacaatggacactcgagagacaatgcgaatactgtaaccccccaaaaaacagggaaagccaagtccaaagtattcattaattctcgaagattttgacttaatggaagttattgtctcgagagtttaatggaaaatattataaaatgaaaaacttattagaaattggccaaaaaatgaaattgaataaaaaagaaaaaacaatt

SEQ ID NO: 18473 - DNA, 1219 bp, Heterodera glycines
tgcccccaccgaaattataaaatcaaaaatttttccagtaaaaattggcaattaaaaaaataatttagccaatttcttagcaaaatgcattaaaatttcaaaatttcccggcgatgcccatcggcaccgccgagccacaatttgaaccattatttttttgaaaatttgagccaaaaatggcaaaatttgcgattttcggcccaaatccactactatgcctgctttttggctcaggcgctgaagattttgaagaatatcactgaagaaaaaaaaaaattttttcgcccgaagagcgaaaaaagctcttaggttgccctccccgaaacttttttctgaaatatgggcatggggtacgcagtaattaatatttatgtaggcaaattcggacagattatggcattataatagaaaaatattacacaatttacaattaacttctgcccgttttacaaaattaatatttttttatgctttaggtcgatgttttctctgagaagatgaatggcacattaaaagcgaaaaatgcgattgccgatgccaacataacatgcggactgaattcaaacttctacttgtacgtttgtgtgttagttcaataacaacaaaatgggattatgattatgccaatcacaaacacaatgccgcgaactattggcatttagcattgaaaaagcggcaaatgcaacgaaaaacaaaatttgccgggattcaatttcttttaagggtcgttgctttatctcttccttatgcccttttgcatgccaaaattctatttttaaaaaataaatttatatgtaaggcggatatgttttaattacgacgcaatagtgccgaacattttgtccatttcttgttcaatgggaaaaataaaatatttaattgttatcaaatatttatttattttttatatttaaattgtgccccattttcagtggatggtccacctgcatgaaagtgaatttgcttctttttatgtgcattttttttttgattttttgtttcttttttcagattgcattctacggggatgacggctatgaaaagcatgccgcaaaatacggtctcgagcaaacagaagggccggaggaaaacttcaagaacatgacccagttcgacaaatacggcttcatgcacggtgaattgttggcattgaaaagccattgacatcataatttgcagcattggagagagctaaaattaattattaaatctgttttca

SEQ ID NO: 18474 - DNA, 1758 bp, Heterodera glycines
  unsure (1)..(1758): unsure at all n locations
aaaagtgccaagtcgccagttttagctttgcacgtgtatttttttttgttgtttgttcagattcgcaacctcaagttggattgggatgaattcgacgcaggtgatgcaatgctggacctgaccaacaacgacaattacgacagaagcggccagtacattgatgccaaattggtcaaaatggagcctaaaatagtgagcccaccgaagccaacggtagggtgccatacaacaaaaccaagcaaaattatttagaacaaaaaaacattaaatcatttttaggaaaaaccagatgttgtggagcctgtggagccagtaagtctctttttatctgaacaaatcatttgtgagaatataaattattataatttattattattaacgcacatttgcaaaaattagtcatttaataatgcctttcatttagacaccggcggggaatcaaacagcagaggttaagaagaaggaaaaggtggagtcaaatataaaaagaaaaagcaattattttttaaatggtattcattaaaattccattttttaagaagtcgaaggaagaagagggcgaaataatgttcgacgagaagtcgaagtcggaggatgatgagttggaggagaagaagaagtagaaggatgggatggaaggatgaaaagcggtggtgaagaaaacaaacggacggatcagagaaaaacccaaaaaaaatgcacccctcccaagcccattttaatcatcatttgtgtacccctccaattcctcgtcccccgccccaaatttcattagccaattgcccccatcaacctgtatcatcatcaccaacccaattcaaaattagccattgccccacccaatccacccctatcgtcncagtctcccctccctctccctccctttgttttggattaattttttgaatttaatttgtattttaatttatttggaatttgcataaatttaatttaaaatgcggtgtctttcaatggaatgaaccatacaaaaattaatcaattagacgcctaatttaaaagcttttaagacaaacaaattccttaaagttgggctacaaataaaaacatggatttccaaaattttatcccgagatttttttgaaagaaatttaaagacaaaaaaaatgaaatggccaattgtaagtaaggagttgcaattcagataaaattttgcactcgcccaaaatttggtgcttaatttcaaagtttaaagtaggagaggtcgggatcgggcgggaaaatcactgaaaatggaggggtcaaaatgaaaaattagggtggaaattgggtgaaaggaaatgttggggaaagtaattataaactgaattaattaaagtgcgcaaattgccaattggctaagcctgcagtctctttccagcttttgccctgcttcaatccccagatttgttgtctgtaatcagttgccaaagcatcccaaaactgcaaatcacatcaccacccatccaccaaatgtttttaatttttaaactttatctaaaattataattattattgctacgatatattttttaatttctaaacccgacaaaattgtgagtttttttatggaaaagttcaaagaaacatatcatcgattaacaaaaaaaattatttaaaactttgaattttttacaattttaaattttgaacgaaatgttcgtttaagaaaaagtcacttttgaaataatatttgctcacggcttttttattttcaaaataagcacaaacaaggctaaaactaaaatttgaccgcagccc

SEQ ID NO: 18475 - DNA, 794 bp, Heterodera glycines
tgatttaaatttgatcaccattccgacaagcaaataaatcattaaagtcattatcgaggatcaacaaataaacaatgatactgaactttgacgtaaactaaaatatatatttttttaattttataatttaattagacggaatgggtcaaatccgtccgccaactccgtccagtcaagtttaaaaagccataactttttttttgttgaccaaacataacaaccttagtatcactcaaaagctcttgatatctagaagatatttgtaagccttttttaattgattaagcagctcacaaaaaagttctcgcttgaaagctggaaaaaaactcaatttttgtatatttttcaaagttgactgggacagagttggcccgttccgtaattagaccatgaaaaagtcaacagtgcaaccggtgatcatcagatcaccatgccgtgcaaattcttttttttttgttaattttactctctcaccaacagaaaattgtcgtcatttgtttttttctttccaactttatttttgacctttccattttcggcatttcttcttcataatgccaccccagcaaaacaaagtttggacagttttgcctaatcccgagcagtaaaactccccatctttttggtgatggatcgtcgtcatcatcgtttataaggcaaaatgccatttgtcatatcagagagcggagtgccaaatttgaatgaatgatgtatttattataatgacctgctgctgctggggtgcgtgctaaccatggcatggcaaaaacatttcaaatggcacaaatttacgg

SEQ ID NO: 18476 - DNA, 1836 bp, Heterodera glycines
aagagaaaaaagagatagccattttctcggcaagaatttttttcgttagcatttcaaatatcgtgtgagtgtctggtagacatcagtatagagaaggtaaaggaaggtggtaggcgtgccgtccaattctcaggtcacccccccccccctccagttttcgtcatcactgaaatttccaaatttggcaccaacatttttagtagtgtgactgggttctgactgactaaatccccagtggataaacaaagtgaagtgcacagatagagttgttgtcccccgcccccctcggcccctgtgccattcaaatttggcaccctattttttctccgttcggcacaaattggtggtcccccgacgcgcccccccccctccctctcctggcccgggtgtcctccgccggacgactctaatttggatgatttgtgccaataaaattaaattaaaaaactagccccggaacccaacccgccgcgattcagccatataaaaatgttggagtttgggcatttgtgctgcagtttttcaatttcctttatgctgattaaaagtggactaatcattacagtgcacagccgcagggctcagctgtgccgtgccgaaacggcccacaaaatgtgccaaacaaccaccgcctaatggcctatgccattaaaaggccaattagtagtgcattggcacttttcaaaactcatttcagttcgttcatttggcatttttccggccgggccattatgcgtagcccatttttgaggctgctgattagccaaaattgtgaaaatggaattttggcaaattaggttattgtaggtaggtagccctgttctaccattatacattaacatggcatttgtctcgccaaaaaatgaaaagattttgtccacatttttaacacttttaaaaaaaactataattaagaaattttgctggattgaaagaaacttataaacttaggcatcgattcccaagacatcaaaaaccataaaaattagaaaaatcccttcaaaatcattttaggctttttttcaatttctctgtcatatcaatgttctgacggacgtcgtatttttgaccgattttgacttttaacagtattttattttttcagaatcgaaaatatggtcattcgatttccctaaatgttcaaatccgtcaaatttatgacgtcagaatattgagtgacatgacggaaattgaaataggcctctggaattttttatttacaagtttaaaaaaaaaactcggaaacacgaattctcgattttttggtctctaaatatatactttcgttaaccaaatcggtttaattcattctttcattcatccagcaccaccaaacttagtgcattttttaaattatattttggcacatatcacaccacattttggagcagtacaccgcccgcaaaatgcctgcatcatcaccatcgtcatcatcatcattatcattcatttccgtgtccaacagtgccatgccgtcctcgtcgccaccgttgttctcttttcctgctcagtgctatgcttcgtcatcgtcctgctcgctgctgttgatggtgttgtgttgctgctactgcttgctgtcgtgtgcagcagaagcggcgccgctgcagccgtccggcggcgccagcggcgaacagtttgaacgcgccgaccgggactatcgcccgttgcaggtgagacaggcaggggcaattagggacaattaattatttaattgactgtcatttttatttttttaatatttaaaaattaaattacatgcgtcaatatttattcatccttggaattatgttctatgaggcaaaaaaaaaaatatatataaaaggtcattatcaattg

SEQ ID NO: 18477 - DNA, 2721 bp, Heterodera glycines
attaaaaagcataaaaaaataaaattttaataataatttattcaacaaaagtgctcaaatgtataattaattatagagaccggccaggatcgggatccgagtttctttggatctgactcgggaatccgaccggttaagaagcaaccgaataggaatgccgaaaattttctaatttttatcccaaaccctgttccggaagcaattctcgaagaatgatctctgagctctgaatttcaaaaaatccgatctctaataaataagggtaaatacaacatgagttttttacaaaatgtattcctaacaagataatgccaaaactttttctgattgcatttacttcttaaaccatatcagctggaccaaaagtgccataatcatgctgtcgggtattcagttcaactaaagaaagaatttttaaattttgtaaaattgaaaattttctattttatttaatattatattttaaatgtttaaaatattataattttattttgaaaattcctctacctttcccgtcttcatattcagtgaatatttttgtacggcaaattggacaagaattattgtagcccttcaaccttaaaatgggatgaacataccgtatattctttagatcttaccatatttggatgcaattggtatgaaacagatgctaaataaattagttaattttttgtaaatcaaaaaattattaataattaattaatagtttggtaaatcaaaattaaattataaaaataattaatattatactaaatcaacattaaattttcaaagtcaaattaattaatattttgtttaatcaaaattaatttttatgtttagattaatttaaatatatattctttttactcgacaagcgggcaattttttaacaattatcccgggttttatttcgtccaaacaaattctgcatgtttccggcccagattgtgccgaacttcgttttccaatttttgtgccggacaattggtcgaatgccgtcatgtcttagcatttaagagacacaatttaaaaaaaattattaaaaatgttagggttacatgtcgtctgggtacccaagctggtccagaccccgatatctggcttttccaagacccggacccggtacctggaggcggttggaaaacttggacccggaccagaacccggtttttctggactcagcaattcctgaacccggcttttctgaactcggcaattcccgaacccggcttttctgtatttcgcaagttccgaacacgttttttctgactccgcaattcccgaacccagctttttaggttcagcaatttccgaacccgtcttttttagagtccgcaattcccgccagctgttctggattccgcaagtcccgaaccccggcttttctggattccgcaagtcccgaactcggcttttctggatttcgcaattcccgaatccggcttttcacaaatatcggactcgattaaccctaaaataaattaaaaattgtacgagcttcgccaatttcggttgaaagtataaatgccgttgtttctgttgcaaattgttcttctgcctcttcgtcagaatgccaagtgcaacaaaaagtaacgattctgacaatccattgacaaagcataactaatcccaacataattaaaatacccattatgccgaaaaaatctctgcgcttttttcgacgacgacggcgctgcatttctaggtagaaaatgtatatttaatttaaaaaaaaaacaatttggtattgcttcaaaaatatattggcgcgcaaaagccaaatttgccattctccgaaggggtaatgatttttggatttagcgaaaaataaccattttcttttttaaacccataaaaatgcaattttgtatatgtttacattgttaagccatctaacacatttttttcttaattacccctttacctttatgaaatgaattaaaccatttcccaaacaaattgttcgaattgttgctgagttggcgaaatgcccatttttggtttttccgatatccgtcctgcccattttcttctttttcatgctcatttccagtcctatcattttcaaattgatcatttaacaaatttgtgatttctttaagcataaatgcactttttcttggctcaacaacattcgaaatttcgttgaaccgaatgccaaaacggttggccattaaggtcatagaatgttctaatgaggcggtcaaatagttttcatgacgattggcatctaaaaatagttttttaagtagattttattaataatatatgcttgatcctaagattttgaccccaaaactcttttacctccacctttccatcgaaaattgaaaattggcaacaaaaaggcaaaaaaaaaaaaatagtcccgaaaattttgaaaaagttgaattaaattattcaaaaatattgcaataatttgttgccaatcttagaaagaatcagcaagtaattaattataatgaacataatattaggtgcggttttcgattaaattccattaagcccgaaacgtaccaatttttaagctcttcagcatttgataaatgaaaaataatttttccaaactgtataaaagtgccggatcattttgcaactgattttgtaccattttctgaaatagaaattttaattaaaattttttaaacgaattaaaaatgccttttccgctggggtttctgcaattttcacgatgacttcgtcaagttgacacaattggcctgccaatacttttgc

SEQ ID NO: 18478 - DNA, 2083 bp, Heterodera glycines
ccaacgttctcatgattcgaatcgccacattttttcaaatttaaatgaaatgaaaatgttaatgcaaaaattaaacgtttttgctaatgcacaatttttcgatcaattttataacctctcttccattgtcattcgaattctcgaaaattgggaaaatgacggacaaaagtaaaaaatgataatttacaatattggaattttaatgggtttttttttgtttttttttgcatgttcagtccgactccatcatttctcagctcaccggcggacgacgatttgaagggtgaaattggctacaattcatgcaatttagccaaacccatcattttggaggggcggttatatccaaaaactattttatttgtttatttaaccaaattcattaacagagtgacccaatttcggaggcgaaatctgacttgtcgaaaaatattcaaattttactatttcaaattattttcaaacgttttttggggaaagaaatgctgtaccaaaaaagatttgctttgaagcattagaaaaaagatataggcgttcaaaattttgttttttgaataactttttagctaaccctttttttttgctcttaaaaccccctaggttttgttcgtaatttttttctttctcggtatgaaaaattaaaagaaattctgcccgaggaaaaaaagttatgctgttcgaaatgtggataccctaagcagaaaataaattgttttttattttgtattaaaaatcgtttcattttccatagccaaaaaaaaaaaacaaaaatgggcatttttgacgaatttgttattgttgacgaaaaagcattcaccaatttgctgattgagaaaggaaacacatgccaccttcacatcaactgtcttggttgtgcaaatggccgcacaaaaaacgtcacaaaattcagtgatgtgactcaattcgcggcactgtaaaattattaatttgcaaaaaaaaattgtaaaattaaatctaaatttaagcgaatttcaattccaaaatgcgaattgcgcattggaagtcaaggacattggcaatgcttccgagtcggatgtgccgttggcacaaatcattgtgtggcggtggaatttgaggggggcacagacggtcaaaaatgtgcgaacgaactcatatatttttttctaattaaccctcgagacatggcccaaacaaaaaaaaaccaagaaatatttggatgaccccctttttaggcaataaattttcaaaatctctgtgttaaaataaggattttcggggtcggaggaaaacccgctttcggcacttaaattttgaaggtatgccaccaaaaaattgtaaaatattagcgtggtctccgtaaatacgaaaaagaaattttttccaaaaaaaggggggggggggtccatctaagcatagtattaccgagatttcccttcttcgagactctcgaatagaacccagaaaatattttttgtccctttaattttagcggcaaactttgaacattggtggcactttatttttccatcaattttatgccagttcttccattatcattcgaattctcaaaaaacggcaaaaggacggaccgaagtaaaaaaaaatgatcatttaaaatttgggcattttaatgttgtttttttttgaattttcagtccgactccatcatttctcggctcaccggcggacgacgatttgacagttcaaatcggcgacaaaaaggtgaaatcggcaacagtgcatgcaattattgagtttaaaagtgccgaaatgaattaaaaagtagccaaaccgttcgcttttcttttggggggggggggggggggggctctatccaaaaactatttgatttatttactagagaccggacaagagggtcggtcgaacggtttcggttaaaaaaccgaaaaaaaccgaagaaaaattttcggtataccgtttcggtttcggtttttttgaatttttttatcttttcccaaaaaaaacaataaaccatttttatcaatagaaaaagcgaaagatcacctctgagtaaaattgtagagctattgaagctctctatcaatggtgtactaaaggttggaaaatgatagaaaaggca

SEQ ID NO: 18479 - DNA, 1789 bp, Heterodera glycines
atctctcaatctctaggctagggctcaatacatacacacctatttattgatttgtttttctttttgaatgacctcccccacccctcccgaaaattgttttttgttccgccgtcggttaacctttgccctttacacattttcccaatatttgtgacattggtacgttcaattcaacagcaatgttttttgatacataattttgtcatttcgttcaagtcgagaatgcggtgaagaattatcgcataattttgtcagagatgagatggtatgtatcattataaaaaggtgcacaacattcctccacccccctcccaccagttcccccacccgtatcgtttcccttccccacgaaaattttattttaaaagaaattaataaacaattttcaaaatttttgttatttattgtttcccccacacctccatttttcgaaattaaaaaaaaatgtaaaattcaaaggaaataaaatgtttgatcattgatcatcatttgccggggttggtgagcgccgccgagaacattttgaaatttgagtgcgggagttcaaagattcgttccttaaaaattcaaaaaatgcaattttgcattctaaaacaaaataggcagtcaattagtatagttgtgttaggtaaattctcaccgctacagtgtctcatttcgtccgtttatttgttatttaaaataatgcttgattggcattttgtttgttttttattttttgtcaaaacatttttctaagtgaaacaagtgcaggtgcgtgccatttgcgaacacaatttcttcatgttttgtaaacaataacatttcttagtctttaaaaacaacaacacaatcaacattaaatacggttaaatgttaaatggactagcttttttgggtccaatgaatggccattctcaatttcttaggccatagttttttttttcattttcgatcgattcctgcgttcttggtatcagtcaaaggcttaaaatttgtagaaggattcttttgtaataaattctgggctaaaacagcagacaaaaaatatcatgaatatattcggaaaaaccccagaatttcgtatttttttttgtaatttttttcttaatgtcaatttttgctattttcttgcatttatatgtaaattaaccagattttaagcttccatttaatacaaagaaatagtcactgtgaccaaggaaaaaaatggtctaagaaaatgaggatggtcattgattggacccataaactgaacttgagccgttaaatgcggattatttttaaatcgtttttaataaaatataaaactgtcaataattttgttgcccattttttaagattgctaatgtctgaaaatgagcattcaaacgttggtggcgcatctcaccaagatgaagattcttcggatgatggactttggaacgagttcgaaacttgcgccacttcaggttccgaaagtagctgtttggcattgttcgaatttggattgttttcagtgactcacctttatcgcaattccaattggcgcacattgcaacaagcggccgcttcggctacccaattgtacaaggtttgtagcaaagaaaatgaatacagaaattgttgtagacttaattgccttggttgttagggtttaggacgatggttcgaatttggaattaaaaagttttcttaaagcgacagaaatcgaatatttttacaacaattggtttctcaatccgcgtgaaatctgattcgaggaattacttctttttttttaaatggcgacgtttgtcaattttgtccactaattacaaataaaatgtaa

SEQ ID NO: 18480 - DNA, 1315 bp, Heterodera glycines
  unsure (1)..(1315): unsure at all n locations
taatgcgaaaggcgaaatgccaaaagcgaaacctaggcacatccctgctgccgacctatgtcactatgaatacaatagaataaaattataattgttcttgttcaaaatttgtaaaaccatccattttgcaattatataaaataaaatcttgacgaaaaaaataaataaaagtgcttaattgatcggtttcaacatttctgctgcctcggtgtgttgggttgtgatcggggctggccgtgattgaatttacaatcacggaaatccgtgagccatgatcacggcgcttccaaaaaaatccgtgagcctcggatgaccgggaattcccgacccggtcccggtcccgtgacactctagtataaaccagtaaaaacactaaataaagttatccttattataaattaaaatataaaaaaatttatattaaaaagaaatgtaataattgatagttaaaatttattaattgtttacataattcgaattttctacatctcatataaaaattttttacaaatttgctcaatccaaaaagctttcctttaagctatactctaacaaaatcagaatataaatataatagatttattgtacctgatttttaaaaaatttattaccattcgttcattagtcgccccgaaggattggtttaatgaaattaatttaaattaattttttaaataatttgcatacaatctaaaaatttgaggcaaatatacaatatgctaaaaaaatcaattactaaatttcaaaattaatacaaaaaagtgcgagaagataaaaaaaaatgctggtattagtccaaaattaaaatattttaccgtgattaaaattttaaaagttaatataaaaacattttatcattagcattttgccgatttttaatgactaaaattcagcgtgaaattcaaaaaaatatgaaaattattagctgaagaagcattaaatcctatttttgcgatgttaataactaaatataatgaacatccaacataataacgtattcaaataataatccgataaaattaaacaataaatttataacgaaaataaataaaaaaatcgatggtgtacaaaaataaagcaatggaaatacactaccatgaaaactttaaaaaatgaacgattgaaatttaaattttcaaacgaggctaaaactaagattttgacccgaaaataagattttttctaaaactaatacaataatagcgtcaaggaaacgcaataaaaacatgaaaaattgatttaaaacaatttttttcgtgtaaaaattgcaactgaaaattttctanatcagtatttagccgcaaaaatcatcttt

SEQ ID NO: 18481 - DNA, 795 bp, Heterodera glycines
ttttgaaaatatctctgtaatttgttaacagatttgcaccaaaaaatgatcaatttttgagattttgagccaatttttatgaaaacaatatgatttgggggcaccacggtgccgataggcgctgccggaggaaaaatagaaattttgaccatttttaaacagattttcctgaaattttggagcattttacactcaagaaaatgaaacaaaaatgtaattttttcaaaattaaaattaattcaaatattcgcttcaataaaaaatgatatttattcaaaaaattattcaatttttgcatttttatttttaaattcaagaataagcacaaaacaaggaggtcgtgccaaaataaggacaaatcttacaaatacggacatttttaatttctaagatcttgcacctccaaataaggacaaatcttacaaataaggacacttggccactctggtatatgtacatcaaaatagacatatttaaattggaaatattttcaattttcaataatataaaaggagctaaaatacttggaaagcatttttaaaaatcaaaagataaaatattatttttttaaaattttgcgagataaaaaatatttagattgaaaagtttccatccatgttttcattaattctcaaagcttaagaattcaaagaaatttaaaaatgtttatgcactttaaaatttggcaacaaggtaagtgccattctacttcaaaatggagtaccatggcactccttaaaatgaattgttaaaattaaagtgccatgcattcctttcaaaaacttaataattcaa

SEQ ID NO: 18482 - DNA, 2161 bp, Heterodera glycines
attcatttttgctttcttcttcaacttcaacgtttaaaaaggaacattaataggcatctggggtagccagttcacatgaaacaacaaagcttaaagaaataaaattaaaattttaaacaattttaaataaaaaataaaatttataatttattatattttttttttttaccgagcaacgcattcccgatcaattgctttggtcaacaatgttgaagtgacttcgttcccatatttcatttgataatgccaaaatgacaatgcatttaattggttattgtcatcataaaatgaatataaatccatataattctgcaaataattatgagtatatttatttatataattttgagtatatttaattttaaggattaaaaagcaatataattaatttatttaaaattaaaacaataaaatttaattttttatttaaatagctaaaaactcattaaaagacgactggttttaataatacttttggccgaaactaatttagaggtttttttaaataaatttttagcctaaaataatttaatagttttttatttgactgaaataaattttttataaataaaataagccaaaattgaaccagtgatttataaataaattttaacaccaaattttctttaaatagttgcagaatttgaaagtttattttaattattttaatttaattgacgaatgaaatttcatcaaaaatctgcaaattatgggtttaaatggggcggtcggtggttccaaatttaattcctccaaattttccgtcatgtaaagtcagtcagtggcgggtgaatgagtgattagtggagcaaacaaatcgccaaataataaatgttttacgtcacacaaaaaattaaattccatcatattttatgaagtgctgtttaatattggccaaattgttaattaataattattttttcaatttccttttaattggatgacacattaattagtgaatcaaattttatttttattaatgaccaaatcataataataatgcgagtaaataaaatttgggataaaaagcaacgaagcattaaatggatatttggaatttaatttaaattagcattttttcacattttggcattctttcggctacgcccaatcattcttggcgctatgtgcattatggaataatctgaaaattttggagattttttttattacaacaatttaataattactaatcattagtgtttggtgaattgttcggtgggagttttttgaattatgctgtacaaatactaaaaatcatgattaaaataatatttttgcttattaattctcttaaatttaccataattacatcacgcactgtgtcgttttttacgaaactttgctaaaattttgaaatttttattttttatagaaagtttgatagatttttaaaaattttttttacattaaataataattaccaaaattgcatcttgacttgggtttgttgcattcgccggactttgctgaaataataataaaaatttttaattttttaatttaaattaaatatttttttaattaattaaattatctaaaataacattaattacaatttgtcctcgggttgaattgttggcatttgacaaattggtctttaaattaaaactattaggtaaatttagcttttgatcaaaatacattaatcggctctcgaattttgttgttggaatttgtcacattcggcttaataaataataaatttaaatgattttattttatgcaacatttaaaatatgcataatgaattttcaaaattaccataattggtcctccaacagtgttgttggcattgttatgcttaaaaaacatattgaataatttgatatatattttttagcattttaatattttttagttttaaaaacttcaaataattacaacatttggcgcagaaactctgttgttggcatttgcaaaagtttgctgaatcaataaaaataaataatttctgtgtttaaattataaaatatttacaatttggccgggcgttaaattatcggcatttggaggggcaaccttaggaatatttggtaattaattttttttaagtcttttatcattacctggatttgaactcgaatggggtttctggcgcttgtggaattttgcttaaatccataaatttaaataatattttatgaattttaaatttaaa

SEQ ID NO: 18483 - DNA, 1553 bp, Heterodera glycines
tttggggcgcactcccgttttaccgattaagtaaggaatcgatgaaagtagtggtatttcacgggcgccttgcggctcccacttatgctacacctctcatgattcttcacaaagtcagactagagtcaagctcaacagggtcttctttccccgctaaatttgccaagcccgttcccttggctgtggtttcgctagatagtagatagggacagtgggaatctcgttgatccattcgtgcgcgtcggtgaccttagggatgttctcgtcgccgtagactccctttcggggtcaccaggctgttagcctctgcgtctctgagcgggttgctaccccacccaactctgcaggagcccactggcagcatggtcgccagtgcggtttcccgaatgcgctaatcgagattccatccatcccaatacacgaacgacctgctggcgcaagcaccaacaggaaaaactcaagcttttcggttctcgcctggtctctcggttattatttcttacgttcgcactaggactaacgctaccgcaagcttcaccgttcaaccaacgatcaccgtaaacattggatacacattctcaccaccggggaaggttatcaatactcgggctacaagtcagtttcggacccgttcctcggcacactcaaatgggtccgaatcacatgtcctgaaccgataatcgcagctcgctgtattgactcaagcaagttcggtacttcacgggctgaaataccaagctcgctcaacctaccagttatattcggtagtacttcaccgcacgacccgactataatcggcaccactttcactattgggaagtcttttccgtaagcgcgacctaacacattttgcaggtttggtcctggtacttcaacttccgctagttccaatggttcaatcatagaattgatcgcatatttccgccacttgatgagttcctgatttctcaggttctctcgccatggcactgaaatttccacgattctgatcgtgcggcttcctttatcaaatactaccatatccggtctgttgcttcgcagaccaatataaccagtactcccgccttcctgaggaagaacactcgctggtggagtgtgtaacgctacatcgtagaggatcttggctcgttcattttcaagtactgcgtgtaggggcacagtatgtgaagacacgggcaacccgtactttctgcagagagccgtgtgtacttgtcgtactacaccgttatgcctatctagcatagttccagttcgggaccaagcacatccactaaggatatgctgttcggtctcgacacgcggatcaccacacctccggcaccacttagctctcgcgctcatgtgcgggcactttaattcccgtgcctttaactggccctcttgtgccgcaatacaatctcggaacgaacgtttcccgatccttgctcgctctagccaatgatagcttcgaacttgatcgagctctggcaaattcgcgactcgaccacccataggtttacccttccaggcggtcaggcgccgttcgtcattcgcagaacgaatgatcttcacga

SEQ ID NO: 18484 - DNA, 2038 bp, Heterodera glycines
ctgtcctttcttcattcattcttactatcggcatggttttctgccttgagatcaagcactattttctggccaagtgcattaaccgcttcgattagaggcaaagtcttcagcacaatgaccaaatcggccacattgtgcttggccaacattgtcccctttttgtaagagccgacctcgcgcacttcctcaatggccttacaatcaaaaaagatggttttaatcaatgcttattacaaatatggtaaaaaacaaaccacagagttaaatgtttccggagcaacaatgattttgtccaaagtctgcttcacttttccaaccaatgccgaaatagcagattgttccaccgtagaaggcagaatgtcattgtgtttggccaataagaactaaaattcgaaaaaaaatttgattgttaatgaataattatttaacgcccacaaaggaaaatacgggcccaccattcttacgattgccattagtgttggatgaacctgtgtctgagctgtttcctcagcctctgtgctgcttcgtgggaaaaactgatcgcaaaggtacgggtcaaaagtcggtggcttgaactgatagatctgttgaggcgatgctccatggacactcattggaactggcggacgcattggaccaacgccaggagtggcggcggcgagcggtgtaggattgtaagcaatgggaggagcaccatagaaagaccccaggctgtacatcatcactgaattatgctaaagtggtcatttttcaaagcaaagaaaaaagtaactaaaaatattgttcattcacattacaaaagtgaaaaacaaaaaacagcgtaagaaccaacaataacattttacatagacctcatcaaataacgtcaacaacaattccaactgatcgacttcatgatcggtaaccaaacggttgttttagcctcccttcttcttagacactcccacagtgcgtcctttacgtccggtcgttttcgtatgctgaccacgcacacgaagaccccaataatggcgcagaccgcgatgtaaacggatcttcttcatgcgctcaaagtcatcacggtatttgctctccaaattggtggacaaaacctggaacccaaaaaatattgtaaaatactgttaaattattcctctaacctgttgatttttaccatcgcgaatatccttctgtcggttcaaaaaccaacttgggattttgtattgctgtgggttcaacataacagtagtcagcttttccatgtcctcctcagaaagttctccagcacgcttgtgaatgtcaatgtcggctttgcgacaaacaaggaaagcataacgacgaccaactcccttcaagatgaaaaaaactcaaaaaatattagcttaatcaccttgatcgctgtaagggcataaggaactttacggttgccatcaatgtttgtattcatcacacgatgaatatgttggaatttttcgggcataataagcgacattttccttttttcaatctgttaatgtcttaaaaatcaaattcaaaaagcctgaattgtttaaagcaaaacctttattatagatttaagtacccctttatgctgaattgaaaaccccaaaattcgcaagactattttaaaagagcatagagttttcagattggtccgttcaagggctaaaaacccaggaaaatagcaccctaaaatcaaatgtttttgaatattacaaaatgccaaagtttagagattgagattcagcgagactgagattgcttcaaattcatatgtcccgtttaattttgcgatgcaatttttaaatcaaccatcagccagtttttaaattttaaaatattgctttgcgactgaatatgcccagaaaaatgaatattgacattgagagacatcagcacttgacaatgccatttatcacagcatcaaccagcgataaagagcattacgtaatcaacggtcgaagtgcttcgtgtagttcagacgaccagttcagctgcacaaaatacgatcacactgacaataagaagttcatttatttaaaaactcccccaggaattg

SEQ ID NO: 18485 - DNA, 1659 bp, Heterodera glycines
tcaatttttttttattcgttttcaccattattaagactgaaaattcggatggccaattttttgagcgactgtgtgaagaggaatgcgagcagctggtcggcattttgccatcccgatatttgaaggcggaaaataattgtgcaaatagcaatggcattatggcacgaaaagaccccaacaaaatgttgagcgaaagatttgctcaattttcactaaaaaatgcagctgaacgcaaaaatgagaagccggaggaactgaaaaagcaaatcaatgtttggaaataatttttatttaattaaaaaataatattaattaacttttatatgtaattattttgaaagttttttgttttttaggacctttatttggagacactctatacaattttgcataaaattggtaaagaagctgttgccaacgaggaccaacttgcgcaatatgccaaatcagctttccaagtcgaagaacgtactcatcaaacactgatggaaaaagcacggagcgaaaaagtggcattttaaaataaaatatcctttattaatttaatattttttattttaatttagccgccaatccttttgttaaatgtccttttgctggaggcccgtgatttaatcgccaaagatatgtaagagtgaaaataaattaagataattaataattatgcataaaaataataattgaaataatttatcaaaatttaatgtaataatttacgtaaatttgatttgaaaaagcataaaatataaatctcgaattagtaaacaataagcttagaaaagtgccttttatattcttaggttgagttagcaaaaaaaatgacaaattgctgacaaaagccgcttcgaaaatattctaaaaaataattttctaattatagtgacggcttttcggatccatttgttatgcttggcttggtgccaaggggtggcagtcaaaggagccctggcgcagatgatcagaattcgccaaccaatgtgattaaattaagaaaaaaaatagttttaaagattttaattatccactaattttattttaggaaatttcggaagcggattcgtctgcttcagctgctgacggtggtgccggtggtggtggcaattccgcgcgaaaaaatccgctcctgcaacgcttcagcggctcatttcgccgcaaagcgcgcaaggcgcgcggtgagacgcaaacatttgacgccgagaacggcattccggcacgcatcatcaaagcgtcatcagtgcagcggaagacgctgaacccgaaatggaatgagaagttccaatttgtgattggcgatgtgactgatcgcttccatttggacatttggtgagatttaggcatcgaatttttaaaaaattgggtgccagaccaataatttacagtgcctaatttaccggcacttacaagggaaccgttcaaaaaaaatatgggttgtaaacacgggaatgtttataaaaaaattttgaatatatgaaatctttttaaatttagcaggcagaaagtatttgtactaaggtatttctctgcaaaaattcatatttttctgaaaagtacgaaacgaacaggaaaatcagcatttttaaattccgtgaatcttataatttaaaaatcattttaacacagaaaaagtaagaaaattttctttaatgaaaataattgaaa

SEQ ID NO: 18486 - DNA, 182 bp, Heterodera glycines
tttcaagtttttccgatcgaatgggaccgatttcggcggcacaaaacattccgaattccattccactctagtgtaaagtgatacccaattatgaattttccggctgacagttcaggaggttcccttgtcatatattttttttacttaattctttggtgtgattaatgagataattaaaataa

SEQ ID NO: 18487 - DNA, 2365 bp, Heterodera glycines
ttatgtacaataaatattcatttgtcgatttatcggaacgctattccaatataactgttcgtttgttataaatagggcattctattacatgcaaatgcatctttttttccccgaactatctaaggtctgaaaagtatgttttattagcttggtttacgcttctaggaccaagttcaatttgaaaatatctgtccgctaatggcttattattccaggaacgaatgatttgaatcagcctaaaattactcacgatttttttatttataagtccactgctggtcggaatgccgaaccccaagtcagacttatttaaatggaaagttccctttttaatttctatttattaaatataaaatgtgaatatgcctttgtttattaatgtgttaataaaatcaaaaatgccactgctttattatgctcttctgtcattttctgataatctatcattattattatcattttcaatggctgtttgctgctgctgatgttgttcattttgttctgttccattattataattattatcatttatttctataatcacttcgttttgtgttcctccattagaattattattgttgttattatttgcttctaaataattggtggtattttaactgatttaattaataattatgctttaatgccataaatttaagtaattaattattatgctcttacgtgcattttctgttgttgttgacaacatgtccgtgtccaatatttcttgtcgacaaattggacaaccattatgaccgcctccgatcctaaagcatatttattaattaattaactatatttcccctaataacttttgcttaccacatttcaatgcattcgttgtggaacatatgctaaatcggcacaaaatgattaatttaatgtgttcaattcaaatggcaccacaccttacagatgggcaacggtttgacttttgtgccggcatcgatttggcataggcaaattgcgcattccgtccgttcttcctcgctcagttttctggcgccgacgacaaccgaaggaatgccattgaaagtgtccaaatctgtgcagcagaatgaaatattggcttatttagcaagcataaataaaattgaaaagcttcccccatttttaagagtttattaattgaaaaattgtgacacctaattaactaattagttaattaatattataatgccttcttattacatcgtttgttgctcattgctccgtttgcttctgtttgtccattgtttctgttaatgttccgtgcgatattttgcgcgttatgacaagcgatcaaagacaggcaaagaatgattagcacgcacatagccaaaagcaaataacaaagtaaatttgcgaaaatcattcgtttgcgcctccgtcgtcgcctttcgtctgaatggttaattagacttaacacttactaattttcctaattaccctttcgcccattaaaaagtgcggcttcgtccaaatcgatttgattagctctaaaagcaaatctaaggaatttttcttcatcatttggccttccttttcttttatttttatggcaacttgagcaatttccaccatttcggtaacgattttttggctaggtaataataattataataaattagaaaatattttaattaacttcctaaatttgaattaattactttgtccgaaaatccaattaattcttccattaaatattttacgctttctttgcttaaatcaaattgtttcttctctccgtatttattcagctgaattcggcgacgttttgccacgaaaagcaaagcaaaagcgacgctttgctttaattctttcaacaaagaaatatcaccgaaacctaaaaaaatatgatcaattaaatgctaattaattaggcatttaattatttgcctgccaatgactccaattttcgttttgcgcgcatttcagcagcaaataagccgtttagcaattgactcaaagcggggtcattagcatggatcgaattcagttttgttttcagacattcgaattcatcggcagcaattaaaggaggaggaaaagcatccgagcggagcaaatgctttaaaaatttttgacaataattaattgttaattttattttcttttttttactttttcctcccccacaaaaagtgcctcaaaaattcgctgctttttgctcagctcaaagtgaaacttttccattaattttctgtccataaattttgtttgcagcagctttaaattcttaatttggcaacccaaaaattggccatccctcaaattttgttggccgtcgaaagtggcaaatgccgacaaagaaaaggataaaaacagcagcaaaagcagacaaatcggtaattcagcagacattttggggattttaatggaaaaa

SEQ ID NO: 18488 - DNA, 2455 bp, Heterodera glycines
atggcatacatataaaagttcaactgaagcggtgccaaaatcatttctgcataaaaccaacaacgatcagcctaaatttgttcatttcattcctaatacctaatcaatgaacgagtttttagttactaaaatcgcgaaattgttgcctaaatagttgttaaaaactgaaaatgccaaaatggttgctatgtatattattattttattagttaatttttgcgaaaggaaataaaagtcgacgattataaaagaggaaaaatcaattatttgcttggaaacatctaaaaatatctaatttacaaataaaatttgtttttaaatctatttaatcattttttgaaaacttgaaaaaacatcacttgaaataataaaattaatcgctccaaaaatgacaatatttgtaaaaaaaaggttgatttttttttatatgaataataaatttttcgaaaacttacaaaaaaatcgttttaaaaaaaagtccgctgtcgaaaagtccgggagccgaaatacgactgattattaaaatagtgaaaaattaaaaaaattagtataaaagtggttgctcttccttcctctgtcactttccattattcattcgccattttcgtctcttcaaattttctccctgacattaccatctgaaatgagtctgtacgtttttcgtttttttctccacatttacccttttccttctcattttttagtctgttcgttgtgtcaatgtttgtcgatggttgcgccattctttggagttattgggatcgcttcaaaaaaccaaaaaagaaaatgtaaaaaaaacgctgacccacgaaatgtccaagtctcgaatttgagttttttattattcagatggactaaggttaggcaaggggtaatataaaggggatattcgtattcagcgaccccgaaaaccctaaaaatcctaaattagactcattttgtttttataaattttgaaaaattttggacatttcgtgggtttttactcttttggacattcgtggcttggacactttgtgggggtgccaaaaaaacaataaaatttgaaaaataatttttcagctttatctccgccgattgttggctttgtgtcttcgatttgcttgcgccttctcaacttggcctcggaatttcaatgatcagccaccgttttgattattacgtggacgaacacttcaagacacggcgctgggcgttgaaatccatggaaatttggagcaaaattgaagagaatggcacacaggaagcggcaattgtcaatgatcgaaaagcattgccaattccgaaaattcgaatgccacgcaaagtcatcggattcaaaaacattataatagggtaaaatggattaattgtttgctttctttatgctatcatttaatttcacagatacatggaccacaatgtgatcacttttctacgccatttttgtcaaattttcgccgtctgtccaattaatttgtccatccacacgaacagcaatcgcattttggagttcgttttacgcaacatttggccattgctcgggaaaaacatttgtgccatggaattgtccgtcggagttttccaccatttgcgacaatttgtgccgtcaattctcaatgatttgccgttgctacgcattgttaatttccaagtcgccgatctcttcaccgaatttccggccgatgacagtgccacggcgtcggatggacaagcggtgaccaaatggcttttcactgcccgtccggacaatgtgccaaaagtgctccaatgcgcgttgctcatggacatggatgatgggaatttggtgtcgagggttgaagccttcaaagcggtgatttcgaattgatttatttggcacttttacggtctttgggattcgcttatttgaaataaacctaaaagctcccatattttttcgtgaccccttccccccccccccactgaaaagtatcacttttatcatttcatatttcttaaccaattttcatgattttaggcatttgcctcggcttcatcatctcctgtcaatttcattgctgtcatgttgtctacgttttttgctgactccgttgtgccatttgtgctgaccaacgaattgactcgggaacaattgacgttgaaaagaactggcctttattttctgctgatccgtcatccaattgtgcgaaatgcgagcaaatgggcaaaatgggagggagaagcgattggctggaattttcttgaccaccagtggaatcatattggcatgcgaatttatgatgaggatcaaatcggggacgggtcagtgaatgatttttcaaaaataaattcaaattttttgtggtgttccaatttttaggcttctcgacgcaacaactcccggcccaagtgatcagcagaaaaagtgactgaatgaattaattgctgagaaatgatcgatcaatttggattatggaattattgttgtactcatacataattatttggtcaactt

SEQ ID NO: 18489 - DNA, 859 bp, Heterodera glycines
tggtggttttttgaagcggtcccaataaaaccaaagaatggcacaacagatgacaaacattggcacagcgatcagactaaaaaatgagaaggaaaagtcgagaaaaaatgcgcaaaagtaaaaaataatattttgaaggtattttcagggagaaaaagtcgaatagagagacgaaaagaaataaatggcgagagcgaatgaaagagaatgggagaggagggaaggcttttattgcaaaactgcgtctataaacgaccgtttaataaaaccgtgtaaaaatggcaaactaaattagtataaaagtggttgcttttcttgcgccactttcattattattaattattcagccattcttttgaagcattgggaccgctttaaaaaaccaccaaaacaacacgaggccatcgcaaaattgaaaaagtgccggaaactgtcataacaattgaaaaagtgccggaaactgtcttgtcaatttgctccgacgaaatgtcatcagacaaccaaaatgaagcagaggaaaagatggcaaacgcgatgtaaaattaaatgccaattttcaattttaaattttgttttcccttttttcagtttcatctccgccgactgttggcaaacacttggccaatgctcgcaaaaaacattcatggcatcgaatcgtacccaagttttttacactgtttgcgacatttcgtcccgtcatttctcaacgaatgtccaccacttcgctttgtctccttctgttttggcgaactattccccgaatttccggccgatgacagtgccgcggcatcggaaggacaagcggtggccaaatggcttttcaccccacttcaaaacgatgtgccaaaagtgttcaaat

SEQ ID NO: 18490 - DNA, 3351 bp, Heterodera glycines
  unsure (1)..(3351): unsure at all n locations
accaanaatcgcttggatcttggttatcaaacaaaaaagttcttttcaaaaaacatgtgctcgtacgaaaacggcctggcctgaacaatttaaagtgttctttgtggcctccgaggttaccatctgctgaacaccatgggaggaaattccagggagaatttacaataaaaatatacgtatttagagaaaatgtttctttttcgtattcttgaaaaaatatatttttcatttttacttattgaactaataaaaaaaacaatttggcacaacttacatttaaaaatttaaacccatcagggcacattatgttggctaccaagtgccctatctcatggtcagtcagcaacaatatgaattttgcatttgctgtagtcgtgaagaaagaaaccctctgaaataaggggaactgcaattaattggtttgttcaatttctttaagattttatggaaataaaagttaaggaataaaacatatgagtgaaaacagagtgtgagtgagcaagagagaaaagcgttaatgaactaaaagaaaaaaatagagaaaattaaaacatccccaaatagagagggtacaattaagagagaaaatagaagagagaataagaaagagacggaaaaagagcggaaatggaaaaattaaaaaaccaaggttgaaatttaaatttgaataagatagatcgaaaaatagcaacaattgttttaacttgtgtgaaagttttaacataggatacaacttctgtccaaaatcaacaaatgccttaacttcgtaacttttcttttgtgtccccggagttaaggctttaagcaatttttaccgttttaaacagctccagctcgcagccaccgagggggaaattatatggacttatatacttgcacaatgtggatggactttggataggatgagggatatgacggcaaaaactcaaatggaatgtttaattgacgatctcgaaaaattatcatttaattcttttgttttaaaaataaatttgcttatggatttgttactgacgtattgtccacttactgatatttgaaacctatgctttggtacttttggcataacttaactgaagtcaacaaatttttttgcaattttgcagacaaatagagaattgttggggctatcgaatgatatcatgatcatgaattagtaattttatttgagcaaagttatacataggttgttttttgctgaaaattttcatttgatgttttttataacgccctttctgatggctttttataaaggcttaatatcagcaccgttgaaagtatttttgtatactaaacatttattaaatatatataaagaaaaataatataaagcaagagagggtgagaaataaaggtaagaaataaacaaggagagaaagagaaaaaaaagaagcgagagagagaggggagaaagagagatagagagaaaagggggctggagagagagaggagagagagagagaaaatggggcgggagagagagaggagagagagtgagaggagaaagagagagagagagaaaaaaaggggctggagagagtggagagagcgagaatagagagagaaagggggggagaaagcgagagagagagagaaacaaacgaagatagggtaaatacaaggaaataaaacgagagaaggtacgtaagagagagataaaaaagagagcggaaacggaaatgaattgaaatttctcaaaacatgaatttaaaataaaataagtggaaaagagtcggaaaatgtttcaaatttttctaagctaattgatacagaagttaaaatttatttaccatgtgtaccataccgcattagaaccacttctaccgtaaaaataagattaaaaaataaagccaccggggactatatcttaaggaatacgatatatatacttaaagttttcacctgatccatttggaaggtgaacgcgcgcacatcaatttcaacgcatttctgcgtttaaattttttctttttgagtcaatattgttcaataaaaagttttaaaaatattcctaccaatattttgggggttttgtcaatgctttgaaatatttttagaattttttcgaattgttcatgtaaaattctgaaattctttaacaaaacacaataaaaaatatttttaaattttctttgacacgatcacattttttgtagttatgaaaaaagaaatcaaagattcctaggaaatttctttttcttacccaaaaattttttaatccactatactaatttggtgcaataacgaacgagaatgatagataaagagaaagaaagagaaacacagagaaggaaagaggagagaaagagagagagagagagaaaaaagggagcgggagagagagagagcgagagagagagagagggggggagagcgagagagagacaaaacaaagggaaatgggataaaaaacaaggagataaaacgggagaaggtacataaaagagagaggcaaaaaaaagagcggaaacggaaagaactgaattttctcaaacatgaattttaaaaaaataaaaaaagagagagagaggaaacgaaagcaagagagaaataagaagagtgagtaagaaataagggaatgagagaaagaaagagaagaaagaaaaatagagagaggaagcgaaagcgagagggagaaataagaagagtgagtaagaaataagggaatgagagaaaggaagaggaacttgaagggaaagagagagagagagaatgaataagaaaaaagagagagggagaaaaagagaagatagagagggagagggagggagagagaagacagaaaaagaagcgagagagagacgtagagagagatatatacttacagcgaggagagaacattgaaagggtgaatgaaagagaaagagagagagaaaggggagaggggagaggggtgaatgagagagagagagagaaagatagagagaaagcgggaaaaggatgcgagagaaagaaagagaaaaagagagagaaaagtgagagtgagaaaggggaaaagggtgagagagaaagaaagagaaaaagagtgagaaaagtgagagtgagaaagggggaaaggatgagagagaaagaaagagaaaaagagtgagaaaagtgagagtgagaaaggggaaaagggtgagagagagaaaaggggagaggaatgaataagagagagagaaagggggaaaggaatgagagagagagtgagaaaagagagagttggagagaaaggaagcgagagaatttaaggaaaagaaagagagagaaaaaaggggagaaagagataaggatagagcggagagaggtttgatgaaaagatgacataaatacaaaagaaagagacaggaagagaaaaggagacaaagagga

SEQ ID NO: 18491 - DNA, 2128 bp, Heterodera glycines
tttttcgaaaaaacggtaatttatcataaaatttcaaaaaaaattgcttaaaaattttcaaaatttttttttctttaaattttccttgttaaaaattttataagaattttttccttgaaaaaatttgtttgaaaaatttttttgaaatttctgcggcgagattttgtcccgtccccgaacttttgcgagattcaactaattttcggtttacaaaaaaaaaattttcggagcgcgggaggaggtggaaggtgcacgcacccatctgaataaaacgctcaattatagcctggtagtaggcttagtaattgaaacatttgttggctgagtgtttgatggatggatgattaaattggattattttagaaaatgctcgagattgacttctaccaaatggtcatccgacatttgatccggcgccaatgtacgctgaccaggtgagcggggcgcataaggtgcactttcatttaccccgttatgttcaaattcttcagcaccggagccaaaaaacaggaatttttatcggttttgctccgaaaaatcacaaattttccattttgggctcaaattttcaaaaaataatgatccaattggggcccggcggtgccgcgccgataggcgccgccggaaagaatttttggaaaattaaatgcaatatggtaagaaaatgtgtaaaattttcagaaattttgcccttttttgcttgaaaaatttcgcagttttttcgaaacccacccccccatcagtgtctttgccagattcgaaatcggccaccggggagaaaattgaaaatttgagtgcaatttgttaacagattttcaccaaaaactttggggccctttgcgggcgaaggagggggggggacaacccccttttccatgtatgggggtagcaaaacctacaagtacctattaaagaacatgaaagggattgcgtgttggtattcgcgctaaacctaattctttgaaatcaatttcccgtttttttgcctgttccacaaaaggggtccatggcgagtgcgccgggccgagttttggccaagttggcctggatgaacgcgagttccgggtccatcgtggagttgccgatgtaccggcgctgactcagagaaaagagtgtcttcagatgtcctcgcccctctcccaaccaaaaaagaggaaatgtcgcgccattggtaacgccggacggacttacgagtcgtacaaagtaaactttgtccggcgtttccctccgtccgttcgcctcgtacatttcgatcaccgagaacacattgctcggatgcgcaaggtcaactggcgcgagagtcagaagcggaatggcagtgtaacgctgaaggacaaagcttactgtagaaggacacacgaaaagtacggtatgatggaaaaggggttgtcactcagtgttctttcccctcattatttgtctgttcacctcaacaaccgatcgggcgtaatcgccgctgcgcttcttttgatggggacgaacgagcagagaccacgactgatcggcggagtcgaagcgctgacaaaaggccattcattgcgcggaaacccaacccaatggccacaatgagccgccaattcaccgcaagcgacgaactcggatcggatgccaatttggccatcacttgctcatgcccgtccccctcggcgatcagttcgtacgccgctttcactaacacggccctttccaacagccgaaagacgtcaaattcgtcgttttgaaactcaaacgattgaatgtgtatctgcggacagaacgaacatattgacccaaaaaataaataaataaataaaaccccatccgaaggagagttgggcaccacagaaattcccttaatctgacaaatggcatcgaactccgcacgtctaaaagtctggtgagcctgactaaaatgaagtaagaaacggcgtttactgcccatcgaaaaataaatttaaatattggtaaattttaaaaacagaaataaataaacgttactaaaatagcattggtacccaaacacacaatgtgtaatatacatttattttaatgtagagataaaattaacaattaaaatgccatgccaaccacgccccccacccattaatatcgcttccgcacaaaacgcggcgctctccagtcgtctttg

SEQ ID NO: 18492 - DNA, 3339 bp, Heterodera glycines
ttcataatatattttttcgtaaatttttaaccttaagtatgagaaaagttataaagcattgaagctatgttttttgcaatgatcatgcaaatagaagtataaacattaaaattttaaagtctttaaaatgcaattgagccaaaattaattatatattcgatagccctaagaattctctatttacctttaaaatttcagaatatttcatttagtttcaaaaaagttctttgcaaaaaattctgacttaagattttttgcaattttgtgaccataactttttttatacttaagtaaaaattttagaaaatcatattctgatagagaacaattaaggctattaaatgatatcacgaaatattaatttggttgaatttgagccaggctatgaatttatatatattacccattatttgttttcaaacccattgacggatttaagaaacgcgctggcggatttaagaaacgcgctggcggatttaagaaacgcgcatgggtggtggaatttaagaaacgcaccagcacctttaaatgcattagtggctgaaggatgcgatctcaaatctcaaaaagcgggcacagagtcaaatttagcaaattgttttttgccccattttacaagtacttaaccactggaatagtaaacagccggcgggaaattccgaaggtaccatcagaaagaaagcgccggaagaaactaaggttgagccccgacccctcgggggcaaaatgtcgggggtcggggaccccgatcgggtagtgatcaacaaaattttttaacgaaaaagcctttttctttttaaagctaatcttcctttttcactttaatcatctgattcaaattcattcgttggcgccagtaaaagcgtccaaattggcattttataaccgggcattccgatgctccaaaaattgtcagaattcgaaaatcggaattccgagattaaaaagtttttgcggtgcgcttttcaaaattttttttagaacatgggggagaggtccgggcgtaccgttaggaaccgccataaaaaattttaaaaatttgagcaatttgtttaacagattttgctcaaaaaattggcaatatttgcgatttcggaacaatttctaggaaaaattaggtgttttggagagccgacggtgccgataggcgtcgctggaaaaatctcggaatttttaatgaatatcttaaagaaaatcttttcaactttcaaattccccgcttcgtcgttgaattaacttttaaattttacaacgcttggagtccttgattccggggggggggcacatgtcgggtcgggaaataggcccaaaaatgtcgggggccgggcggctcggggtcggggcttaaccctagaagaaacctctaacttttgtcaaattcttaaagtaagtatttttcttacctttgtcctaggattttatcaacgaatagtactttaataataaataattaaattaataataataaaacttcaaaacccaaagtatttcattaaaaattctgttaaaattaacatggatttgttagattggctttaatcactccctaagcttgatattttacattttttaatttcaatgccggaaggaacttccaaacttcccacttcagtgtacaaagatgtcaaaattgttttccttctctcggaattgccctctttctgttcgttgctttcctccaaaaccattttaaataatttcgaatgatttatttcaattttattttttgtcatattttcggacaacgaaattcgttctctcaatgcaaaaatttcgatggtgaacagcaaatagtgcttaaccgtttgcgggctttctcctgtgaaaaaatgaacaattaataatcgcaaaatttaaaaaaaatttaaaattttccgatgttttttgggacggacgacgaaattcaattcgtttttgtatcaactgattttttgggtttaatgaattgaaataaatgtaattttaagaataggaatgctttttaaactaattttcatatgtaaactttttttttaagttttaccgtttttccttttctttaagctttttggtaaacttttttttttgaaactgacaattgttctattttatattagagccggatcggaacgggaacccgccgggattttcccgggattccgatcccgtcttttttgcaaaaaaggccgggttagggatcacgcctaaatcgagatttgaatcccggtatcgagattgaaattccagcaaaaacgggatttcaatcccgctaatcctatcccggcctaattccaaccctaaatcccgttcccggcgaattgtggtcggaatgtgagttttaagagcagaaatctcagttttcttcgctatttcaacatttttttaaaattttccagtattctcaacaaagtctatggatgtcagatctcctaactatagtagtttaggtggaaatcttttaaaaagtcggattaaatttattaatttttttcaatctcacaaatttcgacagaataacaaaaaaaaaacaaagaatagaagcttaaaaacatatttgctaaatttgtggcctaaaaactcaatataaaaaacaattggtccaattgataggtgaaattaatagaaaatttactcattttcttgatgggaagaaccattcctaatgtgatttattcgacaaataaataaaagggtggagagatatgataaaaaaatttaaaaactttatatgcttgagtgaacaaactcgagaatttgagtgaacaaactcgagaaccccccccccccaaatttgttcattcattttaccttttattattttctttataaaagaaaataaattctccattatctgtgccattacttgatcattctttttcactgcgaataatcgtttcagtttttctttcagttttttcaacatttgttctcccatcgatgctttctttttatttgactttgaaggagtttcagactaaaaaaaatgtgaaaaaatttaataaataaggaaagatacaatttttaaaaaaatgcaatgttaaacaatttatttaatcaatatgaaaataagaattaaaataaataaactaaaactatttaatttttatttaaaaactccgtcgggccaactccgtctcagccaaggttaagagccatatattttttcttaattgataaaacctatgtaagatattttgtatattcgaaagctcttgtgtttagaagatatttttaagctaatgctaattgtaagcaattaaacaactcacaaaaaaataatcgcttgaaaaccgcaaaagtcagaatttttattgttttttttgcaaattttttttctgtgtgaaattcctaggctaaaaa

SEQ ID NO: 18493 - DNA, 2238 bp, Heterodera glycines
ttttgcggcccaagccaaaatcggacatttgcggcccgacatttgcggcttcacccaaattcatcattatttttcactatttattgtacatcaattaaaacacaaattttttttcccaatgatttgctcaatgcttaacgagcttacagatcacccatttatggtgggtgcccttctgcaaggcgatactttaatgtgtttaaattacaatgcaatgttctaatgcgttctttcgtatttttccacacttttaatgctctaattaacctaaattaatttatttatttcaaagtgcagtgctgcaacatgtattggtaaagaaaaaaaaaattaattgtgacgagatgtgttaactcttttaggtggccacataaataagtttaagcattgtgatgcccttgaacctagagcaagccattggaaaataaaaataattatatgtgatttatgattttcaatatggttatcgttgatgaatttgggtgaagccgcaaatgtcgggccgcaaatgtccgattttggcttgggccgcaaaattcgacaaaaaattgggccgcaaatgtccgaaaatggcccttaagaaatgggccgcaaatgtccgggacgcaaatgtccgatttggctggggccgcaaatgtccgagccgcaaatgtccgggacgctaatgtctggacacctgccatttttggcactttccaaaacatcggcactcactcaccttcatgttgtgcgcgtcgaacacgcgcaacggctgccatccctggcatgtccacagtttcatggtgttgtcataggagccggtgaccaggaactcgccggacgggtccatccgaacgcgggacaccaaattctgatgggccggcattgtgtacagctgacggcgcattcgaacatcccaaacctttttttggggaaaatgcaataaatccaacataaatttgatttatttttcgtatttctaacaaacaaacaaaaaaaaacagtttaagatttaaattaacaaaattttaccgaaaaccaatttggttagaattttttcaaaattttttccaaatatactttttaggggtgaagagcgatcaaaaaatttcttccacttctctattccgaatttttttttttggttattggcctactggtcccgtctaaaaaaaaagaagttgtcgttgtcgggaccccctctcgcagtcattagtaattagaaggggagcagctaaccaactttgtttttaaattttcaaaaattgcggaaattttttttcttggttttctttaaaaaaaaattcgaaaattgaagaccaagcagttcacccccccctcccggaaaattttttaaccattttttaaaattttatgatgaattattatttttctcaaaaattaccaacaatttttttctttcttataccttgcacgtgttgtccgcactgccggtgaccatcaggaaaccattctggtgccagcacaccgtgtgaatgcccttctgatggccctccaaaaacatgatgcatcggccggtgcgcaagtcccacacgcggccgtagcagtcgaggcccctggaaaaaaccaggaattatcaacaaccgataaatcaatcactcattcactgatcgattgatcaaaaaaaaaaaaaattgattaatcgactaaaaaaatgcgcaaaactgttttaaaaaataatttttacaaaaaaaaagtaatcaccaaaaatatttgaaaaaaaaacaaaattatttttctggccatcacttttttttaaatgtaaccatgcccgtagctagaatgaaaaaaaaattcggagggggggggaagcgaaaaattttcgtcagaattttctttgctatttttaatagaatttgtttaaaaaattgctttaagttttcaaaaaaaaaaattgatttttgcttatttgagcaataattattcaaatgtgcgggtgattggtttctcacccggtcaacatcagagagccatcggcatggaaatcgagatcaaagacggatttgctgtgcccctcctggtagagcagttcctgcagcgtttccaggtcaaagaggcgccatgaagagtcaaaactgttgaaaatgaatgaacaattagccgagaattggaataaattcgagagttcgagttaagtaaggagagaggcattggattctcgaccaaatatgcggtggtgttaattgagacaattgaaatcatagccaaaaaattttggcaaaatggtaaaaaaaatca

SEQ ID NO: 18494 - DNA, 1239 bp, Heterodera glycines
tttaaattcaaatgcctcaattgtttcttgctataaatactaccaaaaaaaagttaatgaccaaaatatacaggtttactgtccaactccaaatcattttgcggagacacagcacagtggtgcaaacgatggcggaagggatcattgaactgaaggagaccggtgggttagaaccggggagcgagcagggcatccaatacttcctggaccgcttctacctgaacagaatctcgataaggtcgcctcttttgctgtgtctcattgtcagtttaacaaatggaacaaatgcaattttcagaatgctgcagaaccaacacttagtggtacagacggactgaccacgaaaagagtccgatttgaccacccccttcatcccctttgaggtgttcggctccgttctgccggaatcgccgcggcacgtcggctgcatcgatccgtcagtttggctaattaaaccactaattgtttacttttcatgaatcgcaatttcttgcagaatgtgcgatgtctcttccgtggtcaatgatgcatttgaaaatgcgcgtttcctctgcgaccgtttctatttgacttcgcccgctttgaaattggactgtcacaattcgattagcccggacaagaaaatttccattgtgacagtcccttctcatctgtaccacatcatgtttgagctcgtaagcgatggtctgcattctgtgccaataatataccaaaaacacattttaaaaattcagttcaaaaattcaatgcgcgcgacggtggaaaacattggcacggacgaggatttgcccgatttgcacgtccgagtggtccgcggttacgaagacctgtccattaaggtgatgaaggggcgggggagaagttggcacaagaataaaagttaatttgtccagtcatggatggacatggtggaaatgtgttttctactaaatcgtaaaaaataaaaaataatttttcggttgccacaccttttcttgtttttcttttttttgccacttttccactaatctcattcatatttcgtgcacagatcagcgatcgcggcggtggagtcccacggaaaatattgagcaaattgttcaactacatgttcagcactgcaccgcctccgccccaggacggcactcaaacgccgttggtgagtaaaggagggaaacagcatatattagtcgatgttttctgttggttcaaaattttaaaaattaataatttattcaaatgttgtccaattccattctt

SEQ ID NO: 18495 - DNA, 1459 bp, Heterodera glycines
  unsure (1)..(1459): unsure at all n locations
atcacaaacatgtcaaagtgaatacatacaaaacaaggcaatggtttagagaatgcaataaacaattaacaataataaatgatttgagtcagaacatctgcaaagctgcttgtaaggtaaatgagatcggacagagacgaagtcgcggtcaactaatgatcatctggttaatttgcttgtaatttgtcaaaagtgatcagttttggtcgagacttcgtccggattttgggatatttcgtccgtcagtcagtcattcggtgtcccttcagagcgccttaaggcgatatttggaagccaaacgcgagacggactcccttctgttcttcaacgtcactttcttcacaattaccaaagctggaaaaatggaaccatttgcaaacaaaataaatgtacaatttggcaaccgatggtaattccgttgccaatcgcaatcagcgagaagagcagtgcgaggacgagcacctgccaatcgcgggagcagttcaagcggaagtacaggtcgaagagcacaaaggcacagtaggcttggagaaactgcaaaaagcaaaccgaaaaaatagaaaattcaatccaaaaattcgaataaatggaaattaattggtaaaagcgaacgggttttagagcaaattcacttttcaatttatgcttacatatccgatgatcagaaagggcataagaaatgtcttaaagggagagaaaataaggcaaattggaggaaagtgtcaaaagagacccaccaatcctttgaacatccaactgctgaaacctgaaaaggagggaatgtacattagcgatatttaagaccaaaatttttcggtactcaaaaccccgaatttggccccaaaacatggaggtaaattttattttccgcaaatacgaaatttccgggctctaccttcaacggtaatgtccattgagtgacgctgtcccaaggcatctaaaaacggggaaaatagagcaattcagcagaaaatggaggcgaaatgtttacggagtctgcgcaaacagcccgtttggtatttgtacatgaaaaggaaaaaataaagtcgaatttaaatttgtactatgcaatgaatttattcactggattatctgcacactgctcacatagcacacgagcacaacaaaggtcggacgcatgtgctcgtagcagtcgccgccgctccacgtcaaagtgatgcagcacagaacgcaggtgatgtaatggtgcaacaccggaaaggaggggggaattggtcggggaaaatggcggacggaaagaaaggacaacaacaacgacaacaagttcaagcagtacacaatggtccattcattgcaagaaaagttcaatttttgcaataattgaggtgtgaatggaaaaccgattcttatccctacgccattgtgtgcagaatatcccaattaggaaacgcttgtgggggcaataaaataaaanntttataaaaacaacaaaaatgaa

SEQ ID NO: 18496 - DNA, 955 bp, Heterodera glycines
tttttgaattgaatttgccattcttttggctttccaatttgtctcacttttgtggcgtttcgtccctgcaccgcctccgccacttttctcagattggtgcgcgaatggaccacattcagtgccttctcatccaatcgcaacattttgtacacctttggtcaatattctgttgtattttaccaattgttttcctttaattcattacagtacttcattctcatttactcaatgccattaccgtattgctgtttcgtaccgtatgcttttttctccaattttccctattttccccgtttctgctcaccctctttttgtacttcagttcaacataaggcacacagtcgtggaatggatattcgcgaatttgccggtcctccagcagaaatttgccggcccttccgtcgcagggcggcagaaaaaggccaaaattgaactctttgtccaatttttggggcaacgagcgcagaagacggaatttgatgtcccaaacgaactcatccaaagaaacgcacagacatttctgagggggaaaaaggggggggggagagttggggagaaaaggacaaaacggaacgccaaaaaaagggaaaacggacgaaacggaacgccaaaaaaagggggaaaagaaatgaaacgctaaaacaggatattttactagttctacttggtcccttcattctgctgattcggtgcttccacttttgtgggcttccccaacattttgtggattaacagcaataaataatgccttgtccaccaattggcgttttccgagcagtacacccaccaatcagcagatgatggaccatcacaaaaatccggaaaatttggacagaaataattgtgactccaacgaaaaccccgggtgatcgaggcttattcaagtattttgctcgactttgaccggattggggcaattaacgcaatttatacccccaaaaatcccctgaagggg

SEQ ID NO: 18497 - DNA, 2076 bp, Heterodera glycines
  unsure (1)..(2076): unsure at all n locations
attttactagttctacttggtcccttcattctgctgatccttcggtgtccctcaagcagggccccccaacannngggggccttacagcaacaaanaaggcccngnccaccaangggcgnnnnccgagcagnacacccacccaancagcagaagacggaccancacagaaaanccggaaannnggacagaaanaanngngacncgacgaaaaccccggnngancgaggcnnanncaggnannnngcncgaccnngaccggangggggcaaannagcgcaannaaaacgcccaaaagncgccggaggcgganccnaannagcgnngcnnnncgccaaaagcaannggcggcaacnanncggagngaaanngcggaggctccactgaatgagtgcgatttttgggggcccacccaaccccttgggagnttgcagcaaaaagtgcaacgccaattaaagaaaaaaaaaaacgattaatttgcaatttttggaattttccgctttttcttcccatctctcatgccattctttacctgcattttgatgtccggcacaaatatttgtaggttcagcgtgccgtccgcgcgtccttccgccgcgcttcccgacgcgacaattccgccgatggcattgcccaaatgcctttggtcccccaaagtgctcaatgagtcatcagcggtgccggtgtgaagagaaagcgacggggaagcactgccggcggaggaggaggaagaagcggcggggaaatgcattgggagacgaacggacgaagggaaaagcggaggaaaagcggcgagggaaaaacaattaaaaaagggagggaaaatgaacataatttaaaaaatgggataaaataaaatggagtcgaaaatatttattaattttttagagaatgaggagaaacgcattaaatgcaaaagggaaaaggaaatgttgcgaattaattacaattaattaattatttaattacagagagagagagagagagagagagagagagagaaggaatttgaaaatggaaaaataattacgttaaatttatacaaataattggaaactccgagaaataattgttggtcattcgcgacaaaaaaagtttaacttttattgttaaccgattaattattatgcgatcaatgatcagtcagtcaattactcagcgaaaagcgaagtgcaaaggaataaagacccatccgccgattgatctgtccgatttatggatttgatctgtccgaccgacccattatccctcctcccctccgtttgatttgtccgcccccccccccccgccgtccgtccgtcaccccatcgatcatcgccaaatgagcagctaatctaatgctttgtatttcatatatcttttaaatttattttttttcctcagattttattaattattacaaatattatttaactttgtcggtttttaattaaaaggtcaaaaaagtaacggacgcaaaataattagaaaaggaaaaaaagatgaggaaagaggaaaagcaggagaaagagagggaagaagaaaaggaggagagaaagatgaaaaggaggaagaggaaaaggaagaggaaaagcaggagaaagagagggaagaagaaaaggaggagagaaagatgaaaaggaggaagaggaaaaggaagaggaaaagcaggagaaagagagggaagaagaaaaggaggagagaaagatgaaaaggaggaagaggaaaaggaagaggaaaagcaggagaaagagagggaagaagaaaaggaggagagaaagatgaaaaggaggaagaggaaaaggaagaggaaaagcaggagaaagagagggaagaagaaaaggaggagagaaagatgaaaaggaggaagaggaaaaggaagaggaaaagcaggagaaagagagggaagaagaaaaggaggagagaaagatgaaaaggaggaagaggaaaaggaagaggaaaagcaggagaaagagagggaagaagaaaaggaggagagaaagatgaaaaggaggaagaggaaaaggaagaggaaaagcaggagaaagagagggaagaagaaaaggaggagagaaagatgaaaaggaggaagaggaaaag

SEQ ID NO: 18498 - DNA, 1925 bp, Heterodera glycines
catttctccctccttcgaaaaaaagcctcctggcttttgcctcatcacttctgatcagcttcgtgggtccgtcgttctgatcagccttcgggcactcattgatggtcaaacattgatgaacatgatcattcgctgtcgatcagttgaacatctgacaacgctcccatttgcttcattcaatcatgtcattttctcttgacacccatatctcgggttatttcactttaatggcaaatttcgcttttcctttctttataacagtctccggttttaatttcatattcatttcaaaagtaaaattttcgcttacttcttacgttactcttctttttcattttatctttgcattaactttctcaaagtgtgctgctttaccttttcgaaggttttctattccaaaatttattcactttttttgaccctttacttttccttttttaattacatcatcttttcaattttaattaaagtacttcaattacatcttttttctgccttttctctgattttcacacattcattcctttttttggcttctcccaaagcttattttctgcatttccattaaaatttcatcgaattatgcatttaatttattcagtaaaaccaattttggcattaaaaacggttcaacatttaacctggtggcatcacataatacaaacaataacaaaaagtcacacaatggctttatgccttttaattcacaatcatttttggcattaagcccttggcacatagtcattttaagcacacagcgttaccaaccattttttcgcttgacaactaagaacacacagcttcgactagtccatggcttacgctcatttcacccattaattgatctcttttctgggagcacacagcttcgaccagtctcgtggcacacagccacaacggcactcagcccagctaggagcacacagctgcgactagcttttatcttttcatgctcaaaaccgttgcacttatcctttcgaaaacagccaaaatcaaaaattaacatattatcacattaaaacacaccgcattgatcaatcaatgatcacaaaatatgccataaggtttttgtattaccgtactcagccaaattagccacagaaaatttgccaaatttctttcgcaagacaatgcatttttgtttgctcatttgcgttttactgaaaaatagcaatttcccattgctttagtcctttttttttgttgccaaaatgtactttaatttactcttccaatctccaacaaggaattaaaatttaaccagactaaaactgcttttgggtctgcgtccctttttaagtctgcattgttcaaattagcctttaatggcctcagacactttttgtctggaatgctctggaattttaattctctctctttctctctgtttaacaaaaaaaaatttacacaacgggtcgtggcaccaaaaaggtgttgtgtccccgggtttaaggctttcagccatttcaaattaccgttttaggagagaggaatttattataaggaaaagcattgacaaataattatgaattgaaaaccgggaatatgtttggctcaacaacaacctcagagcattttgggtgggtcagtgcaattggttatttgggaaaggattgccaaaggcaaggaacagcacagactgacccaccgcagacatctcgcagcccccgagggggaaattgggaggacttatatattgacacaaaggggatggactttggataggatgaggggtatgacggcaaaaaacataaagggaataagagaaatggatggcatatgcaacagaggtgaatgggatagaaatggcacggtaaatgagagggaaggattggcttgggattggatgaacagacggacaagtttatgacgggattgggtcggggaatagggcaatgtacattatgcacaaaatatgaaaattt

SEQ ID NO: 18499 - DNA, 1453 bp, Heterodera glycines
atttaaaggttcgagattagaaattggtccaaatttatgtccgattcgtgatcaggggaccccgaaaacggatccgagccaaataaaaagggtaaaaaaaacatgccgacttgccggaattttccaacaaaacgccactttcaaaatttgttcctttcctcgtttctcaccgatttcggcggactggcggaggcggctgtctgtggcattttgtcacgaccagccgacatggtcaggccctggtcctcaggaattgtcgggaaatggttggccgtcgtgccatgttgtggagaactgctgtacagtgccgacgcactggtggccgacttgcgcagcagaccgtccgccgaggaaggggcgacggcggcactattactcatcattccgatggcacttttgcccttggtcaactgctgattggtcggggagaacgggtgatcgtgacgatcactgaggagggggacaaacgaatatagtgaagttaacagttaattgaaaaaaacaattggcgccaacatttttgtttttggcattttgttttgaatgggaggagtgtagagagagagagagagcgagagagagagtgaaagatgagacggaaagatataatggtagactggccatatggacggctgtatcctttcctgaatattggttggtgaatgcactgacaaacgaaaattggagtgattttcggagtaagaattttatgtttttaatggaaatggtctgcatttatcattatcagacctgcgcgcaaattttgaacaataatcaccaaatttcgaccatttgtcttcgaaaatgacagaatcaattaaataataaatcccggaaatggcagggatggatcagaatgccggtttctgattaccgactttttcggctcgtaattttttacgaatacaaatgggaacgaaaaccaacaaatttgaagataacattttacgagagaagcacaaaaaatactaatccccacccaattttcgaataagaccagcagggaccgatattctgtccttataagaaatgttctgatttgaattattctaatctaacaaatttaatgtgtccttatttgtaagtttgtacttatttcgcgattcttaaaattactcataaatttttgaatttatggtatattcaaaatttgatctaggatttttaaaaattgattctaaaaatttggtcattttttgacaaaatttcttaagtcattcatttttctcccgacggcgcctcgcctattggcaccgccgaacgccccccccaccacgccgcaaaaaaagagtgtaaaaaaagaatggtacttctaggttttgtcaccccccccctcaaattttttttctaataattttttttagcttaatttttgatgctgatcacgaatatgacatttatttttagcaacagcgtgtttcacgtgagttacgtgaaaatttacgtgaaaaat

SEQ ID NO: 18500 - DNA, 922 bp, Heterodera glycines
atttattttggttaataatttttttttaatttttttattattctcattcccaacgttgccttaggcccaagggtttgggtggtttttttggaaattattaagttttataatttaatttattagtgatttgactttttcatctggttgggaggatattggaaaatccttttgggcgttctgcggcgggaaaactctgtccgttggtattgcacagggtcctttattttaaataaattatttttgaggttttaattctttacaattcttttgggtcaacgaatgtgagtccgggtggtgatttttgcaaggctttgccttggcttgtattctggctttgagacttgatttctgaagtttaattaatgtgatatttaatcaaatttttgatcatttttaccttattttgggttttttgcattagtttgttgcatttttaaataatataattagtaaaagcactttaaatataaagctgagttgcatttgatatttaaatataaggattcgtaggcaaatagcaatatagcaattgtgggaaataaaaggccgaggaaacttacgtcagagattttgtaggcccccccccccccccccgctgtgtctgctgaaaactgatcccccctgtgacatatttgaatagtgacagattgccaaatgttctaaattgggaacaatcggccagtcagacacaacagagtcagttaatctgatcacgtttagtctgtgtgctctgatcagtcacttacaattagcaaccgagagcattgatcagacaaaacactgatcagtcccccacctctgtgttagttgttgccaaaaattgcaacaacaaaatgaaaaattttcaaatgcagattcggggggggggggggggggaaggaagcatttggcgggagctttttttgtccaaataaaatgcaga

SEQ ID NO: 18501 - DNA, 2173 bp, Heterodera glycines
aaaatagtctcatcttttgaaaaagtgcaaaaaatgggcataatctttgaaaccttttgatgttttgggccgttcttttttttaattctcagaaaaatatttattaaattttttattttctgacgattaaaaaaagaaaataaattatttatctattaaggtatttaatttaatgaatgacaatgaactaaaaaaatattaaaaatgcagcaaaaactcaccatgcaaatgtacaaatattcctgaaaaatggcaaaaaataaattcgtggcaattttggcatgattacaaaacactcacaaaagtgatgatgtacccgtagtaagtgacaatgtatgggcaatccttgcacttggaaatcacctccaaatccatgaaaatccgctttgtctccgtcacattgtcagtgcgcttcatttgctaagaaaatattgtaaatggaggacaaccctaggatttttaaaattagttttacgggatttttaatatttaataaaattgataaagcattttaattgctcaaaaattgatccctaaatttgttaattgtaaaaatgcttttctttaacgcgtaacccaaaaatttgagaaattaagggtgaaaaacttttgtggtaaattgtacaaatctcctctcgcaaaaacgagccaaacaaagcagggaattaactgtttattcatgaaattgattctttttcaaatttgccacaaatccttaaaagttccaaattttgcaaaatgtgtccagacatttgcgcctatgtccaaaattgggttcaaacatacattttcaatcttagaggtcttaaacagcattaaatttaagaaaacttgttctttttggtttattaggaacaataattaaatgttgtttgaaaaattaattgttttttcaaaaagttgctgaggatcaaagtatcccatacaatcactttcaatcgcttatttaaagctgtttaagccctccgggattgaaaaaatgtaagtttgaaccctattttggacaaagacgcaaatgtccggggcgcaaatgttgggtaacggtgcaaaaacttgctgaaaatttgttttgttctcatggacaagcccgtagcaagaaaataatttgggaaggcggaatccgaagaagcttttttctgctcttcaggtcaaaaattcttttactccattttgagtgccttttttagccatttttcaccaaaaatgcccattttttttggaatgaccaaaattttttttggaaatttcaatcacacaccttcactgcaatgggtcgacttctgaaccgatatttgcacacacttccgctggcaccggtgcccagctgaccgccctcaacaaaacaaaaaaaactgttcaaagtgccaacatcagtcatcttttgtttgcaaattttctgtttcggcaggcaattagaaagagcggaacagggccggtttctgccagtatttatcggactactgaacccagtattttagagaaatgcttgcgaattaggaatccggaaaaatgatggtttgtaatctgtaatctggtccggctttgtgtccgaattctaatcctgaatttttcaaaattcaggtctcacttttttgttttctttttttcaaaaaatccgtatattttttgcaacttttgccactaacgcgcaatgtaaatgccgattttcattggtttttttaaattttcgtctccataaattcgtagaatttgtggccatgtgttcacctgctggtccatccgttcaaggtctttgggctgcacattgaacacttggccaccgatgctgagctggcccgacttggcctcgatttgtttgaatcgatcggtcagcttcaataaattgatattgtgtaaatttagacaaaaatttcccatttttaatttaaattaattgtgttttccactaattgtcaaatgggcccagggttataactcctttcatagttgtcctaactaatgaatttgatatcattcaacagcatgggttcggatccgctcgacagatggaaaattatttctagtttttattcaaagcattattgcatctagcatctttttcttgagtcattttatttcgatttttatggcactttcattaattaagacaattatgagaggaattataccccataaccgttgagctgtagccattttttccattccgtggggg

SEQ ID NO: 18502 - DNA, 2444 bp, Heterodera glycines
  unsure (1)..(2444): unsure at all n locations
ccacacctccttgaaattgttgatccattccttctcccttgccaacaacgcaatcgcttgggttggccatcttttctcggagaatgcaaccatttggacaatgcttggccagcagaaattgttgaatttggcccatcaaaatcatcaccaaacgcagcgggcgacaaatcaaaggaattgattgaattcaattggttgagatcagtgagaattgtcggcgaagtgcgacgaagcaaatggtccaaatcatcaccatcgttaaagcccaagtggcgaatgtttgtcgaaaaaattggccaaatttcacgaccaaaaatgtcccaaatccgctggccatccatgatgagtgaagaaggaagccacaattttaaattggtgcctcttttgtcgaaaatttggtgatttgaacgaagaaaagcgatgacggagtgatcaatgtacctaaaaatgggatgaatgcttttattgccataaatctctgattccgaattactcaatctgaaggcgcttaaaacggattttgctgggcaacggacggtcgggcaatggaaattccacaaatttgtaatcgattcgtacagaatagtttcggttctggtcctttgtccttgcgaatttcgatcgttctccaaattgtcaattcgcttttgccatcgaaatgtttgtccaccaacgcattgaaacgtggcgaaagaagtgccaatttgaggccgagttgagcatggtcaaaggatgggaaaatgtccatccaaacgtcgttgcaaatccaactgaaatgggaaaacagtttagttaaataaacgacgaatttgtgacttttaatttaattaccgtcgtttcatttttgtggcaattagcacaattttggccgagttccgaatgatgtcacacaacaaagagcagaataattaattgcgttagaaatttttatttttttcaaatgcgagacaaagcgaaaaaacaaacatttttatagacatgaaaagggattgatgaatgtttttgtatctttttgtttatgtgtcatgattagggaacggattttggctctattgcagtttatgagtccaatcgacttttatgagtccaatcaattgacaatcccgggtttttatacaataactttgttcatgttcgaacaaaccctatctttttggtatcattcgaaagtataaaacgtggcgaaagaagtgccaatttgaggccgagttgagaatggtcaaaactggggaaaatgtccatccaaacgtcgttgcaaatccaactgaaattatggaaaaacagtttagctaaataaatgactaatttgtttgacttttaaaaaatgccttaccgtcggttcatttttggcagcaattagcacaattttgtccgagttccgaatgatgtcacacaaatagcagaagaattggtaatactgtcgatggtaccccccttttttgaaatttttttttgttaacaaaagacatgaaagcatgtttcctagggttttcggggcagctaatcagaatctggcatttgtttcgaccaatttcgaaccacggacctgaattcgaacaaaagttcgaaaattcaaattttttttcgctataacttttttctttggcatccaaatccattagcctacaaaatttcaaaaagtttcgttaagtttcaagaaagttatgagctaaaatgttgtaaaaaacttgggtttttgagcttctcaagttataacttttttgaaacttaacgaaactttttgaaattttataggctaataaaaaacggtttggcctttttatgtcaaaatgtttccgcgccttccgtttgtatcaatgatttttcgcctcccattggccattggcaacaatttaagacgaacaaaattcaaaaattgttggataaaatgtgattttcgttagaatttttggttttccgcttttctcattatataaaaataaagtttccaaaatttggaggaattacagaaaaagttggtcgaaatggatcatcagcagaaagaacaacagaaaagcattgatcagatggaaaaggtgggaaaatgtgaaaaaaggaaaatgaagcaaattgatcagcacattttgaatttgattttcttttttgctaaaatgccgtaaaagatgctacagacgaacgctgatgccgaaaaggagaatgatgacaacatgaaaaataagaaaagcttgagaaaaatgtcatggcacaaattgatgtgaaagtgcagacgaaggaagttactgtncaatagttaagggaaatgagcaatggttaattactgtacctaccgtaacattattatttatattactgtncaatattaatangatttgttccnatttnnagtatttactgananggcantntgattnngatcgtgaattggaggggacacaaaacaccaaagcagcaggggagaagggacaaaggcgagtgtaattaca

SEQ ID NO: 18503 - DNA, 2580 bp, Heterodera glycines
  unsure (1)..(2580): unsure at all n locations
cgacgggatgcgtccttaaaatccttggaattcccggactggccccggnatcgctcaattttgcttttaattaaaaataaacaaataaaaaaataattttatttatttggcgttatgttgatcaaaataaaaaaaaatttccaaaaacaaaatgtaagttatatgtagggcgaggattcttagtttttaaactattttttctgcggcttagttacgacgagaaatgcacgaaaaacacatttttagctcggaaattctttgttttaacgccactattcatcactaggaatcattattttggagcttcgccactaaaaaaaattattttgaagttggccactaaaatacttttttgccactattttggcgtttcgtcattatttttgccactattttggcattttttggaaaatttcccaaaaaatgcaataaaaacgaaaaatacaccccaagaatcgacctaaaaaattcaaaaaatacacccctaagaatctacctaaaaattttcaaaaatacacccctaagaattggaaaattttcacaaaaattcttcccccaaattttttttttcttgttcaatatttgctaagaaaatattttgtaactgcaatcagtgaaaaagttgtttgccttaatcaattgttttgcgttttgatcgtttaaactaaaactggcttagagcaactcaattattttatggtcaatgtagctgaaaaggggaattgcttttattatctaataaaaatgtttctcaatttgaattacaaaattcgtagtatcttaaatcaaacgtcgccacaaatcaaactgaaatgcatgcgaaaagataaataggcaaatgaaaaatttgtaattttttaaattcctcgccctctgttcatttttgctgcaactttgccgttttccaattgattgatgtcacaaatgaattaataattgattgatgtcacaaatgaattaataattgattgatgtcacaaatgaattaataattgattgatgtcacaaatgaattaataattgccctgcaaaatccttttctaaacaataatacaaatcaccgtctgttttttgcacaaaaaatgtgatgaatttatttctatttcaaaattgtttttgcgttctttttgctctctcatttttcccaactctctctttttaagttacataacaacagagttttgccttgccttttgtgacacaattgaaaaatcgtttttccacttaagcttttttctttggcatccaaatccaacaatcttggtatcattcgaaagctcttaacatgctttattagccttatcaaaaacgaaaagtttttcaagcctggaaaaaattttattaagaaaaaacttcaaaaattttgacttttcgcaattttcatgcataacttttttgataattgtctaatcgcaaagcaatagcttagaaaaagcttctaaattgattagctttcgaacgacaccaacaatgttggatttggtttacaaagaaaaaagttatagccaaaaacatgctggcgccgaaacgggagcgccgaaacgcagtggacccgatggcaaaagacaaacaattggtttttacaatggcacttttttcgagtgagcgcatttgtcactcaaaacaagtttttttcgaatgtgaaaattttaaaattgtttaatgtattcgcgttttcgtattactgggcatgaaatcatttttcaaatgaacttagacgacaaaacactaactgacaggaaaaacttcatgcgcgacgttacatcagaaattttcagcaaaaatccaaacaaaattggtcttcaatgccattttgaggcaaaagtatgttttatataattggaacgaaagaatcaacaaaagcatttgtgacagggaataaaagcatcaaattgagatctgtcgtttctcatcatttcttaaaagcaattaatctccgttgctttgatccgcttcttcttcctcttccgctggtggtgacaatggcctaaaattaattaagtttttttatttttcgacaaatcaaaaattgctgtttttgctgctcacccaatggattgactgaaactccacagatcaaatcggatatggttcaaattggcattggcaccccaactaccgtccactatccgtgttttatacaaaaaggcctcctttctgctcacccaatgtcatcgtaaagacggaagaacactttgttcaaattggcatccgaattttcgtccctcttctgctgctgtttctgaaccgccgccgtctccccaataattgggcatctctccaacagccaattgaattcaccagtgccattttcatccttcgtcagtgtcagcttctcattggtccgttcgttcaccaattcaaatggttcaattggcattggttccacatgaataaaaagttgaatatggtaactgacagagcgaatgacaatacgaattttgtagccgaccgaagcagtggcacggagaaatgtctaaacaaaattagtaaataaaaataataataataaaagaaaatatgacagatcacctctctgaaattgttgatcgatcggatgacacattcggaatttgaaaa

SEQ ID NO: 18504 - DNA, 1870 bp, Heterodera glycines
  unsure (1)..(1870): unsure at all n locations
aggtcggcaaactcgcgggccagcttcgctgcgcgctgctccgtgaccagccgctgcagctcaacacagacgccgtgcagcgcgtccaattgttcccgggccgggcccaggtccgcgtcgattcgtgttcaccagctggaactgctcctccagcgtgacttggcccaggttgcgcaggtcctcctccacgccgtccaggtgttcaacgagttcggccatgccctccttgaggtcctcggccaacggcagcgccttctccagcacggtgatgcggctcgcagcttcgtccgccagccgggtggtagcgctggcgcaaattgtccgtccggaattgtagcgacagcgcctcggcaccgctcgtgtgggcacacaactcttgactgatctcgaccacttgagtgaccagctggccttgatcagcaatggaggcaaccagagtctggaaaatggggaaagcatggcattggttgatagtcgatcaaagcaatcaatggcattgactggattggtggtccaaaaataatcaaaggcatttattgattgatcgattgaaaattgattttttggtgactaataaactttttataagatttattaattctttttgatcagagatctaaattcctacagttcactaagttgatcaaaagcgattgaatcatatattaaagtgatcaataaatcacgccttttacaaatcatttctgctgatcagtcagtccataaatatttattttttgtccgcttttcccttaccgccaattcgtcactttgtctgcccaattcttcgggctctgttgacgggtcgtcaaatttgtgcatttcatcttccacctccttcagccaattcaacagctgttccgtgctttgtaaaaattgggaaatgtcttccgccaacgttctgaaagatcagcaaagtgtatagattaatcagtgatcgaaaatggaaacaaattcgggtaatccatgatcattatcagaatggattgatcaaacaaatttcccaaaaaatgatacgtcaaggaaaactctgagataagctcaatataaaatattattttcgtaatttacagtattccagtgattaatttacagattccttttattattacagatcatgttggtttaggacatctcatctcatgatcaaacacaaaacgatgcacaaggaaaatactgagatacgcacgataccatattcttttcgtaatttacagtacccaatctggttaatttacagtttccctttcttaattacagtattcaatcatattaatttagagattatctcatcttgattgattttagacagaatcccatgattaaaaataaaataatgctctacagttttctgcataaacccaccccatcagttggccgatttggccaagccgtgtgcccagcgtgtcgtagcgggtgatcagctggtgcatgtcggcgtccaactcttggccctcctccaggctgaccatttgggccaattcggtgcccaattcgaccagccgatcaaagtcggcccgttgctgatccgtggcctgctgcagttggtccaacaattgcgtttgctcctccatcttttgcgcatcagttggaatgtgttcaaatgcgtgcagttggcgttccgactcgtccaaaaagttggccaattgtcgcttctgtttagcccattcctgggacaaaatgagcgcgtcctccaactgttgatggcgagcattgaccgagtcgagcaaatccgaatatctgaaatttttatgcttttatattccatgaaatataaaaaaataatttaatttttcaaatttcaaaaattcccttttctagcaacaaaaaagggatttttttaataaaaaaantattattgaaaggaaaa

SEQ ID NO: 18505 - DNA, 908 bp, Heterodera glycines
tgtttggatggatataagggacattttgacattaccaaattcgccccatcctctttctgacaatcattggcatacccaggactggcgtctgtattccatggatgaacggaattccgacttccaagtgccgtattagagtcggaattcccagggacggtcccaggatttcggcttgggggggggggtacctccccccccgggggggggtgaccttttttttttacttttcatcatcacttttttacggcgctttttccaaaaaaacctttgggagaatggggacatgtaatgatataattttataagtgataatcgtttaattaaaaatggaccattttctgggactaaaccgtgcggtactcactcagtcggacctcaggcgcaacttacagtagtatttttattatggaatttggaagccgcgaccaagtcatattttactgatcggatgaacaattttcttcgcaagaagcgcaaaattttgtacgacgattccatccaaaaacaaaatttaattttatgcgggtatcaaaaatggtgggcgttaaaaaaagttttcgattggaaagcccataaaattttgcgcataatttaatggcctcgctttggtccgatttgtcatcattttatcgccactttttattcctgacatatatacttggccataaatgtgccatatatggtacatgaatttcccgaattgatcgatttccctatccgataaccgagattcaccggtcccgactctgtttaaaattccaaaatgtaaaatattcccaccaatttgtccgtgctgatcccggggccggctcctttgatcagctccttacattcccgttctgtactctctttgcggtccgccagctcggacatttcttcgtttttcagcatcttaaaatttaaagaaa

SEQ ID NO: 18506 - DNA, 1923 bp, Heterodera glycines
  unsure (1)..(1923): unsure at all n locations
taaattagcaattttttgatacgatttgcaaaaaaccattcaagggtggncatttttttgacaaaatctattaacacctttcattaaaaattacatgttggccaaatttactaacaattcttgcataccaatttcggtttctttttttttgcgattatttgtcggcacatacatttttcaaaaaaataaaatgccctcatttttaaagggcgaaactttgccactgttttcactgtaccgtcagcgccgatgcgcgttgtatgatcagctgaaaaaattgaaaaagtcgcagaaattgtcgcgagctcaacgccggaaactgcgccgggcaaagaaggaactggggacgaatagccaactgttacaacaaataaaaatggtagcctccccccgaaacccataaaaagaaaattttcagtaaattttttgaaattttatgcaattttcttaacaaaattgcatgaaaatacgcaaaaaaattttcccagcggcgcctatcggcaccgccggacctccattttagtatatttttgaaaaattgagaccaaaattgcaaaaatagtaattttttggcaaaaaacggcgaaaattttctaaaatacacccagtaattagggatttcaaaaacgaaaaatacgcccctaaaaacgaattttaacttcacccccacccccgccccccgaagccaagggtgttactacgacctagcacttgaatcgcaaaattgtttaaatttttagacaaaaaaggatgtgccgaaggcggtggtgactcatcagccgcagctgcagccgaatcaacaaaccaaaccgctttatggtgaaacgttcatccgggagtttggccaaatttttgtgtgcccccgggagttggttcagctgcacgagcttggcaaatccgtgtttgaccgtgttgcggtcgggctgtacgtcaagcagcaccacggcccatgggttgagcagatcacacgcgtgtcgttgggtgccaagccatacacaatgtacggccaggagttgaccacggtgctccattttgagcatgcccaccgctgcaccatcaaagcgctgcatttgttcagagcgcaaaacaaaatggactttgtcaagcggcatttgctcaacaacaacgatgacaacgacatcaacgagcagcagaggcagaataatgaatcggtccgtcaaatgccaatttcatttttatttttttaagaataggggggtcccggagtgccgattaagtgaatctttgagaatttataaagtttttatcatgaaatttaagaataatagcttgaaatttttttgaaattttattgtaaaaaaaattttgacgggggaaacgatgcggggcgggttcaaaatggattcgtccctgggtgcccgattagcaccgtcctgaaatatttagaaattcaatttgttgccagaatatgcccacaaaatttgccactttcatttgggatcggaattcatttacatttctgctgtttaaatccgttttttttgtctagacagacacaaaaatgccaatttttttattcagaatgtgcctacgcaaatcaaatttgatccaccaactgttgattatgtcaggcgaaagagtcagcaattgcgcgacacactcaaaaagagaagaacccgattggcaaatggtcctccgaaaacttgatgataataagagaatcaatcatcctctatccttttattgtgttatcattttcaatttattaatttgttgattttattttattttgttttgttgtcccatttcgtgtggaatgcataaaagtgcctaaaatgtcacacattggcgcaaaaacgtaaaaaagtcataaaagtcccaaatctcaataatttattttgaaaaaattgtaaaatcaattttttttattgtggaaatcccaaagataattccataaattgg

SEQ ID NO: 18507 - DNA, 2062 bp, Heterodera glycines
  unsure (1)..(2062): unsure at all n locations
tgataaagtgatgtaattgcagaagacggctaggaanagagttaataattaaaaattttaattaaattggataaaaaaactcctgctaaggctgacctatcaatttaaacaatcaaaatntataaatccgtccantatatcattgtttaaaaaatagaaagatttttattggcctcagaaagaatcaaattggtggaaatctttcttaaaaactaattaattatacaaacaaatttcccacaattaccaatggcggtgatcagaagcaacgcattaagcaacagcagattcggttggaaagatggtgaggacgatgaacactgctgttattttgttttggcaatccaaataagtggcaaaggtccgcagggatttccgctgccattgggttacgagggggcaggaaaattattacggtattacagtagaaataatataaatataaataaatattcgacccggtaacaataatgtccaaaagagaatgaaaagggcagcaaataggacagaaaattaggaaaataaaattggattaagaggggggcatgaaatgtttaccgtagttacagtgggtcaaggcaactcgtacaaaaggcaactcttaatttaaaattaaagcctaagcttaagcctaggcctaagcccaaaagcctaagtagtcctagcctaaagcttacctaagcaactgtacgagttgccttttgtacgacttgtcatgaaaccatttacaggaggaaataattgtacagaactcactcactttccggcataattttacggttggtcatgtttttgtgcttttcgccaagaaaacaaaagcaactcgcttcatccggcagttcctttacagaccccttcatattctcggtacagtaatcacgtctatttcttatgtctgtatcatttgcgcagccaaacccatacaaaattggcttgcccactaattctaaaaattgtttgttttcgagatcatagaaaattatttattttttttgaaatatttgaaaaaaaaaactaagttttcttacattcactctcagtctaagcttacttatatcacaaatcgccgaaaaacaacgggtgttgtcttcattgcatatatgatcaagaggttttgttcattattgtatcctcttccaccacggcactggagtgctccttgattaataatttaagtaattaaataatattaatattaatttacataagtaaataaattatttatttatttatttatttataacaataaaaaccattgctgtttttaaacaacataaaatagcagaacaaacaccaataatgtcagcaagctgaaggccggtgaattgttgttcatttttgttggtccaattaaataaaatgctcttttaaacaaaattatatataatatttaagaatttaaaatatattccttacataaatttttgatttaaatcaaagttattcttttcgtgagcctcccccacccccccccaattttgccgtcctcactttgcccccttagagttggccgtgccggcggcggttattcctccggcttttaccgtttggaattcgtcttcgactgcgacgtgtcctgctttgtccaaattcacttctgtgcccgggaacaaattgacgaacagcagccacaacttctccagtaataaaaataataattcaaaggctttatcccttttctctctcccttttactacctttgcctttcggcgatatttcgttactttttttaatcttttggcaaaaccgttgatctgaccctggtccacccattcggagtgttcttcctaatttgtgaattaaaggctttacctcccctcgtcaaactttcaaaatttccctttttttcctggtcaaaatggtaactccccttccctcaaaggattgtctctcgtcagccccaatttgaacactccgaacgtttccatttccccgtgggcgccaaccaacacttcagccatttcaccttcaaaccgcaccgatacgacatgaaaatgatgcattgggacggcggcccagttttcccggtggtcatcgaaattcgatcggtgtccgaccaatt

SEQ ID NO: 18508 - DNA, 1635 bp, Heterodera glycines
agttaaacccctcatagggcatatttttagctttaaattatttaccaaagcactgaaatttaaaaaagattttcaggaaatttttgttcggctctgtgagtccggcaaatgttctcccaaacattacggtatctgctgaacgacacggaatgcaagtcagaaatgcgttgggtgaaaatttaattgtgccgcacaccgcgcaaatgtaccaacgccaattggcacaaagttggggccaaaggccaagcccagcggcaacagcatcagacaatggccaagtggacagaagcggagcaacaagccaactgcagaggatggcaagttttcatttctggtaaaagtcaaattaataaaataactcaaaagccccgccccaatgaactcggtcccaattcatacaaaattagagaccggccaaatgatcgatccatatttttcaataaaaaacgaaatcgatgcatatcaaaaaataatgaaaaccaagaaaatttatctatcgataaacgatatttatcgtttttgtgcctctttttccaatactaaaaatcgatttataaataagaaaatcctataaattcgaacctgagaattctatgtcggaaccgccaaacacctaattccttaatattcccaaacaattacggacgatgtagaaatttaaaaaattgtatctacgtaaatgattaaaacaaaaatttaataattaaattttcggaattgatctctttaaaaataagcgggtaccaacattttcaatgttactggcaaactggtaattttctaagttctaaaatttatagaaatttttattattcaaattcgttaaaattgtttattacctattttttaaaatccaaaagatccagtgccaaaaaaattaaagaattttctatgttttcaactaattgacaaaatcttttaatttttttttgtccgtgggtgccgataggctcagccgagaaaaaatttgaaattttgagtgaattttgttaacaaattttgtccaaaaaatgaccaatcattggttaattgtgggtttatggatgtttaaaattaaagaaaaataatttttaaagatagacaaagtttcttattaattaaattcaattaaaataatttaacgagaatatgaacaatctcctttctcaattgggaattgaatacccaagcgacaaatttttatccatttagcccaaatctgatttagtgatcccgaatgcactgaaatttatgaaaaatataataatagaatacatttttgatcgaataaaatgtaaaaatatttgaagcaattttgcaaaatgttcttatttttgaccctaaaatcttattttttggcctttggttttattttgaaaattttgagatagaaaccctggatttagacaaaaacacccataaaaattgcctctggcataatttataacccttaaatttggtcatttttagacaatatctatgcaattataccaaaaaagaattgaatcgaggcgatacatcgaataaaggaatgtggagccaaacacatcattcaaaaaaaaatttttgtgagattttttggagctaattaaaaacaaacccccgcccccgtccccgggggcgagaaatttctcacccccgcccccgcgactctga

SEQ ID NO: 18509 - DNA, 2026 bp, Heterodera glycines
  unsure (1)..(2026): unsure at all n locations
ttagtccaatgttaattatatatgaatttagcacgacgttcaaaaattctgctatatcgnaccgnttcatatgctccctttgcggccaaccgtgccattattattattatggtgttacatgttgcgaaggtattttggcatttgttcaacaatttttctaattattaaatttgcgaacaaatgacatgtttcaaattcaaaaaaaaaattaattttaataatatattaaaacattcataacaatataatagatttttaaaattcaaataaagcctaggagtttatactaaaaaattcaaaattgaattttttctagaaattcaaaagctttatcatgactttttttaacctaaaattcctatttgaactccacccttccccgcacgccgctcccccaccccaggttgcaaaaattttttccgccgctcaatttcgatgatgaaggaatacaagtgcaataatggcggacagtgcaacgtcgaaaaaggcaaaaaaaattatagaaaatcaaaaaataattgtttccttcaataatttctttaaataatgaaactgtaaaaatatttaaaatagtttaatgctgattagatatggcaaagtttcagcggtgccgattgaacaaatgcttaacggtcggaatgaacccgcgaggaattggcataaaaaagttcaatgacgaacaaattctagcatatgtacaccgaattaaacagcaaatggcaccgacaccatcctcatcttcggcagaaattggcacgaatggatattgcgacccgaggcgaccgtacatatgcgtcccggacatgtgcggcccacttttgaatcctgcgttgtgacggcaaaagcagcacatcatgttagcgatgctattcctttttcagtgatgtgtagtgtccaaatttgtgccggatttcacggtggatagtttccaacgagcagctgcttgctgactgggatcgatctcgatcgatcacattgacgattttcttagccaaatttcgccgcgagccccgctccaatgtatccacgttttttacgccgtatggaagctgaaaacagaattttgttaacttaaaaagatgttaagggatgacattataattcattcattcacgcaagcaaaaatactctttttcgatccaatagaacataatccaatcgcaggaaaatttccctttctcgtttgggttcaaatatgcttttgaaagtgaattgcgaatcgatcaaggctgggatcgaaaattaatataaatttaacaattctgttagattttttcaatcgaaaacaaaaacccaaacctttacttttgtaattcttaatgggcatcacagcagctggaatactcatctccgagtcagccgccgttatgcaatattttgtcaaaatagcatgttgtagtccgtgtaacatttgtcacaccggtgccagacgcaacctgcaagtttgtacagtagctggccaatgcttaattcagcaaaaatggtttgtggcggcgttgtcagtaccactgtcgaattgacgccgtttttagggcatcactcttgtgtcagatagccttccggtgtcagatacatcttttgcccgtagttgtcagggcgaaaacgtgatagagactgatctttggactccgcaatattggtggggcaggggtaaaaacgcgtctgtccaataatgcaatgctgatcatacatccaagatttctggttcgcagctcttctcaaggctgtcattccagtgtttgaagatgtaggaataagaccttcgggaccggtgggaacatccagaatgacgaagcgcgttttgacttaggtgtattggaattaggcaacgtgttcaatgctgcacttcttctttattaatctaataagaggggagaggcataatataatttttanatgaagaaaataaataaatgcgcgaatttatatggngtgaaattacattgnngataatatgatagtgatgaaacttatataaatannatcaaacgtatgaaacaatcttggctagaaagcagctaattgc

SEQ ID NO: 18510 - DNA, 2696 bp, Heterodera glycines
aggataaatgagaagcgatggatttggtggttgggcgactcacctaaagggagggaaccccccccccccccccggactcttctgtatcaaacgaatattacagatgattgaaaaagaatcattcatttctccacggattcattttttcagaattgtcttttaatttaaaaaataattaatttatcactaaatgaaggttgttttttaaggctctgtatttgtctcgccccactacagtttttacgccgtctttgcatactcttttttgcgtagttcaaaatctgaaagtgattttatgtttttttttctggctcacctaataattatcgtttgagccattctaatattgtgattttttttttttttttgcttttctaaattatatattaagtggggctatgtttagacttttgcactgactgtatacatatagataaattgttttttaaatattatgcaatgagaaaaagtgaagagcaaaggtcaaatcacacaataaaaaacgaataattgtcgggttaattcgggaaagaaagtgtacctgggcataaacttataaacccattcggaagttgtggaaaatgaaagaaaaatggaaaaataaaccaaagaattggataataaagggggaacaatgagggaaaagaaatgtgaaggatgcatcaaaaaacccagcagcagaaaaaacgccctctcccatattataatcccgacaaaggaagcacttttatagcgtaatttatgctctgatcgagaacctgacgccataaatataaataatatcttttttatgattatcaacataattttgccgtaatcgaatgtgtggtgttttggccaaatgctaatccccggcttaatttgaagtggtccgccccatttcagcaccaaatttgttggattgtaacttttgctaaagaagagttctgaaaaatgtattttcgaagaataaccgattgtgatatttgatataagattgctttcttttctaaaatcaactaaatcttagatttttactaaaattaccctagaaaaaagcttcactttgtcgggaccaagattttttgggaggggagggcatgaccaaaaagtaacaaaaaaaaagcgaacgaaaggcaaattcaacgaaacttcttagcgaagaaggaatcagaggccgacatccatggacatcatcaccatgaagccgagaatggcaaataacgaggacattttgccattgccgtgtgaatacgcctcggggataatggagtcgaacacaacataaatcatagcaccggctaaagtgagtaaacatttaaagcaaagggcaattctaaggcacaccagcgaaggaaagggcataagggagcacaaattccatcatcagaacgagcgaagcgccgagcaaagcggcgattggttcgaccattccgctcatttggccgtagagaaaggcgcgccattttgagtagccgaacccggccaaaggcaacgaaacggccaaaccctctgggaaattctgcaggcctatgccaaaggctaagttgaacgctttttcaaatgttgccgaaggcgttttcccaacaccgccaaaaccaacaccaacggccaatccctgaaaagtaaaccttaaatgcgcagctcgtcttgaaattgttaaattaatttcaccaccataacctcctccccccaaagccaaaatcctgaacagtcaatgaggatgacggaaaaaccataggtgaacaaagggtgtgccggcaccccccccccccccctcgttcgtcgtaaggagggcggctgtaaaggaggggggggggtagtaacgaagggggaaaaacttaaaatttgaacaatttccttagcgaaatttatagaaaattctaaaacttttcccggcggcgcctatcggcaggaccccgcaccggttccacataatttttgaaaaaggctagccgcaaaaaaaggtgctttgaatagcaaaaaaaagaaggtcgccgctggagaaaattggggggccttcatacgaaaatttggtcctggcacaccccccccccctgcgccaatcgtccgtcgtatgggcctcaccctggcgcatcccctgtccatctatgatggaaactcgtgcgttttaaaaacaccacctcgggaaaattgtgcactgtcactgccattatcagcaggaggatcctccgccaagaaagcaattgcgacgctgagggattcgagccgagttccgctgactgttccgttccgctgggtcctccttcgttttcgttcgcccgcaatggaatttctgctccttccacatcatttcgttcgcccggaagcattctggaacggttgcgcaatccgttagcatcagcggaatgggacaaattctgagccctgaaactcgggcacaattaccatggccagcagcctgatgaaaggttctgattttgagaaaccaattgaatgaccgagtttcaggtggatgagtcactggaaaaagtcgcaacagaatgcgctaagggtgcggcggtgtttgaatttagaagatttccgtctttacgagtccttccctcccctgtaaaactttaaccgttgtgttgtcgcatcatcgtcgatctttgctttctgttccaaatttcgctttttactcctggctttttgttgcgagtcattactttggcattcaccagaaagtgcactaataacagtcaattcggcattaa

SEQ ID NO: 18511 - DNA, 2738 bp, Heterodera glycines
  unsure (1)..(2738): unsure at all n locations
ttgtaattttaaatgaaaattttgtaatttttcaaaatatttgctgaccgtcggttcattttgtggttcaatgagcacaggtctcaccaattttttcaatttaatttgtgtgtcacaaagggcaaaaaaaaactgtgttaacttaaagcatagacaattaggaaaattgagagcgcaaaaagaacacaaaatttagagaaggtacatgaaaagtgaaaaacagtaatttcacattaaaaactgtgctattattagggttgtaaattatatggactaaaaaggcccgaaatatggattaaaaagctcaaaaatggccaaatatggaccaaaatatggactaaaaactccaaaatatatgttttaaacccataaaaattccaaaaaggtgtatatattcaatatttgcttaaataaacttaagaaatataataaacaagcaaaaaaatggatttaaaacataaaaatgcaaaaatgacgaaatatggatttatatgcactaaaaaccttcaccaaatcaaaaaattttaacgtagaaatgctattttgagcccctttcttcatagccagggaacggattttcctttcaattagagcgagtttttagcacatataaaaacatattttggggtttcggcagtttttgtcatatattttgacaattctttgaaaaaatttgatttttttaaacaaaaatgtcttttttggcaccaaaattcttggccaaatgcccaaaaaaattttcaaaattttcaaaattttttatttttttttcattttttgaccattttaatgatcttttcatttttatggcaaaattaaaattttagcgaaaataagcattttgctagcgaaatgggtaaaaatgagacttttatgcaaaattcacgtatttattaagtagtttttttcagtttttggcacatatttttccttttttggtgtttttagcacatattttgggggttttttggcacatataaatccgttgcctgttcatagcatatacgaagaaaaaatatgttaatccatataatttacaaccctagaaatatgtacaaaaagtgttcaaaatatgtacataaatatgtaaaaaaaaatcccgaaatttgtaagaaaaccccaaaatatgtaccaaatatgtaaataaaattgtccaaatggttgcacactccgacaactgatggtcaaccgaagagattgtttgcagtgattatttggatccaccaaaaattgattggatcaacaacttcaaagaggtgtctcgccatttttctcaattgtttttgtttttcccaattttgtttagacatttctccgtgccacctcttcggccagttacactgttcgaattatttttcgtgtgaaaccaacgccaattgcgccatttgaattgatgaacgaagtgacaaatgagaagctgacactgattaagggtggagctttctgtgggaggcctgaaacgcacgaaaaacatgtttttagcttggtatgaagcttctaggaaggatttctatatccatattttcnatatttttccatatttcgcgatttatgtccatatttccatatttttccatattttggcatttggtccatattttatgtccatattttgcgaaaggatggagcttttcgttggctgttgaaacggtgcccaattgttggggagacggcggcggtggttcagaaacagcagaagaaagacgagaaattggaccgtttgaacggagtctactgtctttacgatgccaatttctcgactcccgggcacattgatcagcggaagaaaaagtgatcacttgagaaatcgccgaccattattgatttttgataattgggttgattgatgctaattgtttgctctttgaactcatatcactttagtggtggacttttcaatgttactataactgaatctctagacaatttctattgatactaaagaaatttcccaaccaaaaaaatcaacaatggtttatataattgaaacaaaagaattaacaaaagcatttctgagagaaaataagcacaacaaattgagatagatcatttctcaaatataattaattaattattcattttcgtacacttaatcagacgacatttccgttgcgtttatccgctttatcttcttcttctttttcttctttcgttggtggcgacaatggcctaaaatgaattaaatattttatttttcgataaaattcaaatgctattgctgctgctcacccaatggatttatcgaaactccacagatcaaaagtgacattgttcaaattggcactcggatttacgctgtcttcccatttaattgccgtcgccgtctccccaattgggcaccgtttcaacagccaattatacacatttacgccgaattcgtcgatcttctgtttcagtgtcagcttttcattcgtccgttcattcaccaattcaaatggttcaattggcattgtgtccacccaaaaataaagttgaatatggtaactgacagaagtggtggcacggcgaaatgtctaaacaaaatttgtaaaacaaaaggtttcatggcaactcgtacaaaaaaaggtacttgtgtgttatctgtgggcagattttaaaaatttttatgtttttcgctataacttttttctttggcatccaaatccaagattgttggtatcattcgaaagctcttcatatgctctattagccttacaaaaggaaatgattttctagcctggaaaaaattttattaagaa

SEQ ID NO: 18512 - DNA, 2231 bp, Heterodera glycines
ctaataaaattcgatcatttaatccaaaatgattaattcgtttgaaataattgaagaaaatttgatttgaaaattttcattgctttaatttagctttaacttttggagtttattcaataaaaaacaaagtaaaaatttaattttgtattattttcaattgaaataaattaaaataaatttttttgaatttttaaaatttcccggttggtcccggttcccggtccgaacaaaaatctaggtcccggtcccggcttctcaggtcccggcaagtcccggtcccggcttctcaggtcccggcaagtcccggtcccggttttgcccaaaattcccggtcccgcttcgctctaatttttaggaacatttgaccgtattgacaaaatttcgaaaatctatgattttcaaaatcaatgatagaatcaataatttttgtaaatctgatatcatattcgtgatcaaaggtcccgaaaacccccgggttaatctttttataacataaacgaaaaaaatttttgggtggagccaagattctccagtattaccggcctaagaaacaggaaaagcattgattggacgcgtaaacagaataaaaccctaatttgacaaaagtgctcaattgtaccactgaaggtgaataaataagaatgaaaaaacaatcaatcatttctcgcgtcagaatcaaagcagttggttcagcggagtcatttgcaacggcgttttccctccctcgccgtttttctgtttttggtggcgattatccccgtttctgtcctcctctgccgtcatttctctgccgcacattttttgaaaaatacgcaggaattcgcgccgaaatctgcgcgacattacggtgtaaataatcgggttaagtgttgcgctaatgtattggaggaggccagtgattgggtagagaatggcgcagacgcgggcacagtatcccctggcgtacttaacgacgagtcgttccaaatggtacggtaagtaacagatgaagaagagaatggtaatggtcactaaagggggggggggggaacggacaaacgccggcggggggagacaaacgaacccaacattttgagcacggttttgtgcgcctgctgacttcggactgaccctcgcccggacgaatttcgcgtcaatttccgccgtggcgtcgaattcgccgtatgtttcgaccacacgaaaaaacgccgttcggcccaattttcatcgggcgaaggcggcaaagactcgcgaggggcgccgccaggcgcacccaccgccagcaatcgctgctgctggcggcggttgcctttgccattgccttccgccgctttttcacttcgctttggctgtgccgcggtcagctgatgcgagttggaagtggcctcattaagtgtttgcagaattttgatgtaacagtaaataactgaaaagggacaaaagtcggcggggaagggacagaaaaacgaaataaaacaatggcacaccgaatgccacggggaaaacgaaagtgagcagaagctgtgccttaaataaaggggaaacgaaagtcatggccaaagaatgggctgaacacctcaaaggtcaaatggtcgtcgccgttctgctgtttttcgtcccatccaacaaagtcacaattgccaaaaacgttcgaatgcgtttttcctttatcggaaaagccgccataaatcgtaaaagccaaaaactcaccacaaaaatctctcacaactgttttgaactttaactcagaaagcatagaaactgagaagaaatcactcacttgaaggccaatgtaaagcgaagggaagaaggaaatgagccacagcacagcgatgagccacaacttaaggaaaagtgggcaaaaagaaggaagaacggggacagcagcaccaattaccatggagcggtggtaaaaatacggcctgaggctgaatgggtagcaaatggccactaaacgctcaccggtgagactaattgggggggggggatcagccgcagggggcaaatgagcaactgtacccgacaatggtgagaatggagcagaaagtgaaccaactgatcgaagtgcctgagggggggggggcaaaaggtgggaatcgctttgtgactgtgccaataatactcgtggcttcgcaaaatccactaaatgcggtccatccattcaaatgacgacgccaaaggctgaacaagtcaaaggagatgccgacgaaaatgagaagcaaatcggacacagccaaactggcctaaattgg

SEQ ID NO: 18513 - DNA, 836 bp, Heterodera glycines
gcaggtgagcagcaaacgaatccatcccccgcctttggtcctgcgcgtacgaaaacgattaattaacaaacattgaactaaaaaaacactcaccggtcttttggccacagattccgcaagtaatttggccaaatcagagacatgtttttgggcacagaaaggacgaagtccgtggattagagtgcccgggtcgacgagttccgactgaaagtattcaaatttggccattggcgcgcgtgtctttggtgcgcacctcggccaaaagaagcgttcgattctctccatcgaattcgaacaaatggtcgacctgctggggagaggggctaaagccaagtgaagaaattcaaattgaataccttcccgaaaagggatgagaaagcggcggcagacaattcgccattttggaagggaaaatccacgcgagggaccgacggaggagagacaaagggaagggcggtgatattcatctcggaaggaaaagagatactacggtaatgtacggtgcgaaagggcggcggtagggcaggcaattaattgctaattggaccacccaactcataccgtaagcaaaacaaccgcgcccaaacaaaggataagttggacacggtagtgaagggtaaaaataacattaattacgccttttttactcgccaattacaaatgccatcatattctcattgatatagaaaatgccaaccattttatgtgtggcaaatttccaaaatgttaatcgatcgatttgcagatgatcgatgtgagaaaaaattaaaaataataacaaaatcaaataaaattatttatatttaaagaaaatatacaaaaatagcgaaataaaa

SEQ ID NO: 18514 - DNA, 2699 bp, Heterodera glycines
tttggaaaagcttcaatttgaagtatagccctgctcctttcgtaattttcaattctataatacaaaacgccaaaataaatttgaaattgcatgacaaatttgcataggtatttcctttaaaaatccttatttaaggagtcaaattggcccgcccattccactttattattcttcttattaatttgctataatttctaaaccaaaaattgtcaccttttctgtttgtcctttgttactctaaaactgtgaacttctgaatccgaattcggattctgattgattttcattgactgtgctgaaattgagcactcacatttctggatttctttccctacattttaaaaagaatttcttgatttcagttttttcgataagacacgacatacaaatttaaataatttttattgttttttcatcacaagtatgccatatttgttcagaaaaaattaagcccagtccttccttaatattcatcataacccatccatctaaatggcagaacagcgcgaggaccacatccaacgggccaagctggcggaacaatgcgaacgctacgacgaaatggccaaggagatgaagcaggtgttgtgagcggcgatggatcgaatggatgctttttccggatttccctgttataatttccctccccccatttcaggtggccgaaatgagcgtcgaactcaccgaagaagagcgcactttgctgtccgctgcgtaccgaagggcgatcagcactcgtcgttccgcgtggcgtgtcatcgaatcccatgtgaaaaagtcgaccatcatggacaaacagaagcaaggtgtcaaggtgctgcagaagaaggtggagagcgaggcggaggagaagggccgtgaaattttggtcagtgcgtccgtccgtgcggcgttttcccggaaagagtttaactccaaaaaattttttgaaattttacagactctgttggacaaccagctcatcccaaaggctgccgacccggaggccaaagtgttctacatgcggatgaagggcgacttccaccgctacttggccgagatcaaaccgtcggaagcggatggtaaaagggcttcgaaaatgctaaaattcaacaaattcccccctccccaattttcagatcttcgcaaggcacagaaggcgtaccaggaggcgtacagcattgctcaggaaaaacttcgaccatcgcatcccatccgtcttggtgtggcgctgaacttttccgttttctacgaggaattactgaaatcgacggaggaggctcgccgaatcgcacaaaaggtggttggaaggatttcattgttttagagaggctgctgttcatttcatttttgcgcaggcttacgacgatgcaaatgcggttatattgacggactcgagcggcaacgaaacgctgatggaggcactcgcaatcattgagaagctgcacgacaatctggcggagtggaaccagcgcaaaggtggagctgaatagaacgccgctgctgtgaatggagatgaatcgcgcaattgatatgggtgattaaattccgatggattgactcaattgtacacatatgtatgtcatggtgttgtgtatatgtatatattgctgtattatattgtatatattgtataggctgtataaatgcgtcaatcgacttttaggcgatcaatcaatgaccatcgtcaatttcttagggcataccttattttttcttacttggtcaatgttgtgtatttgggtaatactaaccgatggtaggaatgaaattcttaggccacaaatttttcttcgtcagtgtcaacatttcttggttacgcttttttagtatatcataattagggaacggatttttaggggcgaaaaagtttcaaatataagggtgaaatttattaaaatattgagcaaaatcatcgccctgttttacgtattttttcacagcaaaacgccatttaaaattttagcatttttgcacaattgataagcttgttatttcaacaaatgggtttagaaaaatcgctcagtcggccggattggccgggtgtactacaacaccgacgacgccgacacctgtgcgagttgtcttcctctgtcgtccacccattccgaccgccggtcattcagaacagcgacgacgactatgagagggaggaacggcagtctacgggccggacgtctttttgaatttgaacgggtgggtgtgggtgatttgattggacgaatggaggaaacccggaacataaaatgcgggcccgaaaaagggggcgggtgtttaaagttcgtcaattttgtccaaaaaaaatttgcgatattgagcaacattttgttttttttaaattgttagtaaaaaagagaaaattccgtcaatttttttttttgtcttgtttgatactcttttttattttaatgctaaaatattagaaaaaaattttctattttttgttgattttttcaaaaaattagcaaattttcttaaaaatcagcaaatcatccatcatctcaaaaaagcatcattgattccatgaaatcagcaaaaagatgataaaattgcagctcatgattgttcagggaagagaaaaatgtcaggattcgggtgacccggaacagcactgttgcagctaagctctctttcttccgcttatttccttgatttttcagctattttttttttgaaaaatttgtaaaaaaaatttattatttagaaaaaatcgctgaata

SEQ ID NO: 18515 - DNA, 2787 bp, Heterodera glycines
tatttgctttaaataatcagaagaaatgggactctaccttttgggaagccagcaccaaagtaaggcacactaactacttgaccaccggatcgcttgcctccttttaatttccttttcactttccttcttttttggcataaaatatttataattttatgtttaggtaacttattaatttgtctccattttttaaatgattttgcacaaaaaaggtcaaacaatagatttttgggctaaattaggaagaaataattattatttttaatatttaaaataaattattttaataaacttaattaattttaaaaaaataaaatcattcaaaaaatgtaataaaataatggatgaaaacacccagaataggtgggacccgagccgtcgcccaccaccaccaaaggcaaaaactaaaaatttatgctattaaaacagcaataatttagttggaaatatttattgaataaaagtaggagcagtagaaaactgatgatgtaaatggaaacaattgataatgaactggggaaagaaaaggaggagacattttttgcttattgaaaaggcgaggtcaaagaccactggcgagcgtgcattacatataaaaaaaggaaagaaaggaaagtaatcaatttttatccaaaagtactttgctccaaatttttgttattatgtctttctcttttgtaaacccataaaattttttataggaaaaatattaaaaacaaatttaaaaccaaataatttaaatataatatttgacgggaaaatccaataaattaatgggactcgaacccacaacaccccatgaccaaaggcaggcacactaaccacttgaccaccgagtcgcttgcttcttccccgtttaattcccttttctttttccttcttttttggaagaaagcccgaccaaaagtgcttgtcctccctttttagagcacttcccggacacggaccaaaacaaccctggtatcattcgaaagccaagagtttgtagatgtgcacaaacatattaaagttttgatttgaccctttttaaggtatgcaaaaagcgttcaaaaatgggacacccaaaaaaagtgcaaattttgactcgttttccgaacgcagttcgaacaattcttaaccgattgggatgccgatagtttttccttatagccagtccaaaaccctatcgaatgataccactcccgacccgtaacattcggtagaaagtcttaaattagtttttaagcttgaaactggggtatattattcttatatagggaattttctttggtcacctcccgcccgtgtgatctttaccaacttaggcccaccggcggaagcttaaaaatatgatactcatcttaaaactacagtatataggcggatagtcagcaacataaactcgaccttttgtgggattatgaacagattttgcgccaaaacaggcccactttttcatgtatttgtatccgctctacagatgatgattattttgatttttcttccaagtattttccatctagcacctatttttcagttatactattttattttatgatattatttttatagagaaatcttgttgatcatcattaaaaaagttaatggctctagcatgagttgaaatatcatgaattttttaaaatttcatcacttttatcgaatcactttttctgatcagttttggggtagggttaaaaaagccaaaaatttccaatagcaaatcgcctatgctctacatgatatcgatacattcccttgtaagcactcattagggatatgtgttaacgaattaatttaaattactttaaaaatttaaatataattttttagacaatccataatgccaggttatctgttctttcatcttcgttgccatattttgctattatttgcattaataaatgaattgttgttgaatttatgaccttggtccaaccatttcttatgtagcatgtctcttttccaattcactttgtttcttcccttttcctttctttctctttctcattgaccaactcttctccatcacttccctttttcctcctttctcttttcacccaaaagtccatcagtcgacgcggcgtatcaggtcgcaccatcgtcagtgtcgtcgtcactaaaacgacgtggaataaacacaaatgagtggtggatgaatgagtgggaggatggggaggatgtgaaggacgaagcgggggaaggcggcagagggggtaatttgggagtctgcgcttttctcaatttattggcgagcagaaaattcgctatcattgtttgtatgtacatttagtgaattgaataattgtaatattcctaagaaagaattaaaatcaaaattatttatgataagataaaattaaaaaaaaaactttcgaaacgattactttttctttttaatctatatactgtaaaaaaaaatatttttaaatatgtatgtatttatgtacattatgttatatacgtatatttgtttttgcttataaaatatgcataaaattttaaaaaataagtacgcccgtgcaataggtttaatcgcgtgggtttaatccgaagaaattaattctaaaaattagatcatttaggataatggttttgcttctgaattttgccttcatattctttgcatttttggtgagttctgtgtaatttatccatattttttgttttatttgtatttagtcttcaatttatgccgaggaagaagatcccaaagttacgcataaagcatttttcgacatttcgattggtggcgtcaaaaaaggaaggattgtgattggtctctttggtgaagtcgtgcccaaaacg

SEQ ID NO: 18516 - DNA, 2683 bp, Heterodera glycines
aaaagacaaaattctctgattttttctatcataaaaagacgattgatcacgaacgaatcggagttcaaattttgcaaaatctgatttgtctgtgtatgatttttcactaaataattgaccttcaaatacacatacttaattttcaaaaggatcattcttttttgacaaaaataaataaataaaattcatgttgcgcatcggactcgaacctccgctctttgtccctttattttcttacaaaatttttctctcttttttatgtactatttcatgactcgagggctctttttcatattgccaaacaaaaaaaaatttgatttctttcacccacactaaatttattttttttaaagtaaaacaaaaaatttttttttagaattttaccaaattttacgtcttacatataccctaaattgtatttacattttatgtgctattccattctctgatatggattatgtccgtacactgacaaggtgaaccaaaatgcccaaccaattttcaatttttatttatttatttttttttgcccttttctgactgaaactgaaacttcggcacaatatcaacataaaactcttaagtatggtcgatgtttgtctaacgctggaaccaggcttttccactcttgaagatttggcatttctcgacttggccggcggctctgtgcatctgctgggcaccacttattcgtcaaaaggcatgcaaattaccgggatcccatcaccaccacgacattcgacgatttttgagacaaaatttgtctaaaatttaacaaattttaaggcctgcaatgtctatgttctttgttttcatggaaattttgatgaaatttttcatgggctgagggatttgaaattttgatggtttaagtggcgacataaaattttttaattccttttttgttatttgcagatattgaagcgatcaaggagttttcgaggtccctcatatggtttacatatcgcaaaaattggccggcacccatcggaggctttgacggacccacctccgacagaggcatcgttttttgttgaaaaattggaatttttaccaaattttattataaaataacgaagccaaccaattttggtcccgaaaattctccaaaattcgaaaaaaaaaattattttaacaaagtcttagttgagatgaaaattttttgcgctaaaatgaattttcatttttaggctggggctgcatgatccgagttggtcaaatggtgttggcacaggtaattgaaaaaaatgttggctcaaaattccaatttacgcgtccaaagtgaccatcctcagtttattagggctatgactgtttgttttttgatcagggtcatcattattggtataaattcaaagcttaaagtctatagaattgctttttcaacatttcctatttaaggcactcatcaaattccatttgggctcgaattggcgatgggccaatgaattggtggaccaacgggcggacaatgaacaggttttgacatttgctaggaccacaaattggtaccacctgattctaacacggtttttggccttcatgatttaagaaaaatgaaaagttttttaggaaatttatgggtttcatactttttaatagaggggaaaatatccggaaatttacaaaaaaaaaaaaaaattttaagtttcaagcctatctccgcctgttgaggatgttccaggacaaacgaactgcacaattctccatccaccaaattggtaaaaaatggtacaattttttgaatctcatgaccaaaaaggggaacccattagaattttaacaaattaaagcaagaaaattttggggtttttttttcattttttcgtgcctgggaggtaaaaaaaccataattttcatgttttatgataatcaatttcagcacagtttggcgtttcggaaggcaaaccaattggcgaatggttgggcccaaattcaatggcacaagtgctgaaaaagtcagtaaattttagggggaggggggaggcgcgcaaaactccaataattttgctcaaattaaggattgtcgtctacgatgaatggttttcacgcataaaaataattttctgttgtattttttgcattttttccaggtccaatttggttgtacatgttgccatggacaatgtgtgaggcattttcaaaaattcaactgacacttaccaaaaaaaccgaaattaaaaaaaagattttctaacgcattttgcaaaaattactggtttccattgttttagcctaatttcggacgacgttcacacaatggtgtcattgccgctgaaaacggttatttattcatttttatttttttttaatttattttattccgtcattaggaaaatgggcaaaccgacgaatctgccgaacgtgaacagcaaacaaattctcccaccaccggtcaatggattcgtccgttgctgctcattgtaccacttcgacttggtttgatttaaaaaaaatttttttttttgaaaaatttcattggattttccacaaaatttaggcctaaccgcgatcaatccctgctatttcaatgcgattgcggtaagtggaagcgattttcggtttgtaacacatgtcttaatgaatgcacattttaggaatatttcaaattgccgcaatgcgttggcattttgggcgggcgtacgcggcacgccgtttatttctatggcactgcggggaaaaa

SEQ ID NO: 18517 - DNA, 1343 bp, Heterodera glycines
tggagggtggcattggcactttcgaacttgaaaatctaacgaaaagtaacgacgacaattcgggcactgattgttgtgatattttgtcattgttgctcacctgacgataagtcatccggcggagaataaagcgatgaatcggcacaacgcacttgggagtggtgccggaagagctgctgactttgtggctgattgtaatgggttcggatggcattggcattgggcgcgaaaagtgccgtcgaacttgctggaggggaaaatggcgaacaaagcaagaaaaagcaacaaaataagacaattcatcaaccattgttctctcttttttgtcattataaaaatttttgatttcgaaattaacccaaaaaattaattgggccaaaaaataatggattattttgcttttcattttcaaaatataccattggaattgtaaaaatgctgctgggcggtgacgtgctgaaagtgctgttgatgggtggaggaggaggacgaagcgatgggagaacaggcggaagagggacaaacgaagtcggaagagtttggagttggggacaactgagggaaaagggggggggggaagggtaaaggaagagggagacaaatgattattgtcgcgaaaagaaaggcgggaagccactcactccctttcccatcccaacggtgatcggattgaacatatcttattcgaatgggattggactgatcggccaaccaaatcccaccgaatccctccccttttccctctcgccaaaacccacccagcagttggcattctgttcctccatgctaatgccaatcggccggggctgtgctcccacagtgggcccgcctccgcccccaatcggatggccacacgattcgaatgctttaattgtaatttttttatcatttccagtccccccctgagcgtcacctgtcttccaaagttggagctgcgcgtgcagagtgtcgcctccgtccggaaatcgttcctgaaactcctccacactcagcgccaaaagtcggcgcccgtccatcgtaaaagcgccctcctcgggaaagcttagctgaaactgtgcgcacatttcgccaacccatcggcggcagtcgtcgccactccacgcggccaaatctgtgatgatcaaaacccattattgttgtcgagattgggttaaaatatcggttttcatttaatcggcacattttggcgagcattggctgccctttgttctgctctgatcacctgttgaaaggccgagctttgtgcacgtgccgctgatgtcggcgatcagatgcctgaggatcagctcccctgtaatgtccgtctgatcagctgtgatttgcgtctgctgttgctgcgtcag

SEQ ID NO: 18518 - DNA, 724 bp, Heterodera glycines
cccccccccccccccgccccctcttgacgtggatcagccgcgcaccttcccctcctccccgtcgcttcactttcgcttttccttcgctgtgccctctggcgatttcgctctgctttctcaacattctcttcaattgttctactatttcatcgtccctttcactttttatgccgcgcaaatggaacgaccgaccaattgaaaagggtggacgaagcgagggaggggcgggggagtgcttctttcgttcattctttttgctgctttttcatcgtcattgctgagtgagtggacaccctacggggaagagcgaaaggaaagcgaaaagcggggggagaggggtaaaagcggggggtgccccttcacttcgcacgcccccccccccccgcttgaagcgaccgaatgaacgaatcagtgaacgaaatgaaacgacgaaacaaacgagatccccttcttctgatcccctcccctgctgatcccactccttcccccgcctattgccgcccctcccgcgacactttcatcccagaaaagagctgctttcccttttgcgcgactatgatggcggcaccgcgcaaccgacggcggacaatgacgatagcaaaagcgaagggggggtgaagggttaacgaaggcgacggacgaacgaatggacgacggcggcggagggtcgaaagtgaaagtggggggggggggattggattaaatgggattgaaaaatgttggg

SEQ ID NO: 18519 - DNA, 2453 bp, Heterodera glycines
gtgtgttcacatatgacacaaatttgtaaaactattttatacaatataaaaagaatattgtaataatattatatttcattatatattgtgcaaaaatgaaaacaaattttaaatgcttaattctagtgaaagttcggcatcggcagtgcttttccatgttcgtcaaagctttaagccgcttccaaaaaatcggcgtcctgaacaggtgccaaaaagggcagcatttttaaaatgccattttactttcaattaagttgtacgctatgatgagcatagaggtaagtgcagaaattcagtggcattttgggctcggaatttggatattaaaatgaacaatttttttggtttaaatataatttaatttacccacgaaaaaagaaccaaaaaatgtctgattcaaaaattcaaattttagaacttttaggccactttcttttatgttgagcttttgttcaaaattttttctaattttatagatatttttcaccgggattagttgggatcgtgatttcatcggggatccaacgacaattcgccaattccgagggtcccgcgggattggagtcattaaatttttcgaatattttcaaattacttataaagaccctaatagataaaaaaaagttaaatttgtttgagcaaaaatttgttgaaatcccaagaacaaacaccatgtacaaatgatgaatatgttgtttcttttttattcagtctccctactggtgttacgaaaagatggaaaatgtgccggacgattattttaatgtgtccataacgtaccatagcgccagtaccattccagtaccgtatagccaattgaccccaattacggcactgacgtcaccggaagagatttggagcgctgcggaagtgagaaagggacaagaaaagcaaaagaaaaaattctcattcatattacttgcaatgatttgctaaaaaattgtaatttaaaatgttttaaggttaggaaaacactccccccgcccttaattggttttttaagttcgccacctttgatacatttcggatattcatttgtttttcacccctaatattcgggcctctattctccttcattttgtcagatcagtgagagaatgtcgcgcaaaaaacgatttgccctccaaattgtgtcccattgcggggctccctccggcagagacgtgctgacaaagcaattgcaggagctcatcgagttggacatggtcggcgagtgcagcggaaaagattgtgatcaaaagtgttatgagcagcaaatgggtgagtgaatgacaaccgaccgtttgattgggcggcacagttaatttgtgaaaaagttttttggatgcgcatcgaggatttggagataaaacattgatgggactgaaggaatcggagtcctgttaaaataggattttatctcctgatcatattcggatccgcttggaatacgagctctggtccgggtttgcgcaattacaaaattccgggccctattattaggcagcgctccgatcgctaaaacacacaaaaaatctgatcctatttacatatatatgaaaaaataaaatccaattttgtatttttggtttttatgagccatgtttataaattagtcgctttttactttaattgaaatatagtttgggcacacattttccctctttgacacatttttaccagccgcttaggaaacttctaaaaatattttctcctacagagtcccactttttctatttggccttcgaaaatacggtgtgctccgaatatgtaacggagaaattttggaacgctttgcgcagtttgacagtgccggttgtgctgtgcagggaagtggtgcgcgagtcgggcattccggacgatttgtacatcgcagcggacgattttgacaatgccacggcattggccgaccatctgaaggcattgcaaaaggacaaggaccgatatttggggtcagtatttaatgagcaaaagggtcaatgacacgtgcaaaattaattttaaatccaatagtatgactaatttaaaaattaaatataattttgcacgttttgagttttgccatggcaccgccgaccaaaaagcgttggattaagttttttatttaaacatacctaatgccattaatttccaacaaatcttttgccaaattaccttttaatttttaaggagggttgtacggaaccgggaaatttaaatttaaattttgttttttatttaataaaatccaaaagttaaagctgaattaaattaatgaaaattttcaaatcaaattttcttcagttatttcaaacaattaatcaatttttgactcaaatgatcgaatattaatagaaattcagatttgcttttcacatcaattttttggcgcgctttttccaaaaaacttttctggagaaaggggagaccggcggtgccgataagcgccgccgggggaaattttgaaaatttgaatgtaatttgttaacacattt

SEQ ID NO: 18520 - DNA, 2389 bp, Heterodera glycines
  unsure (1)..(2389): unsure at all n locations
tcattaaacagcaagaaatatgtgtgagtttcattaaaatgttttcgcacattaattaaatccaaatttattagccactgaaaaaaaatggtaaagttttgtcgacagataattcgaatcagcaacacgaacgaacacgcgaaagcgaaaagagataaagagagagaggaaaaacaattttagtattgaagatttttcatgatgaaaaatacaaccgattgggggagagctaatggaatttattgaaagaaatcctctctatcccttaattcctagaaattacgaagaaaaaccaaaaaaaaagttcgatatgaattgagttgaacggaattgttataccatatttcatggacactaatgggaaattatgaacactaaatgatgtccaagacgaaattgaaatcagaaaaaaaagaatgaaatgggggggaaaatcgggagtttggcgaaaaatgccaatcccgggaaaactaagtttgaaaaaagacgccaatgcgaaactttgacgtggcacaaaaaaaaatccaaaatttttaaaattttcacaactccgttatgaaaaaacaacatcttcaacatgtgtaggtgtttgtcgatttaatgattttacagcacagaacataggtacataaatgcaaattgacaatgaaaatgcaaatcacagcaaattaatacctttttttctgtgtggcaatgccaaacaaattaaatgatttaataaatccaaaaaaacaaggccgtacatataccacacacaccaagaagaagaacatgggaaactgccatataaaacaaacagaatgtgatgctttggggggggggggagatgagaaatggacggcctcgtggtttacagtacgagtgaatgtgaagacaaacatttggggaaaacaaaaaccgtagacacaaaaacattaaattattactgtaaaacttggaaaaattacataatttgcaataacataatctccacttaaatacaatcaatcgtcatgatggtacatgtgcctaatgtatagtataataaatctttcatgaaaatttgtgtcaattggagaggaagaaaacaggggaaagccatttcattcatttcattttcaatgtgtcagtcgcgtgccggccgaatgggagcgcggcggtggcaccaccgaatgcgacgacaacgacagggacgatgccgcagaggttgacagcttgcgcaactcctgcaacaacaggcgcacgccgtgggcccaaccgccaatggcacagtcgctgtgaaaggtggccaccatttgctcaaagaattgccacgcctcgtcgtacacgtgccggtcaatggctgaaaatgtgggggaaaatgatgaaaaaaatgttttttttttgaatcggtgaaacggggaatggaaattgcaattttttggagattttttagtccccaattttgtgtcacacattaaattcacttaattttcttaccatcaaccacaaaatttagcttcttcaggcaggcctccgagatttggccggcttgaacatgttcaccgaactggttgaacctcagctgaatgccttccctcgtaggcccctaaattaaatttccgttaaaattttaattgtcctcaaatgtgccagcccaaccggttgtaaaagcagcgtcgccttggtgagaaaagccgcaagctgaagaccattgagcgacacgtcgccagccgctttcacaggaaccctaaaaaattgagattttttttttggaaaatcttggttagaatcccaagcaagccctgtgtacaaattgtgttgtacaatattgtgacaaactagcatttggattttctttgtttaatagagattgaaatttaggaaaatttggtaaccaaaattcgacatttaaaaaaaaatttggacaggcttttcgtcactgtcattgtctcacggaaaatgccgaacccgaccaaggatgcataccatataacagccaaattaggcaccccatttacaccactgacttgtagttgttcaagtcaaggctgccgccggcaccgtgcgttggcatcgccgccagcgacggattgtggtggccatggccaacaaagctattgttgccggcgatgaacagctgctgctgatcggccgcaattggcacaatgttcggcggcgagaaaagcatttgtgccaccgccgtcgcttggtgcccgttactgacgccgccgatgatggacgatgatgtaacggcggaaaagccgagtgccgcggtcggtggcggtgccatttgttggtggtgtgccatctcaacgggtgggtggaagtgccaaatttggaggcccaacaggtgnggcgacaagcgaatgtttgatgagcggtggacaacgaattgaaactcggacggtggaagaacctgcgatgaaaa

SEQ ID NO: 18521 - DNA, 1255 bp, Heterodera glycines
agaggaggggatggcagtttgcgcgaattgagggacgaataaagcgacgaccaatggaggagcgggcacgaaggggcggcgggaggatattgcggaagttaccccccccctccaccccttcctccttcacctcctctcccttccttaccccctccattgcccttgccctcctccctctccgccactctgtccattcgtttctttgaccccttttggcccggtcaaaagggagggggggggggggtaatgcttctcatattcacatttttcttactccgttcgggcaaaagctctttgtgatccctcgcattacttaatattttggcaccctccctcttttacatttcatcaaatggacaaacaaacaacaaattttctcaaaaactcatccattttttgttgagacaatcggatgaaaataatggaaaattttggaagttttttcgttttttgctcacttctttttttttatcaaattttctttctatttcttgtaattttgtgagcacaaccacaaattggttgtttgggagggatgggacagatgccctaaaaaacatttgtgcattggctgaattaatccccggggatttcccccccccccccgccgtccctttcattttctcataacaacactttcctctctctccttccattcttacatccatcccttcgtttcgtccacctcttcatcagcaaaactatctctatataagccttgtcaatcatccgttcttttatccaaccattcccttatccttactcttcctgctcattcatcccctctcccgcatcccttctcactcatctccttccttatcctcctctccctccctctgcctcatccctcctcactcatcttctctcttatcctttctcttcctcctctccctccctcacccccatccctcctcactcatctcctcccttatccttactcttcctcctctccctccctctcccccatccctcctcactcatctcctcccttatccttactcttcctgctcattcttcctcctctccctccctctccctcatccctcctcactcatcttctctcttatcctttctcttcctcctctccctccctctcccccatccctcctcactcatctcctcccctatccttactcttcctgctcattcatcccctctcccgcatcccttctcactcatctcctcccttatccttcctcttcttgtcctttcatctcccccattgtttctcccttcctcttcctgctcattcatc

SEQ ID NO: 18522 - DNA, 1053 bp, Heterodera glycines
  unsure (1)..(1053): unsure at all n locations
tgaggggggggggagtggacggagaggggccaattcgaattgagagtggcataactaacgcggacgaggcgaacaggcaccatcagcagcagcagcacatgtcgcgcagtctgtcccgcnccgccagaagtgagaatgccaccccgggccacagttttcttttgactttgtgaggtgccatcactcggctgggtgagcggcgcggacgccgccagtcattgagtccggaggcaagtgaactgatcaaacgggtggagagtgactaccgatcggacagcgcgccgttcaaaaacccaaagagcatttacaaccgattggccgccagcgtgtacaaataccaatacttacacaaggcaatccttcgccgattccctcccctcttagcaattttaaactgttttcagcttgatgaccgcactcttcgcaaggtaaaaaatgcataaacaattgacataaaatggcaaaccaatgttaatgctggtcaattaatggtagcgatggtaattaaggacgataattatgctcattatgcgaaagctttttgatgaccgtttgtttgtttaagtatatgctgtcactgcgaaagcaactcgccaaattggaacggttccgcgaagtgtccttcgggccgcatacaatggccaaacatccgccgcaacagttgcagcagtcgtggttcttccggagaaggtccctgccctccctgaacagcgcaaacgctaaccaatcgcgaacgcacacccaacaaactaacgcgggagggcaaaggtgcgataggcagcgattggccaacgtcggcaagcgcccgacgcttcggcacgacgaatgaatgcctcggcacttcgccgaatgctttcgccgtccgattggctgtctcctgtcctgtccacccttctcactttgcttctcctttttgttgctcattagcaatgctttcccttctttttgcttcgtttgcacttttcctatccctccagcccatttcctttttcattttcgtttttcccccaccaaataggcattttcagaagtctcaaatcgggcctttcccac

SEQ ID NO: 18523 - DNA, 2055 bp, Heterodera glycines
ttcgtcttgcttctttatattcacagcaaaaaaacattcactgttcagctgcaacggacctctccacggcttttttctttcagccaatcacaatatgggctgattttagtgaacaaatctaaaatatttcagttatgatatgcgtccatatttgtgaatttatatgtgatttgaaggtaattaaaaatttgtcaaaaaattttcaatttaaagcaatttccgcgcttacttttctttgactcgtggccccgtacaattccaattgcataccatttgcccccactcttgcgcagcagtggtgaaccgctgtcgccctcaaacaaaaataaatttaattctacttttttggttataattaatattttgattttttttaatatgtattttagaatattttataaacacataaaaagcatacatgagacgtcttgtggatgccactcagctggcaaaaaaatccttgtggacacacagaagccaaatgcaccaaatcctgtcgtaacatcttcgggtcgatctgctccgcgtctgccgaaatattatctaagaaaataaaaattttagacaggaaaaactttttaaagcattctttttaaacaaaaattttgaaaaataatccaaatttacttaatttggtctttccccagccgattattgttgccgtcgtccctgtccgttgttccttctttggaagacaaattctgttgatctgtggaccaaactccaacaaattttttagctaaacaaataaaattcatttaaattcattaatgtttaaaatttaaaactgtacctctaataatgctatgtcatttgccgatgacgtcagcctgtaatgttcgtgccgtttgatgcgtgccacctcgtgcacagtcccaaatgttctgtctttgttccccacggtcacgcgcatctcggacgccttggctggcaaaacaaaattctgcatgacgtcatttctgaatgaaggaaaaggtgataattgggttataagttatatgcactaaaaaatgccaaatatgcgcataaaatataaaataaaacccctcaaaatgccataaaaacccgaaaaatacacaattacgcagtaaaatatgccttaaaactgctaaaaaaggctttaaccattaaaaatgccaaaaaagtttttttagagaatttcaaaatttgtatatttcgatttttaaaaaagtttacttttatgctaaacaaaattacattttttatatcaacaaatttcttacaaaaatcacaaattttcgatttttaagggtgtatttaattaatttccaaaaactcgatccttagggggtgtgtttttcgctttatcagaataatttaattcgttttaaattttagtgaaactgccatacctttcgtccggtttgtaacgcaaatgaaggtccataagaagttgtttcgtttcgtcgcatttgttctcgacaaacaatgtgacattgacgtcggcacgatgagctgctgtgacgacccatctcttttgtacgaccggtcctccacgagtactgtatcgtccgtttgtgtccgttgatggtacaggcgatcgtcacgtacgccataaagggccattggtgcacgcccatcaccgcgtgtccgatgttcaacctaaataaagccccagttggttaattaacaaggtaaatggttaattgcttaatcataaattactcgaaaggttgtgcgcaactctacgccgcatggttcgttgctaacggtgtacggtgcctttcttgtgtcggatgccgcatcgtcgcttctgtgcttcaccgtctcaaagtcgatcacgcccttttcttgtacaaatgccgacgccttgctgcttccatatgccgcaccctgttgatggcggattaattaatgttgaatgtattaattattatttacaatagacccacatttttcagtccgtgaagaaccagcaaaataagcaccggcgaaaagacatttttcgtgaacatcaatgagcaataatctataattataatttatataaattattttttttaaattcacatttagaaattattcaaaaaagaa

SEQ ID NO: 18524 - DNA, 2386 bp, Heterodera glycines
ttttcctttactgttctgcagttcgaaataaaaatcataaaacaaataattttttgcttgactttgactattttaagaatttaaccatcaattttcaaaaaccctcaaataagtgcaaaaatccgaataaaaggcaaaatcagcacaaaaaattggaaaaaagcataaaaattaagagagggatgtatttttctgaaatttttcggatcggttcttagggggtgtatttttcgtttttattgcatatttgttaataaattttttgaaaattgctgaaaatatttttaaaaatttctcaaaatgacgaaacagcacaaaaaaaagcaccaaaatgccaaatcagcacttagttaaaaaatttttcgtttcgtacgaaagcgtgtattttttcgttttcggattttaaaattttttcgttttcgtgattcgttttgttttttaatttttttttagtttttgcacacccctgtttcggatagtcgttttttgttttcgtttgctctacaattatttattttcaattttttcttcgtctaatttacatagaattttctttttctgcgctctttttgatgttttttattcctaaaaaatgatcttttttaatgagtaacgaacgtcttaacatcgctgctgataacttcttttattttctttttaaactgtctaccgtatatactctttttatatgccatggtatattatttttcaacctcctcagaagggggtagataattggagattggtagactaatggagactgggagattatttttcgatgatttatttagtggaaaatttttgaaatttattttgaacatgtcgccaaaaaatgtcatcgcgtaaaaaaaaaatcatttttattgcatttctgttaaacaacttctgaaaattgacccaaaaatgtgccattttcttgcttccgatatgcataaaaatttgaatttttaatggtcaaagatggacgaagaaacgatcacgaagaagccttttttaaatttttttatattaattttaatttaaaatttttaggtttttttggcttatctgatgattagggtcgctacatttagtgatttactaatttttttatcaattgttttgaagaaaggagctcaaaaaacgtatttctgcgttgacatttttcaattctgatgtcactatcggtcactagaaatcactattttaacgcttcgtcactaaaatagtgaaaattcattattttggcgttttgtcactattttttcactttttcgacattttttggaaaatccttaacaaaaatgcaataaaacaaaaaaatacacccctaagaaccgacctattttttttttaaatacacccctaagaataaacctaaaaatttttcaaaaaataccagttagaattggaaaattttcataaaaatttttcccccaaatttttttcttacaaaattttttgtttaaaaatttcaatatttgctaaaaaatgtaagaaaggaatgcacctcatttgtaactgcaatcagtgaataaatatatttttttgctcaatttttggctgaaaattatgtcactattcgtcactattttcgacttttttcactattttggcactttttcgtcactattttagttaactatttcgggatttttcgtcactaaaagtcggttccttatttattagcccctcttactgttgaattgagtttaatttttttggaaaatgtgccaaataaattattaaaaaattctattttcccctctgacacataaatggagactggtagattatttttcaaccttctcagaagggggtatataattggagaccggcagattaatggagactggcatataaaaagagtatatacggtatttctccaattgacagtccgtcgttcatcgcagttcgtcatttgtggatttttctttgccgtttctctctcactttttgccatttatttttattaattatttccgttttaaatttcaaaatgtaccacgtcacttgggaactgcaagcaaattgcaaaattccttgcgcttttccgaatcgctgctgggaaccattgcatttcgacaaccctaacatctgcttgggggcttccgtggaccctaacaatttcaccaattatttttcgcttccggcctttcaatttgtgctgattttgattgcccaattggtttttggcctgttactcggctttttcctcgccttctttgtttgttttttgtgttctggcagattttctcgtcgttcttcaaaaaatgtaattattggggaggctttctcttatttttaaattttccatatctttctttcactcagcgtgccttcggcgatcattcgttgcccaacaaaaacattttgcgccactctttgcgctctggggctcgtaaga

SEQ ID NO: 18525 - DNA, 2114 bp, Heterodera glycines
gggaatgaatgatcatcatactgatcagactaattgaataaattgttattaattaatggttaatataagttggctaatttgtgcttctgaacatcacctcaaaattagcacagcaaaaatatttaggagccgaaaagcaattggaaaaaaaattgaaatttaatcgctcataaataaatttttaaattatcaaagcatagccttttgtatatacaaaataatatgtcatttttgttgggatgatatgtcctttctgctgttttgccgttgctttttaattcgacaattttcggcttccgttcgttggcacaattcgaatgtgatttcggttgttcgatgaactgttcgtccgattgccaattgttcgtaagccgtgttcgtggcttttgaacggtctgctacttatgttgtgggttttcgtccggaaagtcgtcttttgttcgaggcgaaatgttttgttggcgggcactgagacattgtcttaaaatggcgggtaattagttaatttaaaggcatgataattaaaaatttggtaattactcgatttaaaaatgtcccataaaattgaagtatgagccatcactgaacagaacgcacaggacgcataagtcattgaacgaaacgcgcccacatagacggaaatgttgaggtcaaactgaatttgcaagattatgcatttaattgcctaattaattaattagccaattattaaattgatgaataatttacagcggtcaaaataaggttgatgaaatttggcaacaaatcaagcagcaattcaaacagaacgcaatagaaaatgaggcggtcactctgaacattgcgattttttcaaaaaaaaatgagaaaattaaaaaatattttttcaattaaaatttccttccgtttaccatttttcgtgagtcggtgttaaccgttgccattttcgtgttcaaatttgtcaccgttccattctgctgagtgctgtttctcgtgttgttggtgttttgaacaattgtgattggcccattaattccatttaatcggcgccgaaatgcgaaaagcgcagccaaaaaggaaatgccggccaaaaagttgggcagcgcaaccgcaaaacgattgacggcgtaaatgaggcgagaagcatcggaagtgaggcagccgaaggaaatgcattctgacaaaagtgcaaattgagggaaaggatcagaaaaagagacaattaattaattaacgcacgaaaaattattttaaaaaaagacaattaattaaataattaattaacgcacaaaaaactattttaaaaagaggcaattaattaaataattaacgtgaaatattatttttagatggtttgaataattttaggatgtatttttattttgcatatttaatttttcgaaaaacattatttgaacactctcatcagctaagttggttttttgacattgaaaatttaaaaaaaacattttagggttttctcgagaatctgttttaattttaaaattcctcaatgataaattatgtcaaaaataaacaaaaaatgaattttcgatttttggtcgtttttcggaaattttcataatttagaaaaatttatgtccatattttacattttttctatagtttatctttccttggaaatggtccctagcaattattggacaatggtttaacaaattcctcacatttggtcattacttaattaaaatttaattaatttatggcccttgctcttacccgggtgttccgttgccggacgttctgccaaattgacgcccaaatttgtgccaaacaatgccaccacactgagcacactgaacctggcgagtgaacgtttgatccatcttttcatgttgtaaattgacggcagcagaatgatcagcagccgatcggcggacagaaagaaaacgcaaatgggcgtggcggggatcagcgagccggggacgaggccggtccagaagatgaactgagtgggggaccaggcggagctgaacacgtctaacagggacaaggtgagcagagcgtactgaacagtcaacgcggcacagcaaacgccgagggaggacaaatacactgaaaaggaggggaattttgaaattgatgagacaaaggcaaaatgaccacttatggaa

SEQ ID NO: 18526 - DNA, 3665 bp, Heterodera glycines
cttttctcactgtttcggcaaaagagtgctcagcgattcgttaatgggtaagtcgagacaattaattaaaaattataataaaatcatttgggtttttcagaaactatggaacgaagggagtcattgccgggtcattctccgctctgattgatcagattttgtctggcaatttcaatgcaattcgaccccaagttttcatggtgctttctctgttttgctattttattgtattaccaattttcttgaaggaattctttgctcatgtgaatgccgaattggccaacggacagcagcacgacgcccatgaattcctaatttatttgctgaacgcgcttcatgaagacacaaacagagtggggctgttttaaaataaaaacgattttatgctatttttaccccaattttcaggttgaaaatcgactgccgtttgatcaaaattacgataacaccgatttgagggccaacgctttcgatttctttgagaagtcaaaactgctatcttcctcgccggtcaacgatctgttcaatgtgaaccgatcactcactgatcactccgtcattttcacctctttcagctcactaccatttctgtgatcaaatgcatcacttgcaatgcgtcgagtgttcgttttgagtccgttaatcaattaaggtgggttttattcgcaaaaatagcgatcaatccttttgtgaatttgaatttagcattgagttgtctaccaattttgactgtctgaggctcaaagactgtctcgaggcacatttctcatcaacagtatgcagcttacttttagagtgattcccgattttggtaatttattttcctttttagaatctcaatgatccatgggattgtccaaaatgcaaaagcaaacagccggcgactcggagcacaaaaatttggaagatccccgaaattttgatcgtccatttgaagagattttcgcataatgatggcaactttgtcaaaaatgaggtcactttccgtcgggcgtcgcattttgcgatttaaattttattgtaaaataggctcaagtgactttcgatatgaatgagttggatttgtcgccctatattcacgaaaagtctctgcttcccaacacggcatttactctttatgccatgacggtgaccaaatggctaaaactgtcctaattacgctaattgctttaatgcctttaagaagcatatcggcagtttgcaccttggtcattacacatcgactgtggttaatctgacaagcactgatcagcaatggctaagctttaacgatgagtcatgcattccgtgtgccaccgccccatcgcccacagtgagaatttctccccattcattagggaatcattttgaagattttgtttatctttttcagagcaaagaggcatatcttctgtactacaaactgaccaacaactcacaggccaagtgatataatattatcattattatttatacctgtgtactgttaccaaacattttcaaataaatattttttattattttaaaattaaaaagataaaatatcggactaaattggaaatactgactgtaaaattgcagtaacaaaagcgagggcgaaagaaacgacgctgacgacgacgacgacgatcaaactgagatagaacagtttaacagagaactcaatgaaatttgtcaaatgttgcgtgaacattaccgtaatgaagttccgaaaattggccgactttgcgcccaaatgagcgaaggaactcgccaagcgttggccatccaacaacaaatcccaaatcccgacgaagtgcaacaacaacacggggagaacaatgccagggacaacagaagcaatcgttcttccgacgaaaccatttcttcgaacaacagcagcaactgtgacaatgccaatgtcaagtgtgaatcggtgagcaacaccaaagcattgtgatcactaatttttcttagctcggattatcaatgccataagttaaaaagctcaaaacaaaatactgggcatgaaaaattaaaaattggagaattgccccattttttagggtttgcatcagaacgcgtggtggcaacaacaatttcatgaaattgagcaagcacttgataatgatgctgatgatgaaggcatttcgtctgtcgagtgcagcgaaaacggaaccaatgaaaatgataacaaaagtgacgacgatatcgaaagtgatgccgaaagtgacgacaaaccctatgaatgtgattgcgaaagtgctgaccacccaatggagtgtccgttgctggccgctcgtcgtgcgcttcgtcgtctcaaattgccgaccattcttgacatttgtgccgcaaccgaagcagaagtgcgacaatacggcacaaaattaagtgacaccattaaacaaatcgccaaattacgcgttcaaaacggcggagcactgacaagcgaatgggaactgcggagcagacagaaacaagcacaaaatctgctgcaacaaattggtaatttaatgccacaattggtcgttgaagagatcgaagtggcgaaaattctcaaattcgtcgaacaaagcgccgatcgcttttccattggatttcgggacagaaagcagcaaaagcaattcaaaaaagcaattcgacagccaaaaaaggtgtgcagcaatttgaaattagcgagaagtttcttccttttatctctagtcgaatatttttggtattttgttatttaaaaagttacaaaaaaaaaattgctgagaaatttccaatgagtgaatggttggtttgcttaagctgcaaatttatatcccttcgttcaaacaaataattattcggctaccaccaccaacaggctttcgaggttctgttaaagcacaatttggacagtttggtggagccattttatgaggagtgttacgaaaaactgtttcgtattagcgatgaaacacgggaacaatcagaattgttcgtgaagcttttggccaaaattgcttttgtgcacgtcgtgggattaaggatacaactggaaatggtcagtagagaaggcatggtttaacaaaataataataataatgcattttggcagtgattttcggatattttttatgggatgttagactagatcagttgacagaaattatacattacatcatagaaactaaaaatatttgaaaactcattaaacaactttcttattacttataatttgtgcacttttcaattatttataaaatttaaagatatatttaatgaatttaagtcataaaaatttgacaaaacatgctttcgtaggttttctggtccctttttcaacttgggtccgttaattattcttttatgccaaaatccaacagataattaattcctcctgtattgttcaggtggaaactgaatggacgcatattgtgcacgcgatgttgcagatgcgtaaattaataaatgcagctcagtatttggtgaaagaggcacaaccgaaacccttggcgtgcgaccgaaaattttcggatgtaataaaaagattgcaatatttataaatattattatttatttatttttacttcaatttattcaaaatttagcaaaagcaaccgagcttgtgttcattggacagattgtatgcgaaactctatggaaaaccgtctcaaataaaacgtgtaagagattttagggatttggtcatttcgctttaattaataaaaatgtacaaa

SEQ ID NO: 18527 - DNA, 2568 bp, Heterodera glycines
  unsure (1)..(2568): unsure at all n locations
tggtgattttccggaagcctatncgcaccactttcggggcactcaaaagtgcctgatccggagcccggaccggcccggttaagaacaattttctagcaccctatttatgtattgtattatttatcatttaattaatgtacttttatttgcagttatcatagaaattttatctttttttgttacatttttatattgtaagtatttttaaaatgttttatgtattttaaattagtattaagtctctattataattttgttttgcgataacaaatttattatagaaaaatgacaataatttttttattttatagaactatatatctaggtttttatttgtacgaacttgatatgctaatttattctgcattaaacgatagcaatttattctattacttaacacgaagtgttaaattacttttaaattaaatttacatccattcttttatgttaaatgtttgctttaatttttaactttggatatttattatctaaatttggattttattttttaataggattgttcagtttgtgtattaaaaatcaaaattataataaaaatgaaaatgaaagtttattaattttaatatttcttttctcattctcgttgacgtcacatggtccctactgtaaaattggaatattccaactcttaattagcaaatataaaaaaatttcatcattattttttataaaatttaactctgaaatatatttgattgtgtttatggtaattttttgtttttaatgtagtcactcttgttgcccccatgccccaatttttatttcgtataaaatcattttaattcagttgacaggtttattgatttatatttatattttgaaaatataagtgtaccagaatttttaaagtattttagagtcatatatttttatttttcttaaatcattattttaacttattttgtttaaaataatatgactctatataggataaaatataaatacatttcagttccttcttgaataagttaaactagtgaaacttcttgaaatatgttgatgaataaacaatgagtttaaatctcaattttataagatccaagtaatttgtgaaatcgatttaacaagaacgattttttaaatataatatataaattagcatttttaatgattttttagaaaagataaatattttttaagttagtttttaattttttctcatgaagttgtagcgaataattttatactttcacgatatttgttaagaatatcaaattgaaaagtttctatttttccattaaaaaatataattaataaagtttataaaaatcatgatcctgattctccttccaaatgatttacgtaattctgccaaaaagcaccacacatatataaataaatagaagctaattacttaatttattattaaataaagtgcattgaagcaattttttgattagtaaaagcaaagtaaattaaagaaataataagttttcattatttttgccaataaaattgttgtcgttagattatttaattatgacatttaataaataatttttttataaatattaattttatttcctatttaatattcaaaagttaaaaattgaattcgttgtaaattcattcattaaattaaaattgtcataaaattaattgttaaactcgtcattggattcgttttaattttatagtttttagttagatttggtccgccaatttgcaggtttatatggttagccgacttttgcgccgcgacacttgcgccgctcagcaaaaaagactcttgcgccgcggacatttgcgcagtgccatttgcgccgcgacacttgcgccgcctaacaaaaacgacatttgcgccgcgacatttgcgccgtacagcgaaaaaagacatttgcgctctgattaaaataaatttatgtgctttatagaataagaattgatagatattcattattaattcctttttcgaagcctttcatgtcaattccatattgaagtgcacgtaatgatttatcaaatcttgatcattttggttttcattgggaccatatgcgagataacaagccttcgtattgcctgatcattaagcggctgattttaagcgaaaaaaataggtaaataaataagggcataaaaattgcgaaataatgcgaaaaatggtaaaataggagcgaaaattgaaaatcagtgcgttttttcaatgaaattaaattaaaatcgatgaaaataacttattgagaaaattaattacaaaggaattgaatttcattcttttttcgaagcaaaaaaataattggggtttctacagaaaattcttttttttcacttttttgttagtttgtattcttaatcattttttcatatctttgatgaacctattcaatgttaagattttaatggttaaaaaattgaatgtcaatctttgtgactagtaattttttcgaattttcaattagttatttttgtctatggcttatagttttagtaaaacttattgataatagtggaatttttatgaatataatattttgacagcgcggcgcaaagtccatttttgctgggcggagcaattttcgcggcgcaaatggnagcgcgcaaata

SEQ ID NO: 18528 - DNA, 2012 bp, Heterodera glycines
  unsure (1)..(2012): unsure at all n locations
cctcttcaattgtggcacttgtcgcgcaattccgccctcttttgcccgcagtgccgctacattctgaagccgtgttcttgacggcaattggtcagagggagtgccagcggtaggatggcgacgcggaagagcgactgttctgcagtgtttgaaacttctccaggtcaatgtcgagcagttcaaattttgcactcggtttcagtcggacatgagaaagagtcgaatgaattgttgaggagtggtgacgagtggcggacagttcgaaagccaaccgggacagctaaagcattacaactaatgaaggcaacaatggcatggcacttgccttttccacaactgccttaatgtcattcaattggtgtgcttttttgccaccaccgcacgacaaagcaacgccagcgaaagatttgtcgaattctttttcagcattgggaagcagagaagtgacggaacaatttgagtcttttctggttgaagttgtctgcagtttgtgaggcattgtcgtgttcgacaaaaaattggacggaacatttgccgtcggcactttcccagacgaattcggcctaatcaatggacactcctcgccggaaataatgtcgtcatcgataaacttaacatgactgttttttatttcggttttttttgacggaacctcaaggttctccagcctgttctgccacccctcggccattgtgccggcaggcgaactttgtggtctttgagtcttcgggtcagaaatagttgaacaatttgttggagttttcgagttggcagaagaagcagcagtgactgaagtggaatagctgaaatgtgaggcggagaaagcgccagtcgttgtggcgggacgttgcgcaatttgcttttgtttgccgtaaaagaaattgcgcctcttttctttggtgctttcgggtgccaccaccggcggggactgttgttggctcgagtgagggagcaaagggacagcggaagacgaagaagacgacggggccgactgctgctccaactcggaggcgaactgcttcatcttctgaaataacaaaaaataacttcatttgacctccaccaaaccgtaatgtaattgttgacagtctgccgaagtccgtcaaactccgagatgacattctcgtacagttccctctccccactcatcaatccgtcggtgccttcctcctcctcttcttcttcctccccattttctgcttcttcaaacaattgttttgcgctgtctccgcctgttaatccctccgttcccttcccatttctgtccatttgctcctttctttgtcccctcctatttctgtcctccgttccttcttcgttgttgttcatttcttccaaaaggaatgatgccgtcgatgtcgcggcacccttttgctggtgatgatcggtccgattttcagtcgaatgccttcgctttgtcaataacatttctcggatgtcctcttcattcccgggcgatgctcttgtcctccatctgctttcaggccgtttttcgagaaaagcggctaaaggaacaaatgatgcaattatgcattaaatccttgaaactttcttaatattcttatttgcactttacctttaagtgccgcggattgtccgctgagttcgcgccgtcgcattgtcgccgttgcgattcgtccctcattttccatttccctcggcgtttctctcttcgcctcttccgtcaaactgtgtaaatcgctcaaccgtatggtcatttgccgaggttggaggtgcaaaacggaagttttgtagaacacttgggcgagtgtagccggcaattggccattgccttcggccgcggtgattttgaatttggtgcaccaaacgttggagctgacatggacgagagtgngaggcggcgcgcggctggcgacagcgccgacggacaatcgatgcggcattatgcgacgactgacgaaacggcggatttgacgcttactgcgccgccacatcgaattgcgttggttactctcacgacggaacccattctngtgggcaacatcctctga

SEQ ID NO: 18529 - DNA, 2116 bp, Heterodera glycines
tgtttaaaaaaagaaaaaataataattttcaagttgaaatattttttattaattaaatttcaattgaaataatgtaaagaaaatattaaaaattttctgttctgttggggggattgaacccattcagaaggtttagtcactacaccacataagtatttaaacacatgctttaaatggaataaataatttactttttttctcaaaaatttctccatctccactaattcccttctcttttctcacccagacccccattcttaccagtgcttattagtcccgccgggaccgggactggtaaaccgggaccgggatttctgtttttccaaaaatcgggaccgggacctgaaaaaaccgggatttcccgacccggtcccgtgcaactctaatttaaagcaatcatataaatttaaaaaggcattttaattgtaatatttcaaaatttgtctttatttttttatcgcttaccaaagaggtgatgaagcaacaatttgggttgttttcctagaaaaaaaaacgaaattttttcaccaaaaactatcttctatcatgccatgggaacatcgcaaagagaaatcgcattttttctttgatatccaaaaatccgtccatttcctcctaaaaaattaattaatattaattgattaatcaattaattaatagtcttggagcaacaagttctaaaaaccacatcttccagcgcatgtccgtacaacaaaatgctgatggatgaggccacaagcacattgatctgcttgatcaggtcaatacgagatggtccattcatttgaatgtcgcaacgaattttggcagacatttttcgaagaccaaagatcatcttaattgaaaatttttttatttaaaactgtttttatttaaatttttacttcttggctcattcggcttctgcccatgcccaggtctcgcaatgtttcgagcgtaaaccttctcaaaaacagccaaccctcaccatgagttctcgaaacaccatgaagtccatgagttcctaaaaaaacaattaaattcattaattaattaattatcggcataaacccgaaacaatttcggagatgccaaaaaagtgtcggcccgacgtttgttcattgtaattgagtagaaatgttgaacgaatcagctcatagtcggtcacgatcacataaggatcctaacaaaaattagtttacaattatttaaagggttaatttgagattaactaatcaattactctaataacccttttaattactttatcgaaagatttaaattggaaattatagattaaaggggttaattagagaataatttaagaaaagacaccctaattaaggatttaagatggttacttcgcccatccacaacgtgtatactgggccatactccttggcaaaatgggtgtacgcaccggcaccgccatggtccgggaaattggctaattggtgtaagttgcccattaatgggagtgggcttggcccgggcggcaattttcggcgtttccacacaaaattccagaacagaatggcgaacacattgagcagaagtaagccaatgaacatttttaagtttatttgaaacccaattattaaaaaaaatacgaatttaaatatttaaaaataatttataaattgaaaaatttaaattacattttccttttaacagtctttcccatcatttttatacaaaaatttattttgtaaattgttaatgatcaaaagcaaaagtcattttttacaaatttgtacttgccttcgctttttttcataattttattaattgcacttaatgggaagatggaagttaaaaaaaaacggaatttttatttacaaattaaaagaatcgaaatttgagataagtttttgccaaataattcccttaaaaaaattaaaatttattttaaaaacaaacacaagtctgccaaaaataccgtatatgctctaattatagcccagtctctattaatcccgcagtctccaattatcccccagtctacgaggtgttttgaaaaataatccctctatcataatcccccagtctctaattatccccccttttctgaggaggttgaaaaataatcccccatgggctataattagagcatatacggtaatgcaatttcgttact

SEQ ID NO: 18530 - DNA, 974 bp, Heterodera glycines
aaatttggccacaagggaaagaaaaaatagcagaaaacttttgaataaacatggaattttaataaaatttaattctaaacaaaaaaagcaaataaataaatgtaattttcatgaattacttattttttttaatttaaaaattaattatatgacataaaatagtaaaaattcttttaaaatggcgcatatttttattatttttcgtaaaaagaatatacattggaaataatgtaaaaaattgataatcaatattgtgacaacgtaaaatttgacaattgaatgaatttatttataaaaaaaatattttacagataaaataataaaatctataagcgaatgggtgcattagtgatgttcgagaccgaaaatttcccgagactcgagaccgagacttgaccccgagactcgtgaccgagacccaaaaacccgagactcgagacttttcaaaaaattttcctattctcttagaaatcgtttaaaaaatttttgagtcctttcttagctaatttttagtttttttttttaattttgattcaattaggtaccatatttatcaatccaaaacgcacaaaacaaaaaattcgttagtttttacgcggtttttgagtcaacttaaagaaataaagggaattttgcggcagtgcagataggcgccgccagggaaatttttgaaatttttagcgcgctttgttaatagatttagtccaaaaatgacaatatttcacgattttaattgttaaaattgggattgaattcttttagaaaaaaaaaaattaattttgaaaaatgagaagaaaatataaatacttggaggggaactgatcctgcgcaaaaataaggaacagaaacaagaacacaacccattggagactactttatgtttacaaaactgaacaaaaaaggacctaaaatttataaaaatagaagtttaacaaaagccaatcattaggggtgtaaaaagtctcggtcgcgag

SEQ ID NO: 18531 - DNA, 1500 bp, Heterodera glycines
  unsure (1)..(1500): unsure at all n locations
aaaaaggacctaaaattataaaaatagaagtttacaaaagccaatcattaggggtgtaaaagtctcggtctcgagtctcgaaaatcgagaccgagacccaaaaaaacccaaaacccgagaccgagactcgagaccaaaaaaacccgagacttttctcgagtcgagagtcgagaccgagactctcgaacatcactagtgtacattgtggtaatatttttaatttgtattaaaattactttcgaaaaatataaacgaaaatatttattcataagtaaacagctaaaatttctacgtaaaaaatcgcaaatatgaagaaaaaaaatgggaaaatgtgtaaaaaagatttgtacaaaaatatgcaaataaattttttttttaataatgtctaggtatttaactaattaagcatttaataagggaaataggcttagaactatttttttttggatttttaagaatagttttttacacttttcatgaaaacatcagttattatagggcttatatttttaagctaaaaatttccaaaataggtaggctttaggctctaaaaaatccataaaacaggtacaaaaaaatggaaaataggctctaaaaaatcctcaaatttaggggtaaatgacaaaatcttagtcaaatcaatttcgtccctaacttttttgaaaatcagtaaaaatttttgaactttgactgaataatagagaaatccttgggctattaattatatataaaaaaaaaagttaaaattggttatttctgaaaaaaagttattagcgaattaattttctcatatttttagagtcatacaaaaatttaaggttgtttaaatgcatgataatttactcaaacttcaattaattcatacacccatgaaatgattatgtagcctaaggatttctctattagtcagtcaaattataaaaaatttattgagtttcaaaaaagtagggacaaatttagccactctaaaattttcgaacttttttggttacaactttttgtaaatttttgccagattttttaacaattattaaactccattccaataacaacattagagcctaagttatgcttttattatttagcaaaatgaagatacaatcgcgcatgtccctttgaatttgtttatttaataatgttttatttttattgttatttaacacagttaagaaaagcataaaacttcattaaattttttgttttaaatttcatttccctgggggtttaagtttcaatttttgctatttttttttatcttagtcgggcttatgattcggtttagttctatagaatgttgttgtattgcaatttcgatttgtttcgacaaatgaatataaaaaatgatttttgggatataaattaactaatttttggaaaaaattattttaatatttataaataaatttggtaaattgatttctgcctaaatagagtcagcttcaactgagaaaagtcttaaagacgaatttgtccaaaatgnaattattgaaataattttga

SEQ ID NO: 18532 - DNA, 1647 bp, Heterodera glycines
gtcatccctccccctccctttcttccctttgcctgttctgtcgtgccattcgctgtcgtttcgcgcccattcggcgtcccctgcccgtgccgaagttgtgctcctcctcgtcctcctccgtctcctcttcctcctcttcccggtgctttatcttccgcttttgccctccccttcctcctcttcctcctcctctttcctcctcttcttcctcctcctcttctccctcactttcattttgttgctgttctctttgactcaacggaatgtttcgcttcattcttcgctgttcgctgatcattttgccacccgttttttgatcggaagtgatcgcttaattgagggagggggatagagagggtttctttgtgtcttttttcctgtatattcaaatttggcttctcactcttttcagtttcgtcgatggcaccgattttggtaaaagtgaacagaaagaagagaggaatggagcacatcagaaacaaattcattgttagaagcaattttttggaaactgagaaaagcaaaaaaaaagagagaaaataaaaaaataataaaatgaaaattgatttatatcgatttaaatggcacgaggtaaagcgaaagagagaaaatccaatgattgacgagatgatatagattatgtcatgattgcaccatctcattagcgtcttaacaagttaattagtgttttcaaagcattccccttcgtgtcccttccattccctcccccctccctctcgttctcaattcttcccatttccccaattcccccggtcctcctcccctgcccaatcatccttcattagtcttcccttctccctccttcttctgtcatgaccaattttcccattccgttcatcccctgcggggagatcgcataaattggtctttgcagcgggaaatgagggagaagagctaaagacgaagacccaatttcttccggcacttctggggcaaggttaataacaccgcgtcccttcgctgatcttccggaagactgtgaagggattaacctcacagtcgacagcgggcagaaagaaattgacgctccccaaatgggaaaagcgagagaaacagcggaaggggggggggaagggggaaagggagggaatcagccccggggggagggagggagagtcatccccccgggggcaatgatcgttattctcatggaaaggaggtagcgtgatcagtgcccacttcggttattctccaatccccaattttccctctttcgtcggtcatttgtccagctgccgactcataagcgccttccggcgcttggaacggaagaaatacgcgggaaagaaagccttagggggggggggggagtcgtaaagggcgaaatgccaaatgtaaaagaatttcagaattaaccgccaaatttattccaaaaaatgaattcgggttccgattttgttcacttctttttgcacttctttcacctttttgtcgccattctttcttatgacatttcggcagttttggacaattttattattggtaagattaaaacaaataattatttgtattaattttcgggattgaccatttaaggcactccaaaagtcatttgcggggagtccgaagtggcattggacattatcacggcgaaaccattcattggtaatttgaatggcacttttt

SEQ ID NO: 18533 - DNA, 2201 bp, Heterodera glycines
  unsure (1)..(2201): unsure at all n locations
atcgtttatntaattaacttntagccaattgccaacgcaagaattgagtgatcaaatgcaaatgccgacgtgccattactccgtgcacagcgaaagcattgacggagcgcaactgacgtcacaaacgcaaaatgttgcaaaagccatggccaatttccgctgtttttaggtgggccaatgtcggtgatgttgtgttccatgtatgggaatgccgaggcccggaaatgggcattctgatcaaaaaagtaacagctcaccaggaggggatgaattgtggaagcatttgtattcagtgctttgtcacggacggcgacggggaggaccacgcggtggtggacgaagacgggtaaaacaaaggggagggggctaattaattaattagggggataaaaattaaatgaatcatttatttaattaattagggatgcattgggagaagggatttttcaaaagcaacaataaaattgcattgattggctaatcagttgttcactggaccattctctgatcagtgaggtgacctacgagaaggagggaataatgcgagctcatgccaaaagtcaggtgggtcaaaaagacacttttccattggatttttcggaatttgtccttccctccctttgaaggtgttcaaatatgccgactccaaccagctgttcttcacctgtcagatcagaatgtgccaaagacagatggacatgtgccgcggagtgacggtgaatttgcgggcggacgaaccaatcgaaattcattttccgcaaacattcagccgccaaaatgcgaaggaggggaaaagcgaaagggcgccaatgagaagaaaatggcacacagtgaggacgaaaagcgggcgcaagagatcacgggggaggagagagtggcggcgaatggcacaaaagcgacgagggaaacggcggcggtaaaagtgggggaggaggggagagaatctcgggatttgagggcgagttaattggccgaacttcgagaatcatttgcacaatttattaaatcggatgaccaacatttttcattttaaagtccaatggaacgacgacggcactttcaaccgaagcacagcgtaagaaaaagcagcagagaccggccgaagtggcggaggaggaggacggagaagaggagggacaatgggtgctgaagagaatgccgttggcggaggggcgacacggaaggaaaagccgcgcattggtggagggtgattagtcactgattgaccatcactaattactgcaaatgccaatttagccgaaatgccattggagagaggggacaagcgaccgttggaagtggacgtggcatccccgcagatgttggtgctggaccaggaggaccgtgcccggatgactaccgcgcggtggcattcctcgtcgacaacagccgcgccttcgccgccacattctgagggacaaaatgccggaggggttatttccgcattggatgcctttcggggagtgccatcgcttcatccgccgctttgtctctcccgcgacattttcgtctttttcgtccccttcgccgttgcactgctcgtcggcctcggctctgtgctgactttatgcattttgcacgctttttcacgagttgcgcggccaaaagtgccaatgcgttggacaccgatgcttttttaagcattttggaaaataaaatggcattttgttttttcaaataaaaaaacagaaataaaacataaagaaatgaaaacatatggacaataaaatgaaaagaaaatacgaaagatgaactattttttgaaaattgaggtatgtataaaatttgaaattctaaaataatttaaaatttgcaattagtccacgtgaagaagtcctccatcggttttgacagttggcaatggcccacatttggtcgttttgattggcaatttgccaaaagattccgaatttggcatcaaacgatggtagcacagcagccaaagaacaatgccgaagaagaacagaacgatttcaaaaatccaaatgggctgagggccgaacattttataagcgacgctgtggggggaaaatttaaacggaaaatggacaaaacaaaacgccaaactgttgatgccactcacttcatcagcggtggaccgaaaaacatcattgactcgcctgtggcgaaaaacattccctgcatggtgccctgtttgatgggcccgagctaaacggacaatgacagtccatcagccgaca

SEQ ID NO: 18534 - DNA, 2707 bp, Heterodera glycines
  unsure (1)..(2707): unsure at all n locations
gatgatggccaaatgcaacttctgctggccaagcgttgtccaaatgggtgcacacgccgacacccaaatggccaccgaaagcgattgttttgcgaaaatagcataagaacaaacttccnaatggatcaccagtttcaaagaggtgttgttgttgttgttgtgctcagattctcatcatatttgggtgtctcgggaccgatttttcatacaaaggtttttctccggcggcaactaactttttttgcggcgctttttccaacaaaaaaaacggtacttgtaggttttgtcacccccttgaaatttttctaggctgaattaatgtgctgatcacgaaaatggttttcgggttctgctcaataatatgccaagaaattattttaaaaaaaacaaattttgatcaaaaaaggcagatttttggcattttgaacccattgacgaccaccatttttacgttttcacatcccttttttgtggcacgcttttttctaaaaaaaaatttaaaaaaaatcggtatactaatgggaccggcggtgccgttaggcgccgtcgggaaattttttaaaaatagtttttaatgcgatttgtcaaccgatttcgtctaaaaatggctaaatttccgattttgagctatttttaaagggagtagatcgttcccccccccccccccccgaaaaattttgacgtgggggggaggggaaatgaagtgcacccattttaaaataaatacctacatatttagtttgcttttcaattttttttattttcatttgtttagaaatttatttgtgcccgcacttcttctgtcagttacaaaattcgttttggagttttctcgcctccatcatcaattgaggagccatttgaattggtgaacgaatggaccaaagaaaagttgacactaataaaggagaacgcttattattggctgttgaaacggtgcccaattagtgaaaaggcggcgattaaatggggaaacgacggaaattcggacaacaacaacaccaaatggaactttatccattttaatttagtttgctgcaaaaatagcattgggtgagcaaatccgtcctaaattgtgtataaaatttaaaaactgcgcatttaaaattattaccaaataggattttagttttcatttttactaaacatacgattttgtttttcgtacttctcttttttttcaccccccccccccctccccctgaaattctttttaaaataatttttagaattttttatgcgcggaacacgaatctaatcattttttgatgtttcaaaaaattgtgactaatttttgtttttagtcaattttagggcaatagtgaaaattttaaaaatttgaattttcaactttttattctaattcgggttctgaattaatataaatggatgtcagattcgtggtcagcgacctcgaaaaacccccaaggaaggcttttttcgggatcagcgcataaaatttccatagaaaaattattttttttaaaatttcaggggggtgacaaaaggataagtacctattttccaattccataaaatttttttacgaagagggacttgttcgtacttggatatgttttcgcgaaaataattcaattgttttgaattttttaggcctttgtctccaccataatcaccaacaaaaacgggtcaaagcagtgaaaagggcgtctgattatgtgggaatgactttttggaacttgacaaatggtcgatcatttcgaattattgcatgaaaattgttgctttgatatatatattttttgtctttggatgttcatttttaatgagataaaagtttatttccgagtttgggttagggattggtcaaaatttgtcagattcgtaatcaatcactaatcagagcgactcgaaatctctatgaactttttaccgttttgtaaataggtacctaaaatggataacaaaaaataataaatagaatttgtattcaaataattatttaattttaattaggtccctaatttagaaaaaaaattttaagttcaaaacattcgttaattacctacctaatttaaacaaaaaaaggaggcaacaataaactttttttccctttttttgggttggtccctctttcgttctttgcattttacgtcgtcgaaagggcgaaaaatcaccccatccatttctcccccattttccattttcttcctattgagtggtgggaacacccaaacacacattcctcaccttttcttcatcatttgctcgtcgtttttgcattcacttttcacaaaaccttattcgcccaattcattatatgaatgtacgttgccttgatttttgcaattttttgctcaaaaatctgttacaattacaacaaaatcagcgcaaaaagcattccagcgttatttttcaaccaaatttttctaaaatttctgcataaactcagaaaggacatacctattagctattagccaatgataagcctagggctaaattaaatccgaaaaattcgcattttttaacaaaaatcttaaaaattcaattataaccttgacagattggaaaatgacaatttctgtcgagatttttgacgccaagtcgccctcacgaccgggtttcaccatcgctgaggtgctttttggctattaaaatttcctatttttttttgtaaaaaattttaaaggttgagcctgattataagaagtgcgtcaattaaaacgcaaaattcgcaaaaaagttg

SEQ ID NO: 18535 - DNA, 2568 bp, Heterodera glycines
cagcaattttattgcctagtggttatttgttgtcgtattttattattaatgtaagtaagaataaaatagtagcaaatcgcattttatattttattatgccaatacaatcatatgcttacaattgactcactctcacttatcaaattggcattttaattggctcactgctcattaattggaaatttaattgtctcatttgctaattgccattttatgaggatttgttaattaattaattacattttgctcatttcccccctcaccgttctgttccgagtcgatgcgcaattcgcctgagaatgtgccggtgcctttgcttgtcgcggcggcaactcgaaaagcgtaactttttgctggctcaatgttaaaaagtgccgtttgcgagggaacctttgatttttaaaactataaatacaaaataaacggggagcaattgcaattttacattccgtcgtatgggcggcgcctctccgtggtccccgagtttgctcaattcaacttcgtaatggcttatgttcccgtttcgatgccgccaatgcggcgggtcccacaaaatggaaagcttaaattattaaaataagcgtaaataaaaaataaaaatttaaaatacattaaataattcaaatattttgaatttgatgttaaattaattttcaatgccttatttttgaataaaaacgtatattaaatggtgtaatggtttttggctaaacaaattggcccactctgttgttgaaaattgtgtagcgaatgttcagcggctctccgtccggcacccccgtgggcgtgatcaaatattccgtcgcgttttcactcgtgcccgcctcgttcaccgccgcgatgttcaattcgtattcatttccgctgtctaattaaattaatttatggagaaatttttaaaatatatgaattttaaattaaattaacttatggggaatttaaaattaattgattttaattacagagattgtccaacacaaagctttgctccatcgggccgacttcggccctttggtaattgtccagcgcagttggcctccaccacaaaacgtactttttcaacggcaaattgtacgagtgcctggaaatttgaaaataaaataagattattagatttttaatgaagcttatcatttaacctcggtggaagccattcgacttttgctctgacaggtctaaattcgttgatcagcgaaatcgattggggcctcgggggagagggggctaaaattgaaaatcttggatttaaaaatgattttaaaaatccgacgtttgcctcccgtcaaaattcggctttgttttgtcaacgcggacagttccccgtcccccttcatattaaaagccgcaattcgaatggcatattctgtgttcggctcgagatcgttcagataggcgtataatttctaaagattcaaaataatttttaattaaatttaaaaaatgaaaatgaaaaaaactcacatttttgtccacgatggccaccgatctgtgcaaattgttcacaaactgattgttgacaatttggaatttgtacacattgtatccgtacaaaagttgcgcgtcgccgtccgccggcggttcccaagtgacttttatggacgaactgttaatttgcacaacattcacattgcgaggcggagaaggcactgacaaaggaataataaatgatcattaattaattaaattttgttaattcataaaagtaaaaatggtaaggtaaaacttgttaaatttgaaaaaaaaaattattttaattaattattgtgttggtaaataataaagtttcaatggaaataaataatttataattatatttggtgatctaaattttaaaaagccaaatttttaccatggtttgaatcgccagtcactgcaattctgtgttggtcactaataaatgatacaagaacaaatgcataaagtacgttgataacgatcattttgatttctatttctaaaaaggtaacaaataaatagaaaatattttttgaaaaaattaattaattttttaattaataaatattaaaaataattatttttgtaaacgcccaaaatttacctttatcgctaacaaaaacaccataaatgttaaaaagagaacatgttgaataaaataagcaatttaagaaaacaaatattaggctgtaagaataaaaattaaataaatattttccaaaaatttaaatttaaaaaatgcaaaatttatttcgaattgggaacattctttttttcctaaattagtacctccgtcagccgagtcacttaaaattcccagtgccattgccgcttaattggattgcaaatttttgccgtccgccgtcgcggctgtccattccttcgctcccttttctttttgcatgaatggggggactaatgcccggggcaacggattaaggaggaaggaaaagcggaaaggcgagtggacagcgagcgcataaataaaattcgggggaaaagcacaaagagaagaagcacaaaatggacaagaggggaaggggggggggaggaagaaaaaagaaaatggcatgaaagaggcgccaaagatggcaaagccaaaggcaaaagcag

SEQ ID NO: 18536 - DNA, 2396 bp, Heterodera glycines
atgccagaaatttcccaatcacattttaaattgccaaaaatttcgcggaaattttctacgaattttaaacaaaatgatgctgaacagaatctgaaggacgcaacggaaggccaaagaacgtcaaattcagcttcacattttaaattgccaaaaatttcgccgaaattttctattaattttaaacgacgcaataaaaaagcggcaaatttcaaatataaattgaaaacatcgccgaagatgaaactgttcaaaaaatttggaaatatttcacaaaaattgaaagatttttttgttgaatttatattgcgaaaatttcggaaaaattctattggaagagaaaaaaacaatgtaaaattaacataaaattaattaaatatttatatattttaggaaatttatgaaaataataaaagaaaacaaaaaagcacagcaaagaggaggaaaaagcgtgaagcatttgaaaagggagcggcaattacagcacatattcgacctggtaactgttttgagtcaaaaattctcgacttttgtgtctctgtctcgattcttaagctacattctcatctcgagagtcgtgtgtcgtttatcatctcgcttctccaatctcaaaaaatttccgattcattagaagctctaatgatcaccactaaaataaatgccccataattctacgcagctcaatccggcgcaaaatgccattgaaaaaatttcaacgctaataattgccttgttttagaaaatggattcgttcattaaaaaggcgttttgttcatctgtttaggcaaaatgggctcgtccacggtgcgctctattatgttcaactcgcgcatcgtcgactccgccatccccggcctccacttgcattggctgcacgccaacgcagcgctgttgctcggcaagtacagcttgctgggccatctcccgtccgcgctgctcttcagcctcgtcattgtcagtgtgttgttctggtggcatgccgccaagttggccgtgtacttggccatgctttacggggatttggccggctgggccctccttctcattgcggctgcccttttcattggctttggtattttcttaatttgatcatcttctgattttcggaagtagcggcagtagaaaaccttttaaagcagcctcagttttataatgatcgatcattaattattttatattttaatttctaaattaggtaaactcttcaaacatttgcatttattttgtatagggatgttgtgaaagaaaaataaaaacgagacacgagaaggatttatcgccctaaaaacacgagaatccgaaatgtacactcggacaagagagagcaattcatcccagcagtcgtggatataaacgaaaaaacgaatttccgttagcagcggagcgttggcaaaagtcgcgtagtattgtacataggaccctaattattaattaatgtttttttcccttcatgctaatttaattttttaataaagctgctttattaaaaaatgcaagggttccacgccggcggggaattccctttcctttttttaattagtcattaattcgtccataaagcagtcgctgctgcttcatccattttcccacactttttgctcaacgattgtcaattgtcgttattcccccacttgtcaatgcctttttctttctttcccttttccccttcttttccccagcaatcaaaagcagtgacttcacttctgattcttgtgaaacgctgcaagctaattaataaatgatttattgagttttaattagtaatacgaatgggcacaacgacgaaacgataatctctcgattaattcgatcctttttaatgctcaaatattaaacacattttaatttttaatgattgccacattgttatgctttgatgactactaattagggatgatatttttaggcaaaagcctattttttcctgagctccccgtggcctgaaacgcacgaaaaacgttttttttgggctgttgttaagctacttttcgagttattagtgcctatttaggcttttatttttagagcctaaaaagcttaaaaaattttgaaagaacctatttttgcctattttggtgttttgtccaaaatttgttaacaaaaatgcaataaaaatgaaaaatgcacccctaagaatcggcctgaaaattttataaatactcccttaacgtattaaaattttctcaaaaattcatccccaaaataatttatttattttcttgacaagaatttttgattttaaaaattatttagctcaatgctgttttccctaatttttttttacttttttgaataaattttgtcattttacaccctaaatttgagactttttagagcctatttttgggggtttttagagcctaaagcctacctattttggcggttttagagcctaaaat

SEQ ID NO: 18537 - DNA, 2068 bp, Heterodera glycines
  unsure (1)..(2068): unsure at all n locations
gacatttgcgccgctcagcatagtcgacacttgcgccgcggatatttgcgccgctccatttgcgccgcccagcaaaaatggacttttgcgccgcgctgtcaaaaatattatattcataaaaattccactattatcaataagttttactaaaactataagccatcgacaaaaataactaattgaaaattcgaaaaaattactagtcacaaagattggcattcaattttctaaccattaaaatcttaacattgaataggttcatcaaagatatgaaaaaatgattaagaatacaaactaacaaaaaactgaaaaaaaaagaattttctgtagaaaccccaattatttttttgcttcgaaaaaaagaatgaaattcaattcctttgtaattaattttctcaataagttattttcatcgattttaatttaatttcattgaaaaacgcactgattttcaaattttcgctcctattttaccatttttcgcattatttcgcaatttttatgcccttatttatttacctttttttttcgcttaaaatccaccgcttaatgatcaggcaatacgaaggctcgcatagtttttaattgatatatatatattttatcattttttaaatgaaatccgtacaaattgagcctaataatcccaaaaaaagaagccatttttgttgaaaatctgttaacaaatctcactcaaattttcacaatttccccggcggcgcctatcggcaccgccggacccctttcttccccaaaagttttctggaaaaacgcaccgaaaaaagtggtgtgataagtaaatgtaaatttcaaaaaatattcgaccatttggcccaaatgattaattgcttgaaataattgaagaaattttgatttgaaaattttctttaatttaatttagctttaactttttgattttattaaataaaaaaaataaaatttaattttgttattattttctcttggaataaattaaaatttgaattttttaaaatttttttgaatttttaaaatttcccggttggtcccggttccggtcccgaagaaaaatcgaggtgccggtcccggtcccggcttctcaggtcccggcaagtccacttttacagtaatgccggccaatcattcgttttgaaacaaaattcaaaaatcctcggcgtttggtttgcgcaaataattaatgcaaaaaaagagcagcgcgtccatttgcccctcttttgcccttcattattatgaccctcaaccaaaagtggaggggcattcaataaaactacaacaaaaaaagaaaataatgccataaaaatcacagcagaaatgccaaaaaagaaaatttcgcacaaattaaatgccgaaattgccgcgagaaaggaattggcgggtacccggcaaaaaaatgtggaacaaaataaaaattattaagaattcattaaaataaatgaataattaattaattaagcggcaaagccttctctgtgcgtgtgcgcttgccattgagcgggcgtgccaacttccgccgcgattgcgtgccaaaattcatgacggtaaatttttgggcgatgataattcttgatcattatattttaatatattttttataaaattcttaaacaaaaaatgcatataaaaatgaaaaccgatgcaaaaaacacaaattatttttaaaattatatttttattccaacaaatttgaaatttgtttttgacatttctttaaaaggtcaacattacaaattataataaatttaaatatttttcataaatttgctccaaaaaaattttaaaaacattttttaaataaaattccttaacaaaaaaatgcgtagaaaaagaaaatcaacgcaataaataacaaaaaaataatttctaaatatacttttattccaaaaatttatatttgagattattttccataattatttcataaatttatttatacaaacaaatttcaaaaaccttttaaatcacatttttattggtttttaattttattccccanaattttaaattttttaaatattttaaattagtcaaagaaatcgtttagcttaaagctaaaatattttaaaataat

SEQ ID NO: 18538 - DNA, 914 bp, Heterodera glycines
tacaaaaatatctttttgcataggttttttgtctgatgatgccttgcttttttaatccgttcgcttttacataaatgttttgactgtttttccaatgattgattgatgattggcatttccccccccccttttcattttttgccgacttttctcccattgcatccgtccatctgcgaagatgctttaggcccgactggcagaagaaaagcccggcccgcggaggagtgaaggcaatggcaatgagtgccccccccccccccccccccggtgaaaggcctttgcattgcccgggacaaacgacacaaatttccccgacaactgccgtcgccgcaggcgttttggtccccgtgggcgggggagggaaagggaaagggagggattctctccgctcgccgaatgtcaatttgttcatcattaaggaatggtctcgaaactttaattcttacatatgtcaatttaaaaaaacaactgcagttttaaaatacacaataataaaagaaaattcccaaaatttgcttacctaatttttactcattttacttttttattggtaatcccatgggaaaaaattttttacggaattcgttaggcacatttccttttacaacagatgtgccaagtgaaatttggcacaaatcatttctgtttaaagcaaaaataaatttaaaaaattaaaatatttagattaatgaaagattggatatattttctccaaattcgactacaattaatttgtttatgaagttaagagaaatttaattaaatgcttatttatcatttcccgtgtttttattggttcccctaatgctttatgatcgtcgcccttgtcagccattttgccgagcgccggacaaaagggatttcatggagtaatattttaattattgaaaatataattttcagactgatatttt

SEQ ID NO: 18539 - DNA, 1123 bp, Heterodera glycines
aattttcagactgatattttttaaaggtatgaaccggcaaaaacggccaatgatttctataaaagttacgacccaatgggtcggcgtcggcacggccgccattttatccgctttttatcactttgctcaccgcaaaatcgtttctgagacggacaattaagcagtggcggatgcgcaaatatatgagacggagggaaaaacaacagcaaaaagcggcaaaaaaggcgagcacagaaaaatttgttgactgaaaatgtaaattcaatttggacggatgaacgattggcatgaaagtgccatttcggaagatcgaaagccaaaaagtgccaaaagtgacgatgagtccaatttggcattcgccggtttcagttggtgaccattgttggcgaagcaaatgaattggcaaagccaatccaaccaattggacagcaaaggcacccgcccaacggaaacgtcgtttaacggattaaatgataagataatgatggtcagcagaagatatttattgcacttttatttatttgaatttaaatatttaattgttttaaaacattaaattaataaaataaactaaacggacgaaacagacagaaaagtaagaccagaaaacccaattctaaataaagcaacagccaattcattaattcgagagtaaattttatatttgaaaaatagtcataataatatgaattttattcaattgtcaccgagcccggcttttcccggcttcttctttcccgctttttcgactcccttttcccgacttttcttttgcttttgtgttgtccgcttctctgttgccctctcctctgcccctctttaattgatcgttcaatttgagtgatcacaatgactgagtggtgaatgtgctgctcgctgtcccattccgcgctggacagtgactgggccgaccaaagtcggcctaatccgccgatttggccaccgcatcagtcaatcatttagtcgtctcgtccgagggaggaatcggtcgcgtaccaatggccaagcggtgcttttccaccgcttgccactgaaaagagttacaccgaattatctgttgggaggaggggccttttctgtccactcatagactgctcaaaggacagaaaatggatttaattgt

SEQ ID NO: 18540 - DNA, 2250 bp, Heterodera glycines
  unsure (1)..(2250): unsure at all n locations
tgtgatgccagaaggaagcggagtgtgggagaaagtgggataaaggacctgagagaacctctaaaggagcgctcgtagctcagttggttagagcacggcactaattgctggggtcatgggttcgagtcccgtcgggcgagttaattttatgtaacagtactcgttttttcgccagtatgtacgtgtcccgccgcaaaaagaattttaaatttcttaaattgctaaagaatttggagattggcaattggaaatgaacaaggaactatactattaatggttatcccccgtccattagtatctgtgactagctcttcttttaccatttccttttcgcattggcttttttggtggctttgtgatttgtaactgtggatatttgccatcggatagtaacaacaaatattgcttaaccgattccaattcgattaatgcactttctttcatttgacactcattagtggtctcgagaacaaatgcccaaccgatcacctaaacaatttcgattggtttttacagtaattttacttattttttgcaaataaatagtcgttaccaacctcaaaacaattcactttgttctcaaagcgcatttgtggcaattgctttttgattttacaatattcgatgcatttttgaataatctttttggatttgccaccaaaaattattttatgtgccgtcacaatttgtcgcatcgcttcctcaattgttaactctttaccacttttttcatcgataaattttggtttgagcgaaattttccccaacaaacgctcatctaaaaataaatttaaaaaacatcgataaaaaattaattattaagtcaccgtctttttttcagaaaatccctaccgatatttctatgctttccattctctaatgcgatacaaaaaatgaaaagccgttcaatagacaagtattgaaattgccattccgctaaggagtccaataaattctttggcactttttccgtaaaagtgccaagttttcgccatgcttctctgttacgataagtggatgcttttgccaaatctttgcatagaaatgcacgcagttttgtgatttgcttaaaatttaaaaaataaggaaatcagtggtaaaaataatatttttaaatatctttaacctcatattcagcagcaattgctgcaaaaacttggcttagaattagaagtaagcttaggtcaatcaataccatttttgctctgaattacaaagagttgagttaaatattcaataaaaatatagaaatatttttaaattttttattaaaacctgtataaaaagtcatattcttaatatattaatgaaataaaaataatgaaatgaattttaaaatggcatataatgatatcaatgaatgtataaaaaataaaaaaattatgtgcgtatgctccataatcaatataatgacgtatgaattaaaaaaattattcctagaaataaattattagggccttcaggaaattggacactataataaatatcataggaatttgaataattttgatcataaagtgattaaaaattgtcaatgtgccttgaaaaaaaacttttgtgcaattttgttcgagtaattcaattgtgattagcagggctacaagaaattacggattacggaaattacggcatatttggaccacgtaaatacgcgtattggttacgggttttgcgatttttccataattttgatccgtaacaggaatttgattatttttcaagacaatttcttgcataatttcttttaaacaattttttcatgtttaattacattttggtatttaattgtatttcatcaaattatttatgcctaatttggcaatttactaaattttacaaaaaattcacattatttggcgaactcttcccattctgttatttttttattgttgttttttttgatcaatgccttttttgggctgatcggaaattgaataaaactttcattcaattatttcttaaatgtgttttttctactttcttgcacaaaacaacacattcacaattttgttgtgcggcgttcattggtcgtatgatcgccgcgcaatttgggcgaccgaccgaccatcgaattttgtgcccgcaaaattaatggcccaatttgccgatcggcggagaaattccgcctaccccccactgattgattggttgattgattgggtatataaaggcggccaatttttgtaacgccacattcatctgaattattntatcattttgtggcacaaaagaaaaaggaatgatgctgaa

SEQ ID NO: 18541 - DNA, 1800 bp, Heterodera glycines
  unsure (1)..(1800): unsure at all n locations
tgagtgaaatttgtgatgagataaatggaggcaaaattgacgacgaaatttacttttgacgcaattttttattgtggaatattttttgaaataaaatttttgtttattttttgtaagttaattatgtaataattatttgataataaaaaataattaatggatgattaatgctattgattttgaattaatgtgaattgggagaatacattttcttcgttcatcacatcataaatgtggccctggctgatgctgtgtgtcgtcttcgttaaatcaacaaattaattcccccccccaccctcacaaatgtttttttgtttgtttattattaaaaataaattcattatttcaaatttgtcagctgaaaagcttacaaattttctttttgggcaattggaaatcttatccaattaagttattcgatctaaattcattaaaatgtattaaaatattcaacagaatttattttctcttagatttcaaaatgttatccgccgatgaaaattattggcacaatgtgcaaaatatgccgtggcttgaggaagagcacaaaaagcgaattattatgcacaatgaacagcaaattagtggtggtgacgattttgatgatgatgagagagtcgaagccattcacaaaagtttggaaagtgcggaagagccggacgaagaacggtgccaaaaattggtgcatttgctcggcacggcgaacattaaccaagtcaattagcaaaacaaaatatttaattaaaaaaaatatgaaatttatatagcgacagaatttgaaacaaaaatatgcggcgaaatttgggggactgaatttgaaggatgagttgatgaagcgattgcctgcgagtgaactgatcaccaaagaattgttgcaagtcaattctataaaattattaatttttgaatgaattaataattttttttagaatttcatagcattaaaaattaatttttgggaaaaagaattattcagactttaacggacacaccagcggaacacgacgccaagtacttgcagaaagccatgcaggcaaattagttgctaaaaagcattttttaattctattttatatgctttctagggacttggcactaatgaggacatgctaattgaagtaatacataattaatttaaatgtttaagaattaaaaatatatcgatttttgaagattcttgtgacccgaagcaacaaacaattattggccattaaaagtgcttataaagcaatgtttaatcgtgaattggaaaaggaagtcagagcagagacaagcggcactttcaaagcacttttgctcgatttgcttgaggcaaaccgtgacgaaagtcatacggcggacgaaggaaaagccaaaaaagtagccaaaaaaataaataaataacgaaaataatttttaatttcaaaaattcattacgaataaaactattaactttctaaaaattatttatttttcatgacgcggaggctttgtacaaagcgggagaagctcgtttgggaacggatgagaaagtgttcatcaaaatgttggccaaccaaaaccttcgccaattgcgtcttgtctttgatgaggcaatgcaattaaaattaaataattaaaaataattgattaattaacaatttgcagtatgaaattgtcgccaaacatccgattgagaaaggcatccaagcggaattcagcggcgattcattgcgcgcatttttggcactcgtcgaatttgtacgcaatggccccgntgtacaggtgggccaactgatgcaaaatgcatttgaggtggcggacagattgatataatgaatc

SEQ ID NO: 18542 - DNA, 2187 bp, Heterodera glycines
  unsure (1)..(2187): unsure at all n locations
gcatgcctgggcaggtcatnnttttaacatttgatgttaaacatatgaccactgttttttcaggggtgaaattttttgataattacttccttatagactaaggattatgatcatttttgaagtattagatagcttagtgaatgtattatcagatactaaataaagtaacaaggatcatttacatttcatttaaatttaagggtggtgtttaaacgattgtttcccaaaagctcgccgcagaaattcaaaatttttttataagaatcatttctgctgtactccccccgcccacctttttgctgccctccaattcattctccgtcaaactcgacatgcaatgctcaacccccgccattttgcatcgatgagccaacagccgaccaatgttataagcggcggagacatccgtctgactgacaggggacacacattttaattgacaacaaacaaaaattgggtatttaaccggcatcgtaactcgttaaggggttttcgagtggttactttgtgaaatgacacgggaaaacaacggaggaacgatcccaaggtcccccctcgcccactcttccgcattttaaggcaaatagaagccaagccaaaattctgagaccgtccttggaacaattccgtgccatccaatttcaagtgtcatcggaccccttgacaatgaatgacctgtatagttgactttggacagtcttctcacgagttgacgcttcgatcacaattccatcttcgtaatggacgactcgggcagcaattgcattttttgtcggacaaaagtcgaccctgtgttactcgtttgttgtaatgcaaaaaaaaaacccggaaaacacatcgacagtatgccatcaaattcacctgtaaatgaagttatgttgcgctcgattcttctcaaattcccacccgctgggcttccgctggaggcgcgctctttccaaattgcgcggattgttgttgacgaaacgctgcagaaaacggactccgttcatcttgccaactgcagtgaatgggcagtagcaaatttagacagaaagcacgacgaaaataaacgattcaacaaattatggagataagatttttgacaagagcagtctcaagcgatttatttgcattaaattcatacatccctagcagagaccgtgtcgacaatttcgtcattattatcatcatcttcgtcatcactgtcattcccatgaccattttctacgtccatttcttcgtcgtcttccgactcttcctcctcgagattgtgcaagcttttggatcctaaaccatttgtaattttggaatagtaaccctctaacagttcatttttttcttacgttttatctcttgcaaaaattccaccgcgtcccccgcctcatcgtcgtcggagtcgtcctccaaagtgaccattgaggaagaagtcgcttgtgcatttgatgatggccctggttggtgggcgaaggtgcccacatgagacgaagaagactgtcggagttgcgcggcattgctggcactttgtacgcttggcccattcgcctcggcttctcctcccattcgcggcgaatttacccaagaaggcaagtccaactgattcctttgctgctcatcccgcgacacaggaaagatgggcgtgtagaaataagtgtagagacgttgtaacatgctaaaacacgcataaaataaaatagctaaaaaattgggtagtttagtctctgagaaggggggggggggtaattcgcacctcccaaaaccaatcccgtaatttatcggtgcacattataacaaacagccaacaggatatagcggatatttgcagggtcgggtcaacataaaacctcgaatgtctgtcctgtgtattgtgctgttcccgtccatgcccgtgttcaacgcgttctcccctttcatgtacacttggccgagctaagcgtcgccgtcgttcgccgacaacttcgacatcgccgcccgctccgccgtcgttcaacaccaaaacgtcgtcgtcatcgcccatcaaaatgccagagcgacgtgagctgcaacagtcagatgaaaggtcgatgagattaaaaagaactgcttgtttacctgtactccgaattttggtcataaacttccaatgtttggcccgtcgaagcgaaatgggttaagttattcaaaaaatgatgcgggttttgaatgccgcgctgtttaaggaaaatcaca

SEQ ID NO: 18543 - DNA, 1241 bp, Heterodera glycines
ttaattaattcgctaattcaaaaatagggttctataactctgaaatcaaatttaaaaaattccaaatttaatataatcgtttctctaatcctaattaaactgaatgactttgtgctgttcttctccaaatgatcagccaaatcagcgcatagcacacaaattcggcacaatatgaaattaaggcattgatgtcagtgtaataagcagtttcgggctgatgggctgggtcaccgagatggcacatcaccggtctaaatgatccgaaaacaaaatttaaattcaaatttaattgcccattttgtgtccacttttcccaatgggctgcgcttccactgtaagtgacaaaacagaaaaatgccaatttaatacaacaaaatgcgatgatccctttgaaggatgtgtattttccacgtgatgtatacctaaaagtaaaaaataaattaattaaaaatggaatgatttattaatagatatctattacgttaattttagttaaaaaggtgggaaaattgaaaaaatatttttaaagtaaattttggaagacaaaaaccaattacttttggataaatgcctgaaatccttctaaaaactcataaaaatcattatttaagatgtatctttcgattttagtgtgttttatttgaattttgtaagtgcctaaatacgactaaaaatgccgcgccacttagcaaaaacatacaaaaaaatggaaatccatacacaaccgttctatttctccaattattactagggctaatatttttaggtttttacctatttttttcatgagctccctagggtctgaaatgcacgaaaaacatgttttttaggggttgttaagctacttttcgagttattagtgcctattttctaggtttttatttttagcgcctaaaaaactaaaaaaatttttaaaaacttattttcacctattttggcgttttgcccaaaatttgttaacaaaaatgcaataaaaaagaaaaatacacccctatgaattgacccgaaaatttctcaaaaattcacctccaaaatttatttattttattttcttgacgataatttttgattttgaaaattatgtatattttaatgacttggcaaaatatttttgctttttgatgaaaattttcaattttacacccctaaatttggaactttttggcacctattttctcatttttagcacctattttggagttttttaggacctaaaacctacctatttcggcagtttttag

SEQ ID NO: 18544 - DNA, 853 bp, Heterodera glycines
atcccaaattaataacgagaatgtttattttatgagacaatgggaaaagaatgaaagtttttccttccgaatgcaaggaatcggctaaaacaacaacgatattttgggttacgccggaatccctccccccccccctctttttttgatctcactcagtccaaagggtttaattttcaggtgtttgaaatggactgtatgacattgcgcatccaatttaatataataccaatcgctatctgttttttttgttttgtttattaaatcatcaacactatcaaattgtgcatttattcctttgccattttgaaatcgtggatcaattccaaaagttttcatgattatattttaaaaaatgtctctattcattgttttgtcgaatgacttcgtccgctcgtggcaatgggtcggcgtttaatttgcaaaaagacactgtgataattagcaggtaaaacattaattggctttttccttcctcaaatgataatccttttcttttctcctttcgtcttgcacaaattttgcgttttccgttggaattcgaaaggcactcattggagaagggagatcatcccgaaatccgagagggaattgcccacgcgcgacaatggttcgatcgtcgattagaacaaattcgaattgtggagacggtgagagaagagggcggggaggaaatagtgggacaatgagtcctttaggaggaaaagggcatcatttgcagggagtacgaggaaggggttgcccaactcgagcaggaacatgtcaaggtgggctaacaagggaacatatcgaactgtatgtgtccaaatcactttaaaaccacgtctatcatgtagagcatagtctattttatttt

SEQ ID NO: 18545 - DNA, 2094 bp, Heterodera glycines
ttttgcagggatcactcctcagtacaggattaaattgtcttgaaaatatccaatgcaatctataagggcgattttttgaaaaaatatgttcaataattagacaaattttttaggcttaattttaaaaaaattttagaacagtcagtcagattcgggaggaagaatccctcgggaatagatttgatattccgtatactgtatatctccccgataggtctgtcacgcccaaaatctgcatagtgtcgcaaatggtcgatctttagaaaatctgtctacaataatgaccgattcccttatgcgagtgatggttacgaatcggcgcagcactagggtgccatggaactgacagatgcagcaggcacagcgaagaggcgttctcagacgaagaaaagcggctcccctttcggattccttggcttcggcagaaccgaaggcgctgtcggtggttttgctggtgccatcggtggagggccgaccatcggaggaacgtccacttcttcgctgatgctcccttatcttttgtcggaatcggccatttcggaggacgtccattcgttgggcagcgactcggccaaccattgccatttggcggaacgttcgtcagcaggatgcggcggactgagtcaagacggagcgattggggatggagtggcactgtcgggcattgcatgccattccaccgcaggcgaaatggccgaggaagaggggggcgagaaagcagcgggcgccagcggaagacaccaccggcgagtgcttttggagcagaacaaactcattttggatgggaaaacgtgagcaaatcagtgggaaaatcaccaaaaagcccaccgtttatgcagttttcatcggtttcaaaatgtgtacattggtaagtgagtgagtgcctatggtcagcaaaacgttgctttttccgaattgacttcgtccggtcgaatgcccgccaccattcgctcgatcagcgagggtcgttacgtcgaatttcgcaggtgccgtcccttgttcccttggtagtccttaaatttccattttcagtggcatccccggcgatacgcgcacattcacggccaccaaagacgacttggagagcggccgcgtttttgtgcggaagcgatattaatgggtggggggcggggttggcatggcattttaattgtttaattttatctctacattaaaataaatgtttattacatattgtgtgtttgggtaccaatgctattttagtaacgtttatttatttctgtttttaaaatttaccaatattttttaaatttatttttcgatgggcagtaaacgccgtttcttacttcattttagtcaggctcaccagacttttagacgtgcggagttcgatgccatttgtcagattaagggaatttctgtggtgcccaactctccttcggatggggttttatttatttcttttttgggtcaatatgttcgttctgtccgcagatacacattcaatcgtttgagtttcaaaacgacgaatttgacgtctttcggctgttggaaagggctgtgttagtgaaagcggcgtacgaacccccccccccccgcccttcaaaattttgaaaaataaataaaataataggagactcagaattttgaaaattttttataaaaactgatgacaagctaatgtgataaaacaggttatttctcttcctttcagtatccctgcaaagtttggtgcgcttctgatcagtttctgaaaaaaaagttaagcctaaactttttggcctgtttaaaaaggaattaaaaatttttaaaaattttattcatctccctttttgatagaaaaagcatcagagtgcctaaactaacatgtaaataaaatttggtgcgtttcagaaccctttctgaaaaaatatttaagaattaattttgcaaaaaataaataaaaacgaaagactcagattttcgaaaatttttttgagccagctagctcggcgctcatttcagtgtaagttagtcctttaccggggagtatccctgcaaagtttggtacgcttctgctcaattagcaaaaaatatgagtgatagaattttaacgaaaaaagttaagcctacattttttggcatattaaaaag

SEQ ID NO: 18546 - DNA, 1340 bp, Heterodera glycines
  unsure (1)..(1340): unsure at all n locations
tgctaggcaaaattttntgctatactaaaattccttaactactataaatgtttattaaattaagtgtttgaaatcaaaattaatttttatttaactttatttaattaaatatattaaataaaattagcaaatagaatataatttaaatcttttcattatacgtaactaattaattgtaatcaccgatatgttcaaaatataaaaaagcaatatttatataaataataaatttaataaaatactccacacttatgaataactttcgataattttattactataatttttataaaataaccaaagaaaataaattttaaaaaatattctaacggcaaaagaataccaattaatatttgaacaaaattaaaaaatatttgaaagtaatgtcacttaaacttttctcccatgaaagatgtggcttattcatttgggttaaaatatttaaaattagaaaaagtaaacattttcattttaaaaatcaatgattttatcgcatatttgtttcaaaattatttcaattttaatagataaatattatcacaaaacaatcgatataacacaaaggttttttaaaaatcattattttcatatcgttcgtaagtattttattttatttaatctgaataatttattttaatatttatccatcaaatatgtaatgtattaaaataaaaaaatttaaatactaaagtaagataaataatcttaactaatcatttatttcaaattgtagtaataatcaattcttgttttaaaattgtttattttttatgcttattcttaaaaatatattgtatgaataataaattaactaaaatgattttaattctttattttttaacaaagtaattatataaaaaagtcatttaaataaatgcaaattaaaagaaaatcgtttcttatgattgataaggaaaaaatgtaaaatatggttttaaaaaccatccatttaactaataattatagacaaataaaaaaaatttcttattgaatacatttttgtgaataatattaatatttatttgtaattttagaaaaatgtgaatttttaaaacattatggtaaaaattattttttaaatttatttttgtatttttatatataaataaataaaaattattaagcaacccacacagaatataattttttaatgaaaacaaattttctcaattaaaggaaaattaatcaaatgattattaagtagcgatatatttttttattattattaatttacattagatattttagacttgcaattttttncaaaaacttatcttaagattatatccataggttctcattttttaaattaatgttttttttttttgaaattttgcaaa

SEQ ID NO: 18547 - DNA, 1952 bp, Heterodera glycines
ccaattttgttttgttcattttttgtattgtcatgccttccccgtcctggctgggactgacccggttaggtggtcgattggcacatgagttacagcaaagacaaatcgatatttcgggttttcgtaaacgttccgctttgattttctaaaaaaatgagtgtagtgaagtaagactattctaaattacccatccccgatgcatatgtaagaggggaggagggaataccgtagtaaaatgcggtcgggtcacttcggcgtggactgctcagcgtcgccaagtttgaaatgcctaactttttcgttgttcgttaagttattaaatcttgcaaatttgaagctctttttgtgtccacaacaccgaaaaagtccgaattgaggttatgacgaaattttttaaaattttgtagattaatatagaaaccaaaagaactaatcgaatgttaccaaaaatatggttgataatgagaacagttgttagcaacgacaaaacgatcgggacggaccacgagtcgggatcccgactgaatccagatcaatcccgaacattttggaaaaacgatcgggacggaccacgagtcgggatcccgactgaatccagatcaatcccgaacattttggaaaaacgatcgggacggaccacgagtcgggatcccgactgaatcccgatcaatcccgaacattttggaaaaacgatcgggacggaccacgagtcgggatcccgactgaatccagatcaatcccgaacattttggaaaaacgatcgggacggatcccgagtcgggattccgaccgaatcccgattccgaaaaaaggatgggaaacagggttgcacgaaaactctaaaaaaaactttcgtatacgaaaacgaaacgaaaaaattttggcggacgaaaacgaaacccgaaaaaataaccgttttcgtacgaaacgaacgaaaaaaccgaaaatttttttaacttatttcattcagaattaagaaacgtaaatctttaaaattatatcctcaaactgagtgtatgcagatcatagtaggtggataagcggatatggctctagtacaggggtgtgtgattgaaaatttttcgaaaaaataacaccaaggaaaaaataaaattttgagtcaaaaataaggaatttttcaaaattgcttcaactcagttattttataattgatccatcaaaatgcacataatattatattttcacctcccattatccattttaaacaattttggggaagaaattaaaaataatacatttcagagcaatagggttaaataaatcagattttaaacaattttttttgcggcgcattttttcagaaaacttggggaacgtgggtgggctcggcggtgccgataggcgccgctggggaaaatttctaaaattttagtgtaatttgttaacagattttgtaattaaaatagtaaattaaatgaaaaaaacggtaaaataaagtgctggcatatgggatcgaacccatattaaaaaaacaacaaaaatctgaaggtgcacgactaaactacaacagttcaatgaaaaaacttatttttttactaaaaaagtcattcttaagggtgtaaatattttcgtctttttcgtcaaaattccgtctgacgaaaacgaaaagaaacgaaaatttaaaattttaaaactcgaaaacgaaacacgaaatgaaaaatgaaattttgaaaatcgaaaacgaaaacgaaatgaaaaaattttaacggacgaaaacgaaacacgaaaacgaaactcaaaaagtgccgaacatattaaaataaataaatataaatatcttaaatgtggttttgtgtattttaaaatttttatatattatttagtccataagtaaattttgtactaatttggaatgagagcaaagtcggagtaacatttttatttacatttaaaaatcgagtaaataaaaaaaatcaaatcaaattgatgga

SEQ ID NO: 18548 - DNA, 2330 bp, Heterodera glycines
  unsure (1)..(2330): unsure at all n locations
cagctacgtccaatgcactgttacagtcgccgggttcccgtggaacaacaatgatgaccggactgaacaacagcgacgttggcaaggagttcagggtaagaatcataacgaaagcaacatattaattttaaattccaacgccaaattacaaagaaacattttctctgtcttcaatttcttcatttcctttcgccaggggcggagcaaaagcagtcaaaatagctaaatttcaaaatccattgtgtaaacgaaggaaaaaatgctaatttatcgtttcaaatacacccctattttcccagcgtcgctggtatgagcaaaaaaaaaggtcgttcgggcgaaagtttttcaaaaatacacccctaagaatcgggcgaagaattttcaaaaatacacccctaagaattgacttttcggatcggtacccccccccccccaagcccaaatcctggatacgtccctgtcccgaaccatgcggggccgaactgaggtaaaccgccctcccgcccggtaccccagcccccaccctgggaccaccgttcctgcccaaaacccataagtgccgccgcgaaccctcccttttgttttacatttgcattttcccattgttcagacatttcttcgtgccaccacttcttctgctgctgcccgctacacaattcaatttgacgtgaacaaatcgttgccaattgtgccatttgagttggtgaacgaacggacccaagaacggctgacactgtggaaaggacgcgattatgaacacgttcgtcagtgggtgatgaagcgatgtccaattggggagacggcgatcattcagtgggaagcgcccccaaactcatcggcaaccaatttgaacaatgtcaacatttatttgtgttgtgtcagctgcactggttgagcaccagctcatatgtactttgtcaaaatttgatgattttttttttctagaaaatacactattttattctgtaaacgtgaaaagatcatgctcattttcggtagttcaaattaggttctcgacgatttgccgtccgggccgagtgtggtgatcagaaacagcagaagaaatgaattgattggttgatttatgcgattatttgatctaaatgttgagcgttgttatttaggtaggtaaatgttgatcgttgttgtagttgatttttgctcattcacaaatcaataaatagggtcttaaaattagcaatacatattttccgtggtgagccgaaggttttctaattatcgctcattatcgcaaccaaaaaagtcatgaaaattgggaaaaagtcgaaatcaaatggttgaccgaggaggaaattgagcgcaaatggaggacaccaattgaacaaacgaaagaacaaaaaatgatcggaatgtgttgtgatcagagaaacagaaatcaaacaaataaatacatttatttggctccaatacgcacagtgtcgggagatccattccaaacccagatttgaacaaaaagtcgagaaagatcaacaaaacaaacaaattaaatgcattcaaactaacgaagcaacaatacataaatatgaggagcaattatccaacagcagatcaatttccattcctaatgatcaatcatttccaaataattcattcactttttcttccgctgggcccggcactcattcatttttgcacgtcctttgcgttcatctgctgatccgcatttggtggagacaatcgcctataaatgaagtgtgaaaattaaatgtgaccgacatcaattaaagcaaaaaggggggggggctctattacagtctacacgaccattaaataatttggcactttatttgtcatgtttccccacaaaagtggttttctaaacttttggcaataaattaagttgtcaacttattttatttatggtcgtgtaaaccagggatggcatggaattccgacacttttggggtcggaattccgatttccgaaaaatggtggcccccggaattccgatttccgaaaaatggtggcccccggaattccgatttccgaaaaatggtggcccccggaattccgatttccgaaaaatggtggctcccggaattccgatttccgaaaaatggtggcccccggaattccgatttccgaaaaatggtggcccccggaattccgatttccgaaaaaatggtggcccccggaattccgatttccgaaaaatggtggcccccggaattccgatttccgaaaatttttggggccttggaatgccagcanaagctgctttcactctctctctcacccatgcaagaagcttcataaaacgtaaagtggacattatttcaattgtccgaattttcgtcctcccattgaac

SEQ ID NO: 18549 - DNA, 1461 bp, Heterodera glycines
  unsure (1)..(1461): unsure at all n locations
aggaagttttttgatttttttaaaccatcagctgatataaagaaaagcattgttgtctgtctttttccaattatattgccatttcggcatcggtctaacaaagctgcgcatggctttgggaaattcctcaggaattaattttcgttgtctaaagaaatgcgctagtgtcgggcattttgacattaaaatgccattaaggcaccgttgtagcaatgatgcacgtggtccttggaaattcctcaggaattaatccctgaatttcttctattttcttatcactcacaaatcactgggggaaaattaagatgattctgatgattagcgttcttgttcgattttggcgctagtgcgatatttattctcatggttcttggaaagtactcaggaagtatttcgatttttgtaaaccatcagctgatataaagaaaagcattgttgtctgtccttttccaattatattgccatttcggcatcggtctaacaaagctgcgcatggctttgggaaattcctcaggaattaattttcgttgtctaaagaaatgcgctagtgtcgggcattttgacattaaaaagccattaaggcaccgttgtagcaatgatgcacgtggtccttggaaattcctcaggaattaatccctgaatttcttctattttcttatcactcacaaatcactgggggaaaattaagatgatactgatgattagcgttcttgttcgattttggcgctagtgcgatatttattctcatggttcttggaaagtactcaggaagtatttcgatttttgtaaaccatcagctgatataaagaaaagcattgttgtctgtccttttccaattatattgccatttcggcatcggtctaacaaagctgcgcatggctttgggaaattcctcaggaattaattttcgttgtctaaagaaatgcgctagtgtcgggcattttgacattaaaaagccattaaggcaccgttgtagcaatgatgcacgtggtccttggaaattcctcaggaattaatccctgaatttcttctattttcttatcactcacaaatcactgggggaaaattaagatgatactgatgattagcgttcttgttcgattttggcgctagtgcgatatttattctcatggttcttggaaagtactcaggaagtatttcgatttttgtaaaccatcagctgatataaagaaaagcattgttgtctgtccttttccaattatattgccatttcggcatcggtctaacaaagctgcgcatggctttgggaaattcctcaggaattaattttcgttgtctaaagaaatgcgctagtgtcgggcattttgacattaaaaagccattagggcaccgttgtagcatgatgcacgtgntccttggaaatcctcaggaataatcccctgattcttctatttcttatactcacaatcactggggnaaaattagatgatctgatgatta

SEQ ID NO: 18550 - DNA, 281 bp, Heterodera glycines
atctttctttactttttccgctaaccgataaaaatccttcacatttttagtccaaaaaacaaaaattataaaaaaaggattattcgcatttttctacggtatcttctcgcctacggtattttccggtgtttttccgtgtcagaatcactccgttgttttcacttttcctgctaattaaccaactccttttttgtcgaattgctctattgtccgtcgtgatctgatgttatctcttccgtgccccggggctgcccaccctttagttcccaagggtcggtccc

SEQ ID NO: 18551 - DNA, 1689 bp, Heterodera glycines
cattctgttggggtatttgtacagattgagccggcaccgcgcgagattggaaatggcggggaagcaaagcctttagcgcgaacaaagcgattggtacaaaaaaaggaggaaaattgttgattttagtcagcttagtgcaaaagtgccaaagaatgcatttccgtcgcaattaatgccaccgaacgacttgaaaatcttcggccccttctctccgcttggccagtattcccgactgagtgccgccgcctctccatcctcgtggggctcaaccggcagcaatcgatggactgacgaagaggaggatgggggagggacatggaagaagcggacgaggggggaggaggaggaggaggacgaaccgtggagaaggaggaggagccgagaaagtacgggggaggatgaaaaagtgcgaagaatggacgaagagttggccaggctcagggaggcgccggtgacggtactgaagagacgggactgaattgggcggggttgaatagtggagagcagcgggagactaaagcgggggtgggggacagggctgtaagagcgatggggacaattgttgggactaaaaagaacaaagtgccaataaagataaataaaaggcatgggaagagacccaaggggtcaaactgtgctaactgttacatccgtcgaggtgaagacggtcagtgggccgggcaagttcgcgctcagcatcgacatgaacatcttccgcccggaggacattgaggtggtcactggccaagcactgcttcagcttcacctcctttttggcatttccaggtgctgatgagtgagggtcggcttgtggtcaatgccgaaagggaagtgcttttagacgagcgcacttcggtgatccgccgttttcgacggactgtggccattccggacgatgtcggcacagacgcagttgcagtgcacatgagcgggtccaaaaggcatagggacagcaaaatgagccgagactcacaatcagtctcgacattgtgtttatttattgcagctttttgcgttttagacgcggcattttgactataacggcgcttagacgcgagaggcgaatatttggcggaagatgaccaaagaaccgggcaaattaattggttaatttgcgggagattaatcggaatgatcagctgaggcgggcttcctctgaatttgtctgttttcttatcaatcattcttctctaattgccttttttgttcccatccgtcccttttcaattcatcaatatttaattattcattttcccattttcccccaattgcccctctctttcccccccccattcccacgcttttaatttctttgctaattcccgtcaatttatagtttttgcaaaacattttcacataaaatgaatgccccctctttttcctcttttttcgtcgttattggcaaccaaatttcactttaaactcagtccgtccgtctgtttgtgtccccaatttcaatctgtccctccctctctctgtgattttattttctccatttttgctacaatttttaaccattctcacaaacaaatggatttttttcattttttccaatgttaattatttttaactttatatttacgagtcgtttgatgttgggcttatgaaagaattggcaatgatttgtctttgggtgacaaatgtcaaagccccccccccttaccccttcccggcttcacccctctctcc

SEQ ID NO: 18552 - DNA, 2836 bp, Heterodera glycines
ctctctctctctctcgatctctctctctctcgatctctttctctctctctctcgctctctctctctctctctctctctgttgttgctgtcgtacgatttcccctcgtcggctgtcgctttccctcattacccattttaaggtgtccctcattacccattttaaggtgtccctcattacccattttaaggtgtccctcattacccatttaatgagtccctttccctcattacccatttgactctcctaattacctttttaatttgcacccgaaaagacataccatcgaactgactgttctgttcctcctcctcctcttctgttgccttttcggatgatcgcaatctctccaaaccgttcctcccaaattaattgaattcgttccgcttatccttacgttgttaattaattgcttctgttgctgttcgtttgttcatcatttctcctttaaaatgctgtaattcgtcactgcctttccaccaaatgcttcccaaattccccaattgcccctctcatttccactccctgccgttttggcaatttttccccaattttcaaaaaattccccctgtgcgttggtggtgcttttcccgtgccccttatcggttagggttcgacaaagccgagaatgacacgggcatttccatcccgtcaattgccttcccccatttgtctttgcttccccaaattaccccttttaatttgttttgtttttcccattttatctcttttcaccatactttcttccaaaatgttgtccgcacagcggctgatcagcttgtccaaacccgagcgtgtgttgcccggccatttgttcccgctgaacaacaaccgtggcctcttggacttggaggatgtgtacgccgccactgttttcgccgattcgtcggtggacggcagcgacaaagaggcaaaagtggtcagcaaattgcttatgatcctaatggctcggacaattaattcataggtttcgcccggctctgacggtacacagacaatggaagaagcaaaggggctggaaattgttggcttcggactgttccacaaatgcacgcccaatcaggtggggatgaccaaatggacaaatgctgatgatcagaaaaagctgatcagttgcgccgatggcaaaatgccaatttaataccgccgtttttcagttttactgctctttgttgtccgtatcgaagcacattgaaccgttgttcgtcaacgtggaaagagtggccgaactgaaaaagtcagaaacggaaaaggaggaaaatgccaacaaagggacgggacggcacattttgttgagggtgagacgaaaatggcacatttgggcgataattatgcttattggccttcatcaaccgcactttaagctcaccgatgtgcaccaatcgttgcccaatctctcctccctcccccaatatttttcggcatttgctgaacccattggccgtccgttgctccaatgtttgttaagcattttctaatttccccgagggcattttgtcatttttaaaatttccttaggcattttggacgaatttgtgagggttcacgttggcattcacgaggttgacgagttatttttcaatttttggcattttcatgcgttttattcttcatcagatggaaacgcgacgtaatttcacggtggatctttacgacgccgactcggggtaatttggccagtttttcataaatcggctcctttcacagaatcgacgaacaccccgacacccaatggcgcgactttgctggttttgttgtcgccgaccgtttccgctactgcgaaattgagttggacaggtgggcaaatgcggtcgaatcagatctgctgatgattcgagagtcggtctcgagtttctttaattaattcgttaatcctccctaattaattcgttaatttctcccccccccctttcagtggcgcctttctgtcctcatttgacgacaattccctctcggtcaatgctcctgttgttctccattccctttcgccttcaaatagggcacttttccatgactacgatcagtccgtttcggtgatgggccgtgaagaatatttggactttttgttgaatttggcgggggtaaaaaggaaagaattgaaagtaaaagcaaaacactcccaattaacagatggaaggagtaattgcaattgacgagcagaagaaacagccgatcggatacattttggcatatggggggagagtgttgcaatgctacgcggacgaggagaaagtggccgggtgagaagcacaaatttggggggaaggagggaccaattagcgttgggtaattggggcgcggaacagaagaaattggcgtaattgggcgagggtcaaaatgagggacaaaatcattctatttacctcccctccaccacacataataaatccctgcttatcaaccctattcccgacgaagttcttgaccccaaaagccatctcccgccccctccgtcctgggcacactcccaaaattgcccgatcctaacagaattttctttccccttaaatcccccccccctccgcttttagtgcgctgttttgtgccacttctcgtgcacttcgttcgcccgcctctctgtcgctgtttcctccgtctcttccacgacgagtttccgcttctgtccgcccgtctctttggcaccgactcgcgcgtccgtcgccgtcgccgttttccccgctcgcgctcaatgaccgcggcggtgaaatgggtcgaagctttggcgccggccaccggattgcgtttgttttgatttgtgagggaatggacacaaaacgattcgataggaaaaaacgaaatttaattttaaatgaaattctaattttaattgttggaaat

SEQ ID NO: 18553 - DNA, 1434 bp, Heterodera glycines
tcttttgatgggctgatttcttggagtaagaattgtgctatttagcgaattttgagggtttatgtcaaaaatatcttccaattgttcttttttgttttgccgtgcgaatatcataatggaaaagttgacgcaaatacatgtagtcgggtgcctcgtcaaagcgtaaaccacggcagtaattcaaatacattgaaaactcggaagggaatcccttgcacagcatttccaccggggttgacattttctaacaataagacaaaatgaaagaatgcacagccaaagtattattagatttaaggcatcggctttttcaaataaatttaagtctgtataatgatcaccttttcactgattttctcatatttctgctttttgttagccgctttcaggccttgccatctgaaacgcataatggaatgaagaatgcttttcaatcagattaatctctcacggcaaatttccacgattgaaatacatgagcacatagccgagcgactccatatcgtcccttcgcgactgctcgatacctaaacattacgaaattcaaaaatttgatgctgattgagagacagaggttttgttaaagaggcacatttatttacctaattgaggggggggggggggataattcaaaccgttggtcctaaaactgatatatggatagattgagtaaaagaaactctggacttcaatttaagatacttattaatcctattgccaaaatttatcacacatacacatgaaggtcaggcgattccaaacaccacgaggaaaatgttttttagagtattttaaattactaaacagtacactagcaaccaaaaaatgaattaacatgccatcctgcttacccatgtgagcattgatggacgcatagcgagcggtgcccgtcagatttttgttgtctcggtaaggaatgtgtatgcgcgtgcgcgagtcacggtatttttttgccaatccaaaatcgatgatgaagagtttgttgcaatgccgaccgatacccatcagaaaattgtcaggtctaacagaaaatgggatgtcagtggtgcatgtaaagcaatttcaatgctaacttgatgtcccgatgaataaagttcttcacatgcatgtactcaatccgtccgatcatttggtcggcaagcatcagaacagtctaaaccgaaggagataagactttggaatttttactccacaatgtttaaaaatgatgaatgaataccacttttgtttactaacaaaggaaaaataaataaaccttcatcgtgaagcgccggcaacaaaagttgaacaagtcttcgagagaaggacccagcaaatccatcaccaggcagtggtagtcgcgctcgatgccgtagtaacgaatgtgcggaatgccaacccctccttgcagaaggaaggacaccttgctctcgtagagaagctgcgggtggcgag

SEQ ID NO: 18554 - DNA, 709 bp, Heterodera glycines
tgactgactcaagtttaaccgccacttcttcaccattctgaatattgatggcgaggtaaatgtcgccaaaagatccgctaccgattttgcgcttgagcttgtatttcacaccaacgatgaattccttaagcgaaattttcagagaatgcctcaagacatttttataatcattttcggaaataaaaaattgtgaatttatagtctaaaaacttttagaacaatattatcaaagttaaaaacgggcacacaccttgctattgtttgtgactacagcagccatcaaaaaatttgtcgttttttaaacaggagaaggtttgaggttcaagatgtcaattagcaggcttaaggccttaaacctgaaaagcgtgaatacgaatagcgattactcatccatggacatcagtaccaaagtacgacacacaaattgtaaataatattacacacaccctttattttgattaactactaaacacattcattgatacttatgtaaaatggctcactgtcccttctcttctcgtcaaattttctaatttcttatataatttcttttcttttaaattgcattgcccttttctgagaaagcattgtacaccataaaatcaaaacgcggcttggtcagaaggttggaggtagaggaattaagagaaaagaagaccggaaaatataagggaaaaggaaataagacgattaaaaaggaagaaagaaa

SEQ ID NO: 18555 - DNA, 1138 bp, Heterodera glycines
gggaataccttcccttatagcctggtacttttaattctgcgttgggatttttcttccccataattgtttgagtaccccaaacggacacttgaaaaaatcgatttttttatttcataaatatttttttagaaagtgctctaaagcgcaccaaattttatttacaagttaattttagcactcggatgctttagtatcaaaaaggaagatgaataaaatttttaattgctttttaaacatgccaaaaagtttaggcttaaattaaaaaaattttcttcggttctagctctttcaataagcaataaaatcgtaccaaattttataggcatactccccggtacaggactaacttaacctgaaaaaatgacaattgtaattggttttaaattttttagaaattctgagtttttactgtttattattttttgcaaaattaattcataaatattttttcagaaaatgctctgaaacgcatcaaattttatgtacaagttaaataaggctctctgatgctttcactatcaaaaagggagatgaataaaatttgtaatttgctttttaaacatgccaaaaagtttaggcttaaattaaaaaattttcttcggctctagctctttcatttttaaatgtttggatttttttttggcttaccaaaacttcatcgaatctggctctttctattctaattcaaatcgccccaaattttttttacagcttaactaggccctattaagcttatttccagaaaatctcgcatgaattctcatttttaaattttttatagatttttaaatgtttggatatttttttggcttaccaaagcttcatcgaacctggctctttctattctcattcaaatcgctccaaattttttttacagcttaactaggccctattaagcttatttccagaaaatctcgcatgaattctcatttttaaattttttatagatttttaaatgtttggatatttttttggcttaccaaaacttcatcgaacctggctctttctattctcattcaaatcgctccaaattttttttacagcttaactaggccctattaagcttatttccagaaaatctcgcatgaattctcatttttaaattttttatagatttttaaatgtttggatttttttt

SEQ ID NO: 18556 - DNA, 2395 bp, Heterodera glycines
ttgccattgatttcccaattaatcatcctcattatcatgatcatcttcatccgttcgccatctccgtccatttttcatcccaccattcgtcttcaaactcatcattcgtccccgaatttctgctggtgacggctcttccgcggtgcatttgcgcaacagtgccaccgcttggtcccgtagggatgggaggcggaaaaattcggcctcctgagtcaacaaagccagtctaaagagatagcaaaatgcaattaaatgccttttaaatttaattaaaaataaaatttcgattttctttttaaaaaaaattacatttattgattggatttataggccataaaaaataatatcaaagaaaagttctccaaatatggatgaatatggacaattaatgatataaaatacctagaaaaattttcaaaatatgggcataaatttacaaaatttggaaaatttaccaaaatttcaacaaaaaaaaatgcgaagcgaaataaaacattacaaattaaatgaaagccaattttaaattcgaattttttaattttccggatatttattatctttaaagtgaaatttttaaatatccaaaattttttaatttaatttaatttaaagaattattaaaataagtagtttttcatttaaaaacgtacctgtccggttccttgggcaagcagacttcccacaactgtttggcattatgaagacgtaaatagttcaaaattatgccgaaacttgtcgggtccctgtcgatgaaaaaacggcctgaaattggcagtaaaaattaaaaattttctaaaaatatttttaaaaattaattttcggacaaaaataaatttttgattggcaaatttttatttaaattatttatttttttattaattctaaagccaagctataccttttttgtcaagcattgtatgtgccgaacctttgcgctcaaaataccactgaaaattgcaaaaaaaaaaaaaaaaaatttaattacagtaaattaccgtaaaaattacacttacagtgtaaagaagtgattctttgtcgaaactaattgtttgataagtgcttgcaaaaatttgtccaccaacattaaattcaattatgtctgtcataatattttctaaaaggtggaagaaaattaaaaagaaaatattttttaatggaaaaatgcggcgaaaatattttttaaataatattattctcgaaaaaataatatgagtgtcaaagatgtgaaagctgtgaaataattaatctaaatagccaatttttaaataattttgtgtaaatttttttaagaagttgatcaatacaaaacagagtttttaaaattattttttcatttattttttaatttatggtataatttaaattattcttttatatatttgctattaagtcgagtgtaaaaataattaccagttttttaccaactttgggagtaaaattttaaccagagtcataattattaattagtccatgataattaagtaaaaaatacagagttattttaaatacattttttaccattttctcaaaaccggaaaatgtataatttggcatccctcatttgtgccgcatcagcgacagcagcagcagcagaaatgccaacaatttggcatgttttgccgccggcggcacaaatcgatataagcgatagttttggagcggatttcatggggggaaaatgaatgcataagcacattttgagtgccataatgaggcgtacaaatccccacacttttcaaatatttatgatggggagagagcatttgggaaggggcgggggatgaaacttcagcgggcgggcggcagagcaattgagaaaagtgtggtgggtgaagtgggggaagaaaattaaaagttttgaaattttaacgcgccaaaatagggaaaatttggcgaaaagtaatagacaaataaaacaaaaccaattaaaaaggaaaagtttgttgcaggacgagcgagaagcagaggagcgagcggttccgtctctaatgagccaaattttttgggctataaatttgggtcggcgtcaaattttagaaacttgtggcattattcgatagaatctttttcaagctctattatatctatattttataaaattaaattggtaaatagtgaaaaaagtttactttttagagatcaattccgtctaatgagccaaagtttttgggctataaatttggatcggcgccaaactttggcattattcagtagaattagaatcgagaaaatttcttagattatcatctctttttaatctgtcttttatctgtaggatttttattctttatttagtatttttcataatgaaaaatgcactttcatttggtgtatcttttgcatcataatcttaaagtgaaaagagtaataataaatgcatctatatacaaaatta

SEQ ID NO: 18557 - DNA, 2010 bp, Heterodera glycines
aaacgatgtgaaacaaatgatgaaattgactgagctagtggcactcagaaattcctggaaattgaaatgaatgccaaaatcattctgccaactgaaagtttttttacagtcactttctcccactctcactcactctcttcatctctttatcttccttaccctccctattttctctcccactctctatctgttatctttctccctctcttgtctctgtcgcttaatctctctttttctctgtgtgtgttcttctctgtatcgatcgctgtgtcactcaacgaattagataattattttatttataaattttaatttaacttttatcctactaattaacatttattggtttgctttcccgtcgcttgcctgcttgtattcgtcacttatatcgtaccaaaaggagcggtacaacactttcggacggccatccgcgcgtggccacagaagccattcccgcacttttgtggtggcgtcaaagggttcatggctgtgctaaaagtattaaagaaaccaaaccatatatatataaacgcttttttttgcggcgtgctttttccaaaaaacttttcgagtacaggggacagaacagcatgaggtgccaattagagacaggaaatttcaaatttgcgaatcccgctgcgggacgggaactcaaaattttttgcgggacgggatgccgcgggattattccggcattttcaaaaaaatgcgggattgcggactgggatcccgcaaaatcccgcgcgggatcccgtcccgcgccggtaatttcctgttttcgtctcaataaaaattcgttatataaattgctaatcacggatcaaaatcacggaaaaattgaaaaaatcggtgacccatgatcacggcaccccagaatccccggatttccgtgagccgtgatcacgaccccagccctggtttatggccaacatcatcaatgctatcatagtaaattaatcggagatttgggcattcgatcagaaaagttgttgaagtgcttgcgagcagtccacgcagtcgtacagcgccactaaaaattgggaataattgttgctagggaagcatattttaggtatttaaaacacgtcgattcaattttgggatccaagcacaattaagttggatttttcgtcttagtggtctgtgagttagtcaccaaaaaggggatcgcaggttcaagtcctccttgtgttagtgtataaatttcaattttttaaaacaaataaaaaataataataaataattatagaatgccaaaagaaaaaatacaaacacaaagagttacactatgttttactgcagatttttttgaaattttttttagcttataacttggtcaatattagaccaaataaaactattttatgctcattttgaagggaaaattctgaagaatgcttctaagttagtcattaaaaaaatgtttattggcaaataattgattcatgtgtaattttatatgtatgttagagacatggaaatagtacgccaaaatgagagaaaaagaaaaaactttgtcctggtaaaaatttttttcctattgtcgtgcccattatctcactctagcgattccaagtttattttgtgaaagttaagtttttaacacaagatcgattcttccattttacaaggaaaagcacaaaaaaaattaagttttgcaaagttttggcgttatgattactaaataaataataaacttatttacactgggagccccaaattgaaacgccgtgaaaacgtacaaaaagagaaaattcttacaaggttttcaggtaaaaaaaacactcaaaaaagatttcatttgtttgcaaaatcttagaaattttttaggtatattcgtataaatgcttttttcgtctttaaattcatttttgttaagggtttttctaaaaacacgtaccaaaaatgccgaaatagataggaaaatagatcagatctttttgatcaatattttcttaaatatttcggaatgtttttgtaatctaatttcctaccctactgatctattta

SEQ ID NO: 18558 - DNA, 1766 bp, Heterodera glycines
  unsure (1)..(1766): unsure at all n locations
tttcggatatttgtgccttttttggaagaaaaggagacttttaatgtcgtccaatttttgcggccatccttgtttggtgaaggcactgatttgttgtagaatttcgtcttttgctgattcctccgctattatttttgcggtgatcggaagttgctcaattttggcctcaaaaacaaaattaacacagcaatcagtgtcattgcagatgtttgcgatgagaatgtcttccgatggcctcggataatttgcgatgagcctcgaaagtacgtcggcatttccgaatgcctttgtgttgacgtatttaatatcaaattcgtaatttgacaaaattaacgcccagcgctgaagtcggctggctgaatatattggaatgcctttttttgatccgaagatggccagtaggggcttgtgatcggtcaacagagtgaattttctgccgtagagcatgcggtgaaatttttgtaccgcaaaaaccaatcctaaagcctctttttcgatttggctgtaattttgttgcgcagccgtgaaagtgcatgatgcgtgttcaatgacacgttcacttttgtcgggaaattgatggctgattgttgcaccaattcctccttttgaagcatcagcggccacaatgattggcaatttggggtcgaaatgcgttaacaataaatccgaaagcataatttctttggctttctcgaaggatttttgttgttcatcttcccaattccacggtacatcctttttaagcaattcatctaatgggcttcttatttcgcgcatttgtttgatgaatttgccgtagtatgtgagcgctccaaggaaagaccgtagagttgacttgtcgtgcggcgctggcatttttcgaatagcctcggctcttgatgggtccgggcggatgccattttcagaaattatgtggccaaggaaaacggtttctttttgaagaaaactgcacttttccagttgaattcggagaccgaattgtttgattttgtcgaaaactttggtaatcgttttgacgtgttggtcgagagtcgtgttggcgataatcacatcatcgagatagacgaatgcgccattgatgggtgtaatgattttgtccatcaaactttgaaaaattgcgggcgctgattttacgccgaacggtaaacgctggcattggaagagtccgcggtgtgtgttgattgtacacagctttttagactcatcagacaattccaattgcagataagcgtcgcgcaaatcgaggcgtgagaaatatttagagcctgcgattgcattgtaaatgtcctctggacgtggcagcggatggcggtgtagctcaagtgcgtcgtttaatcccgtggaaaaatcgatacacactcgtgttttgccattcctctttttgactaccaaaattggagcggcccagtggctaaattcgatgggctttattgcctccattttcagtagacgatcgatttcggcatttacgtcgttcaaagcgccatgtggaactggtcttgccttgcagtagataggcttagcaccgtttttcagaatgagattggccttgaatttggtgcagtgacctaattctgggctgaagacatcggaatgtgttgatttgagcgccgaaattaatgtctccgtgtctttgatttggttaactttcgnntgaattgtattgatttttggatgaaagattgggtgcataatctccttttgggatcacttccaaaggcttctatccatggcatgcccataaattatgactgatttcggggcta

SEQ ID NO: 18559 - DNA, 2046 bp, Heterodera glycines
gtttaattaattgttcaattaactcaatttggcttaatttgtttgactgttccgatcaacaacaaatgttccgagtgcgcgaaagaccacgtggatttgtcggaggaggcgttcaattggttggagccgggcggcggatcggtgggagtggcgaaaagtgaaaaagcaaaaacaaaattggcattaattttcatcttaatcattttagatgctacaataacctatgtgaagtgttaaccatggggatatgattggtctatggatgctcttaagtgatattcttctattttatttcacattttttgttaaaataattattaaatattattattcaacaattcttttgtttttattataattgcttaatttaattatgaatggttggttagttttgctgactatttaattattttaatacattttaaaaagttttgttttttcattgatcaaaaaagttatgtggccaaaaatatccaaaaaaacaaggggttttttgtgttccttagtcataaccttttttaaacaacaaaattttttgaaattttgcaaactgatagagaacactttgggctatcagatgatatcaacaattaaaaattggttgattttgagcaaaattataaataatttttcatcaaaaattttcatattgatggttttttaattaacgccctttatttatgatgttttttgttatattattttttaaccaatttaatgtatatggtgaaggaaaaaaatcttgagttaataatttcgagacggagagcatataattacaaattagcatatgatataatatggattaaatttattaataaaaataaaaaccatttattttttattatttttatcaattttttttttgtcacattttccgttcgtttcgttttccatgtgattgcatttgttatcgccagcagaaacaatgaaaacaaactacgaatatattcttgcccagcagcaagtttaagctacagcagcacacaacattatttcgcgcatttcggatgatcaatcaaagaaagaaatcgttgtttaatctttttcattaatgttgtggctattaatggcggacattactaattacctaatattgtaatattttcaaacaaaaactatgaaaagataaacgaaaatcaatttaaaagggaattaatgccatgtgaataattcattcattaatacattaataatatttgaaaatcacttctctcttaatcctcttctcaaaaatggtcctgctttttctccaattggcactgattttgctctgttcggtgtttgcttttattgtgtaagttttaaaatttgaataaaattttcatcactttttggctttgctatgttattaaagcattttccaattcctaattctttatttaattggggccaatagcagttcgtacaataacaatttataaaacaaagcctaagatcaggcttaggcctaagtccaagcaagtagaagcttagggcgctaaggctaggctcaagcctaagcttaatccgaaggcttatgctgattctaagcctttataaaaatgcctattgtacgaacggtctttgtacgactgccatgaccccatttaattgtatcaaattggccatagaatgatgcgcaaacatcgcaagtactggtccaaccgtggcattccgtccccaaccccgcagctgatcagtggcaatttcggctcgctgtacggcgattatccgagcatgttccagctgcgggattggaccagacagtacggcaagcagtacggtatccaatacggttggcgcaacgcgttggtgatttctgacccggcaatggtccacgagttgcttgtcaccaaatttgaatatttccacgcaagaaatgttggcactttttatttttgacaattcttttttggtttcactgctttttgtcctttggattagctttcgcccatctttggcaatttggacacaaacaaatggatcagcatgttcttggccaggggaggccggtggacaaggaagggaacgattgcgaacccggcattttcggtagcgaatctg

SEQ ID NO: 18560 - DNA, 1077 bp, Heterodera glycines
  unsure (1)..(1077): unsure at all n locations
tttttaacgtttttttggtcaatttgtcgtcaacttattcaaaaaatttttttaccgaaataccagtacaccacctccctgaactaactggatacagtaagtagtatcaacattgtataaatgagaattctgtttttcctttctttgcttacggtgtgcggatagtatgcggaattcgtcttcatcatcatcatcgtcgtcatcctcgtcttcctgctgctgcagttcatcggtgatggtgtcgtcctgctgctgctccgtgccgtcgccgccggtgacaaacattttcttcattttggcacggccgcccgcgttggcggcacaaaatgagccgccactgctgttgtcgctgaaatcgaccacaacacgggagcagcgcccaacacgaaggcgatgcgactcgcacacagtgccaccgaccaccaaactgaccaactgttgcgcaccagacacctgttgatgttggggatttggaattaaaaaactggccatatattcagtcacgtcccctcccccatcacattggggacgggacaaaatatcgccgcataaattttctgataaattacagtttttttttgaaaaaatttccaaaataattttcaataatttttttcttcaaattttcttataaaaattttcgaaaatttttttttctagaaaaatttctcagtttgaaaaggcggcaatattttgaggtgcacccatcaaattaatttttaaatctgaaaatgttttgaaggaaaacttaagattttttaaaatttttcagtgattttttcaaaaatttagaaaaaaacttattaattcatcataaaattaaaaaaaaatcgctagaaaaattttcgcaatttcacaaactctgccaaaagattttcaagttttgagcaaaaaatccatcataaaactggccatgggcagagaacgactaaagtttaccatacgtattagccggctgctcngagattgtcggtctcgagcnggaaatttttcgagactncgaaaaaattcgactgtcaagcagagcagcccagcccttttgcttataaatacatgaaaattncaactcacatttga

SEQ ID NO: 18561 - DNA, 937 bp, Heterodera glycines
ggcacaaatgccgagtcaatcagcgcacgttctcccaacagatggtttacacccgccaaaactgagcgttttgagggtggtgccacagcgtcgaataatgcaactcaaatgcatgtgccgcaggggacgacgagtgccaaagaaacgaacctggcgaaggcaataatttaaaaaaatataatcatcatcccctgctttttagtatcattaattgatagaaagaatttttttagtttcaaaaatatgtccaaatgggagccccgacatttgcgcctatgtcaaaaattgcgttcaaatttgaattttttttcaagccctgatagcctaaacagtagctattaattgctccacatttaaagggtccctccaccctaccaaatcagtgtcttcgccaaacataagccgatcagttttaagccaagcgctggcgcaagcctccagccaacccttggagacctaaatttttgttttttttcttttataacgacattttccaaactctttcaagccgaatccgatcaatgggcccaacatggtgaagcagcagaaccaacgcacgttcaggcagttcggacaaattgaaaacgcattgagtggaagccaaagtcttgaaatttcaaattttaaaaccaaattcaaaggaaaaccggagaaattttttttttgggtttatggcaaaaaaaaagtatttttcaagaaaaacgagtacagtggaataaattaaccatgacagaagagttggacactgtagagttgagtgaacttcccgacgaagtgcgcgacaatgtgttgctggcaccagcttaaccaacaatattttttaaattttggtctcttgcgttattagagccagtaattttttttttgacaaaattccttttttttggcacaacctgccagttccgcggtcgttgaacgctgctgaacttgctgcaat

SEQ ID NO: 18562 - DNA, 2269 bp, Heterodera glycines
  unsure (1)..(2269): unsure at all n locations
agaatggacaatgtgtgaaatgtgcncagggacagtgctgtgtgaatggaaaatgtggccaatgccaacagggaacacaacacanncagaagcacacaaaagttcaagcagtacagcaacaagcgcagcagcagcagcagaaacatcgattttggcacagaatgttgagaaagaagcgcggagcggacgacgaaataaacatttgaaaataaaattaaaaaacgacaaaatgccaatgtttcgctttatttttgaacattattttttcttgaataaactaaagtggaattggacggtgacaattcatataaaaatggttaaatcaaatgaggaaaatctgagcaatcttcgatcagttcaaatttgaactgctgatcggtgtcttattttgaaagtaacggttatttgtcgctcattccatttgcaacattgacaattccattcatagtgcatatttagtaccggttagtaccggtaccgccgatactcaaaaaccgggaccgagacttgacttttttcaaaaaccgggaccgagaccggtaccggtacctgaaaaaaccggtaattaccggatcggtatcggtaccggtctcggtctcgtgctaccctaattgtaattattagagcccggatttttatgtttttacatattttttctgcggtttaattatgacgagagaaacccaaaatagcattttccacttacaattttgctttagagcgtcttataaaaacataaaaataaatattttgatgttttgcaaataaaaacatatcgcacatatttcggggttttggtacatacagtattttgcacatattttggcatttttgagaaaaatctataagaaaaatacaagaaaattgaaaaatttccctaaaatcaatttttttgcaatttttcaaacaaaattttttttcgaaagatgccaaattgaacttttcataatcgtcattggttttcgaagttctctgctgaaacttcttcaactgacagcttttaatttacaaaacaattttatcagaaaaagaacaattttaccccaaacacctccgaattatttggtttgcaattgtgcgggcgaaaatgataaaaaaatgatacttaattagaatttttatgcataaagataccggatttttccaatttatagcacatattttttggtttttagcacatatttcagcattttttagcacatattttttttttattaaatttacaggatttttaaaacataaaaacctgagctctagtaattatgcaagaaatctcccaagaaaaatgtttgcataaacttttaaatttgggcacttaggtaggtccatactacgttgagaaaagtcctgttttttgggacaacaaattccggcaatgtttggccaattgtgtgaatggtcgttttcacatttactgtcccccccccttccctcatccgttcaattaatcaaataatatgtgacaaattgttacaataattgggtcatttggaagtgatccgggtcatttgcgggcctgatctgctgatttgtgctctacatctctgctcagtgctcgcgtgtaatatctcgataaaagttgcaatatttacatgatccagatcattttcaggtcattagcccaacctcctgatggtattagctagaccaatttgatggtaaaaaaaaaggaaaaaaatcaaaggacggatacgttaatttctacggtgggaaccgccgtctccacctaataaatcacattaaatttttaaaaaattaaattaaaaatttcataattacctttttcgaaattgcaggcccctatttcttataaattttaaatatttaatcaaaatttagtaaattgcctttcgtgaccaaccaaacatttgtcatttgcaaaaatatttggattaccaatggcacaccgaaattgttgttgggccctgctcattctgctcacggtgttgtgttgcttgaccgttttggtgccgtcaattttggcctgctgttgcgactgttgctgctgttgcggcggtggtggcggtggcggcaatagtgccaataatattgcaactgccacagcgcttgccactgctctcaacggctcgttgctggtgttgccgggttcaagttctggtaatgtttattgtctcgattttatgacaaaaaaggcctaattttgatagggaatgaatttgcttttccaatttttgctttttaacgctaaaattgattaaaacaaaaaagattaaaaatctaagaaacgataaaaacaaaaagaacataa

SEQ ID NO: 18563 - DNA, 1578 bp, Heterodera glycines
  unsure (1)..(1578): unsure at all n locations
aatcgtagaaccactattccaataancaattcggtaccctacataatgtnggtgnttgnnatgtgggnttgnnnattttntcccttaaaaaatttnnnaannnnntagggattttgaaaatttnnnngattttnagtgtattttgggtgtnnagttnattaaaaaggagtgatntgatnaagttgatgtaagaganttttttgagcagcaacaaaagttgggcaagcatgaattatttcaagtatttaaatgaactataagatagtttttcaggtttgagccaagaatttttggggcacagtatttctctcgtaaaactgtaactttgtttgggaaatattaaataatatattgaaattataattatggtcagaaaataattaatagattaaaataattatattattaattaattaaattaatttcgtccgtactgaaatgacgccacacctctgaaagtctctcactgatatttttgtcacttcgactccaccaagaatctgtaaaaggggatgttaaagcgtgtagatggattgaaaatagaaaaagtttcagatctgttcggccataaacaattttatgcgccatgaacagatcaaatcaaacagctttcgcctattctcaagtgttggcatttgcaggtgttctaatcgattttggtatggaattggcggaaggctgcatttaaaaaatacccttttggtgttttgccgtgtttctttttgttgcgtgcttttgttgtgctaatttattcataaaaacggtgaaaaccagaaagcaaaagccctttcgttaatttatttagtatgaatgaagatttttcaattctacgctccatttgtcgactttttaaaattcaaaatttaagccacaaaacggaaaactaacaaaatttgaactaaaaaccttcaaaaatagcgttattttgttgttgttggcagactttgggggtttatttatggagttcctcaacctggattttgcgtgactggattttcaattacggaaatccgtaattgcatccaaccccgaccgcgttatttggttatagtttccaaagattttgatatttaggcgaatgtcttataataactgatcaaatcagattaccaaataacttactaacgggactttttcttcgtgtccccccccccccatcgttggcagattcacaaaaaatacaaaaatcaagctcttggtttctgcacatgatttctaataattagaaaagtcaaaaatcactttttcttaaaaaattaaaaatttataaaagtaaaaataattttttctatttttaaatgaatcaaaaatagaaacaaagttttattagttaaatattaaattttgtaaatgacggagcattccgtattagcaacttttgcaaaaataattttccaccaaaattcataaggaactgataacgaggtagtcagacagtaggatatctggttattttaaatgattgcttgacttaaaagttgatcaaaatttattttttaacttaaccaaaatgatcaaaaaaaaattacttttcatttgattttagaaatatattttgacggatttgtattttttttc

SEQ ID NO: 18564 - DNA, 1068 bp, Heterodera glycines
aaaaaaaattacttttcactggatttaagaaatatattttgacggatttgtattttgtttccaagtctcagtatcgtgatgcagatggttgtattcttggtttcattctacggtataacgacatcaatttacaatttcatcgcttagaatgatcacaattatgtatatgccaatgcaaatgtggatctggaaatctttattgagtttttttgtttattcttttctttagtgaccgttggatttagggttttttaattttataaaactttttttttggttaaaaaaagattttttatttttttctttttatttttttttgtgtacataaaaacgctgcgccagaaatctatataaaaagtgactttttacatattttttttttttgcaattttttttggaggttttgttaggctcgccaggaaaaattttgacaaaattcttaacgattttgcgtcaaaaaggcaaagttgtggatttttatgtaaagtttaaaaaaactcaggaaaaatatttactataattcaagttacaaaaacctactagcaacattaaatttaattaaattaaaattgtaaaataaatctaatattccagtcaggggattggactaaggtgtaaacttataaaagaatgtaaacttaaccactagaccatatccccacttgcgcttgatcaattttttttctatgattttcccccttcccaaggttattcattttttagtactcaatcagctataccaacttaatttggacgcactaaggcgggagtccgcaataagcctttctaatccttaaaacacgaaagtatctttagtcatttgagattttggtagattaaatgccaaaataattttatgacagaagacagataaattaaatttagaatgatacatagaaccgaaaaagacggtaaaaagaggtgaaagggggacggtggaataatatcaacaagaaacagaaaataccaatgcttcgcttgagaatttgaaaaataaaacccagggttaccagagtgagaagttaaaccatcttttttgggttttgagaggcctaatagtgctaaatt

SEQ ID NO: 18565 - DNA, 2512 bp, Heterodera glycines
  unsure (1)..(2512): unsure at all n locations
gaagaataatttagagcgaaaagaaatttcatacttaatttttttgattttttattggacattgttttctgaattggnccaagagagatttttgagaaagggggctttttcagaatttctttcctattgtttcaaaaatttttaaaaattcagtgtatgtaaagtttaggtctgatcataacaatagcatgaaattttgggaatcggtctcttattgaaaaagttatgccatccaaacactttttggagtttgctgattcaacaatttatgatgactcgtgggaatttttttaagaaaatcagaatgggccatgagataaataacaaatagcccttacaaaatatacataattggttttttaatttggcggagtctcggaaagaaaattcatttaaaaaattttgaaaaaattgcatttttggaggttgaatttaaaaaatcataaaagttcacaaactcaaaataaaaatcataaataatgcttattaaaaagcccagagttttctccttagaataacatatccaaattaataataatttgtttgaccgatttttaaaaaatccgtaaacaaatcaattcacagctatgcaaagacttatttttttacaccccaataaatgccttttataacttttagagactaaattcactccgtcaaatttattagtttatccaggaatttccattaaaattaatttttttttaaatacttatgatgaagtatttaaaaaaacatgctcacagaaactccatggatgaagaacaatttgggaaatgatgaaagggaatattgtttacgtcttatgatgcttagttatcaataggatacaatttcgtgccctaattatcatcctacggactatttttattatcataaaaattaaattttcttaaatttttgaaagtaatctctaaatattttaattttttaaatagggatggcagttttaagaaacgcgtcagcacgaatataaaaccaaaattggttgaattttataacaggtccaaaaataattatcaaaaaattaaagacgaaatgggtttttttaatcaaattttctatatttatatgtattaacaacaatcaaactttctatgaagtagtgacccctgggcgcgtgttacaatttttggcgctaaattcaaatttgaattttcgcgtcaatacattgtgggtggagggacgcttgctggggatgtgggggcaagccgtagggtgtagggcttattttaattatgttttaaatttttattttaaattaaattttaattattattttaaattaaataatgccaaataattatttgccataatttggagggggcgcgctttggggggatgagatgcaaatttatttgaaaagtgtgaaaataaattaaaaataagaacaaacatggggggattaacaacgggggcaattagggacacatttttgcttccagtattcgacaatcatgcgcattttcttgtctcgttccgtgtgtttggcgctggaggatgcacgagacaaagcgaaagacgaagcagacgaagaagacgaagcggaagcggaagagcaggaggacacgtttgatccaggtctgctgtttccaaacagaatttggccggccgctttgatctgatcagctgacagcagtttgtacgctgcccgtgtgcattctcgcggcacccgtcgggaacaagaaggagcctttttttgggggaaattttacatttttattatagtgtaaaaaaaggaggcaaccatcggcaccacatcgcacaacggttgaggcgtcggggcatcgtcgaccggggcaatttggagtgccggtgcaaatgcatgttggttctgctgctgaccgaattgaagaggagggagttccaaggcgccctgaagccgaggaaacggcgagttgatgaaaaatggcggaaaagcgggccgcagaggagacatgttgtgaaaatgcatttggagcacgctaacggcacggtcgacaatctgcgaaatcagcggccgaggcggcagcagcagttgttgttggtgttgtgccgggaacaattgctgcggttgttgttgtaccgggaacaattgttgcgggtgttgttgtaccgggaacaattgttgcgggtgctgttgtgccgggaacaattgttgcgggtgctgttgtgccgggaagtttgtcaattgttcgccgtcaatgtccaattcgatctccacgtctgccggagggacttcggcgggtgccggtaggacaacggctggcggggcaatggcggcagccggtgggacagcagctggtgccggcgggacatccgcgagacgctccttaaagcgaatgcattttgttttttttgctacacttattaaaattatgttaccaacggcacacattgcccgtcgataaggccttgaagggcaaagtcttgctcgccggccctcgcaaaaacgctaaatttacaaaaaacaaacaaatttgtgctgatagacacggtttcttacactcttctggccttttgaacattgagt

SEQ ID NO: 18566 - DNA, 1747 bp, Heterodera glycines
  unsure (1)..(1747): unsure at all n locations
caacagatatagatcatagataatgacnatatgagattgtatttatgatcagcgattcatatcactaggaacattttgagggtgctaaaatattagtagtttgtcgtctgaaatttgacgtttcataaaaaacaataattttagaaaataaaagacaaatgccttatttagacgacaaatgacaaattttggaagacatacgactaatttttttaaatagatttatgataaacgacaaatgacgtaaactgacgacaatatatcttttgtcggttgtctctgtcgtaagtaagcgccgccttttgcattctctaattactcaagacctacataatttacagccccccaccctctcccacacctgctcgctgttagcaatttcggtgtgctgtgcgttcggcttattgatcaggttctgcaagccgaccaaattgctgccgtttgtgggagtcgcgatttgttccttctctcgaatccatgtcttgttggaaacaaatttttttttaaacaaaaagatcggttcccaaaataatctcagatctcgataaaacgaaatcaagggtctagattatcacaaacactttttagtatcctcttattttttaattgatcgatgaggtgattaaattcaaaaaaaatttacaaaaaaaaattgtgaaaatcgcaataaaatttttcggagaaccagagtggaattgataagcgtgggaaaatgaattattttcattctcaccagaaaacggcgtcggatgcggggccaagtgtgcagaaagatcactttgagagcggcgatcacgcttacgcaaaacaatccggtcaacatttttgttcttgtctgctctccatccgtttccgtctcgcaatcctttcccgtgcgcggttgccacgccttcttgatgaaccgcgtcagaggctattaaggaacagcagaacaatatactaattttaagtaatataacattgattgtcagttgtttgtcaaaaataatttaggaatttgggtaaaaagttaaagcaatttgggtgcagttttactgtattaagaaattggtgataacccaaatcgtaatactagtagcataaattttgttaatgcaaggtatgattgtaactgctcgaatttttgagatggaaagctgctgaacacggacaaacaatgaaaatatttaattatctttttcaaataaaaaatgccgaagttaaaaaaccctttttcacccttaataatttatttaaaaaattacgtcgttggagaaccattcactttgtcctggttgaagagccccagcaaaattaagacaagttgtgaaggcaattaaacgaagtggcagcggcaattgtgcctgaaggatcaaataccatatatttttattaaaaacttcctttggatatgatatggggtgggtaggggggggggggtggccggcgagggtgcagctcgtttccgcccccgagaaattcttttaaaaaatttactaacagatatttttcaagaaaaaaaaaattttttaagaaaattttaagaaaaaaatttgaaaatttttatggtcaactactaaggtgtttcaaaaaaattttccaaaaaatctctgaaaagctctcgagattttttaaataattttcttacaaaaaactttttaaggtttttttttcttgaaaatttctaagttggtaaattttttaaaagaatttctctggggcggaaacgatgcaaagggaaaaggcgggggggggggggggggggggg

SEQ ID NO: 18567 - DNA, 2189 bp, Heterodera glycines
tttatcaaagtataaaatattatttaattaataattaccaatttgtagtattttccctttaaaaatgggaaatgccacaatatcttttcattattctccagcctacgaaaaataaattgccgtttctatgacaggtgaacacgacgaggaccgatttggcacagcaagtcatttgcccaattgcttgtgttgagtaaaaaatgcagctgtcatttgctcacagaccattcattcatttgttttcgaaaagctctatttacaaataaaattaaaaaaatagaaaaataaaatatattttggtgtattattaaattaaatttaactatcgtctccttctaattatttttaaaaatgttttaagccattttccattcgcaatattttccttttccaaatgccgcgcaattttctgctttgggtcaatgtcattgaatatttcgtctgtttggctttacaattgcctgctttgcttctgcttatggccattaccatttcagtgcaatttcgaaaaaagttttttatttttattttctttatttttttataaatttttctccgtcagaaatcactcccaaaatgagaaaccgctgtgtcccactctgatctattatttgctctttctgctgatcagtctcatctccgcagttgcttatcactgttatatggtttccaatttcgtgcaaaatggtgccgaaaaagccgacccctattggatgttctggttggcactgtgctacgaatgtgccaacgttgcagttccagtggctatcctcggcctcacaattgaccggtatggcatcggcaacagagttgccgccgagtcactcaaccggaagcattagcatcggaattttggacaaaaatacaccccctaaaaatgggcttaaacgcaatggaattgacattttttcttcttttctattatagaaaaagtcaatatttattttttccttttttaaattttatctttacaaaaaatagccctaacaaataagacattttttcgttattttcgaggttataaaaaatcagtaaaattttaataatatctacaaaattgttcatcatcctccaaaattgcttttttggtgcaaatctgctgttaacaaatggattttgttagcttaattttcgacctgactcaaacattttgccaatttgcttaaccattccccaccgtttttaagctgtttgaccatcacttttccgctttcctacggccgtcgtgccaaacgaatgcttctttttgcggatgttcttttcagtgtgttgcttttccttgtgactttccgcatttattttgtggaattgccattggatgcttcgcaatgttcgtttttccatttaaaaatttgtttttcttttggtagtcataaaaaacaattgaattttcttaattaatctcccaaattggccccattagtgtccgagttgtgtctgaatgcgtcgtgcgttaatatgcgaaatcgcaatttgtaccgacttggcgccaaaagtctgtttggcttcatcaacattatcgccagcttaatttttatggttttactgagggcaaatcgggtgttgatgaagaacagtacggcacgacaaaaagcatcggtaattgatctttttttgtttttttaatttttgaggaatatacggcggaatataaagcaatttgccttaattaatatccatttcaattaatgttgaagtttaagcgtaatcgaatggtcgccatcactttgatctgtgaaacggtgttcaatattttgccaaatatggttgctttttttgcgaacattgtgcgtttcgttccttaataattttcttggctataataattaaaaattattaagttgttgggcattattttgtccaattatttgggttggataacaatggtcggctattctttggattccttcgtaatggtaagagatttccaaacagattttaaatttccagaattttaattttgattatcaattaattcttcagtcaattttttatttcattattttgtttggccgacaacaaaaattaattgtggccaaaaatgtggcaaaagtggcacctgccaacccgcggcaaaatgccatccgttgattaaacccgttttggtggtggggaaatgggcgcatgccaactaagcgcgggccgagtgagcgtgacgcgaggcaaaaaatgcagaataagaacagaaa

SEQ ID NO: 18568 - DNA, 2492 bp, Heterodera glycines
actcagacgggagggaccggtgggatgcgcaaccatcgcaaaatgttcatctcggcagacgcgcgcggacttttctcttatgcatttgtggacttgggcgacgaattcgttgtgaacgattccgacggggagacgtgcaaagaggtggaaattggaataattaatttaattgcgaattgaatggttccgattttcaggtgctcgttgagtacatcgactgcgaaagcggcgacatgatgacactcgaaggcgcatttcaccagttggaggacggggaccacgttgtgttcaccgactttgagcacgccgaactgaacgaacttccaccagtgccagtcactttgaagggaagtgagtgccaccactgaacatttgttggttcatctacagtcctcccatttttaggcaatgtcttcaacattggaaatgctctcgcggccttttctggcgcagttcaaggccccgtttcgcgtggacgtgttcagcaagtcaaagtgcccaagaaaatgtccttcaagccattgtctctcgcactcgccgagcccgactttatgatttgggactttgccaagttcgacgaacctgcacaacttcacgccctttggcaggctttgtacagttttgaggcgacggttcgtcattctggccactttccatttgtttgggttttcctttcagaaaaactacagccctttgccccgttccgatgccgacgcaaaattgttaaaggaaatgctgccaaaagatgcgcccgaaatgccggactcactgctcttcaacttctcttaccaggtcccttttgtgcctttttcaacttcgaattcctcccccgtcttaaggcgtgcggaaatctccaacccatcgcttcgctcatcggcggtttggtggcccaagaggcgatgaaggcagtgacgcaccacacgacgcccctcaagcagtttctgtacaccgattctcttgaggcgttgccgggcgccgattcgacctttgacgccgccaagttggagaagaacgattgtgcaccggtgagtttttggacggacaactaattgctgttggagtgttcaaaaactgtccatttgcagcgcaacaatcgctacgacggacaggcggccgttttcgggtgggcctttcaggaggcgctgcagcaacagaaatggttcattgttggcgccggagcgattggctgtgagctgctgaagaacatggtcagtcatttgctgccaattgtaataaaagtacgttttgccaggcgatgatgggcttgggctgtggcaacaatggctcgctgaccatcaccgaccccgacaccatcgaagtgtccaatttgaaccgccagtttctgtttcgtcgtcctgatgttggggtcagttgcgagtcttaaatgttaccaaattcttgtcatcgcctttctgtagaaaaagaagtccgaagtcgccgcccgttccgtcaaagcgtttaactcgaccattcacatcaatccgatgtctgagatcgtcgccgagtcgaccgagcacatcttcggcgacgacttcttcgcccgtctgaacggcgtcagtaatgcgctggacaatgtcgaagcacgtaagaaattaggagaagggggggggcagactcaaattggcacttttgcccattttgccaggccgttacgttgaccgccgctgcgtgtactatcagcttccgctgctcgagtccggcacaatgggcgcaaagggcaacacgcaagtggtcttcccgcacttgacggagtcttacggctccacgtccgacccgcccgagaaggagacgcccatctgcacgctgcgcaatttcccctaccaaatccatcacaccattcaatgggcgcgagctgtgaaatttattgacctaatttcagttgtaggaaaagtcccgtttaagaagttcaccgactatttcacttcggttgcggagacggtcaaccaatacttggacaatgtgaacgactttttgcaccgagtgaaccaaatgactttttctcagcgggtcctttctttttccatcttttatctttttttatccgagttcttttgcagatcgaagtgctcagtacgcttgagcgtgcgttggtcgtcgaatacccgaaaaatgcggaagaatgtgtgagttgggcccgtgaactgttcgacacgctttaccacaacgacattgcccaaatgctgcacaatttcccttccagcatggtcgttttcctttccatccatccatttttttcttttttatataaatttgcttttagcttactgcccaaggcgacaaattttggagtggaaccaaacgctgtccgcacactttgaacttcgacgttaacaacgtgactgcccaatttaagccaatgaacccgttgtccatttttagcctgaacacttcgagttcgtcttctccgcttccattttgcgtgcccaatcttacagtttggctccgatcactgagcgcaaaaaagtggcacaattggccatggcgtactgctc

SEQ ID NO: 18569 - DNA, 2104 bp, Heterodera glycines
  unsure (1)..(2104): unsure at all n locations
atcaatcagtgtgtaattaaattaataaactgatatattgggtgaaaaaaatattngaagttagtttcccatccctcagatgttgatggggatnttccatctcgactttttgtcctgctacttttctgaccaagtgatgagtggctttgtgcttggtggctgtgttcatggtaaagcatttgtagaagtttttaacaagcttctttctgctgttaattcagtgtttttttctcaaattggcgatttgctcggcattcaacatttgttgccgaaacgctcgggcagaggctatctttatgaagtgatttttaagctcaaatgcaattaatattttttgcataatttagcgaattttggacatcagcttcaacttgagcaacactcacatccccacaacaataatcagccttagttccatcgcatttttgatgttcactcagcaaattttggaagtacaattttcaatttaatttttccatttttatattttttaaagccatggctcggcacagcttttcaatttccgattccgtacgaattgttgttggtgagcaaatgaatttatgcttaatttggttggtcatttgctttttgttaataatctcaggttattattggcataacttcgacgaatttcgcggacctttcaactcggcactctgttacggttgtcggcaacattccaacaaagtaaaatatatttaatattcaaaaagggaaacgctttacctaattgaaattatttgcccagctttccgcccccttcgatggtccgttacgaattgttcccttttgtattctttgacgccattggcatcgcagtcactgcggtggcaatgcatttgaccgtggcaaaaatagtggaaaaccgatatcattataaaattaacagttgccaggtgattgggaattaaattaattaaatatttaataattattgttaatattttaccccacttttcgtctctttgtttcccaaaataccccccccccctccccttttaggaattgtactccctcggattgtccggcatttgctcttccgcttttcccgtctttccgatcacttccattttcgcgcgaactttgatcggtgacgcggacgaaaacagcacacaggtccgtcagttcccgaatgatggcacttttaaacggcattgcttttgccagatgaccacctgtttctcgacactttcgctgctcactgtcattttatatattggcccaattttggaatatttgcccaaagtatgaatttataaaatgccaaaacacttaatatgcccgatttgctttagtgcattttggcttcgattgtggtccgtttgttgtctctttcctttcattttttatttatttatttttgttttccttttttaaattgcctttttcagatggtttcaatttgcgcttctttcaccaaatttcgcgaattgcgcgaactttggccgctttttaaaattgattttgtaattcgaaatttcattttttaattaactaattcctaatttaggtgattttcctagttagttttttgctcactgtttgctatgatattgccgaaggattgactttttccgcgcttttcagtgcctttacaattgtcgttcgcgaccaatggtcacatttcatttaatgtttggcagtttattgcttagtttcttttcaaattaggcctaaatggcattttctgacacacgacgaagaattgggcgagtacaaagaaatgccgaaggaattgctgcagcaaattgcggacgaagggcacgcgtttatcatccgatacgatgcgccgctgatttttacgagtgtccacaaatttatgaaagtaaatggaaaaaaatgaggaaactaagtgaatttgggtgtgcttttaggtgctcatccaatgcgtgaagcgatgggaacagcgaactttcgacaaaaagcacgaggcaaaagcggacaatgggcggcgggaaaaggcggagattggccccggggcaaacaacgcattaatcatcgattgctccggctttccctacgtcgactttttgggcctaaaaacgttgaaaaaagttttggtcttccgttcatttgaaaaagagcaaatattttaggttta

SEQ ID NO: 18570 - DNA, 1304 bp, Heterodera glycines
cattcttccgacgaatttgcgcatttgcattaggaaaacggggaaagtgagcagaagagtttaattgtgagcataaataacttaatttgttttaaaagtgagtaaaaaaataattaagcgaatgatttgaagggatttgtcatgggcaaaatggacaacagacaacgcacgaagaacgaaccgaaattcggactatgacggcgaaaatttaaaagcaaaaattataaaaatataatttaaggcaatggaaaagacggacaatgaagaaaaatacactttcattctctaatgttcaattgtacgaataggctttttgagttcaaagcacaaaagacagaactcaaaaattattaaaagaaagtcggtgtaaagcaaaggatgctaaaactgcaaaagaataaaaatgcaaaaaattacggggtagtctgggaattgaacccaggacctctcgcaccctaagcgagaatcataccactagaccaactaccctataaaatgccactatttataatttcttataagcaccttcctttcgttgattcatcgcaatttcattcctcattaattaattgcttccagcgcaacttattttcttaaccccttgcaacttcatatcattaattaattaaaatgaaaaaatgtggtgttttaaaaaaaattgacttttctcgttttttcgagagaatttacataaaaaacgcaaaataagttaagaaaaacagttaagacaattagtcgtccatttcctgtccataaactgtttaaggaaaaatggtaaattctgcactagaaataagaataaaaatctgaaggcagcaaaaattgcttaaaaattttgttaagttttgacctttgggtttttgccattttcggcttcatcccaaaattcaatcgcttctgagtgtgacttgcgaatgaatcattcgctaatgacattctcaagaatgtgtgctgtgcaatcaattcattgtgctaatcatttgacattttttggttatgctcattctcaattaaaggcttttcgatagacaaaagccttggcggaacgctatttttgctccttttgttcattctctctatctctcccccactccgttctctctctctcgctctctggcattgtcttttctgtactgatcatttgtccgtctttgttcccctccccctccctatctccccctcattcaccgcttgtgatcagatatgtagctagaatgaataatctgaatgaatatgcatgaaatcatactaatcaaaatgccaattcaaattaaaaaatgggagggggcggaggggccgcggct

SEQ ID NO: 18571 - DNA, 2687 bp, Heterodera glycines
atgtttttgtttgtttttacctggggttattcccacactctcatagtgaaaccattcaaatggacactaaaaagattaaatgaattttataattaaaagtaaccgacatttttgttgtcacatgcgaccattttcccatgtgatcgctgtaaaaagcacgtctggttaaattttagaaagatgccatctccactgacctgcttgcaaatgcaccatgttttgttgtcgtccgcctcctctcccgcctcttcatcttctgcttcttcctcctcttcgtcttggtaactgtaattgtcctcgtcctccactgtctcttcgagttcgtctgccattccctcctctccatgcattttcctgcgtcgtctccgtcgtttaatgcccgtttgataagttcgagtgcgagtaagtgactgaaatatcgctaattaatgcttgttctcgagtgtcgtccatacgtttgctcttgatggcgttcggcccgttccttccccccgaattggccctgtcacccgcgcagtcccttcgtttaacatttgctccacttttttcgttagcctataaatgtttttatttgccttttcgccatgcgtatttatcgaatgccactttcttggccttccatgtctgcttgcatgtacgccggccaacaacggcattcgggcaagtgatggttgtcgtgcgtggaaaggactcaaaagggggccaccaattgagcccaattcggtgccatcgaaatcaatttttgcgaacgaagtgcttgggtatgaagtcgatattgtcgaaacagatgacgccgaaccctgaaaatacgaccatttttaattgaaaattaaccgaaataccattccaaatcactaccgttaaaaagaatttaacctaatttaaccaattttattcggtctgttacccatctgtctgaaccaaacagtccatcatttcattacctctcctaaagaaatgataaattttacaccgttcccattgtttttactttgttgttcgactgcaattatttcctgttgttgaactgctccaatatgtggaaaaaaatgttgagttgcgataggcttctgcttctgttcagaaatgccttaatttgcacggacaaaatcaccaccttcaaagggggtgccacttcggcatcgaaaatatcctcatcataaggcatcaatgtggcactgctgctgctggtcgttggaccatcggcaagtgatggacgccgctaaaaatgaccaaaattgaaactaaacatctgtttctttgttagcccatttgccacgccaacattcaaaagagtggcgggaattcggaattcgtcaaattgttgtgttcgatggcccttcggagtcaagtccatttctgttgatgttctgctgaatcgctggttccttttctctttattttgccaattaattacctttcttcgtcaccgtttaagttttccgccgacaccgaaacaaaaggccttaacgggtggatgatttgctgctcgaggttgtcacttccaatattcaaattgtccaacaaatcggcgaattgtccagcagatgaagaagacattgccaacattgtttgcataaaatctgggtactttatattatattgctcacaattaatattaccgttaaaaaatgccacaaaaattctaaaaccctgccctcgtttattaacaactcactcttttctatcaactccgtctccccggggttctccgcctccaagtcggctttgaattcggccaagtccttcgccaccctttcctggtacttctctaaaatcaattgcaggtattcggccactcgcacttttgcctctccaatttcgcgaaccgattggaatttctgttgggaaaattcggtagattaattcaattttgatttttcaataacctcaagtaattcgctgtttttctgctcggctccaatcggagtcatttggtcgatggtttcaaagaagtgtcgagagtccctttgcaatttatcgaacgcaactgaaaatattcgataacgcaaagcaaaactaaaaaataataatgggaaacgacctgaatactgggcatccaattgttgcaattccttgcacttccgtctaagctcctcaggaaggtgttcaagcacttaaattcggtaaattatatccacaatatttaaaaaaccttcggtacttttctagtttatgtggcagtatttcacatacctttttcaatatccactaattcatacttttttatattgtcaaaactttgtctgtggttttcatggggtacatgtacagtttacaccccatagaattttttttaatgatataaacgtgtttctaggtgtattcggggtctctgattacgaatatgacatccatttcgactagttctcgaagcccggacccgaattccaagaaaaaaagaaaccaaaaccggagtccgaaccgccagaatatatgagtttcatttcaacggattttaaacccaagtaaaaatacgattcgccttttaaactatgtcatcgaacccgtatttcgaaatggttgcttgatccgcaaaaaatatgtgaaatctggcctctaaactaggaactaggtaccaacatttctaacataaacgaaacgaacattcgagtgaatcctccaagtaatgcatttctcagagcgcaaagtttgaaaaaagaataactttcccttttctcccaatt

SEQ ID NO: 18572 - DNA, 2883 bp, Heterodera glycines
atttgtagctcatttcgttgccacagtcacaaaaaccattggtgtgtagaagcttaagttctctgagccattctgcgaattcttcgtctggtagagccaaaattttgaataaagcatcaagttttaaatttttaagtgtttccattaatctaaaagcaattgtgacaataaaaaaggaaaaaaaattgaaaaatttgaaaaaaaaaaaaatggggatacaaagtaaattagtacctattgtttgaggatttttgacatcccttcccgtcgatttctcgaacccttgacccaattttgggtccacaacaaaagtttaacatggaaaaattgcccaaaatacaacagcaaactccaaattaatcattccttctgttttagaccaaacgggccaaagactttttggcctatgcccattatatggccgaccaaattggcaccatcggggaacggcggcgtcagctcaaatttttgcatcgctacgaccaaattgagcggccactgaagcgcaaatgtgcattcattcatcgaatctgttctcatcgctgcaaggtttttgattttttttaaatttagaaatttttcatagattttttcaaatttgaaaaaaaattttcaaaacactttttggccaatcccgaaaaaaccctttcggattggtttgaggaaacaaaaattgaattcctttaggttttgattcaagaatcggacaacattccaccaactcgtttttggccaattcattttttaccctactcgttttttgtctataaatttatgtagaagtgcagacagcgacaagttcgacagttcatatactcataacacgtaaaaaacgagttggtttcttttttaccaaaaaagcatgtttttccctttttattccattttttcgttgtgtcaaacaattcatttttcctttaagaaaatcgtttattaccgtgaagaaattgcttttctgcgccatgccaacatgttcaagcagtgcagccaggcgtacactcggctgttgaatgtatgaagattatttgcaccaaatcgttaaaaaaattttcttttattgaaatttcttataaaaatttcgatttttgaaatttgtctgagaaaaattttcaatgacattttaattttttgtattatatgatacctatttcgttaacaggtgcatggaaacttggtgagcaaccatgacgaggcagcacgctttgaattctttgacaacaaccacagtgcggacaggtgaatttttggtttgggaggtgtaaatttgcgctttttgtgggtctgtcaatgctttaccctctaaaattttgttttttcagtgcccgtgacattctgcagaaggctttgcgcaaatttcccaccgcccctcgcctttggctcacttattttgagattgaaattcgcttcgttgaattgtgagtttattacgggaaaaatatcgatgaatttaaccattttttgctgtaccattaaaaaattttcaagttttaccctcttattccaatttaaaacccccaaaaattgttaaatttccatgaattttgttaaaaattgtttcattttcagtcttcaccagcgtcgaatgttccttttgcaacaacacaaaagcaatgagatgaaaaacaaatggcaaaagaaaaacaacagcagcaaaaggaaaagcaatggacaacaaaaaaatgaagagacggcacaaataactgatgaagaagccgagaagttcaagcagttcaacagcagcagtaacaacaatgatgacgaagacgaagtgcttggacttaaattggccaccattgtgtacgaaatggccatgaaaagtgtggaggagcacccggcggagaagacgagtgagtgaaagtgaaaaatatgccataaaacggaattctaaaaattcttacgaattttcccataaaatttacgataatcacacggatccaatgtctaaaattttgttgttttaatagttagtcttaatttaagaattgcttcgtgattttctccgtgttgcgcgtgattgtgcccattttgcggacgttttggtgcagaaactgacggaccatttgcatgcgttgggtgaacacgctgaagaggaggaagagaatgccgttgagggacaggtgaggagctaagttcaagaaatttgattttgaagaaatccaaacttgaaaaaatttgccaaaacctggcatgactgctattgtcagagatgccattcttacacccgagacttgcgtttttatgtgccatttcagttgatccctgacgagcaactgtttgctgttgacacggagggcgatgatgatcagcaacagaagcacaatgccgaggacgatgacatggaggagaacgaggcggaggaagggacgaaacagggcatcagtggtggcaacaaaacggacaacaatggcattggcatcgccacaaaaagcactggcgatggtggtggtggcggcaacaacagtgtgctggacggattcaacccggacgatcccgagcttaaactggttggtcttctgttctcacaatactagcagaactattctcttggagggagtctaatcgttcatgaccatgcctgtgaattagaaaaattaaaaaaaaatttagttgggggatgcaatttgccagcaccatcagagacgctcattcaagagtcccaaattttcaagactatggcctcctagccacaccaacagtcatattagaaaaaactccaattatcatgattggttcagaatttccttttaaaaattttgctttattgggggtggggttatccctttcccctgccattgttcaaaatgttgagacaaaaaaaatgcctcccgaaattgttagtaaattatttccccaaattgctcacagctgttgtcgcgggcaaca

SEQ ID NO: 18573 - DNA, 1921 bp, Heterodera glycines
cattcgctcattcatccacggaaacttgaagaaaggtgctttggttgtcaaaccctattagagcaaaaatagattttttcattacatagtaaaggaatatgcaaaatcaaatcattcgttatggttgggctaattgtaaggatatcaaataatcggcatcctcccattacatattttaaatacaatagaaaatgcatttaatccgttttgttctttcagctcctatttggcttcgtttcatttgcaaagatgggactgagtcggacacttactatttccgaggcggtggttatgaatcgcttgtgaattgtttgcaaaggtataatcgtaaaacattacgttcaatgtttttatccttcattattttgtagatacgtttttcttactcgttcggccaagtcagacaatctcattttgatttcggacagtcgcaccgatgccttggagaaatcagtgggcatgctcaacttagacaaaaaggacatcgtttcggttatttttctttttttaattttttgaggaagttcagttgggttttcatttaggttatctttacagtaatagttagcattaatctgtatatttagcggtttttctcaaatccttatgcaacgacaatgactttggcctccaaagtcacctcttcccttgcaccactacttgatcctgaggcggttatcagtgaaaatcagctccgagttctaagccaacagcaacctgctgcagacgaagacgaaagttccaaattgaggtgaaggctctgtttttttgaagcagttcgcgctcccctctcaattataatgaatattggtccgaggggtgggggaaacgtagtacattcctgttttttaatttactaatcttagacaattttgtgactctgggtttgaacacatcttccaattggatttgccacatcgtccacaaattttacaccgtgatccgcctgttgataagactattttcgacaaattccgatcactttctgggaatgatggacgaattttggactcgcatggattgaaaagtctgatttttcgcggtgggatttctccagaaatgcgaccgattttgtggaagtatatgctgggtttctttaaatgggatcgttccgacgccgaaaatgaacacgtattaatttcatattttttaaatattccaattcactgtttagcatcgaaaaaaattagaggaggactattacagaatgaagttgcaatggatgagcatcggcgaagaccaggaaagtcgatttggcgcatttcgagacagaaaagcccttgtcggtgagatgcattcgcttttgtcaattactttttgacttcactcatgccatcgcatttcagaaaaggatgttgcccgcaccgatcgatctcatccgttttttagcagaacaaaccctgaaaatttgcatttgctccgagacttgctcatgacttattgcatgtacgactttgaccttggtcagtttggttatccttcgttaccgtatttaattgttgtttttaggatacgttcaaggaatgagcgactttctcagtgttttgtgcgttgttttggagagggaagtcgacattttctggtgttttgtcggtctcatggaatttgtggtcagttttaatttgacattactgtaatcagtttaagaaacgtcttatagcacaaaaactttgaattggaccaagtgcacatcaaacagcaattgtccaatctgaaaagtcttgtcgaaattgtcaatccacgactggccaattatttaggtaattattgtctcattttgttttgctgtacccaattctcaacagaaagtcacgattctgaccatatgtatttctgtttccgctggattttggtggcttttaaacgcgatattgaactaaaaggacacgcaatatttgtgggaggtgctttggactgggat

SEQ ID NO: 18574 - DNA, 366 bp, Heterodera glycines
  unsure (1)..(366): unsure at all n locations
attcacacacatataattttcctcgtgataaacgagtctctcactagaggggacttttcctcccgtggggnattcctccccttttctctcccctctttcctctccctccctctctcccctatttcctctctctctaaaggctggttcgtttgttcattgggcaccttttcattagcgtgcgtctttctttttatatattgcgctgcgcgtaagctttcgctcgcgtcgaaatgtctccgctctcccctccttgtcccaataaaaccccctctctcccccgtttctcgtcgtctgtgcttgtcgtctttgccccgcgtgagcggcaaaagaaaatcctccccattttcacagttttcactgtttctg

SEQ ID NO: 18575 - DNA, 1787 bp, Heterodera glycines
taaaagatgtacagtgttgtgtggctaatcaaagctgctccataaaaagtcatatcctttttcaccattcactcatttaaacctacacattttttggcgtccaattttaaattaaaaaaaaagtaataaaaaagtcaaaaacaattgtaccggtggaaattaattggacataaataccacccaaatgtaccacaattgaaacacttttataaaattaactttctactagtacgaatctctgcgcgttttaatgtttttttttgttgtcaaaataagccccggaaaggaagaatttcatcatttacattggcaaaacaaaggcaaaacatttgtgcaaatatttagcgacaaatttattacaatgataaattgcgcttttcctacaaaccttataaaaaaacaacctaaattaggtagatactttgtggttttttgaccaacttcagtgatattttgtgtgccttttccatcagataattatggcccgttttcgtattttttcgtttaacacagtcagaaatttcattgaccttcttaaacaattaattggaaagtgtgctaccccttaaaatcgttcacattttacccattgtccatttgcaaatatgcaaatttttgcctaaacaaaaacccgtgctgggaatgtgaaaaatttcggcggtcccttcgcgtgcgtcccaccagacaacacacccacccgttttttcttattttttggctttgcataattctttattctcactaaataaacaaatacacaataaaatgcaattttgcacattaatcaaatgcaaaatatattgctttatttcaaagtttaagaaaatgcttattaaaaatagttttagactaatcattcgcgtgtttttcattgtgactctatctttagattattgaacatttcttgttgtgtacatttcaccgattgcctttgtcgaagaaatgtccgatgctgaaacgtccattgccgaactgcccgtacccaaagtaattgcacacagagtttactggtacaacaccaaacttaactcaaagcttccgggccaaattttcaaacgctatttttctgcttaatttgtttttgctaatttcgttgtttcttctttagttgaacggcagcaactctgccaccagcggcagtgacggcgaagtgccgtcctcgtccgcgtccaaagttatgcctccgaacactcacagtcaaccgcctcagcagcaccaccacgtcactccgtcacagcccatgccggtgccgatctcttacgcggcgagtgccgcagacttttccacgatggtcggtacgcccgagttcatccaggtttgagtttgtttttaaagtcagtgcgaaataagaaatggctttgcctttttgttttcttttcccatttttgtctaaatttaagtagggtcaagtttttcatatattattgtgtgcacataaaaagacatcttttaaattttgtgggcattccattcctaatttcgtttatctttcctaacgcctttatttcctcgccaggatttgctttacacacccaccggcagcgccaacggtggtccgtccgcgccggcggcggtgttcggctccacgcccaccaacaattacgggttcggctcgttcggttcggtgtatccgccgccatcattggcagcgcatccaccgctttcgcatcaccaacacaatggcacagccacgggagatccattggaacaccatcaccaccgcatcatccatggcacgccgccgtaaacagccgctgcagcagcgtatgcaacttttgttttatgaa

SEQ ID NO: 18576 - DNA, 2157 bp, Heterodera glycines
  unsure (1)..(2157): unsure at all n locations
aaatgctcaaaaatggcttttacaaattccatttttatttttcgcgtcgccattttctcctttcttttcacttttaattttgccgctgcgacgcaaaagcgaaaaaaagacggcacctttttttggcggcataatttaactgagaagcacttgacaaagtgccaagagagaattcatgtgggttttggcttggacatggtcaatcccgagacaccaattccctcccgtctcgccatttcactgccccccctcttcagttcccctgcttttgctcctttgcatcatcagcagcgggtgaatccgtcgtcagtttggcattgtcagtgcgttgttcgggtgccaattcattggagcacattttgtccgcgcttggcccattgtcgcgatggccaaacgcgcggttggacctcttccgaatggagcactcgccaatgcccgtggtcagtcggtagtgccaatgtgccaaatgccaaagtgtccgtcgtctttcagctttacctcgactctctgcgcgtgctgcccccaattcggcgtcttcagttacacaacaattccctggcacaccttctgctccaccaccgtccgctcaattcggctcagcgacaaaccaatggcatttttgacactttggaggaattggccatcacttccaacgaattggcgaattttgggtacttttcttccgcaattgccccgctccgatcactccgatcgctttcattgagtgccaatcggctaagggaagtgccggcccacatttttcttcactttcactcgcgcaatttaatcgaaaagtaagtgaatcataatgaaaagaatatcggtttatttttaaaaattaattttttgtttttttaattaccccccccccccctccaaagtttggatttgagtgccaattccctgcacgacaattccattccgccagaagcctttcttggtctgggctccctgcagaagctgtcattggatagaaatcagttgcaaactgtgccagtgaaggcaatcaatgaattgggcgactcattggaggaacttttccttggaaaaaatcaaatcgatgggttaatgccggcgggggacggattggcattggcacggctaaaaacactcagtttggaagggaacaaagtgagacaaattttgaaaatgatcaatcgctgaacatttcatctgctgattgattgttctcatttctcagatcactgctatcgacggggaattctttcgtggcattccgtcacttttttatttgaatctcagcgacaatcgcttctccgccgtcacttctcaaatgtttgcatttataagaaggttgaaagtgttggaaatgaataggaacccgatcagccgattggacgcgcaaagtaaggccaaatgatcagacaaagagaggcggagggagggctgatcagatgaaaggaaaaattattggaccaaagggcaatcattgatcagagtgatcgatgcggggtagggactgatcagataaactgaagacaagcaaaatgagcaaactgaaatagtttgtgtttttagtgactgatcgtacatctgacaatttagtccacttcaatgcctttggggccgatcgattcattttttaatttgcttaaaaattagcatttcaattggttccttctcttctgcgattggaactcgcgcaatgtcacattttgcaaatcgacgccgacactttcggcaccgtgccaaaattgcaattcattcatttgggaggcaacagaatgagcaggtaaagtatttgatcaacagaacggaaaaatattaatgccataaaatatggaaacatattggggaaatttaaaatttaattactgaccaatgaaaatgcccaatcagcaaaatttataattttattttattagtgtcaaaataaaagaaaacttaattgtttatttaagcatcgaatggcatcattttgcagggaaattgccctttttggtgtcgttggatctcagcaacaatttggtcagtcaaatgatgaaatggcccattttgttctctcgcttgtccttttcttgtcaatccctctttccctttgatcagtgccctttcattctcagatcagtcacactgatcagttcgcatttgccaattttggccccacttcagtcgctgaatttgngcggaatcgca

SEQ ID NO: 18577 - DNA, 1075 bp, Heterodera glycines
ttacattttgaagtccttcggaaattaggtgcttgtgcaggttgtgcactagatgaaaaaggcaccctagaagttgtgcgcccggaaagactgctgccgccgcgtccatcgccgcttgttcgaagtccattgtgatggacgctggtgaaaatgctggccatgcttcgacaatcatccgaaacattcgctcgtaaatcagacgagattttcccgtcagaaggcatgtggcaaccgggaaagtccattttccttttctggaattaaattttgtagcacaaattcaaaaaaaaacaaacaaactttgcaagaaggacgtacacttgcgaaaatggatgaggtgcaatggaaaatgttccatctgcgaacacttcagtcattgcatgcgcccaatttgcgtaagagttcttggcaaaaatcagaatcctgaatttaagggagttcaaaattttcatatactaaattggtactggtgttgtgattcgccattgggtgaaaaaacgccagaatcagatagtatgggcggcggcgagaaagcacgcggcgagttggcccggcggcgagtttctcgcggcgagatggccgcggcgagttggccgcgacgaagtgaccccgaccccgaatctgacattcactttgaccaatttcgaatcccggatcggaacgcgaacaaaaagtaaaaaattcaaaattttcgaaattcacttttatgtttcgtatctgtacataatgaccattttttgatgttggaatgatttttgactaaatttagtttattttggtcaatttaggaacaaaagaaagaaatcgaaaattttgaattttttactctgttcgaattcctgttgtccgggattcgaaattggtcaaaatgaatgtcagattcatgatcagcgaccctgaaaatcccataaaatgtgttttcactacactttagaacagaataaatttttcagaaaaggcgtggtaccatctaaactatattacccgttggtcttctacacatcgtcaaatggacaaaaaaaaagttcatttacatcattagccttgttttatttacctaattttcttcattaat

SEQ ID NO: 18578 - DNA, 638 bp, Heterodera glycines
cgaaatgaccctacccctctaaactgcataagagccgattttttttctgaaaatttcccgatttcaagccatttaagggttttctcactttggtgcaattgacttttttgatcaaaacaaaaagtttgattacatgaattttctagattcgtttattgccctacaaaaaaagttacctgtcttcaaagttttgaccttataatttcttaacggagcatatcatttcgtttttgccaaaatgcaattggcctttgaggtacataattcttttctttttgcatgatcaaagtcaaaaatttatttagccgtatctatctttccaatgtgttgggtcgcttcaggatcaccgagcccgattggaaaatatcggggctgacattctctctgctatccgcgcccttcgacgcaacggtatcggccttctaattaccatcatcaatgtcttgttcagcattgtcttttcgttgcattcatcgactgtggctacgacactcgtcatcatgatgccctggtttagattttagttttattttgacgatttgtatcgcattttttagaagttttctgtgacatcactcgaccaagtcacaacaatcaccaaacatgttctacggtgacaggaaaaatgaataggcatg

SEQ ID NO: 18579 - DNA, 2249 bp, Heterodera glycines
aatgtccctgcgtcataatgtccctgcgtcataatgtccccgcgtcataatatccccgcatcataatgtccctgcgtcataatatccccgcatcataatgtccccatgtcataatatccccgtgtcataatgtccttgcgtcataatgtccccgcgtcataatgtccccgcatcataatatccccgtgtcataatgtccctgcgtcataatgtccctgcgtcataatgtccctgcgtcataatgtccccgcgtcataatatccccgcatcataatacccccgcatcataatgtccccatgtcataatatccccgtgtcataatgtccctgcgtcataatgtccccgcgtcataatgtccctgcgtcataatgtccccgcgtcataatatccccgcatcataatgtccctgcgtcataatgtccccgcgtcataatttcccccaagctaaaatcagtcaaaatgtccccaattaatagggctgctaattttaggtaagaaaaatcgcagaataggtactaaaaaggttaaaaaatatatcaaaataggcatcaaataggtataaaaattccaaaataggtaaataaaaatttttattaacgattttttagtggaaaaaagcaaacaaagagcgaaaattttggttctacatatctctttgtaaacgaaaatttaaatatattaatattttcttagataatattgacattttaaattaaaaattttgtcaatagaaaaaaaaaaaattttgggataaatttttgagaaatttttccaattcttagggtgcatttttgaaattttttttggtcgattcttatgggtatattttttgattttattgcatttttgttaagaattttttgaaaatccttaaaataggtaacaaaaatgccgaaataggtataaaaataggtacctaggtaataggtagaaaaatcccgaaataggtaaaaataagtattataaaagtgggtgtagaagctccaaaccaagctaaaaactcgtttttcgcgcctatctacgtgtattaagtgtgcaaaaattttaggtatttacctaaaattagcagccctaccaattaaaattggagaaaaaatcgaaaattacataattttaaggttcaaaaatacgaaatacattagaaaatttatcaaaatcatattaaaaaaaacaataaaacgtggtaaagacaaagaatatttccaattaattgaaaggataacaaaaaacagaaatgtacaaattttaaaggacatgcacggttgaagctaatttttcatggtcctttatttttcgtgggtgtccttcgatatgatgacgaagagggcaataaatttcggcatcgtttttgtctccgacaaaacgcttaaaacacaaataactgaaaaaattacagatgtaattgtttaaacatacatagaaagtttgtgtgctgcgaatgaacatcctcatggctggcgatgccttgaacttgccgtccaaatgccaagttccactatttttgctcaaaatgtccagtctaaaaaaagaaaatttaaatcacagctcatttgttagtgcgaaaacgaaatccttgcaattaaaaaaaatttccattggcgattaaaaattccctaccttcggaccaaagacaaatgcctctcttctgattatcgtattcttcaaaatcgtcgtcgcggtcgttgttttcgtcgtttggttcatggtttcaagaatttacttcgtttcattgtcgttgttgttcaaaaacatttcgcttacgacttttttttttggataatttcaatctttttacgattaatattgagcctaaatgagtaaattttacaataacaaatagtatgaaaagataaaaatatgtaattttgggttttttcgctaatttcaattggggacattttgactggttttagcttgggggacattatgacgcagggacattatgacgcggggacattatgacgcagggacattttgacgcagggacattttgacagcgcgcctatacatatagagagagagagagagaaagaaaataaaagaaagttataaaaagagggagagaattttatggaataaacttttataatcatatatattcctggtattttttagcatacattatatttacattctttacaacaacaaaaaatattaattcaaaaaagattgtaaatacatgttgagatgaattgcggcaaatattgataattacttaaatttgctaaataatgtaggttttataaat

SEQ ID NO: 18580 - DNA, 675 bp, Heterodera glycines
ttgtctatgactttgggcacttgtacagtttacaccccttagaaatttttttatatttttaaaggaaaaacgtgtttccaaggatattcggggttgctaatcacgaatatgacatccatttgttgacttacgaaggtcctgagctgacgttgacggcttactttcggcggcttgggtcgatgtcccctctccatctgctgttggcgcggcttcggtctgctttggcactgaaaaatgcagtgttttaataaaattaatttaatcaattttctcactttttggtgttgaaccaaccctgcaaccgtgctcctggcgccattccttccgctttcgtcttgcttctgcactagaagcccaaaacggctttggttgatttggcattattaaaaaacaataataaaatttctggtaaatgagttaaatgttcgtccctttcaaaaaaattttctagcttttaaaatttcttcaaattttgtataggcccatatttcgaccccctctatcgaattctcttttgttttttaaaagtttcttttctatctcgagatcggctcttgcatttttacaagggaaattcccaaaaaaaattttaagatttgcaaagttttggcgttttgattactaaataaataataaacttatttgcactgggagcccaaaattgactcgccgtgt

SEQ ID NO: 18581 - DNA, 2011 bp, Heterodera glycines
ttcctccgccctccgtctcgccccactacttgctccgtcttcgcatgcccttttttgttaagttttttttaaaacaattttgtttatcaattattttttggtactgaagtgactgtttttactgagactctgttatccgggtgcagcgatctgactgtattcttaggtttttaaacataactcatcaagagctgtcaaatgatacctaatttgtccaggtttgattattttcggtttaaagtttaagcgatttttgattgcttgatcgttttcagtgcataagaaaacctataaaaatggttttgtgtgtttttgagtctgagccctatggtcaatcaatgtataccaaaatttggtaaaagtcaataacactgacaccactcagtttgacaacatttatatgtcgatcgattcctcaatgaaaagtcgcatgacatcacttttaaggagttataaattttaacaagagttatagcctgagcatgcggtgaccgaacaataagtggggcgtcagacgagcggagggctcctaaggcgtgagaagcccggaacatgcgaacgaacaaccttcagtgttaggtctgtaactctgtttaagttatcgtgtcgcattttttaccacaaattattggaagaaaaaaatctttaaatttttaaaatccatgaaaatatatttccagtggtatttggggtcgctgatcatgaatccagcatctatttcgatcaattcggaattccggacccgaactcgaacaaaaagtcgaaaattcaaacgttcgaattttatatttttggttcaaattttgtttgaatacacggaaacgaagtggaaagtcatcattagggctgggatttttatgttttaacatattttttttttgcagcttagttatggcgagagaagcccaaaaatagcattttctccgaacaatttttgatttagagcgagttataaaaacataaaaacacatattttggcgttttggcacataaaaacatatggcacatatttcggggttttggcacatattttggcatttttgagaaaaatcgtaaaaaaaatacaagaaaatctgaaaatgcaccctaaaaattgactactttacgtttcttaagcatttagaaaatttctttatatatttaaatgcctaaagcagccaaatcaaacgctgtgttaaatcgtcactggatttcaaagttcccggaaggaacttattcaactgatggaaaaattaatccgggactttacaaattgattgatatcgccaaaattttgattggaggtcgggcgaaaattgataaagactgatattaaatatgattttttttttgcgtaaatacacttggtttttccaatttttagcacatatttttgcattttttaacacatatttaggcctttttttggtttttagcacatattttgggtttttttagcacatattttattacatatttcaggatttttagcacataaaaatcccagccctagtcatcattgattcaataaaagatcaaactattttcagaacaaaaatatgaaatttgaaaaatttaaatttcgacttttttttgattttgggtccgggtttcggaattgatcgaaatggatgtcatattcgtgattagcaaccccgaatatccttggaaacacgtttttcctttaaaaatataaaaaaatttctatggggtgtaaactgtacaagtgcccaaagtcatagacaaaatcatatattttgcaaaatctaagctcagattcgtaatcagcgcattttttagcctagaaaatctggggttatgaatattcttgattttgccactagccttccaatatatattaatgaatacattttagggtgctcgggtactcaaagtttgagaaggtcaatccggagatgaaagactatatcgacgaagtcagtgctgaggatgaaagtgaagaggaggagagagatgatgctgagagtgatgaggaggaggaggaggaagaacggaagaaagggagaaagaa

SEQ ID NO: 18582 - DNA, 1855 bp, Heterodera glycines
ataataaaccccccacaaatattattgtggtccaaaaaatcgacattaataatgaccgaagaaaagcatggatttatatttgcaaggcaaaaccaaaccgacggaaattcaaattcaaaaaaatttttgaaaattttttgaattccaaccaaaaaagaggaacagagacagcatcagacagacacagcagacgaggcacacaaacggttcagcgtccggcgacacaaaacaccgatgccccgcccggctcatcgactgggctttgctgacgcagcggaggcgccatcgccgcaccaatgctaaattattatttttttacggcacgatacgatgcaattttattaaaaatgccaaatttgagcccccccccagaagattccaaaaagaagcatttttttgaatttcgccagaattttcaaacattccgacaaaagcaatataggtttttcaagtaaataaaattttatgtattttttcagggttcccaagtgtccttatttctaagatttgtccttatttttaggctttcccaaactttttaaatttttatgcttaaatgatttatttcgctgatataaatgctaccaaaactcccaattttcaaaattttttcccgcgggcggcgcctatcgagcaccgccgagccccaaaaacttctttttaaaaaattggctcaaaatcataagaattggtaatttttggtgaaaatctgttaacaaataatgtaattgcccaaaatgccttaaagaacagtcacaattttacaattatctgaaatttttttgctaagtcacaaaatttgtataatttttgggcaaaatctgttaacaattttggaaaaaagcgacgcaaaaaagtgcatatgcggcaaaatgagaaaaatggtctgcggaaaaaaaaattcaattgtttcacgctaaaaaatgttgttttatgtcggttttcatgtattttattgcgtttccttcgcgctactattagttgtagaaaaaaatcttatttttggggtcaaaatcttagttttagcctcgtttgtccttattttgaaagacaaaaacttgggaactctgatttttttgtttatttttctcatatttcacatgattttaaggctcggaatcggatggttttgttttgatgaattgattaaaatgtcagaattggtcaaataaatattaaatgagtggtaaatggtgaacctgaaatggcccctttttccgctgttggcgacgattccttccgtttccttcgctttgaggccattctcttttctgttcccttatttgttctcattttagacaattttttatgtatttaattttttgttacccctgaaaattgatattattgaaatttatttattgtcacattgtcagacatgaggacatgactcggaaaatatcattattaaaataaaatttaaaaaataaacaaacactatgccatatttataaattttttgaactaaaaaacggtggacgatcattttgtcactgatcgtttcgtcactgacaaatgagaaaaaaattttaaaaaatttcaataaatattgaaaataattgccatttgctttctcgcaaattgcggacttaagtcatcgttttattttttaaatgactgatatacttaatttcttatttctctctctttctctctcttatcctctgatcattttgttcgcccatcaatgtcatcccaatcgagactctttataagtagggttcggaattatatggaaatccatattttttcctggttgtgggaggcctgaaacgcacgaaaaacatatttttagcttggtttgcagcttctagtatggagttctatatccatattttccatatttcgcgattta

SEQ ID NO: 18583 - DNA, 1993 bp, Heterodera glycines
aaaatgaatcgacggtaaggaatttttttaattcaataaattttcatttatccacccatttttacgaatttcagttggatttgtagcgacgtgtggatggatattctcccatcttttgaccatgctcaacttggactcaaaatggcattgctttccgaccgtttcgatgttttggtggacaaacattttgatggaaaagcaacggaattgacattttggagaattatcagaattggaaaggaaaatggaccaaatgcaaacgataatggaccaaaaccgaaactgtctgtactgatcgatgacaaatgggtggcatttccattgccggaccattcgctggctttatatagagtaatttgaactttggatatattaaagcattttaataatttgtgatgatggaccaaatgcaactgctgaccaagtgttgtcaaaatggttgcacacaccgggaaaagatggccaaccgaagcgattgtttcgcaataattattttggtccactgaatctcgaatgggtcaacgacttcaaagaggtggtccgttccgccatattttgttttatcaattttttgtttagacatttctccgttccatcacttctgtcagttacacaattcgatttcatttattttcgaacacaatgccaattgagccatttgaattggtgaacaaacggactaatgagaagctgacattgatgaaggatgaaaatgacgatggaaaattcaaggattggctgttgaagcggtgcccaattattggggagacgatggcggttcagcatgaccaaaatttggaccattcaaacagattcttcagtctttgtggtgccattgggtaagcagaaaggaggccttatttttgtataaagcacagacggacaaggacagtatcccctgtacagtactttctcagaatcttcatggcaggccggcaggggttccaattaaaacgggacttaagtccttgtcttgtccctcccgttctggtccatctcggaaaccctggtcctctctggttcgagtttttttcttcaaatttcgagctctactttcacaaaaagtgttctcatccaattcaaattttggcttaatttaggccgatgtctctaccaccaacagatcaaagcgatgaaaaagtgttctcgactcccgggccaagtgatcagcagaagaaggaaaagtgatcatttttgagcaatgtcctgatcaaaagaaaaggctattgatgaatcatgttaattgatgatattttgttgctctttgaactgtcaaatttaaggctaattgtgaacgcatagaaatctttgattgcttaatcgttttcatcgcataagaaaacgtacaaaagtggttgttttgtatgttttttgagtctgggtcctatgattaatatttaccgaaaattggtttttttgacgaaaaaattctaaaatttgctttgaaaattcaaatcctttttgaaattatcttttttttttgttgccggtagcaaatgccaacgttttttctcattcactttgtatttattaaattttgccgattcgactgtccatcatcatcatcatcatccatccaaattcaagagattactaagtttacctctttgccttaccccaattgttccacaatttgtgcttttcctttgccccaggctaattgtaagtttttttttgccgataatcgcctcaaatcggcgaaatgcactttcattcctcttctttccactttttatcattcaatatttttaagtgccttggtattaccttccgaaaaattgcgacatcagacggtcgctattgcgctccgtttcttaattttgttgggcttggacgggcgctttgcaccgcgatttaaattttgttggggtcaaacgggcgcttcgcgcccgtttctaaattttgtggggaacattcggccgcttcgcggcctcagaacggggcttcgcgcttaatggtaattctatggggaacattcggccgcttcgcggca

SEQ ID NO: 18584 - DNA, 1735 bp, Heterodera glycines
gctaataacaacaacaacaacgcatttcgaacacttccggccatttggagtgtgcgtcgacgatgatcagatacatctttccaaagaagggaccggcgtagtccatgaggacacgtttccatggcccttcggcttttggccaagaatgtagctccgttttctttggcgccttcgcttcggtgacacacggctcacattttctcaacacttcttcgatttgttggtcaattcctggccagtaaacatgctggcgggcgaggcttttcatgcgcttcatgcccgggtgtccacgatgtagcattttaagcacttccgtctgcagcgatgcagggacgacaatccggtcggcgtacatgatgcatccgttttcgaatgacagcgcttctcgccttcgatggaattgtaaaatgtcatctgacatatccattttgtttggccattggttcatgatgaatcccttcacttcctgaagcaaattatcggctttagtggcattgacaatgtcctcgtggacaattggaaattgtgccgtaaaggcattcacagttgccaaattagggctttccgttattgttgccacaataaattcatcttcgggcactggcgcttttgcaattaagcgcgaaagagcatcggcttgaccaaaatcggcagtgttttggtattcgatctcaaaatcatacgccaaaagtatgagtgcccagcgctgtaagcgatttgctgtacacgctttaatgccctttttgttaccaaaaatggtcaacaatggcttatggtcggtttgcaggacgaagtgtcttccgaaaagatatttgtggaacttctgaactgcaaagacaagagctaatccctctttttcgatttgggagtagttcatttcggcaggcgacaaagagcaagaagcatgtgcaattgctttcaagctgccatccggaaaacgatgggagatcactgctccgattccataattagaggcatcggcagatacaatgatgtccttttccgggtcgtaatgggtcaagagttggtccgacttcagcacttcgatcattttgttgaaggcattttgacagtccgttgaccagacccacgaaacatcctgtttcagcagttcatccaacggttgtcgaagaaatcgcatattcttcacaaactgctggtaatgattgatcattccctagaatgatcgaagctcagaaacattggtagggacgggcatttctgcaatcgccttaatcttcgatggatccggtcgtcttccatttttgtcgatgacgaacccgagatatttaatctgtctctgattgaaagagcacttttcgggtttaatccgaaattcaaaatttccgattcgcttgaaaacttcatacaaatgtttttgatgctcctcatgtgaacaactgaccacaatcatgtcgttaaggtaagcaaacgcgaatggacaatcggccaaaatcgaatccatgatagattggaaaattcctggcgctgattttaccccaaatggttagcgcaaaaattggaaatttcctctgtgtgtggcgattgtacacaattctttggacttcttgttgtccaattcaacctggagatacgcatcctttaggtcgatttgagaaaaatttgcctccattcaattttcgtgaagatgtcttcgggcaacggcaaatgagctgattcaaacagcaatgcgttgttcaagcccgttgaaaaatctacacaaacgcgtgctgct

SEQ ID NO: 18585 - DNA, 2049 bp, Heterodera glycines
tttttcattttatgaaaatttgcttctgtacgattttccttaagcgaatcgattttaaataataaatgaaaaaatatattaattattaactattttcaaataaattattcaattcaaatatggtaaatttataatataataatccaaatattaaactttaaaatacaaataactcaaaaataatacataaaactaaagatgcacacgttatcaaatcaaaatatacattaatactaaaatttttaattaaacaaattatcaacaatttattgtttgaatgttaatttttataattctcttaaataggccaatattagaaatcatccgtgcccacaacaatcaaacagttgtgactgtggttacacggaaacaaattataagccatcaatactgcaaaaagaggtgttaaaagtgaagaagtatttctaaaattcaataagaaaattaaatcgaaaaacatgaaattgatattttcttaaaataaaaacgaaattttgatatcggactaatagaatgtcaagctctgaattaatttcgaaggaataatatcaatcaatttaatcttacgcacaatttttttaatcgtttatgtttaaaaaaaattataaaaagctctgcaataaaagaattgcattttaaagataactaagaaacctattttataagtaatttctctaaatacactaaagaatctaatatataataaaaattggtttaaattacagctggttaagagaaactataaaaaatttaaaaaaaaagatttaaaaagttaaatttcaagaaacagtaaaaaaattgaaaaacttgtgctgatttttatttttaaaaatgtttgtaaaatattattgaaattaaaaacaattcttttatacaaaaaagattttccctgtcgaactgaacaaaataatctaaaaaattaattgtacaaacatatgaaatataaataactaaatcccttataactttaaaaaatgtttataaattagaaactaattaagaaaatagccgaaataaatacaaaatacataatgaaactcatattatgcatgaacatgtgcaatcacttgccttcgttttgctaattttacactaatccttaaattatcaagttagttaaaagatacaaatatattttatataaataacaatctaaaattctaaaaaatttaaccaattcaaaacaaatatgtgctatttacataattttcattaaataaataacgataaaaaaatttagtccgcgttaataaatattatcaattacaactaagtgaggaattttcaacggtggctggtaatttcgacactgggtaaattcgacactgagtattttcgacactaagtaatttcgacactacgttttcgacatagagaaatttcgacactgaactatttcaaaaactttcactgttttcctgcattttcgacactggaccatttcgacagtgagtaaattcgacactattgagaatttttaaaaattaataagaaattttggtgttagtattaggtatgataaattttcctatttcattttctaattcgtactttttaaaaggttaggttggtataactgagtaaaacgtcaaacccagtgtcagtgttagacaatgactcataatgccaaatagcgatattttggggcgataattcaaaaaaacctgatcagtcagtgatcactgatcattgcaatttttaattgatttcaaagcgctttgtagggcttctagggcccgaaaaccgaaaatcaccctaaaacatgttttcatgacttttgaagacggaactgacccgcttcgacccattccacggtcggggtcgttttcgcgtggccgttttcgcgtgagggccgttttcgcgtggccattttcgcgtgagggccatttttgcaaaattttttaattaatgttataaaaatccagaattttgggactcaagattcccccccccccgaaatgaaaattttttaaaaattttcttccaattcgtcccccaaaacgaaactacaatatttatgggaacttttttgaaaattggcaattttcg

SEQ ID NO: 18586 - DNA, 1221 bp, Heterodera glycines
aaaaaagagatagccattttctggaatatctattaaatataaaattattgaaaaataaaatggccatggcgcaccgcacttcgtttcatgttcgagagcgtttgttgcatagaaaatttctcaaaaaaagagatagccatttttctggaatatctattaaatataaaaattatttgaaaaataaaatggccatggcgcaccgcacttcgtttcatgttcgagagcgtttgttgcatagaaaatttctcaaaaaaagagatagccatttttctggaatatctattaaatataaaaattatttgaaaaataaaatggccatggcgcaccgcacttcgtttcatgttcgagagcgtttgttgcatagaaaatttctcaaaaaaagagatagccatttttctggaatatctattaaatataaaaattatttgaaaaataaaatggccatggcgcaccgcacttcgtttcatgttcgagagcgtttgttgcatagaaaatttctcaaaaaaagagatagccatttttctggaatatctattaaatataaaaattatttgaaaaataaaatggccatggcgcaccgcacttcgtttcatgttcgagagcgtttgttgcatagaaaatttctcaaaaaaagagatagccatttttctggaatatctattaaatataaaaattatttgaaaaataaaatggccatggcgcaccgcacttcgtttcatgttcgagagcgtttgttgcatagaaaatttctcaaaaaaagagatagccatttttctggaatatctattaaatataaaaattatttgaaaaataaaatggccatggcgcaccgcacttcgtttcatgttcgagagcgtttgttgcatagaaaatttctcaaaaaaagagatagccatttttctggaatatctattaaatataaaaattatttgaaaaataaaatggccatggcgcaccgcacttcgtttcatgttcgagagcgtttgttgcatagaaaatttctcaaaaaaagagatagccatttttctggaatatctattaaatataaaaattatttgaaaaataaaatggccatggcgcaccgcacttcgtttcatgttcgagagcgtttgttgcatagaaaatttctcaaaaaaagagatagccatttttctgggatatctattaaatataaaaaattatttgaaaaataaaaatggccatggcgcactgcacttcgtt

SEQ ID NO: 18587 - DNA, 1225 bp, Heterodera glycines
  unsure (1)..(1225): unsure at all n locations
accgagaagtagtattttaagttttttgtgttatctatcaagatggtttgataaangagagaggggaggagagaacctttaaagttaaatattaaaaaaatattaaattaattaattaacaagaaaaataatgctaaagaagcaaattttgtttttcgtcaacaaagagttatacaatgttaacaattgctcaatctatgaatttattacaaaaaacaaaggtttcttgtaaaatttcaaatgggcagacatttaacaaacgagcgttttaataaaaacaaaagcagatcaatcttattcaaaaataaaaggtaaacattaataaataataaatttaagaaatattttcaattaaaagaaaaacagaaaaatttaaaatatggtgcttctttaaatatttgaactttctatcagtatttaatattttaatattatactctattttttctaccatttaatttgaagatcaatctaatctccgcaaaattgaccagaaaaataagaaaataaaaataaattcacaagttacattaaaaaaaacatagttttaattttgatattattcaatattttaagtattgtgaagtaaaaacgacatggtaaatttagctgaaagatgcaaataaagaatattaatattaagatttttactgactttgaaatggaagaattttaatttaaaaaatataataaaattaaaaattttccaatgaaagcctacgaggacttgcgcaaaaaaaaccatgagaaaaagtcaattaattaaggaacaagccagggtcaaattttggaactcaaatttgtcacacactaaaagataagaacaatgtcatatcaaattatgaccaaagatatgaaaaaaggaggatattctttaatgatcaagaaaatataattattgtacaattaaaaactctcaacagtttcaaattatattaaataaaaatttaaacagatcgagtaaaataattaccccccctctctctctctatgattttttatctctctctctctatgctctctctccttttctctctccatctgtctctctccctccctctttctctctttctttctttctgtttgaccccccctctctctttaacgctctctctttctgaccccgctccttactcgctgcattcttagaaaacaaacacaaaatgacgctggctcgccgcaccaatggcatgcctaagcacaccatttggcatcgccccatcta

SEQ ID NO: 18588 - DNA, 1618 bp, Heterodera glycines
  unsure (1)..(1618): unsure at all n locations
atttattcactgattgaagttgcaaatgaggtacattttctttctatattttatttgcaaatattgacattttttaaaccaaaaattttgtcaaaaaaaattgggggatgaatttttgagaaaattttccaattcttaggggtatatttttgaaaaaatttaggatgtcttcttaggggtattaactgaaactttttaggtcgattcttagggtttattttttggttttattgcatttttttaaaaattttccaaaaaatgtcgaaatatgaaaagatagtgatttttaactattttatgtgacgaaacgccaaaataatgatttctaatgacgaaagtgaaaaataaacgaaaaaatgtcaacgtagaaatgcgttttttgagcttctttcttcaaaacaattaagcaaaaataatttttttaactaaaagttgctgccctagtaataaactttttaaattttttatggtcattaaaatgtcaagggccttttatattatgtaattagaattattcaaaagaatttagcacatcaaagaaagcttaaaatatgctgtaaggaaaaaagtattatttgtgctaaaaaatgctaaaatagatgccaaaaaattaaaaataccaaaaggtatgtaatagctgccaaaaacaaaattaatgcgaattgcaaaaatatcatcattctttatccatttcggcctcaacttcagattaaaatcttaaaataatttttgatgtaatcttttctattgctcatttaaaattgagtcgtaaacaaaataaaaatgcgaagaaaatatatggttttatctctattctatatgtaaaaaaaggttaaaaccaatatatcaaacagttattatatctaacccattattttaaaaaagcaaataaaaaagcttttaatctgaaagctaaaagagcaaagaaaaagttcaacttatgagaggaaatgcgtttgtctatggaacaagagtagttatctctttaaataaaattcaatgtttaataaaatattattcatttactaaaattcttatgaacatattaaaaacccatttcaaaaatattaaataatattgaaagataattaaagaaattattttcatatcttacaatcatccgacggttcgctcagtcgagagtttataaaaattaaaagacgtaattgaaataagatgaattcataaaaatatgaaacacttttataattaatgtaaatgaaacatacagaaaataaataataattaattcaaatagccctaaaacattaaatttctgcacgaaacctagataaaaaaaatactatgaagctgaaatagaaatggcattgtgttcaaaagaaaccacttcttatattgaaatcataaaacacctaaaatggtatttaaattaataatgaaaattaaaagcatatatgaaaagaaacaaaaaaacgaaagcctatgcaagcgaaacaaaatggtatatatttcttaaaaaaaggatgcttanattttctttaattatctcatatgctaataaattagttcaaaccgagcaattaagcggaaaaatgggactacaagaataatttatttcaaaataaatttgtataaatattaanaatgatgaaatata

SEQ ID NO: 18589 - DNA, 1122 bp, Heterodera glycines
aaagagatagtgtagacagagggtcaaaggaatattgtaggcagaaggccaaagagatagtgtagacagagggtcaaaggaatattgtaggcaaaaggccaaaggaatactgtagccagagagtcaaaggaatattgtaggcaaaaggccaaaggaatactgtagccagagagtcaaaggaatattgtaggcagaaggccaaagagatagtgtagacagagggtcaaaggaatattgtaggcagaaggccaaagagatagtgtagacagagggtcaaaggaatattgtaggcaaaaggccaaaggaatactgtagccagagagtcaaaggaatattgtaggcagaaggccaaagagatagtgtagacagagggtcaaaggaatattgtaggcaaaaggccaaaggaatactgtagccagagagtcaaaggaatattgtaggcagaaggccaaagagatagtgtgggcgaaagctaaagggatactttgagcagaaggcaaaagggatactgtagggaaagggaaacgggccaaaggaaacggaatgttttcagggccaattgtggactgatttggtgagagcgaagcgccaacttgttccttcggcggcaggaagcattgtcaattacggcataaatgggcaaagaaagcggcgtcaggcggagccgcgctgcgattgcattagcaccggtaattgggcgtatttttttacgtgatcacttgttttacaaccaacacgccaatttagcactttgccccgcgggaccgcccggccccccgggcattccgggcgcggatggcgagcctgggagagcgggcgaagcaggcaccgtcggactgcccggaccattaccgcaaattcaaaaaactgttgacgcggagtcttgccgagtgtgcccgccagggcctcccgggcagcctggatatacgggaccacctgggccaccgggagcagttgtaaggacaagctatgattggttattggagaaattatctttttagggcccatctggagagaggggcgttttcggaatgccaggaaatcccggagccatgggacagcccggcgattcgggcaatccgggagaagccgggcaagaggtacaagcgacaacgttaattg

SEQ ID NO: 18590 - DNA, 1081 bp, Heterodera glycines
cctctttctcactctctctctctctcgctctcttactttccttcttgttttcctcactttctctttttttcctttactcttcctcctcttcatcttcatcctcctttccttttcctctctctctttttcctttattcttcatcttcatcctcctttccttttcctctctctctttttcctttattcgtcctcttcatcctcctttccttttcctctctctctttttcctttactcttcctcttcatcctcctctccctttctcctcttcttcgtcgtctccctccccccccatagtcaagactagagttttacaggaccgggactgttactgaaaaaaatgtacaaatgagtacctaagtcccggttttttctcgggtttccctgccaaaaagccccggttttttaacccggaaaatcccggtcccggtttttctcaaaattctcggtcccgtacaaccctagtcaagaccattcaccatgagttatcaaccacatttggcctgtcttggttccgcgcgtggttaagtcgtcgggttgtcctccctccggatggaagacgatgtctgtggctgctcggatttgctatttttgcttttttcacagtccctttcctctccccaaaggtcgcttccttttccgagggtctctttttctctgtccctccgtggcaatgtccgtttcttctgtgctctctctcccccttctcttttgtgtttgtattcttcaaataatcgccacagccgaaacagaagtgcccagtgatccgcccgaattgacaaaaagtgagtgatcggacgacgacgcccttttgatcactcatttgaggaatgttctcttatgccgatctgatgaacaattttggggggccgagcccattggattttgtcagtggcaacagttttttcattttggacgaagaaaggcccaaaagggagggtaagcgaacggagcatcgatcggaggctttcctgatgactcaccttttgtttagacgaagccgtcgaactgctgtccgcttggaagagatcgtcgccctttcagcggggctttctcaacggcgtacagcgcaactatctgacg

SEQ ID NO: 18591 - DNA, 2344 bp, Heterodera glycines
tttagtgaattttccgttttagttaagttaaacaaatgttagtaagctttctctcctcagttttgtacattggtttttctttcagttcactgttcgtgccgagtatcatttttatttcgtggatgagcagggcattgccaaattcagcaacgtgaacactggtgatttcaaagtgaagccatccaaaggctcacactcttggggactgcgcaacattccgcgcacaaaggtgaagagttgcattcgtcccgacttgtcgctgcacatcgtctgccaaatcgaactggtccccgacttcagcaaagtgcaatctcagtgctttcgcaaccgccgttacgatcagtcgcaggtttttaaaatttcattaaattaattcatactttcctttatgtacagttgaccaaggaatatttggaccgcatccaccaaatgtttctgtcgggagagggctcggattgtgtcatcgaatgcggaaatgagcagttccatgtgcacaaatttgtgttgatgacacattccgaagtgtttcgcgctatgttcagtcataaggagacgatggaaagtgtcgagtcgcgcgttcggatcaccgattgtacgcctattgccgtgcatcagatgcttacttacatgtgagtgattggtgatcaatgacgaacttgcagatcagcttattcaatgacgtttattgaaggtattctggtggattgcccgacaaatttgacaacgatcacgcccaggggctcattgaaatctcagagaaatacggacttgagccactcaagattatttgtcaggacaaacttatttctcggtaagtattaaaaacaaataaattcactagtatttagatttttttgaatgcaacgcctctgcaaaattagattataatccaattttttattttaattacctaattaatttcaacaccatttctttttcacttgaattcagcctctctctgtccaatgtgtgctccatgcttatggtggcggacacacacaacgcggacctgctcatgtcggcctgtattcctttggtttgttgcgcttacattgctttatcctcttcaaaatcattttcaaatttaggccagaagtcacatcaaacagttgttgaccagtccggagtggacagaaatgaagaccaattgtcccgcgttggtcaacaccgttcttgaaaggtggtcacttacgagagcacggccattccgccgccgcagaagcgccttcgccttcaggacatgtactgtcgcccgtgatgtcttaagggaggaggggaggggttccttttccatttactaatatttgtgatgtgtgccaagtcaataagacacagacaaaaggcgtagccaaaactcacggaatttaatgcatatatttttgtgactaattaatttgacataaatttccatttggctacgcctattaaaatttgaaattttctacttcaattttctctcgcaatcagtcatttaattgtcttatctggtattttgtttacttttggacatttttgggtgcctaaatttatcaaagaaaattttctaacctttttttaacttggttccaaaaacacattcccttcctcagctgacttaaaattgggaaaacttcaaaaagacgacaagactttctggatagtttcttactgttcagctgatttcgtctcccgccgtgctcttctcatccacgtcataattcactcatccattttgtgcgcctgtacccattgactcacccattgtttggtctttcgacaaatgcgctacctacataaattacaaatatatggatctattcgaacaccaaatatttagatcatttatgtgaattctattctctcctccctctttaccttcgtttgtttattttgtgtgttcatttgcttctattaaatgtgtaacacgcatatgacagcaattccagtccatcacacttattgataattattgtaacatcaatgaattaagaaaaaatgaaatacgaatttacaagccgttatgcatagctatgttaattatccgactattgaaaagcgaaaattaaaaaaagacaaaatttggttgttagttaagagaaaattgcattggaattgtaacaacggaaggatgggcaaattcaatgttcaagcgatgcgttttttggatgcgcaacatttcagaattttaacagccatcgaaatgggcatgaaaaatcacgaattggtcagtttatcagttatttattgtgtgtgttttactccttaaaagagtcgaatgccgggccacgaattctcttacatgggcaaagtcatggataaatgccagcttttgcaggtccctcttccactatctcctcaatatcgg

SEQ ID NO: 18592 - DNA, 2581 bp, Heterodera glycines
tctctctctctcactccttaattacctttgaattaaactaattgttgcctttgggggcggtcccccctttgatttaatccaccattttcccttccattttcccttcttccgactgcgaatttaggaaggatcggtccttcaattgttaaggaattgttagtaaaattgctaccaatttgggaaggttattttaaaggggtgtaaagaatgagttgtgtgttttaaactttgaccgataaagaaatattatggcaaataaacaaacaaaaaaagtataaaagtgattaattcgtttgatcggactcataaaattaaagaaaagcgaaagaaaaacattttttctttgaaaattccctttttcttttcaaattcgcattatttttttaaatcggtttaaaaggaagggatgcgtcacaaaaaacaaaagtgacggcgaagcccccagcaaaagtgccgtggcccaccatcccaccgctttctctcccttcgctttttccaaaacattaatttgttggccttaggtgcttttttcgcacataattcaatttgaaatgtgaaaatgccaatcggaaggtcatgagagccaaaacaaaagtacaaaaagagaaattattgtaataaaacaatctgagaaaaagcaatttcaatttgaaataattaattattaataaaataaaagtgaatccaaaacaaagctaaaaagaacggtaaaagaacagcagattaacgagtgtttttctcagtttatgaattacgtttgataattttaattaaataaacacaaaacaagtgccgtcagattcaatttacgctaatcgccggggcgaaagaaatggcgtcaaattgttttgtccggggaaaagtaaacgtcaaaaggaaataataattgggcaaaattcaattggcaaaggtaaaaatgaccaaaaattccaaatgaaaaaatgtacctattaattacatttgcatattatgtaatttggtgcctatgaaaagggacagtttttggcatttgccattcgccgacattaaatttgaaaatgttttcttttgaatgaattccgtccaatttttacttttccattcttttcatccgtcccttttttgctgccatttaattttcgcgttttgtccaaattccttcgcctttttcccattttcacttccgttccgccaattttagcggcgtcggtgcctgcaaaactttggcacttatgtctttcttttttctgcttaggtatcggtttcattttgtgcgctccgctcgccgtgccattccccgtacaaccggggaaaccccgcggggagtgactgacttttgggtgccatccattgcattaaatacgtctcgtcttttttcttttttgtaatggaataccaaaaacagatttggcactttctctcaaccaatttcggctaaattcacagagtttaacttataatcacacaatttgctttttgcgcttcgtttgccttgggttcgttttgttcatcttccgtcgtcattttcctttgcttttttttgtttttcctttgttttcgttgccatttcgacttcgcttattaattggaatcatttctttccgagttccttttgaattttctttcatcattgagtctttgccacatgctccgattttttggacatttttagcgccatttgaacaatctttgggagacaatggccacggcaccaaaggggggggggcgccggaagttggcaaattggaatttggcaggcgagcgctaaaaggggcatcttttcaaattgggtggcgtaatgttcaaacaatgcgtaagaaaaaacaatgccgatttgtttaaattaaatggaaaagcgttgggaagtgaaaatttgtacattttctcaaagtgtcgccgtcaaatttccattttggccggcggatgtttgcaccagcaaaacaaatccgattgaattttgaggtcatttcgctcgtgccatcatttggtaattggatattgctcaccgccttttgcttcctaatggccctttggcatatttccaccgaatgatggcacatttctttggcatttcttccaaaattgggaggaatttcgatcaaaagatgctgacgcgcaacaaatgcatagtcatttatttatccaatttgtaaagaaaaatgccagcaattccacgggttgaaagacttttaagaggccaatggaccggcggttcagcagaagggacggcaacggccgaggccaaaggatgccaaaggctgaagggaccgtcgcgatggggtcaaaggcatcccaaaattattaaaattcttttttaaaacaattgaaaaatattttatgcattgaaatctgaaagtttcctgatagcctaacttttacaacaaaagtcttacgacgatttgaccaattggtccgatctccttcatattaacaactgtacaccagagaatggaacggattccaacctccgaaattctttaaggcctcggaattccaatcgcttttacaccctaagacaaactgaaaaatcggtgaaaaatttctagaagggttataaaaatttgaggaaaaatgaaaaaaatttaattaggttttaaaattg

SEQ ID NO: 18593 - DNA, 2357 bp, Heterodera glycines
  unsure (1)..(2357): unsure at all n locations
ttttttgaaaaatctccaaggatttttgggttccggaaacatacataggtaagttaattaaaatgctgaatccaatcctccaaacttttgtgcccatttaaaaaaagttttccccattatccagggatggtgatgtgccttctctcctacggtgccggcctcgacggcaggcggacacataaaatgacggcactacattttgcggtgtccaagcgaaacttgcagttcacacgcttgctgctctgcatgggcgccgacccgaacttggccaatgcgcacggggacacgccacggcatttggccgccaaattgaacgagtaaatttttttgggtggtggttaaatttacattattcttcgcccaaaaataggaccccaaattccaactctcgtttttatccgcttaaatatgtcaaaattttcagggttgatttgctgaaaagtctgatcaaatgcggtgctcggcgttgtccactcaccaaggtacaaacacaaaaatgttgcactattagtaaaaaaaaaaatttctgccttccaaaattcttttcatgatttaaaattggataaacacatccatatctaacgttttacgaatccacaaatacgcttttttgtattacaaaaatccgtttttccccccgtattttaggttggctgtgtatccggttgtgtcaacgagaaatagacaatactcaaagaatgagaagaagaagaaaataaaagattaattgagaaaaagttaagtaaaaataaagtataaaaaatttttaataaacgatttaaaagtaaaacttttcggaattctataacgaaaaaaaaatacttgaaatttttgccttgtcaaaaaaagcatgcatttttgggccaaaaaatgagtgaaaattttaaataatgtttttcattatcttaacctagaaattttggaataatttctattggactttatagagaacacaatgaacttcaaaatgagtataaagcgacttcatgtggttatagttgaaaatagttataacaaattaaatgtcgtgcaaagacttttggaacaccctgtatttcaaaataatttataaaatattatactaatgaaattagtttcatcgtgtcacaatatttacaaaagaaaaaatatttttattcatatagagaagcaaaaagggaccgaatttagaaaatttacaacaaaaaaactaaaaaaaaaataaatgaataattttaaagaagtttaaaattataattatgtttataaagccatggctttcgtcagagaatgcatcgttttatttgtttcgcaatttaaaaaaaattaagtcattttttaataatttgtaattaaacatgatcaaaaaaagatatttgacattcattaaaagaggcaatattttatatttttgttcatttaagtatgtaaataaaataggtttttaaatgaaaagcgttaaaaagaaatttaaaaataataatgactgtcaaaacaaaaaataatgatcgtttttttcatttataacacaactaactgtaaaataaatgattattttccgtaaaaatttattaaataaaaaactccctttttattttgtatgaaataacaaaggcataaaaacagacaatcaattaaccctggaattaagccaaaaatttgttcgttatatttgattttgtatcacaaagaaacaaaaataactttaattaaaaaatatataattataaattaaaaaatttctaaaattttactatgaaaaattccagaaaatctgtaaataaaaaacgaaggattattttaaattaatttacattatgttttatattttaaaaaattatatattttttaatctatgtttgtttattttaacgcattttttgaaaaaaaaattggcttctaatcaaatggaattaatttaattgtaaaaaaataaatataatatagtgttataaattgaaatacaaaagaaaagcacaatcaaacaacttttaccataatcaagcatttttatcacttttattaataagcttaaaatactacattacaaataagaaatgattaatgaaaaacatttcatcaaactgtggttactcaaagtaacaatctaatttttaaacttttgaattatacattatgaaaattcactgattataaaaataattttcatatttcccaaacttttcctaccggtcatattccattttcgcttaaaattcattaatttcataaacaaaaagataaaatattataagaataaattaaaatgttttgcataattaccatacaatagcgaataattgccttataagtcaatgtttaatattaattctnngaataatacataatgaaaatagagcaaatgcttgagcgcaccc

SEQ ID NO: 18594 - DNA, 2397 bp, Heterodera glycines
atgctcctcttcacgatttttttgaatgccaaagaatcgtttaaatccaaatttacaggacaaaaaaaatcaatatcctacccctgtctctaataatggctaatgctgattcgccgatactaatttctgatgaggaactaagcgacgacgaaatacatttgagaaaattactattgtcggaacaacagcaacaacaactacgtgagcaacaattcaatcccgatcggccctactcgtcgacagtgcattccctgcccatcaaccaggtccaaattgtgaccccagcacaaggacaacagctaaagcgtgaccaacagctagccctgattaatcagaaaataaaagagatggaagccgcaaaaagacaaattgaagaagaagaaactgccgaagaagaagcacgaattttaagagaaaaggcatggaaagcggaagaacagaagaaaaggacaaagagggaattggatgaaaaggtgaagaaaagggaagaagaaaagaaagcggaagaaaaggcaaaaaaagacaaggaggaggtcaaagcggcatttaagaaaattggaatgagtaccgaagtggggggaaaagaagatgaaaacaaaccaaaaaagaaaaaatcgaagaacaacaaaggaaaggacacggaaaatggaaatttgaaggccgaaaaactcaatgatggacatagggaagctaagaaagatgcagaagaaaaggcgacgagagaagcagaagcgaagaaagatgcagaagaaaaggcaagagagaagcagaagcgaagaaagatgcagaagaaaaggcgagagaagcagaagcgaagaaggatgcagaagaaaaggcgagagaagcagaagcgaagaaggatgcagaagaaaaggcgaggagagaagcagaagcaaagaaagatgcagaagaaaaggcgagagaagcagaagcgaagaaagatgcagaagaaaaggcgagagaagcagaagtgaagaaagatgcggaagaaaaggctaacagagaagcagaggagaagagagacgctgaagaaagggcgaagagagaggaagaggaaaaggaagcggcagtagaaacaaaaagagacgcagaagcaacggaaaaaatacacagtgaaaaagaaaaaaagggaaaaagagaagggaatgtctcaatcgatgtggagggcgcaaagaagaaaattatggagacaattagcgaaaaatggacacccaaaattgtgggaagcatttttgacccgcgaggtgaagaattgggggacgattggacgatcaaaaagtgccaagaaaaccgggaaaaagaggaccgactgagagagggaaaaagcgaagagcgaatgaaggcgtggaaggaatggacgcagccaaaaaatcaatgggaaagtggtggcacggcacaaggagggaaaagattttttgagaacacgctgaaatccgcagtgatctcggcgaatgagacacgagccatcccaccggaaggaatgggctggaaacggcatgtaccatgcttccaagcagcgccgcctggccccggcttcaagcgccgacaccacgacgtgagcccaatcagaagaatggacagcacgggacaagggacatcggcggcgagcggaacggaagaaaggatcgtgaaaattcgaaaactgttgctgcaggccgccgacttattgggagaaatggcggacgaattgttcccgtataagaaatagggggacagcaaaaggaatatcaaaataacaaaaaacatatataaacaaaacaaaaaaccaccaaaatcaaacaaaatacaaaaaataattaattacatacattaaccattatttttgctgccccccttttaattgattgcaaatgaaatgtttgggtaaatgactgccctttgccttcagtcattttctctctcccttttcacatctcacacgttaaaatgtctcgccctctctttttctctcattctattttttcgttccatttccttttctttaactctatctctctctctctcttcatctgtctttcgttttcgcttgcctgaggaaatgccaatactcaccaatcacggcggacggcacaacaaagcacggcacaatcaaaattccaaccaccaaaacaacggacatcagaagtgcagcagccatttattcggaatttaaatctacaaaattttgagagaaggaaaagccaaaaagatgaaaaatgacgaaaaagttggatgaacaaaaaatgacggttcgctgctgcacatctgtccaaaaatcctcccatctcttcctattcattattcttcactaatttgcattttcaatttacgcaccattttccacgacaacttttgaatgcaattgaatggaacgccgagagcggcgttcagcagagagcggagaatattgtgcggcaa

SEQ ID NO: 18595 - DNA, 690 bp, Heterodera glycines
  unsure (1)..(690): unsure at all n locations
aggccgacgcttttcttgttttggcgtattgctgtctccccagtcggaattaaaacttgaggactggcgattatgcgccactggccgaccctgttgcttcttgacgaatgctggttgatcttctgccatgcgaaaagaccggccttgttgcttcttcactggtagtagttggtcctcttcaacgccattttgggcttgtcgattgctcggcatcggtcgactctgttgcttcgtcattggtcgtgtttggtcttcagtcgcctcataatgggcttgtcgaatgctcggcaccggccggccctgttgcttcttcattggtggtgaatggtctggtttgtcttttgccgtcccattttgggggggtcgattgcttggcaccgaccgaccctgttgtttcttcacgggtgatggttggtctggttgatcttctgccgtcccattttgattctgtcgattgcccagcttcactggtgatgggtggtcttctgccgtcccattttgaggctgtcgattgctcgggaccgggcggccctgttgtttattcactagtagtggttggtcatattcaaccgaatttgngggctgctgtcgattgcttggcaccggccgactctgttgtttctggactggtgctggttgatcttcactcgtaactgtagacattggcttgacaaacgatcttttatgaaa

SEQ ID NO: 18596 - DNA, 1131 bp, Heterodera glycines
cgaaagaaaattatgctgtttgatgacccgggaaaggggggggggggtgaactgaatttaaatggccaactgtgcaggaaattgagcatttagtttccgttaatcaaaatctatggagaatgatagcaagagatggttaaaagccaaagccgcttagagaaaggagggataaagaacaaagagaaacgggatttgggaaaggagaagaaaatatttttattcaaactggaacaaagaacgccataaaaaattaaaatacaactgcaaaaataaaatttacaatgtctacctaatttttcgagagcccgaatccgggaaatgggaaaacgaaaggaaagaacggcatggattgcgaacgggaattccgcttttcccaatccctgtaaaaatctcatccgggcaaaaaggacgggaaacgagagaatgggatttccgggttttccgcgggaatcgcattcccaccgggctctaatttttttcacttttctcttgtgacaatgagaaggagttttaaaattttacaatttttagtaaaaaaatttttatgtttgagatgttggaaaaacctattttgtaccgaaattatctttcttcaatctcttccgctctgctaatgagcttccaacgagcacaactacaaaaggttgctgtgcattgtgaagggacaattagaagttgtagcaacagcagcagcagttcatctgatggtttgtcgaagaattttgtattttttccaaaaaaaattttccattttttttgttgacactcatccaacgtcgaagaaaatgccgccatggcaaaaaactgcgaattttgtagacagcgcacagactttcgactattggacagtaaggggtcgggaacagttaaatattacattttgcgagaaaatttttttatagtcggacttacatgaaatcaactcctatcatatgatgttattgtgagaccaggagtgatgctctgatcagacaaatgaacaaacggtcggcaacgccgtcgcccataaatatgctgacaaaatgtaaagaaattaattttcttcccgcccacataacactaaaattaatatatatttaaatttaaaaatttttattaaattttaacatataatgaaaactttgctcattt

SEQ ID NO: 18597 - DNA, 2067 bp, Heterodera glycines
  unsure (1)..(2067): unsure at all n locations
ttttaattaatgatgtacaatgcttttaagcccccccgtgaggcggctcctttttgtgcactattttggtttttaaaaattggatccggatttttgggcttttttaaataaattgggaaaaattcaaaacaaaaaaacttttattgcgctacaaatgcttttaagccccgccgtgaggcgggacagttccaaaatttgcaccacattttactgtggaaagtccaagtaccttaattggacaactacgtgtcaatgagcacagtcgccgttggccagttgtgaaacagaaaaatgggaatatcagatggggtgcgtcccatcctaaaaattcctcttttcgtctaaccatcactccctttttgtggagtcgggggcgtttgggccccagtttttgggcccccgcgtttgggcccccgtttttgggccccaagtacagaaaaatttctgtttttcaaaaaatcaatgaaatcctgccggatcctgcacaaaaatcagatttgcggatcctgttgcaggatttgaattcaaaatcttttgccggaccggatccggccggattaatcctgcaaatcctgcattttcaaaaaaacgcaggattgcggattgggatcctgcaaaatcctgcgcaggatccggtcctgctccggtatctaataattaacaaagattttggtgcaaaaccgaacgtgtctgtacgtgttgatgacaaatttgtggcttttccgttgccggaccgtccgctgcccaacaatattcgctttaacggactttacattcagtaattttaaacttgtgtgtgtattaaacagggctctcaactctgctgatttatcagctttttgtctgtgctgattgtgaaacgaacaacgaaaaattcaaatgataaaatgaaaagcgaataattattttaaatattaaaagtaaaataatttaataaaatgtaatatacaaaagcggatctcaaaatcgtggttggtgaagtgcagcgacgcaaattgttcaaagcatcgccaccggcaaacctcaaatgccgaatgtttgtcgcaaaaatgtgccaaatttgacggacaaaaacatcccaattgttctgttttgtgtttgtcgctggcaaacaaagacatattcaattccaatttggtgccatttatgtcccaaatttgcttgttggaacggataaatgtgagcacagaatagtcaatgtagctgaaaatgggaaaaaatgaagaagacagccaaccatattaattggttttttgtataatttttgatttactcaatctgaaggtccttaataaagcggattttgttgggcagcggatggtccggcagcggaaatgctacgcatttgtcatcgatcagtaaaaagacagtctcggttctggtcctttgttcttgcgaattgcgtgcgacacttctccaaattgtcaattccgtttttccatcaaaatgtttgtccaccaaaacatcgaaacggtcggaaagcaatgccatttgagatcaataattaaattaaattgtgtgagctgaaatcattaagaaaacaaaaaaaaagattgcttccgaggtttacagaattcatcactttagctaagaaaatcaccgataacataaaaaagataaaaaagcattttgaaaatcccaatttttgttggtaaacacaaaaaagaagttagttttttcctacttttaagggcacagataatttaggaaaaaaacatattaaatttaaacatcctttaattaatagtaattaattaaataatttttaaaaaaagtgattgcttgtgatgttcacagaattcatcatatacttcacgccatttgctcatttcaccggctgtttctcagtttctctttccgccgctctttcctccaaaattccgtctaaattttcaatttattaaatttaatttgctcatctgatagccaaaaacaatttgagcggacggaataagccaaagcaaaaagaaaattgttataatttcgtgcatttttctataattgatttttanacggctgaaaattgngaagaaattgngaagtgttgtgaccgcacacagcagctca

SEQ ID NO: 18598 - DNA, 2476 bp, Heterodera glycines
  unsure (1)..(2476): unsure at all n locations
tcactaaaaatttcttattccattcccgaattttatgcgacatttttgtattttttgggataaagaaaaaatttatggaaatcttaaaataatagatatttaaataaaattttttttattattattattaaattagttaagcttaattagtatatttgttatatagttaaatccttaccaattccagagttcttttttggtttatgctcatggcttttaggtcccattcttccgttattccgcccgtcaagtcggacaagcactcccggattttgccacccacaagttcttgataccctccgtagactttggcatacgccttttctaataacacagaccaaaatacgtcactaaaaaataaattaaataattaaattaatttaatttaatttaatcactcatccggtggacgactataaagtaagcggccatcagttcggcacggaagccggtcatcgattatcacttccgtccaccttccatagtgccagaaatgaaaatggaaaatgcctgaaaatcaggaacaaaaatagacaaaatttctttgcccattataaaaaaatcttctaatattttgtagctcaaaaatccatttctaaatctttggtaaatatatcattgaatttcaagctttttctccctttttattattttaatcttaaaaaataacttattatataatttattttgttttatttatatttccagacacattttttttgtttttttttgccctcaagaagggcaatatttgcttttactgacaaaatattttttttttgcaaaatgtcaaaaaaagatgtatatatgtagtgattaaaaataaaataagttgttcctggaaactttcgcatatttatgtgttgtaaaatggggataacatcatactgtttttaaaatttactaaatttttatgataaattcaggaactttttccaaaatggaaaaggggtgaaatattttttaaaatttttttacatttgcaaacttttctttttacatacataacattttaaaagaaaaaaagaataatgacaaaaaacgaagaaaaattagtaaaatctatggggaaaacgataaaataaaaagataaattgaaaaagtgtgcgtttttctattgtcagcaaattcctataaataccaaaatagtggcaataaaaattaaaagttaattacaaaaattattaaaatgaaaaataattttgctttttcattaaatagagccatgcatatgccatcatcgatacaaaggaattcgtcaattcacgtgaccggcaaatcattgccttattgataaggaatccatgngggcgggccaattggcaaggtggtttctctgaaaactcgttggattggacaacagtaccgactaatattaaaccggcaatgcaaaaaaggctggaggagaacagcggagaattttggtaattaatcagtagagaccggatttttcaccatcaaaaaatgataattaagcacataattcagcataaaaaaatactaaaataagcacaaaatcagcatgaaaatggtaaaattattttaaatgtatttttcaagaaaaaaaaattttggggattaattttcgagaaaattttccatttttaggagtgtattttttgaaattttgaagtccattataggggtgtatttttcgtttttattgttgggagacagtgttttagtcaaaattttataataccaatcaagcaaaaaataagcacgaaaatgctaaattcagcacaaaaattacatgcgcaacattaagcatgaaaatactatttaagcaaaaaccagcatgaaaaagttggaccaagaagcttcaaaccaagttttaaatacttttttcatacttattagcacgccccgggttagcaaaaaatttcagaaaatgctgcaaaatccgggttctagtaatctgtttcacattttaaacttaaattattaaatgctatcattttaccatatttatatgcatttaacaatgttttttaagtcgctagggtttttgggaaaatttgggtttacatttttgtcagtttaataattttttaaatgattttaaaagatcataactttgaaaaagtggtcaggtttaaatttttggaccatatttaaaagagattaggtttatttttttgcaaatgccataaatgtggtaaaatagcaggttacattaaatgtcatcttttgccaattggattttattaaaaaattaaatggaacaatttgctagggtttcattggacgacttgatccgatggtttgcaagaattcatatttgctttttggagccttcggcaatttgggaagtgaataagatgttaccgaacagtaacattcaaaatgaatggggatgcaataatgtatgatggaaaatggacaaaagacacagccaggagggggtccacaaaaccccagcatgtaagttaaaacgggaaaaaaacatttttttttacgaaaaatatgatttttt

SEQ ID NO: 18599 - DNA, 942 bp, Heterodera glycines
  unsure (1)..(942): unsure at all n locations
ttgaccatcgaagtcgattttgagcgtagtttaagccaacggctccgaaaggactcgtcaatgcgcgcgaacaatcggttcgacttcagttgggtggtcggctgttcgcttgccgaggaaattggtcggtgtgcccgagggaacagtccacgcaaatcgcgcggtctcctggccacccgagcgttatttggtggcgcctttttctttggcgactggtgatttacggtggactcttcctaaagggaaaacattccgtgggttccaatggtcacccgttgttttcattgctccttttcggcccacctgctgcagtgtgtcgtctccgttccgttcgtcctcttcgccctgtgaggcgagcagtgtccgttccgtgtggtacgactgctgccgcgtgtcgtcgtgcccattttccacggtttccattaagaaaacctcctcgtcgtcagcgccaaaatgaaggcgttcatgggaggagcaagcggagcaagacgaaggcggagttgtggcgactgtgaaggcattcacccgctggtggtgctggctgacacgtcttcttgcaagcgcctcgaaattttctgaaaattgatcaagtggaagagtgaaaagacggacgtttttaaattcaaataaaattggtttaaaaaaaataacttgaaaatatgtatttttgagactcgggaatcccgtgcctcgttgttacaataattgaaaatgcgctaaaaacatgccttgttccgactcaaattccaattgttggttataaatcatctcataagatgggttcaccgccatttccacttcaatttgcaattgctcgtttccgtcagttgcatttgtttggtaaaaatgttcagggtgattcacccggtcgagcagttcacgtgtgagtcgtgcgctcaacgccccggaaacgaatgngtcagcctttttttggttgtttat

SEQ ID NO: 18600 - DNA, 2360 bp, Heterodera glycines
  unsure (1)..(2360): unsure at all n locations
aaaaaaaaaattgaaaaatttgccataaatagtaaaataaacataaaaaattatctaaaaaatacttactcacaaataaaagttgaatttttttgaccaaatttaagattgtaaaaacggaatttcttgctatttactaatcatttgatttttaatttacaattaagatgaacaatttgcacgagctctaatgtatgttgatgatgatgatgatgatgatacaattacacatggtaataatccaacggcaaatgacgcagcaatggcacaacggatgcaaaaacagctgcaggagcaacaggaagaagcggatgccgaattagctaggcgtttggctgatcaactttagggtaataatttgggctggcaatttttaattactaacaataacaagttattcaaattaataattaattaataaatagtgaagaattaaaaaaaagccaaaatacgaatttaaattctgtgccttcaacaaatcatattaattgtgagtcgatgtgtaaaaagtaaaaagatggggagagagtctggcaaagcaagacaaagcaaaaggatggaatattggtggatggatattattttttttggattgggggggggggggacgagacgaaggaagggagggctgtgcagttgccattggctaatgttgaagagagaaggaaaggaaggcttaaatggaataaattaagcgatggctaatcaaagccaagcacaacattgacaaaacgccgtcatttaaattattggatgctgaaagtggccatcccaacaaaaatttaaattttacaatttttagcatattttttattttctaaaaaacatcgtccccatatggccggtggaacaactttgcaactctcttcacaacaagcctggtcacagcgcgcactgaatttgttgttttgtgccagtggaataataatttgttatggcgcatttagtgtttttcaggaaaaaatgtgggacctttcaaaaacgtaaaataataaagacttttcattcattcagcacccaaaggctttttggtgaaaagaaggagcgttttgtgtacatgcaagccttagtgttcttccaatgtgccaccaatttggttggcttttgtttaacaattacttgctgattcgcttctccttgtttagcttgttgcttggtatgttttgagaagaaataaacagaaatcgctggacaatgtgccgattcacttgtactcaatgtgctcaaccagctacttcctggccatgctcttcagcagttacgccttggaatgggtcaattacccgacccaagtcagtcactcccctcccattgaactgttccattttcgaatctctgcaggtccttggcaagtcgtgcaaacccatccccatcatgctgttcggtgtcctttttgctcacaaacggtacggacttcgcaaatacttttacgtgcttctcatcgtcaccggaatggccatctttttgtacaaaccccagaagggcagtgtcggctttcagtttggcagtggcgaattgtttctgtgtctgtcgttggcaatggacggattcactggcgccgtccaaggtgccctcctttccttccccacaaatgcatttctcacccccctttttcagacagaattcgccattaccacaccaccgacaaatggaccatgatgttctcgatgaacgccttctcttccgccttcctcgccttaattcttctcgccagcggcgaactctttcagtttttccgattcgtcgccgcttaccctttcattcttcagcaaatgcttctcttctcgctgtccggtgcggttggccaggtcctctcgtcccatcccttttttccattctcctttaattaatttgctcgttttcagtgttttatcttcaaaacggtcaccgatttcggccctctcacctgttccatcatcacaactcttcgaaaactcttcagtctcgttttttcgatcatcatcttttcccacccttacacaaatcgacacgtgctcggcattatttttgtgtttgccgcgttgattttggatgccattgacagtcggaaaagccatggaaaagcaaaaggggacgaaaagccaccagcaaaggacgggcttctccaagaagcgactgcgcaggagaaagaaaactgatgaatttacctcatcatccaccgattgaccaatcggacaaattttaaactctggggaaactgtttagtctgtttttatatttcagtaaattaatttgatggatttctaaattccaaaaactaaccattatgattgtataaacattgttatttgagcttctttggacatgtccaactttctatttattgatttcacgttctttaatttatncggaaatttatt

SEQ ID NO: 18601 - DNA, 1266 bp, Heterodera glycines
ttttatttaagctaattaaatctaaatcagttagaatttggtccttagtttataaaacatatataaagatccttattagaatatgcaacagaaatatgggatcctaagtcagttaatgcacttaacagaatcgaaaattgtcaaaaatactttaccagagtagccctaaaaaaatgtaatctcccttacatttcatataccaaacgtcttgaacttttcaaacttgatagacttgatgttcgtagacaagttattgatttaactacggcttttaaaataattaatagtttttcacatttagaccctaaaaacctttatactttttctaaaagaataaatagattcaattgcaaacaacttgtttctaaacacaaaacaaacaagacaaacattctttcattaacagaacaaccaaattatggaacaaacttaactcagaaattacaacatctccctctataaatatttttaaaaacagagtccttaattgggttaaaacccctaaataccataaaaatatttacattgcatgagaaaattatttaattgttttataattatatattttacaatgttgatgtgactttattttgtgtgatcttttactcctgtattatttgatcttcatctattcatttttgtacctcgagctgcagtgtaagtggcctatgcccttctgtggtagtttttatttcacattaaataaataaatatattatgctggtcagttcatatttttgaagaacgttttaaagaaggataaaaataattattttattttaccgtcactagatatgcatatgtattttaaattttttattgttatgtaaacttctaatatatatatatatatatatatatttatatacataatcatatgagttggcggttttaagaaacgccctggcggttttaagaaacgcccttgcggttttaagaaacgcccaaagtggcggttttaagaaacgccctggcggttttaagaaacgccctggcggttttaagaaacgcccaaagtggcggttttaagaaacgcccacctggcggttttaagaaacgcccaaagtggcggttttaagaaacgcccacctggcggttttaagaaacgccctggcggttttaaaaaacgcccaaagtggcggttttaagaaacgcccacctggcggttttaagagacgccctggcggttttaagaaacgccctggcggttttaagaaacgccctggcggttttaagaaacgccccctggcggtttaagaaacgccc

SEQ ID NO: 18602 - DNA, 1250 bp, Heterodera glycines
  unsure (1)..(1250): unsure at all n locations
aaaaggtcatttaagttctgtcgttcagttgttttgagtttttatatctatttttaggctttatttttcaaagtttattgttgacaaaaaagaacaatacgatttttggctttgcttttttaaatttggaataaagctttttaaaatgagggtttttgacgacctaaatgaggcttcaaatattttttttcatgttttcttccatatttcgccagtttaaaagtaataatatttggattttgtttttgcaagataactcgagctttagttactacggttaagagagttatttcttcaaatacatcgttggcttttctacttaaggcttatccaagatatcggctaaaaatttccaaaaaatacattgcggatctagagagatcccctcacacaaaaccaaagctgctgatcaggctgcgggattgggactcaaaaattttgcgggacggaatttcgcgggctaatcccacaaaatctagcaatctcacaaattccaaaaattactaaaaatattctgggacccacaaaatctcggaccgttctctagataaaatggaaacctcagtatttggccgaaagcggcggattggagaaaaaataaaacattttaatgtcaaaaaaaattgttttattttaaaacagaatactatttaataattaggaataggaattttatgtaaagacatatttattttcgggtttttctacatattacatacgtatgcatatttttatatacatattttgaactttttcgtatatacagggtgcggcaaaacttctgcaactcgcttttccatggaaaatacagtctaaatgaaaagaaaaacaccaaaccagctaacattgcaatttcattcaataggaactaatttatgagaagattacagcaaatgttcaaagtggccaccatgggttgagagatacgtgcgtccaaaaacttccgaaaattggcacatttctacggtaatttcgtcccaggcacgctgtaaagcctccttcagcgcttcagttgatgcgaatcgcttgttcagcttctgctggtccatgatcgaccaagcggaactaagtcaagtggattcaaatccggcgaatttgagggccagacgactttgcccccaaagtcctggaaacagctcctcctcacagagctgaatagtttgcccaatcctgttaaatgacgaattggatttctccnaaagtgcccttgtgtccaaggatacaacacatcccttaggatggtgttctga

SEQ ID NO: 18603 - DNA, 1837 bp, Heterodera glycines
aatttaatcgctaccttgcgaccgtctgctgtgctactaacatggaaagtaatctcttcattgtcgcccacccaacttggccatttactagttgcaatgtccaaatattgtttcgattcagcacctttcgtggttgctccaagttcaatgcttaacccgggacatctagcttcaacttcaaccggattaccatatacaaaataaactctctttgtgtctgctgcctgcgcattttggggaaaatgggccaaaaaaacgaagcaaaccgtgaacagcagaagaataagggacgtgttcatctgctgaaaaatgttatttttaattccaatcctcaaaataagggtcattgattactgactaattaagtggatttttaattgaacaaaacacagggttaagctgagagaaaaatgtgaaaaaattcaattagcgtaacgttttgacgcaaaaaaaaaagaaagaagcaattacgccaatttgatcagaatgagactggaaaataagaatattgtgattttggaaaaatcagaaaagcctattaataaatattcttaaaaattatggcaaaattaaaatgaatattttaataaaaacgaaaaatattataaatgatcattaatagaaaaagacaaaatatgtacataaatatgtaagaaaatcacgaaatatgtacaaaaaacccaaaatatgtaatatgtaccaaatatttatataaaatttttaaatggttatttttggaaaaaatggaggctgctgaaaatataatatttgatcatttttaactaggcgggaccgtgacttttgaccaaaacggggaccgggacttaccaggaccggaaaagccgggaccgggaccaagtttttcgcccgggaccgagaccgcgagaaatgccgggaccaaccgggactattcccaagaggaaattttttgaaaaaatttagaaaatttgagtgcactttgttacgaaaattgcctatattcaaaaatgtaccaataaaatttttttaattttcggttggggggggggggggggtgaattcgaaaaaattttctattaaaatgaaataaataatttaattttttttttctcaaaaatttctacttctcaccaatttccttctcttttctcaccagacccccattcttaccagtgcttatttattcccgccgggaccgggactagcaaagccgggaccgggatttccattttttcaaaaaccggaaccgtgacggggacctgaaaaacccgggaattcccgtcacggtcccggtcccgtgcagctctaataaaaatcaattttgtaaatttattaaaaattttagtgccccgtcggatgggaactgaaattctgtcttctgtttgacggtgaatccgaaggcaatagaactgaaaaataataacggaatataacttgcgattgatggttcaattgcaattgtttttgctcgattcagttcagcaattcaggcgattaaaacaatacacccattaaaaaatgaaaaaattttctcaaaaattcatctccaaaatttatttaatttattttctttttgtttattataaattatgcaatcttgaagaatgggggtttctaatttatttattttgtgcttacaattagtttttgggggttatcagaggtgctgattacgaatctgaacttggatttcaacaaatttcgaaccccggacccgaattcaaacaaaaaaaaacaaattttttttcaaaaatacacgttaaaatcgaccaaattttcgagaaaattgcgtattttctattcagttaataattgaagcattgttttgcatcaaaataaatagttgtcaaattaattc

SEQ ID NO: 18604 - DNA, 2501 bp, Heterodera glycines
  unsure (1)..(2501): unsure at all n locations
ccaaagggtgcagcactacngttttctaaaacatttttcatttttttgaaaatttgaaaaaatcggctgattttttttaaatccttcagaaatttctaacaataagattttttgaaaaaataaaaaattctaagttttaaattattatttttttttaaattttcgaacgtgaaacgatacgggggcggtaatgagctgctcccgaattcaagtccatgaatgaatttaaacaataaaattaaaaaaatcttttacaattttagattttggtcgatccatggcaattggttcaactgctccaacttggccaagccgaatttgaacgggtcgtggtcggattgtacgtagtcattagggtgcgttttgaaaacacagtcatttgggagcattaattagtttaaaaatttttttttaaaagttttcaattttctaagatttttttcttggaaatttctaaatttaaatattttttaaaatttcggcggcgagattttatcccatcacctttatgctttatctttgactgctgtcccaccctatattttccttcaagaagccatggtcactcgaacgaattgaaggcgtcgcatggaatgccgtgccgacgtacaaaatttgtggccaagggcccctgaacgttttgctgtgcttcaacggtttcagctacaaactgtgcaaagtggattattcaaggccgaactctaaccacgaaatattgaagaatgagacgatggtcagtcagccatcgtctaccattttgtttttaggaaaaattaatttgttattcaatgcaaaaatggggagcaggacaaaacgtctccgccgaaatgtcgccggacataatgtcaaacgcaaaacaaaaaacatttagtaaaatatttctataaattttcttgaaaaagattgtgtttcttttgtgcttccgtttttgagttctgagttgtttggagcggatttttattatttcaattaaattgtaagatgccaatttatacattattttcgacagattgcacaattttgcattattccccgacactttcaaaggttgccaatttcatcgctccgtccgccgagcacattaatcgtaaggctcaagaattgggggaagcgctgcgtaacaccaaacgaattaagcgcaaggagggaaagaataggaggaggaataagaagaagccgaagcttgaaatttgatcatttgttttgctcattaggttccaaacgacgcgtggtttagcacttgcagaagaaagacccaattaattaatgatatattgtaattggaaagattcgatatttattgactttcacgcagtatttaaatgcaatggtaaaaattgggaatattaaatttaaacgacgtgtgcgcaaaaagttcccgcatttttcaaatcattttttacaattagttaattaccaattttaattgatttatactcttgtcaaatttgtcgcataactcacagcagcatgtggacatggaaaatttgtgcattcgcaaatgctggatttattttatgactgaaaccctgttcggcccggacagaattgattttggtcggggtgacacctgaaaaaaaaacatgttaaaaataaaaattaaattattatttttttttgcttttcacccaaagtaattgtggcagaggaactccaaaagttccaatttcggatcaagatcaaattatgataaaatctaagctcttgtttcagttgtttcgcgagtcccacgagcggattcaatcttttggtgtcctcgtcccgccatttccttaacagaaaatatttcaagaattttgagaaaaaaaaacaaaattttgagtaatgaaacaaagtaaacccagcagaattttgaaccttacacacagcggcccaattttgggctccaagtacaaatatgctggatttttcgtcttagtggtctgtgagttagtcaccaaaaggggggggggtctcaggttcgagtcccatgcacgctgtaactgtattttgaggtttttaaagcaaataaatataagtgaaatgataacacagtttttaatgaagctcaaaaattaaaaaaaaattttatttcctgtaaaaacgaataaaaacctttatcgaactgtgtctattcaaaatcgaattgttttctccattgttttcttcgtccgtctcccgtcgaccaccaatttcttcttgctaaatcaccaatcaatgacattgataagcgaaatttcgtcagtttcttcttccgtttgatcgaactcatcatgctcttccctctgatcactttgtctctgaattattatatataaatttttaaataaaacaagattaacgcaattaccccctccaaacatacatacctgcttcagttcatcaattttgccagagtcgaggagccaattgttgacaaaatggtgctccagttgctgcaaaatttggtctgcgtccggcatacacttccacagttgctcaagtcggcgccaaacggaatggagcgcctcatcacctttaaa

SEQ ID NO: 18605 - DNA, 2516 bp, Heterodera glycines
tcatgtgttatttgcaaagaaccattgccagtgtgcaacaaagaaaaaattgagttaaaggagccctttcctcccttcaatgatggccatccccatcgatggtttgtgtagtaaaaaagttttataaaattaaaacacatcaaaaaacaatttattctaaataggtgtttttagcttcttttcgatggtcggcatgctctacacctttttgttctattttggaatgtaaggcgttgaatgtaaggcgttgaaagtgatggagcacgcgtaacacgacctgacactgtcgcatggcaactttggcttgaaaaagagaagaataataaatatttaaaatgattttcatttaatttttgttcatcggtttattttgaaatttgtcatcctcaacccaattacacgttgagaccacgaaaatatacccactaatcggcaccgcatcgaaaatttcaaattttcgccgatttttcatattctttaaaaaggcatattttttcagaacgtttcccattttaggtttaaaaaatttttcattgggaggaaggaaaaaattttcctccctccaataatgcgcgcaatcaccgatggtttgtgaagattttttataaaaataaaacaccaaaaaacaatttattctaaatagctgttttacattgttttaaacgattttgcacaaataaaaactttttttagacgataattgtgcgcttgccgtgcggaacaaaggcgcggcatctaaagacatcaagtggcttattgctacttataagatcaaagccacagaagaagacgacataatcgatgttgttgattgtcctggcaatgtcttcatggggtaccagacattctcttgtttggatggttgtttcatttttcaatttaaatatttattaatttgatatattttttcaattcatgccaacttcagaacaaaataatgatatatttgtcttgaatggatgcgccgaaacaaatagttgttcatctaaattggagaaaatctggaaaaatatgatggatttgcgtcatgtgttagttgcaaagaaccattgccagtgtgcaacaaagaaaaaattgagttaaaggagccctttcctcccttcaatgatggccatccccatcgatggtttgtgtagtaaaaaagttttataaaattaaaacacatcaaaaaacaatttattctaaataggtgtttttagcttcttttcgatggtcggcatgctctacacctttttgttctattttggaatgtaaggcgttgaaagtgatggagcacgcgtaacacgaagcttcttttcgatggtcggcatgctctacacctttttgttctattttggaatgtaaggcgttgaaagtgatggagcacgcgtaacacgacctgacactgtcgcatggcaactttggcttgaaaaagagaagaataataaatatttaaaatgattttcatttaatttttgttcatcggtttattttgaaatttgtcatcctcaacccaattacacgttgagaccacgaaaatataccccctaatcggcaccgcatcgaaaatttcaaattttcgccgatttttcatattctttaaaaaggcatattttttcagaacgtttcccattttaggtttaaaaaatttttcattgggaggaaggaaaaaattttcctccctccaataatgcgcgcaatcaccgatggtttgtgaagattttttataaaaataaaacaccaaaaaacaatttattctaaatagctgttttacattgttttaaacgattttgcacaaataaaaacttttttagacgataattgtgcgcttgccgtgcggaacaaaggcgcggcatctaaagacatcaagtggcttattgctacttataagatcaaagccacagaagaagacgacataatcgatgttgttgattgtcctggcaatgtcttcatggggtaccagacattctcttgtttggatggttgtttcatttttcaatttaaatatttattaatttgatatattttttcaattcatgccaacttcagaacaaaataatgatatatttgtcttgaatggatgcgccgaaaaaaaaagttgttcatctaaattggagaaaatctgtaaaaaatatgatggatttgcgtcatgtgttatttgcaaagaaccattgccagtgtgcaacaaagaaaaaattgagttaaaggagccctttcctcccttcaatgatggccatccccatcgatggtttgtgtagtaaaaaagttttataaaattaaaacacatcaaaaaacaatttattctaaataggtgcttcttttcgatggtcggcatgctctacacctttttgttctattttggaatgtaaggcgttgaaagtgatggagcacgcgtaacacgaagcttcttttcgatggtcggcatgctctacacctttttgttctattttggaatataaggcgttgaaagtgatggagcacgcgtaacacgacctgacactgtcgcatggcaactttggcttaaaaaagagaagaat

SEQ ID NO: 18606 - DNA, 1922 bp, Heterodera glycines
  unsure (1)..(1922): unsure at all n locations
tggcaattggcacttatggggaagaggagacgacaagcgaattttagagaaatattggcaaatatgagaaaaggacgaagaaaactaagaaaagtgcaaaatgtgggcaaagtaagccgcaatttccaaatttcactgctttttaaatgccttcggccgatttttcaggtgagcgattttaagaaaaataacaaaaaagccgagtcgattctcccacacatattttttgttttggccctctccactcgcatttcatcaattattaaggaggaatcgttgagttattagtcgcgggacggacaatggcaatgggcaacaaacactccgtgggaaaagcaaaaaggggccaaggaaatgagagacaggaaaagccaaaaacagccctaattggtgggcaactgatcactcactcactgatcatcgtgtggcaataatttcggggtttgaaatggcggtcaaatcggggcgggggggggggagcgaacccaaccgaattatctaagataaatgtcatcagtcgctaatggcgaacattgttaaaacaaattttaaattgagaattcgcattgttgaatatgtttcatttatgtaaattgttataataaaaaaattaaaggttttagaaaagttttagtaggcgaaacgtccgactttgccttagtaggcgaaatattgagtaggcgaaatgtcagtaggcgaaatgtcagtagacgaaacgtctgcacactcccctccccccccccccgcttttttttttggttttttacggcttttctggtctcggcaagtttcggtccatttcttactcgaaattccttttcacatgtaacgctaattaaatgtcaaagaattttttttatttaaaaaattgcactgttttcaaattcaaatttaaatttttatttctgaatagaaacttaaatttcaaaaacgttcgggacgtggtcccgcggaattaatcccacaaatcccccgatcgctccggttctctactgctgaacaaattaatttataaaatttatcaaggacaagtgctcaaattattctaatttataggtatatttgctatttacattatttttcaccaatagacaaatgctgagacattgcaaaaagagaggggagaaggaaagaggtggaaaaaggcccaagttggacttggaaatggtttcggcactgcaaacgccgctttcgtctcccttccgcgtgccctttctgaacggtgccattggccatcccttcgttcactgtttcatcgttccgttcttcagacagtccttccacctcgcgtactccccgcactgttctgccgctttgtcggcgttcggtcagtgtcgtgccaatgccaacagtcacagactgtgcccacgaaaatgtaatcaaaaagcttttggctcgtcccttccgcgtcccaatccccggctacacaggtccgtgtggtgggcctttcattttcgcgccctcccacttttgttcaggcggttgcagcaaccgtttgctcggccttcgcatgtccggggtgcgtctttcgctgcacgacccttacgcggagaatgcgctggtcgttttcgcaccaccggaattatctgcacacgaacagttgaaagtgtggtgttatactatttaaaaaggcatcttttgaaaagcgggacatttgctgcttctctctttttttattttaatttaaaaaattccctttgccattttcctcatttgtcagatcgacgataccaaacgtgaagtccatgtcgtcgtggacccccttttgtgcgctgtgctgcggccccaccagcgcgagggcgtcaagtttatgtacgattgtgtgngtgngaagcgtgtcgaagggcacaacgggtgcataatggcagatgaaatgggacttggcaaacattgcaatgcatcgcactgatgtggacactgct

SEQ ID NO: 18607 - DNA, 274 bp, Heterodera glycines
cccccccaggcccctccgcactcgaaatttttaaggaaacattcgtatttttgctgaaaattttagattttccttgctggtacccccccccagacttagcctcacccaattttccaaaaaaattcgataaatttttcaaaaaatgcacaatttgttgatgaaaatctgctaaaaagtggctcaaaatcgcaaaatttctaattttttggacaaaattcgttaacaaatcgcattataaaatgcaaaaattttcccggcggcgcctatcgacacc

SEQ ID NO: 18608 - DNA, 2315 bp, Heterodera glycines
actaccgtagctgcagaagcagaaactaccgtaacatcagaagctgaaactacagtaacaccagaagctgaaactacagtaacaccagaagctgaaactacagtaacaccagaagctgaaactaccgcgaaaaatgaagatgaaacaacagcaacaaaagaagcggaagagactaccgtaaccaaagaagctgaagcgactaccgaaacaagagaagcggaagagactaccgtaacaaaagaacaggaagagactaccgtaaccaaagaagctgaagcggctacagaaacaaaagaagcggaagagactaccgtaacaaaagaagcggaagagactaccgtaacaaaagaaactgaagaaagtaccgtaacaccaacagccgttcagtcgagtgaaaatgcaacatcggaagagtcaaaagcagccgaaaattccaatgccccgtcgtctggcggtgaaattggagcagtgcccgcagaggaagaacaacaaacaacggtaaaacaaagagaaagcatcaaaaaataattatttaattaagtattttttgatttttaggagggatcaacaatctctgcagttttaactgaacaaacgaatactgccgatgcaagaaatattaataaatttaatttattgtaattatttttcccaattttaaaattttgtagggtgccacaaacggacaattgacaaatggaacaacagcagaagcagaaactgcaaccactgcttcaactgctgctccaccgactgagcaaacgacacttataaatgcaccaccggaaacgaatgagcaatcgaacggcacaaacacagcaaatgcgatgaattcggcaccactgacagaccaagcaaatgctgaacagacaaaaggcgatgccaatcagacaatgacggacaaagcaccagacggcacaaatgcaacttctgctggtcaacaaatggcgggagagaaaacagaaaatgcgacaaattcaacgagtgcagcggtccaacgcaattctgatcagacaaaaggcaatgctgatcagttgactcagcccagcaaagaagacagtgccaattcaaccgctactgatcagcaagcgatgctaacgaattcgtcggatggcattgcagcgaacacgacaaatccggcgcaaaacactgatcagaaaacagcaccgggaacaatgcaaaacagcgaaaatccaacaaaccaatcagcatcacctgaagcagagaagaccaatgttaaccaaataaatccgcaaaagtcggatggaaacgcaacattcacaactgcaaaccagacaaccatgactgatcaaggcaatgctaatttttcaatttccgcacaaaatgccgaactaagcaatgttggaccaacgccggaaaaatcaggcaacaacagcaacgcaaattcaacacaaaatgctgcagatatgggaaatgccactcagaaaacaacgagtacggagaagtctaatgggaatacgaacttgacaaatgccgacccccaaaaaagcaatgctcaacaaaaacaaaatactgaccaaaaatcaaatgctgatcaaatggcaccaacagcgaaggctgagaccagcgtcgccaatgcgacaactgttgatcagaagacagcgccgacaaaggcagaaaacagcagcgccgcaacagcgaactcggcacagaataatgcgtcgaacaatggcacttccgtcagcggagcaccggcggagatgcaaaatgtggacgatgagacgaagctgaagatgatgatcatgtcgtcgcttgcttcccagacggcgcctcattctgcgccgaatccgtccaattcttccgctgccgaacagcgacagggtgcgcccaaaggcgccggcgtcacaaacaattcgacagcgccagaaagtgctgagaaaaagccgtcactgcccgcggctaaattggcaaatgaaaggccccaaaaggcgtaattaggacgtagcctaatgatgtgcaatttaacagttttcaatcaatcgatcaattgtagagtaatgagatatgacattgtgtaaaataatacattttatagcgcatttgtgtatttgtttttttttcttcttcgatgatagtgaaataaaaaaaattaaattaaattttataattaaagtattaaaaacattaattagcttcaaatttatgaaaggacacaatttctttttaataatgtcaaaattaaattttagaaacaataaaactctttaaaatgaaatgatatatattttttatcaatttcctcacctaataaaggcaaccccattaaacaccattgccagaatttttatatttgt

SEQ ID NO: 18609 - DNA, 3084 bp, Heterodera glycines
attccttaacgaaaaagagcttgccatcgtgcctgaaggcggttacgagcggaacgacagggctagcgtcttcgccatcaaatatttggactggcgctccaaacgagacggggttcgcatacagcacgctggaaatggtctcgaaaagagatggcggcagttcaaacttgatgggtggattgcggagcagaacaaatgcatagaagttctcggctgctactggcatggatgtgagagctgcttcaaacctgacgacgaactggttgacggaaaaacatgccgagaactcaacgatgctaccaaactgcgcttgctaaaactacaggagcctgttccggctgaggatgcttacggtggagaagatgaacaaggccttgacgtggaagagatttgggagtgtcagatcagagaacagctcaaaagagatgatgaaatgcgagattttttcgacgacttggggaccgatcgggggcccatcgacccacgtcaaacattctacggaggcagaactgggccgcttcagctgattgctgagccaaaggaggatgagaagatttcggtcttcgatatcgtcagcctctacccgtgggtcaactatgccaccgactacccgaccggaatacccacagtcatccaccccactgttgaagagatgatcgtcgactggactcggcccgaacatttgcaataccaagggatatatcgtgtgcgggttattcctccaaaagggctccgaattccggttcttccactaaaaatcgacgaacgcctcctgttctgctgctgccatcgatgtgctgcaaaatttcggaagttgaacacacgacgagtgcacaaatgcccacacacggatgagcagcgggcttttacaggaaacttcacacatattgagctagaaagagccttggaaactggctatcgagtggacagattctggagagcttggcactacgatgaatggtatgagttagttaaagaatcttattattttattgcaatttaggagtgacggaatattcaaggactatgtacgtctgttgattaaattaaaggtctgaatatttttttttaaagttaaataatgtccaaattgcaggtggaggccagcggttttcctgatggtgccaacactgtggaacaacagcagcagttcgctgatgagtacagaagaatctacagtgtaaatttggacctggaaaatgtgcggagaaatcctgggctgcgcttcatctctaagctgatgctgaacagtctttggttggtatcaaaaattttagtcaaaataaataacaaatttaggggaaaattcggcatgcgaaatgaattaggcgcgaacaaagtgctaacaaggccgcaggaatttttcagcctcatcatggatcataaaattgtaaaccaaaatgtgtaaatgaattttcaattttgtacactgtttaggaagtgtcggctgtcatccctttgtcagacaccgccgtccgtgtcatgtacaagagcaaaaagaatttcgtcagcgaacacacgtcaagcaacattgtgataagtctgtggacgaccagccgtgctcgcctcaagctactcgattttatgacacaaatcgatcgaacagagggagccaaactgctatatacggtaaaaaaagctctaatattgtcaagtaaatataccccaacctttaggacaccgacagcgttgctgtgctccataaacgtgacatcgtgcccatccagacaggagaatacttggggcaaatgagcgaggagtatcttgactacgagatcaaaacttttgtctgcggaggtaaaaaatatttaatctttttaattttttattctaaaatttcaggcgcaaaacaatacggctttcgaatgttgaacaaaaggacaggagaagttgaatacgtacaaaagattcgtggcattacattcgacgtgaacaacagtaaggcgctgcagtttgatcacttcctgcaaaaggtgaaaaattacggacggaacactggtgacgacaacgatgatgctcctgccgtgttttcctacgacaaaataatgccaacacgagacagccgaatcatcacacgtgagctacgtaaaaaatacatgccaatatgtcaaaaaggaatcatcaacgagcaatacgaagtctacccatttggaaattaattttaaatcatattgtattattagtcaaaaaagaaaagccaatataattaacacacacatttattcgtcttcaaaatgtagcaatacaacaattgtttcagtgaaaaatgaaaatgcttccgttttaatgggtttcagttttggagacacgtaacaattcaatggggaaaatatcgcggtggtgaccaccaccaaattgaacaacacacggaagggttggatactttaacataacacgatggcgagtgtaaaggtgttgctgaaccgtgattcctaggaatccacggtatgcaaacacctgatttgcaccgatggggcacaaagcatcagggataatcttaacattttttctaagatggacagtttcaatgtccaattggctcagataggcaaggttctcagtccgttgtttctgtagttgcttcgtcaatcggtatgggccacagttgttgaaccggcacagcactctcaccaggttgtagtctcgttttcgcgttcgttgtcgctccaatagttgatcagatccaactcgtccacgatcaggttcatgctgttgctgctgctgttcggttgttcgcaatggcgtgaaagacacagcggcgagtctccctggcaaatcttcaagtccttcaactccacatatagaggttcgctccttaaaaaatgcaaaatgaaaatattaatatttttttatttagaaaacttaccacactattccctcgtacttcttcttcggataacatgttgagtagagttcaacgtcagcaatcaattcgagcgacccgtcgatatgcacaggttggttcggatggtcagcgtttgcgaatgtgtacccagtccaccggaacaaagagggttgggatagagacaattcccaccttcaggcccacttttattttttgtctttcaaacaggtgtacagatc

SEQ ID NO: 18610 - DNA, 3914 bp, Heterodera glycines
gagacagggcatgcgcggtcttgtagaagaaacagggacttcaagtaaattagctttgtcaggaacataactcgaggcggggatcggacgcagacaaatgtttttcagataactaccgcggcagacgtatcggtaaaggagatttgtaaagtgctctccgtgcactgggaaaactgtcgtagtagtgcgtggaagctgcaacagatctcaaattctcgtatttgtggtgtatgtgtgtggtaaatgagttaacgtagactgcttatagtgaagttatctagtggaaggatcaacctctggtgaacagttgcaaaagttaaacaagcatgtattaggtatggagtgcaacagacatattgcgcgtttttcagtgttctgagtaaagacttttttccgccctttttttgagtaaagagtgatcaaacgactcatgcactcagaaatgaatgagtggatcaaaataattatctaggtgcataaaaagcacatatataggggtaaataaaaacacataaacaaaaaataatcaattaaattttctagtcgaaattttaattttttaaaatttgatcggcttgagtaaagactcttttccaccagtgtatcaagtgtgtagagatggccatcgtgctgtagctttggcctatttcttttggtatcaatttgctgttgcatacgtacggaataatatttatatctattaaattttaaaatggaatttatagtcgcaataaaacatttttaataaaaaaaaacaaattaaaaattgttggaatatttgcgcccaaacgtatcgcgcccaaacgtgctggcgcccaaccgtgagcgcccaactgagcggttccggcccagaacttttttttttttatttcaaaaacacattatcttttctttttatattgtaaatgccattatttaacaaatgtaatattttgatggaagtgactgattttgttaggatattataatatttatcgcatcgtttaaaagtacccaaataaaatgaacaaaaaaaaatcaattaaaatggtattacaaatttgagatgtgcttataaattagaggaagattattaaataaattttataacgagttttggaccaaaatcattaaacattacttttttattttaatttacttaaaactttatcctttgaatgaatgtgatcctaaaacaattttagaatttttttggaagaatttaattttttaaattatttatgaaaatagttcaatgaaaaaagtttaaaacgactaaaaaatgttggaattgcacttttatgggaaaaatataaacagggggcatataaccatcttcgccaccgcttcacggaattgatagaaattgtgaacgatttaatgaaaaaaaattactatcaaatcttggcaataaataagtccactctttttttaaattaaatccaactgagaattcttaaacaaagctttttaaaaattccctttggctgtctcattgctcacataattatactgaaaatataataatttgccaatttatttgcaaatttgattaataattctgatgtgccctgctggccatctgcaactctctgttgtgcaaccggaattttggtctcctgaaaatcgtatgccggatgaaattgaccacggcattatggtagtcatcgactcagaaaactgagtccagcggattcagtactggcatccaatgcaaaggaagagtgacgcacatttgaatgattggcctacatttgcggcgctgacatttgctgcgctgacatttgctgcgctgacatttgcggcgcagacatttgcggcgcccagtcaaagcgacattcgcgcgctgacatttacggcgtgacacttgcggcgacgacacttgcggcgccggcaaatgcggcgcccagtcaaaaggacttttgcggcgccgacacttgcggcgcccagtcaaaacaacatttgcgcacagaattaaatggtcccaaaaaatttcaacaatttatttaagttaacagaattgttattttaatagtttattttttaacaatgactaatttaactataacaataacagaaaacgtttcacttcgccacacacatcattttcaaagtataaatgggtactgtaataaaataatttcaataaggttcattatcgccatcaaaaatgaggaagaacaccaacaaaaccgtctgagaccttacgaaattgacccaactcgtggaattgctgaaaggccacgcttaaaaaaatatttgagaaatgatgaagcgatccgacgattagtcatcatcgcctagggatgaaaggctttgaagaatgggactgagagagtcattatcaatgtttttaatggaaataaattgttgaaatatttttggggtcgttgaattttgcgccgccgcaaatgtccttttgactgggcgccgcaagtgtcggcgccgcaagtgtccttttgactgggcgccggaagtgtcggcgccgcaagtgtcgtcgccgcaagtgtcggcgccgcaagtgtcacgccgcaaatgtctgcgccgcaagtgtcgctttgaatgagcgccgcaactgtctgcgccgcaagtgtcagcgccgcaaatgtcagcgccgcaaatgtcgcatcacccaatggaaggggaggagaagcagctgtcaaaattagaagggcaccactttttacaataattagttcatcattcgtttttggttaatttagcagcacaacgacaagaactgctacagaaggagggggaagagggcatgcagagaagaaggaggacaaatggaaaacagggggagcaagaggaggtacggaagataaggaaacagacgagagggtgggaagagaaggatagggaggaggagggaatagagagagagaagaggaagagtattgagtaggagggaacagagagaggaggaagagtagtcgagaggagggaaaagggagagagaggaatagtagggaggaggagggaaaaggagagagagaggaggaagagtaaggaggaggagagaaaaaagagagaggaggaaagaaggaggaggtagaaagagaaggagggagtgctaattgcccatgtgccaaaaagaatcatttttaaaattattttttcatttaagtttaaccttattagttgcaacaaaattaactcgttagcaaatgagaataatatatcaaaaatgccgaaaaataaatgggctaagacacaaatttgaaaagaaaataggcaaacataaactgaaaatgattaaagagtgaaaattgtaaaatgaaaagattataattaggtaactttaagtatttataaaagttaatatgatttagatgaattaacaaaggaatgttcaacagacaagcttaggaagccacaaattagtttaaaaaattgaccatttaactacaaaatgttgccacaaaagaatggcaatttaaagtaatttctcgccgataatttcttccaattgttcgatggccgttttgtagtcgtcgtcctttagctaatcaaccgaatttgcaagaaatgccaaaagtgttatttctgttacccaaatgcttcgtattccgaccgcttcggcacctttgcaattttcttcgaggtcgtcgatgaaaacgcactctgccgcggacagtcccattttaagcagagccatctgaagaaagggactcactaaaagtttatcaaaacaaaagaattgctaattatatgctaattgcctcgtagaaatccgcatttggctttctcgcgccgattttgcacgattcgatgacaaaatcgaagtcggaagtgtcaatggtcaacttcgactccgatctgtcgcgcacccaaaatccattgttggtcaaaaggccaaccaaatatttgcccgaggaacgaagtgagcgaagggcattttcaacgaaaggattctaagagaaattatcaaa

SEQ ID NO: 18611 - DNA, 1990 bp, Heterodera glycines
  unsure (1)..(1990): unsure at all n locations
aaatggatgaaattcaagaaatttaatggaaaaaattgatgaaaaaattttcgtttaatacccgagaaaagcttgcaattacccaccaaattcaaaaaccaccaaaatgattcaatttttncaaaatttctggcttacactcagaattatgttccgagcgcaacataacacgattaactccttggcgaagcactgctgttgagataatagatctagtattgttttccttttcacctaaatacaaacagctggagcacggaatgtagatatcatttttcttatcattaatctgaatgtattttctccaatttgatccatttccaattatataaatagtgttagtcagctttttggagaagcatttttccacttcaagcttaggtgatgaatcaacattatcttttgtgggcgcaaaaacaatttttatcttatgcaggtagcgtttcaaagtgcatacagaaatctgtatgcctttatgcataagttgtccatgtagttcatcaagtgtctttatttcctttttttcatagcttttgacaagtgatattgcttgaggattttttacgaatccttcaaatccggatttatggccttccaaataatcaagtaaaattaagggaaaaataaaactaataaaaaatattttcattttttagtcaatctaaagaatgaatttaacactgaagggaaatatatttttaaattaaaaatttgttattatatggcaaaaaaatattgacatacattgattatcgtttccgacgtaataatattttatgtagaaaacaatttttattacttgcaaaatatttgtttcattgaataataattattttaattaattattatcattgatattattttaggatcgcccacattgatacttttttaggaacgccccattgatactattttaggaacgccccattgatactattttaggatcgcccacattgatacttttttaggatcgcccacattgatactattttaggaacgcccacattgatactattttaggaacgccccattgatactattttaggatcgtctcagcacggaggtacaacagtgataagaaagtgggcattcaaatagagcatttacggaaattaaggaattgtttttattcaaaatagataaaaaatcgatgtgttatatttttcattttttaaaatataatacactttttattaatgaaaaacaaattatgaaatgtataataattgaatagttatttaaattgaaatgaaaaaaattttacaattaaattttaaaataaaagctgaaattctttaattaaatataataaataatttaaatgaaaatcattattcatcaaaaaataattaaattaaactaaaaaaatttattattaataaaaccaaacatttaaatttattaaaagtaatgaaaattaacccaaaaaatacaaagaaaaataatgtacaccgcccggcttcgaacttcgcccccccccccaaaaatgatgcctcagaatccccaatcacacagggattctgaggtctaaacgatgtcaaaagtaaaatctgatcacgtattcgtgatcagcggcccgaataacccctaaagacatgtttttggaagatttttgtcgaaaaaattttttcactcaaaaaccatgtgcacccccctttggtcccgaatgccataatcacttttatttttatatcttttttttaaaaagggataaaaatgtaaaataaaatttatttggtagagcaaaaaattgcggatttttatagtattttactcttccctaatgacttttcagaaccgaggtataaatttttttctgaaaaatcgaaaatttccaaaaattctggaataactttttttcttttgaacattataaaaccaaataaatctcataaaattctcccgattttttgctatttttaaagctttaattcacttaaaattgagcagtccttcattgaggtatgaattttcatattttaacccaaat

SEQ ID NO: 18612 - DNA, 2501 bp, Heterodera glycines
  unsure (1)..(2501): unsure at all n locations
aatcgatgactcgtgccgatttttctgacttttaaatttgatagagcaccacaaagaaatggaaatgcttatcacagaagctagccgtgaatttaatgagcgttatcatcaactttttcctgaagctaaaaaggatgacaaaaataaaaagcaaaaagttggccaaatggacatcgatgtgccaatgattgatgagtaaagaatagtttaaaaaactgttcgtgccgtgaactacctgagaaaatttaggtgccgtgtcttttcgtaaaaaaatgccaattttttttttacagattttccaagaaaaactcgttaaacttttcctaaacgcaaccatatatgtaagcttatgtatcatacggtaactcttgaatttttatatttgcatgaaaaatttcggaaaattttattcagttttcaaaaatttatggcaatttattcagcatttttggtcacaactttttgaaaacaaaaagaaatttttgaaattttttgcgctaataaggcaatccacgagctttcgtataataccaagatttttttaattttgttgcttttaagcacggaaaatctgtaataattgcacttttttccgaaaatatcctagcaaaccaaaaattcttatcccaaattttggtatttttttgtacagtcatggtcatatttgtgccaaaaaatgaaatgggacaacacttttgaccacctatattttgatcaaattgtgaatatggtaaaataaatcaaataaatgtttatgtcacaaatgcaaatatggtatcattggaaagcccataaaaaatgctatccaatggtatgctacttatctgttgaaattggaaaatgacaattttatacgcaattatttttttcaaagcatgatgggacaacacttatgaccatgactgtatatttcaaaatgattaaatgtttttttaacaaaaaaagtaacaatatacattttctccaacccaactatcgaatttgagagactttttggagtataaaaatatattggcataatttttgcataaattttctcctttagaaaaatgcacattaaaacattaattaatttttgcaataaaataaactcgatatttcgcctttctttttgccgtttcagcttttactttttcaaatttaatttatcattttcggcaatttttatgggaaatttttaccaactaataaagaattttttggcattttcatggaggaattcaggcacttttaagcatttttcacaccaatattttgtaaattgtcacgaaaaaaatttgttcattctgctgtctgctctgatcagtttgtaattattttcctgcccacaatgggcgattgttgagattataataattttgagcattgtatggaataattggcgtagccggcaccgttggatgtcttcgtaacaaaatgttatggcatcgatatgcacggttcacgcgtttcagatcaccttacaaattagcaaaaaataaattaggtatntaattaaaataaaattttcaaatcgtttgatttaatttaatttttgctttttcttaatttttatttaaaatatttagcttcgcatttttgttttaataaatgaaaactttgagaattaaacagttttaatttcttatatcttttttattttataataaataaatttaaaatatgccattgaaatatggtgatattcaaagttttcgatatttattaatattttaaaatttacattgctgaaaatttaatagacattaaattaattaaataataaaaataaaatatattttcaatgcttttccaaccttcagtaaaatccgttgatttgcccattaaatttgtatatgctggtgcatttgctgtaattgttggatttccatttttgctgccttccgtactttcatctatggtttatttttaattttatttatttattttattttttaattcaattttggaataaaaattacgaaattaaaagaaattttatattttctaaaattattacagtgcataattgagaaataatcgtatggctcgtcatagttgcttaatccaatggcacttagcttttcaaaatcggcacttgcaccttaaaataaaatattttttttaaatgaagcggcatttaacatgtttaaaattttgtatttatttatttttcaactttttacaataatttaatattttatgcaaaaaagaattagtgatttttaaaaaattgtgttaaataaaatcgtttaattgaacggcacacgatccccctccaaaaaataataataataataatatataatttaaatattaaaaaaatttattttatttatataaaatttcttaccatcgatcacattctcccaccgaatttgtacaaaaccatcccgatcttcccgttgatgttcatggatactaaaaaaaaaatatattttttaaatttatttattttaaatttatttttacaatccaacgacgtgcataaattcatgaattattgttgagtattcaataca

SEQ ID NO: 18613 - DNA, 627 bp, Heterodera glycines
  unsure (1)..(627): unsure at all n locations
aattattttgtgaaattatanttgtacaacacacactctccgtcttttcgatgcttctcaatgctttagcgattaatttttaaatcaaaaaaatgcgaaatgcttcgctgtcgtcccgtcagcccgtcaccatggccccaaagcagcacccacccacccaccgcccttgccttccttccttgccccgcttttgcccaccgctaatcgccctaatggtcctaaatcgttttgtcatggcccctcccccgcccggcggggctccgatttcgtttcactaattaatcttttgtgtcgcgttgtgctgcatgtctcacactgtctctatgttttgctctcacatttatttcctctaaaattagctcccatttctcttacccttctgttcatctgttactctctataattctctctatctctctcactctctctctatctccccccactctttcattcatactctccttctctctatctctctcccccatctctctctctctccctctctcactctctctttctcactctctcttcctatgttcgtctactactctcaatctttctcatctctctttttttctctgcttgtctggctgctttcatttcccggtctatttctctctaattctg

SEQ ID NO: 18614 - DNA, 993 bp, Heterodera glycines
attagctaattaaattaccataccccattactcattaaggaattgtttgaagactgtcgccgaggtcaaacacattcagtgcaactttggattgcgcagaaaagcaagaagcatcggtctccattaaagtgagaggaaaacttagttaccgtaaccttatttatatgtatgtaacaaaaacagtaatgccatgaatgggaaagagttaccgtaacagtatttgtatgtcttaccttaatcaatcttaccgtcttacgcctttaacaaaaacattccagggatggcagggaattaccgtaaccatactttttccattttaccatctacacttgatcatacttaccgttttatgtttaacgatattacagtaattcgcttaccataattcaaaattttttatttatccatgtccaactttttattttttgctaagttttcttcgctccggaaatgccagcgccggtgccggtgccgtcggttggcttgccgacttgcgcgagccgagcacatcgcacacgctgctccatctggccgcattacatggccacagggagctgacccgtgtgctgatgcagcgggatgtacagcttgcaaccgcgcgtgatcgcaagggatgtttgccgctgcatttggccgcatggaatgggcacgaagaagtgatcgcggtgagaaatatttatttttaaaagtttgaaaaaatcagagattgattttttagacacttttggcagctgaaccagcctcagtggtagatcaattttaattttatcaactgaatttttaaaattgtaaatgatcataataattttaattgttattttttttattaattgttaaaacatttaatataaattttaattaatttaaattattaaaagaattttttaaattttgctaaaatataaaatatgtaataataaattcattttctattatttttattgattattaaataattaaactaaattatattttaagattaattttaattac

SEQ ID NO: 18615 - DNA, 978 bp, Heterodera glycines
tagatgcattgttgatgaaatgcgccctttcgttggacgcatgcacaaaatgccgtcctgatcacagcgaagatattgttcgatgccactgcaaggaagtgtacatcgaaagatggcggaacgatccgtctaaacgattgccactctcattcggccttttaactcttaattatagtaaacggcagtttgggctgcgtgaatatgtacccgttcaaatgaccttaaaaatggagggtttgactctaagcattaggagagatatggccaaatgtataatcacaccagggggcttaacaggctgctatggatgtcggatgggaagtcgttttaacttcacttgtaaggcatccctcggcaatcccctggcggatataatttgtgataatggtgccctttgggttacacattgtccagaaaaatcaataaaaatgaatgtgtcattatccctaaatgaaggggaggtaaaaaccgttcgtcatgtatcttgcctcgggggcagtaccaactttaccatggaaggacttttgcattatttgcctactattagaggcgaatagaagatttctggaaataaagtcgaaaggggttctcaatggcccgacttttcgatcctagaacatttttatcgagtttttagttgggtcctaggcggacctcaacttttcatccttataagcgttttttgtgtaggaattatcgggttgtacgtttgtttgaaatgtaacccactttttcatgcctaactatcgccgattggttcgagtagtcattctgatcaccattttgctgatcactgcatcattggctacatgtgatgaagacatcaaagatgaagagaagatcatcgaccggtcatggtcacaactcaaatttgtgcttttcaaattcgaggcagaattagtacgattttaattgttaaattgataaagagattgatcagtaccaaaatttgaagtggcaagtaagcatttcaccatt

SEQ ID NO: 18616 - DNA, 824 bp, Heterodera glycines
aaatatttagaaattaaaaaaccgtttttaatattaagtaaattaaagggtattattgttttagttttggtcgcatttcttttcaataattctattggatttacttaataagaatgcattagaacttttttaaatagctccgcaaaacatttgttgtttggcatttaaagagaggttttttaaataagcgttaattttattggttcctttataagttttcgacaattttaattaattcaaattatttactttagaactggaaaggataaaaagtagattggaaattttttgtattgcaattgcatataaatgatcattgttattaaataaaattcaataatatgattgtgcagtttattccactagagttcttttgagcgcgtagcagactcattaatgttatatttcagaagaaagagtcagtctttgtaatataagttagtgtatcgaataaaatcaagttcttataaatgtgtctaataagttctgagtaccacatatgtctagagatttgaaattacaatgaaaatttactgatcataaatccgggtccgggttcgaaattggtcgaaatgaatgtcatattcgtgatcagcggccccgaaaacccccggaaatgtattttcatgacttttttaaaaaattttcaaaaaggccaacttttacactagcgccgaaaaaaccatacaaaggcacaaaatattaaaaaattattcaattgattggctttttctctcttaatgcgctcccttctattcctcgctttcgtggcacttctcttcgtcaaatgttcggccgacgaatcaatgcaaaatgatgataat

SEQ ID NO: 18617 - DNA, 2167 bp, Heterodera glycines
attcaaattactaatatgtattttttgaattactttggatttgatttagagactcattggctatcgacccactgaacttccaatgttggcacgacttgggaaaactaatggccgagttcgaccgcaacagtgacgcattggaagcgtttcaaaccgccgcatctctcgtcgtgaacacgccgttaattccattccaaagcattccccgggttttcggtccttagtctttcgatttgtttacccattccattcccttattcattcattcattgttgagaaaagggtatcaagcagatgaagctagtaactttcaactacaggttttaggtatacagaaaaacaatagtgcatttttttatttgtttaatttaatttagaataaatgtaacacaaattgtgagacttggcaaataataatagtgagaaaacacagaaacatgggtacttaaaggttcggatatgagcatcttacattaatgtacatacaaagctgaaatttgggagaatatatcacattgaataattcacttcgcgattgtttgtccggtacatcgccctcattcggtccgcctgtgtctttgccctcaattcctttgtcccccctccccgcggtgtttccgccgttgctgacatggccactttgcttctgctgttccccctttccagtgtctgtgatttctttgtttttaattggttcttatcatttgcaattccctcacttctttctctccgccgtttctccgcgtttcgtccagcaaaggccgagcatccgccggttggacttcgcaacggaaccgattgaactgcttgaacttcgcgctcaaccgttccatctgttcttcgtatttactttctcccttcgcttaatttgtacattctgtttccaatcattccctctttttccattacttccgctccccgtgtcggatgaattgcgctctttgatttgcgggtggtgtaaaaagtgtctgctcgcatcaacgcctttcgttctgctgattggcgccgacaccgtggcacggaagccgcgctcgccccggtggaagtgttggtggtcgcgagaaggcgcaaaaatgggcaccattttgctaaaatgaatagtggttgaaaaggcagcatcaaaaggggattttgaacattcattcaaggcgctaaacatttgtaatttacaacgaattcaatgcaagaaagtcccattaattttctcaaacccaaaatcgttgggacagtcactgatcagattcaattcaatgaatgatcgcacgtaaactattcaaaataagtaaattagtgaaaaatgatcggaaaaaggaccaatattttgccctttgccgaatgattgactatttcgtattgttcgggacagaccgttcaaaaacggcggtccagtcaatgcgcgacatgtacggatgggcacggaaagcggcgaaggaggcgatcctccgggccgggtccggattgatcattgaacggagaaaagagatcaaatcggagggccaacgggcgggcatcaccacgggacgagtgaagacgatgtccaagacctggaaaaagcataaaaatacatttaaacaatggaattaagtgcctgaagcgatgaaaaagccgacggatattcgtgaggaattcgaccgcgcaacatttcgtagaaacaagtgcctaaaaaggaccaaaatgtgccgaaagtgttgggaaaatggcaaaggaaacagacggacccaatgcccaccagtcgacttcaaacgaatagccgtcctttctgccaagtgcggtgagcagaatttcgggtgccatgtaaggacgagtgcctacagggcaaaaaaggaaagaataaagtggcaaaatgcgacagagcaccggagaaagagtgcacaagttgcccttggggcagtcgtttggacagaccgaagtcactcaaatgggcatgcccttcgtcgtctaaagcgaaggaaaactgtgcaaaatcagccgatacagtactcagccgtaaccgagtactgtactgtcgcaaaaagatccgagaattatgttggccgctttcacatagaaacgcccaattataaagaagcagagacaattcgagagaaatattgcggagaacacaaatgacctaaataaaccctagaagacagcacccttgcctgagacaggtactccaaacccaagg

SEQ ID NO: 18618 - DNA, 2862 bp, Heterodera glycines
aaaaatggcaacaaaaaaaaattcggttttatcctttttggcataaactctgcaatattatacaaaatgtatttattgggacggctcaactgttcatagaccaatgttagattatatgtagaggccatttcaaacttcagtcatagagtaaacggcaaatttaaattttttttttaaattttgtctcctgcttaattttgagtttttcatgaaaaatttcacataaattagaagttagctttaaataaattgtcagattccggtttcagcgaaaaaaaataataataaaaaatatttttttaggggggcacaaaaaggataagaaccaaaaaatcgtgaaaaattttttttgtcgaatcaaagtcacagaacaaaaacatactttttttatctaaacaattgttcgagaaattaattattttataaagaaaaaaaaattttttttcctattttttaaaaatttaaaagttaaaattcaaaaaattagcttccaaataaaattataataatcattgcccggatttttaggtgctaaaattcccgaaaaaggtacctaacctaaaaatccgggccctggtaattaaatatatatttgatttctcatagaactgatgcatttttacaataatttaattaatgaggttaggaatttcattaaaaaatagaattaatctgtaatatgaaatttgagaacatgtttttatgaatgtttaaagtgtatatttttaatttaaatttattttatttaatattaaaaaaacagaataattttcttcataaagaatttttgtcgacattagggctccaatttttaggctctaaataccgccaaaataattaggctttaggctcttaaaaaccccaaaaataggctctaaaaagtctcaaatttaggggtgtaaaatgacaaaatttattcaaaaaagtaaaaaaaaaattaggccaagtcagtattgagctaaatattttttaacaaaaaatcttgtctagaaaaaaaaataaataaatttcggagatgaatttatgaaaagtttttcatttcttaggggtatattttttgaaaaagttttcagtctattcaaagggatgtatttttcgtttttattgagttattacttaaaattttggtcaaaacgccaaaataggttttttcaaaatctttttggttttttaggctctaaaaaagaaaaacctcaaaataggccctaataactcgaaaatgtagcttaacaaccacctaaaaaaacttgtttttcgtgggtttcaggccactggagctcaggaaaaaataggaaaaaacctaaaaattggagccctagtcggcaccattgacttaaaaaccgacttgatcatccaattcgagcaacataaatgccggcaccgattggaaaatgtgcagcaatgcaaacaggtccatgtggatgatgttgagcaggatttgctccctttcaccacatggtggggctgtgtatttgtgctgatcactgaaaatggatctgtgccatccgagcaattcccgcggagtgccaaatcgcatcacaatttccactcgagagtcgcgctccccgcgggcgtaaaacgtgtcgtatttcgcttggttcaactccagttccctgactgttgcatgggtctccgccgttttgcagctgctgatcagtgatcgcttctccaatggccaagtgtcgaccccgatcagttcttggctcctaatttggccatcaaattgccaattttctgctgggtgtgagccgatcgcctgctttcgcttcttggcccaaccgccgatcatcttcggcgtcaaatttttccggtttctaaaaaaatgctattttctctcgccataactaagcggcagaaaaaatatgtaaaaacataaaaatcccagccctaattatagacataaaaatttaatgttggatgagaataaattagagaaatacaaaacaggatgaggaaaaaaaaattaaaatgcttcggtaactaaattataatccaatgtttggactattttattaatttcaaataaataaaaatattttattcccaagtccatcccttccaacaaaaaaatcaatttaaaataaaaaaagaatatttttacaaaaagaaatttgagcttgcccctttttaagagcatgtgagcaaacaatttgttttgccacaaagatagattcttcaataatgcccaactactaaaaaaaagaatgaaaaagccacgaaaatgatgaagaaaatcggcaaattgggtccggtctcaaaagatggcactgacaaagatggcacagagtctgcccaaaattgtaggacaaacaaacagaggccccataaagtgctcacacattggttttaaatctataagatgaggttggacaaattaacaatgaaacgcccggaggggttgttatggaaactgaaaaagacaaaaaaaaatagaaattttattttgtaaattgaaaacaaaaaatggctaaaacattgccttcaataatttctttggtactgaaatatctatcttcacttggactcatttgtcgtagttcttagatggcgcctttttttactttattctttgatttttgaacggaaaattcgttaagagctttcgaatgaaaccaaatttgtccgggtttgaccattttaaaggcgagtttttgtggctggtagactatagtacagccatataggtatctgcgactctcgggtctccaagtttcggtatctccaactgtatggtccccgaaggccggaatcgcaagcgtagggtctacaaatgtcggtaatccgcgactgtcggctcccaaaatgtgcgaccccaactgtcaaaagccccgaatgtcggaatctccaagtgtcggatccaca

SEQ ID NO: 18619 - DNA, 1448 bp, Heterodera glycines
ttttatttattttttgcaaattaattcttaaatattttttcagaaagggttctgaaacgcaccaaattttatttacatgttagtttaggcactctgatgctttttctatcaaaaagggagatgaataaaatttttaaaaatttttaattcctttttaaacaggccaaaaagtttaggcttaacttttttttcagaaactgatcagaagcgcaccaaactttgcagggatactgaaaggaagagaaataacctattttaaatattatctagtcagttcatttaaataatttttatccaaaaaatttttttttgggttttcggggcagtccccctgaaccgatgcgcccagatttatggggagaccgaatccttcgggaatagcttccctatagcctgtactttaattctgcgttggatttttgctccccataattgtttgagtaccccaaacggacacttgaaaaaatcgattttttttgttttcggggcagtccccccgaaccgatgcgcccagatttatggggagaccgaatccttcgggaatagcttccctatagcctgtactttaattctgcgttggatttttgctccccataattgtttgagtaccccaaacggacacttgaaaaaatcgatttttttgttttcggggcagtccccccgaaccgatgcgcccagatttatggggagaccgaatccttcgggaatagcttccctatagcctgtactttaattctgcgttggatttttgctccccataattgtttgagtaccccaaacggacacttgaaaaaatcgatttttttgttttcggggcagtccccccgaaccgatgcgcccagatttatggggagaccgaatccttcgggaatagcttccctatagcctgtactttaattctgcgttggatttttgctccccataattgtttgagtaccccaaacggacacttgaaaaaatcgatttttttgttttcggggcagtccccccgaaccgatgcgcccagatttatggggagaccgaatccttccggaatagcttccctatagcctgtactttaattctgcgttggatttttgctccccataattgtttgagtaccccaaacggacacttgaaaaaatcgatttttttgttttcggggcagtccccccgaaccgatgcgcccagatttatggggagaccgaatccttcgggaatagcttccctatagcctgtactttaattctgcgttggatttttgctccccataattgtttgagtaccccaaacggacacttgaaaaaatcgatttttttgttttcggggcagtccccccgaaccgatgcgcccagatttatggggagaccgaatccttcgggaatagcttccctatagcctgtactttaattctgcgttggatttttgctgccccataaatgtttgagtaccccaaacggacacttgaa

SEQ ID NO: 18620 - DNA, 2391 bp, Heterodera glycines
atgcacgaggggcgcgaaaaagtcaaaagtgagattgaacaaacagcggaactatgagggaaaattgtgccgaccgatcagcaacagattgtcatgtcagtgcccgagcgaagccaagtctccatacagctccaacagctcggactggaagacgcagatgtgccaatcattcttgaacaacttcaaaaagcttcgccgacgcctgaggcaacactaaaagctttgcagacggtgcaagagcatttggcgaccaaacattttgcggaaaaggaagccaaaatgtggacagaactgggcattgaccagcaacaacagcagtcacaggcaatgctcacgttgagttcggcattggaggaagtggccaaacttgaagcgaaagcagcacgagaagagataatggagctaattgcttcattggaggggccggaaaagcgggcggagatcagagagatgaagccgactcaggaggaagtgcagagggaggaaagactgctccgaattgagcgacaggagcacgttcttgcgttggtaaagcacgtgcttagcgaatctgcacaacgacgcgccgttacgctgagcgactcgcagttggcccaagtctcggagcagttcagacagttcggcatgacggagatgggcacgaatgttgcactggaccgtctccaacagacaagcgacattacgggcattgcgcaaacaattttggctgattggaatcggctggaagagcggttgttgaccaaaagtgccatcgaagatgaagccatggtacaagcaacaatgtaccggattgatttggttaagccggaagcgaaaataaagctgaaaagtgaactgaacgaagcggcgaaaagggatttaaaagaggccaaagaggagttgaagacgttcatcagctcactgatgggcaccgaacaatgggagacagtgctaacccttcagagggctcagcgaattggagaagcaactgccatcacggcaagggccccgatcgagctgaacaccgagacagtcgctgaactgcttcaacttgatgaacaagcattggctggcgtcattcgaccaattgaattggcaagaaaggctgaagaaattcggttacaaattgaaaaggaagaatatgcagaagagatgaccagaaaattgatgagagatgaattcagagaggtcaaactgggcgagaaggaattcgaaaaggtggccgagaagttcaagcagttcgggctgaaagagacgaccgcaacagcagtcattgaacaactccaacgaatctccaaaacggaaaaggcattgaaactgaaacaggaggaaagggcggaactgttcatcaaaaagttggagaaggaggtgaaggagttcatcagaattcggaaagggtacggaaatgtgcagaaggaaaaggaacggaagcacgatgaacaacaaaaagtcatggaaattgtggcaaaactgatcaatgaggagttcaaggaggtcaaactggacgagaaggagcttttgcaaatagccgagaagttcaagcagttaggcttcgaggaaatgaccatcaccgccgttcttgaacgtcttcaacaacttgctgcacccgctctgctcaaagttgctaccggagaacaacagaaactggaggttgagctgttcttacaaaaactgatggaagagatccgagagtttgcacgcctgcgtataagctacgctaatgcacagcgcgctaaataccaagcacagcggttgagaggtgcagtcgtgcaagtgactgtgccgttgagagaacgtactatgccaatggtggacacggcacgtccggcagctgcagaagcggaggaactgtttattgaagagcagaaatgggaacgcctcgtctattggttcgtcaatgtcacgcgtcgctatgcggaagagcggttgcgcagagacttgcatgatgcgcgtcagcgagcggaggttgcgcaatacatcgcatttgaagggcctgtgagtgcggtgcagcgcgcacttttcactcccaccaccactgcaccgatattgcacacagaaatgacgatggacaaagttgcaggcactgaggaaatagttgcggaagttccatcgctgcatgtgccacaacaaatcgttataaaacacgctgaacccgttggaatggctgaacagcaaatttcgagtccaacaacatggcatgaagagctgaagatcaaagaaagcaccgcagcggaatggcacacaaagaccgagctgtacaagcacgaaattccaagacaagacgaggagacgacgcgtgttttgacggcaccgcatgagcagaaagcggaaatgcgagtacccgaagttggcaccgaaagcgcacaagccagtgacccaagtgagcaatgtggcgcgtgtcgctgatgcaaa

SEQ ID NO: 18621 - DNA, 3074 bp, Heterodera glycines
aagagaagaaaatggattttgatgaaataaattctttgaaatttagtcaaagcgcattaatttgtgaccaatcagcagaatttgtcaattgttttctcttcccctcgtcagcagtgatttttctgtctgtctgttcgtctgccgttctctcccttttcacagtgtctcgtcccctccactctctcatctcttcctttttcctcttacattttgtccgttcactcctctccctgcatctcttccgctctcttcccaaaccgtacccacttgcccccttcgattgccattttccgctgttaattatcttgcaaattatttgcttttccccgatgcttttcctcacctttccgaatcgcatccatttgccctggggcgtccttttcccaaagcgcatccatttgacgccgcccgcgggttgccgaattgcgcgttcgaatgccaattgatcgtcgctcaaaaattcctaaagggccaatttatcgcactttttttcttttgctttttgccgccttttcgcccttttgccattttctgttttccctataaaatttcttttcggtattttccgttttttttgtcatttgttcggattaattaataattttttggtcgctcatattccaaaatgaccaaaaaagcccatgggaattaaacggtggcatgtccaccgaaaggaaatgaaatgataaattagtggcggtgtttattaaattaattataagcaagtagcgttcgttggctgtggacatttgtcattgtcaccaatgccaattcgaatgaatgaaaacgaatttactaaatgacagaaagtggcgacaaaaacattcctatcacagaacgatgataaaatattcaaatttataaattttgaactgaattatccaattaaaataatgcgagaaaaacaaatgattgccctttttacccgaattggcagaagtcgtcgcaattttgtggggtcaaatgccattaaagacggcacggaatgacaattggtgaagtcggcggagaagcaaactgtaagcagaatgaacaccagcaaaaatgagagggaatgccaacgcagtgaaaaatgagggggaaaagtgccggaggaaagtgccgacagaacgacgaccattttatgggggaagcgatggatggaaaaagggacgaataacggacaatctgagagggattagggaaacattacgaatatgagctaatgtttgtttaaaatagggtcaagaaagaatcggtagaacaaatttggactggggggggggggcggcaatgaatggcaacggcgaatgttcaacttggaagttatgaagttacattgagcatcaaatttgtgttttgatccattgcaaaattgggtcttaccctccccgaccccttttttaatgtgtgaaagaaattaagacaaaggggcaaattgcgatgggttggccgagaggaggaggaggaagagggagtgacggcgatggcggaaggaatgggcggacggagggaaggcaaagcacagagaataagccaatttgaggaggcattcattagcggagcttatcgaccaaaatatttattcatttttctgcttggacatgacctcagaacactttcaatgagccaacggacaaattaatgcgtttttgaagtccgacaattgtccaagtgcaactacagtagtcccgccccccccccctcccattacgattgtccccccattagcactcatgggaacattgacagccctttgccaattgtgctccaatttctccgccaaataggtacgtaatttgatgggtttttgtgataaatggagtcgatgcctttgggtatgtccccgcgccgttttgtccatcaaaatgcgggacaacacgcaattcttggcaatgaatgaatgcccgcgaggattgtcgttgaaatttgggaattttagcgacaaaaacaaaggaataaaaatggagggaaagcaaagacagaaacaatccacggaaattgaacatttggtaaatttgagggtgacggcgggctttgtctgccgacggacttctcacaatcagtgaaaggagcagaggtggaagcggaaaggaaattggaagggacgacgaatggaaggaattggggggaaaggggaaggcaatgggaagagcagtaggaaagggaggggagggcaatgggacggaaaatgccatttttgcttccgctaaaaaatgctaaatgatcaaaactcaaatttaattcgcgaaatacaaaactcattaatatgagtaattttgctgctgcataattaggaaaattaatgggaattgcgattgaaatcttttttttgtctgtgaaaaatacgaaaaaaaaggaaaaacgatggactaaaattggcatttcgcaagaattgcgtggaaaatattaatctgcaaaacctagcagaagccatcagaaagggacgcaaatgcattaattttatttaccgaccgaattccttctcaattggacaaagtccgtccaattctgaggatattcgggcagattaataacaaacgacaaattgcttttggaagggtacgcagtcgcaaatctaccggcataatgagtccgaaaggcaaaaaaaaaattagtggatttaatcaaattttatgctcctcgatagcagcaccatttgtggcatgcagttcattagagaataactccagcgggcctttgttcttcagccactggccaaaagacgaatccaaaaaagcgtaaaataggggggggggaggagagaaaaaagaaaaaaaggacgacttaaaacggacgattggacacacgaacaataaaacctaatcaaattggaagaagcaaatccttttttggacccaagaaaagtccctaattagttaaatgcaccaaaagtttattcaattatttattggaattttatgggaggcatttccatcgataaaatttgtttggccatacaaaaaaggaaaaatcagtgaatttgtgtgagcatttcaaattgtgtgtatgcgtaaggaaactgagagccgaaaagggaaattcagcagcaaaaaatgcaattcccatgccaaattgaattttcaattgtaaaa

SEQ ID NO: 18622 - DNA, 2286 bp, Heterodera glycines
  unsure (1)..(2286): unsure at all n locations
ttttccaactgtaccgaaaacatgaacaatgggtgtgtcctttatgccaacctaattaagggcaattaagaaattaaattttcaaacggatacattttagtaattatgtttttcaactttttttactaagaattttaattgaaaagatttgattagttcaaattttatataaatcaaaatgtttttatattttttattccttaatattttgtaatgcaagaaatttattggaatttagtttttttttattatagaactcttattagtagtgcttatatttttagggttttaccttttttcctgagcttccaatgacctgaaaagcatgaaaaacatgattattttggttgttgttaattgtaagctactttcgagttattagcacctattttttaggctttaatttttagaacctaaaaaacctaaaaaatttgaaaaactaattttaacctattttggcgttttgcccaaatgtattaacaaaaatgcaataaaaatgtcccaaaaatttcagaaaaattcacccctaagaattgaccataaaattttatcaaaaattcctcttcaaatattctttatttttttgacaagaatttttaatatttatctcaatactgatttggctaaattttattgcttttttgggtaaaataataaatattaaaattattttttagtgaccaacaatgttccttcaactgttcaccatgtcattcgatgagaaaagtgattaaatactcaaatgtgaatacaacatagtcttgctttttcgcgcaaatattccattttaattgctttcgctaaatgtcatcattataaatgatttatttttaataaattttttttttctagagattgactaaaaacataaaaaaattttaaaatatggcattcaaaacaggcatagataagcctgttttttgttacacctattttggcatttttagttaatattgaacgcacattgttggagtttttagccccataaatccggacataatttttatttatttaattatatttaaatatttcaataaatattattagtaatgcaagtggtttattttattagacgccatgtttttggtgtgtgacgttttttatcacatgattttggtgggcgtaatgggtgctagcgcgtttgttaaaaactgccagcgcgtttgttaaaactgccaatgggtttgaaaacaaaaaatgggtaaaataattaaattaatagcttggctcaaattcaaccaaattaatatttcgtggtatcattcaatagctttaattgttctctttcagaatataattttcctaaatttttaacttaagtataaaagaagttataaagcattgaacaggctatgttttttgcaatggtaatgcatatataataataaacatttaaaattttaaagtctttaaaatgaaatttaaccaaaattaatttatatttcgatagccctaagaattctctatttatatttaaaattttagaaaatttcattgagtttcaaaaaagttctgaacaaaaaatgctgacttaagattttttgcaattttgtgacaataactttttttatacttaagttaaaaatttaggaaaattatattctgaaagagaacaattaaagctattgaatgataccacgaaatattaatttggttgaatttgagccaagctattaatttaattattttacccattttttgttttcaaacccattggcagttttaacaaacgcgccacacgccncgaagaattctttgtgatgtttactcaattgtcaatgccaatatgtttatataacatttgcaaaaaatggaaaattttaaatttttcttaaattcaactcagggtcggagttcgaattgagctgaaagaaggcaagacccgtccgtgctcacaaatcagcacctcaaattacccttagaaataattttgaaaatttcgaggctggatttatgaaaagacgattcagtcacttgaaagaagaaggtggttgcctggcgtcaattggataatgtcgccttgggacgataaatggaaattcatttgtcagggaatggcattccgcagaatttgaatcaattaattaaccgaaaagaacggatacaattacaaatggtttcaatttcttttgcgcctttccggttttgaccttttcaatgagtgcttctttattaaatttttgaatattttcttttttacttcgttacatttaattttttttttcgattttaattaatttttatatctttcgaatttatttgtaattattttcatctatcgtttaa

SEQ ID NO: 18623 - DNA, 1239 bp, Heterodera glycines
cggctcccggacttttcgacagcaaagggcatttcgacagtaaaacaaaaaataatggacttttcgacagtaaacataaaaacaaataatttttattaaaataaattatattgcttgtcaattttattgaatttcttttaaattaacatactataatatgtattgctaaatcagaattacaatactagagatacgttttttacctaggaaaatttttagaaaaatacacccttaagcaccggtccttaaaattttcaaaaatacactcctaagaagaatgcaaaaattttctcaaaaattcatctccaaattttttatttattttcttggtaaaggaatttagattttaaaaattatttattcccatactggtttggcttcgttttgttattttggagaaaattttacgcttttacaccattatatttgaaatttaattaccttttctgtcgaaaagtcccctcctcaaatttataatatttctgtcgaaatgtcctttgctgtcgaaaagtccttctgtcgaaaagtcctctgtcgaaaagtccgtcgcccctttaaattaccaaaatttaattaaaattcaaaaacgaatgattttcttgatatatagatagatagtatatgggagacggaatatttttgaatttataagagtcagttttctagggcaactaatttttgcatcaaaaacctgggttacatatataccctttttctgattcttaactagacgaagactataatcacaatgaaatataaattttcagggcttccataagggattaagatttgattttgatcctcacttcgtttccgaattcaccgaagaaaatgattggccaaagttggacgtaaaagccagtggaaaatttggcaaagattttctgcgtgacattgtcacctctttaaatccatattcggcacggtaagttgacattattatatatgtatgcaaatataaacctataattaaatataatatgatacgattatatatgtacgaatgaatggatggaatttaaacctttaaccgtttttgaaataatggtcatatctttctttataacttaaatcgcttctcactcataaattccttcaaaattttattaccattaatattataaagccaagggtagatccaagttagatggagtaagagtgggtgagtcacaccccatcaccattatatgtggtccgaatgacggtaaagcaattgcatattttagtctacagcaaaac

SEQ ID NO: 18624 - DNA, 953 bp, Heterodera glycines
aaaatgacgaatccaacgattataaggattcaagaccaaagttcaaaaagagaaagagcagatacgggagaaagtgctgggtacgagcgaacgcagtgggaaccgcagtagcaagctgtcacgcagcagttcagagacacgacagcgtagcagaggcccaacggtgggcgctataaatttgtgctagccaattctgtaaaaaccaacacatgtgcaattatgtcgaaaaattttgtcagaagaaatgcttattattgtttgtgctaggtcatttcgtaaaagtgccaattttacattgtctatataaaaactcgtcaaaacttttcttaaaaacaaccgaatcaaatattcttggtaataaatgatgattcataattttgttctataagcatgaaaaatttcagaaaacttcattcagtttaaagaaagttatggaaattttttgaacatttttggtcacagcttcttgaaaactgaataacattttttgaatttttcatgctaatagaacaatcaaatagtagtatgatgccaagattattaagttgggttttgaaaagttaatgcgagtttctctcgaaatctgtaaaattggcacttttaagaaacgacctaacaaaattattgtgtacattatctttttggtggaattgaataaatttcagttgtcgaggaacgtgtccatttcatcaacaacatcgtcagcaagtggggtatgtaaattttttagcttacttttttatttaaatgtagagtgcgccgggaccgggacttgccgggacctgagaagccgggaccgggacctcgatttttttcgggaccgggaaccgggaccaaccgggaatttttaaaaattcaaaaatttttttaaaattcaaattttaattttttttcaactgaaaataatacaaaatataaatttttattttgttttttatttaataaaatccaaa

SEQ ID NO: 18625 - DNA, 1050 bp, Heterodera glycines
tctcaaacattatggggagcaaaatcccacgcagaataagtacagctatagggagctatccggaaggatcggtctccccataaatctggcgcatcggtcggggggactgccccgaaaacaaaaaaatcgattttttcaagtgtccgtttggggtactcaaacaattatggggagcaaaaatccaacgcagaattaaagtacaggctatagggaagctattccggaaggattcggtctccccataaatctgggcgcatcggtcggggggactgccccgaaaacaaaaaaatcgattttttcaagtgtccgtttggggtactcaaacaattatggggagcaaaaatccaacgcagaattaaagtacaggctatagggaagctattccggaaggattcggtctccccataaatctgggcgcatcggttcggggggactgccccgaaaacaaaaaaatcgattttttcaagtgtccgtttggggtactcaaacaattatggggagcaaaaatccaacgcagaattaaagtacaggctatagggaagctattccggaaggattcggtctccccataaatctgggcgcatcggctcggggggactgccccgaaaacaaaaaaatcgattttttcaagtgtccgtttggggtactcaaacaattatggggagcaaaaatccaacgcagaattaaagtacaggctatagggaagctattcccgaaggattcggtctccccataaatctgggcgcatcggttcggggggactgccccgaaaacaaaaaaatcgattttttcaagtgtccgtttggggtactcaaacaattatggggagcaaaaatccaacgcagaattaaagtacaggctatagggaagctattcccgaaggattcggtctccccataaatctgggcgcatcggttcggggggactgccccgaaaacccaaaaaaaaatttattttataaaaattatttaaatgaactgactagataatattttttcaagtgtccgtttggggtactcaaacaattatggggagcaaaaatccaacgca

SEQ ID NO: 18626 - DNA, 2586 bp, Heterodera glycines
  unsure (1)..(2586): unsure at all n locations
ttgtcgaggtcattctcgttctgtttttgcccgccattggcattccattgtgatcaccttacacttaattgatattttgatttgaaatttaatttaaaaaacctgcgttttcaatgtcccaaaccttcatgcatcttgtcgaatgaaccggaaatgacacgatttcctaaaaaagataagaaagaaaattgatggccgagcaaatcaagaggattcaattgctaattccatcaattctatgtaaattgcttggcagtgccaatccaaagcgaaggattgtttttcctacaaggtccaaattttacctcgagcatttatcgcaacacattcgacagaacctaaatgaacagaaaataaataattatagcggaatgaggaagcaagaaaaaaataattttaatcaaaaagtcaattttagtgttgtttaaaaaaattacgctggtggcccctgaaaattgccgtcggctccgcgcgccatttccctttgcctcggctgctttgggcctcattttcgtcttcgtcgtccgccctattctgcgcccgcagtcgcaccaaaatcaaagtttggttttggcctccactcaaagcgaaagttgctaaaattttgatttttttacagctacaaaacattaaaaatgagagaaacaaagggcgcggaatgtaagaaaacgcgatgacaaaataatatactttgatggcataaatgcaaatgccattaattttcccaccgtccattcaaaatgccaataaaagtggttttatgaattattcgagaaagattaggggattaattttgaaccccgcaaaaaatgtttacttccgtcgtcccgagtgaatgtgtccacgcatttcaacggttcgtcgtccaattgtttgacgacggctctggtccattcaccggccaattcccacacattcagcagaccggcaaaattcacggacaaaacactaaaataatgttttatacaatgtccaaaacacttggaaagcaattaaaaagttccattcattcgttttagtaatttgctcaccaattgtggctcaatgttctaagatcggccacccattgcgcttcgttcagttcggcggtcggccgcggggcgggtgactggcgaatgcattcgatgcgcagcacattctccagggacaactgttgctgctcgaccaactcgagcagagagcagcgcaacagcacggaatggagcagaaagtcgaattggacgggcttccaactgtctgaaagaggaggaagagaatcaaagctcacaattgaaaagtcggcgctagttacaaagcgtagtattttgaaaatgttttcactttttttttacataatttgtttttaatttaaaaagtcctgaaaccaagtacccgggggttttagaggtcgctgatcatggatatgacaattatttgggcctattaagcaaatttggcgctagttataaagtgacagatttttaattttatcaaaaacaataggggggacccttttgttttgcaaaatttttttgagataaaaaatcgtgaatatactttttagtcgccataattgtcttgttaatgcttaatattcatcataatgtgtaaataaatttaaaaaaaaattatgtcaaaaaaaagtgaaaaaattttcaaaatactacgctttgtaactaggggtccctgtgccgtttcggcgctcccgtttcggcgccagcatgtttttggctataacttttttctttgtaaaccaaatccgacattggtggagtcgttcgaaagcttaatctatttaaaagctttttctaagctattgctttgcgatgaaagctgtatcaaaactgttatgcgtggaagttgggtaaagtcgaagtgtgttaacgatgttctttgttgaatatttactgggttaacgatgattactgctgagcaaaaagtgggatagcgatgatgaatgctgagcaaaacgtgggatagcgatgatgaatgctgagcaaaacgtgggatagcgatgatgaatgctgagcaaaaagtgggatagcgatgatgggtgctgagcaaaaagtgggatagcgatgatgggtgctgagcaaaaagtgggatagcgatgatgggtgctgagcaaaaagtgggatagcgatgatgggtgctgagcaaaaagtgggatagcgatgatgggtgctgagcaaaaagtgggatagcgatgatgggtgctgagcaaaaagtgggatagcgatgatgggtgctgagcaaaaagtgggatagcgacgatgaatgcttagcaaaaagtgggatagcgacgatgaatgctgagcaaaaagtgggatagcgacgatgaatgctgagcaaaaagtgggatagcgacgatgaatgcttagcaaaaagtgggatagcgatgatgaatgctgagcaaaaagtgggatagcgatgatgggtgctgagcaaaaagtgggatagcgatgatgggtgctgagcaaaaagtgggatagcgatgatgggtgctgagcaaaaagtgggatagcgatgatgagggcttncccccccctcnnntnccgatcatgaatccctttatggaagtgggatagcgacgatgaatgctgagca

SEQ ID NO: 18627 - DNA, 2074 bp, Heterodera glycines
ttctgtaagcaatagcgcgaagatatcccaatggctgtcgctgtgcacggctattaaaaatcgcaagtaatgccgcatcctgttcaacataaacactttttcgacccattcctttgcccctaattccattgtttggggcattgttaaaatcctccacaacatgttgccagtgcaggtcttcttgagacatcactttgacgaatgtactaagaggagggtgtggcgctcgaaacaaagcattgaaagagcgatgccacccctcagttgaattattagtcctgcagctttggttctcaactcttggatgaaataaaatatatattaattattttcaagtaattaccgatcacacatgttccacatttcttgtggaaaaattgcatcagtattttgcaatccagcattttcaatccaatgcctgatccatgcatcggctccaccgtaatcttcctcttcaataggtacagcagcaatttgcataacacgcgaacaaccaacccaacttctcacaaaatatttgacgatttctttattaattatttttttaaatattaatcttaggaaactttttttaccgtaccttcgacttcctcttcttgagggaactgtctaataagaacacacagataattatatagtggttcgcctgggggagtgaaagcgagactgatcagtgatttaatcagggtttttgtatcatccggatcatgcgggtttaaaaaccgctcgttgagtcccggcaaattttgaacctatatttttatgaaatttagcaaaaaaaaaactctgataacccttcggtagattgattgcgcataatggaaaagacagccactatgcacggcaagagggaaaatttgattgaccgcattaattgctgatctttcaaaatccgtcatcactgtttcaggatgccaattttgtaaaagctggcgaactgatgttaaaaccttaaaaaataaaaattttttattaatatttgagtgtaaattattttttaaatttatatttatgtactcgtgcgtattgcgcagtgctctttgactgtagtaaagcataaacggcaggaaccgcaacgaaatcgataaggacactaatattatatagctgagtgaatgggctcggcgcaaccttttaattacttttaaatattatgataattaatttttttattactttaaaagtgccatccattgctatatgagatccgtagtttgcgatcaaatttcggccaaactcagacataaaaacaattagtcgtcggccttcctcatgaccgtcaaaaattgttatttgacgaagccgatcaggaataatcactccaggagaatcaagcaaatcatctcccacttcagcccgtgcctgtgctacgtaattccgaaatgatcttcccattgctgaggaagattgagcttgcgttgcccgaatatccggtgggatgttggttcggacatcgtcaatggcttgtctggtcggaggaggattttgcgcttctgcaaatcggcgcaactccatttgtccccttcgtacagacacatgtacaggagggtgattatcccgggaattgcatataaccccgactttgtattgcccgccatcatcatccctattaattgctccagcgacatgaactcttccaggacaatagggacggcgtttaacacatttccaatactcaattcctaggcaaaatttaaatcaattaggcaaaaattttgggcttttaccctgttcagttctactgtaagcttcaaaatggtactcatatccgtttgcacttagaatatccctttggctactcgatttaagcaggtcaaatcgctgttgctgaataattggctgattttcttcggcaacatcttcgtccaattccccttcctcaggcgctgacgatgatgatgaggacaacattttatttctcaaaaaggcaaacattacatagaaacaaacaataaaatttaaaaacactatgtactttaaatggttaattctaggacgaaattaaatgaataaatgaaaaaaagcaatccgtttaatattcataaacaataacaatgatttgcttgaataaatc

SEQ ID NO: 18628 - DNA, 3193 bp, Heterodera glycines
  unsure (1)..(3193): unsure at all n locations
ctctagcattaagtaagtatgcttacatgaatttttcacatttaaatttggcattttgaattgagtttttgaaaagttcaataaaatacttattttgcaaggctccactaaaacactatttgttaaatatatagactattattattcactatataaaaaaacaacaataaataacaaatatgagaacaaacaatacaatttgcatttctactgtaatatattgtaataattgaataatgatgagatcacaattccctcgggtcgttttgactccgtttgcccaaggcatgccaaaagcagcttttactcgacgcatttacaccttcgaaatgagcgccgtgtgcaattcgcgcgcctttcgctcaatttcatcggaggagggattctgtgagaaaggagaaacaattgcaaagaggtcatgggacagaaaattgtcagaatattggataaactctcgggcagggatttattccacggggagaggaggggatgggtacacggcaagggcgtacaaaaggagggcctgacaatgaggggataacccacccccgcccctaaatccaaaaaaataaaattttaacaaattttttgaaattttagtcaattttctaacaaattgcattaaaattttcaaaataattttccggcggcgcccaacagtacacgggagaatttccgggtaaacttttctccaacggagtccccgagtccccagccaacgactcggaagcctagcagacttttgccgaactgtgcggtaaaatttttgatatatttaaaagtaaaattttgtgaaaattcgcacctcaaaccctccccgcccctttgttccgtttcctcacattcacaccccataatgtaaaatatgcgcaccagtggcagtgcaaacgagctactgtccgtgccggttccgtgggtattgccaaagtccaaaaggaagggaaaacggcactgattaagcggcgactgacactgggcaatggtgagcacgtcgccgcgcgagacgtgcagacgcacgcgctgccactcgcgtgcttcggtctctgtttttgcaagtgccattccatcaacgcgggacggcgcctgctgctcgacaaggctgatgcattggacgcgcgcaattgtcacgcgcggttttggacagtcgaaacgctgaaaagagaacaataataagacaaaaaatataagtaaaaaggaaaagcgacgaagtttcttagattaaaacattatcaaaatggattctgtaacagattttgtccaaaaaaatgacctaattttgcgattttgagccaatttggtcgaccccctctaaaaatgtaagaacaatgcccaaactatacaaaaacggcaacagaaagtgatgggtagaaaaaagaacttgcctcatattgtacgtacagtccggtgaccactcgtgtaaattcgtccacagagtgccgcctgaacagctgcatcaaatagttcggtgacacgagcactcgcgcaagccgccgccgcacggcggacacttccgcgcctggagtgattgtgtcgtcctgagcagtgaaagtacaggtgcggttagaaatcgatgggatgcgtttttgtgtcgacttattgggaaaaaatttcgaagggggaaatccgtttttttatcttctggccaaaaatcccaaaaaattttctccagtgttatttaaaaaaaagttcgcgccggggtgaaaaaaaacaagaatttacagcctttttcaccagattgtgacaatttgttttacaattaaaattcgcaaaaatttgttctttttcttgaaaattttcaattttgggggagggaatccccccgccccgttcctcccctggcttggtctgttgccacactttttgtttctctgccaccgtttggcagtgtgctaccaccgccgttgttgctccgtcgtcgttgctgcttttgtgccgtcgttgatcgccgtttggtgctgaaatggtggcactattcgcattggcatcatcgccggcgacaaaagcattcgcaatttggcgttgcttctccaattgcatcagttgctcacggattttgtatggaagcggcttttctgttaactgaaatggaaagaaaaggatttcacagggttttaatcatcaaatcccttcaagaatttactttaaatattaaaaataatttatttgtaaaaaatggagttttgtacaaaatttcaattccggaaaaaatcgaccgaaagaagcagaaaatgtactttaaatgcactttttttggtaagcgaattaaaaaaatcaaaaaaaaacggactcgttttcgcgtctttctttgggacagtgtgtccaacttcggcaccaatgcgttcatgaccccttgagacagcgccagtgggccccaactgcgcaaaaagcgctctctgcgggacatcgtctgggagtgcaagtcgaccaggcgcatccaataagcaatgtttttggagttgaagtgctacgggaaaagaaactttatttttttggaatgggaaaatttttgtttgagccaacttttgtttttccaaggcgcccttcggcacagccgagaattttatgtgctttcttcaaaatggatacattgtttttatgtaaaaaacccagtttttgattcggtgaagcttaaaattcacattttttgaagctagagcaaaaaaaatcgccggattttttggttaaagcctgtcaaaattaaaacccattccagcaaaagttcaaaacctgaatgacttgtctggaaaacagctggttgatccaactgagcatgttcagctccgcctctttgtacgccaactgtttttcatttgcgcgttgagcagcgatggccaagaaaacattgtcggctaaagcaaattaattttgcaaatgattggctattctgataaagtggaaattctaaacagagtgccgacaataatagaaattacactgaaatttctttgattaaaatatcatttacaccgagccattttcgcacattttgatgacattttggacaaacagagctgttgagtgaaagtacaaagctgaagtagcaaatacaaattaaaatatgttaatgttaattccttanaaaactcaatatttacgtaacatctcataacttatgcttacacgtccagcagaggtacaaacaagaaaaccatggattcattcctggatcattctttctttttatggcagaaat

SEQ ID NO: 18629 - DNA, 776 bp, Heterodera glycines
  unsure (1)..(776): unsure at all n locations
gaaggcaccncnanacgaaaacgccagcacaaacgaanagagcnatgaatatagccctatgatgaatgcacttttgtgaaggcatatttttacgaatatgccatcacaaatgaatatatttatgaatatagccctatgatgaatgcacttttgtgaaggcatatttttacgaatatgccatcacaaatgaatatatttatgaatatagccctatgatgaatgcacttttgtgagggcatctttttacaaatatgccatcacaaatgaatatatttatgaatatagccctatgatgaatgcacttttgtgaaggcatatttttacgaatatgccatcacaaatgaatatatttatgaatatagccatatgatgaatgcacttttgtgaaggcatctttttacgaatatgccatcacaaatgaatatatttatgaatatagccctatgatgaatgcacttttgtgagggcatctttttacaaatatgccatcacaaatgaatatatttatgaatatagccctatgatgaatgcacttttgtgaaggcatatttttacgaatatgccatcacaaatgaatatatttatgaatatagccatatggtgaatgcacttttgtgaaggcatctttttacgaatatgccatcacaaatgaatatatttatgaatatagccctatgatgaatgcacttttgtgaaggcatctttttacgaatatgccatcacaaatgaatatatttatgaatatagccctatgataaatgcactttggtgaaggc

SEQ ID NO: 18630 - DNA, 1385 bp, Heterodera glycines
tcatcttgtttattttttaaaaaacaatctttatcttaacctttagaatgtacttattttaatgccagatcagacttatgaaaattcaatttacctagatattcttaaaatattttttttattgctgctaagccatttttaatagtaaaaaaattcagtctctgtcgtattgtccactgtccaattgtccggttctgtcaaatgacttcactgtccaaatgtccactgtcgaaatgtccactgtccaaatgtccgggagcccccccccccccgctccctgggaccgtacctgcgccggaccccaaaaacctttttttcaaaaaacataaaaatattttttattgtgtgccaattctcacctaaaaagcaaaaaaagtcgtcaaatccaatgttgagacccttggcaatcggcactacccctgccctacccctaccactcgaccccgcagaccctttggtaaaaattttggctgcccccccccttccatgtaacaactttcagtccctacccgatcggggtccgcgacccacgacagtgcccccgatggtcgccggccctcgacttgagaatatgatgaataagaaatacaaggaaaaatcgtttaaattgattttcccctcccaatcaattcattcgctttggtgctaggtcatttcgtaaaaactgccaattttacagaatttttgagaaaattcattcataacttttcttaaatacaacctaaaaaaataaggtatcatacgataaactggctagctctataagcatagaaaatttcagaatatttgattaggttttaagaaacttatgtctatttttaacattgtttgttagaactttatgaaaacttaataaaatattctgaaatttttcatgcttatagagcaagccaagtgctatcgtttaatattttttaggtttatttaagaaaagttatgactaatttttctcaaaaattctgtaaatttcgcagttttacgaagcgcccatgtaaaaaatttaattgtaggctgtgccacctccatccaactcatttgacgccgggcgagcccaattggtggtactgaaagatgaacatgtgtaaagcaaagagaaatattaatgagtgaaaaacggtcattaacaaaaatgatattaattatactaaccgagaacgattaggagaagccagaaattctccgtccgaaaattggccaatttatttttgattgtattgtacatgcttctgcatactgtagtattgtacaacacaaaataaatgctaattgatttttatttgataaattagtaattaaagtttcaagtgagaaaaaatgtttaaataaacatttgagaattgaatttttattaagctcgtatttgcatggactaaaaaaagacaaaa

SEQ ID NO: 18631 - DNA, 2667 bp, Heterodera glycines
tcgcccgcgttgacagagaccaaaaattgcattcttcgacccatcgtccggaacattcgtcgtccttagcccccaatcggcaaataaaagttgggcttgactcggcgagatggaggcgacaattgaccaatttggacccggcttatggcttttccggtatgcaattttactttattttaaacactttcaactgaaatttcaggttattttcaaccggtttcgctgaagatcaatggcaccggtggaatttcacccctcgaaatctttttgatcagctttttcttgttgacctttttggcactcagcacaacgattgtcatttactttatgcacaagtgaattttgtttcaaatttaaattcataatttaattttaggaggggcatcatcaaacagttttgtccttccaagaatggctctcatgatctgttgagaccgggcattcccccggcgcccattcgatcggacgatcttccggccgaatacattctgaagcacagggactcggattatcaatttgcacaggaattcgaggcacttttttggatatttatctgagtgtgcatttctcttttgtcagatgttaccacgtgggaaaaacctcgaccacacaatcagtgaacggaaggaaaacgcgcgcaaaaatcggtacaacgatatcaaggcatgcgatgccacgcgagtgcgacttcgccgtgttcccggcgacccgaactcctccgattatatcaatgcaaattttatcaaggcaattctacattacataacgattctgatcagcatttaacaattttagggatacaaagggaaaaaatgttttattgccacgcagggccctctggtaaatacctttttggcggtatccactttttataatccgtttaaaatctcaaggaatgcaccatcggcgacttttggcgaatgatttgggagcaggggtcaagaatgataatcatggtgaacaggtttattacaatcaatgctaatattaaattttatggcaggtgaccaatttgcgggagcgtggtcgtgaacaatgtgtgaaatattggcctgacgacgacgagccaccgttagtttttcgtactttggaagtggcgtcggttgactcgtcgtatttcgccgattatacggttaatttaattttgcgatattttatgaaaatgctttaaaatccaatgcattgttgttgagtgtaaggcaattcatcccattttttctgatggtccaccaacattggctaattttagctccgcgtcttcgaaatgtccgacactgaacccccgccccaaccggcgagaagcaatggtcgtgtgatttcggcaggggaaaagactttattcaacggcacagctaacactcccttcgacgaaaaagcacggctcgcgagcagcagtccgtcccctcctcccagccttcctctgatccaggccatcaaggccgacccactaaacagctcggcattttcaatccattccaagtcctctcacgagtgagtcgattgtttgaacattgcttaccgcgcccttttagtgttcattcgaccattcaacgacggaggcacgattcggaatatgccaacattgcgagcataattcggccccagtcgaagagcagtggtcgaatgtctgcgatggaaggacgaggtcagaaaattgttttatttattaactataaaaaaaatttaagaaaaacgtcgcgtccttcaattccatttcactagttggaatgattacaaggcgcccgaatgcaccgttgcgttgcttaaagttatgtacaaattgcgcaagatggacgagtacaatcactcgcccgtcgtggtccattgcaggttcgcatttgactatgattctctttgtttgggtgtttcaccgaaaaagaatgtcctctaataatgccccttcgtttagtgcgggtgttggtcgtacgggcactttggtagcgattgactttgtcatggatcaaatgctcgacaccggaattgccgatgtttacaattgcgttgccgacatgcgtcagcagcgcaatttgatggtccaatcggtggttggttcattccacctacatcactttttctctcactcttgttattttctacaggaacagtacgtgttcatctacaaggcccttgccgagttccaattgtttggcgacaccgatttgacaatcgccgccttccgtcgtcatttcggccgactgcgtcagcctttgcaaacccttcgggaacggcatttgtcccttggctgtgtctccagccgttcaagctcggtgcagctgggtgatgagcagcaccctcgccagaggacagtcagtctcgctcaacgagaaagggaaggcattggcggcgcactgaggacacggctgcgactattacgggacggaaatggcatcaatgccatgggcggacaatcggtgccaatgcaaaatggcgtagtgggattatgtacgagggtacaccgaccgaaaaaccaattggaactggaattccaggtaaaaaatagagctttttctgtctcctccctcattgccagccatattttctattgtcaggacctttcgattacactggaaaaaccgaaatcgacagaatgggcgcacaaggaagagaatttggtgctgaaccgcctctttgaagctgttccttacaactttaacagagtggtgctcc

SEQ ID NO: 18632 - DNA, 2710 bp, Heterodera glycines
  unsure (1)..(2710): unsure at all n locations
tataatttgaaagttataattattatttttttgttagaatatcagtgaatgtgaaacggatggtgatgatggtgatcattcatattgtgacacagaattagtgatcagtgctgatcaaattgatcagctccaaaaattgccagacagaaacattcacaaaaacactgttatccaaattaatgaaaccggtcagagttttcatgggcgaaaattgttgcagcaacagccgccaggtaaaaatgtaaaaatttattaaaaaaacggatttattttttatctttgaacataaatctataatatgtatgagattaaataaaattttaattttttttcaatgattttggcaactttagcaggtttaggtgccgaatttttaaaatatagtttctatcaaaagtcttgaaaacatatttccgacagggccaattggacggaaaacttttttgaccatgcatattttttcaaatcaattcaaatttttgataaatatggtcaaaacagatgcgtctaaaactcataaattttcttaaaaaatggcttaaatagcaaaaattggtcattttgggtgaaatatagtacaattcacaacctaattccaaaaaattttctcggcgctttcgccgcagtcataaaattcactttatatgctgaattgactcagataccggaaagcattaaggattgacaaaatttgaattaaaaaaataggtgggaaacgtttttcaaaaatttcggcttcgaaaatttcgtttttttgtgcttcgaacttcaaagttcgaataaaatttgggctttgccctcggctgcggcttcgagagctaagccgagcttcgttcaccctctgctgctcccgattaaatttgattttctcaacaaattttacagtatgtccgtcgggatatgtgctatttaattacatgaacgcatgcaattatccattgtctgtgaccgcagcgagcagagaatatcccccagcaacaacatccgttgctgctaacaaacaagtgtctgtatgtgcacaagctgtgatgtcatcgggacgagtatgggccagcaccgactgtactgtacaggtagaacacatacagtatacggatgcgggaagatggatgccaaacatttgtacattttaaataaatagattaagaagcgttaaattctgtaaacaaaaaaatcggtataaaaaaaattccaaatttccttccggcgacgctgtcggcgttggcatcacacagaacaaacctaaatatttttttagattagggcttcttttggttagaatatcttaaaacctgacgatgttttttttgaaattttgcagaatactactcatagagaacattaggactattaaatgattcgtaagcaattttttaaaattttggcaaaaataaaattaagacattcatttttgtactgtatttaaggattcatgtgtagcggcacagccacctgtgtcgctgtttgagatgacttttaacgccgatggcagtcagtttatggatgttagctatgtggacggaattagtgatccgatcggtgtccgtgttaaaaactgtcagcagggacaggatcagacggtcacatttgacccacaggcggtggccaatttgcgggcaatgtttccacaaatggctgaaacggacaccgaaactggcgtatgtctcaaaaaatatatataataatggccagaaatggcacagataatagtggaaacccttttttaatagctcaaagaatttaaaatatttttttttaaaaattaaaaataataatggcatttttgaatactaaatgtttttgtttacatttttacaggaattttgtgcaaaattagtcattttttatttgtctgtttggaataaaaaagaaaacattttatgaaaattgaaccctactcatagtggatgattccgtgccaaaaatatcggatttgaattgaatttaaaatacacctcctggaatcaaagcctgaatttcgattgcaaaaattctatttttgaaaagtgatttatgaaagaagaaaaagcgctaaatatgtaaaaatatatttgacaaaaaatctcccgaaatatttctaaaaagccaaaaatatttgccaaaaattaaaacaaaatattcgtcttatcattcgatagtccctaaatgttctctaaaatttaaaaaagttatgactaaaagaactcaaaaaccttctgtttcgaccatttttggctataactttttttaaaattaacaaaaaattaaacaaaattttttatttagatggttttttttaaataactaacgcccattatgacttaccactgatgataatcatccgttaaaaatgtttttcatattcccttgaaaaaaaagttagtgttttacccagggctcccagattaaaagtttcaaaagcctcatttggtgtgcaaaaaagcctcattttgagtcaaaaagcctcatttttacaactttattcaaaacacgcttattccaaaaaacttttggggaacaaagggggccggcggtgccgataggcgtcgccgggggaaaaattaagaattttgaccatatttttagtagattttcattgaaaaaattcttaattttgtgaactttggaaaaattggttattttctggtttttatgaaaaatttaacaattttttttttagaaaatttagaagggattttcgtttttccccanaaagcctcaaaaatcctca

SEQ ID NO: 18633 - DNA, 2432 bp, Heterodera glycines
atcccttaccccccccccccctcctttcctttcccatttcttgtttccctcctcttccagcaccaactcttcctcctccgccttgcgtctcttcctcttcaacaaatgcttctcgtcttcctcctcctcctcctattgtccctcctctgacaacaacgcccctttcttcctcctcctctccccctttctcttcacctctctcaacagcaaatttatttggcctttttgaacggatcgcaaatggatcattcgttgacgcgaatttcggaatcagtggctttttgccttcggctgaaagcattgcgcaaacgcagaatttcaaaaagaattcagcggcgatgacaatggacgaagtgacggcgttttccttgggcataaatggcggacaaaaacaacaaaatctacggacaccggcgacaattgacaaacttttacaactttcgcagcaatttttaaatgacacaaatgaaatgaatgaggaaataggcaaaaagaacggacaaaaaaagacgacgaacggagcaaacggagggacgacgccgcgaggcgaagagaacggcacggaaagggaggagacggccaaagggagcgggggagggccgaggggagccaacgcaggcggagacggtagaaaaagggtaagcgaagcgagggacggcaccacccccgggggcatttcatgttttatcttcttgtcatttactcccccaaaacattcaaaaaaataaatcattttcatttgtacgattcccaatttttgaaatgcattaaatttattacgttcatttcataattttgtagcaaattttacaaaatgctcttttgccggtcattttcaagaaaattttttgaaaccgtctaaaaaatgtcaatttagttatttttttagatatttatgtatgtggtttttccgattttttatagcaatatcggcacccctgtaaataactaaatgttgagtatcaaaaaatagcgcaaggaaaaactcgcttgtcatgtttcagcatttttcataaaattgaatttgaaccggtttttagaccggttcaaaaatcggtcaagcgagtttttctttgcgctattttttttatattcaacatttagttatttacaggggtaccgatattgttataaaaaatcagaaaaaacttttgggacaccctagtatttaaataattcacaaatatttatgaaatagtacaaacgccgctttgatgtgataacccgcaggcataagcttaaattagacatagtaataattcaaatacaaaatataaaaaatattgcaaatcttacttgaaaataatcgattatataaaataatttttttatttaaataaattgcggatatataaaaacgactctaaatgcattttattaaatcaataaaatattataaaaaatatacaaatgaaccatcaaaagaattttttaatttgtatgaattaaataattttcgctgttcaaggataaaaatgaaacatttttattaaaatttaatggaaaatcggccaagaaaaggatttttgtcgcttgaatttaataaaaatgaatttcaaattttgcattcgaggtaaatcgataataacaattaatgaatctattaaaaacttgcggcgcaagcttataattagttatttattcttatagttaaaaacttaataatacatttagacttaaaaaatagtttttataccaactacaatcgtaccataaataagtgtggacacaaaatttatttaaccagaaactttttgaaacccaatgaatttttttaaaatttgaattcttaggcctattgaaagatattaattattagcttaattgaattttaatacttgaaattttaaatgtttataaaatttaaacagctatacgtgattgattgagacacacataattcaacacaagaaaaataatgattatttttattattgtcacaaatatttaaaagtctatcaagattgaaaataaaagctattttcaatgaaatgaagctttatttatttgaataataagaataaacgataaaaataaaacagaaattaaataatttattagcgaaattactatatcattttgtctattaaaatttaaaatattatattatattttatgtataattcgagtaacttaagccatggacacaaacgatcgtcgttggtcttttcttgtaaatagataattattagaatgaatcaaaaaagttgaaaattaaaaaagtgatcacctttttttaaattatttatttttcgcatcaattattttttaaattaatttgttaaacaattaattataaaaagaagatacaataattctaatgtatacgaagaaaaaaggtaatggaatgtggtggaaaatgatgaaaagacatgagaatcgtattgtgcagtatttgtaattgaacaacattttttagtgcgaaaaattct

SEQ ID NO: 18634 - DNA, 215 bp, Heterodera glycines
tataataacgctgcggacatctacatttttgaattgaaaaaaaattggtaattactctttctttttctccatattgaccatcatactcatactcttgatagtttaaactgaaggcgggaaacgacaatctgatccccatcaagctagcttctgcaggtcctgctcgagcggccgcccggggatcgatccccgatctagtaacatagatgacaccg

SEQ ID NO: 18635 - DNA, 1254 bp, Heterodera glycines
tttaaacttactcaaaaatgagtaatttatctcaaaaaaaaatccaaaaaatagaaactttccatttatgtcgctttttgctaaattgttgttggccagaacaattaacggtcaaatcaccctaatttttataaataaaaaagatgagatgttttcttgcttccgtcatcatcatcatctcgatgatggcagagcaattatccattcgcttgcaacgacattctcccggacagcccccaggcagcagaatgtggtcccctcggggggcttaggaattcgccaccgcccctgggggggggggggggaggggaacaaagtagcaatgaaagagtgtggcgttgtgttgagtgaggccacagcagcacaagccgagggctgggcatctccaccaccaccagcagcaacagcagaagcacataagacaaatgattatttgttccgtggcgaccgatttcctcccctcggcggggcaaaaattgtggccccaaaaactgcaaaaaaaaaacatcaccgtagaggggtggcaaagggctggctgaggctattttccttcatttccctttcctgtccctccacaagtctgttttgtttgagaaaaaaatcgtggaaataaaaaccggcaaaatggggccccacaatccaccatcaccagcagcagcagaaaaaagccccatgggaaatgtgtgatggaccgaccggccaagcgggagagaaagaagcccaacattatccaaccacaaagcatattatcatcaattttcttttatcggttagtctagtctcttttgcttggcactttttttggaaggtccaaaaatggcatttgacttagtttcgtttttgatgtttccgaaatgcaaggctctaaatttgaaaatttgaattttctacaaataaaattggacttgtgtgtgttttttataatttcttttctcatgggactctcaaatgaagagagaggtacaatcggtttttttttcatagactggtcaattctcacaattttcacagttttatctatgctttaaaaaattatttaaaatttgttcaagagtaaccaaatttttaattcttggtgacctctgttagcctgtaaactttcaaaaaatttcatcaactttaaaaagttattgccaaaggaactcaacaaaccaaatttttttttggataactttttgggaacataacgatatttttgaaatttgacaggataatagagaacatttagggctatcgaatgatttcaagaattaa

SEQ ID NO: 18636 - DNA, 2126 bp, Heterodera glycines
  unsure (1)..(2126): unsure at all n locations
attcaatgtaatcaagcaattgagcacttgagagggcagggtcggtagttcagtgggtagaacactgatcccggataagccgaggcgccggttcagactcggctcgcccnacagtttttcactgaaaagcctcccaattgttaaaataatcaaaagaaatgattttttcttttactgataagtgagttttttggcttactgatcagcaatggcattttattaggttttggtcttttctctgatcatttcctttccaattagccgatttctctctcagttcgtccatcttttgctgccccatctgtgccttcttctgatcaccgcactttttgtttctttcattgctctgatcattcgctttgtcgaagcacaaaatgagcgagaagtaagcggttaaaaacgaaattaaacaaagaaatgaacaaaaatttttttaggaacaaatgcaaatgttggccgaccttgagcagatgagggccgaatttattgtgcacttccgcaacaaaccgatcattctcggcggcgatttggatgcccaaactcgcgcttttgtcctgcgcgtgctccgcgtcgggtggactcgcggaagggcgggcattccgttgccggaattcgacgtggacaccaccaccaacaacaacaacaataacagcctcagcagccttccgacggtatggacactgccaaattcgctgctgtttgccacttcgcttgtctctcgcattggttttgccgcctccctcccaaatttagcattaattttacaaaatatttccaaggctatggccacattgtgccaagaacgccggaaggcaaaatgttatgccaactgttcgcgctcatcggatgccctctttttctgcttctgatcgccgacattgacaaagcaatcgccaatttgtttcaatttttattgcaaggattcaccgagttgacaaggaaaatatgccggaagagaaccgcgaaaaagagtcccattaccaatggggaaaatggggtaaaatgtgttgaggacggaccacaacagcaaaaagggtgcgccggtgccgaaaatgggtgccatttgggcacaacggcgacggatgagagagtgtcggcattggcagcagtgccatttctgttcgccttctgcgcattgactgcctttgcctacgcacatttggagggttggcattggttggactgcttctacttttccttcatctccttttttgccattggttcgtctcttccccttcgatttgttctttatgtaacgggtgccaaaatcattcctcccccccccaccttcttgggactgtttttaaccattttcctactgtaggttacggtgattttgcgccgtccaattgcgcttctgttctgttcacaatttgctctgttgtcatcggaatgtccatgtgagtttttgagcagtcctttccaaattcgcttctctttctttttcagtgccactcttttgctcgattttattggcatcgaatacatccgaaacattcatcgaattgagagaacggcgaggggaaaatgttgtgggagagaacggaaaaagggcagcagagggaaacggaaaaggacgagcagaagccggaagaaatgaagaacagggggaaccattgagcaactgctgatcagtcacccggccatcaatcgataagtgatcacttattttgcccaccactaccctgacctatgaccattttttagcctaccattaaccgccgatcactctttgatcagtcggtgggtcagtttatttaaccattcactgtgatcacttaccatccctacgccttattatgccaattaaatttggtgttagtgatcacttattttcaaccaccgtccctttgccagaccaatttttgatcagtgatcactgtttgctgataaatcaataaagtgtacaaaattaataaccctttttatcaatctctgtttgttttgttgctgacgatttttgagaagagatttatgaggatttgggtaatttgaaggggacaatgtgatgaatggatggaaggtgagtgattggtaataacacgtataatcaaaaaggaaaaaagcaaagcaatttgtaagaggaatgaatgaacgaacaaaaacagaggaagaagcatcaataa

SEQ ID NO: 18637 - DNA, 2110 bp, Heterodera glycines
aaatgcctcgcaaaagggtgatttccaatccaaggccaaggtgtgcccagacagtcagcggggagacatcactgatcaattaaattgtaattgacgctaccataagagaagattttccgtcgtcacgtgacactttcctcggccagcagcccgtgggacagttcggtcttttctatggtccttcgattgcacgtctctctgagctgcggcatctcctcctggtcctccgcttcgctatgtagctgctcttacgttggcattgtgtccgtgccatagtttgttggttcgccctcctcttgaaagcgttcgttcgcttggaccattttcgatcataaaattatggccgaggttttgacacgcccccccctccccccccccttttttctcctttcattttgttgtcctcttttctattttcagcatttcgttgtcctcatgcacatttcgttttcctttcttttattttttccttgttttttttctaaaaaaaatattttccaagaattttcatgccaaaaccctcaataaaataaattttttctataatctttgacaatgaatgataatgatcaaagcgacgccacaaaggtgttaaatatttaaatttattaaaatgcaattattttccaaaatatttcaatttatttaatttattcaattgtcatgtcctttttaggtgcgttgtcgaagtgagtcctatcgcatggcaacgaccgccggcggcggagggggacaaattgtcgtggacaaatcgacgactttcaccgaaacgacaattgtactgacaccggtcgaagaaaatgttggcggaatttcaccgatggaaaacggaccaatggtggccgaggtcgaaccaaaaattgaccactcaaagccctaaaatgggttgataatccacatggattagccgaagagcaattaaaaccgaagggataaaaatgagcaaaatcagtcgaaggaattgggcgatcagagattttgtacgtttaggtcaaatcaccggcaaaatcggagtcaaaaacgaatggaaaagcgaaaaatatgaagaaaaagttacgcatcaaaaaaagggagaagaaaaaggaggacttggaggagttgaagaaggaaatgaaaatggtgaggcgaacaaaaacagaaaatgattattgtttttgggcggctttttcaggacgaacatcgcgtgccattggacgaactttgcgaattgtatggcacaagtttggagaaggtgccgattcgcgtttcaattgagcattgttttgttgaaccttttgccccagggcatgccctcttctcaagccgactgcgttttggcccgcgacggccccaattcgctgtcgcccccgcggaccacgcccgagtgggtgaagttctgcaagaacttgttcggcggcttcgcccttctgctgtgggtcggtgccattctctgttacgtcgcttattccgtcgatgcgctgactttggagcggccctcaaaagacaacgtaaggcaaagggaacgaattgacaattaatcagtgattgattttgatcactttcagctctatttgggcattgtgcttatgagtgtggtgatcatcaccggctgcttccaatatttccaagagcgcaaaagttcaaagattatggaatcgttcaaaaatttggtgcccacttatgcactggtgatcagagacggcgaaaaacggcaggcatggcggagtgacagaatgccaaaacgcgggaaatcaattttcagattccaagcagccaattggtggtgggcgatattgttgaagtgaaagggggcgacagagtgccggccgacattcgcattacccaggcccatgggtttaaggtgggtcaaacgcggacacaaactcatttaaagcaattagggcactgtaaccgttgcgttatacagcaaactcatcatcattcattaaattaaaagattattgtcaatataaatttatggccaatctatcgtatatctttatttctcgaaaatcactgattatttgataaaattggtcattttgatacatttacaatgacttaaccatttaggtggacaactcatcgctgaccggtgaatccgagcctcagtcgcgctcacccgactgca

SEQ ID NO: 18638 - DNA, 1454 bp, Heterodera glycines
  unsure (1)..(1454): unsure at all n locations
gaaaagaatggcgcagaaaaattgtctggtgaaaaattgggaggcggtggaaacgctcgggtcaacgtccacaatttgttcagacaanncaggaacactcacgcagaacaggtggtcgagaacagtgaataaataaccaattaaatggagcggcaattagctaattgaaggatgacagtcgcgcacacgtggcaagaccttcgaattgaaagcatcggaacgtcggaagacgcgcgcgggagggaagacatgggcacggcaatggacaccgacactgggcaggtgctactccgcgtggccgccttgtgcaaccgagccgagttcaagccggggcaggtgataagagcaaaagcacacaaattggcaaaaaatacggaattttaatttattcttacggtaaaattattccaaaatgcataatcattagcatgcaattagcgacattagcagcattttcattactcgatgctcactttttgttagcacgacgtgcccgttctgaagcgtgaatgcaccggcgacgcctcagaaattgccctgcttaaatttgcgcagctttcgcttcccggggaagacggagtcaaagaatttcgccgccaaaaccaaaaagttgtcgaaattccgttcaattccaccaacaaataccaagtcaagcgtttgcatcttaacttaattttaggaaatacaaagttcaggtttcggttcattacaccgcggcgaacgaaggcaatttgctggtgatgaaaggtgccccggagcgagtgctgtgccgttgcgatcggatgctaatcgaaggcgaagagcgacccattgacgaagatttacgcgcggcttttgagaaggcttatttggagctgggcggaatgggcgaacgcgtgctgggattttgcgactgcgcacttgacaaggaccgatacaccaaggtgaaaaataaagaaaaatgaatttaaatgaatggggggaggaaaagccttaggggagggaaacaatcgacacaattaacaaaacggaaaggctagaattggcatcgtttccagcaattccccttcaacgcggatgagcccaacttcccgttggaaggcttccgtttcctgggactcatttcgatgattgacccgccccgcgcggctgtccccgacgccgtggccaaatgtcgaagtgccggcattaaagtgaactcacaaaacttactaatacgtacgcccacggcattaatgtgtgaacaggtggtcatggtgacaggagaccatccaatcaccgcaaaagcaatcgcaaaatcagttgggataatttcggaaggaagcgaaacgatggaagacatcgctttgagaaaaggcattacggtggccgaagttgacccgaagtgagaaggaagagggtcggacaaaagncgaatcatttggatttaacttgtaaggggcaaaggcaatcgttgtgcacgggtcggacttgcg

SEQ ID NO: 18639 - DNA, 1409 bp, Heterodera glycines
  unsure (1)..(1409): unsure at all n locations
aattgttatcctcgntggtctaaaatttatatgagaccctatatacctttcctattgatttggcaaaacgcataggatggaaaacggagtgggtaaactgagtttgcgatggtaaggagcaataatgaccgaatatgtgttggagaggaagggcagagctgaggaaaccaaataagtgaaggagaggggggtgaggtcacggcgtcatcttatcctgtaaatcgattcctctaaaaggaacaaatggaaagaggctaacgccaactgctttcttaacaaaatccaatatttagattttggtttcgggtttatttgaattattttccttttctctgtaatacactttctctactcttctatatctgtttactttcactgttattccttattaatttcagacctacatattgtctaaataatcgtttcctttagctatttttcaatatcttttcttccaacactatgttttattctcgaaccgttatcttccaagtgttcgtattcttgttctttatcaaactattctcttctctatacattacctaatgtttgccttactaactcacattaaattctcactatttaatattgactctcttcaaccacatttctgagttctctatctctatctcttacacccattattaattgtcattgattctatggtgcactacaatatcctcatatgatttcttcatttattcctattacaagacctgcttcacgcatacatttagcccttatctaccctttctcgtctgttccttattataattagaattattttacgttgaattaggcaaggagcattgtttgtgtttatgattaaaattaactagttttatataagttaataaatattatgcagaactttcaaacacacttatcctcaccctcgaaaaaacatacaatacacacacatacgcacacgcatagacacgcacacacgcgcacatgcatacatacgcatacacacacacacacacaaacacacacatacacacacacacacacacacacacacacacacacttacacatatacacatgcacacacacataccccatgtgtaatttttacagatttttgagtaattccttcatttaatcattatttttcttaatttttgttaaattgtatattctattccttaataatttacaaattgtgtcttctttctcttaattctgcatatttctacctaaaaacgacgttcccaaatgcttaataatttacaaattgtaacttccattgcttaattctgtatgcatgttcactccttaattatgcacttttctacctaaaaacgacatgctcgtgcatattttaaaattgtatcttctattccttaataatttacaaattgtaacttctttctcttaattctgcacttttctacctaaaaatga

SEQ ID NO: 18640 - DNA, 3479 bp, Heterodera glycines
  unsure (1)..(3479): unsure at all n locations
tacaattgagaatctactgagccaattgaagtcatttatgtaagcaatctcgacgaggcatatgcaaatgtttttgaacaaaacgaggcttgaaatgttgcgaattttatggaaaaatatttattgtattattcatttgaatttacccaataaacattttgtcagacacatatgtaacattttaatgtagtggtgcaattcatacttattgattttgctattgttttgttttgtcatttctttcacgagaaaaaaaacaagaacgagagagaagagaaagaaagagagttgttcattctcattgacttgaagttttttcacgtgaagtaaaaaagaggagggttggccgaccgatagattctcctttatcacaaaaatgttcaactttacttaacaataaaccccaactttttgttaattgctacagatgaacttttttaaaaattcatttttgaccatagctttgcatattcccttttcaggtagtgtaataattcttattgtaataaaaatgtccgaaaagaagtccgaaggttgtgctgaaaagaagagcggtggattcaacacgcagaagtttatgttggacctcgcatccggcggaactgctgctgccgcctcaaaagatcgaacggtatcgcaacgagaaaaagtggcgcagaaattgtttacgcaattcgttttccaatttcctttccgtctgtccattgtcagatttactttctattcggtgttgtggctcggttggttgtttcgttgatgttcgcccttttccttgtccatgtctatccaaaaatcctgagcattatcagtgattattgcttattacttttcattttaagtcctttagactgatcggaagcaaaagtcggcggacacaaagcacgcaaaacggagaaaggtttgcatttgcgtgtgtttggcagttggactgcttgagagttaaggtttttgagtcccggaaatcccgaggggatttgcatgggaaacccattttggaaaagtatttaaacagctaagacttcctcaaatggatttatgccaatgggaaacgaaacatttctggcgccctgtgttggttttaaaaaattcaaatctaggccataaaacggaaaagtacccattttcgaatgaattcttagatttgtcactatccgctaatatataaaacccggacttacccatgattgctgcttctttcattttttctgccaatttgcctttctttcagactgatcggaagcgaaagtcggcggaagagacggaaactgcgctggaggccaactatccgtcggcacagttggtggcagaaaagcgtgccaaaatggaggcggacattcgccgcgtggcggtgccgccccatcgctaccaaaatctgaagcgccaatgggcaaaagtgacggcaccgattgtcaacgaactgaagctgcaaatccggtcagttttgccggaatcggtgtccattccccgcgcgttgtctttaattaatgccatttttgaccttctaattgtaggtttattttcaggttcaacttgaggacccgttgtgtcgagatccgttgtccggacgaaaaagcggccggtaggtaaaacaaaaagtattaaccaaacaataggcagatgatcatttttcaatgatttctgattaatattattttgttttaatcaattttagacagttttcaactttttgttctattcgcgtttgggattcggaattaataggaatggatgtcagattcatattcaacgacctcgaaaacttcctagaagacgaattttacacgacatttttaaatttttattattttcgaaaaatgggagagacaaagaaagcactattaccgacaacaacaaagtagtttactggtcaaaaattttacttacaattaactcacgtaaagcgtatgagctaaaaatgaacgtaataattgtattcagcgcataaaattaccctagaaaaattatgttaattttcaaagggatcacaaaaaggataagtagcagcattgaaataattgggtcactaatgtttcagatttttgtgcacgcttttctgctcggatttgaggtggacgatgccattgcgctgattcgccttgaccatttattcttggaaagcttcgaagtcaatgacggtatggtaaacgcgtgtcaaaaaaatacgaatagttcggagtcccgaccaaaaatactcgacaaaacccgaaccgactcatatgtttattataatattgtaccttttttccgggtcaactaagggcttatcagttcatttctattctcccctgtgcgcttttcttgccccaatttgttcgtacttcttttcccgcacagtgaaacggctcagtggcgaccatttgagccgtgcgattggccgaattgcgggcaaagacggacgagtgaaaatgaccattgagaacgtgacgaagacacgcgtagtgctggccaacgacaaaatccatttgctgggcgcctacagcaatttgcgcgtggcacggcacacgatttgaactcggaattcagcatttttcgagtatattcaaaattaatttttgtctattgcctttaacctcaaattgtattagataaaacttccagattcaagctttggacttagaattttaaaaattcatcaatctgtctcggccatcaatagtaaacaaatttattttgatttttgaccaatatgcgtctacttaattaggcgaagtcgcgggggtcttaccacactcaaattatcattaacgcaattttttatcaacataaaataacgaacagaacaaacaaaaaacaaccctccaatgactgctcgtaaattcctcttcgccattcagtcgagttttttgaatccaatgtcggaggcatattcacggaagcagcgacgacaaacgttcagtgaatatttacgaatcagtccatggtggttgaagcagacgcgacacgaacgcgagccgggcccaaatttgcgcggccgggaccagtggatgttttcgtgaaccattttcaaacggaatcggcaattgaagcgtctttttgaactaaaattagtataaggcaagaaattaacgaactgaaaaaatggtattgaagcaaaacaattgaattatgaagtggagaaaacaattcgccaatttatcgcaaagaattatcattgcaaaacaacaaaacaataacagccaaacatagacgaaaagagcgcatatcggaagtcaattcgcactttctttctcctcctcagccttgagagtgcgaagcggaagagtggcgacgagcgaccttttccgcctgcttttcctaaattacaaaaagttagcccccgtgaaagaaatgtatcggttggttccatctcgccatccgcttttgccccggctttacctttgcgtatttagcaagtgtttggntggtaaagagcggcttcctcgcgtcgcttaacacggccggttgtttttcagcgcaatgcgcctgcgcttccgttgcac

SEQ ID NO: 18641 - DNA, 979 bp, Heterodera glycines
gggcccgtagaataagaaggtggttaaatgaccgggtcaaacgaccatggttatttgacctggtcaaatgaccacgaagttggtggtaaacccgtagaataagaaaatgaccacgaagtgacgtttttaccaccaacctccgtcaaacgaccatgaactatgttcctattctaccgggttacttaaccacgtgcacttttgggacaatttgtttacacattttttatggaaaaataacttttgttttttaggtctatcgcataacaaatcgttgccaataatcaattttatgttttacccaccaaatgttacatatatttttcaacaccaatatattatttatttgtgagttgaaaaagaaatgatcaatcaataaattatattttttaattaaatcaaatcaaataaatttaggatgtcaatttttaccaaggaaatgtcaagcgctttggcgcaaaaagttcgcgacaattacgaagaattgtttccgcaaagcaaaaaggcagcgttttcgcgccgttcgcaaattgcttgggccaacattacttcagaaattaatgccgaatttggcagcagcatttctgaaaaacagtgcaaggaaaaatggcacaacttaaagaaaatagcaaaaagagaaaacgcaaacgaacaaaagtgaagcacacaataattattttttaagttacattttacaggcatccccgtggcacgggcggaggaccaaaacgacttgaatctaaggacccggctctgcaaattattacggacactatgggcgagagcgcctcattcaaaggcattcccggtgggcggagttcggtgaaagccgacgaagcatacagtgatgttagtactccaacatcagtagagaaagaagtgggttactattgtgttatattagtactgtaaaaatataacaatttttaggaagacgaagatggttacaccacgagcgaaaaaaattccacgttgggaaaaa

SEQ ID NO: 18642 - DNA, 2241 bp, Heterodera glycines
tttgcatattttgccattttttcaaatattttccgatttgaatatgtcttaggaaaaattttgattatgcctaaaattaaatccaaatctgaatggatgcgcgagtaggcaacagtgagcttcactgccgaaaaccttgagaaatttttgatttgcaattacaaaaacaactgataaaatttatgaggaatatatttttaaaattattttgcatccctaattttcaaatttttttgtgcatatttggcaattttatttgcatatttaggtgcatattttggtcatttttcgtgcatattttttgcagccctgccgattattcttgttatatgtggtgcgatatttgaggatttgacatttgaggacccgacatttgaggatcgacatttcaggatcccgacatttgaggacatgacttttgaggacccgaatttggaggacccgagatttgaggacatagacaattccaaaaaaaaataaatggaaattttgttttgtatcattatgaaaaaagaaaaagcctttcccaagggtcaacgagaacgaatatgtcaaaaatttcagggacaaccgaataattccaatctttcgtctccacgtatagcgtataacatcataattccaagatctgcctttgaatttttcacttttcttgttgccttgtttttggtttaataatttataacagtttaaaaacatttttgtaaatataaagaaacatactagtaagacaaattttgtcaattctgcgccccatttgctttgatattttgttgaaaaaatattggggcgtatattccttcgcggcaatgttaaattcgtaattgtccaacacgaagcttaaggggaaaagtcttgcaaaaattcttgataatgatttgaagttgaaataaaatgaaataatcattttaataattttcatttatcagactcatcactgttctgaagagagaggagcgaattgcggccgataagctacggcagtatgagttgaacccactcaggggataagaataaaagtgattctagactatttaagtaattttatgacattttgtgcctatttcatactttacgaggattttttttcaaaaaataaccattttaaaacattttatttacatatttgggttttttgtacatattttgggatttttcacatatttatgtacagatttggaccgatttttgtacatatttttgacagccctagtcaccacttataaaagtttttccaccaaatgcaaaatgtttttcatcctttcttttagcttacgatcagttatatcaagaataaaacgggattggagcttcatccctatataaaaaaatcagttttttaaatttattcggttgactgttacactcaatgcccgatgtagaaatttgttgatatttagcggtaatttgaagcgattatgcaacgtcccccctttatgaaaatagttgcgggcgccgaacttttcgacagcgaacttttcgacagcaaaggacatttcgacagaaatataataaattttatgtgggtacttttcggcagtgaagaataattaagtccaaaaaatcctaaactcttggatattttcttgaaaaatagcttgcttcttccataaacttatgccattcatcatcatcacgaattaatccatggactaagcgggcttttgcataacatattcaatcccattacatgttcttaaatcacggaaactctttctataaatatttaacaataaaaaacgcaaataatatttcattctatatgttggatttaccggtaccaaacgtcctattttttaacatttccttccttcgggtatttccaagttcggtcttttcagccacgtgcaaaatttggacatgtcgatatatttaattataagagagggaaattttacgcaaaatttaaaatacgcagttaaagtcgtttctctttttgatgcttcatttatttcttcttccgttgcacatttttataaaaacactgctcagtttctaaatgtaatatctaacaaatccacagaatgactttccctgcattggaaacttaaattttcgccaacacgcttcacaaggacccaaattttacgccccgaggtatttaccaacttcatcataatttaatgtttttaaactccatcttcgcttaaaaaagaacattcaacattcaatcactgcagcatatcctttataaatataatcataaatgtgttttacagcagatatatcagcgactctcta

SEQ ID NO: 18643 - DNA, 2288 bp, Heterodera glycines
aatatttcatttaaaaataacgtttaaattacaattagtttttaaatcctcattaaacaatatgtattgaaataaaataaactttaaaataaagatatatacattatataaggcattaattatgctatataagaaaaatatcaaatgaaatgaacaaatttacctattaaattattatgcaaatcatattagtgatgaagctttaaataaaataaataaatttcagcatagatgcacaaaataaaatgaataattcaaattttttgtgctagtatataaatatataagtgaatccatagaaaataaattcaaataataaaaatattaaaatgtttttttattaaaacttgtcatcaaataaaattcgtatggatatataacactataataatttacaagtataattgacataaaaaattttattaattttttttttacaatactcaatgtttgaagttaactttgaaagatgaaccgcttgccaagaataacagactattaataaaaaatttgattagaattacaacaaaacaaatatattaagtcagaaataacaaatttagttcatgaaatatataattaaatgaattttacaattaataaagaaaaaacatatataaatttaaaatatggaaaaagacggattcattaaaattacaaataaacaaagtaaaaaaatgtatcaaaaagtaaaaattattgttttggattaataacagcaattagattgaaaaaatattggatattaatcctctataagatatattcagtaatatcgcgattaatttctgaaatcaaaaatttttattctttcctatttttattctaattcaaatttaaaacttattaataagaggtttcaaatacttaatattttcattttcatttcattaaattcatttgtcttcatttaactcactatgtttttctcaatttataaattatgtatgataatggaaatgatgttaattaaattttcattgctttattaacttataataaaatttattcattttttctttcaatttttaaacatttccatggtgcgctattggttttttggttctctcaaatatctaattctttttttcccgaattcttataagagtatattatatatttaaaaaaataataatttttgaattattttgttttttatttgtgcaaataacatttttctataattaaagattatgtaaaaaaagaatttgttgctatatttttattaaaatatatacttatattgttatatccacacttaccttaacataaaataatattgttgttacattttctttgttttaaataaaaaaagataatagatacatgaattaacattttgactctgaacaaattgattgagtgctatttaaaaaaacgtaaaacgataaattaatatatttatgaatattataacacattttttttatttttcgatgaatttttatttcggcaaaggtacaatgacgccttcgtttgttgatactggttatgatagcgaagaacgtcgcgatgagtatattgacgagtttgagcgattttagaaattgctggccaattccctttggggcaagtttgcccaacgcgtaggaagaaccgaagttcgctacgcttcatcaccatctgagttccactgtttgctctataactcttcgatagaagtactcgcctttcaccatgtttcacctcatcttgaccgtgttgttgtgaagacaaaagctgatttttcaaaagcaccagcgatcaactgtttgccgattgcaatttatgttacttcatacgcaagacttcatctttattcctacattgagaaagttgtacaacttggtcataaacttctctattgtggtccgcttttgatcttattttgttattttaccttgttgccattcaatgatttgtttttacctttaaaatttagataaattaaatttatttatgcagaaatggaaaaaaaccggtttttgaaccggtttaatgctcgaaaaattgagtgaaaagggggctcctgaccctttaaaacggtcaaattcggacaaatttagtatcattcgaaagcttttgacgagctgagtctaaaaatcaaggaattaagtcaaaccgacgccatctgagcacctggacaactgagtcccagtgaaaacaaacatttcagtacagaaaaataataaacggaaagtaacaatttaaaagccattcgcaaaagggagcatgcgaagacggagcaagtagtgggacgagacggagggcggaggaagacgtctgacgagcgccacaagcggttgact

SEQ ID NO: 18644 - DNA, 2277 bp, Heterodera glycines
tgaaggcaacgcccattgccacagcaatctgtaggaaaaagcacaaattgaagcatattttgccgaattccgagagtgagtagtgaatgcatcaattgtcaaaattatacaattgtagcccaaataatagcccacaatttgtaaatagctaacaaataagtcttgaaaagttcaaagggctctggaaacgcactcagaccggattttctggatttaaatccggcgtttatggttccagcttagaaatgttaattttcaatgaaaaaatgtcctgctggtcttggtctgtgtctatcaaaattaaataaagtcccgatccggggctcggctctatttcagattttttggggaaaatatttgagtaacaaaaattcgggaaaaattatgctatcttccttttttaattggactttgttaaataaatctgcttttaattgggttacctatcatttcgtcactgagacataattttttaaaaatattgacaaatttcaataaaattatcccataaaattattaattggtttaaaattctctaaaaattattcctgggtaagagtactaccagtagtagcccttttcgaaaattttttttgagattttaaaaaatcgaaaaatgagtttataaggttttcaaggtcgctgatcacgatccctctaatgccattcgcaggcgctttttcatactcagcaacgaaatattacaatcgctgaaattctttatcccatttaacagattttttgatgtgatccataaagctctgttgaagatgactcaaattagtccttttaaaaaaataaacgaaaacttaagtccgcaatttgcgagaaagcaaatgtcaattataaaaaagttttaaagcaaaaaatttttcaatatttaactaaaatttttttttaattatttctcagtgacgaactgaacagtgacgaaacgatcagtgacgaaatgatcggccatcttttaattgggttgtttattaaatgaaaattcttatacagctctccgccggcgtttgcctcgagaagcattggtcgcgcgggatgcattgtccgcgtgcgtttctcaatctgtccaactgacaaaaacagcgcgggaccaacgagcagaaaaagccacaaaacggcaccgggaaacggcacgtgccatcgcagaaactgcaaaggcgcaactcttcgcccggcggacagccaaacagaaacggaggagaagctgaaaaaaaggaaaataaaataaataaatattaaataataagtacgaattgattatccttccgtaattttttaaatttagtacatatttttaatagtacgtaattgttaaattaattggcagttgaaaataaattttccaattaagctatgaaatccaggccaaaaaagtgcttttatcggtcgaacttgttgatgaggaatttgtcaacacattattataggcttttggctcctctgtggatgaattcagctgttcattttgagcggttgccaaattaaagaaaataaaaagaaaataggaggccatcaacattttaatgacagtcatttggtgtctaaaataaaatatatttcaagcaaatttattactatttttatttctataaaaacaaacactttgaaagaattatgtattgaacatgcgccgaaaataataaaaaaacaaaaataatcgtattaattgcacagaaaaacatggacaacacgccgaaatttgcatatggcgaaaatatttttttgtttgtaataacattaaaacaaaaaacaaacaaaattatttatcgcactttaactgtttgtttttaaactaaagtcctccttgttcggttaggccggtttttcgacttttcgggtttttcccaaaaattcgacttcctttagttcggttaattggtggatctctccttaccatatgattaaaattttgcattattactttatcaccatttattcagattagattacctgactttttgctcattattttatcagcgaaatttatgcattgatttatcagccaaagaaatttttcttttccatcaatttgtactccattctcatatgaatatcttttaggacaatccatcataaaattggattttccttttttattactaaatttatttaaattaatttctaatataaattttttttattgcgattatgccatggtttgccgattcgtttgcctcccaaattgacggcctttcgcgtgccatttccctctccgtccaatggcttatcgtccactggtggcttctgctgctgcttctgctcactgtt

SEQ ID NO: 18645 - DNA, 3517 bp, Heterodera glycines
ttctgtgtatccatttttttattcacctttctttgcaccgccgccgcctaaaaagattattcttaaaagctttgaatgctcccgtcttaccccttctgccgctttggtctttaaaaattatgtatcaagatgataaaacattaattgtcccatttacggtaaaagatcaatgatcatatcgtccctcccaacattctttccttccctcacacacaaaaagggaagggcttatttattttgttcttgggtttcccttccttgccacccatcatcacttggctctctcttttctctccgtccatttgttgacacaattttgttttcgaaaacaatttagcattgctctcccgcccctcccccttccccactaggcaatgattataataatgtgctcatttggacgtgcatggacttaaaactcacctccattttgcaaagaaaatttaatcattccaaattaagccaaaaaattctttactctattaaataaactcacttattttgccatggaattaatcagaggcgtgaccgacagaatgtctgcaatgttttcggtgtggtaattgttttatgcaacataatacagaatataatattgattattagggccgcaacttttagtgacgaaaaatcccaaaatagttaactaaaatagtgagtaaaaatgccaaaatagtggcaaaaagtccgaaatagtgacataattttcagccaaaaattgagcaaaaataatttttattaactgattgcagttgcaaatgagtagtagggctgggatttttaagagcaaaaaacccaaaatagttacctaaaaaaatttttgccaagaaagtaattttttgagaaaattttttttcatttcataggagtatattttgaaaaattttagctcgattcttaggggtgtattctttggttttattgcatttttgttaaggaattttccaaaaaatgtcgaaatagtgacaaaacgccaaaatagtgatttcttaatgaccgataatgacatcagaatcgaaaatttttaatgcagaaatgcgttttctgagctcctttcttcaaaacaattgagcaaaaaaaaagttttttcactaaaagttgcggccctattgattatgcttacctaattgatttttaaatccaaacattagccctatggatattaaaaaaagaaataaatgactttttattaatgggaccaaaaaagtcaattccttttcatttttttattgtaaagggatcacaatgattcactttctatttctgaccacttgggcaccgaaatataaaatgttgatggcagcatatgggcttggcatatgcatatgcttgcatatccacctttgttttgtcttctcttctgctggtgtttatttgtttttcgcccgccccctctttccctcctcatttgtcactgctctttctcacccctttcattcactttcgaatacagtccaatgttcattgtatggcatgccctcccatcatcctccaccccacatatccttcccttcccaatcattcaattcactcatcatcatttttacatacatatgtataggtcatttaaatttaatccctctgccataaattgggatggacccataaaatgttttaaaaattattgaaacaaattgaattctttctagccttaaacattcaatctttcatcttctcagaaagtcatgcaaaagcgttcggctgtctgtgtgcttgttggtgatgaggacccgaatgtgaaggggaagattaacttcatccaggtcataaatctaacagaaaatttcttagcatttttgtagcttctagaatctcggaatttaaggttcaatttttgcaattgcgaaaaaatttaccattactaatgctattccttccataatcttttaaagttattctaatttatgaattaaggagaaggatgactctccggtgaccatccagggtgagatcactggcctttcgcccggaaaacacggcttccacgtccacggtcatcgaccaacccatttatccattttaaaataggatttgttttagctttcggtgacctgtccagcgggtgtatgtctgctgggccccacttcaatccgacgaacaaaacccatggtggaccggaggtggttaagggagagggcggaattaaaggatgatatttgataaaatcgcgcttccttttttgattagggatatatttttatataaaattaaggatgagacgcgccatgtgggcgatctcggcaacgtgttggccgggcaggacggagtggcaaaactcgatttcacggacaaagtgatttcactggtcggtccgcacaacatcatcggccgcgcgcttgtcgtgcacaagctcgaggacgacttgggttcgagaattcattaaataatctaataaaattaaatcttactctcaatttgctaacaaattgactttttttaggccgtggtgaaggactcaagaagccggagagcatggagactggcaatgcgggtccccgtttggcgtgcggagtgatcggaattgctcagtgatgggggaatgacgaccataagaggaagagagatctgattattgacctatctcattttgtcgatacgacagttattcaatttgtaagacatgtttaaacattcaaataaatatggatttgatgatggtaaatactagtaaaactagttgtatttctattatatatctagaacccaatggatttaaggtttgttccttgaattaaaaccagtataagccatagcgagtgtcaaaaacagttttttgtgaccaattaattagaaattggaaaagttaggtaactgttccatttttaaatttatggtaaacgccaaaaaacaattagccagagaaatgaagggtattttaaatttgaaaatgtttttttcgcttttccttttttttcattttccttttacgcaaaatcatcttctcattcacatctaatctgcttgttataaactcccatgtttattttgaagaaacaaatgggttttaggctgatgattttatgaatacgaaaaactttagccgtagctagtatgaaaaattattttctacgaacgattataaaatcctaaaatttaaattgaaagatttactttttcgatttttaaaattaatggtaacgccaacaaataattcgccagaaaatgaaggggattttagttttgaaaatgtttattcggtttttcctttgatttcttttacgcccaattacatacatatcttcggattcccacctaggtaatcactaatcagtcatatcataatcagcagtcacatttaaagacttccttaaaattttcataaatgctttggggctgctatccccgcttggtcatgcccttactaggcgtccatcgttctcattcaacattattaacctcattcatttccccattttttcaaatcaataaagttctttattctcttgcattttccgtggaccttcaacacttaacccacaaaaacaaatgaaccgaattcgaaaagcattgacagtac

SEQ ID NO: 18646 - DNA, 2029 bp, Heterodera glycines
  unsure (1)..(2029): unsure at all n locations
ccaattgagcggctgccgagcgcaggcacaattctncctcgcatttgtggccaatgctttttctgagaaangggccatcaaaatncagtgtggcatttgtgcgcagtgccaaagccaatgccaaacccaaacgagtgttaaatagcaaaaccaaatggcaaagccaatgccaaccccatttcagtgccaatctgacctcggggactcgaagctctctccgagcatgctcatctccaccatcctctccaaatgcctttccatctcccaccatttgctcaattcgttcatgccaatttccgtatttttgtccatttccgctgtccatttgacgtactccttgcgcattttcttcagtgattgcttcggcacattctctttcccctccaaaagattcagtttcgttccgcttgcgttgtgcaattgaaaaatggccaaataaatggccaaagattgcaacttttcttcggagagtctttcgtcgaacagaagcctcagatattcgtgctcaatgctttcactctctgcgaaaattgataaaaatttaaaagaaaaattggaaaattattttaaatgacttttaaaagcgattttcaattggatttagaggatttaagttcaaaatggcattgaaaataaatatgaaaaatttaaaaaaaaacctttaggcgacgaatgagcacagtgaatattattaataataataacaataaaaattaataataatattatttttatttgcaaatttttgaatccaaagaaaaaataattattcatttttctaaattaggtaaatcaaaatgattaaatttgtctattatttttttattgaaaataataaaaactgtctttcgttgaattattaaaatgaattgggcaaacagctcgttgtggtgccacgtcaattgatgaatttctgacgcaaattatgttggattatttcagcgtcagaatcgatgaataaatttggttggaattgtttagcaaaatttatattttttataatatgtagtgaaaaataaagatggattttgaaactggcttctcttttctgccttaaattgggcgtcttcccaaattttctggtcgcttttgggccaaaaggctctgatccgatccgtttctcagacaaataatctgcaccattggcagaatgtccacagaatatccgcttaactgtgacggataaattaaaaaaaactttcttttgctttatttaaattttggaaatataaaataaaaaatccaaaaagaaagaaaataatgattttaaagaacttaaaaatgatgatcaattgctcttaaatcgccaccaatcatttgtttttcggcgtccgacttcgcagtgatcggtcgcatattgaactaaataaaccgaatgtttcagctaattgggccagttaaagccatgaagggagggtgccaaactgctgccggtgtgtgccgtgtactcctctcacccgtagtctttggtgccgatcgctactctgatcacaccgttctccgtgttccaccgcttccgtccgatcacttccctctcccattgtgcccatttctgctcattgcgctcaatcggcgccctttccaacagccaaaatgagtgccgacaaagccgcgcagtgaaacgctccaaagttttgccattttcaagaacaaaaggcgtaaaatcggcaacagatgatgaagcgacaggggagggcgaacaggcggaaaaagcggacaaacggacgacgaaattaacgggggaggaggagcggaggaaaagctgaaaggaagtgaacggaacaattaagaaattcaaaacgatgcattaagccaaataatttaaacaataaaaaactttatgaaagataaaatgatcaaaattacgaaatcgaacaataaatcaatttgaaaggtattgccaattttgtgagcccacctctttgagttggtgcacactctctgcgaatttgctctcctccgtcacgcatttgagcaacttcggccgtccgtccaaccgcggcgtgtgcagccacgcgcacaacgcttg

SEQ ID NO: 18647 - DNA, 1636 bp, Heterodera glycines
ttctctctccatgttcttcccttacccttcttcccgtgctgcggcgtcgtgccgttcgttttgctggtgtttcccgtctgatgttgtgatgggtttaccacggccactttcggcttatacgcttgtcccgttgaattctgcacaacgcctggggctaaccttcgcacattttcctgttgttgttgttgctgctgattctgttgttgctgctaaatgtaaatgtttcttaattaatgaaaatgactcggtcataaaaagcgcattaagcggcggaagtcggtaaaacaattgttgcaattagtccatgtccccgaattttttcgttgttcggctttaactcaccgttttctgcgcagccttctgctgactctgctgcaacttcttcaacatcatcagcttggcctcctccaaccgaaggattgactccaactcgcggatttgcatttcgcgctgtaccatcacttctttgggtacttcttgtctttgtgtctgtaatagtgtggatgaaaatttaaaacgtaccacacgaaacacacattttcgtaacgttccctcaaatcggtaacgtccgcttcgttcagcgacgaaatttcactttcgtccgacatcattaccacgtcgccttcggggtcgagacgtatctgtaccaaatgaatgggttaagaaattgggctctttttgcttcgattgtgtgcttacgccaaatttgcagtcgtactggtctaactcttgcccatcttccaacttgcgcttcaactttcgcttcagtgaagagatgcattgctgctgagaaagtgtggaagcgtgttcattgacttccatgtcgcgggagacagccacggcatcgccacccgtacgatgttcttggacctgtgattagaggatccaagtgaatgattttgttgtaatctccccatttcccaccatttccaattcgtcgtcgttgtcttttgtgacactgtcagcgctccgttcggattccgtccgttcgttttgctgcgtttgttttttcgcgttcagtacggagacgcgcgttgaacgacgcaacggacaattcggagacaattgctgctgctccgttaagtcactgtcgtcgttgggctgttgttggcttcttgggcttttgtcctctgtctttttttggtctgtcgtcgtttttgttggcgtttcgatgggattacggtcggaatagtcaatgctcgttgcggaggacactttctggattatgcagaattattaattttccttaatttatgtataattaaggcaattcgataattttttaaggttgtcttgggcctaaaaaatgccgtctttggccgaatttatattttaaagtttgtggtcattgacatacataaacaattcaaattagttaatgaatcgattgcgaacgtttgagagaaaagtaatgggaagaaaatgaaataggagcaatggacgacatcgattgccataaacgaccttttaattaaggtaaggaaggcattttcaaataagaaataagtaacgttgtgaaaaggccgcgttcggcttggaagttaaagatttaaaatagatattcgtttatgtaaatgaaaaatggtaaaaaatgttcaaggcatttaacgcttttatgtttaagtgaagtgaaatg

SEQ ID NO: 18648 - DNA, 897 bp, Heterodera glycines
  unsure (1)..(897): unsure at all n locations
gatcagaagcagcacnagcagcaggagtacctngggacatggctgccctgcgtgggtgcaaagcaanagtcagtgctgggcaagccgaacagtgcaaagccttntagtaaaagccaaagccgaacagttaagccgaaaaggacagataactgaacatcaatcagcctcaaactccttttatgaacgttattctcaaacaatggcactgtttctgctttcttcttcgtgtgccttgtcgccttcccttttcccctgcttttccaaatgcttattttgccggatggctcttcgcattttgactctttcttttccccactgatgttggccctgcaaagggagtgagtgaagcgatataatagatgccgtgtgaataatgtccgatgtgagttcagacttagagagtgatgaggcgatgaaggtggggaaagggcagggaggggggacagaagaggggaggggggactatgggctttgcattcctcctcttattcttttcaatgcattatatgtatttgctttggcttattctgcgaccggacgaccaaaaagcaatggcaaaagcggcggatggatttggttgggtgggaaggcgtgcgaaagaagcggggaggcagtgcctaactttcacttcattacatgtttgaattttgctcggaattggtcttctatctatctgtttgtgattgactaactgcagcagacagttagcatgggagtgcgaggggggggcattgcttgaggggcattcgggaagcattggataggaaagggtagatggaggaggggaggggaaaagggcggagtggggattgtgcctgtactgctccgcaaaatccaacgaccaagaacagcagcgaggaggcaccgcaaattttcggtgatttagccngaagcgtt

SEQ ID NO: 18649 - DNA, 1550 bp, Heterodera glycines
tgaaacgaactgcaacgtttctctatagtagtataaacttttgtgtggcgcagtaattgctcggtgtagacagtatactttgcacagtgattgcacggtgtagacagtatactttgcacagtgattgcacggtgtagacagtatacttttggtatatatgggcgggcgctgacatgagcgcttcgcgcaaaggacttcgttgctagtgcatgcgcgattttgaaaagaatttatggatgtgataagggattttggtctacaggcatcgcgaggacgcattcataattttgtggaggactttcggccgcttcgcggcctcaaagggcgctccgcatcctttttatatttaaggtttaattcggccgcttcacggcctcaggacgggcgcttcgcgcccgttttttaattttttgggggacattcggccgcttcgcggcctcagacgggcgctttgcgcttctaaatattgtggattgttgggaattttcggcagcttcgcggcctcagacgggcgctttgcgtccgtttattaattttgaaggcaacattcggccgcttcgcggcctcaggacgggcgctttgcgtccgtttattaattttgaaggcaacattcggccgcttcgcggcctcaggacgggcgcttcgcgcccgttttcaaactttgtaggaaaattaggacgcttcgtctttgtttctttagaagatagaaatcccaaataaatcccataataagaggtgtaacagtgattagaagaggtacaaaagtgatagaagaggtacaacagtgattggacaaaagtgatagaagaggtgtaacagtgattagaagaggtaccaaagtgattaaaagaagtacaacagtgattaaaagaggtaccaaaatgattaaaagaggtacaacagtgattaaaagtagtacaaaaatttaatgcaatttattataaattttaaaaaataaattagtcattccttttattaattaaaaagagaattttgaaatgtacaagaattgaatatttaaattaatatgaaattaatttttataaattcaattaaaaaaaatatgaaattctttatttaaagataattattattttttacataaattcttttattattaatttacaaaaaatctttaaatataaattgatacaacagtgattagtaaattcattaaattaaaatgaaaatattttttaacaaatttaattaaaaaatacatgaaattctatcaattaaaaaaaaaaattaattttaacttataaaatttattcatcaaaaaaaaattaatttaaatataattttttatttattaactcagcaaaatattttaaattaattaaaatcattgaaaataacgtaaaaatgcacagaaaaataatgtacatcgatcggatccgaacttcgccccccccccctcaaaatgatgcctcagaatccccaatcacacagggattctgagggcttaacgatgtcagaagtgaaatctgattgcatattcgtgatcagcaccctaaaatgtccctaaggacatgtttttggaaggtttt

SEQ ID NO: 18650 - DNA, 1599 bp, Heterodera glycines
atttttcattcatttcatttcaacaccattttgagctttgcttgttgctcattataggccatggatggcattttgttgcccccgccactgttattgcttgtggcacttgtgccggtggttgaaattgtctttgttgatttgtctgcattttgttgttgttgttgttgttgctgttgatgaacacttccttttcgagctgtcgtcgctggctgatcgaccttaagaatgttacatagcaataaattaaaacttttttttttgataaaatccattaaaaaaggaaaaactaaaattttttgaaagatttctatgattttttttttgaaaaaaattctaattttggaaaataaaattttttgtttcgcgggatgggaatgatatggcgggcaaacgacacagtgggtggggcgggggggcggggggggggaaaggaaacatagggccccggaaacgagtgagtgcactactaacatggtgctgcacctttttgcgcccgttgccccccgccgttgagggcggcggcggcggcggcactcttgctgctgctgctactggctgtcgccatgtttttggtggccttgttgccagccgactgttgctgctgttgttgttgaacagttggcacaactcctccactggtgcttggtacttggtgttgttgctgttgttggacgcgttgcgcttgtccggcgccatcctccagcaacatttcaatggacgcgggcccactccatttggcggtctccagcgtgatacaaatctcgaccactcgccgcaacagaatgtgctcatcaattggaccaacctatgataagttatgttttatgacttgacatgattttatttactctatcgccggatttacgacaatttagagaacgggaaaaattaatgataaatttaatatagatatttaaattatacacccttttaaaactgtaccgattcaaaaagtttgggcaacagtttgacttttccatgaatgtcctcaaggccaaatttgtcgacaacaatgagcaagtgttcgtcatgcgcttcagtccatcctaaaaaaaattgtgaaaaaggcatcatcatttttagtccaagtgtatccaatgggccaattttattgtataaaaatgggggccaagtccccgacccatcggagacgaccggggacaggaatttttgtgggcaattttaaagtttggatataatcgggatttagtagccgaaagttttgatacgaatagagagagataatagagagatgtgtatcgagagtagatagataaagaggtagacatggagataagtagcgagatagatagagagagagagagagagagataaaaagagtggtagggagatagagagatataagagagagagagagagatagaaagacagataaagagatagagtataagagagggatagaaagacatatagagagcccatacaatataatcctagaatttcgcgggcaggccacgtggtcgcaaaagtcgtcaatttaggacccaattcttgaaatgttagggtaactacagtaaccaacaaagtccccaacgcccccaacgatggcataacgtcgagcgcgaccatttgacattc

SEQ ID NO: 18651 - DNA, 2513 bp, Heterodera glycines
  unsure (1)..(2513): unsure at all n locations
actgaaacagtgaatttcattatntgggataattaaattcgattctttttttaattgccctattttattttttgctttttcccttcacacacattgggccgagtccgaggtgggatttcggtgtgctcttttcctatttgtggttccattcggtctgaaattctcaatgttttcctcgtcctcttcctccgccgatgtgtcgtcctccgacacactttttgatgagttttcctcaatttttgttcccattattttctctctgctgttggccattgcttcgatcagtcgcatagagtgcttttttatttatttatatttccaaatgaaccttcaaaagtttgcggaatttatttatgtgctgccattttttggaattaaatgttttgcatattttgggagggacaattcgagaacaaattgaaacttccgtcctaatcccgattggcggacgtcattaaatcacacaaccacacaacaataaccacaacatcagcaccgatcacgccaatcattttttgctttttagaaaaaaatcaaaatgaattaagtgagtgcagcaaaaaggtcctgaaatatgtgcatgaattattttttaagtaatattaaattaaaaaatattttatttatataacaaaatggaagaaaaaacccaaaaaacgatgggtaataatgggccactacttttggccctaactcaaattttatggcccaaaatcattggggacgggggcaaaacgaatagaaaattatacaaggataaaagcatagcaaatttagaaaaaataaaataaaatgcacttaaaagtgttaagaattcattcactgcgctataacggaaaagcgaaggcgtgaaaggggaggggataaagcatttgagggacagacaaacattagcagacggagggacggattatcggtggagaagccgagccgagaaacggcaaaaagcgaaggataataattgaacggttactcaaattcgcttctttcagtgccgatctccggcgggggacaattaagcctattagtctgcgcaaatgaagagaactttaaaattgagaaagaatcatgaaattaatattaaagaaaacattttaaaacataattattaaagatttttttcaaaaattattagacaaatgcaaaaaaattttacgttcagagttttgagtaggtctgacttttgaggctaagatttgctgctcgcttcttctcattattccctcggtttcttttgtttgctcagtccgccaaatttgtggcggcgtgccgttgcactgatagtcatgggaacgtaaaagccaaaattagttttgtaagcacaaaatgagagagagagagccggggagaacaaaaaacttttagtttcggcaaacccaaaaaaaaaaaaattaattgattttattttttattttatttttttgtcattttctaacgctgtcacgcggcggttcgcttctgacagtttcggcgtacaaacaaaagcataataaaatgcactaaaggacgaaaatgggaaaatgaatgaattgctgctgaattgcccctctgtttgtgctgtgatggggcgggggctttgctgagattttggctaattttggtgcgttgggatgcaataagtgagctatttttagaccgtttttttgcccgttggcgaatgacgtgggacaaaaaatgtgcgggagaatgtgcgcgcccatcgcatcgaagcgaagcggcgaagggaagtgacaatgcgccatccgccgctgtttttgtgctcccccccccccccccccccccccggcggcgcgtcttctctcttctcataacattccgttccgccaaacattgggcaaacggcgggcgaaaaatgtgggtttctgcgcgaaaacatcgcttaagtgatgagggaaggccaaaaataagccaaacattggaaaccctcgaggggacgtacggtcatcaggcaaattaagggggacggagagggggggggggggaggggaaaacacagaaatttatgcttatatcgataagaaaagagaaacttcgtgcaaagtttcgattaaatccaacgaaatagcggaataatcaaagcctttgagggagagcgcttttgggttggcggagtcatcgcaatgatcatcacaaaggctattcagccaaacactgaaaggatttaataaaatattatataaatcttcagttgtgaaaatatgtaaacaatggaattcgattcatttttcatatttttaaaaattttacaccaaaaaaggaagtgagctattcctactcaccttatcacttcgctgtcctctgctttggattagtacccttcgaaatcaatgacatatgattttggagggagtctaagaatgtcataaattatcgtacggaactcacaacgacggtcgatagaaaaaacggcgccaaggcatttctaaaaaattgacacaaaaattgctgtggtacgacacttaattcagaatcaaattttgaataaatctagaaaaaacctgaaaagcactgat

SEQ ID NO: 18652 - DNA, 2526 bp, Heterodera glycines
tcttcctcctcctcttcctcctcctcttctctctctcccatttttgttttgttccgcatttttcacctttaattatgctgctgctctgctgttgatgacgatcatttgcttgcgcaacagatggataataattaaccaattaatttgtcatggaatttctgcattttttccctcctccgttcgtccgtcctttccttcgttcgttcgtcaaattcccccccccctccccccaatgcctttgtctttctttgctcattccctcccaaaatgacgcaattaattcgcttcccataaatctttctcaaacatcaaattaagccgaaggataaaaatgactcaaatcccttcctttgccccccgcgggcattcatttgatcgtttagtcaaaagagcccaaagtattatgtatattttaatggtttgttgtaattaactaatggcaatgcgaatttaatgccatttgggcgactcgccgaaatttcacataaaaacattttctaaatatttttggaagaaataataaattttattaaagattatttttcaaaataataaccaaaatggttggaattgaatttgtgcttctttctgtggattataatgaaaagtctcttcttggcgcccaaagtccattcactaaaatttgtgaaaatccaaataacaaaccgaggccaagcaaaactacttactaatagccacacatcaaaatcccatgaaaaaacatttggagcggtgaaccaaaacggaccataactctctttttcaaatccattcgctttggctccgaccgttcggtgccgttgagaattttgtatttgtcgacaaattttacaaagtttgtctcatctcttgacaagctttgttcatttgcaaaatttcgttagggtagagcaaagttatggcaaaaacgtcaaaaattgacttttttgccttttcggcaccgcgtgccaaggacgggcgaagctcggttagcactcgaagccgaagcttcgccgtccctggccaagcagtacccacccgcttgtccaccgaaaaatgtgatgagaactcagatgaaatgaattacacagagaaaaatcaacatcaaagtttatttcagctcattaacagccgatggggtcattttatggtacgattttaaaattaatttttatttttcccaatattaccgtatcccagccaattcggcgccacaatgactccaccgtcgtcccacgcactgccaaaccggggacggactctgtcgactcgtaaatgaatgaatggtacggtagtttcccggcaggcaaaaagcaattaacaaacgcattttattgtttattttatttttactttaaacaaatgatcgcggttcgttcacaaattgcgtttctttgctaatttcccctcagggctttcactcgcaaattattcactcaaatggaaatggacactccgccgacagctacaatctgtccaacggactttggcaggacaaaaagacgaaaaggaggcaaaataaatttggaccgtgctgtaattaatttgatattgtcactttttcaaatgtcgatttttaatgattttatgggtaaaaaataaaatttgtaaataaaaaatctggcaaaaatgaattgattcgtttggatttgttggccattaattcgttttttgctttggcatttttggccattaattggctttaattggggaattaataattcgcttttccgtttttttcgctgtgtctttttttcttttcgaattctttcgcttttctttttctccgatcattcgctcctaatttggcttctgttggaatgcgttgatcacttttcttttttctttccatttgtccgccttttcttcgccttttgtgtcgtcaccgcaaaagaattacacaaaataaaatttggtcgacgaacactttttggaaataaataaatggaaatgaattttttgtccgcccttcgctttactttttctccccccccccccaaatttctcctttttctgcccgccgctcctttcgttgctaccgtatgtccgtgtcgaccttttgctgtaaaacgccctcctcatactccacacccttttctactactctttctcccctttttctctttcccccctctctttttctttttttcctttttccccctctctttttctttttttctcttttcccttttcccctctctttttctttttttcctttttccccctctctttttctccttctgtttgtccttctcttctttaaccttttaccctttcgtcagcccctcccaaattccttctgtcgttttttcattttgcgttcctttcttttgcaaatttaatcgcattttaattttaatgagtatttcgactcccccccccttattacgttgccgcaacttcggtcacaaaaaggaacaaaatggtaaatgaaatgagtgaactctccccccccccccgcccctctgctcatttccattttccactctctcatttttgctccgaccatccatcactccgaccgccccccccccgttgcagtcgcta

SEQ ID NO: 18653 - DNA, 3006 bp, Heterodera glycines
tcaaaaagctaatacaataatggaaacatttgttgaaatagtcattcaccaacactcaacaccagaaatagttgtaactgatcaggggcgacaattcacttcagaattatttaatgatatggcaaaaatttatggatttgaacattgcacatccacggcttaccatcagcaatcaaatggccaaattgaggggtcaatgagaattatggcaaacataatttcacaaatgattaatgaaaaggggaataattgggacgaagtgttatcccatgctttattcatttacaattcctcaattcatacagtcactaaacattcaccatttttccttttacatttgcgccacccaaaaatgcccactgatcgcttacttaaactccctaatcaggaagaaatgaattcagacatttcaatttacaccagaaatcatgtttcaaaagctgtgactgcttggaatgcagtcaaagaagcagtcacaaaggctcagattatacaaaaggacgaaaatgataaaatcagaagggcagaggaaaaagtgattgaaattggtgatttgctcctactaaaaaaggaagttttaaagcataagtttgatcaacgatgggtaggtccattccgttgtgtaggagtcgataagaccaagaaaaatgttatcatacaacagatagatggaaaaggaaaattaaaaaaggtacaccaagaaaagattaaaaaattcaacgggccggcggtccttccgctaagagaggcggatgaacccttaaattgggaaaaatacgcaaatgatccaaatttggaacaagaggaagctgaagaaagctcagagagcgacaaggactcagaaattttagaatgtgaagagagcaaaaaagacggtgaaaataaaaaagagatcaaaaattctttttccaaatttgggtttgaaagtagcgatgatgaaaatgaaatggatcaaaaagaaagaattgtgtttgtgagaggtacggatgaaagagaaatggaggaaagacctgaaattttggacccgcaaatttgggacattgagcagcctatgccttgtacaattactgaaatatttgtagaaggggagtttaaatgggcttatacgagttggccagaggaaaatttgattcctttaacatcgttaattccaagcaattttgttaaagattactgggaaatttacgaaaatgcctcaggcaacagattcttaacagcatggttgctcgggaatagctttgagttatatttaaatgatgaaacggacaaaatagtcttgggaatacaagttcaatttgcattaaatgacatatggcactcaagaactgaaagggaaattgagtcctattgggaaccattaggcgaaatggacggtcaaacattagaaatacaaagatttcccgacttaacaattacccataaagaaaatttggaggaaaacgaacaaagaaataacatattggaccaaacgaacattaatgcaatttgctacaaaaataataataatgataataaaattaaaaataattatcaaaatggtcgtatggaacaaagtataaatgtgattaaagaaggggatttgtttatgagcatatttgatttaaatgaagaaataaatcaagaaatatatgaagaaaaatcagaaaaatatgaacaagaaacaaaaaatgatggtgacaaaaaagccgaaataaatcgtgaaaatacggatttcctaacaaaaaaacttaacagggaatcaatgacctcgccaaaagcgcctgcaatggaagcattcaatgaggagcatttaatcgccgaggaaaagaagttaaaaagtgaaattgaggagttaaagcggcgactggacgaaacaaataatcgaaaagcggaagcggaaaagagaagaacagagaggaatgagagaagacagatcgatgagatagtattggatgtggaggaagaagaagaggaggaagaggaagaagaagaattggccagacaggcaaaaagggggcgcctggacccattggaaacaaaaaaattggtggaaaaaacgatcaatgaaaaatgggaaggccaagagctggtcacaattgacccacgggcggcaggctttaaagagcccccagagggaactgacagccggggatgggaagacgcaatcaggctgcaaatgagaggagaaagagaaaaaggatggagagaatttttgtcgacgaaaacgtcgctggatcaaatgaaagaagacagattgaatgtgatgggaagagcgggattgacccagagtggtcgaagaatggcagaaaatagtgtaaagagtgcagagaaaagcataatggaaactgaatgcattctgccagaggggaaaggaaaacaaacaaaaccgtggaacgaattggaaatgcaacgggaaagcacagaagacatggaaagaagaagaaaattcgcagttcggaccccgccaaactcggaaccttttgcgaattccgggtggggagaaatgtcaaataacgaaggaaccgaaaaaatactggataagatcggggaaatgcaaaagaagttgaacgaagtcaataacgaattaaattggttggcaaaagatgtgcaagaactgagccaaaataaaggaaatgagataaaaaaaggggaaaatggccagcaggacaattgggaaaaaggcaacacaaacatccctttctggagacaacatgacgacaatcgtttccgtggtcgtggcacgggcggaaatcgcgggcgcgggagacaacgcccatttcaatatgggtggcgaggatcagatggatggaaaaaaaatgatcagcaccagcagcagcaacacaatgacgaagcatgcaccagcagcagtgtcactacaactcgctacaccggagaggaattcacaagaatggcaggataccgtgattgaagaaaaccaatttttccaataacgcttatatagtagggaagacggttaaaaaaaaaataaaataaaaataaaaaataaataaaaataaataaataaat

SEQ ID NO: 18654 - DNA, 2318 bp, Heterodera glycines
tccgcttgacttttgttgccccagcactgacccttctccgcctgttcgctcgaatctcgtttacgtgcacggaattgtggactacatactcactctgccttcgatgtgtattgaggaggttcgattttttttttttgggcaaaaaattgcttggaacgctttttctcctccattgcacctataatttagaaaaattaacaaaacaattctggtcgcgaaaagcacaaaaacactctcagctttcgaccctctgaaatctttcctgcttaccatagggcgttagtttctccacgtactcttgaaaaacttacgccgggtttttttttggagagcgacttaaactggccaatttatccaatacccataaaatttcaacgtcacacagtttaccgccgtaccagcccctcaacatgcgctgttctcggttcgggacagtctgagcccagatcagttggcactgtatcgggccggacagttgctgttcaggttggtggcactttttaaaaaatatttcgggagggcgggggggggcgacacgtgccaccactatttcggtacacttcaaaacgtcgcaactgaaacatcgtgggacataacgtcaccacaaaaataaaattttcaacagttttatgaaaaaatttaaaaaaaatcgtcttaaaggcttttttttgaaaactaggtgttactgaaaactaaaatttctgaatttcctgaaaaaaaacaaaagggtaactaataatttttgatttttttctaaaatttttttattgtttttgcggcgacattttgtcatgctccgccacattggcattattgatgcccaattatactcactgatgtgcttgctgctttcataggttggacgagccgactgcacggaagggcatgttccgcgttgacgcccgcacgggcgagctgtacatggaggcgagcacggcattcaacggcatgccaacggaggagacggagcacgagctgggcgtggaagtggttgttgacacacagcagcaacaccaacaagtggttgcacgacggacattcacggtacgcttggtacaacgtacaacaactgcaacggcgacgatggaaacggcgacgcggacaagatcaagcagtacaccaacaacaaccgcaacaccaacaacagctgaacaagagagcgatgtacggagggctaataggggaaatgtagcccggaaaacgggctttttgccaagttattatgctaaatcccagtttggcatgacgacatttcgcccactggacatttcgcctactcaggcaaaattggacaaatgtcttattttgacttaggcgaaacgcccggttttggcttacaaattagtaggcaaaatgtcagtgggcgagctgtcaagtagacaaaatgtcggcgtaagccaggtttagattggaaccttagaccaatcccaagggtgggggaatggcaccaaatttcggtagaccgacaaacggcactgtttagcccagattaagcctaagcctggtctggaaatcgaatatcccggactggcttgtcgagaattgcgatgcttaattttatttgaattttttaggataccactgctactgcaacggaaatgccaacaaccatgacaacagtagtaacagaaacggcaccaacaacaacaccgagcagtagcggtagaacaaccacattggttgaagaacaacagcaacagaagcaatctgttgatggtggtggtgataatgatgaagaggaaaggtgtggatgaaaatattttcaagttcgacaatttgacaaaaaagcctgaacctgcattccattttggatttgatgggcctggattttctgcgtaaaaatccaggtccaggaaaatacaggcatggatatatgcccagatcggactcaaaataattatccattttttaaatgaattaaatttgattccccaaggggaatgcaaccattagaaaagcaaaagtgccaagattggcaattcatttcgaccctttagggagtgccacaaaaaatttggtgacccttccccatagagaatatgccgaaaattggcaatcgatggcccaattatccatctaacaaagtaataagtggccatgaattcaaaatttagcacaattttcccggacgagttggacgacgaaccatttggcacaacgacggatattttgccggcactttcagcagtgccaccaaattcttcagaggccagacgggcgccaactgcggcaccgttggtgccattaagctcctcatcagtggtgagtatcagtgatcggaattcattgtgcctgatcaagaagaataatgcactgga

SEQ ID NO: 18655 - DNA, 1058 bp, Heterodera glycines
  unsure (1)..(1058): unsure at all n locations
gtgaaactaattaaatcttaaaaaatattaagcgaattattggggaacggcactacaacagtttgccgcagtgaggccaaattttctatttggaggagaaaaaaagattgaatctttgcttggcgttgtggaccgattaggcacaattgcggcatacttttttgacccaacttacgcagaagaattcaataacgaatttgacaaattgtttcaagaatggcccgagccaaaattaattaacgagacggaagtgagtggcgaaaaaacaacatttggccaaaaaattattgaaactgttctgcaaattagaaaaaagtagtccaataaaaaaggggaaagaaaaggttgaggaggactgttcatcagcagcagaacaggaatcactcgtcatagatcgggcaaattttgaaaattttttgaaagaaaatttggaaagcctaaaaacggaaatggaacggcacgccagcgcatacaaagtcaatcggatttatgaatggcttttctcaacgtctacaaaccaacagggagttgaaccactcgatgatgacgacctgctcatcgcatttgtgacgagggacagtgccaattttggccaatattgcatggaaatggaggaacacaatttgttgatgcaagtcgggttactgttgaggcgtaagggcaagggcaaatacgatattgacgagacggtacggtatttggaacaacagtatgaagcatatttgggcgcaatgtatttgttgagaaagaaatggaattgtgacggaattaaagatgattttctcacatgggcagaatgtgacagatttagaagctatttgatttcattgtatcaattcatctttcgttaaatatctggagggtaattaattaactaattaaataatcataatttgttttacaaaatagctaacaatccngtcgttggcacgacaatttgcacaaatgagtggtcaaagtttcagcttggcaccaaaatgaatgtgacattaatttgacggtgtggacagtctgccccaatttgggcgttctttttttgattatgattacggccaaaa

SEQ ID NO: 18656 - DNA, 1494 bp, Heterodera glycines
ttttgtccggatggtatttcagtgccatgcgccgatcctcccctgaaatttgttgtggaaaataaagaaacgtcaaaaatttttttttaataagtttagtaaaacaacttttgatgtcttcgtcagtggccgtttttggcagggccaacagctcatacaaattgcaatgcgtggacagactaaaacaaatggaaattataaatttcctttaaattaaggttttggaacccctaaaatatgtaaaagtttgagtcccaattttctctagcattgtacaaatgtagctctgtcagaatttttagaaaccaggttttttgtttttaattcgaatcatgattcgaatcaattagaatgaaaggtaaaatgcaatgatcgaccttggggatccaagcctagatttatccaggaatcaggcccatgccattttcggcaacctgcatttttcctaggcctgtatttatgtccaggaaatccaggtcctttttcaaaaggtcgagctctagtaaaatgcaatccatattattgattgtaattgaagctacctatcctgggcggagactttacattcttccaaaaacattcgtttcgtgacacttacgagtcattaagtcctcttgatgaacgtcggcgctgacggcgtgcattgccttggtcagtatcgggcggcatttatgcgaaaatggacgaaaaaatcggcttttagatgtgttaataaaaacaatggcaccgcacctgctgtacgataaaccaattcatattaattttactttacacatctaataaaaaaattcttattttaattcctcctatatttttcgcactttttcatcgaattttaacaaacaaaaattttaaattaaaacaagaaacttctgatgggtgttgaaattgtcgtgcgttatgcacatgcattaaaatgtctttccaaaggaattggctggcgtaaaaaacaaaacgccaaaatgcctaccatttaaattactacataattcgcgcatttttaaggaatttaatgataaatttattacgtaaaaatttctcattgaaaaacaaaaaaggggctcttctttcaatcatttatcatcaattttcccatcattattattgctgtccttttccatcgacaatttcttccattcttttctctgatcctccagctcttgttcggcttgcaaccgccgctcctctgccgcggccgcaaatgcgttctgtctctcctctttgtctttctgaaaaattaaaaaaaaatttaaatttcatttcatttccatttttttttaaattttcctaccaaaatcttttgctcaagctgttcctctcgcattttcagcttctcttctcgcagtgcagtgatcgctttcattgcatgctgaacaacaattaattaacattttctcaccaattgcttaattggttctatctattatatattaatagttgaatttcgtatttaatttgtttccatgtcacgccgaatttgtttttttcattttc

SEQ ID NO: 18657 - DNA, 3012 bp, Heterodera glycines
  unsure (1)..(3012): unsure at all n locations
cgtggtgcgacatttgaggacctgacatttgaggacccgacttttgaggacccgacatttgaggatttgacatttgaggagccgacatttgcggatattcccgacttttgaggacccgacatttgaggatttcaaggaaaaaataaaaaaaatttcgaaaccatagtgcgaatcctaaaaattttgttgtctgctttagccagagttaatttttgaagtgaaacaaattatgaattttgaaattaactctgtttccagacccaaccacgtggaggcagcagactttgagtccatacaaaccacaacacaaaaacaccacaaaattaagagaatataaaatcttcacaccaaaatttttattaagtgcacctttcccaagggccaacgggaacatattcacacaaaactaatttagggacactcaaatatctcgagccttccttaaaatgatgaaaataatttaatttgagaatttttgttggtttgtccctgatgacaaaaacaggacaaatgaaaaaatcagaacaattataaacgtttttcacttaaaagtgaaatatttaacattaatttaaaatagggttgggcccccgtatgtcggggttgaaaaagtcggggagtgataaaaacttcaattccaccgcttcacacaaattgatactcgaagaccaacgattaagcgaggccaaaacaaacaaatttattaaaatcgaagcaaaataataaaaagaaaagtcggaggcgatgatgagaaacaaaattatccaaaccaaaaatcacaaaaaaaacaaccaaaatttagaaaagatcaaaaaaaattaaacagaacgtcaaaattataattatttaaattaataatgaggtcacttatcacatcccgcccctttatgagcggcgtccctgccgtcaaaacagaaaaacccgaattcgactgtcaaaaggtggggctcgtctgggggttctcagcttcagcgtctcggcacaaattcggaacggcgttggatcggagtcgaatggtggaagggccctccgcgcatgcgctgatacggatggaattgagacgacgactgaccacgaaatgaaggaccagggcggtgacctgcaccaacccgtccaaaatgacttttctctccataacttcgcacattcacagaccgaactgaattttgggcatgctcagaagctgaatcggatagagaaggggaaaggtcacctgggcctcctcttttcccgtttttctcggaccaattgtggccaatttggggagggtctgctggacctccacccctcactttggcacctctttccggcacaattatttgcgacttaattgtgtggattccgagttctcggtcacccggaaatcctggaaccaccgccgtgagccatgctttcatcaccttcaatcccttctccgtcatccatccatgatggttcacagtttcattattgaagcttttgccgaatcggaacacctccaataggcttcgcccttcttcattcacagcaatcagctcaatttcgtccttttttcggaaaattgaccgcattcttccacagaactcttcggattcgttctttttggaaaaaatgaacggcggcaacagccaaaaggttttcacgtggccaaattttgagcacaattggcggagtctcttcactctttccatcacactgtcaatcgcttcgcccgccaaaattgagtctttgccgaccatcacgaccaaccacttgacttttgatgacagaatcacttcatcaaagtttctgatcacttccgccactgagcctgcttctgctccaacaaattccgacttgggccaaatcttcattagttggaatgcgcctgaatcgcccaaaattacacgctcttccgtaatgagccgttttctgtgaattgaggccgcccggattttctccagctgaaacccggcactttccatcgcctttttcagcccttctctttcgttttccggcaaaagggacaggccttcgggcacttccattgaaattggacccatgccggtcattttcaattcctcattcacgatttggcactgctcggcccacacttccaatgtcttttccacgtctgattctgacggaaatgcgccactttttacgtcgtcttctctcaaactgcagtaagtggctaactcccaactgacttcggcctccaaaatttgcaaaatcagcttctttccggccgatcctgatttcaccgcttctgacttgagcaggaaattggcgagcagggccttcagcggattgtcgattttgagaagccccattccagaacggtccaaaacagcatccagatcagccattaaaaggtccgcgcagtctttgtgctgatcaccagtgcaacatgtgctccaggaaatcacttttggcgtttcggcttcatcttctcccagcacagaaattgtgtcctcctcaatgtttgcctttcctgtctgctgttcggtttccattgcttcgtccgtaccacctaaaaaatcaattgccctcaattgaaaaacacttctctcagtcgttttttcgtaattaggcctaaaattttggtctatttgttgacactctttataaattaatgttgccacgcttattaagccattcaaaatatttttgtaaggattccttccttttggtagtgaacatatgtttggcaattcttttgggactttcacaagtcgttcgattgggactaccatagtacttccattgggtttatctgaaggcattactgtagccgttgattttttaagctcaacaattcgaaatggtccaaaatgattccatagtatctttttgtgaggcgaacggctgtgagatcccggaaaaatgaccatgactctatctcccacactaaatttgttctcggtgactttggctttggcatcgtaacgctctttcattttcaaccgactncattctgaattttttcgcgcttcatccacaagctgcctaagtgactcacggaacaattgaatgtatgaatttttatcaatt

SEQ ID NO: 18658 - DNA, 2465 bp, Heterodera glycines
atgattatggtattgagaaaagggataaacaatagaaaatataaaatttgtgaatacggtattaaaatataaatttcgtattgaaattaaaattaaaataaatataataaaataaaaatgctaatattttcagaaatgaattatgatgaattgagtattgtgaaggaaggagctgttattatgataaacgatgaatcattgactgatcagcaacagttgaaggtggaaaaaataaaaacaaataaaatgaaataattataataaaatataattttatatttatttttacatttcaatgcttttctgttgttcgttctgttgatgttccatttcgaccaactttttctgcaattcctccaaattcttctccaattgctcctcctttttgtcaaatttttcctgcattttctcaatttcatttttcagctttcgattctcagcctcggcctttaaaaattaaaatttaaacaaaaaatttaaataaagtgaacagttaaaatattcccattaaaactatcgatgtcaccttaaaggaaacttaaattttatttagatttttctttttaatttctttatttttaggtgctttcggttgagagcccgaaatttgtttccactttctgtcttaggatgatttaatatactttttaaacaatcagaaaacatcaaaatggaagatattcaaatctgtcttagttcaatgagtccgaaattttgggttcaatgcctaagttttgagaaatttttttttgagaattacatttttatgcagttgctccaacttgttcatgtactgctccttcttcttctccaattgctcctccttctcgtccattttcatttttgcctgcattttctcaatttcatttttcattttcccattctccgcttcgatctttgcgagcagtgcattcgttttctgctgcttcaacttttcttggagtcccttctaaatttaattaattttttttacaaaaattaattgcaaatcacattaaattttcaaactctttgtaaaactcacatttttgagctcaagtttggtgtttttcaataccaattccaatttttcaaaattttcactcattttctaaaatgtaaaaataaatataaaattatattttattataattatttcattttatttgtttttattttttccaccttcaactgttgctgatcagtcaatgattcatctatcataataacagctccttccttcacaatactcaattcatcataattcatttctgaaaatattagcatttttattttattatatttattttaattttaatttcaatacgaaatttatattttaataccgtattcacaaattttatattttctattgtttatcccttttctcaataccataatcataattttcttaaaaattcttccccttcatttttttcttgacaaattttgatttaaaaatgtccaatatttgctaagaaaatagtcaaaggaaatgtacctcatttacaactgcaactagtgaataaaaaattacttttgcttaatttttggctgaaaattatgccaccattcgtccttatttcggacttttcgccactattttggcattttttgtcactatttatttaattattttggcatttttttgccactaaaaaatccgcgccctactgatgatgatgtagagctggatggagtgggagatgatgatgaattgctcatttgttagcattttttgctattgtttttttgaaaaatgcattaataaagttcagcaatttataaccaacggacgaataggctttttataaattaattttatatattttttagtagaatattcaatattcaaattctatttttttcgtcatttatcagattatgctaaatcatccatctgctgttggtacattttccatctcttctcataaatgatcaaccaacaattttagttgagctgtgctttctcccattaatatggaaataacttttctaatgtaaaagaaatattagcaaatatttaataaaaataaatcgaaaaaacaaaaattttttatacatttctttcttttttagtgtaaaaaatgtgccattttttgaatgtgaatttaatccttttgttattcactttgttcaatgtgctgctgaccatcgctcaactgtatttttattattattattttttactgaaattacatttaaattttcaatttaaagttttcaaaaaacggatgaaatgcggcgatgcaaaaataatctgacggacgaagaatatgaacggtaaattttatcttttacaaaaaaaataaatgtttaaaaatttattttgccttttaaatgattgcaggcttttccctaaaagtgccgacaaatatgtcttcccaacgaatacaaatggcatttgtgtaggacttggcaatcaaatggtaattactttaatggatattaaattatcaatctcagagcaccgggactttgtgaaa

SEQ ID NO: 18659 - DNA, 1768 bp, Heterodera glycines
cctaatgatacattattgaattaaaatgagtgccatttataaaaaaaaaatttttattaaatatattcgactcttcttttaaaagaaatattttaaattgctcttttaaattaattattatatttttatttcagtaatttgcaaaaaaaacgtcttttaaattcaaaatttttatattatacccgattgaaatagaaataaaaatttttttatttttgttattttgaataagtattaaattttaagattttttattccccaatcgggctccctatttccggttaattttgatttttatgcttatttctgggtttctcggcatttatgaccccaaaggctcatggatcaaaaaattttacttccgtttcaaacaaatttaaaaatttcggttatttaaagttaaaaaagaaatgattttttcaactatcgccctcccattgtgcccgttgaaccatcattttgtgccgtgccgttgccactccggcacttcccgctgggaggggtggcctgtcgcgacgtttttggcaaacaaatttaaacattccattgtgccatagattataaagaattttcgtcaaattcattcgttcctactaatttggacttaagtttatgaacagaataaacatttaataggtaaaaaaaaaactaagaggcgaccacccaaaaatgggaaaaacgaaaattttgtcttaaaaaaatgttgaattttttaaaacaatttttcatggcacaaataaacaaaacaatcttgaatattttttgtttagttcagttcattcaaattgtttatttctcataattcccggtttcatgacaccgacaaaacattagtcttatggtctaagaaaaaaagactttaatttaaatcccggtataaatcctggtcttgaatatgtgtttacatcaggaatataacggaataccgattttcagcttcccgtttccgacaattttaagctccgtcattcctaaattttttgagcgctggaattccgatttccggcatttttttaattcaaaaaccgatttcagatcccgaagttacgatttcatcattaggggacagaatttcgatttaagaattccgtctttttttctgccctggaattccgaattccatcatttgtggaggagggattccgatttccttaattatttgggtgtcggaatttgcattcaaatttgtatcttggtgataactccattttccgttttccatctctcgttttactctttggtctcgagagtgccgatggtcgtttatggtcttgcgcattaactctttaaaatgcttgtcatttactgtctgggcacctcccccacaaattcgtgtaaaacttttttttttgtctcaaccatcttgactactcatcacccattcaattatcgtgtcgtgccactttctcactcccctgtgcacttcaaatcattttcaatcctcgtgccaaatccattttcttccttggcactttactctgtctcctaaaattcatacattttcggaaataaattttattccctaaaagggtccccgccaaccgtctccataatgttttcatccattttcccgcatcaaatctcgcctcccccattcccgactcaaaaatgcgtgcaatatttggtgggtgtgtgtgtgtgtgtgtgaatgcttcttggaaacaaattggcacagcagagcgccaatctcgcttgaatatttcttccgagagctttcgtcggtcggtctcggcttggccacttcaatttccaattttttctgcccccc

SEQ ID NO: 18660 - DNA, 1449 bp, Heterodera glycines
attttcaacgtgtgacgtgccctattcattagagtgtgtggtgccggcggcgccactttggaaaaaaaatttttgttttgtttattttcttcggctgctgccgaaacatactttttgaagagaaaatcgccagcagcagcagacagacagacatgtcctttgaatgaaggacagaaagtgccaatgatgcattgatttaaatgagacgaaatttttttttttttggattttatgaattaaaataaatttaatgatttttttgttttagcgtaatgtaaaattaaatatcaaaaaatatttaatgaattattggttttaatattaatgtaaaacaaataataaaaatctaagtttgcgttgaatttatgaattagctcaaattttcactttaaataaattttcaaatttccaatttaaaattagtgaaaaaactttaaaaatataaaattaaattaaatttcaaaatttattatattttcatttcccttaataaaataaataaataatattttttcatcaccaaaaccactaacaaattttttggtgggtgagaaatgtgccgtcatcgggcgctgtgccatggtggcactttttcacggtccctccccccccctccaacactgtgcgctcggttagtgccagctttaaatgctgacagccgcatttgccctaacatttaattgatgagcttcccccgcccttatgcttttccttccgcagtggacctccgatgaatggcatatgacgacgacggatggcactttatacaaccccagggggaaggaaggaaacaattttttgaaaaataggttatcctttaaattcaaagttaattttaatttatttttttgaaaaaatattaaaatgtggctaaaacataatatttaatttcaatgttgtaagatcactgatgttttcttgtaaacaacattttttaacttatcaaaatttcaaaattcattttttaattattgaaattgcaattaaaatttggatcaaaatctataataaaatttcttttcacccttttattaagtttttttcttattttcggaaaatatttggtactatgtaaataaatcatttttaattattacccaaaaaaaaatccataaatattttttgttctcatttataaaacaaataaagcgaaacgcgccctgcggcgccttaggtaacgaaatgcgatatttaaaaaaaaattaataataagaccccaataaccacaaccaacagcaaaaaatctcaaaatttgtgcaatccatgatagcaaaattatcgatttagcttaaatttaaattatttatcggcaaatctattaatataaatacaaaaatgtattttttatattttatttttaatacagatcaaaaacaattttcttgaaaatggctaaaaaattaacaaagtcgcgtcgcaatatttatttctcgtcgtcaccgttacatt

SEQ ID NO: 18661 - DNA, 2628 bp, Heterodera glycines
  unsure (1)..(2628): unsure at all n locations
ttgtcttatttttaaaaaaaaaacttgggccgcactggtttttntggtgaaattaataaatcacatccatattttctaaatttcatggcgatgtgaccccattgcaaaagatttatatccattgacttatagtcatgttaagcatcataaagttgaaaataccctttatatttctgcaattttgcaaaaaactccgaaaaaagctttggtatggaaataaaaaattcacattgaaagtttttagcgaagagatagattttcatattgaaaaagtagtacgtcaaaacgagtatgtattatctatatatcggttcatccctttttcaattcagtgtctgtaaactttacttccttttcgaaagccaagcggcattactttcctaattcatgttgttttttaattgtaaattttatttttaaatctatttgggtataggctatgtcagacctcaaatgctgtacagaaaacaaacaacaatttattcccgaaaatcaacaaagcgcggaataaaaaaagaatgtgtttagataatgccaattttgttggccacgtccaaagcatcataatctgcggctaagcgaacgtaggccttctttgtgtggtcgggcgtgatcaaagtgttgagcttagaaaaagcaatggttagataaagagtactttagaaaaaccctagcacaaaaatgtttttaacaataaaattgaaatgattaacaaaaatagtaagcaaaccacatttttccagctacttttcctccaacgcctttgtaatggactttcctaaaaaattctatattaattaaacattacaatcaattttcattaatacctgtgtttttttactcgcggagttgttttttggtggcatttctttagtttttttattattaaaagctgataaaaaataaataaatgatattagcgcaaggattattcacattgggatgggaattaagtcacaaaaacattaaaaactgactacgaaagagccaaatttaattaatttagtatcctgaatttagcctctaaccggtcgaccgagggttggagagaggtcggcgttcaaatttgttatggcgaacttttcaaaaactttatggaacttgggagtccggagatactgataggaatgaaattggcgtaaatttttgcgcgctaattttaaatttacactggaaaatgccttttttgtattttttattttgatcagccaaaacttgcttcattcccaactaaactgaataaatttggtatctaataataaattgatttgtaccattataggcaatagtgaatttgatttttttcatgtgttagagagatgaaattagtacaccaaaatgagagaaaaataaatgtatttttatgttttgttctataactaatgaaataagcgattgttttctgttaaaaatcgattgaaaaattctttatttttttctctatcggtatacaaaatttggtgtagatttaacgtgtagaaaaaaaaaagttaaaggtcacgaagtaatgttgttttttacaccattaaaatcgaagagatagtacgtcaatgagaaataacaaagcaaaaaagaaacgacgagatagtactaggcttttcgctgcacagtgtggcgtacccatcggtctacgtcagttcggcccccacggttcggccccagcatgtttttccactataactctctataacttttttctgtcatccaaatccaataagcttagtatcattcgaaagcttaatctgttttgaagcttttttaattaactgtttaattgggcaataattttgcaacgcacaatctgtaaattgtgaccgccctaatctgtccaattcgccaggacctctcacgggcctaaaacccaaaatgggaaaattaatttattgaaattgagcaaatcgacctgtgcatctgtggatgggttccaatcggggtcaaaaatcaaaacgcgattcgctccggtcaaatttatgccaagtccaccgacttttgtcgtcaataaaaacacaaaaatatctggatccttattgttagaattaaaatgagaaatgtaagaaaggcagcaacaactttgttgaactgttcgatgagagtttgtcgactgccaattggcgttgtgccgtccatgcgaaggaaggaataactgtaataatacggtaatataaataaattaaatgttttttagcgttaaatttgccaacccttcagtgataacaaagctttcgatgatcgaaagcatctggattttgttcgcgccacaaacgcaaaagctcacggagaacaaccattttgccactgcgctggtaaaagccgaattccatatccgaccgatcttcgacattaaagtcggctaaataaagcaaaacgaatggaatgacaatttaaatccgttaaatattttaattaccaaatctgttgggtccatacatgatcaaggagtgcgccggcgcaccctccccccccccccccccccacgtgcgtcgtaaggggtggggaggtcgtttgtgaggggaggagggagccccgaaggggaaaagagggaaatttctgaaaattttggctatttttttagcaaaattcgttaggaattctcaatttttctcccgacggcgcctatcggcggcgccg

SEQ ID NO: 18662 - DNA, 2369 bp, Heterodera glycines
  unsure (1)..(2369): unsure at all n locations
tccactttttatggattttccgacctgctttttttaaagaggactttctatgaaaaataagtttaaatggattttaatattataaaatttcggcagtcggaattacgatgctcagaaaaatccagccatcggaaacgggaattccgagcccaaaatgtcggaaaccgccaatcggaagtcggcattcctacatccttgatccgttctcattgtaatcggttttatttggagtgccatttgctggagtgttgctgtatcagattgtatagggagatagaatgattgagttctcgtcaactttgactttggtcggctgtgaaacacttccttataccgttaagcttttaagatgccatcgaaaatattccagaataagaataatactggccacaaacagactttgttgacatttttgttttttttaattataagaattggcctacggtcccgaggcgagacgaaaaattttctaattttgttataatttcttaatagatttgcataaaaatccaatattatgaatttaagccaaaattaataatgaaactatgcatgcccttaatatgcatgaaaatatattttaaaaaaataattaagctagttttgttgtatcgtttttggataaaactccgactttacaatgacttaaaatgagtaaataacaaatttttaatttttcaaaaatggagttgatagaaaggtataaaatttctctttaaaacttaatttcagttcttttttttattctttccccaatatttcgtcgtccaatttgaccttatcttttcgctccgctttcttttgattttttttatacatttctttcattaaaaggtcaaaatgcacatactaactgctttccgggccgggatcgagaatctgaccgaatcggattgaattccggttccctgattcccagtcccataagtttagggattggtgagacaaatacgaaatcctactgacaaaatgccaaattttgagataattcatcaaatatttaagtaaaataattttatgaaaatactgaggaaaagaaaaaggaaaaaaatcaataaagctgatcaaaagtgatattttcttccttcaatgagtgaccaaatcaaatctgaagttggggccaaagttggcctcaattttatcaccagcgccattcaaactcaaagtgacgaaagggaaaaagaaacaatcagcacaggaggatgtagccatcaactcagaattatctaaataaaaaagcacgggaaatttgaaggaaatgaaaattattttgggttttttgggaaagaagggatagacggtgccgacaagccaggctccaagtttttcttcctattgggttgatgaaaaagttctgaccctctgaaaaaacaattatgcaaaaaatgatatttaattctaaagagattgaaaaagggaggcaggcaattgggatgaatcagcggacggttggccatcttttggccatttgcatttgttgtatagccattacttttgcaaaatcgaacgattttcaaaaaatggacaaaattcgcctaaatgttgcgttctcaacgcaacaaaaaattgagcaacttcgatgggcggttcttcctcatccaccatacagcccaggcatcagcccgtgtgactactatctgtttcgatctatggagcacttcttgagagggaaagaatttgctgatcaaaacgaggtcgaaaatgcattggatgacttttttgtatcgaaaaatgatcagttttataaaaaggggattgaaatgttgcccgaacgatgggggaggatcattgatcaaaatggtgagtacatcattaattgaacatttgttttttgtgaaataaaaaattgtttaatgttgaagtgcttaaagggtcagaacttttcatcaacccaataattaacttacaagtagcggaatgttctcttcatctttgttgtcgcttcttccctttgcggatgtaacgattattataaaattgataataataaaaattgaaaaaaacaaattcatttcaacctttacaattatatatatatttttattttttatttgttttaaaatgaattttttgtttcttacgaaaatttattaatgaagatttgatttgccaaaatgaatattgttattggttaattgattctatacgtgtataagtaagtattaatgattttcttatgatttgtagaaaatataattattttttaaattgtaaagtaatgaaaatgaatgatttgtacaattacgcgagttgaaatttcgaaatacggttaaaattcaattaaaatacactgtataaacaataaatatttaaataaaataaataaatatgaatgngacatttttgaaatttaaaacttaatataaaat

SEQ ID NO: 18663 - DNA, 1030 bp, Heterodera glycines
acgcagcagccatacacaggctttaacatgtgcagcactgagcggtataccacagctccaaccgtatggaagcaccccaaaagccatggctcgtgaggcagctgccccgtaatgttgggcagcgtccacaagtcagctcgaacgacctgtgcccgtcagcggacgggggcatttggtggtgccaacgctagcccaacaggacagcaggtaggtggtgaataggaatcacttgggtaatgatccagcagcaggttcacctacagctaccttgttacgacttttgcccggttcaagccactgcgattaaatcggttccagtctgcataccgaccgaagccggaacactaaccgtccccgaatttctcgaaatggctcagtcccgggcagcgacgggcggtgtgtacaaagggcagggacgtattcagagcgagttgatgactcgcccctacaaggaattcctcgttcacggacaataattgcaatgtccgatcccaatcacggcaaattttcaccggtttaccaacccctttcggggaaggacaagcacgctgattttgccagtgtagcgcgcgtgcagccccggacatctaagggcatcacagacctgttattgctcaatttcgtgcggctgaacaccgaaaatccctctaagaagttgtgcccacagaagcaatgagccaactatttagtaggctagagtctcgctcgttatcggaataaaccagacaaatcgctccacgaactaagaacggccatgcaccaccatccaccgaatcatgaaaaagctatcaatctgtcaatccttacggtgtccgggccgggtgagtttccccgtgttgagtcaaattaagccgcaggctccactcctggtggtgcccttccgtcaattcctttaagtttcagctttgcaaccatacttcccccggaaccggaagactttcgtttccgggaagctccccaccagggcgaataaatccgccggcggatcgctagttggcatcgtttacggtcagaactagggcggtatctg

SEQ ID NO: 18664 - DNA, 3079 bp, Heterodera glycines
tgtggccaataataaaatggcataaatggcgaacaatggcaaaatcatttatcctcgaaaaatcgtgtaaaagcgctcaaagttagcccgcattgatttgctttttcattgctttccgcctaacattcaaggatttagcttcattcaaataggacaaaatgaattaattgacaaaaatttgcaaatttatttatgaaattgcaatttaattaaaataaatcaattaagttatatatatatttatatatttttattaatcgaataatctttgttctgattgagtaccgtatatgctctaattatagcccatgggggattatttttcaacctcctcagaatacaggggataattagagactggaggataaatagagactgggggattataaattttctcggaaaaaataaaaattctatttacccccatgggggataaatggagacagggtgattattttttaaactcctcagaaaggggggggggggggggtaaatttggaactgtcgggattaatagagactgtgctataattagagcatatacggtatttggtgcatatttcacgactttatttgcatatttatgtgcatattttggccacttttcgtgcatattttttgcatccctgattataagaaactatatttataacatttctaatttatgaattgttatttaaaattattattaagcaaataactgcttcattttaaagataataccaaattcaattttatgcctctcaaaaactattaaaatatataattcatatcaaattattattttttatgctaatatccctaataattcaaaaattttaaaagcgagttaatattaattttttccaatgagggaaaagcagtagaactcgcgtgctgttgaggcggcaattgctgctgctgtgcgctaattgtgttcaagaaaatggcaccgtctgcttttttattttcgaaacattggcattatctgatttgttagcaatccaatttaaaattatatttttaagatttatttgttttgttcaaaatattttaagaatttcttagtaaaaaataggccgaaatgatttcgctcgcacaagataaacaatttttactaaataatgataatgatttttattcaaaacaaaattttaactgtaggtgactgaaacttttaaattttatattttaaaaattaatagctttatagtataaaagcaatatttttaatttgtttttttaattcaagcgctagcttaattgtgctatgaaatcaacgtgaaaagttcaaattcattttatatattctattctgttttaaataaaaacaattaaaaactataatttaacgataaagaataattttatgatttattttgcgcttatgctttcatttattacaattttcagtttttgtttcatatatatttcaaggtgaagcaggagctgaacgtttcattttttctaaattaattttatttttaatttcatgaactataatattttatatgtgtatgaaagaaaatcaagttttttaaaatcctcttcaaaatctaacaaatctttgtacatttaaaagagaaatataaatttttaatcaatcatatttttgaattcattttttaaagtttaaatttaaaaatgtttttttcacttttcatttatgatttttaactaaaatttattgaactaattcaaaaaaaatataagtctgttatcaaaaacagttttttctcctattttagcgtactattttacatctctaatatagtaaatacatcaaattagctaattctaataatttgggttattaaggtacaaaatcagtttggatatttagaatcaatagaaaaacgattagtttttaccattttggttggaatcagcagtttaggacgtgttttataaattttaaaattttcatagcttttttagtatgagttaaattgtatagttttttgtttagaaaaaattctccatttcaaaatattttttttttactaaatttgataggttgggttaggaatgaatcaatttatggctgatcaaaataaaattgaaaatttagccaaaaaatgtgccataagacaaagagtaattaatcaatgaatatttactgcaaaaaattcaaaatcatactacaagataaaagatataaattactcaaatccaaaagctaaaaaaatttcaacgaatttgtgtcaaaaaagacaaagagaaattaatcacctaaatactacatgtgctaaaaaaagaaaaatgttaataattagttaattatctaggcaaaaaatgtgccacaaggcaaagggtaataatttttgtctttaaattttaagccaatttttattaatatataaagagtaattaattatttaatttataccaagctaggtctatttgttaacattcattgaatcatttattacatgcttatttttaatgtagtattttgttgtagttaatcgtaccttgatttttcggcatttaggtaatgtaaattattattagcaggactgtcaaaaaatgcacgaaaatgataaaaatatgcgtataaatattatacaaatatgcacaaaaaacttggaagttaggggtgcaaattaattaaaaaaaaatatgcatttgcatatttttgaccgccctgattattatgattccaaataaaaaagtccgcatttgcgtcttgttgcacattaccaaatcgaatattctcctattttttccatttattttataatttttctcaatttatatttttcttaattataagcagggatgcaaaaaacatgcaaatgcatattttttttcctggcttctccatgctctaaatagcaggaaaaacactttcttttttgtgtttgcgtataaaaatcgggacttttatttgcatatttatgcatatttcgccatttttttggaaaatttgttaacaaaaatgcaataaaaacggaaaatacacccctaagaatcggcgctaaaaaattcaaaaaatacacccctaggaatcgaccgaaaatttttaaaacacaccactaagaattggaaattttctcaaaaatcctccccccaatttttttttcattggaaaattttt

SEQ ID NO: 18665 - DNA, 699 bp, Heterodera glycines
ggtccggcggtgcctataagcgccgccggaaaaattttgaaattttcaggagatttgttaacagaatttgtctaaaaatgatcaagttcttggttaaatttgcggtttagctgtttaaaaaaagaaaaaataataatttttaagttgaaatattttttcttaattaaatttcaattgaaataatgtaaagaaaatataaaaaatttctgttccgttggggaattgaacccaagcgaaaaataatgaaaggcagaaggtttagccaccagaccacatttgatagccgaaaaatgattttaatacattaaggaagcagcataagagatttgtgatgtttttttgcgtaaatttgaatatttttctgactgctcaaaagttcaatctgtaggggtgtattttcacctctcatcccaaaaaacgagaggtaagaggcgagagtcccaaaaatggcgagagttggcgagaggcaagagacgagagttgtcccacctctggtacatgcctattttcattttttatatatttataggattttttacagaaattttagaaatcctcaagaaaaaatatcggtaaattttcgtaaaaattttcatttattttttacttacctattttgagaattttttgaaatttatagaatctcttgtgagtaaattaaaatttgttttttgaaaatgtgccccctaaaaattgatg

SEQ ID NO: 18666 - DNA, 1198 bp, Heterodera glycines
attttgtttgttcaattgtttaaaattttagcccttcttaattatttcgttaagcgggaaagatggtatatatatcagggttgttgcgaatcgaaaaacaaaacgcgaaatacgaaactaaaataaaacacaaaataagaattacgaatacgaaataacataagaactcgaaaatacgaaacgctgaaatttttttaactgaaaaattaaaaaatttttcaaacacccgaaacttttttttttgcttttcccttcactttttttgctgcgcattttttttttaaacttttgggaaatggcgctgccgggaaaatttttgaaaatttgaatgcaatttggaacaattttgtccaaaaaatgaccaaaattttcaattttgtgcttcgctaaaaagttaaaaatttgcaaaactatattctcatgaaaatatttgtagattttgatcaaataaaaaaaataataaattttcagcttttgtcagcttttttcctattttcagattaatgccccatgactgttctttaagtgatcgtatggaggactcacaaattttacggcgataattatgagtaaatgaattaattcattcagtttttgcattttcagtcgagaaaatgcgttttaaaattttccactttttccattaagaaaatgcttatcctaaaatttagctcccatttttcttattttatgaaatgcaattctatcgctaatccaaaaagtaggctcacataatactgaatttaaatttaaatcttaatgaatttttaatttgcataattattgaaaatttaatcccaaataactactcaaaaaccgatcatttttataaatattttaaaagactttaataagcaagaatatgctaatcctagaagatggctccacattatattgagttttaattttttataaattttaaattatttttttaatatgtatttttgtgaaaaataaattccaaataatattaaggtgaaaagtttttgcgcgtttaagccagctttttaagaaaaaataaggatttttataggcgacgcaaaagaaaattttttgctatttttaatggattttttaaaaacacgcaagattcggagttctctcagattaatggacaaattggatccaattacttggattcaaaatcgattattcctactgccattggcaaatcttcccggactaaggtgttttcagc

SEQ ID NO: 18667 - DNA, 2936 bp, Heterodera glycines
cacaaaaattccacgcccttttgtggagagtgtcggttgatcagttcagtgccctctgtcatcagtcgcttttgtttcttcacgtcgatcatttccgccagtgatgggaagtggggctcttccgtcagctgttcaattgtgtgggcagtggcaattggcgtcagatggtcaacgagttgggtgtgcatcagctaaattgtttctttgcttggcatgacattaaaaactgcacaggaccataaccacaaaaaagtttctggggatgggggggggggcaaataaaacccggttttttcttcccgaaattagcttttaaaaagcgagcgtttaaatcggagcaggtcgtttcccacacccacatcgtttctccccctgaaaattaaaaaaaaaaaattccaaacagaatttttcaaaaaaattaattttttaagaaaattcaaaaaagcggataattatacacctcctcctcaatgccaatttgaccctttccagtgaaccctttaagttgcttggcagcacaattggtctctatcagttcaacgacagccaaaacagtgtcgagggataaaatgtgagtggaaaagagaagcggaccatttggaaaggcattatagagcaaagtccgaatcttaaaaatatttgtaaaatataatatatatatatatatatatagatacaaaatcaaccaaccaaatcctcaaagagattcgagcagtacagagagcagtcatagttgaggtacaattcagcgacaaggccaggcaaacgccacatgtcgaccaatgcctccagcgcgagttcgcgcaattcgtaacaaacggcggccttagccgcgagaggtgaacccgcggatgaaatggacacagactcggccaattgttcggtggagatgagctgacccaacttgaggaagtacgactccatttggaacctgcaatagttcagttgtgagctaaccaattaagtgaacgagccaacttcagttgaggacgcaatgtttgcaacaacaaaaaacagacgcgattcgctgctgcgaaaattggtaatttttgagtgctcaaaagttggagcagtgtgtggctgagttcgtccttgagcaatgcgtgaagtgatgcggtggtgcgcagaaaatcatcccccgtctcaaaggcgacggtcagcaagtgaagacccataagaatcatgctggacttgttggtgtcatcatggggattgcacaatgcaatcaaaaacctgaaaaagatattgtaaaaatttggttacaattctaacgtaaaaaaatcagttgtttggcacttttacagtttatgtggcccggtaaaaccatagatgggatccttttgtatggtctttcatcggccacctaatctgcgaaagtacccagttctaaaatatggtctaatatttaagaattgaattttttagatcttatgagaattcaaaaggtatgccactacactctaaggaggcaatattatgcaacgttctaatattaataaacacgactcaaattctccgaattttttcatcgatgccaaaacgcagcactgaccctttattcctcatgcaagaaatttttgaattccaaagccgttatgctgattttaaaaaaccttgggaataatgtacgaaaagaacaaatcaattaattcttttgtgtctgtctaaattacttcatcaattctttgagcccgggtcggatgtcctgctcaaacgtttggatggaggcgaagagataacggcacatttccgccaaagcgttctccgcggccattcgaagcagttcgggtagtgaagactcgagaccaatgcgaaaacagcactgcaaaatttcgcataatgtttcattggttaggtggcgcccgccgggcgaaaggaccaaagaacgaagggactgaaacgaaaaattacattaaacagaaaaagggagaaaaacctgtagaatctggaagagcacacattcatcgatgcccaatttcgtagttccgacaaactttgcctttgttaccgaatccgcaatcgactggacagcccctgcgattcgaatgctaaaaatagaaactatttacctttatggccatttttatgacttattcgatgtcaagagtccgtatgtgatgaatttttctattgctgctaaagctctcgcggtgacgagcccatcggtagtttccgatttgatcacttccaaaaaaggactgagaaatgtgtcgaattgaacttcactcagctcagcgacctaaaaatggtaaaacaaaataggtaaacaacaaaaaaatgttgattaaacaccttgttcaaaacatcacgaaggtctgcaaagttcctcagcagaggattgttttcgtctaacagtgttagtctctgacgtgtctgtgcacgacgaaactttctaagcaatgctaagacggcattggcttcgccttggacaacaaagagaccatttaccagtgccattttaatcaaaaaaaagtttaaatgtttatattaatgtatcaaaaatgaaacatcttttggccgattagatcgacaaattaacgtttgacttaatggaattttaagaatccaaccagctgccatgcgagaatcagctggctatcacatttcaggccgtatttcacaaaatacgggtacttttttggtttacggggtacttttaacggtgtacggacatttcgcctactcgacatctcgcctaccgacatttcgcctactgacatttcgcctactaaccaaaaaacattcatttcgcctactaagccaaaaacattcatttcgcatactaagccaaaaacattcatttcgcctaccagcaaaaaaattcatttcgcctacaagccaaaacattcattttgcctactaattagtaggcgaaatgaatgtttttggcttggtaggggaaatgaaagtaggcgaaatgtcaggaagcgaaatga

SEQ ID NO: 18668 - DNA, 3179 bp, Heterodera glycines
agttcaagtcatggaactcttcgacacatcatccgccctccacctcctgaccggcacccatgttggcaatgaacatgacctccatgccgcccgcttcgtctttggtggtgacccgaaggcaccgcacgagggcccgatcaagtgcgagcgaatccaatacccgcttcgtcctggcagcgtgatgacgatcaataaatcacagggtcagaatagttccttttccttcttttgtatagtgttttttgattgcaggccagacgcttgcgcgagtcggagtgctgttggacacctctcagtgcttcgctcacggccaactttacgtcgctttgtcgagggtgcgagactcggacaacatcagagtctgcaccacacgcagtgaccttcgtgtgaagaatgtcgtgattcgggagctcggacgaagaggaggaggaaacggcgttggcggcgctgcccgatgacccaagcgatccggtatgatttgaataaagggattttttgaagaaatttttcaagtttccacgccatccaccggcggacagtgaacccgaggatgacaagcctattgggatgccgaatgaggcggtgttcaaaacacccacgccatccacaagggcacagcacccaaagacaacgccaattgagttgaataacacagtgtccaaacaacatctggacaagttgacggtggtgaaaggcgacatcaccaaacaacaaatttggatgatcgtcaatgccgccaactcggatttggtcaaaggcggtggagtagacgacgcaatccatcgcgcgtgttctcctcgtcaaaaagagctcgaacaactgctcaacatcaagattttgtcaaatggtggaccaattgcggacggcggggtcgtggacacgcccgcgtttggagacttggccaacaacgtccaatgtatgccagtgctaatcgtgtgttagtcttagtcccacatttgtagacattttgcatgctgtcggtccaaaagtcagtgcagcgctcaatgagcaccaccgcaggtccctggcaaagtgctacaccaatgcattggaccatcttgtgagcatgcacatggatatagcaaacccccagtcgagatcaattgttagtgcaattggaatttattcgttgacttatctttccataattataggcattcccaagcatttccaccggggctttcaatttcccccgtgtggatgccgcgcacattgccattagagcaattctgaattggcttgcggaccaaccagcggatgcaccggcaatcgatgaagtccgcttggtcgcatttagtgacgaggactttaaattgtacaaggagattcgcgaacgagtaataaataagcaatcatgttcgtttctatttttttcgtaggtcaaacgccaaatgaacgctggcaaacgtccaacgcccaaaacatcgttgcagacgcctttacgcattccaatggtgtgtatatgataacaggctcatttgtatgtttgttataatagctttccccgacaacatcgcggctgtcggaatcggttgagcgaatcgacctagccatgactcctacaacgagtcgcgccccggtcccccactttccaattcaacagcagcgtcgcgtccgaattgttgatgtacgaggcgatggagcttgcttcttccggtgaatatattaatgcactaccaaattacaagttaccattatgtagggccattgtgttcgccattgttggccgtgacgatgtcaacatcgcattcaacttgcgtcagcaaatgtttactcttttgcgacaatttcttgacgacccaaactgtttcccgcgaggcttctatgccaatcgcgcgcgtttcatgcaatttattgaagcactccttttgggcgatgaaaacaccaactttgacgcttacatcgcaagtcgggtgggcgcaactgcttgggcagacgcatctgatgctctgctcgcggccgtcttactcgggcagacaattgttgtcgtgtcacctgtagatcctgacaatgtccgccgtgctacgagcttttttgacgacacagttcgccatacaattggagtgtttttcccagacggaaatcatatggtgacaaataatttcaaggcctacctcatattggtttaaaaacagagaatggagcaagactttccacatgatcagctgcaaaacttcactgtacatggccatcaaggtcaacaaaggccggtacacaacccggttttgatatggtacaatggactcaaccacttccaaacaatcttggtcagtttctcagtatatgtcaattggagctcagttcatttggtgtttcagggtcctgaacagctgaactaccctgctgcacataacatcgtgacgaaccagcagtacgtgactccagcgcatctgttacaggatgctatggatgtcgggccatctctcgcagggccttctgttgccatgcaagaggaagaatttgcagaagaatttgtaccgaccaagaaattctggtccagtgatgaacgaaggatctgaaaactggttggggttttgggttttggttaaataaagaaaatcttttccaaggtttttggccgaccaataatttcgccccgggatcctgaacgggttcgttcaggggagggtggcctcacaagaaaagaactaccttcgcgctggtgtgaaggcggtaagtacctgttgtgctcaaacagggaagccaaaagtcttccttaacatgaacatgaagaaacatggagaaaccgtttaccacaagggaattggtgttggacggtacgctgccaagtgttgtcatttttgctcttacgaacagccatcgtatggacattacgctgccgagcgttgtccttttgctcttacgaacagccatcgtatagacattacgattccgagtgttgtactttcgctcttatgaacatccatcgtatggacttacgctgccgagcgttgtccttttgctcttacgaacagccatcgtatagacattacgctgccgagcgttgtccttttgctcttacgaacagccggtagcagtttgtcatctgagcatgtttcacgcatgttcctaacttcttcgccctgtgatcctgaacgtgttcgttcagggtgaggggtgcctcacgagtagagactaccttcgcgctggtgtgaggcgtagtacctggttgtgcttaa

SEQ ID NO: 18669 - DNA, 1746 bp, Heterodera glycines
  unsure (1)..(1746): unsure at all n locations
ttttaaaanttctgcgacaaaaagaagtttaagtttatgcttcgctggaaaatttgctattgttattaaaattttataagaaagtaaaataaatgggcacatttttggagcgcaaagtcttatgagcaaatgtcaataaaaattatttatgatttattttataaatgttcttatgattttaatggaataattttcatctaaaagaatcgttgatcacttttttgtacatacataaggcgtcctaaactgtcgtgtattgctacttgttgatccatcagtttgatcattgatttggccgatgtccgttcgtccgaacaccaaagtgtgcatgagcaccggacattgtgggcgttgttccaagttcagcttgtcaagctgttctctcagcacttgctcagtgggactgttcttgagcccttcagcggatcgccacaaaagtgttgcaccgcaaaggtcaatcaaagtgccatccttcaaaaggattgcaaatgccattgattttcatttattttaatccacaaccataataattcaaaagttaaaaaacaaaaaaataaaacattgattccataaatatatattatttttttatgattcagattaaagcactaataccctaaaaaacaatgtttgccttcaaaaatgttttaatgcagaaaaatgattttttagggcttttttacaagagtttttgaaagccttgtcatgaaattttgcgtggtattgaaatcaaaatttcccaaaaatgttatttcaaaatggttcttcttgagtaattttttagaaataattttttttacaattatttaaaatatgaaatgatgagtttacttcaattttgtttgtttttccaggaagcaattctcccattttgccaggagagcgcacttctcttttcgagtaaatgttgccgttaacggacactaaattaattgacttaactttttttacattaattttaattttaaatttggcattatttaagcaattctgaaaaaatgagaaatttctcaaatttttgaattatttttttcaaaatgatgacaattaccttctttccaacaatttggagaaatttcgctgtctgattcattttcatcatcatcattgtttgaagaggaagctgataaataaacggaggccccctgaaaataaaaaaaattttaaataaattttcttctgtttctcttttacctcatcatcattatcattgggtgaaagaattagcacaccatttgtaaccaaaccatcaaattgaccatttgacttttctattttatttgcggctgggcccaaaaataactgaatgaataaaaataaataaattatgttttaattgttttgttttgaaactctaaataaattttataggttgtcaatttcatcaaatttacagcatttagtgtgtattgtcaattttgcctattatttacgcataaaaaatatctctaaaaaatttgtgtcacaatcagaatagttttcaggacaaaataattttcaaattttatttcttcacttccaaaaatttttcataaaaaaaaactagaaaagtccacgtccacatcagaaaagttatttgtgcaggacaaatgtcttttaaaaattaattttctttttttttaattaagacttctgtctgaacgaatggagaggaataataattttatttaaattttttaaaattaaataatgaagccatttatgtacatcatttgaatcgtcaaagccagccgcgtaaatgtacac

SEQ ID NO: 18670 - DNA, 1813 bp, Heterodera glycines
catacgcatattttagagcattgaatcgcacaatggacaatcgcaaatccaatgcgagggatttgttgcgaaacggcacggaattgaacgaggaaactgccgggtcgacttttcagggtgaaaaagacaaattgtaactgtcaaagggggggggggcgggaagggggtccggacaatccgtcagtaatggacaatccgtcaatggacacaatccgtcagcaaaatttattttttaaaacaacaaattttatttaaaattatatgaaaatgaatttaaatcgctaaaaattgtgtaggtattataaaaatttatgaaataattatttttaaaataattaaagataatttttatataagataattaattaaatctatgtaaattttatttattaatttaacaagcattttcgcaagatttttgatcattgctccaaaaaaaatcctgacgaattgtccactgactgattttccaatgacgtactgtatgtccattactgacggattgtccatttactaacggattcttcttcactgcagaattgtcattccacgaccatctcttcgtcaaatttcattcaattgcacccccccccccccccctcccttgtccatatcatttgaaaaacggcaattcgaacgatcctttgtgcaattagtgacgtcgcagtggaacaaatggctgaatttcggcttttgatcttagccaaaggcgcctggcggagaacttaggggctgattgggatcaacaaatagaacggagagaaattaagtgacaaatcacaaggaacaatgacaaatcacgagagttaatgaattggccaattcagtgatgaaaataaaagaaagttgagcaactaattttgttaattacgaggaaaatgttgcaaaataaaagtcacaatggaaaatgatgataattaattatgaagaaaaatgtgattaaaagaaatgaaaggtgttctattttatccctaggccaagtacctactgccgactggcactgatcacaattcattcgaccgttattgctctaataaattttttttttctctgcggcatacaaaatataataattgaattttattatcataaattcacatttgataattaaataactaaacgtagccaataatgataatacattacttttactaaatttaatatttttattcatagcaaattaaaaactctctctctctctctccgtgctgaaaaccgacaaaacaacgtgaattgacgtgtgcagactcaagaacgacgaaacgacgaacaaattggtggcatttgcagtgttgctgacgaagtaaatttatttgaattttgcctataaaaaatatataaaaataaaataaatagaacaaaaaataaaaaatctcttgtgactcattgggtacggtaattacagtatacaataaaagttgttttaatccgagaaatgccaattttactccgatgggtcagaatcggaattggaaccgaaattttggtaaccgaacgaattttgaaaattcacgatttcaacggggaaactttaacaataatcgaggtatgagaggaaggggtaatgaaaggcagaaataccgaataaatgcaattgggaataatgaggaaattccgtcttcttctacccgtaaatctccaaccccaacaatgacatttctgacaatttcaatggttatattttcattgtttggtctaattaatggccaatatcaactatgctctgagcgagtgcccacaactcctatttggctccaaatataaccgaatgttcagttccagagtacaagaaaatggcagaaacccaagtgac

SEQ ID NO: 18671 - DNA, 1862 bp, Heterodera glycines
  unsure (1)..(1862): unsure at all n locations
ctctanngagtcattttccaaaaacaaattcaaaaatttttcgaaatttccttgggctcgaaatgacccttggcggtgtttgcattccacagctgatgactcaaagcgcaacgaggcaatttttagagaaaaaaacagctacaaattttcagcgccaaaaaatatggcaaatgagaggattcgtcgagaagatctcgggaatgatcccggattttttggcgttccgatcagggacagtcccagaatttttgaaaatttgagtacaattgtggatttttggaaaaattttccaaaatttttagaaaatttgaagtaagtcatgagtagggaagcaggcgttttgtcactattttttcactatttcgacattttttggaaaattctttaacaaaaatgcaataaaaccaaaaaatacacccctaagaatcgacctaaaaaattttcaaaaaaatacacccctaagaatcgacaaaaaaaatttcaaaaagcactcctaagaaatgaaaaaattttctcaaaaggtattttcgtggcaagaatttaaaatttaaaaattatttttttatgtacctattttgtttttttgcccttaaaaatccagccctactcatttgcaactgcaatcagtgaataaaaattatttttgcttaatttttggctgaaaattatgtcactattcgtcactatttcggacttttgtcactatttcttcactattttggcatttttactcactattttagttaactatttcgggatttttcgtcactaaaagttgctaccctagtcatgagtttaaaatagatttttttttcaaattttaaagacgccgaaagggtggcagcgtggacagcggcggcggcgccggcggtgtcgcctccattcagccttatcaaacgccaatttccactttggcagctgcgcaaatgcagctgccattgaacgagagttcgctgaggcatgtgtgccaataaaatgccaaaattaatttggcaaataatttttaaaattaaatttaattaaaaaaaaattcggcacttatttaaggcagttacaacaacaaacgctgtaccaagcacaacaattgcagctgcatgtgaggagattacaacatttttaaaaccggatttttaaagtcttttaattgattttttttccaatttggctttagactaaaatgccattctttttaaacccctccatttttattttatttaaaagcttttcctattttttctggccttgatctataatattataattaaagaaactaggcatgcttaattaaattctcggcatcagttttgctgatagagaaaagcttttatagagttttcattattgcacaatttttgctcgaatgattaagagaaaattggccaacaatggcatttcctcggggatttaaataaatggacaaaaaatggtattataaattgggatcaacaaatggcacatttcctgggtaaatttaaatttctgaattttccatgttcacatgcattattaataaggggacttaaacatagcgcaaattaatttatcccactaattgatttattttactattgtcaaaactaattagagtaaagccgtgaagtcccatacccagtgcttaatgagggatttagtccagaggagccctcttacgcgtccgtaattaggccccgcagggcttggaagggaagggatgttgatggatgcctgngggcgcctcccaggcggngatcgattggccattccactngaagactcccgactgatccgactgtcccctttggccggntatccgttgccttttaagcgcccctcgagatgngaggagccctatcggagagataaatgggggggnggggggggaa

SEQ ID NO: 18672 - DNA, 769 bp, Heterodera glycines
  unsure (1)..(769): unsure at all n locations
tttatattttgtgttaaatctataaaacggggatttgcatttcattttatttctttttaaaaaatgctctaaaaaacaattttttttttttgaacaccgtccctatgttggcatcgccgccgtgcgtccctttgtaaatgtttcttatgccaataaacaaaaaaaaaaaaaattgcatccaattttttccatacatcatcgaggggatatgtgacaagaactaagcccctggcaaaacgaactaacaataagcccctggcaaaacggtgagggggggggggggctaaatttgggagaagggattaaatgagggcgatgcccgggggggggcggacagaaaaaatgnaaatttatggttgggggacataagaaaatattccttgtgccttggtggtgtaaaatgggaaaaatcattaaaaattttaagcggatttttttttttgtacaggtacaactgcaacagcaggcgttgcatgaccaatggcgccgcgagcgtcgcgctcgccgcgacgctgagcgactgaaggagcagcagcagcgacaacagcagcagaacacgaagcggcgactgcttcaacaccaccagcaacagcataaaagccggcacaaagattgcaatgacaacgaactgctgaatgggcgcaatggcattggcatgggatcaattggagcagcagcagcagcaggtggttggggattagtgatgccgttgaaattagaaagaatttttcaacaaaaaaaatttaaatacttaacatttaaatgcggg

SEQ ID NO: 18673 - DNA, 1026 bp, Heterodera glycines
  unsure (1)..(1026): unsure at all n locations
gtagtgacctccctcttaccccagtgattttttactgaagtatntaaaccaattcaatacctgcccaacggactactttttgccgcatcgcgggcggaagtgaactcgtaagtgcgacccggctcggacaacactttttggcctggcaaaaatttgagactcaatgggtttggcgtctcctcaatttgagaaaaaagtaaaaatgattttatttggaaaaattgcattacttgaacttggatgaacatgaagagacctagcatttgaaattagtataattgaatgtttttgaaaaatggcccaactccgtgtcctgctgatgcaacggtgtgcatttgcaaattgcttagtggacgaaggatattttcgcaaaatggaggcagtcacaaaatgtcgttggatttggagcaaagaggaggaacagcacagagacaaattggatagaacagcacgaaatttaaacattttattgaaaaatcagattttttaaatttttatctaaaattttgtaaaataattggaagagaaaataatatgtaaagaaaaggccgacaaaataccgataaaatttagtatggtagggtctggaaaccgtttttttttaatgtcaaagcgtcagatccggcgaatttttgaccgatttttgatttagcaaagaattcttgctttttcattttcttttgaaaaatatacttttggcataatgttgcaaatttttttccgtcaatttaacagtcgatttttaatgggtttgctgctaaaaaacatttcgtcattgatcgtttcgtcaccgttcagttcgtcactgttcatttcacgaatttgagtgttatcctttcgatggggattttctgctgctgctttctgtataaattccagcaaaaatgtgacgcaaattattgtcttgatcaacatagagggaattgcgctacgactttccctctaatgctattttctgacgcattttcataatcagcaacgaatgttaccatcgctgaaaactttaagcattccttttaacaaatt

SEQ ID NO: 18674 - DNA, 1198 bp, Heterodera glycines
ttttgtttttcaaaacaccttttttttcgcggcgcgctttttctaaagactttttggacaaaggggtcagcgctatacaccaggggtgggacaactctcgcctctcgtctctcgcctctcgccaactctcgtcatttttggtactctcgcctctcgtctctcgcctctcgttttttgggacgagaggtgagagttgaaaatacacccctaaagattgaacttttgagcagccagaaaaattttcaaatttacgcgaaaaaaaatcttaaatctctttctttccttccttaatgttttctctatttttggatagctccaattcaaatatggtctgctggctaaaccttctgcctttcattatttttctcttcggttcaattccccaacggtacagaattttttaaataatttctttaaataatttttcaattgaaattttaattaataaaaaatatttcaatttaaaaattattattttttcttttttttaaacagcctaaaactgcaaatttaaccaaaactttgatcattttttgacaagttctgttaatatattacactcaaaattttagaatttttccggcggcgcctatcggcaccgccggaccccgcaccccatgttccaaaaaagtttttttgaaaaagcagcgccacaaaaaaagcgacttaaaaacaaaaaatttaaaaaacaagttttggtcattttttgaataaaatctgttaacaaatccgaagacaattttcaaaattttttcggcggcgcctaccggcaccgcccgaccccaactgtccccgaaggtttaaaaaacgcaccgcaaaaaaaggtggaaaaaatggacaataataaagtttgtttctaaaataaatatatttcatgaaaatattttttaattttcatgaaaaaattttaaagatttttgtttggatttttcatgacttggactcggtttaaaaactaggactctgacccggttttctgtacccggcaataccctgacccggtatttgcccaaatacccaggcccgtacccctaatttaatatacgattttgaagttttttaaattaaaaaataaggctacagaaaaaaattgaaaaactctcgcctctcgtcctctcgccaactctcgtgtttttggggactctcgcctctcgccaaactctcgctctcgtcttttctgagacaagtcacacccctg

SEQ ID NO: 18675 - DNA, 1988 bp, Heterodera glycines
gaatgcacattgcgccattggagttacatccattggcacgctggtttcagggtcgttaccataaaatgcactgcttgtgcgttgcttcgtgggatcatgtacttgtacgtgttcttacgttacttgctcagctcggctgtggggttttggtgtgctggcgcgaacttgtggttctaattcgcgttttacggaccgtaactcgggcgcaccaatgctttgcatgctgtggcggagtgcctggattactggcattcctgctttgatttttcgacctgaactcagacgtgaacacccgctgaacttaagcatatcagtaagcggaggaaaagaaactaacgaggattcccgtagtaacggcgagtgaactgggaagagtccagcgctgaatcgcagctcctctggggttgcgaggtgtagcgtatagaccgtgagcttgggttggcccgcttgttcaagtttcccttgaccggggctccagagaaggtgcaagacctgtccaactggcggtgcctacccatctttacgtgtcttggagtcgggttgtttgggatcgcagcccaaatcaggtggtaaacttcatctaagactaaatacggccacgagtccgatagcgaacaagtaccgtgagggaaagttgcaaagcactttgaagagagagttaaagaggacgtgaaaccgatgaggtggaaacggacagagctggcgtatctggtctgcattcacccgtttgttgctgtacgttgggctgctagcctccagactggggtttgctgtccttctgttcagtggcgaatggggcatttgcaggcggagtgcgctgagatgctcggagtagctgcgtgagctcggtcttgaggccagcctttcggggtctggtacccggatcgggggagtgctgtttactctgggtgaattgtgcaatggtttcgggtccgtgttgactcgagctgggggtcggtggcggtcgcgtgcgacacgtaccagcaaccagttcggtccagctcgggctctcagttgtgcgttctcggtgtaaaagccggtcatctgttcgacccgtcttgaaacacggacccaaggagtttagcgtatgcgcaagtcattgggtgttcaaaacccaaaggcgcaatgaaagtgaaggcttcttacggagctgatgtgtgatccctggcactgcggtgttggggcgcaacatagtcccgtctcgatcgcatgcgatggggcggagacagagcgtatgcgctgagacccgaaagatggtgaactattcctgagcaggatgaagccagaggaaactctggtggaagtccgaagcgattctgacgtgcaaatcgatcgtctgacttgggtataggggcgaaagactaatcgaaccatctagtagctggttccctccgaagtttcccccaggatagctggagctcgttaagcagttatactcggtaaagcgaatgattagaggacttggggacgaaatgtccttaacctattctcaaactctaaatgggtatgaagccagggttgcttgactctgaacccaggcgttgaatgtttgagctccaagtgggccatttttggtaagcagaactggcgatgtgggatgaaccaaacgtggagttaaggtgccaaagtgcccgctcattagaccccataaaaggtgttggttgatatagacagcaggacggtggccatggaagtcggaatccgctaaggagtgtgtaacaactcacctgccgaatcaactagccctgaaaatggatggcgctggagcgggccacctatactccaccgtcattggcttgtacacgtgcttgtcgcgtagtctggccatgacgtgtaggagggtcgtggtggttgcgttgaaggctttgggcgtgggcccggccggagcttccaccagtgcagatcttggtggtagtagcaaatattcaagtgagatccttgaagactgaagtggagaagggttccacgtgaacagcagttgaatgtgg

SEQ ID NO: 18676 - DNA, 1191 bp, Heterodera glycines
tccgtccccagtgccgccggcgaccgcgactttccgcctctcgacgtccgacggcgtcgtgcccgatcactcacggaaatgcatccgttggcacttattcgttcggctaaccctccgctggaggacgaccagcagcagcagctgatggccaacaacatcgtgcacagacggcgcagcacaccgaaccgatgcgaagcgttgcgcttccgttcgtcccgcgttcggccggcaattgacgaggaggaggaagggaatttcgagccaatcgaacaagatgaggccgacttggacgacgaattcggatcggacatgcacagcgacgacacggaaaacggtcaatcgtcgatggcaacggatgcggatgaattggacagtgaggtgggcacggagcaacgcatggagaccgacgggggcgaggacagcgacgacgaaatggccgaatttatggcagacaatggccaaatggaggccgaagaggaggaggaggaagaggacgagtggggcgaggacagcacggaggaggacctgttcatgttggccaaactccgtcagcaccccgaaattccgtttaaggtgggcagcgaatgacgaataattttcctatttgttggcagccattctctgtaaaacgccaggcccacagaaattttcgaaattttacgagtgattttttcattttttggggcaaatctttcgtcagatttcataaatttttccgtcctctcggtctattgacaaacattcatttgttttttcgcaccttttttgagtgaattatgaacccattcattgggtgattagtgagagacaacccttcccccccccattaattaatttgattatttaattgactgatgatgacccatgcatttctcccccccccccccccttcagcggtacggacacactgtggtggcgtaccatggcgcggcgtatttgtggggcggtcggaatgacaaattcggctgtaatcagacactccatcgctacgacccgggtaagaaagaagttgtttttttggtggatgaataatcaaatgcatttccttcctcccttttcggtgtaatttccgcaactttttccgtcccattcccccccttttctgattcatcccttttcgtttcgttttgattacacgttgattttgacgaccaaagatcagccgattggacattctttcgtttttttttg

SEQ ID NO: 18677 - DNA, 1655 bp, Heterodera glycines
tgacaaaattgcatttatttggacctcaaaacgttccaatggcatcgccccgaggtgaaagagccgacgacggcgccgtgcggacggcggtcactgacaatgtgtaaggagggcgaggagggcacggcggatgaaacgtgtggatttatttgtccatttagggacttatcgggatgcgatttacatttttggcggctaccaaagcattcgaaacgctcatttcaacgacttgtggcgcttcgaccccacaacgaatcgatgggccgaattgctgccctccgggcaaagtccgtgtgcctttgatcatttaaaatgcatttgtctcttttgaagtgccatcgcctcgtcgtcgtcagtgcactgtactggtcggtgaccgcgtgtttctgttcggtggcacaatgttcgtcccgtttcgctcgctttttctaccccatttccctttgccctcaggccaaacggcgagcggaaaagcggactgtccgaccttggcgatttgttcgttttggacttcgcgccgtcgttggccacgctgtgctgccaaactgtgctcaaatttgggctccaccggcatgccgccaatattttgcccacaattatcatgtgaatatttgtttctgaactgtttccccccccccccctccgactgttctttgatgggttaattctgacaaatgggcgtgaatttggggacgtacagtcccaggggacgaaaatgcaaaagggcaatcaaactactgtatgatataattctgtacaaacatttcaggaaggagttgcattatctgagcactcccaatcggatctccaaattgcacgtgccatcgtcggacaatatgacccacggctaatccccactcattcgtctctttgctttcgctcttacgcggctttcgacacattggaacggcatttgatcagtccgtccttctctccctctcttctcatctgatcagtgatcgcacttttctctctctctctctttccctttctttcttttcctctcctttttgccttctcttttgtccaaatccatttctttctcaaacatttgccctcctcctctttctcttctgtgtgctatttcctatgtgtgtttagacacttttaattctgtaaagtcaaattgtacttttaaatccggttcctttgccaattgtcttaataaaagtaagtaaatttattttacatatatccattgataaaaatttaattacactaattctttgggcaataaaaacatcaaaattaattattaataaattcattgggatatttcacttcaaatggcagtgatttgattgtcctcctccgtttaataataaatagccaatagtctgggtattattcaattcaattcattgcttttcattttgggatttttctgatttcaaaaccgtttctgtctgatatggctgctgcttttgctttgattttttgtcgttttaaaatgctttaaatgcgtcgaaccaatcgccgttgacaatgttaaacaatggcgggttctgattgacgagcaaaacaagaaaagtctgcaaatggaggaagaaatagtgctctattcattttccgcatattagccacttaatttggcctaatttgatcaccaacagctgatttggcattgtccgactagcaacgacttactcgggttt

SEQ ID NO: 18678 - DNA, 1575 bp, Heterodera glycines
  unsure (1)..(1575): unsure at all n locations
cgaccctgggtaccccnttttttcattccaattatttttctgataactcgcgctgccagtgtccctgctcgaaatccgcccgaaataattgtccaatattttgtcaaaataaaaattattatgacgattaataagattagtggaataattattaataaaattgatagccattttaaataattcactgcgtcttgtgcctttttggaatatttttcattatgtcaatccaattacttgtttttcccaaaattacgctcaatgtctcatttgcttcttcattaattagtctaatgacttctgagacatttgtccaatgtacgacacgtaaagttgaggaaggcaaataggacgaaaagtttctaagttttttgtgagcttatctataatgtctttttcagtcgcgttaaaaatgttttcgttttgcatactttcacactcgattgttttacccagaatactcaattctcatactgtcgggaatcaacagcaaaaaaggcagggttacaaatccaagaatttgacgggggaaatccaaatttaactgcggcaaatgattcttttattcaaattttgggaaaggcacagggaaaaattcgcatttacgacaattcaactggaaaatttggagaatgaaaagtgtgtcttgatgagatttggacaaacattatatcagtaattgaagttgaaatgactaaatcaactaaagtaataatgggaaaaaccgagataatcgaaccatgaacggaaaacattattagcacatgtaaaggagcattttccaaaagaacaaaatttcttggtaaaaggatttagtcatcaatacccaagcataattattggtagaacattagtgatccctgggaacagtaataatgttacaatccaaattttgaatgctgggaatacaaatgtaaaaatttatgaaggatcacatattgctgacttggaacaaatttacataaatgcactgcctggagatgaaattcatccaaaagattacatgcctccggagacaaaatggcacgaaaatttgcctaaattaccaacacaaatcgtgaacccgccaccttcagaaaaaattaacctggaagggactagactaagtaaaaagggtcagaatgacttaaaaaagctcgcagataaatattccgaagcatttgtgggagaagatggtaaaatcggacgctacaaaggccaaattgtacatcgaatcgatttaatacccggatcattaccatttcatttccgaccgtaccgttatccgccggaaactcaaaaagaaattgaaaggcaaataaaactaatgcttgaccaaaacatcataagagagtcggaatccgagttctctagtccgatcgttatggtgccaaaggcagacaaaatatcgtggcgttttgcagttgattacagggctttaaataaaatgactaaaaaaagggtgttccatttaccaaatattcaagaattgttggatttaatgggtgcaaaaaagtactatacatgcatggatatgcaacagggattcatgcaaataccaatggcacccgaggacattgagaaaacggcatttatttc

SEQ ID NO: 18679 - DNA, 982 bp, Heterodera glycines
cagtgccttacgacaacggcacaaatgagcagcagcagcagcaaccaaacgacactaacatgcaacgcctaacaataacgggacggtccagcagccattgttttgagggagggaaggaggaggagcaccaatcggaggacaatgaaagtggccagatggatgagtcggaggtgacgcaggagcaaagcgacgacgaacgggatgaggagccggtggagttgggcacaacaacggcaaccagcaactggacgaatcgatgcctgcgtaggacgaagcggaggaaacggcggaaaacgacatggccaatcaacagcaacaaccgcacatagaggagcagcaatgccggtggaagtgcctgacgagccttgttatgagctgacatcgattctcgcggtgtacacggacggtaagggagatcgggcgtacttcgtcaagtggaagggtgacttttttttttgggggggggggattttctttgggtgagggggggggggcggctgagttgagcaaggggaaaaattttttgaaaaattgagtgcaatttgttaacagattttcaacaatgagaaaaaatttctgaatttaattaaatttttgaaaaattaaaaagttaataatccgtgtgtgtgtgtgtgtgtgtttaaagaccaagggatttgtccatgcgatgatattcgcatgttgtgtctcaaactcccctcctctcccgtatccacccgagctatggagcggctgagtttacttgcgacagccgtcgcatgcaggactaccctctccctggttagggtgggtattcatgggcccgtcccgtattcatcctaattggggagaggctgagttcacttgcgacggtgtcgcatgcaggactccccgctccctggttacggtgtaaaattttagcatataggaatttggagtgggtgctcggaacggatattttcggactggaaatggccgtggacgttaccggcacatcagcatc

SEQ ID NO: 18680 - DNA, 3065 bp, Heterodera glycines
  unsure (1)..(3065): unsure at all n locations
taaggatggcaaagatttgtccaagatggcacaaaatcggcaaataaaatgtaaaaaaattcatntaaaatttattcaaattagcgaaattattattttttaagttatcaattccgactctgatagcagcagcagtgatgaagaagcatcttcattttcattatcatcatcagcaacaacaacaataacatcagccataaagtttaacaggcaaagattgtcgtcaattttacggaatgccaaaaagtttgaaatgccaaaaaatgcggcatttggcgcgggtcgcgtcgtgcattttgcggacagttgcggacaaccgttggcatcgtttcggctcattccgagctggcgagaggacagcatttcagtggaacaatgaaaaatatggacaaattggaggaaaatgagaaaaaaaaaaccaaaaatttttgagatcgaatttatttaatcctattgttttctttgtatgatttaatccaattttcgaatttatttaatccaatttttctttctttgtattatttaatccaattttctttgtcaattaaaatattttttcacagagttattaatggggatcggatttaactgcaattaaaaagagctaaatttcggtattcgtcaatgaaatattctttttttgagaagactcgcattttatggtggtgtatttttgaaaatattattttcttattatttttatgttttattgaaaaatttaagtgccaaaaaggataaacaccaaaatagggacgcccttattttaagagcgtaaagtccaaaataaaagactgaatttttaattaatatatccatgagattagaaagattttttgaataattggaatgattaaatataatttataattaggaactttatgtttttatgataggatttgcattatttgttcttgaaggtcccttggtaaaaaatgtcaaaaaaattggccaaatcttgaaagtggataaataatggtttcctttatttcttcattaaaaatttaatttttgttttttggcatttcggctgatgcctttatccatctacaaaattcagaaggagtttgattttactgtccatgcacccgcctctcattgtataaaatgacgataattaaataaatgttttaattaattttgtcactctttatcagggcgcgtatcgaaaatttttcaagataagaacatcaaggccaaaaaataagattttagggtaaaaaataaggacattttgcaaaattgcttcaaatcagttatttttacaatttattcgatcaataatgtatcaaatattatatttttcacctcccatgatcatttttaacaattttggtgaggaaatgagcaaatcatacatttcggggcaagtgagatcgtaattcaatttgatttgtgccagacttttcacggtttcgattttcaatgaattgcgtacatcagtccattgcgctgaacaaagagagaaaacgcgctccacacatgcattggacacgggaattgaaagaattttgctgacaagcaaaagaagattgggcaatttcgcctcaaaaagcttcatccacttctgttcagcgttcatttctctaaatttctcatcagaaattttttcaagcgtctcattcagtgccgtaatttcgtcaaaaagttcattgtcgttcaattccggcgcaatttgctcagccaagctcattacttcggcgcgagaaacttttttttctttgagagaaacccatgccaaatccgttggaaagcgctcaacccggaaccatttatcgacatatgaaaaagtttggtggttttatggtttgatgagtcaatagaaattgaaaagggaagtccggtcatttcctgcaatgcaatggatactgaatgcggagcgactattcctaaatccttatcaatttatatttaaatttataggaaaaacaaccagtagtaattgctgcacatttcttctcttttgatccgtaatttgccgcaatttttgaatcaggaaaaatttttgacaacaaatctgagacacaatcggccgatttaaagctttgcgcatggcgcgcggtgtgatatgcccaagcgcctaaacaaataaagtttatttctgatttaatttgtaattcaaccttccactgctgctgtttgacggtccaaattcgttcgtgccgatttgcttggcatgaatgccgtgattgccaaagcggaatttgcagctttcgctgcttttttgtgtttttccgtctttagatggtgaggaatggccgctttgccaatagacaacaatgaaatgtcaaaattgcatgggatacaatgcgcgaattcatctcctgttttgctttttgtgataccctgaaattcattggcatattcacttttaaaaacatttttgcgcttaggcggtgccatttgttagtattagtgcagctgctaaattaaaaacaaaagagaaaaacaacaaatacaaaaataattagacaaaattaacagcaaaaaggaaattataatgcaaaatttaaaaatatttttcttaaacagtacgccaatcagaatttataaagaaaattgacagatttttcggacaagcgacaaataagaacaaaataagaacaatagccctaaataaggacaaatcttacaaataaggacatttttattttgtaagatttggaccctccaaataaggacaaatcttataaataaggacagatacgcgccctgcaataaacccaaaaatcaagtggcatggctatttcctgctatatgaaaattttaacgttttctggatttattaatagctcatgccacttgtgctttgggtttggaccatcacaagatcggtaatttcttgtgcgaatgatcgaatatcattcgttctcatcgctgcatcgtagttgttgcgccatctggcgcgcataagaaccggagcgtgcccggcccttcccaaaatcaaattgaggaggagccgggcggtactcccgttcccgtcaaggaacgggtgtattcgcacctgaaaattcatgattcaaaaacacagccagggagtttttggggtacactatgaataacaaatc

SEQ ID NO: 18681 - DNA, 2781 bp, Heterodera glycines
aataccaaacatgtgcaagcacagcttgttaaccaattaatcccagagactactaaaaagacaacgataacaacaacaactaccaccacaattaccgaaccaccaaaagacacaattgatgattttattgggcaaattgaagaaccaacgaaaagaaacaatgcagagcagttgcttgctgtcttgtttggaaacgatgaatggaaaaaagttaacttgagaattcttaggcaaatcattgaaggagttgagttacagtatcatcccaattttgaacgatttaaagcggtttttacacatccgaaaattgaatatatctcattttcgcctcagctcggctatgtgttgggttttgaaaattctcaatatgtaagaaataatgaaatagccaaatacggaagtgccgtggtggattcgcaagctttgccgtttacgcaaaaggtctaaccgagaatatgattgttggaaattcattgagctcactccttcgtgttgtctctgtgtcgggggcggtaccaggcgaatatacggaaaaaatttacgactcaccgctctatgcacgtgttctaccaaaagaagtatcagaaattgaaattgagttacggacgatgacagacggacgactggtaccattttcctatggtacagtgctggtcgtactgatatttaagaaggtgataaatttttgaaatcactcattattgtttttattatcacactcaattgataaaatggtacatactctttatgacacttcggtttcgggctatgatgcattttttgtgcaaaatggttgtggagtcggggatgactcctcctaccaagtttttcgaggagcgccaccgtttcagcgcggatggggcccagcacagacgggtgcggggctaggtgatatttttcgtggactctggcgatttttcctgccactaattcgcagagcttgagattctgttgcagatgaaacaattcagactggaaaacgctttataaatagggtaatcgatgaaaaacccggtttgaagggaacgatagagacgttggcaactgagagtaaacgtggagcggataatgttttagagaagggcggatttcggcgtcaatttggcacaggagggcgaagaaagcgtataaaagctaacaattcctccattctatcacatcaaacgataattggaaaaacaataacaaaaccgttaattcaaagcaaaaagaggcttcgatcagacgcgttcgggctttattaaaaaatgacctttcacaaaattgacgcgagtagcatcgattcgattaccaatgccgttgattttttcagtatacccccgacaaatgttaccgtatcatcgtcaaaggttttcgagattttgccgagtaatccactcaccgacactccttatcattttaaaatacactcgagccaaaattacattgacctgtcaaagtgttaccttttgaccgaatttcgaatacgaaaattgacaccaccaaatggtgaatggggacatttggatgcttcagatcaggttgtaccgatacaattgatcgggcacaccttcatgcgggacttgaaaattgcaataaacggtcgtgaaattttcaattctaattcactgatggcatacaaaacttatctttctcatgaactttcgcaatcacttgaagctaaagtttcgcatttaactgctgctggatacgaccgtgaagatgctagtaatctacaaaacgcaaattccgaagggttcaaaagtagaagacaacggtatttgggaggtcgaacagcacaatacattgcaaaaattgatgccgatcttttcaatgtaccccaatatttgattaatcattgtgaaattgacataacgatacaaccccatgacgacaattttttgttaattgacaccttagacccacccggtcagccatatagtattgagcttgttggattgaaactctactgcaaaaaagtcagtcttatggatggcttggctcttgagttggcgaaaaaattggaaatgaaaccagcacggtatgctgtacggaagacaatgatgaaagcactgttcataagcccgggacgctatgaatttaatgcaaacttgttcatggaccaagttccacgccgcgtaacaatgggacttgtcgcaaattcagattatgtggggaacaccaaaaggagcccgttcaactttcaacactttaatgtacgggagttgagtgttgtggccaatggtcgctcttatccccaggccccgtatgacattgactatgaaaattggaaatttgttcgtccctacaatgacatgcaggaggcgcttggttttgccaactctacatatggaaatggaattgattatttttcatttttgcacactcactgtatttatgtgtttaatatgacaaacagcggagacgatcatggcggtttattcgatctgatcaaaaagggatgtacagctgtaaacataaaattcaaaaaaccagtacccgatggtggaattacgctaattgtgatgggtgaagcggactctatttactttttggataaaaacagaacgattgcaaccgatacaaccatttgaatcatttttaaaatgttgaaaattttattggcttccctatttttccagtcaattgttgcacttgttgtagaagaaggaataaatactgaggaaattccccaatataaagagtggaaaagattgttgggttttaaaaatgcttcagaaactaaaaatattacaacaacaaaaataaacatatcaactcataaataggaaaattttcaac

SEQ ID NO: 18682 - DNA, 1043 bp, Heterodera glycines
tccattttattaacccccccccccccaaaaaaaaggggagacagacttttttggtgtgtaaaaatttttaaataatgcctaggcatgaaaacctgtttctgtgattttatggtcccggacatgaaccttaaatttttttcgatcaattgcgatttcctacctaaatttaaaaaaaaacattcagtaaatagagaaaattcggcttttattcgagtttgagaaaatggtgtaaataggtgtcacagatttgtggtcagggaccaaaaaatcaaccgagaacaagtttttacgagttataatcataaaaatttgagtccaccctttgggttttttaataaaattcaaaatgggccatttttaaagtagcgcctaacaataaaacgcatcacttttttgacagctttgtcgctgtgaaagccgacttgtcccgtcaccatatcgcccgtctttttcaagttgccccacattgtgtacacaacatcggtgaaagccaatttgcagccctcaaaattttttaattcgtaaaatttttttcaaaaaacacaaaattttcatatgaaaattaatttgttaaaaaaatcacacttcaatcgaattagctttgacgagttggcaacagtcctggagaagcctgaaataagaccacacacacattcgattattttgagattttcgatttgaaaaaaaaaacttaattttctggaatttcttcgacgccttggcctggggacaaccttaaaatgaaggggaaataagtttcacagatttggtagaaataataaacgacgaaccaggccagcaaattgcacaaaactcaccttaaataaacatgggcagaggacaactgaaaaaaaagttgaattaaaatgaagaaataaaaatgaacagagaaaaggcactttgtcgacatgaaaccacacatcctcgggccaaccccaccctgaaaataacacaattaacaaaacgcaacttgggtggggcctaattccatttccgtaattcagtgatctgatgtcaaatttttgattttatgtttttttttt

SEQ ID NO: 18683 - DNA, 1319 bp, Heterodera glycines
tatcaaagaatttacaaacggcagccaaaaacaaattcaaatcaatcaatttttttcgttgccatttctttgatcacttccattatcttctgacgcggctgattctcaaccgaaacgcttgtctcaactccatgctcatatctagaaaaaaataaataaaacaattcaacaattcagaattgggtaatttagatggttggtacccctttttacgggaaaaaaaattcaaaattttaaagtcacaaaaatgcatttcttgtaattttcgagttaggtagattatttttgtgaaaaatagtgtggattaagggtgaaaactcaacgcgtacgagtcgatcagcaaaaaaaaatttttttttagcaaaattctattcttacagttactagagttcgattggaaaaaatatttgataaacacaccgcatgaaaaaggaggtaaaacgctcgctaaattttaagcctttttgggaccctttggtatttttatcgggccacctacaaactgaaaagtgacgccttttggaaaaaaattaccaaaaacttacaaaataaacaaaacacaacaccgaccttgcccaaattcgtggcgtaattccggagcattctcttacaagaatggggaaatcccgattgttctgcttcaggtccacataatctttctggatgaattcccgaactccattgcttgctgcggttgtctggcaaagatgaattcggagttctcgcaaagcaccgccagcgagtcgaattgaagaagccattatttatttgcacgcttggttgaataaatggattaaagctaaaaaagaaagtgaaaagataaaaaactggcaaaacaaattaattaattgtttaaaaaagcattcaatttaatcattttgatagtttaaaaatggaaaaaaacattggattaatgtggacctgaaccatggaccttcatggaccttagcaaagaccaggaaaatccacgcaaaaaaattccaggcatatggatccatggtgtaggtcgaaaattttttttgtaaatctaaaaaaattgaattttgaaaacaatatgccaatttatttctaaatcaattttttttttgataccgtctgcaaaaacaaaacgattttcattttttgtgatccagtaaaactagtgccaaaaaatcgaaaattcttattgttagagatttttggggtgagctctatcggaactatagataataaatttattaagatattgagaaacggattcggaattgattcaaatagatgtcagattgtgatcagcgatcctggaaaattgaacgatttccattccttttatgacaaaa

SEQ ID NO: 18684 - DNA, 3408 bp, Heterodera glycines
  unsure (1)..(3408): unsure at all n locations
aagcccattaaatgaagggaattttgttttcactgcttttttgtttgagttacagaagtgggcgggtttctatgccactaaatctttagaaatataaatttaatagaaatcattagatgaattcatgtgacaaatgttatatttgtgatcaatgtcttcaaaaagtgacaaatgatcattcctgatcagggacgggcgaatcggcttagcactcgtagccgaaggcgaaattcgaagcctagaaaatccgaagttttcgaagccgaagtttcgcccgtccctgtttttgatcatcaccatgaaaaagtctcagatgctgaatgattgtcaaatagtcaactttgaatttgtgattgatttaaaaaatttcatcaaatccctttgagcaagtgtcctttgtccaaggacaccgtaacttagctttaaagggcaacggccgcttaaggccggccaattacgagcccattgaacaatagttccgtactgtgttctcagagtggatgaccaccgaaattgcttttcaagcccaattccaatggcacggcatacctctttccatttgatgacacgtggcagcaaaagtttgtgcagcagcgaacaggacgagagcgcattcggggcggcattttcggcagggatgaaaggcacaatttcgtacagaagttcgagcggaaggcatttgttggcgaatgtcggcatcaggggacagtttgttatttggggtaattagtgagcaattagctgattagcattgaacgaaaacgccgctgcgcaccggcactttgaaacttggtttggctcgtcccccggcagtgtaacaacagcaaatggccgttttctcctctcctttgtcgtgttgtctgcctttttccttttgctctgtcgctctctcctctccctctccctttctctctctctcttctctccatctcactcattattttctctattcattgcgttctcaacgcttttcgtcgtccccggaggggtattgtgctgtgtctgccgacactgtctcgcttttccctgtgcacactccttgcctttgcttctctattcttttccttgttcagcacttgtaacggcactctctgtgttctctctctctctctctctcctctctctcttctctctctctcttttcgctcactctcacccctttctctctctctcttttcgctcactctcacctccttctcgcactcttacccattttctctctctctctctctcctctctctctcccttttacttctaataatttttgtttgaattttccatgttatgcctcggtttttcaaaagatttttattgtgtatatttgaacattagtgaatgctttgtcatttattaatgtgtttcagcaggactcgtagcggaggaggaaaaatgaaccggtcattttgcaattgtacaaacggcattttgggagggaatttacaatgtcaaaatggcatttcatccatatcattagcgtacaatataattttggtcgccattttcatatttgtacactccgccgatggacaattaatcctccccattttgctcactgatcanctgctgctgcagatcaattagcgcaaacaataatattaattatatttataaatttaattcaacttcttncgctgattagtttctaacaataagcactttcacattcactaattatgtgcatttttacatagaaaaccttttttaccttttatatttttaacttttcatttttctaaaatttcaataatattgaaaaatttgattgaaaattttctgggaatttaattaaaaaaagaggaggatcctataaattttatcaattctcatctttatttcgggttggcaactcttatgcagtttaatcctcccccagaaatttgttgcccaaatttttcgtttgatttaaatccataatgcccatgttttcagtcgccgatcatgaatccatcatccacttaggtctatttcgaacctgggacccgaattcggacaaaaattcagatttttaaacccaattcatggtaactgtgctgtgtatttctaggccgaaaccaaaagcaccaacataatttttttataggtaagggtttggaacttaagttgtgaaagccattaaaaaagtgaattgataatgattaaaaagtcacgaaaaagtcaaataggcatattagaaagttcaaaccaagggcgtagccactagagaatggcaaatcaacctttttattagtttttgcggggtatcaatttaaatgttgatatttaattaaatcaactaacattatgccatcaacgcaaatatcaacgtaatttttaaaatttgcgaaaatttttaagaaattgttaatttatttaaaaaatccagaattacctatatcactcagaaaattctaagatcccccccccccccccgaaataaaaatttttaaaaattttcctacgaataatggaaaaattcacccaaaagaaaattaaaaaattttaatggtacatttaggtatataggaaaattttcgtaacaaagtgcactcaaatttttaagtttttttcaaaaaaattttctcttgggaaaattcccggttggtcccggtcccggcttttctcgcggtcccggtcccggacgaaaatcgaggtcccggtcccgacttttctggtcccggtaagtcccggtggtcccgaccagctctattaaaagtagagaccggtaaaaaaaaatttccgggagcgggagttcaaaatcttccgggacgggagtcccaaacgggaatccccttaaaatcccgctcccgttaaaatcccgtcaactgcgtcttagtagttaaagggtcaactgcgtctcagttaaaaaaccaattacctaatacccaaaaatctataaaattcgataaataacacttatttgtttgccttagcctgctcattgttttattgtttagtgtcccaaatggatattaggatttttcattttctcatagtaccttctttagacttagtgctttcgaatgataccaaagaaaatttttaaaaaattaagcataagcttaggcctaagccagtgtttcgaagtgtcattatttttcagattgtccaggtttttgaggtctccgataaaagtattcaataaaacttccaaaaaattttacggtggcacctatcggcaccgcggctacccgacatttggggacacgacttttggggacccgacttttggggactaactttggagacccgacacttaaggaacccgacttttggggatcccgacatttggggacccgacatttggggacccgacttttggggatcccgacatttggggacccgacatttggggacccgacatttggggacccgacatttggggacccgacttttgggaatcccgacatttggagacccgacacttaggga

SEQ ID NO: 18685 - DNA, 1013 bp, Heterodera glycines
caaaagctgaagcgcattgaatacattgacgtggcggtacctttttttaaataaaaaaatattcattttgaattttaaccaccaaatccgtcccccatttaataaaggaacagtcgctgatcgccttggaagtgatgtcgcgtcgcaatgccaaaaacattctgttgtccggcggcatcgcgtcgaccatttcgcacgtcgacttcttttcattgccttctcaacgtttggcttttgccatcgccgcgaattgcgccattcacgtgacccaaactgaatttcaactagtcaaagattgtaagttcctaataaaatttttatttttatttgtgtttaaatgcttttttcacaggccttctcgacctcacccaacggcttgtgtatgtcgacgacaagcggtgcctggaatcgatctgcatactcttcaaccgggtcatcgaaaacatgcgccaacacccggacaaactccgccaagttgtgggcgccagctttgaattcctcaacaatgtccaaaagctagagtcgttcattttcaatgtgtataccaggggtgggacaactctcgccaactctcgccatttttggtactctcgcctctcgtctctcgcctctcgttttttgggacgagaggcgagagttgaaaatacacccctaaagattgaacttttgagcagccagaaaaattttcaaatttacgcgaaaaaaaaatcttaaatctctttctttccttccttaatgttttctctatttttggatagctccaattcaaatatggtctgctggctaaaccttctgcctttcattatttttctcttgggttcaattccccaacggtacagaatttttttaataatttctttaaattattttcaattgaaattttaattaataaaaaatatttcaatttaaaaattatttttttttctttttttaaacagcctaaaactgcaaatttaaccaaaactttgatcattttttgacaagttctgttaatatattacactcaaaatttt

SEQ ID NO: 18686 - DNA, 1841 bp, Heterodera glycines
tgatttgctcacagatttcccaagcaaattttgactacgaatctgcgtcagtgaatgcattttgcgatgtttttccaactgtcaaaccaaaaatgtgcgcgtttcaggtgaagcaagcgataaatcgccgaattcaatcaatgggatttatgcaattgtacagctcaaaagaaccaaatggacttgagtttcagcgccttgttcgcaaaattggggctctacaattctgtcctcccaactatttagcccgttcgcttcaactcatgcgccacctcatcactagggcgtgtaattatatggatataaaatctcgaaatatggccataaaatatggaccaaaaatcgcaaaatatggacataaaatggcaaaaatcgcgaaatatggacataaatggcaaaaatgtcaaaatatggacataaatttttcaaaattgaatgtaaaatttcttcaaatttattggttgaaattgcatatgagatacatttccaaattttttgactcggtaaggcgctttgacaaagacggctttcgttttgcaattagtcggtcaacattcggaaattagtctcgaattttttcggcaattacgtgcaatcattttaaaagaaaaaaaacataaaagctaaaatttattaatttttttagcgcaaaatcaacaacaaaagcgaaattttcgcttttttgcttatttttgatataatttattaatttttaagaaaatttaaatttattcaatattctcgagaaattttggcgaaaaaatgattttttgaaaaatttttcgggttttgggctcaaaaaggctaatttagctctgctgggggccgttctaatagaggttttttttgaaaaatgacaaaatatggacataaaatatggacaaaatgccaaaatatggaaaatatggatatagaaatccttcctagaagcttcaaaccaagctaaaaacatgtttttcgtgcgtttcaggcctccaataatccaggaaaaaaatatggatttccatataattacacgccctactcatcacacactccccattgaaaatttttcaccaagaatcacatttattgtcccaaacttattcaaatgaacggaatataatagaaaataaagattcaaggccatttagtgcatttgaatcgttttggataatacatgtgaattttggtgaaaaattaatttccgacttgtgttcgaattcgggttcgggattcgaaataggtcaaaattgatatcatattcgtgatcagcgcccccgaaaacccccgagtattactccgaaatgcataaaaacaactttttaatctctttttttatgggaccaataaaatacaggattaccaaaaagtcatacatgaaaattgcaaaaagtcgaaatttttgaaatttgaagaagatttaacataggacaaaaaaactaaacatagaaaagtaaattcaatttttcaatattaggtaagtagataaagaaatagtacgccaaaaagagagatgctttaaaaataataacataatggccatagttaaataaaaaaataatttccaaatttacgctttcactagaaataaaaaggaaaaattgtgtatattaagaggaagtttttatgaatcctttcattcgcatttttaatctgttcttatttcattttttatgcgttcatcacatccttagtttcttaagccataacttttttcttactcaagacatacattcttggtattaatcgaaagttccgaccagtttcgaacccaggaacccaaattcgaacaaaaagtcgaaaatccaaattttcaacttttcgaccgaattcggatccggggttcgaaagtagacaaa

SEQ ID NO: 18687 - DNA, 2613 bp, Heterodera glycines
  unsure (1)..(2613): unsure at all n locations
ttcttggattttcaaagaaaaatatataaaaatttgaagtgattttttttctccaatagcccgagatttcgcattacaaaccccatcagtattccagtctaattttaacggcatttacggtgccagaaattttcggcaaccaaaaaatttcgggccacaaccataattcatcagtgataatttgaaggcggcaacacagttattattatttataacaatattatttaggaggaggcgattgttggcaccgcaggtcgagtccatcataagcccctcaaccaattaattgtctattactgtcggtgtccccacaaaaaatattttattttttcctttgtttttgccgatagaaaatggcaccagcggcgccgcatttttaatatttatttcaacgacacccctttcggtcgaccgnggagatcaatccccccccccttcagaggatatataatgatggagtgaaagaagatttgctcgaaaaaatcggttccccccccccccgcccgccgaggcccgaagagtgactaccggcagggtcgagaatagacgagagtgggccggccggtagcggcggcgccaacaaccacccatattaaaagcttcctcgccgtaggatcgtacccccccccccaatatccaccaaaatccttttccccgtgaggggggcaggtgtgatgcatttggatggaataaattttagccctcccctccttctcggggcgggatgagcaaatattatcatctttgtggcgctagtggacgctcccatcaattacaatcctttccctccgctggtgctggcgcttccgctctccccccccccccccctctttttcaggatgggatttatactgtaagcagtggcccacccctccctatcgccaaaatatattttcgcgacttaataattgtaaaaaaaatagttcattatttgtggtggcagcagtttttggccaaggttttaagtatcaaacggtttagccaatgccgtcggctggttttgggtggaaaaatttaaggcgccctcgccggtcacataccgtattacgtctaattatcccccgtctccaattatccccccccccctttctgagaaggttgaacaataattccccgggggataattagagataatagggtatctgtataattttttggcctcaattatgggccacccagccaaaatattttgaatgcaattaggctgcttctgtctattcgacctttgccagtattatattattgttcattttcttgcaatttaaagtttttttggaacgaaatattacaatttctcatatttaatttatgcttaaagcgggcgccggacttttcgacagtggatttttcgacagaggacttttcgacagcaaaggacatttcgacagaaatattataaaattcaggaggggacttttcgacagtagatttttcgacagtaaaaagtaattaaatttcacatttagttgtgtaaaagcgtaaaattttttccaaaaatcaacaattaagccaaaccagtattgagatacataatatttaaactcaaaattaacaaaaaaataaataaataatttttggtgatgatttttagaaaattttttaattcttattgatgtatttttgaaaattttaaggatcgattcttaggggtttaatttttgtttttattacatttttattcataaattttgagcaaaacacaaaaaaggtcaaaataggttttgttaaacttcttagggttcaaagaaaataaaaacgataaaataagtgctaataactcgaagagttgcttaacaatcaccaaaaaacatattttccatgctttagggccactggaagttcaggaaaaataagtaaaatctaaaaaacttatttctatgtagtaatattatttagcaatacacattaatatgttaattaaaaagaaatttagtaaaactgacaaacaataacttgtttttatgattactgtcgaaaagtccattatttttaatttttctgtcgaaaaatccttcactgtcgaaatgtcctttgctgtcgaaaagtccgggagccaaaatgattattatttttcattttttaattcacttcttccttattataatcttaaaattttttttctgtactttttttaatgaatttaaggctttctgtattgcttcagacggtaaatcatttatttaccattttaatttttcattttctctattaataaaactcacatttttttaatttataaaataatatttgaatttccatttcattgtcctatcggttcggatcattagtcaaaaaccatcaaaataaaaaatttttgacagaaaattattaacaacttcgcccaaaatgaaccaaattgaaaatatgatattattcggtagccctaagtgtttccattatactgcaaaatttcaaaaagttttgttaagtttcaaaaaagttattaccaaaaatgttcaagaaaacttgcttttttgagtttctcaggtcttaacttttttgaaacttaatgaaacattttgaaattttgcacgataatagaaaacttagggctaccgaataatatcatgattttaaaattggttcattttgggcgaggttatgaataatttt

SEQ ID NO: 18688 - DNA, 1832 bp, Heterodera glycines
  unsure (1)..(1832): unsure at all n locations
tttatcattttaaagaaaatctgtaancaagttaagcatgtatccctaattaattttgcctttattcaagtcccggcaattcccggtcccagactttgatcattntaatcccccaccncacgcaaaaaataataataataaaaaaacatctggcaaatgccagcaacgactaattatggaatattaaatatgccaatccataggatgcggaaggcaattttcattttctaaccattttgtaaagcgccgtggccgcaggcaatatgcaaaggcgtaacgccacgaccaatgccatcggtttggttggcattggccccgttctccaccaacaatttgcacaactcaaatctgtcgtcactgccggcacagaagtgaagcgcgaaatgcctgcaatggctttgacttcccaaattgaatgaaaatttaaaaaaatgcttgggatttcaaaattaaattttccaacgtaataaaatttttcaaaaattccagctgctgattgtgagcagaaaataaattggagcgtttaaaataaagcatgataaactgcttaaacactagagatcttacaagtgattgaatcgatcggtaaatattaaaaaataaaaaaccgaaacattttactcggttgatatttcgttaaaatgtcgaaaaatacccctaaagatatcatcgttttcgtcccgaaatcactactttgtactcctcaccatctttgttggtccgatcaactcgcgcccctttcgagacaaaataacgaacaatttgagtgtcctggttcatgacggccaacataaacggactatagccatcattgttttcggcattgatgtccgcctccatttgcgcgttctccaccacaaatttgactaaatttgaacctaattaattgttgttgaaaagagtacaaattgcttgaggatgataaaagaacatttatttatatctgttatgcttttaacaaaaattttttgtcggcaccgcaaatgccaacttattctcttaactaaatatttttaaattagctactttaaaaaaattgcagtcttactcatttccagacggctttcttcggagacatttgtaccatccccctaaaattgttttttctgtgaaaaagttaatgaggaattcaaaatattttcattaatttctttgaaaaaaaacactagataattttttttggtaattttcttcataaaatttaattcttaatatgttttccaaaaatagcgaattatggaattcaaaaatatagacaatcaattcataaacctggtttgtattttgggcattagcacaagattgtgatgcacccattgatgaaagtcttaaaattgatcaattcctaaaagaatccaagaatgtaataaaaaaaaacaaaatgtggattaaatacagaaatttttttaaaacacagattgtgcaatgtaaatcggcagattcatttcgaaaatgttgaatcaaaaatatgaatgcaaaaagtttaagaaaactgaaaggtgaaaatccaatgtaaaataaaaaaacgaaaaattattttcttctctcaaataggtatgtaaatgaataaaagatggtttgttgtgattaaatctttcccaacgattaggcaaaatatttctacaaaatgatgaatgaataaaagaaaaaatctccataatgaataataaaaaaatgggtgctgtgcaatcagcaatcgtccccactggaatggattacaaaaccgagctttgacagggtgaaaagaaaatacttaaaaaagaataaattaattaaaaactaattaagagttgaacagtttcgcatctcttcactcattagcgatcaaaaat

SEQ ID NO: 18689 - DNA, 1617 bp, Heterodera glycines
  unsure (1)..(1617): unsure at all n locations
tttcatggccgggtgaaccagtggtctgctccttctcagataccagacgaaggagatgaggagatgcaccgacatgaccactgtaaccttgagataaaattgcacttttatctaaggtagatggtcctggacccctgcccctgtaccgcaggaggggggacacttccccttcatgacatatacttggacaggggcaggggtcctgggacccctgcccctgtaccgcaggagggggacacttccccttcatgacatatacttggacagggacagaggtcctggacccctgaccctgaactaaatggatgaaggccttgcgaaatttatataaatagagcaaaaaaattaaaggataaaaaaaagatgtttaacgctccatttactctaattctttctggggccacaggcagtggcaaaacacaatggcttatgaggttgttgagacactatccggaaatgatcgaaccgcctcctaaaaaaatactctattgctattccgaaatgaatcagtcggttgttgatctgatgaaaatgggaatagaaacacataatggggtacctgatcagacactcattcaacatcaaccaagaccacttttgctcatcctggacgatctaatgttgaacatgaagaacgattttcttgatttactattcacccgagggtcccataattggaatgtaagtgttattttcgtcacccaaagtctgtacggaagggacattcgaaccgctagggcaaacagccattatctggtgctgacccggaacccttcaggacagctgcaggtaagaactgttggttcacaactttttcctaaacgggtaaattatttcatggaggcttataatgatgcaacaagtcagccattcagttatttggtgataaacatgcacccaaatgcgcaggaaacggaccgtttgacttcaaaaattttccctgacgagcaacgccaaatctacctccccattgattaattttcatgagtagtgtctctatataaaggtgtaattcgcacaaatttggcaaaatgtgttaccaattcaccccatacataagtgaaaattccgagttttttaaacgtttggcctccacaaagtcagatcagcgtaagaacaagctgctcagagaggcgagtgcagaacagatactcggattagttgaaatttgcgcgaacattttgaaatttaattttcgcctaaatacgcgtcaacggcgacgcttaattcaatacgcggactactacagggcaattgctcgttcacgaagtgagagcacggcaagaaagagacttcaagagggaaccggtgttgctctaggcgcaattattgcaccaataatcagtgtgcttgctcaacatttgctggagaaggcagcaacaacaacaactgctgtagcgtcatgaagtacacaaaaaagatgataatggttcccgagagtgaatatctcactttgataaatctgctgaagaggggaacacaacttctggcccctatgnaagtgagagagctgaactggacacagacatccaaaaaaattttgggcgatcatanaacgcgagcagatgtgcaaatgaagcgccattcctggctgtataagcaaagacggcagctaaa

SEQ ID NO: 18690 - DNA, 1741 bp, Heterodera glycines
cagttgcagctttattttttcattgctttcttaattgttttatttaagcatttgttttatgaattattttaatgtaattattcctaaattcggcatttgtgtgccatttcatttggtaccgaccggccacagggataaaactgggagtcggaaaacccgacccaagcggaaatccgacataaaattttttaaataattttttacagttattttagttgaaattcaattagaaatctttaattttaaatgagttaatccttaattttaagttgaaagaaaaggataaatttgttattccattcgataggatactgcccgtaatactgatcaatttgtctgatcagcttcgaatttgcatttaaatttggtgattgtattccggtctctatttcctagatcttcgatacttcgggatctcaaatgattacaaatcttttcaattatggtttaataaaaccaaccagccgctaaattagtttcagtgtcttcaatttcattaataattgttcggcatgtttctttccattcatccaaagaatggagcgttgcaaacacagcaaaatgagttccgataaaagcaagcagaaaaggagtaaaaattttcatttttttctaaaaaaattattaatttgatttaattaaagattttttttttattatttaaaaaatgaaaattgccgtatttaataagaaatagacactcatttattataatttgcttatgtaaatacaaatcaaatggcgtcttttggtgacgcacgaatatgtggcagttcgaccaataatttattaattgtttgcagtgaatgccatcctactaatgaaaaaatgacaattaattttatattactagggctgaaaacttagtgatttaattttttgcagctttgtttcaacgaaatatgcacgagagcaccttttttgcgtgaaaattcataagttaaacgtcattacaaaaaaaaaaatttgcctttactattttggcattgctacctttttaccactgttttacttccttttaatccaaaacaaaaattgcaataaattgtgcactatagtcgacaccccacccccccccccaaaaaaaatgccgaacaatcggaaagaacaattttatcagcaaaattacgcaaaaaagacggagcaaataaataatggggcgatttgttggaaaagtgtaaggcaacgaacgcccttttttgcacccctcacattaacaaatttaaacgccaaattcaatttatcagaagggctgtaaatttcatgtaaatatttattattattattttcctggattctctatgctccgaatagtaggaaaaacactttctttttggactttttctcacttttttcgttcataatttctaaaattctttttttgggattttatgtgtttctgccacgcgaccaaaagcatggcaaaaatgtattgatataaatctataataaaattatatctattgttgtaatatgcttaaatatattattatggacggggtttattttttacatttttttgcaggtaatttttcatgagagaagcaccaaaactttttctcaacacataatatgtaaatgtttttccttttttaaaccattttttaggattacaggaacatctcctaaatgaatccaaatttaaacttaattaaaaaaaataatccccccccaagcttttttgctaattttttttaaaaacaaatcaaaaaaaatttttttttttccccaattttaaaaa

SEQ ID NO: 18691 - DNA, 753 bp, Heterodera glycines
cctgcaaatttccaaaaaaaattcgtcaattttgaacaaatttatgaccaaaaagttggaaaatatggttttttgagttcttcaggtcataatttttttgaacctttacaaaatttttcaaaactaatagagcatctgaagggctttcgaatgataccaacaatgtttgatttggatgacaaagtaaaaagttataagcgaaaacccgctggggccgaactgacgtgctggggccgaactgacgggttccggatgttctatttcatgaaaaaaaaaaaatttttttggcataacatttttttgccaaatttgaatttatgtttgcaaattttttgctcaaaatctgtaaacaaatctccattaaaagccaaaattttactggcgtcgcctgcagtcagctatattttgttgaaaaaatggtgtgaaactcagaaaaaggatcggctcgtctgtacttttaaaacagttttggctgctacgaaccctggtttttcgtattttgtcttcattttttaatacataaatattaatttgttttttattttcatcaataagcatgcaatcacaagataaattagttatgccgttgaccacactttctggccacccggtgcgcatcatttacggcaccgcatggaagaaggagcgcaccgcggagttggtacgcagcgcaataaaagccggcttccgtgccattgacacggcctgccaacccaagcattatgacgaggtgtgaacagaaacatattcatt

SEQ ID NO: 18692 - DNA, 2632 bp, Heterodera glycines
  unsure (1)..(2632): unsure at all n locations
aaaattatatgttaaatgtttcntaaaattctgtccatatttctgtattaatcatcatttcggtctttgttcccccatttttcgatcctatttaaatgcttctcactcctcctgttcttcacttcaccattttccttggactgttctgcattggaataaagcgcacttttctaaccgtctactcgctcgttttcccccaatcgtttggccagtctctcgcccacacgtctctccgttcgccgccctttcttggctctttcgctgccccttcgtggagacagaagttcatgagctgagcgaatggaccaagcatcccgaattcaccagatgcttagcatcttcttcttttggtgggtgtggatgtttaaatgccggtgccagctgcatcttctaccgtccacatgccattgctaactcgccagttgtctatgagcaaatctcctgtcccatatgggaataccgcttgcgcacttcactcaaactgtcggtcaacgcaaacttcacgaaagagccgtccgtgtcactcacacccggcattactttccgttggaaggatttgagcatcacacctattgcctcttcggttcctccggccccaatcatggcaaacaagttcctctcggatggcaataacatggcaatcagtgatgaaattcaaagtgaccttcaatgccccagtcgtgctaatgccaaacgcctcaactgcacactcagatggggctcatgtccaatgtgcctgcctgaccacgattcagcaaaaatcaactgccaatgccgagatgtcaaactcgaaccagcactcgccgatcctgagaagcgcctaccaattcagctcaaaaacttgcttctccggaacgaaaggcgggacatttttgccgaaatcacctacgcgccgattcagttgtccattcaattcgaggggcttcgaatcgctacggaagaagacctcacaaaatgccatgccatgtccaagggtcttttcgggtgctattcatgccacactggagctcatctccatttgcaatgccacaccgacttcggttcagcacttggctacgttcgttgttcggatggcaccgagttcacagctctctgccacaaaacaccagaaattttaaatgtcagcctatcattcaaccgtgccgaggtcgacatcaactgtaccattgaatgcagtggaggacggaacccattcgtgattaatggtcatctccgctatgtgccaaaacacttccaagcacctaatgaaggaagctcatttgcctcgaaggccaaacccagcaactcatgcctaatttggtgcccagattggaacttcgacttttccgatgtcttttggtatttctttggcctccaaaatgctctacgaactgttggcatcatcactctggcccttttcatcatctatgtccttttgcgttgcaaccctgcccttcgatcttggagagccataagccgagtcgtccttttgttccttgctctttggcctacgactgattcttctgcagcgggagagctgagccatctactcagcattcaaaattcagcaccaaagctgcagtttgaaggccattcttcggtgtcaagacgtgtgactgagactctcgacatttttgatgcacaaatcgggaccattcatctcgccaaaaaccaaaaatcgccaatggacttcgctataaaagccgtctctgtgccagtccattcaccattcctacaaattcccgaatcggccttccacattcaaacccaagcccaattccctccttttccaatggccacactgatctctttcctcgccaacacaatgaacatcgaggtggaacgctttggtcttgccgtgaccacatcgctgagccgttggaacgaggcccgaacaatcgttgagggactgcatgaacgcggctacgaactcaagacgaggcatctgcacccacgtgagcgaaatgtgcgacttcacggatctgagctgagccgaagtggtgcgaatcgtctcggtgcctacaatggaagtgcctgtggcccaactgtctccgagctgtaccgctctcgacatggcatcactcttcggcacccctctgccccatgcctgatggagcccggcgggaatggacaccatgattttttccccatcgaaatgatccgagtcgtggcccctgaccaagtttctacaccacggggcttgtccacacgctctcttccccgcccccgcccgtctcacttcgagctctgggacagaactgaccatccgccccggtcccgagaattggtgatcagcgttatgccccatggtgattcgacgactcgaggtgccgcggaggaataccgcatcggtgttggccgcgaactcacgatctctggccccctcgttctacgaatctatgctggtgcccttcttcttgccctattctctgttgcccttgtcgatggccaatcatctattgctggtccctgccctgctctttcatttgctctttgttctccacggccgctcaaaatttcttgcccttgttcgtcgctttttggtccttcaccttccgattttgtgcaaatcgtgaacaatttgctccgctggcttgttcaccgcttcccggcagcgaacactttgctgaaagccatgccaaattagctgact

SEQ ID NO: 18693 - DNA, 2415 bp, Heterodera glycines
atgaatgtcatattcgtgataagcgatccttaaaatcccggagaatttcattattttttattcagtatattaattttagtcaaaaaaaaataaaataaaataattacattaaattaaaatgcatttaataatatcgctttgacaaattgccgcttgtggtaaatgaataggaagaaagaaagaagaggatgctttttggcaagaaaagaaaaaataataaaataacacattttgatgtgaatttaataatgaaaatgcataaataaataaaaaataagaaaaaacagcgtaaggcaacgaatgaagcgcaaaaagagaattaaaaagtgggaaaaaagaacagaattaaatattcaactgtacatccgcatcaaataatcagacagcaaagagaaaatcagtggaaaaacgacaattaataattaatgaatgaatgatttaattaattgattggttggccttttttacacaaaattgggcaagagattttgcaatgccattgaaaaataataaatttacaaaaaatgaaataaaaaacaactgcattcaattaagtgaagtgattgtccctgtcgtacaatgtttgttttgcaaatgccctgctgctttctgtcgcccgttcttctgccccccttttctgcttcccatttgtctcattaattaattaattagtgcacgtaaaagttcagcgcccctccggcgccgctttcttcgccattgaccgcttccgccgcttcgtcccccgcggcgccttttcccagcatttcctccatcagttggggcagcttcagctgctccgcctgggctttcttccgcaaactctccacgcattttgaggctaattggctgaaaaaagaaaaatttatttaaatttttggccaaatgaaaaaaattacccaaatttctgcaaaatgtccaacaaaacggaggaaagcatcagtccgttgtaattgcgcagttcggaccaactgtgcagcactttgctgtggatttggtacaattgggcgcgaaactgcgcgaatttcgcctcgtcataaggggggcctaattaaaaatatataaatacaaaaagaaaataataactttttcttacggtggaaaacactgtagtcgagcagagtgaggtatttgaaggcgacgtaatcgtactcatcgaagtgatattggcgaagttgctaaaggcaatcagcaatcacaattggccaatcattcattcattgtttgattaatcgaaaattgggactcgagaattttgattcgagggagatcccaacccgagtttaatcaaatcaccgattggcgaaatgccatcggataaattttcattttccaaaatttgcatttgcccaccagcaaaagttcgttccattcgactcggaattggtcacaccccaacagcgcaatgctgcacatttcgacctgtctaaaaattagcacaaattttgccaaaaaagaaaaacccaactctttgtcctggccgacattcacttggaccggaagttgatcagacttaacgccgtaggcaaagtcgatcagatggagaatagcccacgcagcgataaaataacgcgggcgataataacgctaaaatgataaaatgatcaaattggcatcattcattgaaaggcaatgaatgccaaaaatgttgattacgtccaattggttgaagtacacatcctgccgggcccagttgatatttgtggccaaatgctgattggcgaccaacacacaaaagtcgagcaatggcactttcccaccactcaattcattcattgctttttgcaggctgttcagagcgggtctaaaaattgaaattagaaaaaatgattttaaaatgcaacatttcttactgcttttcgcgcacggacagaaaaagttcctccaaaaagtgtctttcggtgccattgttcgcaatggcgccgccagcggcgccgtagaaaacgcagtcaatggccggcatcgggcatatgggcaacagttgctgctgcgatgaacaggaggaggaggacgaaggtgaagcagtaaccccggcaggcgaacagtgccgctgctgcggaggatgccggtgggtcagcagttgctgctgtccgttgttcgtcgcttggctgtgctgctgcgtctggtgctgcgcgtgtccgccgttttgctgcggcaaagccgcgtcgcttgaggcgcacaattgttgctgctggttgtgctgcaattgctggtgcggcggtggatggcagttgttggcgtgcaaatggtgctgctgctggtggccgtggtggtgggacgtcggcggaaacaaatggtacggctgcaacggagtggtcacgtgcagcgaagtgctaaagggtggggggggggggggagaattcggaatttgtgaattagggacactgcaattaatgatgcgcgagatcgaagattcct

SEQ ID NO: 18694 - DNA, 2893 bp, Heterodera glycines
gcacctgtcttcctcctcaatcgacgtatgtttcgttgtgtaacgcaaacattcggcacggacaatcgtccgctgaaacgaatggagacgatatggcacagcagcggcaacaattggtgatgccggcggacattcaatgccattcccacaattgggcctctttcttcacgcgccgactcatccgccctcccctccacggctgccaatcagacctttgctttttcaccgaaaccaacgtacagatcttgtccaatcatttggcttttctccgttagatcagtcgcctttctctcgacggtccgttgggagtgcaccggcgcatcgattcgtccgtctcccaaagttgcggtccccagcgcgaattcaacttcgaccttttgctgggtcctctatggcccggcaatgggctccacagcgacgcgtgttttcagttggaagacggacgcggcaccaatttgggttgttcctgttcgaatgttcgtgcgggcaaattaaatccatcgcagtgattccctttgcttgtgtagaatggctgcaaccggctgattccataccccatcgacttgtctcgaaaaagggtcaaatgccatttggacggcccattattcgccccttcccgtgccgacttttgtcttggacatttctgttttactcaaagaatgcccgtccccgactctgatggacaatgggcggtgagcagcgggtgtttgagcagcaatgaatcggcggcgaggacgagcctaaaagtgtcttggccaatctttgaattgttgttttaatcccacccaaagattggctaccgaaacattttgggcgtggagcaatggctttgcgggaaggacttttgcaattcgaatatcggaggaggagagggagagggagcaaatgattggggcggaagggagaaagggcggggacagacggacaaagatacaccgaaacagaacggaaaggacggaggaggggagggacagaaagagggcgaaaagagcggacgcggagaggaaagcagcgctaggcggaggacacgcggatggcattggccgatgcacttttgttgggccattttggcactttatttccttttcacttttgtacacatccattaataaaaactcgattataaacattcaattttaaacgttttcctttggaaatgacctttggacttggcttttttctgatcagtcgcattttggtccaaaaattggtcaaaggagcgactctcctttcccatattcccttcccacctaattatgtttaacatcccattaattatgcactttaacgtttccatgccgacttcattcgcaaatggtcttttcggtgaactgtcctccgtatgctttcatttaattaataatttcgtttcactttgcttttgctttctattaactcacttaaatgaattgttcgaaataaaaattgccaaaattttaaaatatttccgtcgaatttcggcacaatgaaaacctacgggaagcaccaagtgccaatgtttgatggggaggagaaggaagagaagaaagttggaacagaacaaacggaaggcaaaggaactcgcttgtcgcaacagaaggacgaatatttggagcaaaaaaggtgaaggaaaagcaaacccacgccatttgagtccctttccctcccctccgttaagtgcgtcggctctgatcaaagtcggcccatcggactttccgatcgcccaaagggtctcttcgcttaggtctaacggcgtcaaattaaaaacacatccgaccatcgctcttctcaacggcacaaacaatgaacagaacattcgcaaaagcgcttcgaccccttcgcttcagacaaagcctctccaaggaaaggaagatcggctgcagctgagaagcgaattcgaccggactgtgcccaatgccgcacaaatgcttttagcggcacgggaacgagaaaagcaaatggcaattgcatcgccgagaaatgttggaatgcgactgccaccgcttcagctgccaaacgggccgaagagaattgaaatggaagagtgtaagaaaggagaggatggagggcagggaatgatcgcaacggtggcgacacggcctttgccgcaactgcagccgctgaggcagtaccaagtcggagaataacgggcagggggggtaaccaggctcattagtcattcaatttcagaatgccattgaaaattcggcacttgctcagcccgttcctcccccaccatgcaatgccactgagtttttgcccaattcatccccaatcactacaaacatttccaatgtgccgtccaaccaatgccttggcaatcttcaaaatttcccccggcggcgtccttcttcggccaatgcaattttgacgaaagttcacaagccgcttccagccatttcggcgcaaattgggcccaaaagtggtctaatatgtcgagttttaagcttagcccttccttttagggtacgcaatgctttcccgtggcggatacttcgtaaagcgacgcgcaaatcgctttttgtgcacgacgaaggtgaaatgtgcgcttgtcgccggcttcttctccgtgcccgtgctggtgttcgcgctgatgctgcttctctcctccgatggcttttccccgcattccgccgaagtctcttcgccctcttcggtcgccgcttcttccaccgccgcttctgctccaatttcgccagtctccgctccttccgatgttaacatcgtcggaggtgccatttttcagccgatttccatgcaaaatgcatcaggagataacaaaatgatgacattatgaaaagagaagggcaattaggcataaaatagattcaaaagatgatttggaaaagaaaattagtctttttttgatttggttcatacgtgaaaaagggggggggggccgaacccccccccc

SEQ ID NO: 18695 - DNA, 2457 bp, Heterodera glycines
  unsure (1)..(2457): unsure at all n locations
atcaaagcagagtgtgacgcataatcacgaagcactgctccagaattctgtaatgttcacggcagattttgtgatatttttttcactgatttcttttatctctacgcatatgcattattgtttaagctcaaggtgtcaataaaaacaaagtttgtntaatgaatatttacatcaaaaaattaatgacaatttcgaaaaagaaagtcaagtaatttttagaagcttttatttcatgttttgttgctcacttgttgaaccgcacatgagccgttggaaatattttcgccttttcttggcaagttttttcccgaactgtttcacgacagttaattgagtcaattattttcgccagtttcttttatctccaagcgttatttattgcatttcacttaccttggaacaagattacagtaaaataaaatattgttttgtgaatatttacgacaaaaatttatcgacaatttctaaaggggaaggaaaataaatgtttgcctaatatattaatttatattttcaaatgattgaaccgcatctgttgcttatgtttttaatattttttgattttgccatatattttggctttttggaatttttccaatgtccgaaaatttatgtttgcttttacatgataagtaatgatttggttatttttgtatttttcttcttttcatcatgaaagtcatttagccattcatcccctctaatgaaaatagttttctgcagctgatttaacaatatttttctttgcactatacatgtagtatagcactggttgcgccttcaattctgccccttaatagaaggttcctcagcaaaaaataatactttctcaacaaatgaattcgctgcgcccaccccttagtattgtgataaatctcgaataaaaaattctcaactattttcccagaaaatgcagaaggtttttaaatttgaaaactccattcatctcaatttatattgcccgtttcattcagtgcttattttactatgctggccataaaaatatggagttttgcaggttcgaaagagctcggcgcgctcttcatattcagacgtatcaactaagggcctatcgccactctcaggcgagatatggccaatcaaagcagagtgtgacgcataatcacgaagcactgctccagaattcttgtaatgtttcacggcagatttgtgtgacaatttttttcactgatttcttttatctctacgcatatgcattatttgtttaagctcaaggccttatcgaaaaaaattgtcaataaaaacaaagtttgtttaatgaatatttacatcaaaaaattaatgacaatttcgaaaaaggaagtcaagtaatttttagaatcttttatttcatgttttgtttttcacttgttgaaccgcacatgagccgttggaaatattttcgccttttcttggcaagttttttcccgaactgtttcacgacagttaattgagtcaattattttcgccagtttcttttatctccaagcgttatttattgcatttcacttaacttggaacaagattacagtaaaataaaatattgttttgtgaatatttacgacaaaaatttatcctcaatttctaaaggggaaggaaaataaatgtttgcctaatatattaatttatattttcaaatgattgaaccgcatctgttgcttatgtttttaatattttttgattttgccatatattttggctttttggaatttttccaatgtccgaaaatttatgtttgcttttacatgataagtaatgatttggttatttttgtatttttcttcttttcatcatgaaagtcatttagccattcatcccctctaaatgaaaatagttttctgcagctgatttaacaatatttttctttgcactatacatgtagtatagcactggttgcgccttcaattctgccccttaatagaaggttcctccgcaaaaaataatactttctcaacaaattaattcgcttcgcccaccccttagtattgtgataaatctcgaataaaaaattctcaactattttcccagaaaatgcagaaggtttttaaatttgaaaactccattcatctcaatttatattgcccgtttcattcagtgcttattttactatgctggccataaaaatatggagttttgcaggtccgaaagagctcggcgcgctcttcatattcacacgtatcaactaagggcatatcgccactctcaggcgagatatggtcaatcaaagcagagtgtgacgcataaacacgaagcactgctccagaattcttgtaatgtatcacggcagatttttgtgataatttttttcactgatttcttttatctctacgcatatgcattatttgtttaagctcaaggccttatcgaaaaaaattgtcaataaaaacaaagtttgtttaatgaatatttacatcaaaaaaatgatgacaatttcgaaaaatgaagtcaagtaatttt

SEQ ID NO: 18696 - DNA, 2703 bp, Heterodera glycines
  unsure (1)..(2703): unsure at all n locations
aaaaatatttgtaaaattaaatgaaataaannaatttaggtatgtgaaatatttataataacatcggaaaaaccaatccatttattaacgatacaaaaaattatggatttacatatatttttcatttaatataattttattcaacgtaaattatgaagatgtaataataagtctgggtttattatgcaagtaaaatacaattataatatgtgtctgagtcgtatagaaatgaataataaaaatagaaggaaaaacactttatttttttgtgtttacgatggaattttattagatattttttcatatttaaggtttttctgagtttttgaactttttcgcactttttcatacctattatgcaatttttctgaattttttaatgaaatttttcataattgctcaaaataaattcaagttttgaacttttctcgtacatattttcatttttctaaaatgagtttgttaaaaataataaaattttttaataacttaaactttattctaagcataattagatcatttttatgacattttgtcttttttctaagaattttttgtcacaaaaatttacatattttggtacataatcggaacacaaattccattttttatttgcgttaattcatattcaaatagcagctaatgtttagttgaatattcgggatgtaaattgactcagttaaaactcctgtataaaatcaaatttttgctgacaaaataaatatgataaaagtaaaagcgccgaaataattacttttataaatattaaaaaaaataataaattgtcgttataaatttcaaaaatatataaaatcttcgtaaaaaaaatataaacgaattatttaaaaggcgaaaattaatattttaatcatcttttagatatatttcaaaaatgaatcaaattcaacccgaattgctactttccacttcaataacagttgaaacaaattccttcattgcttttcgttttaatccgtcaagaagaagcttaataacataaataactatttaaattactatattaaaattagcaaaacatactatttccaaatattcgtttttctggtcaaatccattggcattttgagcaataaaatccatttttattttgctcaaaaatatataaaaatgttcaatggttacgctagctttttcctgtaagaaataaattaatgaaaatgaaatttttaattttaaaaatattaaaatagattataatgattcattttcaaattttattttttgaggatcaaaaataatcattaatttaaattaattagcaatttttttttattaaaaccaatgtcttttctgtagcattaaagttattgttgttgcgttgtctaattgtttgcactaatcgctgtatcaatgtacgtctacacatttcttgttcactaaaatagaaacaaatcaatgaaatttttttttattatggttgttctttggttttttgaatacttttttatttaattttaaaatattatttgatttaattaattaatttattattacatatttttcatcaatttttctttgatacattctgctaatgctataaatgtgccaaaaatacaaatttttgatcctttcgaacttaaattactctaaaataaaaaaaaatttttaaattatgataaattttgtgtattttttcattcactgataatgcgttggatttgttgggttcatcggtagtgttaatgaagccaaactgctcacagcaaaaattcaaaaagaaatgaccaatttcacttaattgtacaccaatttcctttattttttcttccaatttgatttttatatactttaaaactgaagagatttgttcatcataattcatctgaaaaaaattctaactttaaaatttattaatttaaatgaaaaatttatataataaaaaaaaattattgtgaaaaatttcgcaaaaacaggacaaaaaagtccggcttttgaatcaataaaaattgccgacaaaatttctaaccctattgaacttgttgctgctgaattgttcatcaacaatttctgtcaacagcttcaaaaattctaaaccctgttcatgttgaaccttcattttgtgtatcgtttcagtggatgaaccttaaaaagtgtttttaaaaatatgaaaaataattcattaaaaatatttctaggacatgttaaaaaaatcgtagttcgatattttccgaccaattttttgcacaagttattcagatcactccttaatgataataagaagtgactcaaatttttagcacctcaaattgacttaaaaacgaaatctttgggaaatgtttatatcagttttttagattttcatttgccttaaatgcttaactcgtaaaattaatttgggtcaccattttttgaaaaaaaatatttattttttgttttttagacagttttaattcaaaaaagtgctcctaaaatgtcggagaacaaaaatatttaccatttttatttattggagtttggctttttactaaactgattatggtaaatagaataaatatgagtaaataatttgccatttattatggcactaaaaaaataaattaaaaaaaaaattaaatgaataataaagctaaaatattatgcatacgaaaaatataataaatttacgtcataaataaaaaataaatttttctttgcatatttttaatagtcataaaaaaataaaacgtcaattaatcgaataaa

SEQ ID NO: 18697 - DNA, 1985 bp, Heterodera glycines
  unsure (1)..(1985): unsure at all n locations
taaaaaacagaatttttatcattaaatttttcgtgataatgaaaatggactttggcataaaaagcaaaaataataattaaaaaaatgaatttgcaagtagaggatccgaaccgggggtttagaaaacgctgactagcgcactaccgctgcaccactgtacacggcaaagcttcacaaacaattatttaatttgtttattcattaaaaaagtttggcacgtcataactcggcactcgtactcatttcgcagaaaataaaaccacttttcttaagaacccatgggtgctctatgcacccaccaaatttcattccgaaactccacggacacctccagaccttcctttgttaggtctttcgctccctaccggcaagcgccgaaaccgacttatttttgctctcaaaatttggcctaagccctaaccgatccaatcctaaaagatttctctgtaaatttcatccgtttaccaccattaacttcttaatatttaaatttcaaccgccccaaaattccccaattttttttctttagcttttccatttccaattctatggcatccacttcaacagccgctgatgaacataatattcttggcaaatgcattgtaagcgtaatgaatttttcaggaaattttaaaattcgaaaatttaccccctcatcccctcacagaaagacaaatacgtggtgctgaaacagattggccagggaggctttggacgggtgtacctctgcgagaacaaatacgtgcgcggacaacgctacgcgctcaaaatgatcccggcaagtttatttatttttggaaacaatgccttcgacgatggagtctgtatgaggcctcattggagaaaaaaaaatggaaagaattgagtcagtgactttttatgagtcattgccctgagtttcttgaaccaaaaatttttttcctaatcaacctatttgtacattttttgtatcatttgaaagcaaaaatggtacttttccgtttgggtgcgccacatttatttaaaataaaaaacgtcaacaaaaagcgcgtgccatagggatccattcgattatattttggctaaaattgttgcttttatgactcccaaattgctgaagcgctgtttttgaatattcttcgcgctttttgttgacgttttttaatttaaataaatgtggggcccccaaacggaaaagtaccataattaatgttatttttaaaaatattcattttcccctttttagcaggtcaaaatttgtcaacaatgttctttccatctcacatttctcccacttttcactctttagaattggtcaactcctctccatttggcggcccaggcaggcaatttggagatgacgagacagctcagggagatgggtgggcatctttcccaattttggagttcagtgtttaattgcaggagcggaccctgcacttctggacgctcatggtctcacatttgcattaaaaaacggagaataattattttctgccctaaagtgcgttttggatttcagttggtgattttctccttcaggtaagcactactacgattacttaccggccgacaacagaaaattgtttcaaaatgcgaccccaaaaaggcagaaaactccaagtataaaaaatgcaggtaaattcgcactaactcaaaaaatattgcaacaaatttcacttttcagaggactctgacagcgtaagcagcaatcaatcngcaactttctttgtcgttgcatcaccgttttgagacgttcagaaaaccaataggacgggctgtaagcgactttcttcacaggaagtagaagaattgacgnagatggtgtagtccactgtatgtatttgatcgcaaattatttaaaaaatagttttaactttgctttatttacttttttcaaacaaataaataaagggtgctttgagntgtcactgttaaacaattaattccatcctccatcactgcatttcgaaactcttcttgtcattccttttcgaacgtttttt

SEQ ID NO: 18698 - DNA, 2890 bp, Heterodera glycines
ttcatcaataagggcgtccattggaataggaggaggaagaaaatggccaaagaaatcggccggagagcagtaggaacgggggggggggggggggaggatacccctcgcatacctaatttgcattttttttggtgtttctcacaattgtttcggtacgattcttccttttttaatagcattgaagactccgatttattttttaccaaaaaaattatttttattcttatttaattcaaaaattgttcgagttcgggtcaggcgttcggtattgggaaaaataaacgtcaaattcgtgattagcggcccaaaaaaccccaaaaataatcaaaatacaacttttacaggcaagaggatttgaacccacagcccagaaacccatttttaaccaaccgagcaattcgtttcccttcctttccctctgtcgagaatgtgccccgaggcaatgaaattccaatttttgagggcctgtaacttttgaagcaggcaaaatgcaccgctaaaattaaaaattcacaatacaagtcgaccccgctctatccaatggtatatagcttatatgcattttcccactcacagctcggaatgttcccttgttagcataggaaattctggggccatcctaaaaagtgacacatttttctgtatcccttcagctatttgttcgtctcccaggagcgtttcggcttcgccctttggtccgcccttttgcagggaaatatcacttggcaagagaccggcattttcccacgcgtcacttggtgcgattttgatgtgagaagaacaatatatttacattttttaattttttcaaaaaatgaacatttaaaatttttagaatgaaaatttgtaattttccccccaatttttcgtgttaaggtgcgcgagatgggccaaactgtcaaccacacggtgcaatgtgtgctcacactgaacgttttcatggagaaggtgtgtgtgcaattgacattaatttttcatttaatttttgtctcaattttcggtagaaattagtttagcccaaatgatttatgactaattggggggcggcacgggtttaattccattccatgaaatgatcattttcctattttctacgccactgaacaggtgttcctgatcttgtgggcttggtacgctgtgttggccgcgttgaccctggccaacatcaccgcttggctgtacggctatttgagcgtggcgtccgctgaccatttcattttcaaccatttggagatggccggcgctgaacaaatgctgctgttcgacatggacgggcggacgaaaagcaaacgtaggcttatgtttggagcaaaatttttttaggtttaattaccccctattttactttaatggttaatttgcatcaaaaaaattaattgaaaatgaatttattttttattgcaattgttgtctagtggtaggccagtgttcagacaaagacaaaaatcacaatatttattcattgaaaatttttaagagaaaaagaaatttggatttattttaattatggtaaaaattctgaaacatgtaacattaaaagaataaatatttcgggagcagctcgttacactccccgtgtcgttccctccaaaagtttttaaatttcaaacttataaaatgtttttttgaaattttctaatagaaaattaaaaaaaataccggaaacgatacgggaggagggcgtaatgaacccaaatatttcattttataggcaatttaggggggagctaattgtgtgggataaatgtgtgaaaatgatcgatgctgtttgttcatttatattttttgttgcgcagatatgcaattcgccgtgcgtcgcttcgtggccgaatatttgcgctccgatggcatgttcattctgcgcctgattggccaacatgcggacgttgtgttcaccaccgaccttgtccaccggctgtggacatcgcactacgaaattgagaaacagcgcgagtaagaacagaacagcaacagaacaccggacggacaaccgaaaaaaaaatcgaaaaattttttaaaagagattttcaagaaaaaaatttcagaaattttttgtaaaattttttcataattttttatttctgaaattcccccccccttcatatgaaaatgaaaaatttcaaaaagaaaatggctaataatttcttcaccgcattcgtttatggttttaaaaacaaaaacagcatcgaccagtctataataatttttgcgatttttttctttaaaatactttaaattgaacaaaatgcgccattctcatgcccagctattcgttacatccgatttttaaatttataaataaaaagactcgaaattttcaaattaccatccctttctttagggcattgcgtcgaacggagccgttgtggaagaagcattaacaacagttaggagcggaggtgaacagacgggcggccctagtggtggatcgcccggccacgtaaatcaacatctactttatttttacgacagaggcgaataatctcaaaatcaatataggggaggggccccacctgatgagtaaaatatatctctttaggaaacctctcagtatgaaaattttgaattatttgaaattaatcgaataatcacataaagcattgatcagattttttgtgtcgtgatttcggctttattacattttcaatcagtcggtcaaaagcctttttagttgttgcgcgatgagcacatgcgcgcgctgcttcggattggccttgggcaaatcagggggaggccgcttttcggcctgtgatcagtggcaagtgctgtgcaatgatgccataatccgtcatgaggataatgaaatcaatattaattaccacttattccgtttatctcgcacgatttatcgaaaattttcgtatttcaaattcatgaccacattctcttt

SEQ ID NO: 18699 - DNA, 1379 bp, Heterodera glycines
aattttataggcatactccccggtacaggactaactaacctgaaaaaataacaattgtaattggttttaaatttttttagaaattctgagtttttaactgtttattattttttgcaaaattaattcataaatattttttcagaaaatgctctgaaacgcaccaaattttatgtacaagttaaataaggctctctgatgcttttactatcaaaaagggagatgaataaaatttttaattgctttttaaacatgccaaaaagtttaggcttaaattaaaaaaattttcttcggttctagctctttcaataagcaataaaatcgtaccaaattttataggcatactccccggtaaaggactaacttaacctgaaaaaatgacaattgtaattggttttaattttttttagaaattctgagtttttaactgtttattattttttgcaaaattaattcataaatattttttcagaaaatgctctgaaacgcatcaaattttatttacatgctagtttaggcactctgatgcttttactatcaaaaagggagatgaataaaatttttaatttgctttttaaacatgccaaaaagtttaggcttaaattaaaaaaattttcttcggctctagctctttcaataagcaataaaatcgtaccaaattttataggcatactccccggtacaggactaacttaacctgaaaaaatgacaattgtaattgattttaaatttttttagaaattctgagtttttaactgtttatttatttttttacaaaattaattcataagtatttttacagaaactgctctgaaacgcaccaaattttatttacatgctagtttaggcactctgatgctttttctatcaaaaagggagatgaataaaatttttaaaaatttttaattcctttttaaacaggccaaaaagtttaggcttaactttttttcagaaactgatcagaagcgcagcaaactttgcagggatactgaaaggaagagaaataacctattttaaatattatctagtcagttcatttaaataatttttattcaaaaaaatttttttttgggttttcggggcagtccccctgaaccgatgttaggcttaactttttttcagaaactgatcagaagcgcagcaaactttgcagggatactgaaaggaagagaaataacctattttaaatattatctagtcagtttatttaaataatttttatccaaaaaatttttttttgggttttcgggcagtccccccgaaccgatgcgcccagatttatggggagaccgaatccttcgggaaaagcttccctatagtctgtactttaattctgcgttggtgggggggacccataattttgagtaccccaaacggacact

SEQ ID NO: 18700 - DNA, 2854 bp, Heterodera glycines
  unsure (1)..(2854): unsure at all n locations
attcaattcgcaatgatncatattgagcaattcaatgatcagaaaaaacgtgaaattattcacaaatttcacgcaataaaagaaaaaattaagaaaaggggaaaatattctcagaaaatttggaattaaatttggcaaaaaattgctgtaaaattgggaattaaacgaaaaaaaaatttacaaatggaaaaaaggaattggattaaaaaagcaggaattcattaagcgaattgatgaatttaaaagaagctacgaaaatggaaaaaagaatttggcattgaaatgagtaaatgtaaatattttttaatataaaaaatgtgtaatatttttacaatttaattaattatttaaaggtggaaaaaatattctaaaggagaaaaaatgagcaaaatgaatgtttattataaaatgaagaatgaaaatccgtctttatcagacaaaaaaattgctggcattttgaaaatctctgtaccaacactaataaataatatggaaaaagaaaataaaattataaaatattcataaatattcattatacaatatttgttgtttattaatttattatcatatggttttcttaaaatgagatttattttcaattgcaaattgtaatttattattttttgttcgaagaaatcgattaatttagataatggaataatgaatagagaatatgccgaaaaataatttaaaaatattatttacttggtttttttttggttgaaacaagttgcaattaatttccaaattgtccaaatctttccaacaattatgctctatgacctgagaagatttcctattcaaaaaaatacaagaaagaaaattattttaatctgctaataagcatataaatttatgtcataaatgcccgacagaataagttgcgagaaagaaacatttatcaataaatgatagaaaaaactttttattttcataaatatatttatttttaattactttgcgaatgctttcattaatgaaaaatgaataattttaacttaaccaatctcacgaattgtgatggaaatcactgaaaaattaagcaaaattccactattgtcaaaatgtgcaaaaatatgccagaaccaatcattggccagcaaggattttgatcagaaccaatatttattaaaaatgtgtaaattatcaataatatttaataaatcaccggcaatattatcatttcttctttctctttttttttgatttcattcattataacttaataaaaattttaaagaaatttattaaaaaacaacattatgataagcgttattttctactcaatctttggaaatttcttctttcagtttaaaaatgaataaaaattacaaaatgaataaaacaaagtatgaccaaaatatacggttcgtctcgcaaccgacgaagacgcaaaaaagaaatgacatgctaatggggatattagccgtggtgggttatcatcattgtggctctgattgcatgctattttggccgagcgtgtgatgagagcagttcggcatcggcatcggctggcgccagtgccaacaaatcggcaagcaaaagtgccatttcaagcacaaacgaaggagcaaaaaatgatgatcaacactctgggatatagatgctagattttagggatacattattgtcattatttggcactattttctcttcaagttcggcatattaggggaatcaattatggattaattatatagaaaaaaagacaattctataatgccaaaattggaaaaaatgaatattcaattgaattttattcgaaattatttcttttttaagagataaattttcaataaattcttccctttaaacaacaaatttgtctaacaacacaaaaagtaatttaaaaaattcaaatgtttttcaacttttggaaagtgtttttattcggctgactaattaatatccggccccaactttctgaaaatatttaaacgcttattggtttaaaatttttttcaaaattattagattttttttttaattttgtgccacagcatttttccataagttatcataagctcaccaaactttgcagggatagatacttgaaggaagaaaattagcttatattaaacgtttacatcccatatcctgaaaataggtttccttttgcttttttggcataaagttgaaaaattttttgattttaatgctcaatggttggctttttggcaacgctttctccgcttttattagaattattataaacattattttctaatgaatttatacaatttaaacattacacatttaatgaaaaaagcataaaataaataataaatataataaaatatttttatttttttagtagatgcatttgcttattattgttttagtgttctttttcataaagaattcaattgacaaaactttatcagttaatttatatgaaaagaatggaaaacttaggccaacttttgctgaaatatttggccaaaaatgggacaatgaaaaaatggaatgtgaaaatgaaactgatcaaaatgcaaattatctccaaaatgatcaaaatgaattaaattcggtcgattcaattagcagtgatcagaataatcaattagatgatcaacaaaaattcgaaattgttcacaaattcacgcaataaaagaacgaattaagaaaaaagggaaatattcagcaaaaattcagaataaaattgagcaaaaaattgcggaaaattgggaattagtcgaaataaaatttacaaatggaaaaagaaattggattaggtaagtcaaaaaaagaaaagaaaccaaaagaattattatgaaaagaaaaagagggaatttattgaacgaattgacgagattaaaagaatgaaaaaaaatggaaaacagaagcaatttgc

SEQ ID NO: 18701 - DNA, 1802 bp, Heterodera glycines
ctattctttttcctacgacgtattaatcccatgaattttttttagcggcagagccaccgtaatgtgaatcttaggaacacaaaagataaaccaaaaaatctcgacaaaaaatcgagataaccgataaaatcccgatcacgatagaatttcataccgattctcgactttccgcttctccgtcctcggcgtcgcccgacatgattggatggatctgctcattgttcccaaattgtgaatcgacaaaatttgaacgtgtggacaagccaacttcgtttttatcttcatcatcctcctcctcatcatggtcagcttcgttgtcttcctcctcgatgaaatgcaatttttctgccattttgtgacagcgttctaatttttttggattttccattccgctgcagaacgcttccttgaccgctggccaactcgtcaggtcatccaagttcatccgtacctaaaaaatagtgcgtgagatttctttttgattttaattttaatttaaggatttataatttttttttaaatttttattttattttttatatttttatgtgcaaccttgaagcttttttaagaaatttgtacacttttgagtggagaaggggaaatcatctctgttataaaatatacaaaatggtgaagcgggctaactccctgtgagggtgctgaggcgttataaaaaagccatcaaatacaaattttcaacaaaaaactgcctccaattttgggcatattttccattttttgctaacaaataagcaccaaaatgcttagtattcaaaaattacaaaagaaaagggatcgataatgccaaaaaaagcttgaaactattggactgagaatcttaaatttggctgagacggagttggccaaaagcatttgacgtccccgcaaaaatagacatttgtcaacgtgccttcattctcagctcataatcggtgaacagcttcccattttcatcacgtgcgggcaacagtttttcacatgggccccctttggtttcgtccagcaccgtctcactgatttctgtttccaaatcgggattttttgccaattttttctcaaaacttttcgtttttcttgattcaataaaccgcttaaaaaaatgttttacaccctttggacggggaatattttcgcggattttgcgcaaatttgccaataattcttgttgaatttcttttgctgattttatccgtctttcttcgtccgacaattcttttgcaacgataagtgtcgacaaagaaaaagaactattggtctgttaatcaattaaaaagtttagtttgtcacctcgaataatctatttacataaccccgtaaaaactcacttgctcattactttcttgtccatcattgaccatatggtttatcacaattaatggttcattaaatgtgtaatttctcgctgacattgctctgcggagcacatctcccgctgattgcctacggctaaatcgaaattcttcaattgctgcaaatgaatcactaataattaacgtgatgatgacaattataagaaagaatatcattgaataaataattttgcagaaataattaaataaatattaaatttataaagaaatgaaatgctaaatttatgcatattcaggtccacccattacgtcgtcagtaaacgtggcacacgcacatttctatattgaaatagcctcatgcttaaggaaaattataaaacgcatttattagaatatgcattaggctattagcgtaatttgataatatagcatttggcagtgggacattaggggaaggacatttgcacacatttcggcaaaaaaatataa

SEQ ID NO: 18702 - DNA, 2466 bp, Heterodera glycines
tcggttgtgccaatttcgtccgggaagccgctggcatgcgttttcatggccatgaattcggcaacgtagcctcgaaaaacgcggtcgctccactgcgtatcgtcccactcgacggggcgatagtaggccgtacaccggtacccgttacgaagcgcctccaactcgattgacgtcacagtggacacccacccccgctcatcatcctcgcgatgcgtgcactcgtagtcttcattgaccgctccatgcgggtgttgcagagcacaggtacggcacagcgggaaaagaagccgctgatcaaatttcacgggcagaacaggcacatcaacgtgatgggccggcacaacgaacactttgagaatgccacggaccggcacctggtcggcgcgtcgccagtcaaccgcctgctctgcctcaccaatgatgttcactcgtgttgggtgacccacggggtatgctgtcacggcattcgtgtgggggtagagcgaacgaacgtcgtaatatttcatccgccacccctccggcacctcgtagtgcagtcgctgcggacccacacgtcctccatggtagcagtccttcaaacggatagggccgctgtccttgtactgcgcaaaggagcgcttcatttcgttgttgttgcgcttctccgcgttgatttcgcactcccaaaatacgagcacttgttgcacctgagatgtgatgaaggccatccgtcgcgcatcgtcctcccgtatccgctgcgccgttttcccatttgccatcactgtttggggctgaaagcggtgacgcgggtggtcgtgcgcgtgccagtggcagccgttgacctcaatcacggtgtcggtcgccgcgatgtatccgtccacagtgtactggccaattttttctctccgcctggcgagtgtgccgtctgaatgctcaccccgttctttttggcgtaccagtccatgaatttaagcgctacaaggctttgcgtgtttgtagtgtcgtagccgcactcgggcacgatcgcgagctgatccctcttgaggtgattaagtcgaaagtgtctcattgaggcactggcgatggtcatcggctcccacgttatgtcaatgccaccgccgatcacttcaaatgcattgtcttcttcctcctcctcctcctcctcttcgtcgtcgttgtcgtcatccaagcatccatgccgctccagcgggtcactgatcgtcaagaactccgtgcgaaaagcgaccaacgcctcaattagtatgcgcgtgtcgttggtgcagtaggctgcgagctgttcacacaggtcgaagtgctgatggtggtgttccgcgtaccactggtcgaatctgcgctgtcggtcgggcgtcatcccgccgtataagtagtcagcttttggcggtagcgactgcagaatgtgcccataattcgccgcaacaatcgccaaatgagggaaaaattccttatcctgcacattgagtccaaacgctccgggcagagcgccgagcggcaccggcataaggttccagctgtctcttacgatgatctccgggtttttttcgcccctcgcaattttcatttcgtataatttgttaccccgacggatcatctgtggacaaaacccgttgaggaagaactgccgaaacagcataatgttgtcaaagcgacccccgaaatgggcgaagagcattgtgggatagcgcggatcgaattcgttgagcagccattgagcaaaggccgccattggacacggagtgatgaattgggcatcggtttgggtgtgttcataggcacggtgggagaatgtgacggtgcgctgccgcccacaaatgccacatggcgcttgtagagaatttcgccataaattttcgttatgcactttgtacagacgacatagcatgagatgaagttgacggaatgaagtctgcggtcgccctcaattcgcgtgttctgtgttgtttcgcagtcaaaggcgatcagcctgtactttttggggcggcacgccatcaactgctgtatgaagcagccccgctccggcttatggtaacatttgcaggtgtagcagaatttctcaccgcaaacgtgtccgcttcgtccttttcgtcggttttgtctgacattccacacaactccgcactggttgcattttttgaactgttgacacacattgctcgacaaatgatgactgaaacagtcttggctcatgaaatccttgccacatgctgtgcattctttgtaataattgtcgttgttgtcatccgctcggcacggtcgccccgctcctatgcgaccgcagtttatgcactttgctttgcattgtagcgtgtgaccattagcattatcgtaggggcactcacacgaaaagcagtagtagtcacgcccaaacaccgctttgcccaccccgcatcgaattccgtcgaaatgtccgttgtgatggtagagcgggatttcgatgttgtaattgtccggcccatattgaaattttgg

SEQ ID NO: 18703 - DNA, 2530 bp, Heterodera glycines
ctttgtgtcagcccctcccatcactttttgtccctcaattgaccaactgcccctcccctttttgccaccctcaattcccccggcccgttcgttcgtccattcattctgttaattgttgaacttttgcttcgcttggctttggtttttaacacagcgaataaagagcacatcgaagaggcttggtgttttggccattttggccagcccggggctacaacgaggggccccattttgggtgtccccgagtcccaacagtctccagactagggctttgtcaatttactctaacgattgtttagaactaatgtgtcgtagagtaagtgataaaaatatggacgatcacaggaataaaaaaaaagtaagtgaataaaatgaataaataaatttcccggagccgcagtatttgaaaattctagctaaatatgaaaaaaaaagaacagaaaagtgattacctaattcatttcgaaatattaagggatgaaacatggaacagcgaaaggcccaaaatgtgtcacccacacccatccgtcccttaatattacgggattttcagacagcctgtcgtagttgtcgggacagttaggttcggcacagaagaattgctcgccgggacactggcggcaacattggcactatatgacatagccgatttggcattacgaagcgtgccatccgccatggtagtgctggctttgtgggcaccgcgaggacaggcacaatttgggatggcaaaagtttcattgacgggacgatgggggacaccgaaaaacaagttaattaaattggcccaattaaaaccaattaaatcattgagacggaccgatcaaatgggcgacttcgtggaagaaaatggacgccattgcctcggggttgtgcgggtaaaactgaaattgttgcacattttgtgagaatattttaaatttattgttctataccaaccccggccatcatcacatttcgccctgagcacagcccgccgatgaatgcgagtccgcccgcgtggcgatgactgatcagaacggcaacattgtggaagggcaactgggcaacacgctggttacggtactgctcgaaagaatacagtgaggcggacagatcgtcgcgaaaagtctccaaaatgtccacgacaagcagacggatgttgatttggaagaagtactgaagcagattcgcttttaataatccctgttaatctgacggcgccgacaagaattatggcggattttccaactttctatttggtttttgcttatttgggcctaattagtgccattggcgtgctaattaatgttcggtctcacagtgtttgcctcatttcgcagtcgcatcacttctcgcttcacgacttcgtgttctcggcgataatggtccgactaaataatatttaaattgacccaaaattacctatgcaattcccattgctaaatgaaaggaaaatgccaatttttagcccactttagtgcttcaccgtcttcaagtcgacaaacagcagagcatagaggaaaaaggcagtagagggaatgccgaggctgactgccgaataatccggcgccggctctccccacaccgctggggccctgcgccaccgattgtgccgatgttcctcaaatttgaccactttttccatcgtcaatagatcaatttcaaacatcccctcaggaaaatgctataaaattttggaattcttcgcccattttggggccaattaaatacgtttgtttgtcctttggtttcaaattgtcacaacgcacacataccctatgctgattatgattatggtggtggtggttctgttgcttggggaagatgacctcgtccctttctatgaaagtgtcctcattttgcggtccaacggcgaaagccaaaggaaaaattgggagaaaaaggagggcaaagaatggacaaattggaggatgataaggataacgatgcatatattcactcactcacatagcagcaatgttcttaacgcggaagtttttgcgtattaaaattttgcgaatttccatttcgtaaaaaagagacatcggacggaacgatttatgtgtttctgacacaacaaagaagcaatttgttgtgctcccatccaatggaaatgttcattaatttttaatggcagcagaaaagggggcgggggagagaaaagttgttggaaatgatgtcattaattttgccgaaggggcgggggatattgagaaaaagagcaaatcgatgggggatgaccagcagcagcagaaacagagggcacagcacagcgaccaaccaaacacattaagcagccttctgctggtggtgggtggccaaaagttgggagaaaatgggacaaatgaaaggggtacgtacaaaggaggcactggaaggggagagggggggtgtgggttttccttaaataatgatcaaaccagtgtcaattgtaaaaaaattatgaatatttattaggcggcgatgcaaattggcaacaccggagaaaataccggaacttttaatgaatttctgaactaattaccatacattttttaggggggggggg

SEQ ID NO: 18704 - DNA, 1145 bp, Heterodera glycines
tgaaaacggggaaatcgatttactctaatgaccgtcttctattggcccggttaattaccctgatcagtccgtcgtactatccgctggcgatgcaatcgttctcccggaaacgcgtgatgttcggcgtgtacagctccgaggaggacagaatgcgcatcgcctcgcgcaactgcgtttgcgtctcctcgtcgcagcggtgcaaaacattgcccaaggcattgagggcctttaattaaaatttaattgacctttttattccccccccccggcaggcgatcacctcagtgatcggagcgtcgaccagcgaacccgacgaacggcctttttggaagaaagcggctgaaacagagcacaacgccataggattattgagagaaagacgcaaagtttgcaggggaacgaaacgaatgaataacaaaatgaaaaaaagcattgacagagggggaaaaaagggtgggaaaacggacggacggaaaatgatttggcaatcggacggacgaactcagtcccacccccgaaaaagcgaagaacgaacgaatgactcaccaaaagggggggggggatcagagggaaaggaaagccaaccaaaagccgaaaaaagtgttcaatttgggcgcttaccgtcagcacttccgcgcttaacgtagacaaactgttggctgaaagagggcgaagataatgaaaatgaacaaattaaatgcccgtccggcggctgacctgctcgaattggttggcacggcaatgcattgccaatcggatgaacgacggcggtccgccgttgagggacaaacgcccgcgccaccgccagcagcagacgaagggtcgacgacggactgatgctggccatcgacggacaatctgccaaaggaatgccaaacatttgaaattgcgccaaaggacattcccacctgttgttgtgctgctgctgctccgtcttcgtccgctcttctgtttttggtgcggtccaagtgaccgccgcggtcactgccgccgcggcactcgcggcaattgtggcggtcgcgacatggttaagtgggcgacgacggcctatcatcagttgcttcagtttagtggcattggcatcctacccattcatggcattggcattatcctccattccctcttggcactgccccccccccttt

SEQ ID NO: 18705 - DNA, 1356 bp, Heterodera glycines
ccgtcaacaattcgtacgctctattcacatactggacaatgttgtgttcatcacagattttgaggggctgttgtgcctcttcaacaacagtgaaaagagcggggacagcccggagacgggaggaaaggcgggagaactgctcgcaaagggcgatgtcgaaggaggagcggaggaaaaactgaaaatggagggggagaggggtaataagaggggaagaaaaaaaataggggagagagagagggagagagatagaagagagaacgggagagagaaaagagagagagagagagaaaggggggggggggggaaggagggagtgacctgttgaatccgcaactgtttggccagccgacggacggtccgttcatttggcatttttgggaaaaggacggcgtacagaacgtcgtcggcaccgaatgcatacggagtaaccgtcacgtctgaatggtcgtcgtcgccacggactgcgctaaagggggggaagacatttgagggggaaaatagggaaaggaaattaaaaaggggagaaaattagggggggggagtaaaatttaaaattccatttaattttgaacccgagaattcgttttccccactcacttcaccatggtgcacaattcgttctgattcgtcccgtccagcaacacaacggcgggccgccgctggcgactttcttcgccggagacggacgaagtgcaggtctaaaaagcacagaacgcattaaaaaggatgccaatgtttgaaaagggtgccaaaaggtgattttttttaaatttggctccataaacagtttaaataagccattaattgacctgcacttcccatccggactggcgaagagcggcgatgaaaggccaattgggaggatcgaaagtgtgggaggaagggacggaggaggaaaaggaggcggaagaagaagaggaagaggagaaggaacagcaaaaaggaagacgtccggagcatggggagggagaaggaagcaccaaaagagcctaaagcaaatggggggaaaatgagaagcaaagaaggaaggaaatgccaaacaaaaaaaagtgccaaagagcaacgccgcataatttggcacatttaatcattccaattcaatcgaaattcctaggcttaattggccaatgcttttcggtttgctttgccccatggggctttgtttgctgctggcccacccgtttgcattgtctgagcagcattggcccgtattggtcgctggcggagggagagcggaggggcggcgaagagggcgacgaggaggaggagggcggcgagtcctggcaaaagcggatcattacaacagaagcggaacaacgacggacaaagagcattggcaccccatccaaaatc

SEQ ID NO: 18706 - DNA, 2450 bp, Heterodera glycines
agaaaagtcattgggtaagagtaaaataatgcagaaatccgctattttttgctctaccatataaattttattttacatttttatccctttttaaaaaaaagatataaaaataaaagtgattttggcattcgggaccaaaggggggtgcacatggtttttgagtgaaaaaattttttcgacaaaaatcttccaaaaacatgtctttaggggttattcgggccgctgttcacgaacacgtgaacagattttacttttgacatcgtttagacctcagaatccctgtgtgattggggattctgaggcatcatttttggggggggggggggcgaagttcgaagccgggcggtgtacattatttttctttgtattttttgggttaattttcattacttttaataaatttaaatgtttggttttattaataataattttttttagtttaatttaattattttttgatgaataatgattttcatttaaattatttattatatttaattaaagaatttcagcttttattttaaaatttaattgtaaaatttttttcatttcaatttaaataactattcaattattatacatttcataatttgtttttcattaatataaagtgtattatattttaaaaaatgaaaaatataacacatcgattttttatctattttgattaaaaacaattccttaattaccataaatgctctatttgaatgcccactttctaatcactgttgtacctcttttaatcacttttgtacctcttctaatcacttttgttcaaattataatcactgttctacctctttaatcacttttttaatgttttaattcatttaaatgagtgttttttctatataaaaaaataaatttttttaatttaaattaaattgtttttttttgtgaaaaatttaattaaaattaattattattttttaaattattatttttggtgaatgttttatttaaaattaattatttattaaaattaaaaaaatttcatgttttaatttaatttaaatttgttaaaaataaattcatttcgatttcaaatattctataattctatatgctttatagtttatttttaataaagaaatggagaatttcttttgttatattaaaaatattattaatattcaatttttctttttttaataaaaccatttccttatttgtttaattttaaactatacttcttttaaccgtaattgtacctcttttaaccgtgtttatacctcttccacccctatggttgtaccctactaatcactgttgtacctcttctaatcactgttacacctcttctatcacttttgtacctcttctaatcacttttatccctcttccacccctatggttgtaccctactaatcactgttgtacctcttctaatcactgttacacctcttctatcacttttgtacctcttctatcacttttgtacctcttctaatcacttttatacctcttccacccctatggttgtaccctactaatcactgttgtacctcttctaatcacttttatacctcttccacccctatggttgtaccctactaatcactgttgtacctcttctaatcactgttacacctcttctatcacttttgtacctcttctaatcacttttgtacctcttctaatcacttttgtacctcttctaatcactgttgtacctcttctaatcccttttatatctcttaatccctgtgtgattgcccgtctgagttcaactaaattttaaaaacgggcgcgaagcgcccgcccaagcccaataaaatttgaaaaacgggcgcgaagcgcccgtccaagcccaacaaaattttaaaaacgggtgcgaagcgcccgtccaagcccaacaaaattttaaaaacgggcgcgaagcgcccgtccaagaccaacaaaattttaaaaacgggcgcgaagcgcccgtccaaggccaaaaaattgaaaaacgggtgcgaagcgcccgtatgagttcaatggatttaaaaaacgggtgcgaagcgcccatctgaaccaacaaaatttaaataattcgggccctggaaacgcccgttaaagacataaaaattcataactcaatgaaggactgctcaatttaagtgaattaaagctttaaaaatagcaaaaaatcgggagaattttatgagatttatttggttttataatgttcaaaagaaaaaaagttattccagaatttttggaaattttcgatttttcagaaaaaaatttatacctcggttctgaaaagtcattagggaagagtaaaatactacaaaaatccgcaattttttgctctaccaaataaattttattttacatttttatccctttttaaaaaaaagatataaaaataaaagtgattgtggcattcgggaccaagggggggagcacatggttttttaagtgaaaaaaatttttcaccaaaatcttccaaaaatatgtcttta

SEQ ID NO: 18707 - DNA, 2205 bp, Heterodera glycines
taaacaatcgctgatcaaaattctcgagtcgtattccccagatgctcatttgaaattctcagatcactttataattctgttgcattatgaattcttaaccccgcgtcccaaattttagctcatattgtgcctttttgatcatcccacgacttataaaaagctgagctgatcagttgttgatcattgaatttatttttgcgtccaaattattcccaattctctccactcatctgctggcttattaaatgctcgagctctgaattattatttcatctgaacccatcaattatttttgatccttcctaaattagtgtccctcctcctaaaaaaccattttgaaatgggttcacattaagccccctcctcctggaaattttttttcggaatacggtagtttctaaaatttttcaccgaaagcacgaagagaatgtcctggcggatgcccttccgtgacgggtcaatgccggtggtgttccacattgctgtgtattcgccggttgatgaacagtgcgcaccctccgtgaccagctccaaatcgctgccgccaatgtgcagtgaacttaatcacacagtgcaattagggcgattagtcaatataattattaattaatgaggtaattaagagggccaatttacaggaaatcttgcggcggcgtgcactgtacactgacacggtatttacagttggagtgcagcttcagcgtgcgctgcgaggtggtgaatcggttgccgtcctgtttgaacatgattggtatgccgttctccgcatcactgaacaaaaataagaattcagtgattagaacataaaatggacacaatttggcaccgaaaactgagtcttttgatagcgatttgtggtagcatgggggcatttgttaaatttggcaccgataaaaacaaatttggccaaagaacccaaattgaaggctgtgtgatattcgagaccgagattctcccgaaagtcgtgaccgaaagcccaaagagcttttgtttggttttcgtcgattcaagacaaattcggtcaaccctaaatcgatcaggacaaaatttgcaaacattgactctgtttcagtccataaaaacgcatgaataaagttgatcaaacccgtccaatcagtcgcaataaaatagcttccaatttcaagattacttagttttttgggctaaaatttttattgtcaaaatattgacaaaattcaacagcttgaaaagcgaaatttcgttattcaaatgctgattgtctctatcctgatcaaatcgataatgggccgtaaaatgcgtttttgtctgatcactgtcatcgatcgatattggctcgtcggccatccatcaatacatttagctcccgctaattagttggttcaaaagtcccatcacacctaatcctgatgctcagcttgaagtgcttgccgcttcctccgctgcttccattgtttatgtgcgccgcggaggcaccggcggagtttggcacttttgcggtccccgtcggcaccccacagtgttggccttggaccccgtcaacaattgtcatttccgctccacctgcgactgatccaacggaccgtttggcactcaacgacaattttggatgaattgtgtgtccaatgccggcggcggttgttgctgccgtaccattacagccgctgccgccgttgcgtgccgtcgttgaaagctttggccttggcttttcttccaccgccgccggcggcagcggtgccggcgtgggaacactgccgccgctgtcgttgtcgtcgttttccccggaaggcattatcagcagcatacaacagagacagcaccggaggcaaaaagatggaatgaggcctttttttgccagacacagagagcgacgagtgagagagtacactgctgggcccggccagaagagaaacagacaaattggcgggggcaaagaacgtgaaaaaagcgttttctgtctgcttgtttggcttaacgaatgttctctgctaaggcggctggcttgcttcggggcttaatgcttaaagggtccgagaccaacaaagcccatggtcttgtgtcttgagaatgggtgggaatgtctgcctataaaaataaatgaaattgtgccagcgccaatttaagttttgggcaccgggggcgagcgtgacatacacgaagccccaccccgctaatcatggacatggcacacgggatggcatcaatggcacatgcaccaaataaact

SEQ ID NO: 18708 - DNA, 1461 bp, Heterodera glycines
gagtaccgccgccgcagtgtgggccgtattatggtgttagaagagtgtatttccgcgagattaccctcgggggctgggggggggcacagataattcactttcctgccctagggacaccaaaaaacaagaaaaaaacaaattgattctggcggacgctggggcgacgacctctgtggggacagatgagccgatttaggtgcacggaaagggataaagcctctggcagacggaggcgcttaagtgatgaatgtgtgtggatgtgggagcatcgctcaatgaatgatgaagtgaattttatgtggaaaacgggcataaaaaattgacaaacaatcgctcggaatcaattattaaatttattttcaaaatttttaaattatttattaataaaataaaaatatattttcaatttttgtattttcgatttttaaggtatgtactgaattgtaaattaaaaagcactttaattaagcttaaaaatcagtcgcctgggcaaaattccaaaacggaaaaatgatatgccaaaacatggcaaattctcatctaaatgcttaaagcgctgctccaatctttgaaataaaaggcatagataaagcattaaaaataaaaaaagatgctaaatggttttcgaagtgttcccttgtaagtaatagctgaatagcttatgattgtgatcgtaacataactgggtgggacggtacggtacacaggaaaatgccaaaactcggcaattcgtgccaggataaatgggcagaccgggacagaaaaatgggcaaattgccgagtcatgtcgaatttccaaccaacatttgcgggaaaagttccctgaatttttactatttcattttttataataaatcagcgaaatattgaaaaatggataatataaaaagcaaataaaaaattccgggaatttttcccacatcctttaacatatttttttgccgtcgttgccaatttttgttttcggcggcgcgtggggcgaaggacaaacaaatggaaaatatggaacaaaaacatacaaaacatatgtcttttttgtgtttgagatgcatttgttggggctttgaggacaatgggaaaaaacggtgaacaaaataaatgatggaggtaaaatttattaatattttttttcactaggctacgccacgaaaagaggagatcatagttgttatttattttgtattatttttggaggttcgccaagtgaaaaaaaaaaaaaatttgccacacaaaaatcaaagacatcaaattaaatggactttgagccaggcacattaatttgctgcctctgatgatcagcaaatgccatttgttcgttggaagcaacaaaaaaagatgcataccgtatttcctataatagagccctgggggttttatttttcaacccccctccccttaaaaatttttatttcaggggacgtgccactaattaaggcgggagaggggagggggggggggggc

SEQ ID NO: 18709 - DNA, 733 bp, Heterodera glycines
aataggcaattaattagctaattacatttggttgactttcgtgtaacgaaatcggccaaatttggttggagtcgggggtcagcgagaacgccgtttcgggccacgtgcagctgatggagcccggcaaaaccgcgtgtttcgctgtgagtcaatggcattcgattgtcacccctacccaattccccccccctttctttggcagtgccttcctccgctcgtcgtcgcctctcaaattgatgaacgaactctgaaaaaagatggcgtctgcgcagcgagtaaactaattggatttggaattctattttcattggcattggcattttctacacaaattgttcctcctccaacaatttttttgtcttaggtttgccgacaacaatggccatcattgccggactgttagtccaaaatgcgttgaagttcgtctgattattgttctcccctttactttccattctctttttttaggtttctgctcagttttggcgaagtgactccgtttttaggatacagcgcgtaaaaaacaactttatttggttggtaatccatacaatttattaagtttggtggatttcttcccgaaacatgaaatccgaccgaatccgcaatgcgacgactgtttctgtaggaaaagacagcgcgaacaccgagtaaaactggttgggggaagccaagggacgacctttaaatggggtggcggatgacacatggggaaagcattttgggggggggg

SEQ ID NO: 18710 - DNA, 1774 bp, Heterodera glycines
ataattagggctgggatttttatgtgctaaaaatcctgaaatatgtaataaaatatgtgctaaaaaccaaaaaaaaaggcctaaatatgtgttaaaaaatgcaaaaatatgtgctaaaaattggaaaaaccaagtgtatttacgcaaaaaaaatcatatttaatatgtctttatcaattttcgcccgacctccaatcaaaattttggcgatatcaatcaatttgtaaagtcccggattaatttttccatcagttgaataagttccttccgggaactttgaaatccagtgacgatttaacacagcgtttgatttggctgctttaggcatttaaatatataaagaaattttctaaatgctaaagaaacgtaaagtagtcaatttttagggtgcattttcagattttcttgtattttttttacgatttttctcaaaaatgccaaaatatgtgcaaaatatgtgccaaaaccccgaaatatgtgacatatgtttttatgtgccaaaacgccaaaatatgtgtttttatgtttttataactcctctaaatcaaaaattgttaggagaaaatgctatttttgggcttctctcgccataactgagccgcaaaaaaaatatgttaaaacataaaaatcccagccctaataataatttattagcattgatcaatgcaactttaagcgaatgttgtgttaattgacaataaataaatatgaatttttgtggaatcaatttaaaatagaaacaaatcaaatgtgaaaaaatagcaatagaaatttcaataaaattggtaataggtatcaacaaattgtaatgtctttgtgtcattccgtcgcctcttccttcagaatttgtgtctcacagagtgtcgtgtaaatccctcctctgctcatcagttcgtcgtgcccacctgtgtttgggtgagcaaatgtttttctttggtctttctctgcctctgctaaccctgctcgacgactcggccgtctttgatcacgaaaataatgtccgaattttggatggtcgacaatcggtgcgcaatcacaagacaagtccgccccttgcgggcattttccaatgcctttttgacggcctttaaaacaaaggaatttcctccctttccgccccattcggattgattgccttctcattttccgtgtcaagtgctgaggtggcctcgtccagcagaagaacggtcggctctctgatcagtgctctggcgatggcaatgcgttgcttttggcccccgctcagttgggcgcccctttcgcccacccgcgtctcatagcccaaaatggggcaacaaaacaaacattaaggcaattaattaggggctaattggtgggcggtcatccgccaaattatgctgttccgccaatcccttaactgcacaccttcgggcagtcccagcacgaaattgtgcacattcgcctgctccgccgccctcacaatttgctcgtgcgttatgcgttctctgtccgccattccgtaagtgatgttctcgcgaattgtgcagtcgaacagcgtcggctcctgcgaaaccatcgcaatttggttgcgcaatctgtgaatgtttatctcctcaattggaattccgtcgatcagctgaaattagcactgtctttgattggtccctcccttttccatcctttcgttcttacaatgcttccccgggtgggcaaataaaaccgttcgagcaaagccatcaccgtactcttcccacagcccgaatagccaaccaaagccacggtttggcccgctttcacttcaaaactcatccga

SEQ ID NO: 18711 - DNA, 1407 bp, Heterodera glycines
agcaaatatcagtaactaaaatagtgcaaatgacatgaaacttacattggataaagcacccttgaacatgcccttgagcagtccctcgtttttgatgattttgatggcacagtccaaagtgtctaaaacaaaacaaaaatcagaacaatcaattgtgggaaagtgagggaaacgcactcttgtacatgatgtccttgcggcccgactgcatcatcatacgacgacggacggtgtcccacgggtaggagagaacgccggacgacacggtgacgacctgcgcaatggcccagttgacgaagaagttcatctgcttgccctccggggagaagagcattttggcggtgtcgaagcagccgaagtaagcggcgcggtaaatgatgatgccctggacagagacgaagaagccgcggtagagaccgatgggaccgtccgacttgaggattttcatgatgcagtccgccaaacctttgaactcacgggcatcggccctaaagggacgttttatttaagtattttttaaaattttaatctcactttccaacatccgctgccaaacgcgttcgcgcaaagtccaaagggtacacaaaacacagcgaagtggcgccagcggcaccgcccgaagccaaattcatggcgaagaacttcaagaactgcttctccttgtccactctagatttaactttcatttaaccattcaatgttgaacatacccttgcgtgaagactcgcttataagtgtccttgaaggcgaagttcagcgcctgagtcggaaagtaacggatgacgttggccaggttaccacgccacaacgacagaaagccctgctccttgggaacacggacgaggacgtcgatgatgcctttgtagcgtttgtccgcggtgatgtgaatggaagcatcttgcacctaagcaatacaatagttgaaaactgtgatacataaaggaaacccgagaattgttttagtattagtaaaggttagtaatcccatgccataaaggccggcactacctactgacaaatttctttcaaacctgcaacaacagcttgacacgctcgatgggtgcaacagcggtttttgagactgcagcagcagttccgccggatgcgaggtccaacaaaaacttcttcgtgttgaatccaccgctcttcttcttttcagcgccaccttcggacttattttcggacatttttactacaataagaatttattacactacctgaaaaaaggaaaatgaaaagcaatggtcaaaaatgaatttcaaaaaagttcatgcgctgcaattaacaaaaagtagggtccattgttaagtaaaagttaaacattttgtgataaaggagaatctatctgtcggccaaccctcctcttttttgcttcacgtgaaaaaatttcaagtcaatgagaacgaa

SEQ ID NO: 18712 - DNA, 2617 bp, Heterodera glycines
attagagtgcgccgggacagggaattttgggcaaaaccgggaccgggccttgccgggacctgagaagccgggaccgggacctcgatttttgttcgggatcggaaccgggaccaaccgggaaatttcaaaaattcaaaaaaattttaaaaaattcaaattttaatttttttaaagtgaaaataatataaaattatttttttaattttatttttattttataaaacccaaaagttaaagctaattaaattaatgaaaattttcaaatcgaatttacttttattatttcaaacaattaatcaatttttgactcaaatgatcgaatattattagaaattcagatttgcttttcacatcactttatttcggcgcgctttttccaaaaaacttttgggaaagaaagggggtccggcggtaccgataggcgccgccgggggaaattttgaaaatttgagtgcaatttgttaacagattttcaacaaaaaatgctgatttttgggattaataggctcattttgtactgattttctttaaaaaatgataaaatacaattaaaaaattgaggaatcatattttgtcggtaggaaacccatgaatatacaaaaagaaaattcaaaatattttagtttctgtaaagggattgaaccaggggaaagatgaagggaaagtcaaggagactagccactaggccatttttacagttggtactactacttttatcaaatatcttaattattatttcaaaattttttcttttcactccaattttattcactaatatttcactcagaccctcattcctaccagtgcttgttccgggacctcggatgaccgggaattcccggcccggtcccggtcccgacgcactctaatatatataattaattggataatgcccccatagaattggcaatccgcttgtgctttctccgcttgtcttctctccggccattttgtccccgagcattttggggttctgttttgacctaattgtctaattgctttttatttatccatttcacaccttttggcctgcaattttgtcgcctcgttttttctctcccctggttcgcgttcattaaccctttaattatgtttaattggaccaaatcatattttggattatatcgcctcgtataatggctcccatcgtgttgtctccgcttgtcttctcatccattattttgtctccgatacttatggagccattcattttgtcgccaggtcaaataaaaatttaaatgaaaaacaattaaatcaacttttttagggtttttgaacagtctcgtaagttttcaatttgaaaatccacatatttcattttcctgtcccagattttgagtccggccatcttgaccccgctaataatgtccccccagttgttacatccggccattctgtccccgctggtgctgaccccggccattctgcacccgacagtgatgtcgcccactgtgctctccccgttcgtgctaaccccgcaaattttctctcccaaatttctgggcggtcttttcctctccccctacgcactgtcccccgtttttaagtcgccccttttcgtttattcgatcgttttgtcgccgagttggctgagctgatcaaaaattgccttcataaatatttgttgttttccaaaaattttatacagaaatttaattttatttttcgtattattttattttttttcttcttaccatcttttttttgtacatatttttttcatacatatttattaaaaaatttaataaagaataaaattgcaagggaaatacccaaaaattttacaatgtaattttttgtattttacgagtgaatgttacaaaaataaccatttctacaatattttacatgactcttaaatatcggctatgtttaattaataatttgcattttttcttattatatttttattacttttcgttcgaattcgactcaaatgactgtggtttaaaaaaaaatatttttgatttgtaatattttagtgaacagttcatttctcgttttccattttcggtataaaaatcatttcacgcatatccaccaaaatcggtaatttgtggatttacggaaaattttgcggtcgagatttccgagacttcgttaataaaatttcaataggtaaaatgtttaatgatgaagaataaaataaaaagctggacacttttaattttgcgggaaattacaaataattaagggaaaagataacgaacgagggaaatgacagcaaatttatgggagaaatgacaacaaaaaacgggaaatttaatagacacatcgccaagaacattcaaatcggcataactaaaattctcttggcgtatttgcaagcaaaaagtgctgatttgaataagcttaaaacacactaaaaagcattttatttggcctatttggttccattttagcaactatttggtaaaattatcataattggaacaccgtttaaagagttcttaattaattaaagaactccataaagataagcaataaaaacattcaaatggtttcaaataatacaacaaaaccacaaaaatctcaaaatttaaattttttcttggggggtttttggagtcgttctgcacaaaattctcccgacatctttgagctcccaccaattttt

SEQ ID NO: 18713 - DNA, 1339 bp, Heterodera glycines
  unsure (1)..(1339): unsure at all n locations
ttgaatgcacacntgcaaaagcttccgtagctccacggaagttcatttggcatatgggccggctcatcgataccgattttgctgccggactcctctttgcactcgacataacaatgtccaggccctttgaaagggtatttgagtgcatattttatatttgccttgttaccgtacgcaaatagtacattatggtgcactcggtaacgcagcaaaatgtatgggttgtacggcacgacctgtgagttgtcgtatattaagccgttaacctcaatttgggcaccaccatcggttgggctaggccggtaatacaacgcgggcctgtctgggtgcagaatcgtacatttcgagtacggggctgggaagccctttttacaccgcccaaagttggggtcacgtggaccgcaccaactatcactgcatctatgcagttgcatatgcatcaattcgcggatttcgcgatgcatttgtgcaattggggagtcatcgcctttgtctggcaaaggtggaatatgagcccatatgtattcctggatgacttctgggactgcgtccaggtccgtctgggctacaatgtgtgcgtgtgggccaccacgcccttggaactccattgactcgcctgagccaaggattgttccgaagaaactcttttcatagagctcctggtggaaaacagcaattttgctggaccacacacgcatccacatgtcaaaacggtcagtgaacatctgaccatttttgtaaatgttctccttgaactctggccactcacggttgttcgtgaatgtgatgaagagccgcgccttttttgggttatggcaacgtgcaaaaatggtgttacagtcttcatacctttttttccaatactgaagcgaatttacattcttttcagaaaggcgaacaacactgccaatgtcatcaacactcttttgttgtgcattggggttttgccgagcttgctgcttattgtattggttcaccaaataatgcagcaaattttttggagtactaatgcgcaagtccatgtctggacggcgcaaaaaagtggcaatttgccagtcaatttttgcagcttggtctaggacccagcgctgtccaagaccaccaccacatgaaagaatgtggtggtattgccactccaaattttcatcccttattgcgagatggtacttgcagtaatctcgcagagaaatgaattttctcgtcttatcgatgcgatcaatcaatgattcggtcgatgcgaccgactcagcatctgatgcatcaattgactcagtctcgcatgagccatcatcggacattgcaacagagtcaaacatttgatcgacacattgatcgcttc

SEQ ID NO: 18714 - DNA, 2201 bp, Heterodera glycines
aaatttggaaggtgccgctccgttcagagcaaccggcgactgtcgcgcatgtccaaatgccggtaaaaaaggggttcaacacgtaaaacaacaatttctaaaactcaaatattttatgcattaccgaaaaaatgggcatttttaggcttacatagcgaaaaaaaaagacattttatatttggtaaatttttgaacagatttgtagcgaaagtttgtccagaaaattacatgaaaataaatttaattaaaaaaatacactctctaaaatcaatttaatttactaaaattccttttttttaaaaaaaaagtcctaaattttatataattttaatcataataattaaaagcctaatatagcatatttaacaaaaatttgtgccttacttatttagaacactgaaaaactgacaatttttggccaaattttgctatattttatccttgaccaattaacaatttttttgtgtttagtctcaacaaaaccaaatgaattatggcaatgccaatccggcacagtttaatttttatccaacggcgcctccagtgcaacgcggagcaccatgaaaagcggagaatggagcatgtacacggatttttagttgaagaaaaggattcacgaacggggggacatatagaagactattgtagctaaattttgtgtggatttccttatttctgcataaaatttttttgttgatgtttaattggtgcctgttgtgacagaagaccccagacaaaagactcactccgacaaaagacctatggacaaaagactcataccgacaaaagacctatggacaaaagactcataccgacaaaagacctatggacaaaagactcataccgacaaaagacctacggacaaaagaaccacaccaactaaaaaccattcacgtataaaagacgcaaaaaaacccattttaattaaatttacaggactcaggttacccgaccgagtcagacctggatacccggattttccaagacccggacccgacctttttaaaatacaatatgtcgtacctgacccggcaggtccggatccaaaaaaatgcactgccaagaatggaagtcgggtcaaatttgagggaaagaaaaatttagaaaaattaatttactatataaatacttttactttcttttaaagtggcgttgtctattgtctctctctgcttattgtcaatatcaatttcttcacatagcgatgaatattaacagctatgtttaatatttttgttgaaaaactgccacagtatgcaagaataataaatttatatgtttaaaaatttattagacaattttaaataataatttccttcctttttaaacgcctaaaaattttttttttttttaaagacaagtctattaaaaaatttgcaaaattccatccagaatccaatgttaatcgaaaaccttaataatttaatccaaatttttcggattttctatggtggcatatatcgacagacatccccggactacactaaagattttaggaaacatagtgctgcaaaaaaaaaattgaattttttagcaggcatcacctcatttgtcggaagaatatttatatcaaaaacgtcataatttacccgtttttcccaaaaattaccggttacgtgctattcaatttgaggaaaaccaagaaaacaaatgaaaatttaaaaaaatacgatttcgagagttttgattttttaaaccgttgattacagtattttagctaattaatatcttattgtaaatggagagaatttttttatcctctagatttataatttatatgtttattacatattcataaatgtttatgaacatatttgctagattaatgctacgactcatttgtctgccttttttgaacacaggaaggcacagaatcaatatcaaatcaataaagcattataaaattaaaaaataagcaaattttattattttgttgcaaaattaatatgtggattgtctttatttttattaatttttttcgtaaaaaaaataaaactttaaattaatttagatttaagcatatttggctaaaaattttacaataaattaaattatttagttaaaattgttttggtttttttaatattaatttaagtaagataaaaaataattttctttttttttcattttaaaatgtaaaaaatcacgtaactttttctggatcatcccatccataagtataaatccatttaacaatgtgc

SEQ ID NO: 18715 - DNA, 1642 bp, Heterodera glycines
tatattttttaaaaggctcaaaatttttatatattttatgtttaatgatgttaaatcaaagacagtttgtatataaatgtatttatatacataacacataaaatgaatctgacaaaaaagaactgtataaaaaatccgaaacaaacataatacatacagtaaaagagggctatcagataaaaatttgaaaatcataaatatatgattcataattttgccaaatgaaaaaagcatttgaggccaaaaatcatcattttgatccaaatcaaaaaatcaacaaaaaagttttttgcggtgcgtttttccaagaaaactttttgggaagcggggtccggctgtgccatagccaccgcctggaggatttttaaaatcgattttaggtccattttgcgcttagaaatcatcatttcaaaaataaaaaccgtcattgactcgtaaatcaaatcaatgatgataaatctcataaacaaattgtaatatatagctaaaatttttgatccaaatttttttatttctatgttctttcatacataaaatcatacatatacaaggggtgtctcgaaacacccccccccccccatcgttcgtcgtaagggggggctgtaaaagagggagggggttgtcgtggagggggtcgttaacgaaggaggaaatttaaaattggcacaattttcttagcgaaatccatacaaaattttaaaaaaaaattttccggcggcgcctattggcaccgccggaccgcccgccaccccttcccgcaaaattttttttgaaaaacgcgccgcaaaaaaagatggtttgaatagcaaaaaaaggtcgccagaaaaaagcggtctgaatagaaaaaaggtcgtcgccggagataaattaggaccttcgtatgaaaaatcggtcccgagacaccccccccccctgtcccaatcgtccgtcgtatagcccttgatctgagaaaccctttgtatatgtatgaaccaaaccaaaaattataataaaaacggtttctgtttttaaatcctctaagctggctatactttttaaaaattattgacaatttcgtcgattagtcatcaaattttcgaaatttaagttttatttcgtttgtcgtcggcattaccaatgcagaacaacaacttatcatcggatgcaaaatgaaaaaatttattttatagtcaaacctactaaaatttcataaattttcaataaatttaattttttttaattgcaaaattaagttttcctaaagttttgattaattttcaaaattcttataaatatgtttagaatgatattattttatagaggaataaaatgatttgagggaaggaataatggtttaaatcccattatggaaaaacagggcaacttggacgacttggtctctcggctgacgcgcggcattggcatcaccaacgaaaagttggaccacctgttgacgcgcattgacgcggtggacgcagcggcggaacgtggcgaacgcattgaactgttggagcgacaggtgcgcgaaattggggacgacctgcacatgctgaagccacctattgacgagctgttcctggacgtggacacgctgcggcaacatcggcacgcggacgcggccgacttcaacaaacagtgagcggataatcgagggatttttaaa

SEQ ID NO: 18716 - DNA, 1575 bp, Heterodera glycines
atgacccaccgggtaaatctcctggtaattgttgatgagttcggctgaccgatggcatttgaaagtgaaattgtccttcgggtcctttggctgcaaacattgaatcgccactcgtcctaaaaagcgaaacatgggaaaattacgattagattagtaatttgccttcggtggagccaagagcgaatccattgggctgtcccgtcattttgtctttgaaaatcgcaatgcaacgactctaaaatgaaaacgaaattcgagagagtaaaaggttttgcatgcacctgaaacttcaactgagattccacgtcttgaatttcagagctaaatggaaaaaagaatgaatgctagaaagctctctgaaaaactcacggtgttccgtccaacttatacattttgatgtgtctgtcggccaaagcaacgaccatcagcgggaaaaccatgtcggagcagtacacgcgttcaggcagttggatggttgccagggagttttgggtgggcaattggcgcatgtcccaaaaacgcagcgtccggtcccaacttcccgtcattagacactgaaaatgttgaacattacattcaaattctatagtggttacagcccctccaccgccaataccgaatattggggtgtcgctatccaatggcaacttcgcactggctcattgtgcgtgccaacaacagccatttggtttgagcctaaatcccaggcgaacgcttgtttgtctgcaccagcgatgaatatttttgagccgtcctggaaagagtacattttttggaaaattttcaagtctgattacaaaacaaaaaattacgacctccgaccaatccagcgaaagaatgggcgctccaacattttgcattgccttcggttcaaccattccattttcattgacctgccaaatgcgacaggtgttgtcccaggaaccagcagccaaaaaaatgggagacccggccaccagcggattgaatttcattgcctgcacagtgtcatcgggagcttgtggaaccttagaaaacaaactcaatcgagccaattgcagcaagtgtaaaagcagttcgcacgagttaaaaaacccaagatacatttactacatattttatataaatccgaatcgaaattggcgcgacattcacacaacaacacatgctgtttcgtcacctcgatgtcctgctgcgttgtggtcgaagtgctgggctgcacaactgcggtgttcgcagcgccaaagagaccaccactcggcttgctgccaaaaggcgaagaagtgccgatggacgaaccaaacaaactcataccagaattaacaggacacacataaaatgtcggttaaaaaagtcagatatgtaagaaaaaatcatggaattgctaaagaaagacgaattactttttttaaaagttttcagaaacaatttatacacatttatcgatgatctgccaattttcctcgtttatgtgattcaattccgtcgcaattttagccggcgactgcttttccctcctttcctttttcctctttcttctcacttctttacaagccactgtgaaattttataatcaattcaaaaataattttgatt

SEQ ID NO: 18717 - DNA, 976 bp, Heterodera glycines
gaatggtggattattcggctatttcgctcttttcccgcattgtctgtcgcttgttcctttggaggtgagttgcgctgcttttccccctgattttccagccgagtgagtcgaacacggcgaatgatgtaattcggctttgattcctcatgctcaagttcgcattcccaattgttaaatgcaatttttttctcatcttttgaagggaaataagagtgacacctaaaaagaaataaataatccaactattaatgaaaatgaaatttttatttaacgaacgttgccgatttcttacttgacaaagcttttttccatgactttgctgagcataatgcagattgaaactaaaacgagttttattgaatgtacaatgagagctgaaccaaccttcttgctcaaagatcatctgccaaaagtcacaggtggtgttgggcagaggtccctgggtcagaatgtaattgcgatgcgcaaaaggcaaatgcaacggggaagcattaatgtacgagtcactctcggaagaaacaccgcacctcagcattattctgttctggtcatctgacaatggaaaaaaacataatcgtataacacaagaaatattttataaaattgtaattttatacaataactccatagtaatacttacatggcaacacattccgatatcggtttttctcatgaaaagtgttggacagatcacagcacaaactcagctttttcgcctgattttccgactccacattaatcttcttaaaaaagtaattttcttacttaaaatttgcagaataacaaaaaaaacggacatgaaaaacctgatcccaactgtcgttgcgttcgtactcatcaaatttgcgcaaaaaatacgcttcgtccattaagcgaaatgtgagtggcgaatgtcgagggatatataaagacaaatcagaggacaatagtcgttttggaacttgtatgaattgcgtaattcgaggatgaatggacc

SEQ ID NO: 18718 - DNA, 2030 bp, Heterodera glycines
  unsure (1)..(2030): unsure at all n locations
attcgaaggacggatatagacaaattggtttttctaacgtatggattcgggttttaatatgagtttcaattggcggtacgaattcgggttcgaaatgagttttaactgcagccggattggtgatcagccatttcatttgtttactaacccatcagcaaaatttatgctaaaattcgctttttatcgcaaattgattttttttgctcaattaatcacattattcggattcccccgtcccggaaccgtttaaaagcatatttatatcgacagttaaattcaaaatcaaaaaatgagagtaatctttcgtagattagatattgcacacaaaaaattacaagtgaaaaacaatcaaaaaactgaaaatttctctgcgattcttcccccccccctcattttccgtccatttcgcttccgttgtcgggacgcattttctttgatgtcggagtccgcaagatttcctgaatgtgctgcacaatcagatcaatggccacgtcgttttctgctcctcgcggaatgattacgtcggcgtactttttggtgggcaggcaaaagtcttcgtacgccttaaaggggagggacagaggtcgttttcccgaaacatctttttttttttaatatgagtagaaattaggtagttattttccgaatttttaaaattggggttttttaagaaatcattataattatttgtttcaatttttttcaaaaattttggtgaaaaaaacttggaatttgggaatttttattcattgttagttgtttttcttcatcagcagataatagccttaaaggggagggacagaggtcgttttcccaaaaagtttcaaatgatttttaagacaaaaatgaatgaattttttcaaattaagtagcaattagggaattgttttttaaagaaattattaagtgaacgccccgtgaaaaaatgggtcaaatggtataccaatcgattcatctcaagaagctaagcacggaaaaatatgtctcgagttgcggaaatgccaaaaaaccgctttttgaaccggttcaaaactcgaaaaattgagagatttcgcactctaacttacgatcaaattccgacaaatttggtaccatttgaaagctcttcaaagcattgttttgtgtggttaagcatttgccatttcacacaaaatgccgaagtgagcacatggcttgggcttatcagcacacccgcgcactgtttgtacagaaactttttcgtgtccgccgtacaatagcgaaaggcacggacaaaaacaagccacggaaaacggagcgatcttcatcagcagcagcaagctgggcatgtgcagttgcactgctaacagtggttagctgacgagaaaatgcaaaattaaattaaaataattaagttgttaggacattttttntagaggagcatctaagctaaatataattttctcaaaatagactaagtttattgcctaaatttaaaaaaatagttttatccattgtttcattttttatatattttattatgaacataattttgatattttaattgtttaaaataattcaactcgtttataacgccctaatttatgtaatgaattaattaattaacatttggctgtgcttcatccagctcataatagtcggaagtcgcacgcgcacagaaaaaaacatttgaaataaagaaaacaatgaaaatcattaaagacaatcagcgggaggctaattagtaattaatagctttatctgcctttaattgaaataagttgaaaaaaactgtagttaaaatttgccttatgtaaaaaattcaaagaaaatgtcaaatattttgtgaatgaaaaattgaaaagatcagttgatcagatgattaaataataatagcgccaaaatcagtttataattggggcaaatgacaggtggtccaacaagcaaattaagcaaatatttaataaaagagcgtgggttttattagtgtacaaaatcatgaattaaaacaatgtttgttcgccatacagaatggctttacgattggtaaaagtgccaaattaattaattaa

SEQ ID NO: 18719 - DNA, 2091 bp, Heterodera glycines
  unsure (1)..(2091): unsure at all n locations
agaaacaccgagttcattggctggtgaagtaaaagcatttcctaagattttgtttcagtttattttagactagtatttttttcgagtgtttttccacctgactgatgggactcgcactgaacatgttgatgttacccgtgaagcttggacttattggcactgtttcactgccctcttgcggcacagcaatcgccaaaggacattttcctgaaaataattgaaattataaaaaatacaccttaatatctctaggtttttttctttanaattgtgtaggttaaagggttagtttggattcgttttttgcagtaataatgatcatttttcagtcacattcagacctccgacttcgtcaaaatgccaacgtttatgatcaaaaagaaatttaaatctgttgattttaaaatgaaaaatggattcaactaattaagtaatattgtcaaaaaaaagttaaccgatagcattcacaatattttgaacattagcggcttcatcgacaaaaggctgcggttggatttccatttttgttctataatttaactcgacgaacataacaccaaaaggagttggtaattgtccgagttttttagatttaaattcatcgccaagctgagaaaggtctggttcaccgttaaataccttaaattgtaaaataggaatgcactatcgcttttatgaaccctgtaagtgatgacaaaagtctccgactcatgggaagggttttcttgtcgcacataatgacgataagtcggtgtaaagcgtgacgcaacgaccaaagacctcagcagagtggacaattggtggtagaaacttgtccgggcactttgcgtccataagccatgatgggctgaccaatcttggcactcagaatcgagtcggatgaccctaaacattacataatacaaaaggaatcgttcagattgcaaaaccaggcttctaatggcaaagtatcaccatcgtccgtgtacaaaatgaattcgagcgtcattaccgtggaatttggcggatagctaaaacaatcttttggatattaataatgagattaaattgtcaattaaatgactttttgccaactgtcgactttagatatgcagaaatttcaccaatctcatcgattacaatattgaaataatctgcttgttcaggatttggtgtgcaagggtgagaaagcattttgcccattcgtgcctgaaccacagcttgaaccattctcgaagaaaaaaagcgtaaaaaacttgaatactccttgaagtcattggattcgttgtagctaaagtttgcgtgaatcaactattggataaaaatttgttgagattttgtaggctaataaaaaactcttagagcattaaataatatcaagaatactaatttggatacttctagaaaagttatgctttaaatttgttattttatagtcgtgtaaattgttcagataactgcaatagagccaaactatttttgaaagtgacaaaattacgtcattttcactggtgttttcaaacgagcgtttcttcaattaattacaatgatgttttccagagagcgttcttcaataattacgaataagaatacatatgagaaataactcaattgacttctaaaattaaaatataatacctatttaggtacatataaattttgtatatttcgtaaattttttaaaaattctatttctttttaattcgaaaaacacactaatacgcagggatacctaatgcgaggattttgtcttattttgtggttttggtgaggccgtgttcaaaataagtctgagactttttgtttttttggggaaaacccgcaaaaaccaatctgctaaaaattcaaaattttcccctacggcgccacatactacctaatttttattgaaggagaaaataaaaattctgtacctaatccgaagaatttttttttgtgaaattttcaaaaaaatgccaaaatagtggcaaaaatagtgacgaaacgccaaaatagtggcaaaaaactattttagtggccaacttccgaaaaagtttttttagtggcaaaactccaaaatagtgattcctagtgatgaatagtggcgttataacgaagaatatccgaactaaa

SEQ ID NO: 18720 - DNA, 1042 bp, Heterodera glycines
  unsure (1)..(1042): unsure at all n locations
tggcatccatttttggggggttttttcaaagaaatttcaaaaagattnnnntttttntttgtnnttttggttggttccctccaagcccnnnggccggcngggnnnnngncgcnnggggnggggggnggggagaaaaggngggncagcggaccacaaaaaaaaggggaaaannnggccaaacaanaggaaacngggcngggcnngaggcagcaagagcagggcacggcgaccgcaacaaggaccagcgagaagaaagaagccancgagggggcggaccccccaagccaagggcacacccccacacaggcgcgccaactgttgttcgcccgggacgagaacgactttcacgaagacggagacggagcagttcaacaatcgcatgacgaaattgccaaaatgtgcatggaaattgtgccaaacgcgacgacactaacgacaatggcattagccggcacaaaattgccaacaagttcgatgccatcctcggcatcatcatcgtccaattgggtaacgatgaggagcaacgaccacaaccaccattcggaggaaaacaaccgtcatcagcagcagcacatgtggcatacgcaacaactacatcatcaacaatatcagcagcagcaacaacaacatcatcatcaacaacaccaacaatttcaacagcagcaatatggccatggcacttgtgccaataacagcacaaataacgccaattattggcaaaatgtcgacaaatgtgacgacgacgacaacaacaacaaccacaattacgccaaaaacagggatcaacaacatgagcagttgagcatgtggatgcgcacgcatggcgtcattgaagctcatgagaccagcagcagtgccatggactgctggatgccggccaaagtgtcggcatcgactaccgctacgccggcgccaacgtcgatggcatcggcttccacaactccggcgccattgaccgctgtgccggcggaacacatggcgtaccagcggcagcagcaccacaccacgcatccgatgaacgccgcgcagccatgggcacagc

SEQ ID NO: 18721 - DNA, 1542 bp, Heterodera glycines
ttttctcttcaatttggcacttttattaatcacataatttgacattaaacaaaacaaaattccagcacgaaactgcaatcaccacctccgcgcttcaccaccattaccaccaccaatccaccgacatttcttcgtcctccccctcgctgcttcaaaagcagcagaacccattggtcgacatggtcaatccgccgagcaatggcagcatcagccaacactcgtcgacctcgccgcccagcctcacaaatgtgctgttgtgattgatattcgaaaataaatgcattataaaattccctatttttgtacatttgtgaatttatcattttagagctttattttttattgttttgttattttgctgttattaatcctcgagatgtttcctctgaacctttttttctgggctttagctaattgtttcccgagtacaaaaaataactgttcatatgttctaatatattcctatcctttctcaattaacgcatacctcaaaagcataaatcactgaatatataaattcatttattttattaaaataattggccaaaaatcgcgtcacagtcagctggggacaactcagcctaagacaactcagccgagaacaactcagctgatgggacaattcggctcatggacaactcagctttacgagatttacaaaacgcaactcatacaatggcttaggctaggcttaggcctaagctttaggcgaggcataggtttaggctttattttgtaattttttattgtacggctgagttgtccatcagccaaattgtctcctcggctgagttgtccccagcagctgactagtccagaagccgaccaaaaatattcagtgatcagaattgaactcgagaattgcaggacatgactttttggcctcttgctaactatgcttttccttgggtcgagattctcgctcgattggcttttcctattttattttaaatttgaaattgaatttaattattttattctcatttgccgcctattatgtattgtttgtacataaaagggctgttgtaaatgcaagtgcttgttttgttttttgttattcttcctctgctcttttgttctcgcgtttttttaaacgccaattttccgaaatgtgatacaatatttatttatttattcattcctcaatcattcctaaatttataaatatattgtcgagggtaaaacccaattagtgctaggccagatcgaactgccacgactcgcactgtttttcgataaaaaaaatcgctataacttttgtcaaagttgaacaaattaaatattcggcaatggtgaggaattgtggtcccgatgaaaaatcgtagaattaataaaagcaatttttctgggataaaaaatatgctgatcacgaatatgaactcagattttacaaaagccatcatttgtgtaagatttttcatcaattctcacaaaaaaaataaaatgcagccaagccgactcgaaccgcgaccccccctccccctcaagagacctttcaacactcgacgtaaacaaaatgactcgacgtcatgtttttagtat

SEQ ID NO: 18722 - DNA, 2308 bp, Heterodera glycines
ccagggtgtttctgggttacccgaaccccgataccggaaacccgaaccccggccttttctcgacccgaaccccgacccgatgattttgggtcgggtttcgggtcaaaataagcactggtaagaaagggggtctgggtgagaaaaagagtagggaaatggtgaaggagaaattttttgagaaaaaaaaaattaaattatttattttcatttaaagcattttgttcgtatgcataagtggtcaagtggctaaaccttctgattttattatttctcgcttgggttcaattccccactgggatagaatattcttcatattttctttaccattattttaattgaaattttaattaaaaaaaaatattccaactttttttcattcattttaagcatcctaaaaatccaaaaattaatcaattggtctttttttacaaattctgttaacaaaaaaaaaaattaatccggagaaagaaagactaagcctataaatttttggaataattttcgtttttaatcccgttaatttactatctttttggaaataaatccgtttttatataataatttattacttgtttatttctaaataattatgtttaatctttctttaatttatgatttgaatgatttatcgatatttatcgatatttatgccgtttcttttcttggaatgagcgtttaattttcttaaagttttcgttcgagttattatttactaactctgattaatgtaatattttttggttcattttaattaattttttgaaatatatagacattcgtttttacttatttttatagttttttattaaagcgtcaagtttgttttcttgatatcctaaatttagaattatttttgcaatttgctgccaattaactttttgtaatttttatcgcttatataatttattaaactcattttatccatattataatgagataatttttagtgctctttacaagcccaattctcacttcattttcttgtgttaatgacgaccgcacttatttttgcagtaatatctttactattatttaaaaaatattttttttttctctgagttattatgtttaatgctagaaatgatttttaaattattatcttttctcgggctgagtgttatatgtattttttgtttaaagacttatatgtgtttccattttatttttcgcaatgtatacgatgtgtcctattgagcaatatattattttttcaatttatttatatattcccagcctttataatcagtattcttatttatgtagagatataattttaaatgatttgagaaacattgatgctttctttttaagatcttttggtgtgtatctcaacaagccctgagagataggcatttgccgcaactgtttaattatgttttttctgcttttttctgttttttaaatgtgtcaaaatgtatttttatacacatttaaattgcaggctgaaagcaattaaaaatatgttttaattaataaatattttggtgtgaagaatttaataaaaataatacaaattggttgtgtggcggcataaggaaagatttattgcaagttctatattcatattattcattagatttacatttttatattatgtttgaattaaaatatttttgttaatgtaacttatttgaataattttttattttggcttttatagtacgttagattcgcgcatgatcaagtctcttggcaaccattgcgagaactctttttaaaaccctaattattttattcataatttcatatttatccaatgttaaacatattcatttaatattttaaaattaaaatgattgattgatagaattaatctacaatataaattcaacattttataaataaaatttgatgcacaagcatgacaaccgtcagacggtttgcaaaggcgcgctagatattcatttactgtacaagtattgttctaacaaaaataccttttttaaatatacaatgtatctgcaaaactttattttaaatattgaaatatttttaattttttttgatagtattgaaatataatttttgattatattaggtggacccgtaacaagatgcattacagattatgaatattatattttgttttcttttaacaaattttaaaatgaatatttaccttaatcaatgtataaatctatataaattacttctattacatcattaatattgaattttaaaatatttttatcaatattgaaagttttatttttaaacatagatttagtctgcgacgtttataatgaatgatggctgttttcgcagcaaacttatttaggctttctttgtatatataaacagcaggctt

SEQ ID NO: 18723 - DNA, 3224 bp, Heterodera glycines
ccaatttttataaaaaatagagttgaagagatacaacaacttcactcttggaattacacatcacttttcattatgtaaaatcagctgataatccggctgatttggcttcacgaggagcaactatgagtgaattaaaatacaacaaattatggtggaatggaccaaaatggcttaaactggaaaaggaaaattggccacctcacagcttttacagtcctgatcaagaagaggctccatatttagataatacagaggaaataattaacactcaaataaatttaataaaaaacgaatataacggaattatcgaatgggataaattcagttcatggcttaaaataactcgcatttgtcaaactttattaaaattcatatttttcaaattgcagaactctaaaaagtttaaagaaaaatttatttgctctaaattcaaaaatgcattacaattaaaaatcatggcacaaaaaatacttatacgaattattcagaaagaaatggaaccaaataaagaagaagaaagacagttaagaatttatctcgataatgatatgatactgaaatgtgaaggccgattaaaaaatgcacaaattcaaggtgttaatcctatttttctaccaagaaaacactatggaactcatttattaatcatggattatcacacacgaaatttacatgcaggtacaatgacaacattatcggaaataagaaaaacttattggataccaaagggaagaagaattgttgatcaaataaggaaacaatgctatcattgtaggagatataataccaaaccttttcaacaaccacaaatgccaccattacccaaatcacgagttgaaataacggaaccatttcagaacattggactagattatatgggaccaatacaaataaaaaatttcaatgaaaaatgctggataattttatttacatgcttaacaacacgaggtattcatctcgaattagtcacttccttatcagttcaacattttctcaatgcatttagaagatttatatcaagaagaggcacacccaaacatgtatggagtgataatgcagcacaaataaaacttgcatcaaaaattctaccagaagtgttaaaattaagagaaattctcaaagacgaatcaattaaaagttattttttaaatgaaaatataaattggacattttctatagaattagccccttggcaaaacggagcaattgaacgacttaatcagaatgtcaaaacagcaatgagaaaagtaatcggaaaaagatttattgagtttgattcttttcaaactctgacttgtgaaattgaagcgttagtaaactcacgaccaattacatttatatatgatgaaattaactcttatcaaattcttagaccaatcgacttcatacttccacataaaaatttatgtattcctccgattttggaaaatcaggaaactaaagacccaacatattacccaaaaaagacttcatacgaacaaacaattgaattatggaagaaaaccacgaaattattagatgactattggaaaatttggactgatgaatatataccaagtctaagagaacgttataaaatcgaaaacaaaaatccacgaaattgtatgaaatcttttccagaattgaatgaaattgtaataatacatgatcaaactcccagagcaatgtggaaaactggcattgtcaaaaatgtcataactggatcagatggtatcgtaagaggcgctaatatcgaacttccaaataaaacagtactaaatcgacccttaaaattaatttacccgttagaaattaattcaaatgatgataaagagcaagaaactctctctaatctaataattaatcaaaaacccaattatttcaacagaaaaaggaagatggataatcccttagtccctataaaaatgaatagactgtttcaaaactcgttaacaattatatcattattaacattaatttcattatgttcatcttattcatacgaatgtccaaaggaacctaaaatatggaaaacgagatatacaactctatgtatcgaaaacggttttacaatcagacaaaataaaataacaaaagaattttgctataaacaattggtatgcaaagacaaacatattattaaacgacgaccaccgtattgtggtaaaaaatgtaattgtcccgagggattcaaattttgtagtttcgcatcttataataaaatcaaaaatgaatcagttggaagaattaattaccaaaaaataatttcgttctacaaaccaaatatctgctcactaaataaaactgaaaagtgtccaaatatgcagagaaaattatttaattcaattgttcttcatgacaattcaattcatatggtgaaaactttaaatttacttttttcccaaattgactcgataaacaattttcgttgttttggggagggcaatctgacgattggtactccaatttactgtcgagaacatgactgttttaaaaataattcattcaaacaaatatatggaacgaaattttgcttttacgatccatacgaaaaaatttaccttgttaaatctgatgaagaattaattcaaatcaaagcatggggaactattgaaaaaatattttacttgccaaataatttaaatcaaccattcattgaaaatagacggaataaaagagaagaaaactcttcaatcactgaagaatcaaccattgagtgtttaaaaggaggcattattattaaagcaataaatgatatacaagaattacaaatttccattgaaaattatacaattataaaaaagaaccctcaaaaagaggaaataatttatttacccccaaaacttacatcctttgaatataaacctgtcattaaatttataagtaatccagataaaactaatgagaaacaaatcacatgtcaatcatctccccgtatgtgaattaattaactgtcgattttgtatggaatatattaaaaaaccacaatgtgtagaccagattccactgggcattaatgcttgtaattataatgataaatttatatggtatttcatttaagcctcccaaattattccaaataactcccccgttttatcccttgggattttaccaattatttttaattgtttttaaaagaaaaacccaaaagaaaaccaaattaaaatttcagaaccaaggtaaaaaaaaacattggtttaattaatcccttcccatttaattttttttaaaaaaatttttgtttg

SEQ ID NO: 18724 - DNA, 564 bp, Heterodera glycines
atattttatgtccttttttggcatttttccaaaaaacctctattagaacggccctcaacagctaaattggctttttgacccagaaaaaccggaaaatttccgaaaaaatcattttttaatattctcgaaaatattgaataaattttaattccttaaaatcttaaatttaggtcaaaaataagcaaaaaaagtaaagtttctagttgatttttgctaaaaatgagtaaattttagatttatcatttttttttcttctaaaatgatttttaatacccatatttagccatttttgaaagttttactttaatttagcgaatttgaaggaattttgaaaatttaaatgcaatttcaaccaataaatttgaagaaattttacactcaattttgaaaaatttatgtccatatttggagatttttgccattttatgtccatattttgcgatttttgttccatattttatggccatatttcgcgatttttggtccatattttatggccatatttcgcgatttttggtccatattttatggccatatttcgcgatttttggtccatatttttgg

SEQ ID NO: 18725 - DNA, 1636 bp, Heterodera glycines
aatgcagcagtggtttgaactaatgatattttataatcaatttgtgaattcaaaaattaattttatataaatatgaaaatataaattaaattgtttttttggtgaattttttacgatttcaggagcacacttgctgtgaatacgtatcggccttgtccagcattgaacacgaggcgccatcgcctggaggtgtacccgggttcgtaagtttcttcaaataactcatttttaatggatcaaaatattaaaaaaaaatcaataatttttaaagttttttcataaattttgtaaattcgaattctaaatgatcaattatttctattaaaaaaatttgtaaacacagaattaaactatcaacttctgatccaaaagatttaaaacttaaggcatgagggcaacgactgttttgtgtacaaattgcctgacgctggcactgacaaacaaacaaggccattattggatgagcagtacgagcagttcacggtgctgaacaatgttgaccatgtgccggtacagttggacggcgatgatcagcagcacggacagcaacagtttggctatcggctaaggctgtttctattgcgcaacaaaagcccaccagttttgctggtgaagagaatccatagggccaagtaattgaaattcattttacaaatttataaattatgcacatttgatttcagggaaggctttgaagtaaccatctgccgaccacgttgtagcaatttggaagaagctgaaactgttaagcgagaaaaaggatggggtaaaacgagagcgaatcggttgataagtgcaagaagaaaggaagaagaagaaaaggaatcaaagatacaaaaagaaaaagagcagaaaagagaggaagagacaaataagaaaagaggaaaggacagaagagaaaggaaaaaggaagaagcaaatgtgagagagattcacataaaaataataaacgaaaatgaagagaaagaaaacaacggaacggaaaaaggaggaaagggagagaaagaggaaaaaacaaaaggattaaaaaccggaagaaatacagaaggagaaggaaaagacaaaagtcacactgggagaaacacagttgaagagggaaaagacaattctggaaaaaacacagccgaagaaggaaaagacaaaattggcactggaagaaatacaactgaagaaggaaaagacaaaattggcattgggaaaaacacagccgaactgggaaaagaccaaattggcaacggaagaaacacagccgaagaaggaaaaggcaattctggaagaaatacaactgaagaaggaaaagacaaaattggcactggaagaaatacaattgaagaagaaaaagacaaaattggcaccagaagaaatacagccgaagaaagaaaagacaaaattggcactggaagaaatacagccgaagaaggaaaagacaattctgaaagaaatacaactgaagaaggaaaagacaaaattggcactggaagaaatacaactgaagaaggaaaagacaaaattggcattgggaaaaacacagccgaactgggaaaagaccaaattggcaacggaagaaacacagccgaagaaggaaaaggcaattctggaagaaatacaactgaagaaggaaaagacaaaattggca

SEQ ID NO: 18726 - DNA, 2973 bp, Heterodera glycines
gttgtttttcaaaataattatataaatagaaaaacttttaactctttttcaggcatttataatttctcttcgttataaaaaataaaatttttcatttatttagcattttacataaataaatagactgataaaatttgtttatagattaattatggaatatttaaagattgatttacaggaaaaattatatctaattgtactttctttatatatataatctcattattccatgctagctattgactcagtttgctgaatcgttcaatgttttttttaataaaattttatatagtgcaaacatcttggcaagatggtgttaatccattgtgattcattctaacggcgaaattgttatgcatattcacagaggctcagtgaactggttcttatactatgaattaatttacattttttcaaaatatattttaattcaaattttgaataatcgaattaattctttttttattactctggttgagaattatatttaaaagatttcaaaaacgaaaaaaaaatgaaaaagcactttttatataaattcctggcgcagcgtttttatttatgtacacaaaaaaattaactttcaacattaatcaaaaataatgataattttgaattttaatattcgcagtgtatttcaatataaaaattctatattaattatgtatcaattaaaattaataaaaacattatttattgtattatttagtttataaattatattgtatttacataaataaatattgtcattaatggtgtcattgtaaaatcagactattttttatttaatatttaaaagtgtttaattaaaattctaatgaacttacatatttacattttcaattgatttttggttacattgaatttttatttatgtatactttcgccatttaatattttaattgcttatttttttaatatattatttcttctgtcctggtaatggttatgttagagacaatagataaatttaactataaataaattaattttattatgtgtaagtctcattacgatgaatcattattttattgattttatacacaataaattgtttcgacctaaatcatgactttttatttttacttgataaattgcctgatttaaaaatcacgtatatgggatcaattttttaaattgtttacacttattttttaagatggtttgaaaaaaaatatcaataaaatatgtttttgcaatagttcttttgtttgaaaacattttttttattataaactgttcaatttaaattttttaattcaaaaaataattcattaattagatatgattaactttttattctgagatcaccaacactaagtatgacaataggaaaatgtttcttttattggtcatgcttttatattagtcgataagttatttttaatcagacaacgtgaaaatattaaatttattgatttaattctgctagaataaaatttaatttttggattattatttaaatactaaaaaaccatataatttttagctttcctaaaattttatttacatttatttatgattttttgttatggttttttgttattactttattgaatcgataattcatacatatatttaagaaaatttgtattaattataaatgcaattaattttccatgtctgcattttctcgagatattgattcatccatattgctctctttttatcgagtcaatttttatcacttaagaagaagaaacaattaaaacaattctatgaacacataagttattatattttgaatcgcatcccattactctatgatattatagagaaatttaattccatatttgttatcttggtaaatataattgaagtatgcttaggttgttataatttataaacttttatgtcgatcagtatcaattataataattttttagttgtaatttataaattaattttttcgctatgccttgaagccatctttgttttttccttttatctttttacattttaaaaaagcaaatttatgaattataataacttgtaatatattctggtttaaattattattattacattattatttatgataaaatttattttaaatgaataaagagaatggaaatttgccaaaattgaggtaaaattagtacgtaaaataaacaccaaatagttcaagcttgaagcttctaaagcaatattactttataaaaattcatacaaatattaggattatttttaataatacgaaaataattgacaactacaacgatattgaacaatacatttatttttattaaaaataaaaaatgcaattgagaaaaacaacaattaagtataaaaattctagcaatctttaaatttctgtcataaaatatccaactgttttcaaatataacaaaaataaaaatataaacgactcagtaatacaaagtaataaagcatgaagaagcatttaacaaaactttttaagtttattaaatataataataaaaatttgaatattatcttgagaattaaaaacctacgatagtaacgatatccgaaaagtgagtatattacgtgttttacaccctcatccttaataaaaaaaatttatatgccttatttttatgcctttttgttattttcttgccttttcgtacttttttaatttcattaaatcttaacacttttatctctttatttgttatatattttaattttggcatgttttggaatgatttgtattttttgtaacctgcattgtttatttgaagaaaaaattattaaaataaatgaagcatggtctttctaattgtgttcaacttcccttataacaattatattatgtcttatttgtttatgttaaataattgtttattattattattgtagatttcaaattaaatttctttaaagaatcatggactactcatatcttcttgactttttgatctctataagtagttagttaccctggcgagtagcgggtgctgataagatgggttgcggtttctttgaaggtgccgctgtgattaatga

SEQ ID NO: 18727 - DNA, 2489 bp, Heterodera glycines
  unsure (1)..(2489): unsure at all n locations
cgacttggaccagctccagtagagaacgattcatatttcctaaaagacggcgacttaccatgtccggccccgcaccggttgaaggaggattaaggggcggtgctgcgggagtgtgctgggggatttaagggggggggggaggaacgggganggtgccggtgcggcagattgtgccgccgccggtggagcagttggcgttgtgtgtggcggtcccaggcgctgttgctgcgtcgttgcatcacggaccattggggcctggatgggcgccatgaaatttccatcggcgagcggacgagccataacgtaatttggtgcaccggagaggggataaagagggatatattgcggaggagggtaggccatgtcgttgttcataattgtttttgttatgttaatttgtggatgattggctacaaaaattcataaaagcatataaatcgttaagaaaaagagaaaagataaaattataacaaaggggctaaaggcagcctaattcacatagtttgggtggtcctatggttgcctcgcggcttaaatcttcgtgatcggcccctgctagccctggctgatcgggcaacagcgactcccgccgttgccggtgggcaacaaaccagagcaatccctgcgagtgagcagtatctgatggccagccaaaacaaaataaaccaaatcaagcaaacgccaatcgctaatattgcctggggcatggtacccactgattgaaaaagggcaaactttatttgcggaaaagtcaccccgccagtaatgaccccttttgccccatgagtcgaactgataggcgcatatttatcttccctaacgagaaggaaaatcagcgtgccctttaactcaaaataggtcttttcccccaaacagtcagcctggcaccgtgttttcaccacgggatgtggccaggacaaaaccaccgagcttggatgacctttaggggtacagcgcgtcacccacatggtgccgtcggcgcaattaatgctggcaaaggattcccccctggaggaagtacaagagaaattaaatcgccccccggttctgcagctgtggcaacccaacaggcggccggggttaatggtgcacctcgtaggggcatgttggacagctaagcgggtccttctcatttttacgattaaatttatgggggaatacggaaatatagcccacaattgcccatttctgtaaccaatctgcaactggccaagtgtggtcgggagtcgcagaagggggtcacccatgacccgctccaagtcaaattgccgtgggcaataacacttaaccaccgccgactcatggtgtacgtaacatgagtggcatgcctcaggtaagagtgagcagttgaggtgaaaggcggctaactccgtcggacaccaaagatgggtgggccgttccggggctaacgcagcatgagtacggtttgttacaaaaacattccccaaaagtggtaaaggtgggaggccgcttggggagaaagtgatggataaattagcatagggccagtgatgagtgattcccgggtttagcgttatttcctcggcccgtgacgaaccttcaatgtccaaaatgagacccaactgtaaatgaatttgccaagatgggcacttaaaaaactcatagacgaatggggccattggttccgcgtaaatacgataaaagaggcacgcatatgcgggagataagcagccttggcggatgaacccggacgcctcccggcagaaattaagacccggaaaatcctctactaattctgggacggattgttcgggatccaattcagaacaaaatgtgcctgcgcacgacccggctgtagggcagcgtaggatcgaggatatgttaacacggtatgagcgggtccaaagcttactttcttttacacattggagggataagccctttaaaataaaaaataaactgcccatgggtacggaatgaggggtgtgaaaaacaagctccaccttttggccgactggtagcagtgtaagtgaagtcacactgtcaaaacggcactgagtgctgccgtgatcgacaacgcactcttccgtgtcggctgacacggacaccacttctagtcccgcttttatgcatgggataaaaaataaggcgaatagcagcccgagtaaaggaggggaaagtgcatatccgaagcgggttaagagtttaggccgagcagccggctctctttgagtccgggactgagttggcctttcttcagccggacctatttccctctgctggatgatcccgcccgctaagtccccgtgctgaaataaaacttcgtcctcgtctgacccttcctcagttatgacgcgactccgcctccatttggcagccggttcgggactgcgccggtttttccaaaaaatacctgaaaataacccggtccatcgaccccgcaccgcacttctttggacggtccacaaaaaacaaagaaatatgaaaatcacggcaccaattgccccagcaatgtcccaaggcaaagg

SEQ ID NO: 18728 - DNA, 3156 bp, Heterodera glycines
aaaaatcaaatcaaaaattgttggcaaatctttacataaaataatttcatttttttattaatactttttttatttgaaaagataaaattaaaagaattttatcattgtccatgaaaaactgaagaacataaaaattaaagctctgcgattttcttgacttgatcatatcagaaataatacaaacattaattgtggacatcagcccaaatccattgggccctgactaccgaattgcgtcggcattgaatggaaaacaatatatatttttagcagtgttttagaaatgaatatcaactcaatattaaaaaaaggaattgttatttctaattaatgcttaaatttatacaataatagaggactattataaaaattgaaacaaagaatttatgacaaaaaattaaatttaacaaagttaaatatcatttaaatagtaagacataatcaatattacaacaatttaataatttacgtcatcctagcaaacgaaatgttatcaatagttcctgaaacttagattatgataaattcaaaatggattacaaaggaatttattatttttgtatacaaaaaacaacaatattaattgataattttaacatgaatgaaatttattttataataaaatgcaaataaataatttaacttgaaaaatttgatataaaaattgctctgtcacgaggggggttgataattatatttacagttgaatttccaatattctcgtccagcaattcaccaaaaattatcgttgtgagcatgagagcgaaagattcaaaaaatgcctttaagacgaaaaattcatttgaactttatttagaattttatgtgacctaacatattaacaaattacgcggatgtaaaaataaaaaaatagtaatataaaacaaacttctaaatataatgtaaaacaaattatgttaaaaatccaattaaatcagtaactaaagtatttttatttctcaatgaataaaagtaattcttttaaatagaaatatttcgaaaattcctttataaaaacccgaaattaaaaaataaaattacctgatttaattaaaacttgtttttaaacagatttgaattaaattatttaaatatgttttttgagtgggttagcaagtgaatgatttttgatgatggatacattaaattccgaaatgacgatgatgattcatcgacacagcttttatttaaatattttactttttattagtaatgagcaaaaaattttaaaaataaaacttgaaaattttaagcatataatattgactaaagaaaaaatcaatgatttattatttgtggtttccagcagaaagtgacaatcaaaaatattgaaactgtcaactaaattaaagttaatgaaaataacataacacttctaattaattatatacattataaaaaatattcaaaatataaaatcaattctttattagtaaatttaatatattgttttacaaaatagatgaggttgtcaattaagcaactactatcgttttcaagaaattggctaaataacgacacaatttttatagaagactaatacaattgtaaaacttatttttcctatttgttcttgtaaaaaaaggaataaaaatattaattaaaaaaatatcaagtaagaataagattaaaaacaaaaataaatgtagatgatagtcacgaatattttctgattaatagtagtatttatttattacatgtttttcatattgttctttctcaatgaaatatttccaaatatatgaaaaaaggctaacacatgccctgttccaaaaattccgaatccaataaatccaattgactctcggtttccagaattttagaagaaataacaacaaatctaagaaacttagttggaaaattttttttaccaaatgtcaattgaagtatttaaattctattactaccagaaaaaaatcttcgtagagggaacgaaaggtaggcacaaatgcaatttcttaatttgatattaatttataaaaaataaataaattattgtcatgaaaaagtttaaactgaatgaggatcggtgctatgtcgatacttaaaaaccatcataatgggcgatacttaaaaaaccatcataataaaatttgggcgatacttaaaaaaccatcataatgggcgatacttaaaaaaccatcataatgaaatttgggtgatacttaaaaaaccatcataataagaaatcgatatacctttaattaattacaggttcctttaattaattatatgattacaatttgaaattacatgagttaattacaattttaaaccaattatcccttttatttttattattttcctcaaattcacacattttttatttggaaactttaattttaaaaaatatttcagccttgcttaagggcaaacaacaagcatttttacatgatttaatagccggaaatacgtcattaaaatatgaattagatttaattgccggaaatacgtcattaaaatatgaattaataaatgttaatataaaagcaatgtaaatttattatttggcaattcatttaataattaacattcctgttatttcataaaattttcaacaaagcctattaaattttacaaattcaatcgaaaatgatacggtaaaggtagaggcaaatgcttttattatttatttacaaaaacaatggattgataagtacgatgaaagtaacttatggaactttcaccggttggcaagaacgcggagtataaatccagcggaaagttttcattcatctatgaaaaggtgaagatatttttaaaattgcacaaatttaaatttatatagagcccatctgtaataaaaaaaaggaaccgtgaacaattttgtgaactatctacaacagctcgtttcagaaaccgatgcgcgcatttttaaattaatgacagataaaattaaacccagaaaaaaagggatcgtttatataaaaacattgatgaacaaattttgagagcattagatagatacaaggtaatttgtcgaactacaaaaaaactaagataaggtttaggacacacttgagattgaaaattcgcagaataatgggcaccagtttcaacaaacaactgatcgcgttcttgtacgcctcagctttcttctgcttagcttagattctaaagggaaaacgctaaaaacagtaaaataatatcggtaat

SEQ ID NO: 18729 - DNA, 2160 bp, Heterodera glycines
atcgtcactgctcccgagttcgatcaggtcaatctctcttcttaaccgacgagcctatctcttcgatttcatcgtcatcgtccagttggaccaattcatcaaacgaatgatcatccaaattgactgattttactcccgttttaaccggggcataagcagcagcatccaactccttaaactcacaaaatcaaagtgccatctttctgtggacacacttttttgttcttttctatccgatccaatcgttctttttcaagtctctgtgcttctttggcttcctctgaaatcattgacgaatcgaagttcctaaattaacggaacggaaaataatatttaaaagcgaccgcacaaacttaagttttctcttccgaaaattcgaatgcgttgacgatggaacggtgttttcagttcgttttagcaacggagtaatggttttttcttcttcttcatcgtcctcatcagttttttcgtcaatcaaataaccgccgcactcgccgagaggcatttctaacttcacagatgagatcataaagaaaacagtaaaagtggttaattacagccaaaaaataataaattgtctaaatttttaattatagaacaaagcttttcttacatttcacacacgagactgagttttaatttaggttttagcctatttttattcgaaaaacattttgttttttagtggttatgaagatacttttcaagttattagtagagcccggacggtgattcaaaatgatgatacatgtgcgcaggatccggtcctgctccgggctctagttattagtacccattttctagattttcatttttagagcctaaaaatctaaaattttgaaaaaatctgtttgatctattttgacattttgcccaatagtacaaaaatgcattaaaacgaaaaatacacccctgagaatcggctcgaaaatcaaaatacacccctaagaaatgaaaaattctcattcatgttgtgtatatcactcaatattcaaatgtacgccatttactgtactcaatttcgtgtcaatactcatctctcagcatcgtccataaatacccatcactttgtcactcaattgcttcttcttccactcattcaacacatcattttattattcatttattcttcatccaccgacacaccaattttattatttattcttttgcctccgacaaataaactatttttattcttcgttgtgttcaccattgaacataacatttttggcgcagtcagcgaagtgatttatttttgtttcatcatcattttgcgcctagcatttggcgcaaatcaactttggctaaattgtcaacaattcgattggagcatctcaaattctttatttattttattctctcatcattcattttggtttttgcgaagttggttgtcagcagctcgcatcggtcggcacttcacctatttcactcattttccatcaatttcgacctttgcccaccccgtaacacatcggcttgaaacgtcaaggcaaaatcatagcccgctgaacgccaagcaagccgagaagcctttttgcaacacttacgccgtaaaaagcctctgagtgcactgttttaaggaaagacacatttgtgaaagtgtaagtcattgcgaccgctacactcagcgcatttgtgcatcttcccatcaccaaaggtcgtttattgatttcccactcatttttctgtgcctgaccaccactgcagcacttgctggccgacaccaagcaaagtcatttcaatctcttatcaccattcaaattcactactcatcaaatcattgctccaattgaattcaatttctgactaaaatggccgttgactttgctcaaatcctaaagcaattagtcgaccaacaaactcaagcatttcaaaatttgcttcaaaatgcccaaccaaatcccaatgtttccaatcattcaacaatttattccaccattaattcccaacttggtgaattttcattcaatccagaaatggattcaacatttcaaaattggctcgaccgttatgggcctttcatccaaattgatgggaaggacctccccgatcagatgcaagttcggctcctgctcggcaagctcggatcggaggagtacaaccgctatgccgaaagtgtgcttccaagcaagcccactgatttcacactggcgcaga

SEQ ID NO: 18730 - DNA, 2367 bp, Heterodera glycines
agcctaataaattgcgtagtgaaattttaaaaaaatctccctcctaagctaatgtttaaataatttaactttttgaatgtgcccgaactttttcaataaatcttttggagaaagcgacgatccatcgactttttttgccaatttccgctgctttgtttggtcatcaatgttcttctgcttaaatcaaaaataaataatttaatcacaaatttttggccatttaatttattaaatattgaaaattcggaagactttaataaattattatatatttttaatattttatgcgctttattctgtgtaaaaccaaagaataattagtgcttagtttcatttcttcgataaaattgttattgtttttaatgtttcttccccattccaataatttttcaaaacaatccctcacggggaaaagagcatttcccaaattactaatcgtttatctcataaataatacatataaaagaataaaatttaaacaaattttcacattttaaggaaggagcaccaaaattcgtcataattccgagtttaatttatttgagtaattattcactaattaatggccaattttctctacggttttaaataacaaaaataaaaaattaattaatgctttattttgacgtcaaatcgattatcgttttgtgttcccgggagaaagaatttatttatttattttcgcccgttttcaaaagtcgtaattcaattttatgcatttcaatgctttcacatggcaaaaatggggctaaaaatagcaaatttaaaaagtaataattatttaattacatcactaaaatattataaaaatagtaattctatttttagaaaaatgatttttgctttcattttttcttttatttcttccaaattcaacaccttcgcttttgccttattttggtgttttctcgttaataaagtaagtacctttttaatttaaaaaattaaaaaatatttttaaatttttatttttatttttattttctccctttttcatacgttgtctgatgatggtcagtcgaatctgctgacgaacccaaaagaaattgtcacatttttgatggacgaccaattcccgaagtttcgtgatcagaccaaccaatattgggccgacaccgttctcagttatctgaacgccctttacccgaggccggcaaaaaattttaaaaaacataaattaattgttgtattaattaattattccgttttattgccttaggcatcgctttttggtcattgttggttcgggtgccgtggcgtataataatcggttggccattacttttcaagaagggaataagtgagaaaattgagaattttaaaacgaaatttaattatttttattttatgccacatgtgaccgtttacatggcattcggagctgaccaatttgagggcagcaacaattgttacggggacataaacagcaaattcaacaggtaaagcgaaggcacacggaaatagtgggataagaaatgcgaacaaaaccatgcgccgatcagctgctacccggacatcaaccaaatcctcggatacattggcgaaacatgcggctatcccaagtcagaattaatattgtagaattagttaattcatccgaattatcaaacattttgtaggaattttttggcaatttttgctacatgtatcataatttgttgtcatggatttacatttaaatgccatccctttccgccgtcagtctcttaatccctgcaggtacaattccgagtcggtgggcattcgcgcagtgatcccggacaacgacggcaaaattggcattgcctggtccttgccgaactcagccgtccgaagggaagtgatcaagcggaattgtgaagtggggaaaaggcaatggcaagtgatcatcgcactgctccagaaaaagtaaagcaaccaaaaagtcaagacgagcaactaaaataagataaaaattgatattaaaaatgatttattttaatgatccatttggctattaccgctgattttttattttaaaattatttttattttatttttgaatttattattcactgctttgcgagttaaatttattctaacagaaacagcacagcaaatttcgtcaaagctttggcccaacattactcatacaattcttcggactcaaattgcattttgccaaacaccgatcactttgacgagggactgtggcagccgaatggcatttttatcgcaattttggccacggcattggcactaaatgttctgctggtgattgcgatgtgtgtaataataataataataaccttttaaaaagtcaaattgaagttttggcattgtttttgccacatttagttgcgttctgggaggttctttacactttgctcaaaggaattcggcacaggg

SEQ ID NO: 18731 - DNA, 2311 bp, Heterodera glycines
aaaaaagaattttaattattcaaataaatttaaaattatcatgaaaatattttatttctataattattctttgggagactagacaataaattattcattattaaattgaaataaaaaataattaatttttaatttaaatttttaggttttaaatgattttcactttttgaattattatttatttttgcccaactttgccaggtgctgttactgcttgacgacgtgcatttgctgcgatttggacgtgcactcggccgcatggacaacgctttacgaaaagtgctgcaaatttaaatttttaacaaaaattttttttggcattttttcattttccaaatttatttttttttttggcattttgatcagttatttcctcgcctgcacattgtctgcacgtccaccacagctcaaccaatgctcggctttcctcgttcggttgaactggtcgaaattgctgggccaacagctgaacaggcaaattggaaaaaatttttcattttaaaattaaaaaaatatttttaatgaattttgaattagtaaattattattattaaaaactagttaattttttaaacatttttactcaggaaacaattttttctttaaaaactttttttttgaaaagcttgcctcaaaaaatgatgtaaacacaacaaaaaatgttgctatgcttcacccttttgttgccgtcatttgataaattttttgaaatgtccttaaattcgaaaaaaatttttccctttatgtcctttgaaatcagagcatcggtcctttaaatggcaaacttttgtcgatagaagccctgtccttaaaataaaaattaaattaaccccatataattaattaattcatcaattaggtaatttattcacttgccaaatttatcagatcaataagtttcatccattttcaggccattggcattctgtccgacccacaagtgccgtcgttgtcctctgatcagatcagtgctctccgtgccgagtcagccgtgtgagcggcaccgctgctgctgatggcatcgatttggtgctgggcgcaattcaacgggacgaactgatggccgggcactcggaggtggtggcaaattttgtgacggatttttttttttttgaattctgatcagtcatgatcagtaacaggatagaagatggctgatcaattctggctttttccgctacagctaatttagagacgacaccttttttggtgccaatttttcttcaaaaaaattgttataagaaaattttccagcgattttttttaaaatttttttgaaaagaaattttaaaagatttttcttggaaaatctttaaatttgaaaatttttaagaaaatttttcagcggtggggggatgtgctcctccctgcccgattagacttttgatcagttccagaataaattggtctgtcaaatcaatacgtattcaaactggccagcctttcatgacgggtttattcgtaaattaaaaatttggggtccgaaattctactcttaaactttaaaatttattattgaaattaaatatatcaatcatctttataaataattataatttctagaacataaattatggaaagaaacaaacgttttttataattttcaagtctttttgtattacaaaaagaaactttcgaatatttatttaaatcttgacagttccgataatataaaacgaacgtgaaatttaaatttttttttgattctaattaagtagtgttcgatttttataaacatcgtttattatattttttacttataaattattatcttttttataaattataaagaaattcttacttttctattttaaaatttattttaaaattgtactgcaatcatcgcgtgagctccaatggcgataacaattttgaaatttataattatatttgatttttttatttgtgctattaatttcctttttatcccataaattcaggttcttacttcaactatatctcctagggtcagcttccatttttttaaattttaaaatatttgttttactttccaatttttattaatttattattctttatcgtcataaatttatattttgtaaatatttcattaaaaacaaaattttgacatggcaaatcatacagtcttatcgacgataacttttctttcaaaattttcaatttattatttatctattagataattctgtttgagtggataattatttgaattgtagtcaatatatgcaataattaatatatgttatttattttaggaagaaaaacctttttggaaaaaaaatttatttaattttttcaattttatgttctctcggtctcatttgaaaag

SEQ ID NO: 18732 - DNA, 1815 bp, Heterodera glycines
tgaaaccaaaaaagtaaaaatattcagcaattttttgaaaatttaagcaattttcttaacaaattgcattaaaatgccaaaaaatttcccggcggcgcctaacgacaccgccggacccccatcttaccatatttttgaaaattgaaaaccaaaatgttaaaaaaatagtaatttttggcggaaaacagcttaaaaattttgtaaaatacaccccctaaatttgggatttcaaaaaaagaaaaatacacctctaaaaatcaaaattttttacttcagcgccccccccccccccgaagccaaggatttggctacgcccttggtctggaggtaattaattttttgaaagcgaaaaaatttgactatttatcagatttgaaaatgttgataattttgatcgctaaaagtatttgtttttctatgattcaataaaatttcaaagaatttattaaacctaattgcaaaactttaattatggtccgacgccataattaaactactcaaaacaaaaaccggcgctcaaattcagtcataatgagttaaattttgttcacataaaaactagcagcagatgaatgaatgcatttccatgggcttttgaaatctttggcacattgacgaatatacaaataatcaattaattaattacctcagttttgggatttctcaattttttgaccaattcctttttcgtctctctaaaatctatggcatacgacttttgatcactttggtcgttttcctccaagtcaatgcggcctttggcgatcaatttgtcgatgaacttaattaattgcttcgcccattcccttgtttcttcactgatcagttcctgtccatcattttgggtaatatttttggattgatcacattcaatagagtgcttgtcctttcgctttgattgactttgaacagcgttgaatttatcttggtcagccttaattagtttatttaaattctgcatgtgttcttgatcgcgtttgttctcaattcgtgataagagatgatgatcgttcatcccattgataatcggtggtacaatgataattatgacaaaaataatcattgaaggatttgtgaatttaaaatgctactgaaatttaatgataaaattaaaaaataaatgttaatttttaaatgaataaatccatatgattttataaaaatgaggtatttgcgtcgaaaatttttgaatttgatttaaaatgctactgaaatttttgatgcttttatcatttaaaaaaataagaataatataattagccatttatgcttaattctaaattaaaaaaatatatataattctgatcattgtactcaatacatttatactcaaaaaatgtttgacgtcatgcctttcatttaaacagagcttactgatgtactgattttttagatttgtccttaattggggataggcagaacatctggaaaataaaatgccctgaatggtgtaccgacttttgcgcctcgacacttgcgccgcccagtaaaaatagacatttgcgcctcgacacttgcaccgcccagtaaaaatagacatttgcgcgtcgacacttgcgccgcccagtaaaaatagacatttgcgccgcgacacttgcgccgcccagtaaaaatagacatttgcgccgcgacactttcgccgcccagtaaaaatagacatttgcgccgcgacacttatttgcgccgcgacacttgcgccgcccagtaaaaatagacatttgcgccgcgacacttgcgccgcccagtaaaaatagacatttgcgccgcgacactttcgccgcccagaaagagatagacatttgcgccgcgacactt

SEQ ID NO: 18733 - DNA, 1756 bp, Heterodera glycines
aaacgaccctccgttcattttgggagcgctcaattattacggacgtttggtaaaccaatgcgagaattagggcgccattggacaactcctccgaaaggatgatcctggagttggggagatgaccaacagtccgcgttcgagcaagctaaggcaattatggtttcagaacttctgctgacccactacgaccccacacttgcgatcgtcgtagcggcagacgcgtcaaaagatggcatcggcgccacaatcagccacatttttccggacaaaaaggaaaaagtcatcgagcacgcctcaacagttctgaccaacgcgcagcagaactacagccaaattgagaaagaagctctggcgcttgtgttcgcagtccaaaaattccaccggatgcttttcggacggaaattcacactgctcacggaccacaagccattgctggccatcttcggctccaagaaatgcatccccatttatgccgccagccgactccaaagatgggccctaatcatggccaattacgattttgaaatacggtacatcaacaccgcatcatttggccaggctgacgttctctcgcgcctcatcgccaattatccccgaccagaggaggatattttgatcgccaacatctgcaccgaaactgagtgctacataagcaccattctgcaaaccaaaacggaacaacttcccgtcactgcagacgaaatcgcagaggcgacaccgaaagatgagattttaaagaaaattttggcattcacccaatcgaattggccaaagaaatgcagcgaccccgacatcgcaccgtattttccaaaaagggaaaacattttggaaatcgagggctgtttgctctaccaaaatcgcgttgttgttccccaatcgctccgcaaccgaatgctgaagtccctgcacatggcacaccccggaattgtgcgcatgaaggcactcgcccgccaacacgtctattggccgggcatggactcggaaattgaacggattgtccgtcaatgtgaagaatgccaaaaggctcaaaaagcaccgataaaggcaccgcttaccccttggactccaaccgacaaggtgttccaacgggtacacatcgattttgcggaccatgccaagacggtcacgtctatttcattttggtggactcattctccaaatggccggaggtctaccaaatgaattcaatgacggccgcggcaaccgtcttcacactccgttcaatcatccaccgactcggaattcctgaagaaattgtttcggataacggaactcaatttcgttcgtcagaatttgcggcactctgtaaggagttcggaataaagcacacttttacgccgccattccatcctcaatccaacggacaagtcgaacgtttcgttgacactttcaaaagggcgatgatgaagtgcaaaggcgacaagaacagccttgaaaaagtgctgctctcctacagatcaacaccaaattctgccatcgacggatattcgtcagatcaattgttccttggacggaaactgcgcaccaaattggcactcgtccacccaaaaggacaaattgatcagtcggagaaatttgaaaaaggtaagttcaaacagcaccaaaaggactattcaaccaaaatggcacagcaattcgatcggaacaatggcacaaagctattgagttcctcccaacggattccgtcctactcttgaattatcgccttggaaaaagtaattggctacagggcacaattgtagaaaggctcaacaat

SEQ ID NO: 18734 - DNA, 1142 bp, Heterodera glycines
accgcgctaccaaccaaattattgtgttctcttttgtcgttatgtggaaggggacaccaatttcaaattttttttttttgtaatttgtgactcggttttgactatgactgatcagcttaacattcccagaaatcctctgaccagctgttctcactatcggaacagcccttccacttcagcaaatactccatgcgcccatcccgtaacacgcgccgtgccaaaatgctgtccacttgaaactcattctcgccaacgcccctcttacttcgccgagtcgccattccccaggcagaaaaattatgaacacaaaaaaacaccaacaatgatttgattaaatatcatttgatcactcaacaaatattcgagaaaaaaagggatttgtgatttatacacgtgcttttgtcagaattctatgcttaaacacaacaacagcagccatcgtcatcatcatcgcctaattagtcgaccgttccgcacaccccacgagacattcattcattcgtccgatttgatctgcgaacggagtccgggaatataacgggcgaaacgcttccattccgtaacgtaaaccaacacaagaaaagcagaggctgaaaaagaagaggaatatttgagttgaaatgcagccggattttcagaaattacacaataaaataaaagttgagtgttattttacactcgcattttcattaaattcccagaaaataatccgtaaagattcgataaaaatggtgcaaaagaacttaccaccataggcagcgtatgagacataactgaaaaatgcaaaaattatagaaaaccataacccgacaagaatttacagcttttatttttatatgacctcgattagatttttgcaatttgtcatttagtaaaaatacttactaggagctgttgacagtcgcgcgtttaaggagtgtcgaaaatttgatgtgcgggaaaatcaacattgtgaaacgattatggctaaaagtgaagtgcgtaatgtgatgagtcgaatatatttactttaatgggaacatgaaaatttgtttgaaaatataaatttaggtatgtattaggaagttttttgggctattctcgagaagacccccattcttaccagtgcaaatttttaccggcggtaccggtactagacaaac

SEQ ID NO: 18735 - DNA, 663 bp, Heterodera glycines
aaaaaaaaaattctataaaaaaaggggggcaaccatcggcacgtaaattacccgtttttgttttgttttccattttattctgttatgctctgaaattttttaatgaatttttttgtgcactcagaaaacgtactgacaaatgagtacgcacagatatttttatatttttttaaaataaaacgccaatattgtcaaaaatttaaatctatccaaaaataataatttttacgtaggtaatttaaagacgaaattttatagaagtgtcgagagaaaattaaatattatcaaaaaattcttggccaggtcaagtcaagggcgttatttgagaaaaaataaaacaaaataggtgaaacatttatcaaagcaaaaaacggaagattggtctgattaaacaattataaatggagtgtcctaagtcggttttcccttttctcttctttccacggtgtcgtcatttcgactgttcgtctccgtcgctggcgagtcatggttttgcaagtccaatgattccacacgccagccgagcccctgcgtttccggttttcttactctcatcttccttttcacccagaccacggcctaaaatattaatatttctgacaatgagttagttcaattaacgaggaggagaaggaagggggcttctcaatatggtgctcggca

SEQ ID NO: 18736 - DNA, 2355 bp, Heterodera glycines
ttacaaggggacaaattggcccacccaaaaaaagctgtgattaaattattccgtatgtatttgtaatttgtcttccactatttcccgttttttcttcgcttggaccaattcccttaaccaactaacccctgaccgccagcacccgaggcccaatcgtctctcgattcatgtctgacgggtgagtggctaacatttgaaacataatttgctccattatctcgtctacctgaattaatataacacttagagttacagatccgggactcaagtggccaaatgcctgtgggactgaaccgtccattacgaatgataccaaaatggtaggacaaagaaaatagctatagtacatgctggggcccaaccgttccggcccaactgagcgagtccgatattttccgctcgacatttaaataacgaatccaaaagcatttttggacaaaaaagaaataatattttgtcgcaattccatgcgtttttaccctttgaccgaattcgtgcattgtttcttatcccctctcttcccacccacctcctcgacaacactgcacaacaaactaaaatttaaatagaactaaataattatttgttttatatttaaaaatgaacttacatttttggttttccgattagccccgggcaattgtcggccatcaaaatttcaaaaaaatcattggccaaaacttttggccgtccacgccgacgaatgcctcgtagtggccatgggtgagtaccgccacaattgcgctaaagaaatttgccaaaatctttcaggagcgccagatgttgggactcggaatgggccgggtggggtatctcaaactcaaacttgggtaattaaacctttatacttatttgataaaaatacattaaaatatgaaaataaaatgggaggggaggagggacaaaaaaaggggggttggcggtttggcgggtaaatcacaaatgaattgggggtgttcatcggggtaatacaatatgtgagggaggggcggggtcgaatggcattttggccaataacaacttttaggggggattgtacactaacaaaatttattattgtcaatccaaaccctggcctcgcagtctgaaagacaccaatccgaaagaattttttgattttgactgaaagctttttgtggccgagttatggacccgggagtggtgaccaaatgatgattgacaaagaaaaaaagttatagtccaaaaactgggctggcgcccaaacgagggtgtccctggtattgtacagtattcttcaaatccaattttattgttattccgagactcactcttgaggatgtggctcgtcccgacccgctgtatcttcctgtttttcctcttgttcccgacatgttttgctgactttcaaaatctgaaaattatgaaatgaacatgaatagaaataatgcgaaaaatgtcaaatctatagatgagtaaaatgggatcgagccaattccctaccgccaattcccttccgccaattccctaccgccaattccctaccagccaattccctactaaggcatttgggccatctccgtaccaaaaaatttttagagagctcgtcaagagctttcggatgataccaaatttatcaagattcgatcgttttaaaaaagttagaagtgtcaaatctctcaatttttcgagttttgaaccctcctaaaaataggttctaaacccatttccgcaactccaggggaacccgaaaccgggctcaaaatcccggagctttagggacttcggattcgtaaagtacctgcttgtatgaaatttgaataattaaaccccggccttacttcctaattttcgggcccatggaagtcctacaaagcgatttgaaatcaattgtaaattcgaaaaaaaattcacgatccaatttaagaatccggagactggataaagctgctaaaatagacaaaacactattttaaaatttttgcttcgatttgtgaaaaattatgaatggtcattgttttgaagctttgtacggttctttttttgttagaagtattttcattttcttctctgcaacattaaacaaaaaatttattgtcttataattcacgagaaacatcaaaatgttgaaaatcccctttctgtttttgaaatttttccgaaaatttcgaaaaattttttggtacggagatggcccaaatgccttagtagggaattggcggtagggaattggccggtagggaatcggccggtagggaattggcggtagggaattggcggtagggaattggctggtaaggaattggcggtagggaattggcggtagggaattggctggtagggaattggcggtagggaattggctggtagggaattggcggtagggaattgacccca

SEQ ID NO: 18737 - DNA, 146 bp, Heterodera glycines
aataatatttttagttttttctgttcgcttaaatacccctttttcaattagttatgacgtggcttttatagacaaaaacatacatcaaatcttcatagcggaaattgaatttaaggtttaaaatctggcgaaatgtctttaattca

SEQ ID NO: 18738 - DNA, 1043 bp, Heterodera glycines
gatatttaaatcagaaaatatttgacgaaaatggcaaaatatgcaaaaaatcttaaaatatattttaaaaatggcaaaatatgcatgaattatgcagaaaaacccaaaatatgcaaataaaagtcccgacttttatacgcaaatacaaaaaaaagatgtttttcctactaattatactacgtagaatccaggaaaaaaatatgcattttcaaaaaactaacaatagatatgccaacgggtatcaatatgtcagctgatgaacagagaagagttttgaaaattttttttgccattaatatcatttaattaatattgaaaagctccgacaaatttcactcaacattggcatgtgcattttctaagtaaattagcaaatttgtcaatttggcattaactgaatttttagaaacattacatttcgtcaaaatgtaattagtgaatgttaacgctttcatttgacacgagaagattttacagtgtttaataaaagtgcgggcaataagttttggtttttaccattttttaaaacatttattttactttagcgttaaaatataaatatacgaaaaatatatacgaatttttagcatatcaattttggaatttaatgttctaaagcactacatccacttcgacattataaacatataattattttttttgaattaattattattttttttttaaatttatttttttcattgaattgttgttcattcattattactagggtcgagacttttagtgattaaaaataactaaaatagtgaggaaaaatgccaaaatagtgacaaaaagtccgaatagtgacgaatttagtgatataattttcagccaaaaattgagccaaaatatattttttcacttatgcagttacatttccattataaaattaatttagcaaatgttgacattttttaaaaaataagtcaaatcagtttacattattttttaaattcaaaaatttgtccaaaaaaaattttaaagacgatttttgaaagatttttcatttcttagggggtgtatttttgaaaaaaatttgg

SEQ ID NO: 18739 - DNA, 2030 bp, Heterodera glycines
attatagaaaaagatttcattttatattcgaattttcacattttctgattaatcctcaccgttgttatcactaattacattcttgaatctagttttattattttgtacaattggtttttgtccgggttcgggtcaagggtcctgaactggctgaaatagatgccatattcttgatcagcggtcgcaaaaactccaaaaataatttttaaaaatattttacaggcaagtggaattgaacccatggcctaaaaactcatttttaacaaaccgttcaattcagtttcggttgtttcctctgtcgagaatggacaatttccgatttttgaggctttgtaactcttgaggcaggcggaatgcatcgcaaaaattaaaattcaaatataagtcgaccccgtacattaatgccaatttatcaaaattaatttaattaccttttggcacttttctatgaatttatctaaatgccaaaaaaaaatcaaattctaaatatccgtccaatacatttgcgatttataagaattgaaaacacagcattttattacaaataatgagttcaaactcataaattttttgccaaattaaatgaatatcatccactaattacattttgacatttggccatatttcttcgaatttaatttcatttaatgccaaagtgacaattcgctgatttacccactttgaaaatgcacgcacctgcaatttgttaattaatgcatttgtctgaatttctcaatattcattaaaaaattgtctatagaaaaatttattattgcatgttgaagagtaacaatttttgataatctttcagaaattggaaacgaaataaatttttattcgttatatcaaatgaattatgaaactttttgccacctattttcccattttagtatttaggggggtttttagaacctaaaaactaactattttggcatgttttagcacctaaaaatcgtatcattattaattaatttcaattataataaagcaaaaaaataataattttttaaattgtattttcatgatatgacaaaattttaataattaaacaattttaagcattctgtaccggttttcatgaaaatcattgcgtgacttcgtgtaaatcttttaaaaaagttggctttgcgtgttagaacaacggcattaatttttcttttattcagaatttttattattgcatgctcacagacaatgtttaaattaatcttatttctaatggaatgctttgcagaatttttcgttttaaataattattttaatttaaatgtcataatgttcaaattttattaaaagaatttcattttcccttcttttagtcaaaaattaataatgcataaattttaatgcttttcctttatttgttgcaaataattttagctaaaatttatactaattataaccgttttgtttaattccattaaaacaccaattaaaaatgtctgcatcaaatacaacgtctacaactgattttgaaacattccttctgttcctttgcggtgtcgttgagctgctcatccattttgttggcattccgttgtccattgtcaatttaattttggtggcacgcacttcggtcattcatccgaacatgaaattcatcctccttttccagagttttgccgttcttctggtaaaatattcgggattttttatataatatatgcccgcatttttttttaattttagcgcggtttttgtcgttttgtcatttgtctgttcaaattcatcctttgggatccgatcagtgccgaaatgggcttgtttttcccagccatcttaaaaatcggctatttcggcatttacagtcgtaattatgtgccccatattctcatcattgagcgcattttggcaactgtttttgtccgaacttatgagcagcatcggggctttttgttcacaattatttggcttccatttgcggtaaaatttaaattttgaaaattgcaaaaaaaaaggacagagttttttttaattataatttatataaaagaaaaaaatagaaatgggaaattcaatttaaggcgaat

SEQ ID NO: 18740 - DNA, 2753 bp, Heterodera glycines
  unsure (1)..(2753): unsure at all n locations
ggtttataataattggtgagcaatcagccagtcagtcccattagggaattaatgactggtggtcggtctttcactgatcagactcaaatgattgattcgccttataaaattaggtaggccggattgatgtattgcctggttcaaaacacgctgtggaatcagccgatcattggcaagactgcccgagctgtgttcctccttactgtagtcaccgtattttgcctgcattgcgtatgagccgagaagcactgcttggtccggtggacagtacacttcgtcggtcaaaatcaggtccttcacttgcaggtaaaacagacgctgtaatgattgatggtggaaataacacactaatgaattactaggatctttcaaaatttttgaaaaaatcgctaaaaaactttccttcaatattttattcttgaatctggggacctttctttgttagcccaaaacattaaaaatacgatttttcgcatgtttatggccataaatttgtgtaatttgacgaagcttttgcaaatttaacaggctcacattatagaaaaccattggcgctttcgaatgataggcaaaattttttgattttgttacatctatgaaattaatgaagctgtcaatttgtcatgcaattgtttacggtcatgtaaacaaattcagaggcctcaaattaaaactcttttttatatgattatgtttttttacatataatcaacctacgagggtcacatcctggatgatttcttcagcaacatctataaaaaaaattgtgtaaaattttgacttaaatttcaatttttttaccctcagggtaaaattttgcacggaatttgaactgcaaagtctgctcctttttgatgtcctgtttcagtactttctgaaaaattcagcaagaattatacaataaatgttgcngggaggttttccattttttgtccatggcgctgaaaatttatgtcaattgaaaaattttttggccaaaagagcaaacaaaggctcttcgggtgccacccccgaaatttttttttctggttacgggcctggcggcggtgagtgggaatgatgtgggacccgctccaactccaacccaccttgttcagcttcagccatgaagaaatgcccttggtgtctgtgtattggagcccaaaataccaaatttcgcgcaaattgattgtcttgaccacttggtcgaacaactgcttgccaactgtcgatggcggaatggcaaattccaattcttaacaaattaaccaaagtaaattctttttttttttatcattctcacctgcgtccatcattaccacttttacattaaccgattttgaagacatttttagacaaaaaaatattttaaaaaatttttgcctgaaggaaaaatgaacaaattaggaaatatcataggtaacgaagaaagcaacccaactcatctacagcacgatgcggctctgtatcgtggcattttttgtgcatgaatgagttgggtatatggatgagttggtatagatgagttgtgaagaattttctcaaatcaactgcttttataatggaaagtttgcatacatactacatatgtagttttaagaaatactaccgccgaccgacctatttaaaaagaaaaaaatagttgcaagcgaaaaattaaattcaaatttttgttattttttcgaaccagcaaaagcctggtttttggtataataaacaaaaaaccatttttggattggcgaactttaaaaatttgaagatgatttttaaatttttcagtcactaaattttgcctacattttcggaaatcggaagacccaaaaaatttcggaaatcggaaagattactcattgcttactagtcttgtaattaacgcctttttactatcgctttccaattcgatatttgtttaagtgttaaacattcagtccattcgaataaaaatttctgtccgattctctctgaaatgactacctccgatgagaaacaacttcaagtggttgtggctagcaatgaaaagaaacaaattaagaaatcggaagttgactttcccgtggtattgaagcgtggggtgcagggacgtggtctgtgtttttctgatggcattttaaatttattttcttatttccagtgaaatggtactcgcccgaggatgcctatgggttcatccatcgttacgacgtcgacgaagacattttcgtccacggctcctccatcgtccgtttcaacattcgcaacaaaaaccagcatcccgtccttagcattcagcaagaggttttaactttgaatcaacaaattgtcattttgaaagaccaccattttcccattctgtatagattcgatttattcatttggttaaccgtttcgttaacttcttccgtcgttcaggtggaattcgatgtgatcaaagtccgcaagggtctcgaggcgcgttgtgtctctggcccgggtggccgacttgtcggacgcttcttcaatattcctcgtcgaagtgtctcgggtgctaagaagcaagtttcgaaaaaaaacattaaaagggtcccccgtaatactgccgatggtaggaccccttttttgaaaagaatatttaaatttttaaaagtcactgaaaatatgtttctaagggttttcggggtcgctgaccaagaatctgacattcattctgaccaatttcgtatcacagaccgaattcgaacaaaaagtcgaaaatctaaaattttcaatattctctaattttgttcccataaattgattaaaagatgctaaatttagtc

SEQ ID NO: 18741 - DNA, 2691 bp, Heterodera glycines
agaatttattatcgaaccaatttttattaatttaaatttccaatgtttcataaattctcaaaaaagccgaaacccatatttaccatcgaaagctcccccaactcgctcattcaagcgggtccaacagaagagcgtcaatacctacgaaaggcggaaaaattaaggagacatttcaatttccgtattatatgtaactttttttattattatggattattaaaaagtaataatgacactaaattataagatttatcaattggaactttttaatctttcattaatatttgttcaaaattgtatttttccgtaaatttttgaccccaaaaacttctgaaggcagcgcctccgccatctgtcccaaggatttgagtgagtgattgagtggggcactattatggtaatatatttctgctgcaacagcagcaggtgagttatttggtccaccgccgtaaaacaatcgctttttcttcgccatcgctttggatgtcgttgacatggcgaatttgtccgcgacaggagcgagccattgggaagacactttttggggcaaaatggaacaaatttggtgataatttttgttggttgatggcgttatgtatgatcaccgctaattgataagcgggtggagagagcggcggccggcggagtatttaagcgcaacggcgagagcctggcgaggacgaaacgcgggaaacagtgttaaatccagacaaatgacgacgacgccgagagagagtccatttgtctgtctgtgataattcagcagacaattaattaattaattcttttgttttttaactttcgaaacattgccattggcttctcccttttctattttttttacaaataaaaagcaatttacgcccaaattaaaatgtatgccttttaaaacataattaaagtgaagatgtacttttttgcggaaattagttatgtttttttttcatttttatttccaaaaattaatcttatatttcagaaattaataggaattaaaacaagcaaaatatgtgctttatgattaattatgtacgtaataataaaaatttaaaggaaaaaattacacattaatttagtccataacaaaattttcacgctgaattatatagaaattttctagtttttttcttattatttacctccaataattaccaccaattaccaaatttaattgctttaggtaaagcttttactttgacaacagttgattttatctttttgtcaattttttcttcaatcatcaaattttcccatgaccccatttattcacatttttaaatttatttttggccattatggcaaagcacacgtgttttggcataacaaatgtgcactttatcatataataaaccaatttttattttcaaagaaattaatttttaaagtcagtttttctttgctaatttccattaaatggcatattctaattagcttatcaaatattatgaatgcttaaaattaaacaatatatttcatttttaagattttttaatttactgacacacaataaaatttgcgggaatggacaagcccggactggtcggctcggtgctgttccacgcgctgtttttcggttttggcgacctcgagtccaatgtgctcaattatttgtctgtgccattgcgcgagttcttcgccgactcattgcaacggcactacgcaattgagcctgacagtgaacagtttgagctggcatattcggcaatagccagcgtaaatttgattaaaaaatatttaaaattataattaaacaaacaattaatatgaaattacaataaataaaaataaagataaatgaactttaaaaaaatttaattacaaatattcaaatataaaatagtttaattattatttaattcttattaaatttaaattaaataacaaatatttatatattaaaattcgacttaaattattaaaattaaattacaaaaaacattttagtctttctttgttggcgcgatcattgcgagtttgatgatggcgtggtgtatggaccgttacgggcgcaagggtactgcagtgtatatacggtaaagattgaaatttacttaagcaacttaattgcccatttcagctcttctcttggcattattgcagcactggccatgctgatggccaaatggcttggaatggccgaattgtttgtgctcggacaccttttagccggtgccatctctgcgctgaaaacggtcgtgttcatttatgtggcggaatgtgctccggaccaggcgagaggtgggcacaatttaattttgtttttgaaagttcctggttttgtttttgagctagctaacacaaaattcgaataacaaaaaagcattcgctaattgattgttgctaatttttagttcgactgggaattattcgttttgagactgcaagagtcttagacgattttctcaactcgagaatttgactcccgaaacatcccaactcattcattaccgcatttcctataatatagcccgccccccccccccataaattagagccctaccccttgaaataaagcccccttttgaaggggaggggagttgaaaaatatagtccccaggggttctaatacaagaaatacagtatttatttttgaaattttaattgcctattaatccactcatttgttaggctggtcctcgaccgcaattggctccggtgccaacctcatgctgttgctggcctccccgttgt

SEQ ID NO: 18742 - DNA, 1291 bp, Heterodera glycines
gtcctcgacgcaatggctcggtgccacctcatgctgtgctgcctcccgtttgtgcctgcggcgtgttcggcaccgtgagtcctggtggtgctgccagccggctgtctcctcatggccatgtttcatctgttcggcgccgcccatttcccagagtcgcccaagcaactgtacatcggcaacggtgccaaggaggaggccaaccagtccgcaatgttttaccatggctccagcgcaaaccttggtagttttttatttgaaaatctaattatggcaattagagcttactcttacactaatttatattaatattcttttatatttagccgaactctttgacgaatttgagcatgaacgtctaattgtgcaccatgagaaagtgggatggaccgagttttggacaagccatcgattgaggtggagtccattaaaaaacaatggctttttgtttaggcattctaggttaactttaaacgtttagggtttcatggaaaattaccaatttttaaacttgatgaaattttgaagctaatagctatcgaaatcaagaagtttaaactttgctgatttgagcaaagttaggacattatttgtttaaaaaatgccaaattagtggattttacgaaacaacctaccattaaatatattgccgtaagcttgaaaaaaattcataaattgatcaattaaataataaaaacgatttttaccttatcagatggtccatggccattacactgctggcctcttcagtacccgccttgtcgctgataaatttgaagagccaatacttggagccgatgctgatgcgctatgggttgggccaatccgagtctctagtcttcacaatggtgaatttaatttaaataaaaaacagaaataaattaatatttataataggccggagaattccgctggttttgaatgggagaaatttataaatttttgataatcaattttcatttttgattattcttttttgcataataaattataattctcttaaaattaggtttgaaattacattaattgttttcccatttgctaggccatgaccgcactgaccgccccgttgtgtttggtggcaccgtgtctgatcgaaagttggggacggcgtccattgttcctgctgatcactgctctgtcaacgcttgagctaacgctgcttacggttgctcagctactgtatgacgtactcggtaagtctaacaatgcaaacgatctataaaaacagaattgattcaggaggcggtggcattgttgtctcgtcaatgacactgatcggatgtacgatggg

SEQ ID NO: 18743 - DNA, 2369 bp, Heterodera glycines
tgctggtgggttgagtcccatggtttggaatgccggaaatttgagtcccagagattggaatgccggaaatttgagtcccagagattgaaatgctggagggttgagtcgcagagattgaaatactggtgggttgagtcccagcgattggaatgtcattgaaagttggtgggttgagtcccagtgtttagaatgccggagatttgagtccattgtttggaatgccggagatttgagtcccagagattgaaatgctggtgggttgagtcccagcgattggaaagtctgataattgagtcccagagattgaaatgctgttgggttgattttcagtgattggaatgtcattgaaagttggtgtgttgagtcccagtgtttagaattccggagatttgagtccattgtttggaatgccggagatttgagtcccagagattgaaatgctggtgggttgagtcccagcgattggaaagtctgataattgagtcccagagattgaaatgctggtgggttgattttcagtgattggaattcattgaaagttagtgggttgagtcccagtgtttagaatgccggagctttgagtccattgtttggaatgccggagatttgagtcccagagattgaaatgctggtgggttgagtcccagcgattggaaagtctgataattgagtcttagagattgaaatgctgatgggttgattttcagtgattggaatgtcattgaaagttagtgggttgagtcccagtgtttagaatgccggagctttgagtccattgtttaattctttcaacaaatttcactaacttttgataattgttggaagtaattattccaaagcaattataaaattagaagaaaacaaattttttctacgaaggcattttataaacattatttgtgaaagtgaaatttcagaaacatattcccatacataattcacttgaaatgggtaaatttttcggtcatattattttgcaggatattggtttttgtttttacgctcttattttaatatgaaaataggtgaaggaaaatttcctaaatcatcttcctgtgcttaaatatcaaccaaggtaatgagttaagttttcgtatgtatctgtttttcagatgaattttacagatttaatatgctgcaattttgatttaaatctaagccattaattaattctttcaacaaatttcactaacttttgataattgttggaagtaattattccaaagcaattataacattagaagaaaacaaattttttctacgaaggcattttataaacattatttgtgaaagtgaaatttcagaaacagattcccatacataattcacttgaaatgggtaaatttttcggtcatattattttgcaggatattggtttttgtttttacgctcttattttaatatgaaaataggtgaaggaaaatttcctaaatcatcttcctgtgcttaattatcaaccaaggtaatgagttaagttttcgtatgtatctgtttttcagatgaattttacagatttaatatgctgcaattttgatttaaatctaagccattaattaattattacggcctttttggagttacgaattacgggttacagatttttgggatttttccgtaattttgatccgtaactggctttttagattatttttcgagacgatttcttgcaagattattttttatataaaaatgaattttttttttctatttttattaaaaggctacctatatttcgatttaatctgacctattcttggtaatttgtagtattattaatatacataaagggggggggggaagctagcaaaggggaaaagaggaaatgctaaaaatttggctattttttaacaaaattcgttaaaattctgaaaaaaaattatcctcggcggcgcttatcggcaccgcccgccccaaaaattcataattatttttgcccccccgcccgcccttcagagcacgacaaatatttcaacaaaaatttttaaaaattgactagagcaatcgaacgctaacggacgacctaatggaaaaaaatccccgaaggagagaatttaattaaatccattccttcgggggaccgtgccgggtgccgcggggtaagcagtgctggttcgtttcatcacggcaccgaaccttttggctagtcagcaatcgttgcttaacttgccagatcggacgggtgcgcatgattccactgttccaagcaccccaccaaaagcaaaacgatataaccaaaatataaggaaaaattttttaaaaaattttttctccatcttcctttttgatactaaagcatcagagtgctaaaattaagttgtaaataaaatttggtgcgctttagagcactttctgaaaaaaatatttagaaa

SEQ ID NO: 18744 - DNA, 1868 bp, Heterodera glycines
ttgttgctgttgcaactgtccatgcccaaaatgctggaaaatctgttgttgctgctgttggtggtgaacagatgtaactgtcgtcggaacaagtgcatgatggtatgatgttgtcgcagttgtcaccggggagttgctcacagatgccccactggttgcactcattgtcagcaacacatcctccgctggtgacggcaacgggaaatgctgttgctgcaaagaatgcacggtttgttgatgttgtggctgttgttggatatattgcgacctgaacagagagagaacaattctcgtttcacaatcagatacaaacggactgtctcttactgaatggtaatgggtgcgttcacaggaactgtctgaacaactgcttctcgctgcggttgctgctggttttgggcttggccactcattgccatgtttgttggataataatagtcgcactcgacaacaacgccttcccgttgttgtggaaaagtaccgttcgtggtcgtcgttatttggtgtgcgttttgctgttggttggcccgttggaataagtcaattgtgagttgctgttgtgccaaattgggagaggcaatttgctgcataattaatgctgtcgattcttggttttggtgctgcagcagtgccgaatttgtggccaccgcgtcgactgtctcgtccattcgtttcactgtctcttccgttctccgtctttcttccgccagccgttccaacgcgtcttgttcacgtttctgttgtcgcaaatgctcagcatcgacctccacaaaaccattgcccacgccagccatgtgactgtccacagactgaacaaagacaatgagggaaatgctgaatgatggggtattgttacctcattcgatgcacgtctttcaacagtttcgaatttaaagccgacacttttgtccactggtggctcttcattggctgttttgtccttttctcgtgaaactgtctcctcctccacctgttcacgttttatttgtttttctacggcacattcttctaccttttcttccatatttttctccttttcctcctccaccatttccgttactttttccaatttcacctctttttcggaaggtctttccaaaaccttccaaccaatatcgtgcccgatagcatcgatttgcggctgattggtgtccttaagaatggggtttttgtttattgttttgaataatcaaagacacaaatggtgtcacctgtggctgccttaggtcagctttcgtttggagtcccaaagaggcaaccgccgcctcctcttcgttgcgctcctccatcctgcgcaacagttcggcttccatctcctcctcgtcgtcctcttcggtaggcagttcgttcgcctctctctcttccctctttttcttttcctcctcctcttccttcctctgcttctcctcttcctgttcccttcgcttcttttgttcctcaagttcttcctttcgccttttttctttctcctcctcttccctcttcttttgttcgtcctcctcttccctcttcttttcctgttcccttcgcttcttttgttcctcaagttcttcctttcgccttttttctttctcctcctcttccctcttctttagttcgtcctcctcttccctcttcttttcctgttcccttcgcttcttatgttcctcatgttcttcctttttccttttttctttctcttcttcttgcctcttcttttcctgttccctcagattcttatcttccttttctctctatttcctctccctttcttcccctatttccttctgttttcgcttcgtttcctctccctcttccactttccaaaagtcgataatttcaaattcgttgtcctccatccgccctgtaggaacgatgttcagcaactc

SEQ ID NO: 18745 - DNA, 1871 bp, Heterodera glycines
ataaatgtcgaattttccgtcgtcgttttcgcaactgtcactttcgtagtcccaactgttgttttcgacggcttttgctgcttcatcttcttgtccaattctgccgttttctcgaccactctctccactgtgtcaatggttccgcttttgttgcttgtcatttgcttttgttggaagtgtgccgttttgagtgcagttgcgtctgatttgcttctgtccctcacagatgtcgtcgttgttgttgttgttgctggcggcgaagtcaccgtttctttttcggtatttggtttgctctaaattcaaacgtacataccaaaatataattaatgcccctttcccagttgaaaaagccaacctttacttttttaaagcgtttctgttcgaccgaagagaccgacgacaccgaagagacgcgagtccgtttcccttgctcattggtcgtgagaagggatttgttttgagccttttcggtccgaattttgatggcttcttcgtgtttatttccaacttttatttttggtacaacaattccctttttaattgtctcattgacgacgcctttgtgtttggttatggacgaagaaagctcgactttgttctgacgaagaggaggaggaggaagaggaatagcgcgttcaccagacgattcttcggatgagtcagccccgaagacatcttccatcgaaagatgcttcacctttttctaaattcagttaaaaaaatatagtataagtttgaaaaaatgggttcgacctgtgatggtaattttttcgacattccggcactcaattttggtcgctctttctttggctcactgtcagtgacactttcggatgacgacgaactgtccgatgatgaatcacttttttcagagtgagaatctgacgaacgggtttggcacccctcagtcgctattgaaatgaccttcgtcagtttcttaattaaacattttatttattcaagcgacagacgcacttcgttaaattgtttggcttcgtccgccgatgattcggaactttttcggtatcgcgacaacacatttttaagctaaagtacattttgattaatgggtttctcattgctagtgttggtcacttttttgattgccctgtctcccgcgtccaattcgccgtcctcggcttcgctctccgattcggacccattggctgattcctcctcaacagaagaaggcgaggagttcgccccctcctcttttgttggtcggtcgtccatgaatggttttcggggcgctatttcgggccgtctgatggtcaaaatagcagttgtcttttctaatttctcgtcggcactgcttttcgtgctcatatcgcccgaagtgtccaagtgtgttttcggtttttctgtcctcgtcattgcgtcatcgttttcctccgcgttttgctctccgttctcttcatcggaggtgtcactttcgtcctcttctgccgactttggttttggagacctctccgccatttttagctgggttgttgttgcttgggcgtattcatttccttccgaatcggttgaggtcgaactcagccgaacacgagagaattcttttctctaaaacaccaatatttgtaattgtctcttactagtaaataggtaaattgatcgtcattttgtgtaattacctttttcgcgtgcttcgtgttcaaaacttctaatgccgtctttttcttctgctcatcgtcagggcgttgcgaagaacgccgtttcacccggtcgtacatcgaaaggccaaagccaatgcccgatttgatcatcttcatcatccgcttctgctccctcatgtcaattccgttgaacatatccgactcctccaaactctcatccgaactgctcgacgacgtcgactgctcagttga

SEQ ID NO: 18746 - DNA, 1956 bp, Heterodera glycines
tattgttctggtgctgatcattccgactctttcccaggtgtgggtaaccaaaagtttgccgtgccgccatctgtcgtcaaaatcaccgcagcgaaaatcgtcccgagcaatggatgaggcgaagaatatggcgctgttgttctttgttgaccacctaatgcaaaaggggggccagcggactatccacgacttgagctgtacgtgcagacaaatcggggcaaagggcgcaaatcgaagcgcgacacaatgccaatttgaaagattggcattccctccggtcattgcactcgcccccctccccaaggccaatttggtgcacgcggattcaccgatgaaatgcgtcaggcggtcggcaccacccaagagggcctctacgagttcctcagccagtacccgtccctgttcaccctccaagacggggacaaggtccagctgaagggctacggagatggcgacgagggccgcacgcatttgtcgcacattcctccgtccggccgccaacgcgactacgtcgcggaggcagtgcaattttttgtggccaaattggagaagttcggccccgaaatgcaggtctggcaaagcaaaagagcaaatccatccgaattcgagtcgatgcttttgtcgccttaggtaaaatcgctgctcggccatcgttctcaagctgcccccgaagtccggctcgtttccggacgccatctgaaggaatttgccgactttttggccaaccaaaccaaccatttcacggtggagggcgaccgggtgaagttgaagcacatgccggaaccgaatggaacggatgccaaacaatttttggacgaggagggccgcccattagtcggccatcgggcgaaattggcggccgtggactttatgagaggggtgcttgaacaggtcgaattcgggggaggcaaaagcgacgcaaataacgggcaatcatcggcagaacgaagaaatgcccatccctttggacattttctaccgccgtttctgcgaccgtttcccgcacagtattcgccaggaagtggccaccaaccccaaggagttgctgctgttcctcaagctgaaccggcacgtgttcttcatccgctccaacaaggcatctcttttcgcacttctctcatttttaatctgtggacctttcgtttgagtatttaaattgcctttttctttggcgttccgtctcaaccgttccatttcttcgcctttttcaggtacaactcgtccgtaatcggcctggcgatgaacatggttccgagagtggtcgttcgaccggcgaagacggcgggtcgtccgatcgaagtgccacaagcccagcggagaacggaggcggctgtgcgccgccgagggcaccgacggacggaatgtctcccgagacgaacgctcttttcccgctgaaccgcgacaatttgcaccgcgtacaaattgtacaaacgctgcagcaggcacaggaagcggtgcgttgcctgcgcgtcgacctcgactccgtcccgtcttccgccttcctcgccctcgacttcaaattgctctctttcggctccgttccgtccgctgaccttccgctcgtcgttctcgccgttgtcgcgtcgccgctgcgtctcgtcgtttttgacctcgcccaatcggataaggttctgtcggagagcggactgcgcacccttttggaggacgacagcgtgctgaaagttacgcacgacgttcaacgaattgcgccccttttggccaaccgatgggacattcgaattggccgactgtttgacactcaggctggtcattcaattcattcactcattagtcctttttgggttccgaacatgctccaaaatcctttgcctaattaccctaattgttttgcctttgatcctccgctaatttatccccctttttgcccttctcagatcgcccattcggtcattcagcacgacaaattcagtaaacccctcggcgacttgcgtgcca

SEQ ID NO: 18747 - DNA, 817 bp, Heterodera glycines
atagctcttaaggttctatattaatgtgtaaaattcaaaaaaaaaattcgtcagtttacaaaaaagttatggcaaaaaataacctaaaaaattgactttttcttggctttttcggcgccgcgcgctataactttattttttatttttgattgttttctttcaattttgacatgttatgcggagaacaaatagagttttcaaatgatgccagattggctaaagttaactgacaacgaaaaaagttatgggatttgaaaattgacggcgccgaaatggtctgcgccgaagtgaccccgaccctttgatcagcccctctgatcaggcaaaaatgggcatttttgggtgttttctttaaaagtcgctcactcacgcgaagtccgactgcgacttttttcagtgacaattggtggagctgatcattggcttttccgtcccactttgttatccttttgtacatgtcctgactccaatttgttacttttttcaaacccgaagcagcaaacacttcgccaacaatttcatgaaacaatcgccgtctgtggcgtgtctaacgaaagagcattttatgtacgattatgtgtgataaattaaaaatgaatttatttttaattatttgcctgtatataaaaatgaaacttcaaaggataattcaataaatgtttttctcttgggttactgtctctctctcccctctcccctctctctctctcccctcgctctctcacccatctctctctcccctctctctctctctcctcgctctctcacccatctctgtctccactctctctctcactccctctctctctctctcctc

SEQ ID NO: 18748 - DNA, 1860 bp, Heterodera glycines
tgaaaaaattttcattaaaaattggcaatttgaaaaattttttaaccaattctacttaacaaaatgcattaaaaattaaaaattttcctggcggcgcctgtcgcaccgccggacaccattttacacaaaacagtccttttttggcgaaaatcggcctataaatggacggtccctccctggcgatgccatattaatcagtctcataaaattgaatttatttgtgccaacaaatagtgccatgcctggaccacttcttcggcccgtgactgcgcgtgctgatggttaagccatgtgctgaccatttccaattccttttcaaaattttcccatttttctttggcgtactgtttgaactcctgtgactgaacaaaatcaataaattaactaaaagtttaatttaatttgcttcggtttttctctgttttgttacctcttgtcccaccgattcatttgttcctttttttgtttttaattcaactaaaaaatgtttaattgttaatttaaacaaatttttatcaccagcgatagtcaaaataagaagaaaaaatggaattagcagcagatgatttatgaacattttaaatttgttgtttttgaaattgaaaaaataatataaaaaatttgctttaaaaatgtaaaaattatattaataaaaggaaataaattctgagattttggcattgttttcttaaaaattaatattgcaattttggacagcgtttcatttgcttttcatgtgaattcgtaaagcataaaaattcattttaatgatgcgtaataaattgatttaataatattatacaaccatggcaaatgaatataataaaatgaataatagtaataataataagcaataagactctgttgagtttagcggaaatgaaagtaataaataaattttaaaaatatatatatcccattgataacccttattatcctccacctctaattaaaaaatatcatttatgaaggcaatttggattaattcaaaacgaatgaataataaaactaattaattatttcgatcattggtgcgtctagacttaatttgtttgttattttttgaaatcggatgtttttcctctttaaataaagtaaatatttttttaattttgaaatctgaaattggaaaatcaaaaataaaaagcgattaagccaattgaccaattaaaatttctttcagaatttttcttgtccatttaattttaatatttcatgataaataaattacaaaagaataaataatgttaactaataggccaatttattgtttgactcttttcatttcggcattctctgtttggctttcaatggaaattgtcgtattgccggtaaccaaatcaccgtcaatctgaaaatggcacacattttttcgcggagttattttttgtagctttaaggctattcaaggcaccgagaagcactaccaagaaaattttttacaaattttttgctaaaattatacaaaatttcagattctcccatagataatttttaacatttttctacggtaaaataatttttaccttttccattcgatttcgaataagggagatagactaaaagctgagtgtggaaatgttcaagataatgacaaatcacatcttcttgaaaagtagcactccgctcttatcttctctccttccttgtaagaatgtcttaattttcctgtgattttgctcccaaaaacagaatgaaggctcctaacgaataaccacacttcacaagctatcaaatccagtactgtcctcaaaacatgatggagatgagcctagacttgtattgttttcataatagtctcctatagatataatcaccaaaatggggatggtctcttcatgacttaaatttttgcaaaaa

SEQ ID NO: 18749 - DNA, 2381 bp, Heterodera glycines
  unsure (1)..(2381): unsure at all n locations
acaaatcaaatattcttcacacacgtatcgtccgttgttctgctgctgtttccgttggttctgcaaatgttaccattgcaattgttctgcttcttcttcctcctccgctgtttcggctaccgtttcctctccctttgccggggatactgtcatttgctctttcgtcgttactgtccctttgcttccgttgctcagaatggcagtgattgtgtcgaccagcagaacgaccggggcttatgttgttgtttttgttgttgtttgggtcaaaagagtcagcggaagaaggcgggggatgaatttgcactgcacacaaacggcaaaacgaaagttagtggggaaaaggaaagaaaagtgatcggaaaagtgatcagaagagaaaaaggggagggggagagactgtggggattgaagagccatgggaaaaatgtacaaatggagggggagaagccccgaggggttgccaaatgccaaaacgatttggaaatgcgaagggcgacagaccaaaagggaaggcacgcgagaaaagcctatcaaatggccaagcttggggacagaacttcaaaagtttcacccttttttgcgctagtatcagccacaaccaattaaatctacaaattgccttttatgacttattaattacccaccgctggcagtcattgagcagcaattagtgacggcggacggtcgccgcgaggaggcgccggaggtgcgacgcgagtcggacggaaggcaccgctgggcggcagacggacggtcgggcgagccggttgaggcgaatgatacgccggcggagagcggagaggcgccgcctggggcgttgtcggcggcaacgctttgctgccgctcgacgtccgccgcaccttgcggcatttcctcccgcgaggcggccatcgcacggacaaccaaagactgtaaaatatggtcaaaactaataagaaatacggtattgatttatttgggttaattaaccctcagtaatggctaatgggccaattaattattaattgcttatttttcatccgattgaccttaaacgattttcccgtccttcgcccttcgcttttctttgcgtcgaccgaactttgtctgaaatatatattttttaattgttttttttataattagtttttttagtaatttaaataccgttttgattgaaaaagtggcgtgtttccaccattttcttgcgattttttcatcgccaccgaatttttcgcgtttgatgcgaagccgcccggggcaacgacagagatgagtctaattaacaattttgaattttgaactacaataaagtgcataatttatgcaaattaccgtattagtttaatttttaggcaattttgtttccgaaataggtttttttgcttaaaagggaagtttttaaaagaaaattctgggataaaggcaacagacaaaaattattcatgaatatatgcgaaaaattatgaatttcgggatctctcattccaatttttttttcttaatgcaaatatttgctcttttcttgtatttataaattccctaaactttaagctttcgattgatagcaaaaatgtttggtttgagcaagtaacaaaaaagttatgagctaaaaaagtgagggtggtcactcattggacgcgtaaactggaatagagccggtcccccccccccctcccccctaataaattttcacggggtttcccattttttcgatttttcaaaaatgagagagaaatttactcccatttaatttagtcatttccctcccgctttttgttctccttatgtgtctttcgttcgcatccaaaaaaatgaaaattgtgtccaaattgttatgccgatttttgaaaaatgcattgaaatttcgagaccgaccacaaattcttttcccgatgttatattttttcagaaaaatataggcattgagtgaaaaatgtacttttttttttacaaattttcgccaaaaatgacccattttcgggttacaaattcgggcttttttgagcgaatatatacacaaaattcttcgaaaatttcctcccctgtccgctctaatacagccccccacacactccatttgcggcaaatttcaaaaaatttccatggaagagagacctccacttgttccgttaggcccagttggccaatgatggagtcctcttccgccgccatttcggccgccaattcctccggcgttttcttccgtgccgagcccacgcggccatcctcaaagccggcacccattgagccgctttcgtcctgaaaaatttttcaaaaaatgttcccaaattgcgtcaattttgaacaaatttatggccaaaggttggaaaatttggttttttgaatttttctggtcataacttttctgaaccttaacganattttttcaaattttgcag

SEQ ID NO: 18750 - DNA, 3107 bp, Heterodera glycines
  unsure (1)..(3107): unsure at all n locations
atatttgatcaaatcccaaattttactattgaagcgccaccaaaacatgtcagtgggggcgcctaaagtcacttattcttttgtgtccaatattccctgcactaatctttgttgatcacccccggggcagacaaaggaagataacatctgtatgaccatttctacaatgaaaagacggcagattgacaaaagaaacaaatttttggaaagcgaactatcgctctggggaaggggtgggggcatactccgctggtcatttcttccaatattcgcatggtcatttcttccaatattcgccatgcagtggatcaaattcaactgcacgctttgcccgattggtctgcattgtttttatccgcgcaagtacgcgaagcctgtactgtgtgcgcatcccagcgtccacaacatcacggactttttgcgcaccgggcagcttgaggaagctgcaacgacaacagcaacaacaacagcaattccaacaactgcggaggtggcggcgcgtccgaatgcgcacctccgcccgcgcatttgtccgcatgggtcgcggtttgcacagcgctggtgcgcttttgatcatcgcgcaggtctgttaattttgggcatctacccacgcttccgctaaacccctatttctcaattaagattgtgcgcgccggattcaaagtgcgcaaatttttgaaggaccgcgccttcaaaaagggatgctgcgccgccatcgccagcgtgagtttcgcactatttgaattacatttttagcaaattgtaattaacaatttgtacaggaatgagtgccgcccgtcgcaaccgccaaccggtgagcgcgccgactccgttgatttagccggaaatgttggccggcgtttctcttcgcccgaccggcgtcaatttgacggtggacagggtgggcaattttaattaaaatttttatataatttcatttctctatcattacaatacacaaatcttaatcgttttaaggcagcggggcagcgccgcgcggatggtgcaattgagaagggcgaagagcccgtgtacgatgaggtgccgcttgacaccgtggtccaaatgcgtgatgaagaaaatggggaggaggatgaggaagaagatgacagttatttttagtgattcggcaagcgatcaaccaccatttaaccaattgatcgatttttcactttaaaataaaattttttaatgtttgaaaataggattacaaataaaataggaggaattcataaaaagattaaaaataggtacaacgcatcaaataaaaaattctaaaaaaggatttagaagcatttgaaaaatgtgggtgggcgctcgctctatataaataagtgtgcgtgtccccgtcggcccatttcaatttattcctgtcaaacatttcgccgtcagttttttgtcagcagcatgtcggataaaaaaagcattgtttaagcgtgttatcgcagaggtggacctcactataagcacggtcggcataactttgagcggcccccgtctgtctgttccccgtttcattccgtttgaggaaaacgggcgttgccgcgcatgtaaaggaactgaggctgaggtggacacaatggtcaccaaggatggaatcaccttatggtgcacacgaatagaaaaggctcagtttgtcccttttgatgttgtttacgcgcttcccggtcattgtttctttcgcgtgaaaaataaggcacgtgtgttcagtgttccatatagcaaactgccgtcctcagacaagtgtgcacagccgccaccacccccatcatcaaaacatcaacggacaccggacgacgaggaggagaagaatttgaggcgtaaggcaaaagtgacgcttgacttagtggaagctggtctaatggaagacgcaatacaggatgggacgcgctggaagaaagccaaaacctcgatcaatgtgctgggcaatctgcttttgccggaatcattaacagatgcctcaccaacttttcagcaacaacaacaacacttacagcatcagctatcgtaaaaagaggaggagaagagggaggaatgcacaaacaacagcagtgctggagcaacaactgaatctgctcccgatggtgatgtaatgaacgatttcgtcaatagcattcaagcggcgacaagcaatatgcaatagcaaaaaaaagcttaaacgatggactcgctctgccctatatataaaagttgttgattgctcaatttgtggttctccatactattattcacattttaaaaatgttaaattctcaatcgttcagtaataaagacatttgtttcaaattgccttgcggtataattatttccgggccatcctatcgggcaaaacggaattcctactaaaatttattgctgagtgcaatgaactgatcgcacccagtcccatctcaattatgtactgttttggtgaaatgaattcggcggttccgctactgcaaaaggcgggagttgaggtgtattcgggcgtgccctcggaggagctgattaggcgtcttcccaaaccgatgctgctcatctcgacgatctgatgttgtcaatcgatgagcgctatctgtccgatttgttcaccaaaaaatcgcatcaccatcagtttgcggttgtgttcatcactcagaatttgtttgagcggaagatcaaggtggcgtgcctttcggcgcagtatttggtgctaatgcgcgcgcccaactctctgctgtccattcgaaatattggagttcagctttctccgcgtcaactcgattttttccttgacgcctaccgcaaggcgaccgcccgcccctatggttatttgctaatcgatatgcacgcatcatctgatccagcgcttcgcctccgcaccaacatatttaaagaggagcaggatgaggacgtgggaacagttgtgttcatccccaaaaatggagcggtataaacggaaacaacaacaacaacaacaacaagctaaagttagtcaactaataaaagaaaatgccaactggctttgcgcactgtcgaaggcaaaatgcgtgaaacgatgcgggagactgatcagaaaggcgaacactgataagctgctgtcacttngtgaagtgtgcttgaacattgnntgcttctgattccgactg

SEQ ID NO: 18751 - DNA, 1345 bp, Heterodera glycines
  unsure (1)..(1345): unsure at all n locations
ttccaaaggatttaaacaaattgaagcgatgacttggccttttttttgatgatgaattgggaaatggcacgaaaaagcaaatgaaaaagtgccatttttaggggaatttgccgcatttngaaaactttgcgcaaaattttgagatttcaacgaaaaaaacaatggaaataaacaatcattcggtggtcaattagcattttattcaatcaatcaacaacgagttttgctttatcgaagtcaaaaatgccaaattgggagctgcgcggggtcatttttcttccgtccgcccaccattcatttgccattcgctccttctgactaatatttcccgttgcacttccgtccccccaccttccaattggccaatttggcatttcccctcccctcggcacttcgtccttttttacactttgctttcaattttggcaaagtgatgggacgggtgggatgagaataatgaaggaggacgagaagcagcgtaaggaaaggaaaaataaaaaacgaataattggaaaaagaggggagggaaaacaggggaagaaaggcccttattaaataattaggaattgggggggggggcaatgagtgaaaaatgagtgactgaatttttagggggaatggggaaatgccattgtcaaaaggccaaaaacaattgagaaattggcaaatgaaaagggcaatgataatttaataagctgacaagggaaagaaagaaaagactgtgcatttgcattggcatttcctttcccctttttttgttgcgtcttttggcccatgcgatcactttttgagtttacacaaaagcttcactatttggcagcagaatgaaattgatcggacggaacttttaaatttgaagggacagatggtaaaagaaagcgaaaagcaaagggaaaatggcgcaaaaaaataaaagagaaaaaaaaggagggaaaagggggggcaatggagggaaaaactctttggccaatctttggtcacaatttgctgggatttgtgaagggtttagtttcttcttctcttttgaacggacagcgaatgagcagagggagaagtgtttactgtgtacaaagtgcacgccaatggccaatctcagcagaaattgccggggctgaagccgatgggaaggcgggggaaggcattcaaaaacccctcgggggggggggggggtgaaatctgagcttgtccttgtccatgcggtgggaaggtgcgaaagtggccaaaaaagaaacaaatttcacttaaacatataataaataagcaacaaaaccatgcttaattccgcactttttgtctctcaaaaggtttaattttgagaattttcttccttttccattgccccaat

SEQ ID NO: 18752 - DNA, 618 bp, Heterodera glycines
ataataatgcataattagtgcatctttaattacgatattattaatttggttatttcttcattgcactgaataagtacacaactagacaccatcattatgagactcacggccccgcgttcattgtcaggagtattaaccaggctcgagcttaccggtcaaaaacgtcccatctaccgggcatcccgtctctagagacattacatcaaatcattaataaatatttcacatgggggcacattgtctattaatgtcttcaagcgccaatctatttccctcattttccctggtgtcgcttttctgcgtttatcggcataccctctgtctaagtccaaagcgaggttcacgattagattccatgcctcctgagcaaattgattaaatctcaaaaaggcgttcttcttcacgctcatcttccgctgaaataagtagggtgggggggtcttaaatttcgatccttcgaggcactcggataaaggaaacttgaggatttgtggatttggtcgatgactttgtttctttgtttgtccaagtgttggcgttgtgtagcgacaattttttggatggttttgctaaaattaatacgccttcaccttttgtccacctgttttagtggtgact

SEQ ID NO: 18753 - DNA, 1259 bp, Heterodera glycines
  unsure (1)..(1259): unsure at all n locations
gcagggtctttctttaaggttttgtctttgactttgcttttttgtccatttattccaatcgactagggccacttatagtcgttattttatggtataaagttgggtcgtccgtgtacaaatcgctcctccgttgcaccatcgacttcaccaaagggatcggcttcttaattcactttgtatgattattctccgttcgcctgttaaaccggcttcggcggtggcggagggtttatcactctgagctttttcggctgttgcgccggccctttgggttttttgctgttccgtttattttgcgttagcttttgctgtatctctttatactcctctctctctttcgtaattctcgcaatctcttcacaaatgtctaaattatttttcttttaccaaatattttgtgtttgtgttacaaaaaccattgtaaggtcgtttcagcctgaacagcaaagatccctaaatgaaaagcattctgttgctttacaattctgagcatcaagatttaaattacatttttgttttggtcagttgccaattcaatgtcctggtacagatacttgtccatgatgcctttcaactgtcccgttgggaaaaactctttcagtgcctgtaatcttcggatcagtcaaatcactcccactccttcgttattctcaccgctttgtttaattccttgaaataattatgttcatacaattttcgtagttctaacaagtccacgaagcgttcctggccacccaaattataaatcagagaaagcaattgttcttttccctgaaattgacgtccgttttattttagtccgttttttaaattttaaaaatgaaatgaacattagtgataaaaaataccgctaaaattttcggattatacttcggatcgccgatgagaatcttaaatttatttatccaccaacaaatccgaatgtttctttaacctcgaagtggcgctgtttctccgcctttttgtccctatgttgtgctgattcttcgatgctggagaggatatgcgtaaccattggaatgttcttaatctaacacaaaattcaggtgaaaaacaatcctttcgacattcttaccctgtaactaaaaacttttttcgggttttcatttccggcccccttggcaaggtcagtaaaacacggctcaacaatgtcggacaattccaccgagtctaacattgcctcaattgaaggataacccaactttttggccagnctggaggatgtcttcattagtgtcctctcttaattaagttaatat

SEQ ID NO: 18754 - DNA, 2085 bp, Heterodera glycines
aaaacttacaagtttagaacacctcaaaaacttacaagtttagaacacctcaaaacttactagtttagaacacctcaaaacttacaagtttagaacacctcaaaacttacaagtttagaacacctcaaaacttacaagtttagaacacctcaaaacttacaagtttagaacacctcaaaacttacaagtttagaacacctcaaaacttacaagtttagaacacctcaaaacttacaagtttagaacacctcaaaacttacaagtttagaacacctcaaaacttacaagtttagaacacctcaaaacttacaagtttagaacacctcaaaacttacaagtttggaacacctcaaaacttacaagtttagaacacctcaaaacttacaagtttagaacacctcaaaacttacaagtttagaacacctcaaaacttacaagtttagaacacctcaaaacttacaagtttagaacacctcaaaacttacaagtttagaacacctcaaaacttacaagtttagaacacctcaaaacttacaagtttggaacacctcaaaacttacaagtttagaacacctcaaaacttacaagtttagaacacctcaaaacttacaagtttagaacacctcaaaacttacaagtttagaacacctcaaaacttacaagtttagaacacctcaaaacttacaagtttagaacacctcaaaacttacaagtttagaacacctcaaaacttacaagtttagaacacctcaaaacttacaagtttggaacacctcaaaacttacaagtttagaacacctcaaaacttacaagtttagaacacctcaaaacttacaagtttggaatttcaaaaataattctttttttttgaacaaaaaaaaacttaaaactattcatgtagcacaatggactcgaaccaccgcccttttttcaaaaatacacccccccccccccctaagaattgtcctaaaagttaatacacccctaagaactggaaaattttctcaaagtttcatccacttaatttttttttttgacaaaattttgattaataaaaaatattacaaatgtacctcactttcaactccaaccagtgaataacattttttgctcaatttgcttgaaaataatgtcactattttcgtgcaactttttgtcaccattttggcatttttcctcattatcttagttaactattcgagatttttcgtaactaaaagttgctgacctattcaccagtcatattttggtgttaagtattaccgtacttttccttttgacctaatcccttttaccgaaggagtttcaaaatgaaattttggaattccgacactttcctttcaaaagaacctatgctattttttgaagtaaatttcctaaaccacaaaatcagattaaaaattgtggtggagtcgcatggcggacgaacgattgaccgtccgtctaatccctcaagaatcagtacatttttgttacaattttctccccggggccgctcgctgaatgaaggacatttggcggtgggcgtgcgcctgttttttaaattattattcgtattctgctgttttattacttttaacaaaaatcatcatcatttatttccaaataatcaatttctaattctttttcttctgcatcgggctcagtagatggtgccaaaaacaactggtccatatttgctttgatgtctccgctcaggcttaaattccttggttttacagaaatcagaaatcaaaaataccgatttcttaatgagttgccataaatgagccccgctttcgagaacagcctttccgatgacacagatgtggcgggaattgaatgaacaatccgggccagtacaaacaacaaaccggtaacggtactttcatttttgaaaaaaccggtaccggtaccaaaaaaaccggtaattaccggccagtaccggtaccggtaccgctcaaccctagtttatattcagttaattggtcagcaattttgtcacagtgccaattcttttgcattaaatacataacgccaagatgggcctcaaatttttgcgtcaaatgttttttcattttctcactttcaaataacccaaaagag

SEQ ID NO: 18755 - DNA, 2931 bp, Heterodera glycines
  unsure (1)..(2931): unsure at all n locations
cgctttttcattagcagctcatttaactgccaaattgtctccctaggaaagcatcttttgctcgcgttacccactgcaccccttcgttcgctattattttgcaattttacgcgtgcttttttcccattcggccggacaaaaattgctcgaacaaacggcaattaaccaattgtgggacattttaaaaattttattttatttagttaagtttagcctctacgaactcgcgcttaaaccatcgacgagcaattcgctgatcaaactgatcatcgtcagtttggaatactttcctagcgatgaaactgacgatggacagcagggaatatttgcacgaggacttttcgaagctgtgcttctccattcgacacttaatgaggtggtgaaaggccagggcaaagaataattaaatcctcagcaagtgattagcacaaaaaaatattggcacgaaatgtccaaaagttttatagtcaaaaaaataaataaaaagggacagaaatatggactatgataacttctatatatgcgatgataaatgataaaactaaggatcaaagtaacagaattttacaaaagatagaggagaaaaacagaaaacaataaccgaaaatggaaatcaaagataacccggaaaagagaaaagtgttgtgaatttggtggtggaaaatcactgtgccaatcaatcatgtgatggtgcgttcgctgctgatcaattctgatcaagctttttgttgcttttcttgttcttacccgtgtttctcttcccatttccgccccggagacggaggaccaagtggagcgtggactccttctgtatgttgtagtcggccaacgttcgtccgtcctcgagctgtttgccggcgaagatcagccgttgctgatccggcggaacgccctccttgtcttggatcttcgtcttcacattgtccacagtgtccgagctctccacctccaaagtgatcgttttgcccgtcaatgtcttcacgaaaatttgcatgccatcgcagccgggcgcaattagcagtagagaaacggcgacgaacaaaagtcagcccatatgcgcagaatttctcactcatggcatacgaaaaagtcaccacccaaagtcatgtgccaaatcatgtggttttggtataaacgggggggatttatttgcggttggctctttggcatggcttattattatgcatatcttttactctttcttgggttttttgcgccttcataatccttttaatggtaatacggccaattattttgtctgtattattacagtccatccaaaaatgggccacccgtttcctggatgtgttcatctctctcgaacagcttggccatttgcccaccttcccctgttggcattgggcactttcgttggcttttcggcaactgtccaatccttcgctgaaaattgttcgctgtgccgccaaattgttgcttgattggttcccggtctgttttaccgcttttcgggagtgaatgtgcgagatttgcccattatccattaattaggacatttaactttattttttttatagaaatgtccgccggaggcgcgtaaaacggccctacttttgctaaggacatccaattttagtacgcttggcaatttgggcacgcttttggaggtgattaaacagagagatacttaattgagtaaattaataattcgtcatttttgggtgtttttgtacggcgattgggacgaattgtcactttgcgaaagtgaacaattggccagggaaacgcttcggagatggaaaaaggtgcgtttcgaaggagcaatgaaccgatgttcagttgcttcttatatttaagcagttcaatttgggttacgtggacattgtggaggaacgcatcagaaagtcgttgtttttgaacaacgccgaaaccttccaaaataaacgctcaatggatggccattttgcgagagtatcatctaattagtaagtgtcccaatcaggttttgtacccctaatttttttttgaaaataaaaaaggtttaaaaaccggtctagcctgtccttactattccataaatccttgtctatccattctttatcattttcaacaaattaattgtttagcgaaagtggcaaatgtcggccctgccttttcagtcccgagcatttgtatgggcaattaattaggacacaaacgggccaatcacttctccaatccgaatgcgccgtcgatgacatcatcaaaacattgagaagctttttgattggcaaagaaatttgccaaaaacaaatcaaatgttcgttcctttcaattagctttcatttttgctctgcttgtttcagcttcgctcttcgccttggcccatttgttggccaattccgaccctttccatgcccatcttttttcctttgatctcgccgcttcctcttccgccgtttgtcgctttccaattgctcaattggtccgcttgctttgcgattgtgtgcgccagcagcggtcactttgtgtccgcggattcgctctttgggcggcgaatattgcggcaaacggaaacggacgaggcgagtggaaaataatgagaaatcaattaaacaaacattccttaattgcctgttatttattagttgctgaaactctcactgcctttggttggcagtgcggcgaaaatgccgaaaattccgttggttattcgccgtatgaaaatattttaaagaatggcacgaaaatggcgaaatgggacggcacagggaaattgttggttgaccaaagcaaccgctatttcaatgaatttatcaaatgccaaatacccaatgacaaacaattggaacatcggcaaagaattcgcacggaatttcccgcaaacattgcaaaaagccaagaaatttccnccaggtggnntacatatttaaacactnttaaatattataatatattttannnagattttaagattttccgctccgtttctct

SEQ ID NO: 18756 - DNA, 904 bp, Heterodera glycines
atacaggcacacaaaatacccacagctatttccatcgcgttctgaccgtaagatttacggcatccacaatcacggtcaacgctgccgacggcaaaatatcagaaatgatctttctaattttatccgtaagttgacaatccaacctgccataaggggtaggcaaagaatcggcaaaatgagtaccgaactggacatcatggacaatgagagtccaatgtccagggaaatgtactggcaaaagtataacttctgccggtacattagggtcgtacccaaatgtcatatttttgtatggcatgactctgtccaagccacttctccataccattgggtcgactacgaccacttttcgttgtgatatggttgccaagtatgctaaatatgtggcagcaaagccgtcattgagaaactgggtcagatcattccaacaggtctcaatgtatcttgggccagaactcggggcatgctctgtttcgccatcacgttcgtaaaggccaatggctgcccatttccaaattttgcaggcaaaattccgcgtggttgcaaaattaatttgcactgtgctgaaatttattttatcagacacattaggcaaaactgccacatttatgccagcttcagagctctgatccattggcgagtcttcactcatgaaatcatttgttttagccctgcctgagcctgcatgaccgcctcttttcttagccggccggcctcgacgacttctttgcgaggaaactggcgttgaagcaattgcttcaatagcagatctgggtcggtcaacatcgtaggccttcccttttttgctgtgcggcgttaactcaatattttgagtggccgatgtaaattgtgtgtcaactgaagacacactattttgcgaagccgtgatagcctcatctccggc

SEQ ID NO: 18757 - DNA, 1218 bp, Heterodera glycines
  unsure (1)..(1218): unsure at all n locations
tggtcgcaaagcagaccggcgtgtgcactaantatcatggtcgctaagcagaccgatatttgccatggtcgcaatgcagaccggcatgtgcacaaatctcatcatggtcgcaaagcagaccgacaagatttggaaacaaataaaaaatgtgaatctcaaaagggaataaggacagaaatctttacaattgacttcggtattctttgtaaaataattttaagtacaaatttaaatttctgtcaagagtaaagacttcttaaattctattttggagcttatgcgtgccaaagtgtacgaaacttaattcctaactaacctcagatttgggttagtaaaactatttgctttgtgtacaccttgccataattttgtatatatgggcatctaaaaatttttggttattttattctattcatggtcaaagtgatgaattttaaagattttaaccggccaaacacagagattgcctgagagaattttttaagtttggaaaattttgggatggaaatggtatcattttttaaaaaattacactaattgatttcttgtttgaaatatacaatttcataaataaaaattttcttcaattcaaggaaaaatgtttccatttttctatttttgaactcgaattcaatctataattttcgagcttagaaaggtttgaccggcttatttgaaaaaaatgaaacttgcgcaacaatccgcttttttcccttgaaaaatttgcacaccagcgcatcgaaacggagcgaaagcagtgccaatttgaggtcgagatgagcatgtacaaaagaggggaaatgtccatcaaacattgttgagcggttgctgaaaatttcaagaatataagaatacaaaatagcaaaaaaagaagcaaaaacactaaaaaagagtgcttttacaccaaaaaaccgaatttggtttttaggcaaaaattctttgaaattggaggcacccttttggcacaaaatcctttaaaaacactaaaaaacaattcacctttttgccaccgaaatgtttgtcgaccaaaagttcaaaactgggcgaaatctgtgccaatttgaggccgagtgagcatggtcaaaagagggaatggccaaacattgttgcgcaggtgctgaaaaatgtagaatatatgattgcaaaaaaagcaaagaccctaaaaacgngccgaattggtttttaagcaaaaagcaattgaaaattggaaggcctttt

SEQ ID NO: 18758 - DNA, 1906 bp, Heterodera glycines
  unsure (1)..(1906): unsure at all n locations
aaattttaatttttaaaaagaaaaaatgatggtgagttagtaagtttttcaaaaaaaaaaaaattcaaaaaaatttcaagaaaagtcaaataattgattttgccttttaagattttagtaaaaactctggaacaaaataatatttgatttaataaaaattcctcaaaaatgatccaattatggaaaattgtcctttcttatttttaatgatgacaaagccaaggctctttattttttttacaaagatttggctttttaggtatttatcctggttaatatatagtaagtataagtaaatgagtatcaagatctgtgtgagtggtgggttattcaacatctaagtagttacagtagacggaagagagagacatagttcgttgagcagatggccgacttcgattccggatggttaagtctgcaaaaggcagtgatagcgtcatgataatcgaggtggacaaatcgatggtctggatcagtagagtagttcgatcttgaatgagtgtaattattgaacaatcaggcgggaaagttcgtgagatgagtcggtatggtgggggtggcactattgtaaacgagtgtatctgatgcggaggctgttattctagcgtgaggtgatttcttttccatttcaatgaagtcggggaaccaatcgcatcgcgctcaaattgaattgctaaaggaacacatgcaactgaaactggcatgcagtcaccttcttttttcatgccggcactgaaaaataaaaatgtgaaaaagtataaataggggggaggggaggcacctcagacacttttggaagcggcaaaagcgacacgcacagcgatagtttttgtcgatgacgcattgcttgttgaaacgacaagtgaacttctgacttcgcaaaatagtacggcgaaaaaagccctaaacgaaagaaacaaaagtggcggagagaaaaacgaaggcattcattgccttgcatccgttgcaggaaacctaaaaaaacaaaaacagtaagtgatccacgggaccaatgtgtgaaagggagggaagtcaccgtgccgtaatgtgtgccggtggatttgtcaccacaaacttggcaaggctcggacaaagggtcaactaaggaacacttaaaaaggtaatttggcaaaacaaaaatttaccaaccgatgtccattggatgatgtaaaaacaaactgatcagaaaattcaaacagttcaaaaaagggggttaatcgcaataaaaattatatcagagtcaaatcgaatgtgacgaaaacgataagtattccattgtatttttaaacaaaaaatttaaaatgaaagaattttgcgtttactttataatggtcaaaaaggaattaaaaggaggatggtcgggttaattagtcattaattggtcaattagccgtcccgttggcgttcctttcttcctcttcgtcaaagtccatcatcagctgctcaataccaatgcatgcttggcgcctacggcgtgtagagcttaaactgcgcaagaatttggacactcgccgtccgaacagctccgagtcatcctcctcatgtgtgggaccatcaggtttaaaagaagaagctgatgcctaattgtgagggaaaatattatttggcatttggaagaaaatgaagtaaaacattttatgttagtaaatgcatagattccattggtcaaaatcaagaacctcttttcttctttctctctctctttcactttttctttctttcttgttatccctttctttctttctctctcttccatttctctctttctctccatgtctattacttttcccctttctctctcttcctgtctcctctctctcgctttcatttcctctctttttctcgccttgtcttatttccttctctctcctntctcttcnttcgcgtcctccttttccttttctct

SEQ ID NO: 18759 - DNA, 1538 bp, Heterodera glycines
  unsure (1)..(1538): unsure at all n locations
atgtgacgttctacgaagtattgttcaaccatagaaatgttttcaaccattttggtaaaatattcaagggcaattcaaaaaatcacaatgatntaagacctgtggagaaaaacgatcattttatcaaattaaccaataagtgataatcataggcgaccgtacaaatgcaaatgtcgaatcaaaacaatccaaagcgtttattctatcaacaaaatgtcaacgatcagagagggtaattcagtcgatcattccgcggtttctttgatggccaattccatgcgacaaaatgtttctctgagaggacgcgtctcatcaaaatgtgccgacttccttctgtctgactcaaccgttcaacagttcgcattttcagttttcttttcactttaaaaccgaaaaaatttggcgtgtaaccgctccgatgccatggacagttgaatcgcaccttcatttttttatttgttagcaacagaattcgagtttttcaaccaccccaaaatgtggctagtaaaaaataacaattatgagaataaaaaagcacctgcaacacagcgactggagaagctttcccaatgaacgctgagcaattaaagggattaaagcgaagaaagacgcggtcaaacatctctaagccaatttatatataacaataaatttaacattgttaaaggaaacgatttaggtatttacaactttttagggaaatgattttaaactgttgaaattttgataaatattttttcatagtttattaaaatatagaattttaattcttcatttacaagagattaataagatagtaatgtgataactgataaacaataaaaataaaatgcactttgctcttgaaaatttcggcactttccggaaagattttggagcatttaccccagcacaaatcctatgaaactttgtgagagaaagtgccgaaaattgttgtaaatttggaaacttaagcaaggcggatgcaataaaagaactaaacaatcaaatgacctgcatgtgctgagtatccttatttggttggttatggataatttcggacggagataagcgagaggacggattctaggaagtctcaatgggatttgaattggcggtaaaacagtgcgttaaaaagttaaaaaaaaacaatttgtacaaaaagaattcctttgctacgcaccactttaaagaaacaaaaaatgaacataggcagaagaaataaaaaagtgaaattttaagacggaaaatgtcaattttgaaaaggtttccattgaaggaagggccatttccgaggagtgaggtcgtcgatgatttgcttgtgtgtgtatggctattgggtggccgggtcagcgggtgcttcgtcgccgagcagagatggaacggccttaacaattaacaatcactcagagtcattccaaaagaattttcattgagtccaagggatgggacacaaaagtcgcattagaatggatttcggacgctatcactttggtgcacttataatccaaaactgacaaattaattagaatttatttttttactgaattcatttactt

SEQ ID NO: 18760 - DNA, 2692 bp, Heterodera glycines
  unsure (1)..(2692): unsure at all n locations
ttttcagcgaatattntttgaacgaaacttttctgtatgctttatttatccagaaattacagacacatttccatgaaatattgtgaacttgattataatccctagtgtaagtaaccgatattcatacaaataaaaacatctctttgacttaagcaaaataaataataattaagttattaattaccgagtctgcaataatataaaatatttgcgtactgtgctttgtacaacctctgaggttcctattaggaaaagccttcagattaagcctatatcctatacgagtatggcttttaaatgacaaaataaatatatgttaaattaaaatgctgacacaaaagacctatgttttgtagaaaatccctaatagtttcagctttggctagattttcagcgaatatttttgaacgaaacttttctgtatgttgaatttatccagaaattacagacacatttccatgaaatattgtgaacttgattataatccctagtgtaagtaaccgatattcatacaaataaaaacatctctttgacttaagcaaaataaataataattaagttattaattaccgagtctgcaataatataaaatatttgggtactgtgctttgtacaacctctgaggttcctattaggaaaagccttcagattaagcctatatcctatacgagtatggcttttaaatgacaaaataaatatatgttaaattaaaatgctgacacaaaagacctatgttttgtagaaaatccctaatagtttcagctttggctagattttcagcgaatatttttgaacgaaacttttgtcgcgactcacgtcacgagaaataaaatggaaatgataaattttataagcatgatgcaatttcattaaaaatgggaaaaaccttaatttaattggaaatgttccccctcttcgtcgttctattcaaaaaatatttgtttgtttacattcaattcttattcatttctcacacaaaaatgtattaatcagcgaatgacaccctatttaagtcgtggaattgttattgaaatcggttcagtcggaataaaacatcattcccctgcttgtctactgtttgtcccaatttctattttgccaaaatttttgccgggccgaatttgcatctgtttggtcccgacaagtggtgcaacggccgggaacctctgcactgatgaatgcttgtgatcagcgggtggcagacgctggtacaagggcgacaggacggagaggagtcagtctggtcaactgatcgctgtccaccgccgcggagcggatcttcacaagcaacaagggatcagcctggtcaactgatcacctcacagattttacgattaaccaaaatcaaccgcccgcctttctcagcacagacaacccggaatgaggcataagaaataaaacaacaacatacaggcagacttgcagcaactgaaccacccgacaactttgctgtggggagtgtcgcgactcacgtcacgagaaataaaatggaaatgataaattttataagcatgatgcaatttcattaaaaatgggaaaaaccttaatttaattggaaatgttccccctcttcgtcgttctattcaaaaaatatttgtttgtttacattcaattcttattcatttctcacacaaaaatgtattaatcagcgaatgacaccctatttaagtcgtggaattgttattgaaatcggttcagtcggaataaaacatcattcccctgcttgtctactgtttgtcccaatttctattttgccaaaatttttgccgggccgaatttgcatctgtttggtcccgacaacttttctgtttcttgaatttatccagaaattacagacacatttccatgaaatattgtgaacttgattataatccctagtttaagtaaccgatattcatacaaataaaaacatctctttgccttaagcaaaataaataataattaagttattaattaccgagtctgcaataatataaaatatttgggtactgtgctttgtacaacctctgaggttcctattaggaaaagccttcagattaagcctatatcctatacgagtatggcttttaaatgacaagataaatatatgttaaattaaaatgctgacacaaaagacctatgttttgtagaaaatccctaatagtttcagctttggctagattttcagcgaatatttttgaacgaaacttttctgtttgttgaatttatccagaaattacagacacatttccatgaaatattgtgaacttgattataatccctagtgtaagtaaccgatattcatacaaataaaaacatctctttgccttaagcaaaataaataataattaagttattaattaccgagtctacaataatataaaatatttgggtactgtgctttgtacaacctctgaggttcctattaggaaaagccttcagattaagccgatatcctatacgagtaagggttttaaatgacaagataaatatatgttaaattaaaatgctgacacaaaagacctatgttttgtagaaaatccctaatagtttcagctttggctagattttcagcgaatatttttgaaagaaacttttctgtttattgaatttatccagaaattacagacacatttccatgaaatattgtgaacttgattataatccctagtataagtaaccgatattcatacaaataaaaacatctctttga

SEQ ID NO: 18761 - DNA, 2563 bp, Heterodera glycines
  unsure (1)..(2563): unsure at all n locations
aaatattttgatgtgcaaattccgtttaattgatttttgtaacaaatccgcaaaatattcagagctattgcgaacacatttaatcagtgccaaaaagctaaataaaaaatgtaaacaaacaagctaaattattataaatttaaagcctaattagatctcggatcgttatcctaattaccccgcttcgtcgtcaccgccaaattcctgtttaattcccgtctcaatgtcttggtctgcaacttcatgataaaagtcgaatgtgagtcggagcttaacgaaatgactcatcatttttaaatattttaaatgggaattttatttttatttaaaataattttttttatatacctggactaagtttcttgtagcaatcacttcgttgaacactgattcgttaatgcttttttggccttcgccttctttgatcagcttcatagcatcctaaacaaatagtaacgaaaattattaaataattttttaataaaatatattttcaaattaaaagaaattattggtaaaaagnaaatnaaattatttnatatttgtatatnaantaaaaaaattnantaaannangaaaaatanttgaaaaatggttgggtggnagagatgangnnaaggnnnnaaaattttnggaaatagttaatngatggnaaaatttttttggaaattgggaatnngatnnnaaaaatgtcaaaatccgaattccgtaccatccatgttgcatggtgtgccatttgggcacatttcaagataaacattttatttatttcgctaattacttccttagccaattgctcgtcgaccagctcagtctcatcacgagaatgtctgagcaatgagagcaacaaattttgaaatgggccgcttgtttttgctttaatgtcattctcaaggccatcaaacacatgattatatgtatcaattagttcagcaatttgtccatttgtgcgtgttatcaaaatttcggctagcaccggcctgaaatggtccgcgcagtaattagggctcattttttattttgtatctctataaattgtccaacaagggtaggcttttaagcaaaaaaaagtagactttcaattttagccaccatttgactttttttttcatgtttttcgctttggtccgtaaaaatttttcatttccttttcggtgataaaatattaattaaattttagttcattttaaattagtttttgggtttcatgaaaaattattaatttcatttctttttcgttccaaaaaattttttggtttttgtgtgactttgtttccgtgcttcgtgctttgacgtttcctaaatctgccaaggggtcaaaaaaatataaatattgtacataaaaattcataacttggcttaaattcaacaaaaataatattaatggtatcattcgatagcatttttttaaacataatatgatttcacaaatgtataaaaaaaaaagttctcgtcaaaaaattccaataaattttgggtcagaattttttaagtgttaaaagggtttcaagttcttaaaaatattaatttgcttctgaaaaaaagtactgaagcatttaattaagcattaaacggatgaaccacacgtttttgccatgattatgcatattttattgtcaaaattaatgattttcattcaatagcccaaaattctttgttaaaattttaaagaacaaataagttgtggccaaactaattctgattcaaatttttgatatattattacaataaattaaattggattttttgatagagaacactaaaatttgttaaatgataccatgaaatatttttattttgattgttttttgagcaaatctaatgaatttatatattttttcctaaaccttggcggaattaaggttaatctcctaaacacctcacaaatcagtgctttttacttattgatgttgaagccgctcaatgcattatgcatttggtttgtatcataaacaatgggcgtttgcatcagataaaaacttaaaattttataaatttatttaaaatatgcatgatttaatgagaaaattatgtttaaaaaaattacatcagttcccgaaagtcgccagtgaactctctatgcagcatagcaatcatctctttctcaaatatctttttatatacttcactcaatttttggcgctgaattttttttttttttttttgaaaaattttattctatagggatcaatttttatttaaaaggttcattttttaaataccgtaaaataaataaagacttttttccatttgtttccattttatatcatcattattagatggatatggttgccaaatgaaaattttcaaaacaagcttttggccgacaaaaaatcagcatttggggtcaaacagcagcattttggaacaattttgaaaatttgagtgtatttttatgaaaaaactaagttttaggggtccggcgggccgtgccgggggaaaatttgaaatgttgaccatttttaacagattttcactaaaaattggcaatttattagtcaaaatttttgtaaattttaggggaattttgggggggcggcggggctgtatatagacaaaaaat

SEQ ID NO: 18762 - DNA, 1225 bp, Heterodera glycines
  unsure (1)..(1225): unsure at all n locations
cagataatttgcgtaacaatagccttaatttataaaaaaaaatttcanaaaaattttgacaatttttttttgtgcctctttcttcgtcataattgcagcttgcaaaatttctgcataagctacagcgagatttgcatcaaatttcggattggcatttatggttgggccaatgttaaccggcacacaatggcaaatcatcatcacggcaccagtgatcagcaccagcagaacagtgatgattagtgaatttttgtccatttttaatgattgaaactttaattatatgtaaaaatccaattttttttttacaaattgtcaaattaaaatgcaataatttgaaaagataatgaatgagattgacaataagaaataaataaatccatatatgcatgccatgccaataacacatgttcaacgtggatggcaacgcgacaaataccagcaaaaaaaaaatttttctatttttttaatggtggctttgatgagaggcaaaagaatattgcaaaaaattgtatttctaaaaaaaaaacattttttaatagatagatataataaaaaatttatatttattcatatgattcacaatatacgatgcttgtatcacgattactgaaatgaagttaacaactaaaaccataaaaataaaattgggcgctttggagaggaattttttgtaaatttattttattaaaatttgaaatggtaattcattcattagacgcttgaaatgaccaagggcatgggttaatggatactttcttctaagccggaatggtgagcctaaaagtgacaatgatatatgggtgtggggatatggcaaaatcaagaattcaatatatatatatatatatatatatatatatatatatatatatatatatatatatcaaaaaccatcaaaatgggcgttagtcaaaaaaccatcaaatgaataatttttgacagaaaattattcataatttcgtctaaaatagatcaaattttataatatagatatttttcgatagccctaagtgttttctattatcctgcaaaattagaaaaaaattctttaagtttaaaaaaagttatgacctgagaagctcaaaaaccaagtttttttgaacatttttagtcataactttcttgaaacttaacgaaactttttggaattttgtaggctaatagaaagcacttagtgctatttaatgatatcaagaattaaaaatttagatgctttgaacaa

SEQ ID NO: 18763 - DNA, 2032 bp, Heterodera glycines
  unsure (1)..(2032): unsure at all n locations
tctctgccatttcccaaaagcactttttgattttcaatcttataccaacttcttttaaaagtcttagaaaattttcaacgtcaagtctttcttccgtctcacttccaataattatatcatcgagataaattagcattgccgctgtaagtcttcgcctcaaagagttcattactctctgaaaagtatccggggccgctgtaagtccaaagggcattgtaatgaactcaaaaattcccaaatgtgagatgaaagccgttttgtctgtatcctctggggccattgggatttgcatgaatccctgctgcatgtctaagcatgaataaaattgtttagcgcccattaggtctaaaagctcttgtatatttggaaggtgaaaaacacgttcatcatctttatttgtttttcgatttctttttgtgtttcgggagggtaactgtaaggtcggaaatgaaaaggtactgatacgggcactaagtcaatccggtgcacaattggacatttgtaacggccaattttcccatcatcgccaacgaaggcttcatgatatttatccaccatttgtttgagatttattttccctttttcacttaatttcgttccattaaaatttattctttcggatgggaaccgattcaatttttcttcgggtaaatttggaagattttcactccaatttgcctcagggggtatataattttttggtagaatttcatctccgggtaatgcatttattagcactggttccaaattggctaagtgtgaattttcgtanatttttattggtgcttttccagcgtttaaaatttgaattgtaacatttttgctgtcccgggtgaaaccaaagtccttccgacaattactccgggatattgatgtgcaattccttccaccaaaaaattctgatcatttttgaaattcccgtttacatttgctgtcaaaattgtttccgttcttggttccaaaatttctgtatttttcatagtcactctcatgggtttctctgattctgtgccaattaccgaaatgatgtttgtccaaatttcgccaattttcacttttctttctccaaatgcaataactccctttaattcagttaaaatgggtaatccaattaaaagtggaccgggacaatgtttgtccactgataccaataaagttgcttcccattctccactttttcctgtgagtggatcttcaattcgaatatttgcttttgtttttcccaaaattagaatttttgagtcattcgccgcggccaaatttgttttgtcagtttctaatggctcgatttttaaccccgctttttgagctgttttttctctgcagtaagaaacacttgcgcaagagtcaaccaaggtttgccaaaaggccatttaaatggattttgattgttggcaattttcttggattattcgttttccagagaatttctcatattttcttactcatctgacttaattgcattttctaaattgtctttcgccttttgaaaaattacttcatcactttctttttcatcgacttctgacaatttttgaaattgtgagtctttttctccgctttcatttttaatttcaattgtttcagttttcattggttccctcccagaatttttcgaattttttttagaaatctttgaaagtattgcatttttgtttggcaatgcctttttggcctttgtttccgccacttttggtttgggagttgtggttgaaattgtttttattgtggtcattttaggtgtttgtgttgtggttatgtttttgttaccattttttcttttggtttttgtgtggtcattatttttggaatcttttcctcctaggcattgtttttccgtttaattctttgccaatttttaccgttttgggaggtctttcttcctttttcgcttttatctctgtttttgtcttatttccctcctttaacttttcattctcaaaaacgaaatccgaaatattcttctgagttttttcctgttttggatttgttgtagtaaaactcatcaacggagttttggccgttgttgttg

SEQ ID NO: 18764 - DNA, 2448 bp, Heterodera glycines
  unsure (1)..(2448): unsure at all n locations
ttctataagccatattctaaaaatttgaattttggtttgtgtccgaattcgggcccggggctcagaattggtttaaatggacgtaggattcgtgatcactagggctcggatttttaaggacgaaaaagtccaaaataaggccgtaaatttcaaaatgttattatcaaaaattataaaatataatcataaacataattctaaattcgagaatgaattaagtcactattagcgaaaagcaccgccgaaatttttggaatttttatattaaaattttgggggaaatattaatttaaagaggagtaacaattattgatctaatgtatatcttaataaaattttaattataatttaattatttttgtatattttttcctatatatatatattaaataacaggaaaagcatcaatttattgaataaaaatcaatttttcaatgtttataaaatggtttatgacatgttaaaatgcatatttaacaaaaattaaaaattttaaatgaatttatttaaagtaatatttattattccattatttcttttcataatttctgttttttacaaaaatgcaaaagctgagaaattgaaattgcgcgtcatttacggacaattggatgcaaattggaaggtccaattggatttgatgattgtttcccattaccacgaatatggtaattaccataccaaagaaatggtacaccgtaacattgaaaatggaaagaattttgaagtaaatttggagaacggggaacagacggagaagctgacactcggcttcggattctcaatacaattaagcagcagcagaagaagccaatttgagactgtgagacttttaaaaagataattggggaagataaatggaagtaattaactgattaatttattggcaagcaagaaaaaattaattgtcccggtcaaactagtacagctagatttgatttacattcctaaatacgaaataatgagcttttgtaatcctcttatgccatcctcgccctctccccgcttcatttttggcactttttccaaagtttagttgggaaatgcgagtgacaccgaatcatcggatgatgcgtcgcctttccatcagcccacttcaatagggacacaattgaatgctgaacgtttcagaaaggttgtccgggttgatctgtacaggccgaactttgcgaaacggcaccgaatcgaattgggcaatgtcgaagtgccaatgccgccaaatgggacggcactgttttggaatcgcagagtgatttttgaggcgaacaaagacacgggcaattatcatgcctttttgtatgcaaatgttggcaaaaatggtcggagcaatcgcaactctanaaaaatgtttatgggctatgcaccgctattgagaattgggcagcacggggaaggaggagaagcaccgacaatagcagcagcagaacaacaacacggggtaattagggggtaattaagggaagcaagttggagagagcccaattaggaatttaatgggatttgccgaaagtctaattgaattgtaaatcatttagacctctgaataccaagtgacaattcctgtcaaatttggcgaattcttcaaacataaattgtggaatctgaaagtgtttatttaccaatttaaagaggtaataaaatagcaaaataattcaattaaaaaagattaattcagctgccaagcgcaggccaaaaccgaaacgcaacagaaaatgaccaaaatgaggaagaaacgtgcccaatttgcttagattctctccagttggagaatcgtcaaataatcaaattgcatggaaaaaggacgaattatgaggcgaatttttttgcaattttttgacaaattaatcatttttgatttaattattatttttagcacaaatatcacgccgattgcatcacacgatggtttgttgaaaaagataactaatttatttgaatattttaggatcgaaagtaaacaaatgctgcggtgccctttgtgtttgaccgacccaaaattaattattgtaataagaaatttaattgccatgccattaatgcttctcgtgtctgttccctacaaaaggtggccgattttgcgccaattttcttcgactcgtcccaaatttatcacaaaatgtacgtcaatccaaccgcgcaactgtttaaaatggcaaattcggaaggaaatgatcgcttcagccatggccaagcactgcacgcatttgccaacatccgacgcaaaatggagcaagccgaaagggcagtgaagcggagtttggccacgatggaagtgccattgttaatggacaaattgtttggcgaaacgttttttgaagtcggatttaacggatttggcgagaagcaaagcattgaaaatgtgcggaacgaattggagacaattgtacaactgaatttcacacaaaacatgatggataaggcgaaggaaacgctgaaactgatcaatgg

SEQ ID NO: 18765 - DNA, 1790 bp, Heterodera glycines
attttaggagaggcgaaaagttcagaatgagttagcaatgggctcgggagaaaacgtggcctcagcgaaagtccgcattgatgtacgtgtcgtacaaaactacatgaacataagcgaagaagaaagaaacaaaattcgcaacgaggcatgcggcaatgcaaaagcaacaaaaaaagtaggcgtaaagattacaacgaaaaaccatttcacatattacaggcgctttatcgagcgcaaacaaagcgcttccttcatgaacgtccgcactcttcaaggactggcacaaaacgattgtcgtgcgctgtggatcactctccgagcaagaagcgccgcaccggaatcgccattctatgacgaactgcttatgcgctacttggacgatgatctggccatattcgcatcaccgcgacaacttcagttactgaagaaatcagctgtcattgtgtcggatgggacgttcaaacaggcgccaaaaggaatttaccaagtatagttatcatcctatttttttcaattttttaaattagatttatcatgtcttcggctttgtagcggcgactcatgcggtaccgctgtgcacggcactgatgcgtgggaaaagtcgtgtcatttaccgacgcttctggtcaacgttgagacaggaacttgaggacacagaaggagagctaatggttgctatttctgtgaaatttatatatttttcgtgctttagataaaccaagccaattttgattttgagcccgcctcaacgcgtgaacaagaaggccgcgcatttcaagcacttcttcgcaaaattggcgccctacaatttgcacccccaaaccacgtcaaccgttcattgcacttgatacagcaattgatcaacgaaagcgagttggagttggttattcgattgtcgttgttggacatattagaatattatgtttgccttatttttttcttaaaaactaaacttaggtcactacttgggtacgcaacagcattggctccgagtttttctctctttttgatgttccggttcatcggacaatcaatcatgcggagtcttatcacggccgacaacgttggttttatcaaccacatcaattactcggtcgttggcttgtgaatttccaggttaagaatttatttttttcaaatttgactgttttgcttaggaggttaatcatgcagaagaagaatcagctgtgtcaattgaagagggacgacagccaccatctcaacagttggcagtcaccgcagaaatagatgccagcatcgcgcgtgagaaggctgacattttggcattcttggacagcgattacgaagatgagcaatttacggagacaatgtcacgctactatggccgtattggacatttgattgggttcaatgtgcctccaagattagaaatagaagagcagatggaggaggcagcagcaatggaagaagcggaagcgagtctcaatgagagtggaatttatgttgtgccaaatgatgaaaacctcgatccttgttgaattttttaaatgaattattttcattttaccgaattttgtgcatttttatgatttttattatttattttttgctgaatttttatcatttcatcgattttcgtgcattttttcgattttaaaaaaatttgagcgattttttgttgttttttttttcgttttttgttgcacagtacgagttgggaatcttagtacgagttgggaaacttagtacgagttgggatacttagtacgagtcggggtaccagtacgagttggggcagtacgagttggcctagtacgagttgggtgtcg

SEQ ID NO: 18766 - DNA, 1142 bp, Heterodera glycines
tttaaagagaacaacacctaaagaaagctattggatggttctcaaaaaagttaacttaattaattttttctggaaaaataatcaacgactttttttcatcataaaattttattgagaaatttaatttcttttgcaattttcgatcactaaaattgacataatgaccattgcaaatttcaataccctcgacaaatgctcagccgtgttcgggtctcccgggcgtgccgacatggtggcctttgtgtgccgggcagcgtctgacgagaatgccattcggctggcggatgccgtcatctgaaaaaattgagaatttgattaattcataagctttgcggaagcaattatattcgctactgtataatatcgtactaaaaatataaaatttaaaattaaaatattttgccaaaaatcatttgctccggtattccgaaaattcttctgctgatgggcctctcaaaaaacaagtacggacggggcaaaaaaaaggcaagttcttgtagatgtttgttttatttttgcaaaaatgacaattttaagaggaatgtttttgtatttatatttattttaaaatatttttaagtgtttttaaaacaaaataaaaacccaaaacataatttaacgtaagcatttttttcgcaaatcctcaaaaacatttaaaaataaataggccctgcaaacgcaaaaatttatcttaataacagcccaaataaagaatttttatgtatttttaggtccctaagaattctttgaaaggtcattatcgcagtcttaaagagatttgtcaggcttttcgtccgccaaaggcttttaccttgaccattgtgccaccaccaccctcggcttcaccggttggcaagcgctcagctttttgttgtactactgctccagttgctgtcggtgccactaccgctcgttgtcgttgatgctcctgcgattgttcatggcgatgagaattttagaattttataggatgtgtaaaagatttttcaattgcgctagaaaaccgccgcacactcgactacggcggccagtaggtgtggcgagactacgggctacggaagaagtccgagcgtgatccgcactgagtctcagtgaaaatcgccacaaaaggaccagaaaaaaatcgaattaaaagtaaattt

SEQ ID NO: 18767 - DNA, 914 bp, Heterodera glycines
atcgcctcgggggcgcgtcgggcgtatccgatttcaacgaaatcaatcaatttgcgatcacaccgggccccgatcactttttgttacagctgcgcacgccgctagacgggtttatactagccaaatagcttcaccgatcaatcgatcgtggaacggatttttttaggccggtgggggaactgatcactaatcggaggaatgattttttggcgagatttgtgaagtgtgggggggggggagggaatttgcgcgcacatttttcaagaggttcaggagaagcggcacttaagcgcaaaagtttacgaccgatcagctcattaagtgcgggcggattagcttttttcgaggaccaatttagagtgtgccaatgggagaggggaaaggtaatgaaatgtttgctaaatgagaacacaaatgcggtaaagcatggggtggggggagagataaagcaaggttaagaaactttttgaaatttcggttacccgtggtataagaaacattgcgagataaggaaatatgctttaactgattacttgggcccggattaaaatgctaaagaatttaacttcaattttttgtagaaaaaaatgcaaaatcatttttatgaattgcaactatagataagttatttttctcacttctaaaaattaacataattcaatttttttaacttttaagtagtgcatttttgaaaatttaaagataaaattctatgagtgcattttaatttttattatatttatgttcaggaattttttcaaaacttaacgaaatctttattaaacctaaaaattctcatcatataaaagtgaaggaaaaagaatggaaaaaagctctcaccgatagcctgttctatgaaaacaccttttgttttggccttgatcacaattattctctagtctttccgtccacca

SEQ ID NO: 18768 - DNA, 1032 bp, Heterodera glycines
tttccaattcggttcgaaaaatggtgttaaatgtgaacagattgcaaaaatcccaaattaggacaaatttcttgcacaaaaaaacttgttgaaaccaaaaaatttaatgagaaatgcttttaaagtttttacgcttcttatttaacagcatatgagcaaaataaataaactcaattaaatataaaatattaattacacataataataataataattaaaaaaacagacggactaatgactgacccgaatgtattggattgcccagtggggaagagtgaaggtcctattgaacaggacaatgttgttcagacgcaccgaatagtcactttcattgtagaagtaaatgtccaaattgaacgaatttcccggcttaattggccgtttaagcggatagctgtccttctcttttagatcataatcattctaaattaattgcaataaggacagtgatcaaacaaagaaaaagagagagaggagagagagagagagagagagagagagagaaagagtaagaaaaagagaggagtgagagagattgagaaagtgagagagaaagagagagggaggggaatgagagagagaaatacacacacagagagggagagatcgagaaagagacagacaaagagaaagaggggagagagagagtgagtgggtgagagagagagagggagagaaagagagagagaggagttagaggaggggggagagagggagagatcgagaaagagacagacaaagagaaagaggtcacagagagagatactcacgtgcgagaaacatagacagacaaacagaacgagacgctccatttgcatggcgcaatgttttcgacactttccgcgcgatccgtttccatcttagtcggctgaaggcgctttcggctgattgccaacaatgcgctgcactttttgatcgaagcggcagcgatcggagaaggcatttcatcagccgactagttttcgccaaaagatgccctaaaatttgaggaggacaaagtgccaaacacagaaagggcttacatttttactc

SEQ ID NO: 18769 - DNA, 743 bp, Heterodera glycines
aaagaggggagagagggagagagagagtgagtgagagagaggagttagaggaggggagagagagggagagatcgagaaagagacagacaaagagaaagaggggagagagggagagagagagtgggtgaaagagagagagggagagaaagagagaggagttagaggaggggggagagagggagagatcgagaaagggacagacaaagagaaagaggggagagagggagagaaagagagagagagagaggagttagaggaggggcgagagagggagagatcgagaaagagacagacaaagagaaagaggggagagagggagagagagagagagagggagagaaagagagagagaggagttagaggaggggggagagagggagagatcgagaaagagacagacaaagagaaagaggggagttagaggaggggggagagagggagagagagagggagagcagaaagtttaatttaatttttttatttataaatttttcatttctcttttgcttatgcttatttgtttgtaaatttacaaagcgctcggagcatttcaactcttttgcgctgaattgcatgtccaaaatcactcggccaactgaaaaatgactcacaatttcaccctttttaaattgatttgtcatactttttttcactttttctttttgctgaattgacgaatgaactgaaaaaagatttttatcatttgttgatattattagcaaggacggaattatttagtaata

SEQ ID NO: 18770 - DNA, 663 bp, Heterodera glycines
  unsure (1)..(663): unsure at all n locations
ggttggaccgacttgagtcccagcggatcgctccgatccgccagcaccggcactgagagtggcccatttccactctttccactcacaaccaaatttttttcaacccgcaggcaagggttttggagacagaagaattggggcggtttgaaggaataggtttttgcatctaaacaaatgaaaacttggaaaataaataaaaatgaaaattgaaaatggaaaaatggaaaaatgaaaataaggagcggaggaaaaaaaatgagaatgaaggcaagaaatggcttttctgaaggatgagcaggccttaaataacgatgaatccgagtggacgatgggcgtaacagcaaaaaatgtaatttattttttgaatgttacaacagcggcgaggcaatggaaaaaggcaaaaaaccctcccgagcggtaggggagagtcatctccgtaaaaagctaatgtcgcgacgggggagagcaaaaaacgggagagggaacgggagatgaattgctttccgtcgctgccatatttggcacggagagaaaaaatggaggggcaactgcaaaactttgatcatatggaattaatanaaatgcagttataagcggggaaattgcaaattttaatgaaataaaattcaaacattatttcaattgaatcgggttcaattgacc

SEQ ID NO: 18771 - DNA, 1901 bp, Heterodera glycines
tttgcgtttggtgaaagaaaggcaaaaatatttcaggaataattcggaatgaattttggtctttggagactatgattgccaaaaaataagggggcggggtggaatggaacattcgcaaacatgccggcacaaggaaattgcgaaaatgggcaaaaacttaaggaaaatgttgcaagggaaaaaaaggaattctttggccttggagagaaaagaagaaaaaaaatgggattggttgtgcaaaaaggacggcgccttccaccaaaatctcatgggaaatgaatggcaacaaaaagggaattgccttaaaaccgggagaaaaaaaggagacaaaaagggaccaaagaatgccaatgagaaccgaaaaggataaaggagagaaacaaaaggaaagaaaaattaactaacttatctgcgttttggtgattgtagagagtccatggcggcacataggtagcggtatgacaatcgaaattgctcattttggagccattgctgattgtcttcgagttcatcagcgccaaataagttcgttccgacataaatctgctcagcccaccaatcgcgaattccatcacccgaagttgaccattcatttgctgaagtcttggctcgaaatcccgtagtttggacccgggtgccttcttctaattccattaaattaacacttgaatcgatttggtgggggaagaaacgctgattactttcttccccatacaaaaagacatcaatggccataatttctgaggtgattttattttggttcacttccctaattattccacagcagctcgaagggacaatttgactcactgatggtcccagttttggaggagaagtcatttgctacaaatcaattgttttgacccgagttcctaatagagattgtttattccaatcaacgaaatttgtgtgaaatgtggccagttattgttagggtccagtgtaatagtcgtcacataacttggagtactttggaagaccaattgatccgattctaggcttaaatttttccggtccaatagctcattttgttcgcccaaaatgtccggttgtaccagtgcccacagtatggggtgtgagatgaacacaaaccccaaaactgagctttcaattggcgatggaccagctggcggcggtgaggtgtccgcaaatattttctcaatttcccttagactagccaatttttcagaatccgtcaattccagattttcaaacaaattcatgaaattaacagaattttcgtcaacctcggttctcattgattcatttccatttccggccatattttctgtttcttgcctgcaggcgaagggatttggattattattgggattaatttttgcttagatctaagaagaggggaaaaatgttcataaacgagcaaggtgagagaaaaaaaaatcagaaaatgaaaatgagtggctatggagagaagaatttattgaccgatgggtgcgaagaaggcggggcaatgtacatgacgcatacattaaactaaaggggctaatgttagcctaaatggatgcaagagataatgattggagaaacaattgagaaagggtcaataagtcgggcaattttaatgaatttcaccttgaatttgcgttcaaatttattaatatttattaatttaatctttgtttgtagattaatgtgaaaatgtgcacaaaactgtagaatcattgactttttagaatattatctagagtacctggggtccgggaattttggacaatatcaggtctccggtacccgtgggcactctaaaataaactatttaaaatacaaataaaacagacttttgttaatgaacattcagcactttcatacaaacatttgctaaagcttttgtcgcaatcgtagcgtttttagatttgtttatatagcataaatcatagtaa

SEQ ID NO: 18772 - DNA, 1125 bp, Heterodera glycines
ggatctggaattttcgcagagatatatgcaaattagtaaccagtgtttcgtttcaaattatttctcgtattctaacgaaataattttttactatgagtgtttggtttggaaactgtctaaaatgttccgggtcgcccacattgcacaattttcttgaaaataccatgaaaaatgctctaactccaagagacttagttgagcgcactgcaaggagaaccctaacacagttcagcacaaaaaaattaactattcacgcttgagaacgcgaagtttgctgcggagaatggcaattatatgcagaaagtcaagtgcatatatctcagcgcctagtgcatgaataggagcgtttttactgttttctgagagcgcctgaaagcagctttcgaatggtatagctgatttttttggatctggaattttcgcagagatatatgcaaattagtaaccagtgtttcgtttcaaattatttctcgtattctaacgaaataattttttactatgagtgtttggtttggaaactgtctaaaatgttccgggtcgcccacattgcacaattttcttgaaaataccatgaaaaatgctctaactccaagagacttagttgagcgcactgcaaggagaaccctaacacagttcagcacaaaaaaattaactattcacgcttgagaacgcgaagtttgctgcggagaatggcaattatatgcagaaagtcaagtgcatatatctcagcgcctagtgcatgaataggagcgtttttactgttttctgagagcgcctgaaagcagctttcgaatggtatagctgatttttttggatctggaattttcgcagagatatatgcaaattagtaaccagtgtttcgtttcaaattatttctcgtattctaacgaaataattttttactatgagtgtttggtttggaaactgtctaaaatgttccgggtcgcccacattgcacaattttcttgaaaataccatgaaaaatgctctaactccaagagacttagttgagcgcactgcaaggagaaccctaacacagttcagcacaaaaaaattaactattcacgcttgagaacgcgaagtttgctgcggagaatggcaattatatgcagaaagtcaagtgca

SEQ ID NO: 18773 - DNA, 1209 bp, Heterodera glycines
agtctgtttgagcaatactgttaatattaactctccgttttttaggatttatttctctttcatgaattatacgagaaattgttttaaagaatatttttataattttatccaaattctataagaaaaatacgattaaaaatataagaaacgaactttcaaattttaataacatccaaaaattggcttttttcaaaaccaaagccatattttacaatttaaaatgagtgattcacttttagttggaaatgatgcgccaaactaataaatttgtttacctggaagaaactaatgtaaaatttatataaaaattgaactaattatacaaaataaacaaaattcagttcaaactgttggggatggaatttgtgggagggaatgcgcacctttccatcattttgccaaattcaaacgacggactcacaaaagtgttgggggaactgacggaggccaaattgatcagaatggtcaaaaaatcatcaccagtcattagagttgaggtgagaaaatggaatttgatttgatttaatataaaaaggtcaacaaaagtgcggtagaaattaaattatccaacttatcaaaatttcatatcaattgactggctaattgattcgtgagaagtatttactcgatcctcctcccttattatgagtttatttgtttattttagggttcgagccccgtgggcgggggtggcttttcgcggggacggatctttagtcaatgtatcgccttgatttaattccttttggcataaagtgcacagattttgtctaaaaaaatgaccaaattagggattttaggctaatttaagagaagaaaaggttttttatggggccggcagtgccaattagtaccgcagaattgtataaattttttgccctttattccatgaatatgccattgggctcaaaagtgcgttcgatccgaacagtgccgatttctcgggcataagccatggttcgctgttcattggcaatgtgcttcagaaagcgatgatttcggtaaggcaaaaagccaatcataaataattagcaaggctcggtttttatctgataaaagaaatgtatttcattctttacctaattctctgcacaattacaaatcaaaaacacttcaattctttttgtttgggttgccccccggcccccgacttttttgggcctatcccccgaccaccgaccagggacgggcgaagctcagcttggcact

SEQ ID NO: 18774 - DNA, 905 bp, Heterodera glycines
ccaagtttcatttgaaattccacggtcacttgccaacccctccttgtcagcccccccctcgctgcgcccttgtggtcaatgacaatttagcacttcttattctcatccgagagatcagggaggaaccctaaaaaataataattaatctgtattgaactaattaatttataattaggtggatgaaaaaggctgtgaagcggctgccgcgacagttgtaaaattcaagccaattgctaccatcggccaaaagccgccgccgcccgttttccgtgccgaccatccgttcgcattttttctagtcaaaagcgcaaaagaagtgatgttcggcggagcatttgtgggcaaagaataacggaataaagagaaaataatttggaatgaaacagaaaacaattaaccaataagaatttgaaacgaaataattaacgaattttgaactgaagtaattattaataatttgttacaatggaattgagagatatgtatgcgcatcaaaataataattaaatataagaacatggtgtgaaatcgacagagcaaaattccaaagtactggcaaactaattgcgaaagaaaaatagggaaaattttgaaaatttgagtcaatttgtcaatagtcttaattaaaaaaatttaggggtattttattgtcttagcaagtgccataaaataattttaataaattgaattattctattttcattgaaatttacattccaaccaacctattaattaactttgtttaaatatacttctttttaaaatttatcaaaagcaattattagaagagtaaaaacacatcattaattaagtacatttttattaaattgttattttttattcgtttaaagcaaatatcttcattgatttgagtgttaggttccatttaatttttatattgataa

SEQ ID NO: 18775 - DNA, 2084 bp, Heterodera glycines
actctcctggtccagtgtcccggcagtgtgaggggatccacccaggagcgccatgtagaccataaaaggtaactcgcccggtgggactcgaacccacgaccccagcaatccgtgccgtgctctaaccaactgagctacgggcgcctcttttagaggttctctcaggtcctttatcccactttctcccacactccgttccttctggcatcacacaataaatatgtttttatttcttatttttgaaatttattaataagttagtgcgtaattgtattttaattagcatcatattaattaattttgttaaaataaccatcttgattaatttaatattcttaataatctttaaatgagtaatttaaggaaaagattttgcaaatatttgttaggtattctatcaaaaaattgtgtaatgctagttatcagtatgtaaaacgaaattttatttaatatttataaatctatatgataatattggatttttatacataatcacgcttaaatatgtttagatgttcatttaaatttatttaattctgtaatttaagcattttatttaaatgctatcttaaatttaaactaagagaaaattttaatatccgatatgaaaattagaaaaattttttaggaaaacttaattatcctgttttcaattagagaatgcatgtaattttcattcagtttgtcaaggtttattttcatttttatttctcttttattgtttttttgaattacaaattttttaacaatctaagatttcttttgcattattaaatattctttgtacttttaatttttctcttttagaatattcaaatatattttattctagtagattattagggctgtattcttgtgcatattaaattcatttatatttttttaaaaatataaaattataacgaattatatcacatcatgttttaaattaaattcattcatttcttgcgatgaccggatctcttggatcttcagttctgttctcttattttctttattacactattaagcttgaaattataatacaattttaatatttttctttaaatttatatgatttttattttatgcactttagaatttttttgttatttaatattgttgttgtttttttgggttcacttgcataattttatttggctgattaagcattgaatcatatttcttcttgtaacattagaaactaaattttatagtagttttttttcatactaatttcctagttgtttttgcaaatgtgttcagacatgcttcttttgttattattaaaattaatttttatagaatttcatcattttttaaataattaattttatatatatatatatatattttttttttacttccgtttattattctcctgctggtccaccaccaacgggcttggctgcgccgcctcgccggcgtccaacaccgtgctcacctccccttccgccggcggtgcttgcacaacgccagcgtcttatattctattttttttaataatatatgaaaatctattaattcttcatttatttatttaattttagcttacaaaatagaattcccccgacaaatttgtcgattaagtcacgccgcatctcaaaaggattatctgatttcgcctgttgattgtgtattattctttttgttgttttatttttatggaaatatttctgccttatcatttttattttataatttttggctttttttaatacacaagaaatatgatttttctattcagttcattctttctcaattagatcatttcaaagtaacatcttgaaacttaaaaaatctttatctaaaataaataaatcaataagctttataatgaattaaattttataattgaaattatagagaaaacaaaccttttcataagttttatatcacaaatagaaattgtcgaatgtttattaaatcttgacagttacacaagttataaaacgaacaagaatgattattataaatatttacaggttttaaagacttcgtttttatttatattttttagttataaatattcatgttttttataagttataaaagaacttattataagcgaatttatcaatttatttaaaatagcagttcagtta

SEQ ID NO: 18776 - DNA, 2351 bp, Heterodera glycines
gtgaataaaaatatatgaaataatttctgtttttaattcttcttccgacaacaggtatagccatatcatttaattttctaaaatgatttaaggttttgtcgtgaattttagaaatgagtaaaaaatttgaatttacctggtccttcgtttttgaaaattactttgtaacgagaaatagagttaataataatatgaaccagatcaaatgttcatccggcaccgcatttaatctgcagtatttattgtgtcattctgatacacgatatgatttttaaaaatcatttagaatttatttttgctatggaaaccttttatagtgaataaaaatatagaaataattttgtttttaattctatcttcgacaacagattcagccatatcaattaattttctaaaatgatttaaggctttgtcgtgaattttagaaaagagtaaaaaatttgaatttacctggtccttcgtttttaaaaattactttgtaacgagaaatagagttaataataatatgaaccagatcaaatgttcatcaggccccgcatttaatctgcagtatttattgtgtcattctgatacaagatatgatttttaaaaatcatttagaatttatttttgctaaggaaaccttttatagtgaataaaaatatagaaataattttgtttttaattctattttcgacaacagattcagcatatcaattaattttctaaaatgatttttcacatttgaaaaatgaaactaaaaatttgtaataacgccgcaagttattgacaaacactatcaacctagaaaagagcttaaattaaaaatatatatttcaagtgaaaatacaaaattaattttttattttataaaatccaaaacttaaagctcaataaattaatgaaactttcaaatcaaattttcttcaattatttcaaataattaatcattttggactaaatgatcgaatattattagaaattcagatttgctgttcgcgtcacttttttggcgcattttttccagaaaatcttttggggaagaaagtggtccggcggtgccgataggcgccgccggggggaaattttgaaaaatcgagtgtaatttattaacagattttcagcaaaaaaggatgctggttgggattatcaggttcaacaatttgtacggattttcatttaaaaatgctaaaattgtgtcaattgaaaaaaagtatgaggaatcatattttgtcgataggaaaacaatgaatatagaaaaagaaaatttaaaataattttatttctgtagagggattgaattttttcctttatctccaattttcatctctaatttttcactcagacccccattccccgaattatgtcggggagtcgggggcaaaaagtcgggggccggggacctcggggagcgacatgtcgggggtcggggctgggaatagtcccaaaaatgtcggggatcggggtcggggaccggggagctcggggacggggagcaaccctaaaaatacgaataaatgttaaaaggtaatcatgataaaaagcaataatattttattattattttaatgtatttgaaataagaaacattttttatttgaaaacacaaaaattacatactaactaacatggtaatacaaacgtttagtcctgcgagatttgtattcacacgcgtacgcacgcacgcttaccacgcatgcgctcattcggggctataaaagcctgaccattcgcccatttgggcacttcgtctcacttcttctcactgcttgtactcagcatttattaatcaccccttctcttcatttaatcacatatttatttgtaactaataaaggaattgaaaaagaagggagaaaaattgaagagaaagctcttctcgcataaaaatacaaaggaaaggccaaagcctcctcctttgtccaacaaatcaattaacgttccacaggggaacgttgaaagggttcgaaatccctttaacttttttgtccattccgcgacaatcttctcaaaaatttttttatgattaaaacaaataaatattaaatataaaattaaaaaatgaaatataaaattaaaataatttaatttaagtaattaaactcgaggaaaaaccaaatcaaattttctgtaactgcatctaggtcagtctgggacacaatgtgtgcgtgcgagcctccacggccttggaagtgcacggactatcctgatccaaggatggttacaaagaactttttttcgtaaagttcttcacgaaattcagctaagctattttgccgatccacatacgcacccaaatatcaaaacggtcagtgaaagattggcagtgtctttattgttgtttttccaaattatatatataaatagaaaaa

SEQ ID NO: 18777 - DNA, 2022 bp, Heterodera glycines
ctatttattattttaatttttttaactaattacctttgtcaatagaattctttagttctgtgatttcgttgtacaatttgtgtagtaaattggccatcggcttgtcattctcatttagtgcttttattgcttcgtattcctggctcatggccgggctgtaaatctttagggggtgtattttccaagaatttcagttgttcacgcaaaactcgaagttcaaaaacccgaaatttttaactttcaaagacaaatttcactcaatcattttagagttaaaggcttaccactaattacccttttaacattgataataatttatcattcgcatagataaaatagggataaaatcttgtcaatataataccgtctattcggagcgattacctgtgccgagttgtcccccaatgctgtttcgatcaccttttcatattcactcacatcacttagcatctcctccaattcttgcttctgctgctgttgctctccatgttttccgtttttgatcacctcactgtgcaaaatgtccatgaacgatttgcgagtcggcgcatttttgctgctttgcaccccgaatgcttctgctgcttcattcaatgaaaagttgctgctgttgttggggttcgcgactttggcaaaaacgacgacaaacgacgcaaaacagaaagccaaaagagagggaaaaggcatggaattggaaaatggtgggatatgaattaatgggtgacatatttagcaaataaatattaataaaaaagggtataattccacgttatttgtggcatgacaaatcacacgcatgtaagggaattgacaatggaaaataaagaaacaattatattgcaaatattacaaaaattgattaatttagagaaataaatttaaatatgtatataaataattatttaaaaaaatcgtaatttggatttaaattgaaaagatggaaacttccataagaactcatggtaattgttagaggtgcggcgtgactcacggtcacggttaccgtgaatttcacgtttttttccgtcacggtcacgattcacggggtcaactcacgggttttccgccgtgaataatttacactggataaaattgaaaatttcaggattgcatatttttttatataaaaatttagtaatttttttgcagtttgctaagaaatcggggaaattttttaaaaatttacccggcgcacctatcggcaccgcagaggccaatcttctatttcttcccattatcaattgaccgtcgaccactctccgacacgggacaccctcgtttcggcgccgctcgtttcggcgcctgcccagtttttggactataacttttttctttgtcaaccaaatctaacattattggtatcattcgaaagccctaagtgttctctattagcctgctaagtttcaaaaaatttcgttaatgctcaaaaaaattatgactagaagaattcaaaaaaccaggccacatgtgtacttttggccataactttgttcaaaattgatcaaattttttgaaattatgcaaaataatagagcatcagaagggctctcgaatgataccaacaatgttagatttgatggaaacgaaaaaagttatagtccaaaaactggggtggcgccgaaacgaggtggacccctccgacacccggaccctcttatttttatatccaatcaaatttaaaaataattaaaactcagtaattactttaaaaaatgcgcgtagttatgttgagtaaaatctgttaacaaaccccaataaattattaaaaatattccttggcggcgccttatccaaaactcctatttttcttaaaaaatggctcaaaatgcaaaattttgtcattttttggagagaatctttgcataaattacactcaaattttaaccgccggcctccttgttctcgaaaatttttgaaaaaagcatagcgcaaaaaaaaggtgtaaaacagggctcgcaaacgaaaatttttaaaagcctaatgtttgggtcaaaaagcctcattttcacaaaatttattcaa

SEQ ID NO: 18778 - DNA, 1421 bp, Heterodera glycines
cccgtttttatcgtcccgaatctcgaagcccattttttctcgtcccacatctccggacgtccctaccttaatcccgggtttttatcgtccccaaatcccgagccggaaaatcttgcagtccaatgttttttttattgttcggaacactataaatttccagcagggaagggggtaaactgacgtccattcgagaaaatctcgaaaaaaaaacaaatgtatacagaaatcatcgctaaatcttcgtccgataaattgattgttttagttaattaaatattttattccaaaataattaaataaaatttatataaaaacgatttttctttttgtgccacaatttttttggcattttaacagcttcaatcggttcacacattatgcctgtacacaaatcgtcaaagaaacagcccgttcaaaattggtctaaagaaaaagagggaaaaatttgtgtaaaatttaattttggcaaaatgttttcactgcaaaattcaaatttaaaacgaatgactctctaaacgaattttatctaaaaatgttatttggaaagcataaaaacaattatgtataattaattatttaaatatgtataattataatttacataaaatggcaatttgttagagggaaggaaaaacaatggacggacgagaagggaagagaagcacagaggggcgagggacgtgaataaatgatgagacccttttgtttggcgagagaagctggggtgtgaaaatagtgtaacaaatggagagagcgagagagagagagcggatgaagaaggaacaatagtgtgtgtttttggtgttaaatgttatgtgacaaagaaaaaaatagtgcgttaaatgatgagagtgatatacaaagaaaaaaacggcaaaaaataatcaattgttaaataaaaaatcaaccagcaatgcttccaaaagtgatcagtctaatattgattgatctgcatgaactgatcaaagagaaacagcgtagatttcccgaaaaaaagatttgctgatcagaaacaagggtctgatcaggatcgatcaaaaattcatgaactttagtgcttgctggtcaacaggttggtcattgaatgccaacattgatcagatcaatattgattaaggcaatccttcaataccggatcaagatattaagcctgatcacttgtcgatcaaaattacatacggactgatcagtttgttcaattttggaagcattgtgacacataaaaaacaaagacaaagaaatgagaaacagaatgtgtacgaattgggttggatgggttagagaacacagagggaacgagagaaaaaaaaatcagtgggacgacgaaacacaacgccaaaatggagcggcagacagtgaagacgatgacacaaatacaactgcaacccgacagagaaaacagcagggacagcacagcggac

SEQ ID NO: 18779 - DNA, 843 bp, Heterodera glycines
ctcctccagcgaccgggtatggcggacggagtaggtggacttcatctgagtgatggcaaatttaaaatttgaaatgttggcgtatgcggcaaaacgccaaaaaaatggcgggcactgctatttgtggcattatgtgtggagcagcaacctgctgttgtggatcgtagtaatcgtagagcagcagctgggcatctggagacagtttgttgattaaaattaaaaatgagaaaccaatttaatttatgaaaattttcggggatttaaaaaaatgcataaattttattttccatatgggacgtcggcacggctttttcggttaaaatttcagttcgattggttcacaggaagtggtcaaattagagtaattttccctctgaaatcgccccactaccccaataaagccaccccccccctcccccctaatttttgagggcggggggggggagcagtccatgggcattattagagaaatttcggtattacagtacaaaaattgcacgccccgccccctctcgtccattagcatttttgattatcataggattgataagcagattaagagctcaaaccccgctggtccgcaatttggtagaccaagtccgtgttcatcgacaaacaaacgggcacatcgccaagctaaaaaaaatttaaatttaaaattccatttcattttttttgtgagacgaacagcattgaagtaaatgttcagcttgctgtcctccttgtccagctcaacacgttgcaaatcggcgattccggtcagacgacggacgtcctccttgaaaatgaggaaaaatttgcaaaaagtaaaaattatttaaagaaattaagagaatacttaaa

SEQ ID NO: 18780 - DNA, 1980 bp, Heterodera glycines
ggggaagtgataacggacggaatcggtgctcctttggccgcgtgactgagggagtggtcggtaaaacggcgagggcgggagtatcggcaattttggcttgacgaacgtcgtttaccaccgttccgacattcatagccactggaagagggccgggtgcccaaggtgagcgaataatggggcaaaaattgacgaaaatggggggagggcgatagcgggcaaaaagagatgaggaggaggcggcaagagcatcacgacgatcggatcatcacgagaattcaggcgattggactcatccccccaagagggaccttcaggtcgggattcagactgaatgggaggggggttcgacggcgcagcttgttggacagaaagtccctcaaatcgacgaaatagggggtcgggccattcccttccccagacgaggagtcggacgagggggatcgcgaacgagggggtccgtaaatggactcaagactctcgacccctaccatctcgagaggaaagtaatcgaaatggggggagccggccatccagaccggcactcccgtccggagtcgtcgcccgagtggcggtcgttttgggctgccttcgactttgccgtccactcccgccagtaccccgcctttcaaaagcacctcctcctcctacagtacctcgagaagggctcgccaccacgacgaatgatcgagggatatccaccgtcggacgacaattacagcacagtcgtgagtagagcccggaattttgaaatggccgggaccgggatcgggaccgggacttggaaaatggaccgggacgttatccgggactcccggtcccggtagtttgtccaaaaaagccgggaccgggactcccgttttccgggactcccggtcccggccccagtttttgggcagggaccgggacttttttcaaaaattctcaaacctgcccggaacaacctcaagcagttgcgccaacttcagcaagagatcaagcggatctgcaccaaactttgcagcctcgagcccgagggggagctctcgccaatcgccaacagctcgctggtcaccaatctcatcaaaagcaaacttccatcaccggtactgctcgaactaatccgaatggaacgcgagagatacacttcttggacggcccgaaattggcgtgagggatttgctacaatcgtcaccgacaaggagcaggtggatttgtgtgtgcgtacttcccaggacatggatatccaaccccgcaaacgtcccccgagagagcccccgcactccctcgtcctgtttgccgttcttctcgcccaccaccaccaccagcagcgccggagcgacgttatttggagaacactcggacctttcctgctttagcccaacccatctctgccaacggcatcagttgctcactttgtgagcaggagggacaccgtccgagcgcttgccagcgatacaccaccgtcactcagcgccgacgacgacttgaggaacaggggcgctgcctgcgttgcctccgccaagaccatgttactcgcgaaagaccgatgctcaaaatgccaggctaaagaccatcatttcctcctctgcccgtcaattgaccctccagggcgaaccaacaatcgaacaagagaatcgggagcggaatggaaatgcgtctcacaacgtcagtcgtgccacgggccccccccccccgcctctctgagcacctccttcggattcacactttcggagactcacgccccaaaaccgtccgatcagcaaaattcgccattcaactgcagcgcctggacgtaggctgggagaccctcgagcttaacgtaatcgacgaaatcacgaccaaaatcaaggcccttcaatgggacaccaccgatggacccctccctcctaatgccgtcctcaagctcgtcgaaaaagcgccggtgattggcatccgagaattttgggaattcttcaccggctgttcaatgctccattccgggctccacctcatccaaacggt

SEQ ID NO: 18781 - DNA, 2480 bp, Heterodera glycines
ttaaatgcctatctttaaagattttgttgcctgatatccagaagctttacttatgcctttgataaaaaatatcagatggtcaataagctaccatttgttattttagaatcgggatgcgcaacacttcctgtcctcttgcttcacttttgctggagtcgcagagttcgtccagtctaacatcgccaagggtgccggcgatcggtaattgtgataatattctaacagttatcatcattgatcgcagacttcgtttcggggaaaaccggcgaaagtgacaatctctccaaaagaggggccactctttagccctcgacagtgcattcgtcccgggtattgacaatgcggcggaactcgtccggtttgcatggccgctttcggggatttaagccccacaatagcttcatctcaaagtggtatcttcaggctattgactaaaccatacacaccattaatcggaatcgtcgagcgcatctcttccggaatagccttctgcttccacatattcttacctcaatattctaagcttcccgcctctatccgggctagatcctcggcatctctttaacctcggcatccgttttagccttctcttctgcgtctttcttggctttagcctcggcatccgttttagccttctcttctgcgtctttcttggctttagcctcggcatcctttttcttggctttagcctcggcatcctttttagccttctcttctgcgtctttcttggctttagcctcggcatccttctgagccttcttctcctcagcctcttttctcttcttttctgctggagatggtggtacttccactggtttctcttcctgcttcagcctttcctttgtctcttccgccttcttcgcttccggcactacggctacgccttcggcaggtgcctcaggcttttcttcgggcttagccttttgcttcttcatttcttcctcctttttctttgcttctgcgtctttcttggctttaacctcggcatcctttttagccttctcttctgcgtctttcttggctttagcctcggcatccagtttctcttcctgcttcagcctttcctttgtctcttccgccttcttcgcttccggcactacggctacgccttcggcaggtgcctcaggcttttcttcgggcttagccttctgcttcttcatttcttcctcctttttctttgcttctgcgtctttcttggctttagcctcggcatccttctgagccttcttctcctcagcctcttttctcttcttttctgctggagatggtggcacttccactggtttctcttcctgcttcagcctttcctttgtctcttccgccttcttcgcttccggcactacggctacgccttcggcaggtgcctcaggcttttcttcgggcttagccttttgcttcttcatttcttcctcatttttctttgcttctgcgtctttcatggctttaacctcggcatcctttttagacttctcttctgcgtctttcttggctttagtctcggcatcctttttagccttatcttctgcgactttcttggcttgagcctcggcatcctttttaggctttgcttctgcgtctttcttggctttagcctcggcatcctttttagccttctcttctgcgtctttcttggctttagcctcggcatcctttttagccttctcttctgcgtctttcttggctttagcctcggcatccttctgagccttctcttctgcgtctttcttggctttagcctcggcatccttctgagccttcttctcctcagcctcttttctcttcttttctgctggagatggtggcacttccactggtttctcttcctgcttcagcctttcctttgtctcttccgccttcttcgcttccggcactacggccacgccttcggcaggtgcctcaggcttttcttcgggcttagccttttgcttcttcatttcttcctcctttttctttgcttctgcgtctttcttggctttagcctcggcatcctttttagccttctcttctgcgtctttcttggctttagcctcggcatccttctgagccttctcttctgcgtctttcttggctttagcctcggcatcctttttagccttctcttctgcgtctttcttggctttagcctcggcacacttctgatccttcttctcctcagcctcttttctcttcttttctgctggagatggtggcacttccattggtttctcttcctgcttcagcttttcctttgtctcttccgccttcttcgcttccggcactacggctacgccttcggcaggtgcctcaggcttttcttcgggcttagccttttgcttcttcatttcttcctcctttttctttgcttctgcgtctttcttggctgtagcctcggcatcctttttagtcttctcctctgcgtcttacttggctgtagcctcggcatcctttttcagccttctcttctgcgtctttcttggcttagtctcggcatcactctgagc

SEQ ID NO: 18782 - DNA, 2112 bp, Heterodera glycines
tttaaaaaaaaaaaaaattacccaattttttttgggaatttaagaaggaaaagaaaatccccctttttattatttttaatattctttttatgatgggaaatgatcaaaattaaacggaaaagaaaaaattccatcacaaatcttttaagtaattttggggggaaaatggaaggaaaagaagaggcaataggaaaggaattaaaaaaaagagaaattattggaaaattttataaaataaaagagaaaatttagcaaaagggaagaaaatattcaacaaaagaatgggataaaattattcgaaaatagcgaaaaaattgggaacaaattgccaatatatttataaatggatcaaagaatttggtcttcaaaaacgcagatctttcaaatcaaaaactgatgaagaaaagttagaaattgtacagaaatttattgaaatgaaaaatgaatttaaacaaaaaagaaaatattcatccaaagaatgggaacaaaattatgtcgaaatttgcaaaaaaattggagttagtgatttcactattatgaaatggaagaaacaatttggcatttgctgtaaaataacggaggatgaaaaaatggaaaaaatgaaaatttattgggaaataaaaagagaaaatccaaaaatgagtgacaatcaaattgctaaaacattgagaattagtctaaatagcatttataattggaagaaacaatttggagaagaaatggcagaagaagaagagtgatttagtgatttgttaggttttttatgataaatttgatttactgtttaatgcaattttcgcagttttctcgtttcatttgaaagatcataaaatgtaattcttttactaatacaatattttttcatcacccgagaactaattgcaattaagtatctttatttttaaatgtttaattaaaatttcagaaatattcgaagggtaattagcaaaaaaaaaaaccacctcaatcattccggacaagaaagttttgtaggatggaatgtagtagagaatgtggctggcggtgtgaagaaatgggatgcgcatttcactgtggcacatcagtgccgaagtataactcagtccatttttactgtaacagaatgccaaattaagaaaaaaaattgtcaaaaaatggctaattaatcatgatttaaacaaaagtaaaaattcaataatttaaggatttcttgactatttcaatacttttaaagtatggataattaaacaaatttttaaatttattttccccttttagagatttcttatcaatttttatacttttattaaagtgccaaatatgaaaaaacattaccaaaacacgaatttaaaaatttatttggttttattatttatgcatactgtagctcaggcactgctttctgtgtgatccagtccaattctgaagagcttgagcaactcagaaacacgtcataaccaattggtgttgttgcgaggcaacaaccgttcggacgagtcgacgaccgatcagaggcgcgacggtcaatcctgaaaatttaaatatttttattaaattaattcattagaaaatttaaaagatttcgaaatcaataagccgatttttcgagtttttttttggaattttaataaaattacatttttatttgaagaaactactcgagattagcttggtgttgaatttcctggatttttttcatcagaaattctgtacgcatgtcaaatgttaaacccagatcaagtccgttttttgttgttgaaaagatcaaaccttattttaattaacgccaaacttttcaaggactttgcttgccattcaagtataaaaacgctaaacattgtccttatgcacttttcctaccttttttcatccggcttaatcatcgtccaactgctgttggtgtactgcttggacttgttgttgccagtcgctgctgttgttgctgctgaaccgctcgtgctaccgctgatcaacagttcaatcattggtccatatgatgagcagggaccgcctccgcttccgctcgacacttttccgcgatggaaaaagcgccgcgggcgcgctcggaggatgtggcggtggcagaaacgtcaacagctgcagtggccagttatccggaagcgtgtgcacgcg

SEQ ID NO: 18783 - DNA, 1010 bp, Heterodera glycines
ctgagctatactcctccaaataatattacagtgattttaatctacagaacctttcgagcaatttaatttacaattctgcgtactatgaaattacggtatttcctgtaccggtacaatattccaacaatatgatacagtataccttaaatctacagtagatgatcaggccaagaagtaacaaatagttgagcgccaaaagtggtagcacaattgcccacataggaacagccagaggaagcgtatttgtcgacagtaaaaaaccaaaactcatcacaattaatgcttcaaacatcagcaaaagtgcgaatctgttaaaagtgattataatttaattattgaattcatttaaataaattttattgaaaaaatctttaaaatattttaatgattagggactaatgagtctttaagtgtccattataattaattaaaattcactattaaaatttaaatgccatattataatgactgtaatttaataatatttaattaatcgctcactattaatctttttaaatgcatagttaattaattttaaatgaattaattaattaccttttcaaatgcgttaacaagcgtaagcggcacagacgcgcaacggaatgccaccgctcactgcaacgcatcgcgcatcgttgcgtctgtaacttaatgaacggcacccgctgcgcgggcgtgagcaacgcgtgcaaccatcgcttgccgccaatgattttcgcgtccacaaagtccaatgcttggctaattgatgttagcataaggacagagtgccgttgcagaattgcctcaagcaaattacctgaagcaaaattattaattagggtttaatttgttgaatttcattatttactaaagggtaataaattttaattaataggtaatggattgataattaaatcattctaaatattatagataattatttctaggatttcattcaatttaattctaagaaaaaattttgcaaaaattaatatttaaaaaaattattaaaattttttattaaatat

SEQ ID NO: 18784 - DNA, 1900 bp, Heterodera glycines
tatttttcaacgcctcgttgactggggcttccttggtcattgggggattaatggagattgggggataattagaaaatatacagtaagaattttgtgtatatttcgtagagcccggaacagaaccggatctagtcgggatttttcctgatcctgcctgatccgggcgggcatattttgaaaaaacgacccaaatcacgagcccggcaaaacaggattttcaatccttaaatccggtccgggtccttctctgggaaattttgatcatgatctgatccggataagaatgaccaggatcaacgggatttttttcttatttctaccaaaaaacaaaattttttttttaattaatttgtcataattagagctcgcaaaaaaggtgtaggaatttggtggatggcggaggtgtaaaaggtcagcctgcggtgggattcgaacccacgtcccttcctttccgtggaatgctctaaccactgagctacacagggcaccctttacacccttctattgcactttttcatcagtgcaatgagaaactctctgcctcccaggcactttgagagagcccgcactacaaaggcacgaaaatcccgaaaaaggcatgaaaaaaggcatttaaaattttttattaaggatttttagggagtaaaacacgtaaaacttaaccaaaaaccttaattttggtcatttaaatgattattaaatattttataatgttttcgaaaaagtaaaatttttaaaactaaattttttatcaagaaaaaaattaaattattttttgagaaaatttttaaattcttagaggtgtattttctgaaaatattttctggtcatttcttggggtgtattttcccaattttattgcattttaatggaatttttcggtaaaaaacgccaaaaaaggcaccaaacggcaaaatgccaaaaaaggcatttaaggcacgaaaatcccgaaaaaggcaaaaaaaaagaataagctcaattaaaacttttttttgtttttaaaaaaggctcaccccgaaattcgtctaatgtatttatattttatcgaaaatggcacaaagtgggcattttttgatgcaaatttttaagaaacacttagggccaacattttcaatccccccccgggcggcgtctatcggcaccgtcgaacccttccctttacaaaaatggtaataataatttaatggagtcttcgaattgatctctcaaaatttcggagcatttttagggggctctaagctagaaaccttctgacatgacatgaatagcttttatttaaaaaattattgattttctcatttaaatttttttaggtttttggtaaaaatcctaatccagttcacgcacgatccgggccaaagctttgggacccggatcaggagccctgaaaaacaggatttttcatcctgaaatccggtcctggtcaaattgtttattaaatttgtatacaatattagtctattcaaagtaataataataattattattattttttagttttttttttgaaattttgattttttattacaaaaatttaacttaaaagttcaaaattatatttctgttcttcactaaaggcgactacaacatgtattctcggctggacggatgttggattgaggaaatcgctggcattaaatgcggaaaataaataaattattattccattgattttaacttaaataaataattaattaattttttaaatttaagccattttcattgggtagtgtgttttttatataacaaacttcacaaatcgcaaatcggatttaataattcaattcaaagttttcagaaagacatgaaaataaataaataaatttactgggttgtaaaaaaaaacagtgtaagattttagagacaattggacggagttccgaaaccggaaaagtaacta

SEQ ID NO: 18785 - DNA, 2499 bp, Heterodera glycines
agtggacaatggcattggcacgaggggaaagcccttcttagaaatgtaaattctcgagataagcccatgggtttcatgcagttaaattattcaatcacaaatcccaccccgtgaaccatcggatccgatgtgagcaatggcatttgctgctgctgccgctgggcatgcgattggggaggcatccattgggcacaatgaaacggaaagaacggaacgaccagcgaaaggacgaaaagcactgatgggagaggaggaagacgatgacaatttttggtgccaaaaataatggcagaaggaaaagcagcgaaagaatcagtcatttttgaatgtgtggcgatgctcattgctgctgcgtcagacggatggagcactaattgagggttaagcacaatcggtaatgacccgccggcgctttttagtcccaattaatttgccgcgcccctccccaagggggatggatgataagctgggccaatcagcatccatcattcatatttcaccttacccccccccccccccccctcccagtgtctcggcctttatttgcgcatgaatcaccgtcgtaagacagagagagatggagagaaaaaggcaagagaatagagaaaaagggcacgagagagagggagagaaagatggcacgagaagtgaggggggaagagagaaggagacaaagatggcacgagagatgggggaagagagagagggagagaaagagagcacgagagagacagacagatgatcactttttaggcaaatgtggctttattccgctgctttttcttcttttttagtggctttgtttgctctgatcatttggccaactgaattaattcgtcaccctcactttcatcgtaatccctccgccgctgattgcgcaaacggaaaagcaaacagaaaacaacaaacagatcaacgggggaatccaaatatttctgccactgatcactcccccggccaaagataatcgcgcggatggattggggcggaaggattaatgatcaattgatgattctcgagaaagcaaacagagaattgaaatgagagctgctgaaaaatggatgagtcaaagtgagacggagggggagggggaggtaattaggctaattagggcactaatgagaaaaaattgtcgaaatttaaatttaaaagaaatcacatggccaggtatatattgagagacaaataagtagcctttctagaaagacaaaaaacaaagagaaggaattgatggttaaattttcaaaaatcgactttctttcgaatgctttttcgattttcatttcgtttaataaaaagaattgtttaataaataattaattatgaacccgaatttgaaattgtcttttgggtgccattcattgttagctgatccgttcgccgttcgtttctcttttttcactttttgtcattccgttggcttttcgctctttttttattggcatttctctgattgcattctcttggtcattttttccctctccatcacattcaattagcatcatttggtaacgaagccttcgttggtgttggtcccggggaagggaaaaattggcattggcattttgtgtcccctcaggtggttccgtccccgttttccgctcttcctccgcttgcctcgggaaatcaaaattgaatgtgcattccgtcgttggcgttcccattttccgctcttcctccgcttgcctcgggaaatcaaaattgaatgtgccctccggcggtgccgtccgctttttccccttttcctcctccgccgttgattttgttaggctgccgcaccctgttgacaacgaaagcacttcgcgaagtttgccaaaagaagatgaaacaagccgaacgaagcgcgaatttccattcccttgggagcgatttctgatgaattaaatctcgattcgtttggtctctctaatttcgagattttctcaagactgagacttcaccttctgctgccactgccttggtcaaattgaagccgtcctttctccggtgccgtcgcctggacagccatgtgtccaggctggtcgcgtcgtccgcctgctttccgaccgctgcggcacttccgcacggcgggcgccggcggtcgtcgtaagaacggcgcaatgccaacgaattgaaaaactgtaaattaacgattggtcaattagtgaaataaaatcgaaaatgccatgtttgaatttttggatttaaatgtaaaaccgatccaattccataataaaataaaaataaaaagaccctaatgtagaaggatgaacgtccggcgtgtgatgaagcttcatcatcatcatcatcatcatcatcataataaacagagtctctcttgtctttgtcgttttgcgtctgtcgccgttcgtcccccgagggtaatttagaaagctttaaaacataaaagattactttaaatgtgacagattaagccgcggaacaattgactgatctgagcactgactgatcggaataaatacacaaaattggaccaacagaaaagggaatggccactta

SEQ ID NO: 18786 - DNA, 2306 bp, Heterodera glycines
ttatcggaaaaatgaccaaatttgcgatttttaacatatgtattagggttgggcccccgaccccgccccgaccccgaaccccgacatttttggccatttttcggggttaaccccgacccgaaccccgatgcttccaaccccgacgaccccgaaccccgacccttaaccccgactaggggtcaggcttaaatatacacccctaagaatggcatttttgtgggggaaatgcaaaaaatttaaacatgagttcgaaccctgttggctgtttcctttttaatttatttttatatgattaataggattttttaaaccaaaaatacccattaaaatcaatcgtccttggcataatttatagacgtattaaacccaattttcctttctttggaattaaaaattcaattttttgactaaatcatgaaaatttaatatatgtacgtacatctttcaaaataattttgacaaaaaaccaagaaaaaaaaccaaaaatttatcaaaaattcataaaatttttggtgaaaactgttacaaaagagaccttaaatttcaaaattcgcccggcgctgcatatcggcatcgccagcgccacaaaaaaggaagaactatttttacataaaaaaaatttggctcaaaattgaaaaatttcataatttttttggacaaaatctgttaacagacccatccaaattttcaaatttttttcccggcggcgcctatcggcaccgccggacccctttctcctaaaggtctttagaaaaagagcaccgcgaaaaaaaagatgatttgaaaaacaaaaaaagataaggtgatcagaaatttttgtgcatttttttgaataaaatccactatttctatttgggggccaggcgccagaggaaaaatttgaaattttgactattttacagattttcactgaaaatttgtcattttaaatgccttatgtgtttttaattattctctacaaaaatatttatgataaaaaaataataaaaaaagcatataaaattattattatgaataataaatatttttaagcaaaaattttataaagttttttagaaaagtgctgctgttgtcggactaaataataagaaatttcgttgggtggcgatagaacggccaaaaggggcacccaattaggggcaattagtggagaccaaatgtttactcttttttaatgtcgcattttcagttttactggttctaatggttttgtgttgattgtggccagctttatcttccaatttattgcctcaccctcaacgaattctcattagattttcttactttttcttgcaaatgacagataatacgcccctaacctttaaaaccattggacaagcacacctttgctctcatttgtcagtttcgtggtgtttggccgctgcctttaaataactttgaaatgccaaatccatttgatatttaaaccacctgctgttgaagtgagggcgcccgcctcctccccccggggcgaaggcctgtcaaaaatgaacacaccgccagcagaggaaggaaatggcaataagttttaacaattttgaaaatttatttatttgaactcctactgtacatgatagtaatgtcagaaatgttaaattttggttctctttcaattgtaataattagggcaaatttatatgcactaaaaaatgtcaaatatgcactacaaatccctcaaatatgccctaaaaacccaaaatgcctaaatattaaaaacaccaaaaagtacattaaaatagtatttgatgacggaatgtccggcaccatgggtgggcgtatccctttcttcgcgcttatcgatcattacttttatttcattcgcttggaatttgtccattcttttcctccatttgattggttttgtttccatctatccccacatacatatgatcgattaacgggggggggggtcaacccaaacggtggggcaaaatacactaacccaataaaattgcattaataaaacatttttaactaactttgcaaaaatgcaaaagagatgattttgagcaatttttaaaatttatttatttcaatagaaaaaacgaatgaatttcatctttttattaataaaagcataataaaatgcaaaaaatttttaacatttgatttagcaacagtttttagctcaatgagcaatctttcaggtccataattaatccacattccaaccggggaaaaaataaaattctttcgttagcgaagtgtgcgtttcgggcaattgaaaaagcgtcttccctccttcttctcccatggtgccacccggggaggactcttcttaacatgtgtgatatttggataattat

SEQ ID NO: 18787 - DNA, 3627 bp, Heterodera glycines
tggcaaaaatgagcagcagtcgaacgaattggcaactgctaatggtcgaagaggaggaggtcattaataaactaattagacgaataattaattaaatgctaaaaagtaacgaccaattttcagcaggaaatcgcacaaacattcacattgatcagcaacaatatgatgagaacagttacttgagcgtgaacagaacgcagaatatttttggatggagtgacgaggagggacgacgagcattgggtgaacagttggggaaaggcacccgcccacgggggggggggggaggggatggcacagaattccgagttgcgacttccgacatttttggggtcggaattccgacttccgaaaaattttagggcggcatcggaattccgacttccgaaaatttttggtgtctcggaattccatcacctattcattaacgtttttgtcttccctaaaaaccaatttgccgaagtgccaatatttggattttaaattttatgaattttgataattagccgcgtttttaaatttaataaaacactcattttggcctttccttaacagcacaacgaaacatcgacgatttactcgcagacaatgaacagcaacaaaatgccatcacaacgctttcaccgttccgcgtatttacgacgctgacgcattgtgaaaacgccgattgggacgaactgagggaagtgcgagtgcgcgagttgtccgaagtcagtgcacggacggacggacagcccctaattaagaaaatgggggattagtaaaatcaaatttagccttatgaccggatagacgccgattcaacaacaaaatctaaagtttaaattttttgaaaattagcacggaaatgctaaaagtaaaaaaagggtcttcaatgttttttttgcccattttgcaaaaattttggtcgaccccttaaaattggtttatttttgactcaaatcactttttttgatcggtgtcacagctctatttttttattgcatattattaatttattcaataatgtaaatagaacagaattgcttttatgcgagcgaatttatgtgtttttttaaactcgagcctggcccggtggtgcctgaaattgaccaggcttactaggcttaggaaagtctggggtttgaaatagagtagcttcggctcaccacatatataatttttataaaactttaattatgtagattgtgaatatttttaaatgatctttaatagtaatttaaaattaaaatacttttttatttttaatttttaaaataataatttggctttaatttgatcacttgcacttttcgtagttcgtctcatagcactggaaaaagcctagtttcggtcgaccgcttttgaaagtccccagacttaatgaaaacaattatttaattttaaggctcgccaaagagttatgtttatggagaatacgatgagatggtaaataatcataattaattttaataaaaaaatttttatttccggtggctctccgccgcggaacattggcgcgaaaaatggctaaagctgaaaagcgagcgaagccgactcagagaggaaaatttgcgactgcgaaatgcgttggcattcgcaaaggcacgcgccgtccgttttctttttttcaacattttgtcgtttttaggttgaacttatcggccaaaaaaattacgagaattcttccggcgaatcggccaaaaatattcataaaaatggaaaattaatttctttttcagcaaaaattgacaatttgcaaaaaaatgcgaaaataattcaaaaagaaaacgaagaatttggaaggagaaggacaatttgaccattggtggaatgccaaaatgacaaccaacaacatcaaaatcgaaatgttctttatcttttgcgctttaaaaatttgaagaaaaaagtaagaaaaacgaaataaaatcttagttttttctcttaaaaattgactaagactacgtcaaaatgagagaattactaagaaaaacaaagaaatattattagccttttctctgcgcatttttattggctttattctttcttttttttatcaccatattattttttaaaattgctttctctgttttctattatcatgtctaaaaatttatcggtggcattatagcaattttattcttatttttaactaaaattttaaatttttgtcggtaaaaaattcataattaaaaatatatgtgtatgtagcattttggctcaaaactgaaaaaggctttctataaaaacaaaataaaaaaaaatggcaaaaattaaaaaaatatttatataattaaaaataaatgcgatttctttcattttcgccttttaatttggctggcgaaattgttattccgaaagcaaatcgccggcagtgttttgactaaactcctttcgctttgtaacttttgtccaccgtctcgtcactttcagcggatgatttgtgccaaaaagggcaccttccatcattttcggcatgactgaatgaatggcgccgcattcagcaacgaacaaaacaatggctatttttgtgtgcaaaaagcgggaaaaatatttggcgattagggaatattataagcacaaaagaaaagagatttgatataattaatgcgtttgaatgcattttcattaattatttaattggaatgactccttcgaaattattgaccattcattcatttcccaattaaaaataaattgtttcttcgcaccaatgaaaaaaaacaaaatgggatcggaaaaaaggagaaaataattaaagtgaacggttagtaagaaaacaaaaaaaaggaatacgaacaatgctaattattaaaaatgaaaagcaatttaaactaataaaatatcataaccgagttttccaaaattttttaacatttccttttaatttaccgcgcggcagtgactcggctaatttttgtcttgcattttctgataacggattttgaagccaatccgtgcacaaattaattcaattttttatgcattaatttttaaggttggttcaatttttttattgtcatatgattattaaatttacaggtgcctacgcaaaatcggagttttatttgcattttctaattgtgggaattgtgaaattaaaaaaccattttcgtatttattatttattgtttgaaaaaacaacaacgaatcctcaccatgggaacgaacattttttgtttgtttgttcacctttcacaaaatgctcaaaaatggaaaaaataataaaataatttttgtgccttccctcaactaaatttttgtttgtttatctttcctccgcgaggtgccgaaaaatttaaatgaaatggtcaaaaatgctataaaagcaaccttaagttgttgctttctatcacagccaactcatcattaaagatactaacaaataagcttggatttatctgcaaatcattaggaaattaaaaatgcaattctttgttggctccaagctcccattggcctttctgctgctgcttttggcatgttttaagtgctagttttgaactgtttattttttaagttgtcttttgtgttttccaatgccaaaaaccaaaaggtaaagtaattaatccatttacttatgtttaattttaagaaattattaatttaatcaaattattttgtttaatttaatattaatttctttag

SEQ ID NO: 18788 - DNA, 2264 bp, Heterodera glycines
acatttcaattaatctataaaaaagcaaaacttataatctatatttaaacaaagtatttacaacccattaataaaagagattaaaaaatttttaaatatacgatctttattcacatttcaaaaaacattaaggagacacagttgcgtaaaaaagctaatgacatgccattttgtatcatcacaatgcaaataaaacatagtataaataaattaaaagaaaaagaaatttgatactttaaatcatttgcatacgaattagttttaagtagacaggcacaaagctcaactcatctcgttatttatttataaaatatttaaaaatatcgatcttcagataataattaatgctatttaattatcgtaataaaagtatatataatattaaataaatgaaatatttaggcagaattttaaaacaaacattttacttagtactaaaaatattttcaaaaactataaaattaaatttattgtttcaacaacgaaataatgacctttagattaaaattacaaagcaaaaatttatggattggagtcggttagccgacttttgcgccgcgaacatttgcgccgtgccatttgcgccgtaaagcgaaaaaagacatttgcgctctcattaaaataaatttatgtgatttcgagtaagaatcgattgatattcattattaattccttcgaagtctttcatgcaattctatatgattgatcaaatcttgtcattttggttttcattgggaccatatgcgataacaagccttagtattgcctaatcattaagcggcggcttttagggcgaaaaaaatcaaaataggttttcaataaattaaataaaaatcgatgtaaatatcagtagtatatgacccctaaaggttgcgggttggttgcgggtgtttaccgcacaaacccgtgcctatgtgaggggtggaaccttttgaagatgccgccaagagccaaaacctatgggaggggtgcagccctttgaagttgccgcccgctcacatcctgagcctatgggattttctttgaactctgccgccttgtggatttaaaatttccccaaattgttgcgggtgtttttttcacccgcgccgcgcagcgccgcgggaaggtcatcaatcatccacctgtcaccaaaagtgacaggtgtaagaaattcaattttttcttttgcaaatttaaatcccaaaccttttggggctgtattattttctcaatcctgatttttttatgatgaattttctgaattttgaaaatttgccaaaaccatgcatttcctctccgccccgccggtgcgccgcgatgctggcgcgcgcgaagtaatcgataacaaaataaatacccaacagaactataaattgggggaccgtcccaataaatgaaaaattttttatcgtctccctaacttcttttgagccattttcagatagggaagaatataatgatacatttcatcaattccagaattgttttttgttcccgtaattacgactttaccggtccagaaaattagcgctgtcatgcttttaccccgcttgaaatttaaaccgcaaaatatttcgggttcataaaaggcacgacgattttttcgaaactcgttcagttcaatttcatgtccgaatttaaaggtcgaaacaatattttcaaccgtgtgtccggtgtaagaagcccccggacaccccgagcccttaattatttctataaattttttaatagcattttcgcagtctatcagacttttcgtccccagacatatcatttttccggattcccataataatgccggggctttgataggagttgtacatttgataaccgcggcattgaattttctagggttatacttaaattcgcattcggtgatcgtcagagagtttagtttaattccggtaccgagattagcgaaagcaattatatttacgattatcagtttttgcatttttgatacaatgtatcaatcaaatggtcctttcatccctttatataccccttctataaatagcaacccaaaataaaattaaattgaaaaatgaactgcccacataaaattaagtgttgtcattactgtccctgtcattacgagatatgtaacagatgtaaaaaacacagtcttttgcatttcggtacatcattatttgataatttctggctatgccccaaatgcgcgaaacatgttccctatgaaaatataaataggtcaaataaataagaggaattaaaaatgtttcgcggttcgttcactctaattctctcggggggctaccggg

SEQ ID NO: 18789 - DNA, 996 bp, Heterodera glycines
  unsure (1)..(996): unsure at all n locations
agttttaaactaacgaccaaacaaaaaagaaggttgcacaatacgccgatttatagagaaatgttaaatctcgttcagagaaaacggcaagaaaaaggatagaacaggggagtggtatagccctgggagctgtcttgatacctgtcctgagtgttttagcncaacatttattagaaaaaataacatcatgaaatttgcaaagaaaatgttaatgattcccgaggcggaatatttggctctacggagtgcgatgaatagtggtgattatctccaaaatgaaaaagcgagtttagacgcaaaaatttctcagaatttacaagaacccggcataagcgaggacctcaaggcgaagagacacgattggctctataaagaaaggcgtacggtaaaggggatacttgaaaatagaccacagaaggtagtgattgagaatcatgtacccggtccgaatgttgcaccatatctaggcctcaacactcaatccaaaccacaggagaccgatgaaccccggaaaataattattcctaggaaaagacttgaagagcaaactcctgatcctgaatcagataatgatacaataaatgagttaactccggagccccaaacaacatccacattaaaaacacccattccgatcaaaactattatacacccgacccttttaaacggtctttttaggtacgtgaaggaaaacaaagatttatttaaaattacggcggccggaaaggtacagtcgaacatgaatttgccgattgaaaacagtaattatagagatgttttgttgtatctcgcagggaagaaagatgaaacgccgcgcggtgcaaaatttctcaaagatcggttactgaaggatccaacagtaaaagacatggttgataaatcaaaggtcatttggggacgtggaaggaaaaaggcaataaaatctataaaaacacccggcatagtgcgagagaagaaacccttcaaaccactaatatgggcaagactgtagagaaa

SEQ ID NO: 18790 - DNA, 1104 bp, Heterodera glycines
cttcgacgttttcgaggaccaaatccgcgaggcgttcctcgttttcgggcccatcaaaaccatcaacatgtccatcgacccgtccacaaacgtaaggcaccaaagctcggaatttgtttttcattttgggtcaatttgttagcgataagtttgttttagagatacttttttgagaaatttgctcgaaatttgactcgaattctctaaggcaatgatccattttgcggaaaagccgacaaatcccgcttaatgaattcaattctttgccaattattcattaattgcgtgtcccctcttccctttcagcaccataaaggcttttgctttatagagttcgagctgcccgaggcggcattcattgcgcgcgatacgatgaacgggcgcatgtttggcggacggaacatcaaagtgttgccggtgagatcggggaagggatttgtcatttcgaaagtagttaaaaatcacgtaatgatcatacacgaacaaagggtgtgccggcgcacccccccccccccccccccggcgccaatcgtccgtcgtatgggcctcgccctggcgcaccccttgttcatgtgtatgctaatgataaacatgtttattaggtcggtcgtcaggacacaatgcctcaggctcagccgatcatcgacatggtgatgagcgaggcccgccagtacaaccgcgtgtacgtgtcctccgtgcaccccgacatttcggagcaggacttgcgcagtgtgttcagcgcttttggggatgtcacaaagtgtcaattggcgcgacaaccgtccggccgagggcacaggtgaatgaaaaaacaaaatatttagtaaatttgggtgcatgcaacggaaaaaacaatcaaatagttttgaaaattgagacaatttcggagccccgacttttgctgctcctacatttgcgcctatggccaaaatcggattcaaagttgcatttttttcaagccctgatagcctaattgcattaaaattacgaaaactctgtagtttattaggaacattaattctgtttgtttgaaaattgtattgttttttcaaaaattcattgacgatcaaatgatcggatacaattactttcaatcacttattt

SEQ ID NO: 18791 - DNA, 1620 bp, Heterodera glycines
  unsure (1)..(1620): unsure at all n locations
tccttgggggtatagtcattttcagaatttttaaatttccataaaataagataaaacggaaaaaaagatggccaaaggaaatgaaaatggcattttatttcgatttttaatatttgaattatgggttttcttttttaaaatattccaaattaaaatagtaaaaacatttcccggtcacagattagcgacaaagcatcgcccggctcatctccgtcccgacatcaaacgccctcctcgccgacgccaccacctacggctgaaaccactcaaaaagctatagctggttcttccgcatccacttctcccgctgcgccgtccgctgttgatacaacaacggttactgctgctcgacccgcggcgcgtcgacgcggctttggcggcttcgccgccggctcgacagtgccaccgccgaccattgtccaggcgttgccggccccgccggcaaccaccgacccaactccccacgcgacaacgacggcgcctgctgctgtctttgccgctgcttcaaacgctgttcaacaaaatgtgttaacaccgccgggcatttttcaaccactgccaccgccgtccttggcaccttcgctcgtcatgccgaaattacaccagcaaacatcagcatcaatggcacagcaaagcccgggcaatacggtggcattgcctttacccgcttcagcaccggcagcggacacaacagcaacagtggcatcaccgaccacagcaattacgtcgatggcaccagcggaagtaccagagaaaccagtgattgcaccacaaccaccgaagaaggccaagaaggaaaagcgcaacattttggacagaattggggacaaggcacacattggcacgttcgatgcaagcaaaccggccactttcgccccattggacccacatgtggcgccgcgagacccaaatgcggtcgattccgatggtttgtactggcaatttagttggcccattatttgttgctctttcattcagatgagcaaggcgatacgctggccattggcgggcccgattcttggtatgcgttggcacttcgtgataccggcacggtgctgaagaaggacaccggtggcactggcaaaggcaaaaagcagggcaaagagagggacccgaacgcaccgaagcggcgccggacaaagaagccgaaactgtcctcgggacccaaggcaagggataaagcgtgaaacctatatttagccattgctattttaaaatatctcaccaattacaaattaaaattttcatacaaaacccagggacataatttaaaaactgagtttcagttaaacaccgcgcaaaaaatcgctgccgcgaatttggcgggagtgctcagtgatcagctgtcggtgcagaatgacaaaaacgatgaggccactttggcatcacaggtaactgatattaatcaaattcaaaatttaaacatcatttcctatttctctccaggaacatgtccaaatccgcggcaacgacgctcgccatttgctcatccaaaaactgatgcgcaccaatcgttcctctgtcgtggtcctgcgcaacatggtgacgcccgagggcattgacgagtatttggaggacgaaattcgggaggaatgctccaaatacggncgagtgaccgat

SEQ ID NO: 18792 - DNA, 2759 bp, Heterodera glycines
  unsure (1)..(2759): unsure at all n locations
aaaggcttcttccaatgcgctcacggacaaatgaatgtgtgcataattacgcttaaggcttctttgcccactcattctttttcgtaatgccatttgcccttgccaaaaccttttatcttaacaaatatttcccgccgtattttctggccaccgtggacggcaggacggacactcattcatttttttggcacggcactgatttttgctgattaactcttcttcaccataattggaatgaaagtccaaatccaacacagtttttttttaatttttttgcaaaatgtatggatttccaatagtttctttctttttttttcatctttcaatgcatttaatttgtctgtttaaataggttaagaatttgagaagccaattagccttcaagaatggaattgctggtgaacgacctctgtgaggcgacccccgagcttttcagccgcaactcaacactccaactgaccgtaatccaatggttggccaccgtatcgcaactgtacaacaattacgtccatgcttgcctctgtctgctcatctgtccactgggcattttggccaactttgtccatattctggcaattttcttttagattctacaatataattaattttggtgtattaaatttatttcttttttaggtgctcacccgacggcgaatgcgacggtgtgccgttaacaactgtttgatgggcattgccatctgtgacatatgcacaatgtccacctatttggtgtacattttgtacttcgaagtttatgcaaaagtatacgaaacgaatattaggtaaattcggaggggagggggataaattccgatgaattaaaattaaattttggaaatgaatcccgccccaattcgttcagccatttctgggccacttacctgcatttccatgccaccgtgtccatttgtctgcacacaatcactttgtacacgtgcgttacaatggcactcattcgttggcgcgtgatgagccaaccgtactcaatgattgttcagccggcaatggcctggtaacaataaaattgttagactctgaaaattaatttttttgaaatttccatttaattaatagtgcacggattaatgaattttcctatttattatttgttttattttaaaataattctattaatactgattgctaaatttttggaggaaaaatgttaaaatagaagagaaaaaaaagtgcgaccctggcagggatcgaacctgcaatcttcagctccgtaggctgacgcgttatccattgcgccacagggccgatgtcctagaatagaaatttgtcttatttcaatataatttttctttcaaaaattactacagaaaataacaaaaataaatcctaaaccgacatttaggaaaatctttgtgctcgtcactgtgctggtcgctctgttctgtgtgcccacttacctcgtccacgaagtggtcgaattccgttactctgacggcacagtttttttcaccgtggacatttcggaatgggcgcggacggaccgttgccactatttgaagacgaatttgtttattattggcattgtgcttaaggtgagaaaggcccaatggaaaattgaaaattcgctaccccaggcgattccctgctttttgcttctttggttcaccacggcactgatgttcaaactgagggaaaacaatgcaaaaagggcacttctgttgagggacaaaagcaaaaagatgcgaaactatgacagaacgacattcactctcattgtgatgctgggcgttttcttggtaatttgggatgaatttcaagaaaaaaacaaatcacatttggtaataatttagatgacggaattgccgcagggcattctgacaattctgaatggcattttcaccaacgatgtccattccgtgttttacatgaatttagccaatttgctggacattctttcgctgatcaattgctacgtgggctttatggcctattgttttttgtgctcaaaatacagacaaacatttgttatgatgatcctaacaacgtaaaatttaagttggcgtacatttttggtattctgtccattcagtttggactcctaccgaaaattgggttgctctgaaaagtgccggcagcaaaggcatcggcaacactcacagcacggcacccgaaataggcataacggactgctggggcgggcggggaacggcacggcccattccgcatcaaaagtgccgatcttcgaaccgacaacgattggatcggctcaaagcagcagcatacaatcaatagaagatccatcagcaggccaaattgggggtaaggaaatggcgggggnggggggggacaccgtcccggccaactcaattaaaacgcataaatttaattgttggcctatccataaaactaatgccgttttcttggttcaaatttataacttttaagggttgataagtcgtaacggccgaaataaaaatatcctcctaaattcgaatttaaaaattttttataatcatttaagaaagagaaaagaaaatggaattggtagtgacgatggatgggcgactaccggacgaacaaattggccaaatgacggacacccatctgtaaaagtcaaaaaacaccaagggaaagaaacgtactactgtaaaaactgaaccatccattaaaatatatatgggacaattattttaattatttatcatttaaaagatttattatttattcgtttattcgaaaataaaatgaaataaactttttacccaacataaaatataataaaatgaaaaggaatgaaatga

SEQ ID NO: 18793 - DNA, 1657 bp, Heterodera glycines
  unsure (1)..(1657): unsure at all n locations
ctttcaactcacntggatgttccatttgtttttcattttgttgctgctttttctcttcattttccattccactaaatccgctgtccgttttcgaaatgccaaaaaattctgtttttattgataatttataaatgtcctcgccgccgcacgatttgtcccctccgtgcgtcaaaaatttcacattgtccgtttcatttttattggaaaggcagcaaaggccgaagctgctgagtttaggcattaaaaatgaacgttgtgaatgataatgataagtaaatgactaattagcagaagcaacacaccgatcgattgccgtattttttttactgtaaaattctgattgtgagaaagagaattgtatgtaatgagaaaattgttggagtttattcaattattgttttttaggccccaaaaacgggactgcatttgatgacaaaataaagttttcgggtcagacgctgaattatttatacatctttttttgacagaatatgaggttgttttttagggtgcaattccgttaattgtaacaacgtaaaatgaaaagcaagtaccaaagtgcataacccagtaaaatcagctggaggccatcggcaattatttgagttttgttattttattgcataaataaagaggaagaaaataacttataaatgcaattttccttcagaaaatgaattcattgcaaggtcgaccaaagacattaaattttgggctttcaaatatcctgcactttaatgtgaatgaaagggtgagataatcgggagcatttcgcacaggcgaattaattgattttgtaatgaaatgacacacaaaacagaagacaaactggtttacacaatcgaaaatgaaaacaaaactttaataaacctaatatttaccttaaagataatgattacaattacctatcagtagggctggcaattttatgtaaatacatgtttttttcctggattctccatgctctaaatagcaggaaaaacattttcttttttgtgtttgcgaacaaaagttgggacttttatttacatatttttacatatttcgagatttttatacatatttatcatatttcgggtttttttttacatatttggtacatattttggactttttagcatttttttctaaatttttttgagaaattttgaaaatttataaaaatttcttgtgaaaaaaataaaattttttgaatatgtactagggttcgagccccgtgggcgggggtggcttttcgcgggggcgggggttggcgggggtcagagtcgcgggggcgggggtgagaaatttctcgcccccggggacgggggcttgtttttaattagctcccaaaaatctcacaaaaaattatgtcgaactcataacaaaaagtagtgttaatgttgaagcactaaccactaaaccacaaatattttaaaaaatataagcatatttactttatttcataaaaatttgtaaaagatggttaaaaattgaaaattgtataaatttttgcctttaattccacaaatatgccattcttaggggtgtttttttcacccccgcgggggtgaaggtcgctggggagggggatgcgggggtcagagtcacggggacgggggtgagccccaaaaacctgtcccgcccccggggacggaggcggggctcgaaccctatt

SEQ ID NO: 18794 - DNA, 1263 bp, Heterodera glycines
  unsure (1)..(1263): unsure at all n locations
taaaatcattttagaaaaaaaaacacgatatagcttaaaatttactcattttagcgaaaaatcaacctgaaaagcaaaatttcgctttttttgcttatcttggacataaaacgatcaatttttaagaaattttaatttagtcaatattttcgacaaaattttgctaaaaaatgactttttcggaaattttttcggtctataggggtcaaaaaggccaatttacccgataggggccgttctaataggggtattttgaaaaaatgcccaaatatgcacataaaatatgcatgaaatgccaaaatatgtacaaatatgcataaatcgcgaaatatgcaaatatgcatatggaagtacggcctagaagcttcaaaccaagctaaaaacatggttttcgtgcgtttcaggcctcccacagtccaggaaaaaaaatatgcatgtgcatataattggactccctacttatcatataccgatgaattagatatagtcgagaggaatcgaatggtccttgtttcggggttctacgatttctctatcaaaagttatagcccaacaaattttgtactggaattgggctgagcacttttcaaatgaagccaaggtaagcattccgggctgctccacggcactcggggctttttctggatttttagagatcctagacatgcttatgggtttaaaaacaacatattttttctgctttttcgaaaaatcattgccaaaatcacacgataaaaatcattgataaaatcataggcaggttcttggtcagcgcctaaaactccctggaaaaatgctttcctttgtagggatattgacattttgatgagggggagggtaacaaaacccggaagtacctaagaattgacaaaattttaagagtgccaggtttccatatttaaatgtttaatttttcaagtaaaataaattattaagcgttaatgatgaaatcactgcataatttagttttttaaaattaatatcatagtgcccaaatttctggtgcctaaacttcatgtcgcctcttccgttgttccttctcatgtcgatccgttgagtaataattagatgattagcgagtgaaattagacattattggctgttggtattaattcagttctcatgattctgatttcgcgctattgttcttatcgttttgatttcaaaaattcatttgcttttanaaatcgcncaatcatccagaattntttctttcacggcaaatttttcaatttttatcctttcngtcccnttcattttttg

SEQ ID NO: 18795 - DNA, 1799 bp, Heterodera glycines
gcaatggcaaacccgaaggtgtccataagtcaccctaattggggtcgatccaaataattaattaattgtctgtagcctcagggggaggaggagcgggccgaacagcttcaggaattgctaatgggagaggagcagaaaaatgacacaaaacgcgcaaaaagctttgaggaagtgaaatcgaccttcggacaaatcgctgaggaacggcaaaaggaaatgctaatgatgcgcgaattgacgacaatgatttacaggtggttggcaggcaaaagggcaattaacgaaagttggcattcaaaaggctgttctcggctgactctttcactaaacgacttccgattggactgcaacggatggacaaagtgttaaaattagccaaaatgtacgaagaaggccaaatgaccagagaatcgtgggcagaacgaatgcaaacgcggaacatgcggcacttcctcgaggaagacatttacgaggtcgctaagaagccaaatggccactcgctaatgagttaaatggccaattgctaatgaaccaaattgtcaatcgttaatgagcaaaagagccaatcaatgagtacacaaatgactaatcattttgctaatttaaattaaaggattggcacaatttgcttgtgcgcgacatggaacaaaatgtgcttgaactgatcaacaaaattgaagaattgtccccccaaatttatcaaaagtcttcaaatgggactgcaatttcggtgctttttcccgttaattgtttttgtttactcattcctttgcccttcttttcgaccggctctgttcttctcttcggcaatgtccgacgcggctcagcaaacgtcgaacaattggccaattttctggacgatgccttcgaatgcattttcaatggcattcgtaatgaaacggcacaaatgctgaaggaattccaagtccaagattcgcttttgcttcccccaatgaatctctcccctttagcgtgccatgttggaacttcattcggcactggcaatacttttccgaaaggaattgcccgaatatttgcaaaatatggaatttggaccaaaatttattcggttagcttattcagtcattcattttggcgttatttttttgcagggaaaacttcgcccaagtcaacgttttcctgcacaaaatgaacattgagtattggcgtcaagagcccacttacagcatttggagctttttctgtgccctccccttttaattgctctttaaatgtttaattgtgcctttaggcgacattggcgccacaatgagtcttttccttggcgcaagttcgctttcacggcatttctcataaaaatcgcaattaatcattttgaaggtatgctgaccatcatcgaagtgctttactttgttctgcgacaatcgcgcatttacagaagcattgcggtatggagacaacgaaagaattcgctaaaaatgacaacagaagcagcggaagagaatgttggcacaaaaaacgaaggaaaagagagaaggtgcactgagaagggagaaggaggaaagaacgtcgattgggcactgatcagtgggaggaaaaatagggataaattggaaaaaatttggcactgatcaatggtgatcgttggtataattgaaataataggggataaatttggcactgatcagtgggaggggaaattggtataatttgaagttttatggctggcatttttaagaaatgcattagcaccgtgactccaccatgaaaattgcctaatttagaacctccacgtttatatgggtgtgaagaaagaagaggaaatcgaaatcgaaaag

SEQ ID NO: 18796 - DNA, 2776 bp, Heterodera glycines
cattttgaggtggccattgattcaaacacttaatcactcacccgtttcacgctttttaggctatcggcggaaaagggatacgaaaacagtgatgagcaagtgaccattctgagctacgcccctaaaaaaggtcgtttgtcccttttgtccctttgtccgttttgacccctcttcagatagcatttgtggggtcaccagcaaaggtcggctcgccacttggcgaagagttcgcgactctttgccaaatgtcgcaaatgctgggccaattcccgtggaccagcaatggaaattggcgggtgcaattgccctaaacacaccaaatgtaagcaaaacattcacttggcaatgtacttgctaattttgttacgagaatccattagcggattaattgctgggaggtcattgcttactttttcgaacggctttttctgccgccgacgttggggtttttctctcccccccccccattccattcattaatcctttatccccctcccccccccccccccttaggtcattggcatggcttggtctcacacatccgcagcttttgcgctcaattctgacgattctgtccaaatttttctgtctcaaagccttgatttttatgtggactctgaagtgatttctttcgaattgcataattaataattgtcaattaatttgtcctttcgagttcgccgtcatccaagtcagtgcgcaacttctcactttggtaaaaattacggatcccgtggaaacgcaagaattgcaattgcacacgaacattcgtggattctttgtgatcggtaattatctgctgctttgggatgacacaaaagtaagtcactaaataaaaaaagagcatttaaaattcaaattatttcgcacaattacagtgaaacattcactttgtgtccgccgctttccaaattaaattaatccgtctgtttttgatcagatttaattgatcacttttccaatattttttagatcaaataattttgtttaatttttcattgtttctttagtttattactatcacatttactttatcagattcacattgcctttttctctctctgtttttcttgatcacttttccttgttcattctctattttctgaacatatcattttgaccactttttcaatgttttcaaattctgtgtcactttttcactgttcatagttcgatcattttgaccaaattccatagttgttgtttttctaatcagattcaactcgatcagctcctttgtccctccgattcgcccctccaaatctctcacatcgccgctttcgatgtccaaaatgttcgtcaggctgcttatcacaatcaacacgtgatcaccataattggtgaccaacttttcgtctatactcttcaagtgcgttgtctctctctgctcgtctctttcttttcccaatttttcttcttcgaaaagggcacagtgaaaagagcgatcacttttcgcgagagcgaaggtcgtcctgaactgatcaatgtcaagggcaattggctttgtgtggccacttcgcttggatatttgcgaatttacgacctcacagaaaggtgggaaataatgccaagtggcgatgacaaaccctttgaacactcagcatgatgaaactgacattccattcgtccaatttgtttaatgtgatgcccaattttggcaaattggcttcaattaagctgaattccacgggcaatcgcgtcagtttcaccgttcagcaggcattttttgtcaaattaagcatttgctaacataaaaaaaggctttttgaggcaggcgatgagggcatttttgagcgtctatttgtgtgggaggcggaaaatgattctgtcggctatttttctttccacgagggcatcacggaccagcagaagtacgaagcggactctatgggggtcaacggggagagcggcaccgcggcacggccaaaaacggcggcaattcgcaaaatcgaaagcgaacagtcgcgctttcggatgccaaaccatctgccgggcaaccacttttgggatcaaatggacccaagactgctgatatgcgaagcgaactccgtcgggacgggtgacaaataaaagaagcgtcgttgtatgttgcgaatggcacttttgccttttcccccgtttagggcaatcgccggctgctccgtccgctgcttttggtgctttttggttgaccattttcgtcactgctgagcacggtcttcaaatgcatgacttgcacaagaagccgccaaaggcggattcgctgctttttgtatcggtgccgcatttgttctttttgcgaaacatcgaagtggaagaggaagacgaccctcaggtgaccgaccgaccatccctcattagcccgttaatcattggcatttgagaccgaacgttgcctttctcggctgattttgcgcaggacaatgcgcgagtttgttggcatcgatccgcgcgaggaaaaggccgtccgggcgatgctcgacttcgcctttttcctgtgcattggccaaatggacagcgcattcaaagcgatcaaattcatcaaaagcgaaagtgtgtgggagcacatggcacggatgtgcatcaaaacgcgacgcgtcgacgtcgcgcgcgtctgtctcggccaaatgggaaacgcacgcgccgcacgggcaatccgacgaacggtcgaaagcggcgagggcactgaagagcaaattgcgcatttggcagtggaattgggcatggcggaggaggcgatcggcctttttcagaagaaagaaggatgggacgaagtcaaccgattgcttcaagcaca

SEQ ID NO: 18797 - DNA, 903 bp, Heterodera glycines
aagccctgattactggaacaacgatcagttgtatttgccaaattcccattataattccattgatcaggcgttggagtgtccggtatctcgggggattacagtatcacggattgaattgcataattccacaaataagccctgattactgtaacaacgatcagttgtatttgccaaattcccattataattccattgatcaggcgttggagtgtccggtatctcggggattacagtatcacggattgaattgcataattccacaaataagccctgattactgtaacaacgatcagttgtatttgccaaattcccatcataattccatttatcaggtgttggagtgtccggtatctcggggattacagtatcacggattgaattgcataattccacaaataagccctgattactgtaacaacgatcagttgtatttgccaaattcccattataattccattgattaggcgttggagtgtccggtatctcggggattacagtatcacggattgaattgcataattccacaaataagccctgattactgtaacaacgatcagttgtatttgccaaattcccatcataattccatttatcaggtgttggagtgtccggtatctcggggattacagtatcacggattgaattgcataattccacaaataagccctgattactgtaacaacgatcagttgtatttgccaaattcccattataattccattgatcaggcgttggagtgtccggtatctcggggattacagtatcacggattgaattgcataattccacaaataagccctgattactgtaacaacgatcagttgtatttgccaaattcccattataattccattggatcagggcgttggagtgtccggcaccaggccatccattttccgctaa

SEQ ID NO: 18798 - DNA, 1958 bp, Heterodera glycines
  unsure (1)..(1958): unsure at all n locations
atgccagcatgccaaagaaaatttgatttatcacattgtaaaacattcgtattttaagtattaaaagggtaaataataattaaaattcaagttttacccactcataacgctcacttaaaaacttcaggattggtctttcttgaaaatttttattttaattttatttccaaaatttccccgaggcgcgcgccattcgacttttaatcaggcccataaccaaaattttagccaatttcgtgatttttgagtccataatttcctttaatatgacaaaaatggaggattcagatgatgccgataaacgccgccctggaaaacttttgaaattttaatgaaatttgttaataaaattgagtaaaatttcaaaaaactatccatttttcttgaaaatttttcattttggtagggtggaaaattatcagaaaaggaaattttcgcataaaatgcccatttagtttatgattcggtgatttgcgccaaccaatacggtgtttccgccgcacattacagtaaccaaacaacactggatggaacaatgttgacaaacaggtacggtagtaatagtatgggcattactgtatttaaatgtagctcaattttaggtattcaacagaaaaattgtggttccaacgtgtgaatttcacccacaattcggaggccgtcatttgggtacattcgcctgaccatgccgtactggacggtactcagtttgccgagattggatggcacattgacaattgttcaattgtcgagaatcaaggcccaattttggacacacatcgagatttggtaaaaacgaataaataaaattcaatcaaaatttgaatttttgaaacacaatttttaaatttaaaaatcggtgcgtacagaaacggccacaaaactataaaaattcgaaatttacgaaatataaaagttagaggttcaaatttttaaacccataaaccttaagtgctcttatgatcacttttttgatgtgttatatctgcaaaataatcttataataaatttaaatatatatatatatatatatatatatatataaacttaaaattaaaattaaatcaattttgtttttcacagttcgccagtgccaatgtgttccactggaatttttggtcaaatacatttgccaacaattcaaatggcggtgtccaagtccatctgccggatccgtgggatttacaaaatcggcgccatcattctttttggatgaccgaaaatcgttttgaggtggaaaatatttttacaaatattagattttaaaaaatcattttataattttttaaatttttcatttaaatttgcttaaagttacaacaaaaaaaaactcataaaaattggaattttgtatcttacgaaaattgtacccttagtattcaaaaaaaaattgccttcttataaaaatttttctgtaaaaaaaatatttactacaaaagccattttgctgaaaatttttgctcttttaaatgggcttaatgattttccgggaaattttttaatcctcttaagttttttgcagaatcggtacgacttttttttcagaccttatgaattttttaagcgataacctatcattgtggcacttctgtataatatggtcttacatttgtaggacgcagaaattattttattatttcgcatttctaaatatttttaaaaatattttttaattttatttttacaaattaaattttgtcacatattaattaattactttttttccattcatttagcgcaattatgatttcatggtgcagttgtcaggatattttacgtttgcaaatatttcttccaacaatttcacggataattatgcatctttggaccatgtaagaaatgcaataatttcaaaaaattttttttttgttttatcattttgtttttttattactaaggcctggaatttaattttcgcttttgtttttcctaaaanntatagcctccccccccttaat

SEQ ID NO: 18799 - DNA, 2891 bp, Heterodera glycines
ttacagtatagtatgacgttgttaaattccaatataaaatttaaaaaataaataaatttaaagaatagtgtacaagcaaatttaataatttatctttacaaaatcaaatgttaataaaataaatgtatcctttttataaaaacaacttgttattttgtatttcaagatgaaaaatgggagttaatgcaattaaaaattttggtgttttcagaatttaaaataaattgtaataccttattaaaaaatgcgaattctatcattattctaacatcgattttatatggtcgtccacggagcttaatggattttttgcgttcattttattatattaaattgtgcactctttgatttatggtctcattaaacttttttaccatttatttaataatttaaattatttattaagtattgcgtgtatgtaattaaaaattatgtccttacatttcttactttctttacaagtgatctatttttaagctccgtaacgaagtatacaatatgccactgtaatatattttttcttttaataaatgaaacatatgattgttatagttttaaaatatttattagtaaagaagaagaaatcaattaaatacgtttttataaaaaagtttttgtattatgatcttccaaaatttagattttataatttaaatatatcttttaattgacgggaaatggcttgtcgaggttatacatttatggcaaatttggcggtctctattcgttcgacataaatttccgaccttgtgatcccctctcaatttttatttatattttatttaatttgactgaataatcacgcttttgtttgtgcaatttaatttgatagattatttgcacaatgctatgataaatcgcttagctgacaataaattttggtttgaatttcgttaccccattggttgataatattatttaaacaatcaattgatatcatcaataccaaatttgaaatgcactaattatttgttcaaatattgacgcataattcattgatattactgaattttgattttgtgtggtttggtaagaaaccgatagcaacaggttttgggattattaccaaattaaattgatgaattatttattgaatcaaaactgaataatcaactctcccaaatcatattatcaaaactgattagtttggccaatttgataattggggattgatacttcactgccctatcacggtatgtcgccactaacgaaaatggccatatgcgattatggaattggcaaatatcctgtttctatattaatatattttatattttattgaaaaagtttgacattctctttttaaattctgttttcatattccagtattatttttcgtgaagataaataaatccaaagagagttgatttaccttgtttttcaaaatccaaatttgatgtgcatcaaagagattaaagttaaatttaaacaaaaaatttcataaattttattatttatttcatttcaaaaaaacatttctgtattaaaatggaaattttaagaatatcggttaattattcggtttatttttataagttttccatgattaaatatatttgcaatcagaactaaagatttttaagctttggattacaaatctcatgtatccgtgcgttatgcagcaagcgctataaattttttggcgattcagtgcttttacattttaataaatgttgaaattttgtaaaaataaattctgaaaaatatttaatttttgattttaaaataaattataattatattattaaaattgacaatattcatattacaataacatgaagcatataacactgttcatttgcattgtcaataaatcattaagcaaaatcaaattatgaaatataagactaaaattttgcttgaaatttaatatgaaaagaagaatttgattataaattctaattacagagttaagttaaaattaaattttaattttttatacatcgaaaatatttttaaatttttataatgttttttagttaccagacttatcgcgaatttgtcctttaacatgtacaatctggagttcaatgtataatattcttttttgtatatatgagaaggtataaatattgtttttctatttttaaaatattttaattttgctcttttcactaaaacttattatttgatctttttaaataagcaaattattattttttttaaataaactgatttttattatttatcattaagaacctagaagacagtataatttcttgaatgtgaaggaatttaggcgtgaaaatgcatgataaaatccgaaaattaactgaatatacaaattaaaataatattcgataaaatctcgaaaaatattatgcaaataatataccaaactaatgttttgttataaacttaaaaacaaaaaatatgaaaaccaaacaactacttgtcataaagatgactaacaaatgagaagttaaatttaaaaaataaatattatattgcgaattgaaaaaatgctataataacctataaaaattttatttattaaataacgcccattaagtaaaaataatatttacaatattaatatttattcaactaaacatttacattattcgagaaaaaaatttatcgtatgcaaaataaaattgattctattcatcttcaattagatatactctgattctgtaagaaaaatacaagaaaattgaaaaatatacccctaaaatcaactttcatgtcatttcttaaaatattttcaaatttttttttggaatttttaaacaaaaaaagacacttaattttccaattttttcatttttttaaattatttatagtaaaaacaaaattaaataaatatttaaatttaatcaaaaataacttcttttatttgataactttgattgttataggtatggttgtcacaataagaaggaaaatga

SEQ ID NO: 18800 - DNA, 1420 bp, Heterodera glycines
  unsure (1)..(1420): unsure at all n locations
ttttgagcatttttcgcgttttagggcatatttgagggattgtagtgaatattttatgcgcatatttgacattttagtgcatacaactataaccctatttattagtattttttactgttcattttgttttttttaaatggtgtcatacattttcttagtaaaaattctacaagaacctccgagccacaccttttggtagttcaatttagaactccgtcgttttacttacgcacatttcgcaagtggcccattaattttgtttctcgattttgctgttcacgaacaagcatcgccatgtcgtctctgatgctgttgaatgtggactcgtagtgaactcttacaaaatcagaaaaatgaattttacaaagattgatacaaatagattctaaatcagcaaaagctacgattttcctagcctaaaaaagcggtatttttaaaagaataatgtttgtcattttttactcatgagctttttttccgcaacttctttttaattttctatagaatatttaatcatggctcgaagatgtgagacttttagctcattgtcagtttgtagttttttgaggccaagaggaatttttcaaaatgggggggggggctttgaatttgtcaaaatggtgcaggattagcgatcccgaaaccctcagaaacaaattttcattttggtaatattgtcgattgcatcacataccttttctaaaaaattctttaattttgaaaaagcataaaatatgcttctagggcttttcggggtcgttaatcacaaatctggccctcatttcgtgcaattcaaatcgcggaaccccgaaaaactcacgaagcatgttttatgactttttttcaaaatttcagaaaggtatgataccatcggcaatattaccttcattttaaatatttgatcattttacatttagtgtatgaatttaaattattttaattttaaatttgtttatgaaatttgttggtaaataaaatactgactttattgcttgcaagaggttgggaatctgctggtatttcgcaatgacctccctcatttcccggttttgtctgctgattttcctaagttgcatcatcaaaatgttttgtcggcgcagcaacaccaccgaatcgcatttgcccctaattaaaaagagtgtcgatcgaaatgttcatggaacaaaacctatcgagggaagaggattcgcctgcattcaaagcggacacagattccaacaacgcgccaagttcggcgtcggtttgcaccgtcgcctcgcgaaactttggtttacgaccaaaaggtcttcccattttagcaccaggcagtagtccatttggacgcttttttggtggcatattatgtattatttagaaattaatcttttctaaattttaaaaattactttcattgtgtatattgtagccacaanntatatag

SEQ ID NO: 18801 - DNA, 1263 bp, Heterodera glycines
taacacaccgtttcaattttggcctcccagttccaaaaagatttgcatgtgtggcgaagtggtttttgtaagatagtaaagggacaaagggtggtggttcgagtccgttgtgcaacatgaatatttttatttatttttgtccaaaatattaaaaaatgacgaattttgggaattatttttgaaggtttttcccaaccaaattggaaaaacttgatatcattcgaaagctctttatgagaagaagctttttctaagcaactgctaagcaattggattgattaggaaaaagatatgagggttcgaaattttgtttctcgaataactttttagttaaccctttttttgcgtttaaaaacccttacattttgtttgtaatttttttctctttcaatatgcaaaatttgaagtggatctaacaagcagaaaaaaagttaaacaggatgaagtgaattcagtttttctctattgacagagataaaaaatagtatgccaaaaagagagatgtttttttctctgcgctctctctttattggttcatctctcgttttttgaaacggtgtgataattagcagctattaattcaattaataagccttcatgagccttttgcttattgtaactaacattcgttaaattacgttctaagtaacgcagaaatagaaaaataataaatttataaattaaataaaccaactcagagacatccagcgttttcctcatcatcttttgttatgtttccttgtacagctctcaaacatgcgcagcagaatttttgaaaataaaaaagtaagaaaccaaaaaataaacatggaaccgttttattaaaaaggcacaaaaatgatgcaccaatgtaattatggcgtattaaataaagaagttaaataaaaaaattaaattaaaaagtgagatagagattaagagagagggaaagggagagagggataaaagagagagagagaaagagagaagagattgagaggggagggggaaaggaaatgagagagaggtgggggatgggggagaagagaaaagggggagagagagattgagataatttaagagagagacagggaaagaaatcgagagcgagagatagaaaggagggagagaaaggaagggagagagagagacaaaagaaaggagagagagagagcgggagagaaaagagggagagggagagaaaggaaatgagagagagagagggaaaaggagagagggataacggaagagggacagagagaaaggaaaagagaaagaagagat

SEQ ID NO: 18802 - DNA, 1202 bp, Heterodera glycines
cccatggacggcgtcgtccggcaacaacagtttgatcaaagaaatgccgccgtctccccccgctttatctcattagtatgatgatatgatgacgcgcagcgtggacaacaacagcataaaactcattaggggaagcagagacagcgcacggcacgggtgccatttttggcattggcacttttgccgccattgtttgtcggcaccgccggtggcgtccattttcgctcatttattttttcttcggcatttcttctattccaacaactactgccttttcgtgttcagaatgcagctgatcattctgatcagcactacggctgaacgctcggcagcaggtgagtggagagagtggagaggagaatgtaaaatgaatgtttcccccattttagtcgatggtttttattggccaacaacaacaaaaacaacagcagcagaaaacagcaacaacaacttctgggccaacaattacaataacaacaacaacaacaacaacgacttcaatgttggcgatcaacaacagcaacaacaattcggagcagtacaacagccagcaagcggtggaggaggaggcaaggaaaacggggacaaagaaggagaccgggaaacggggttgtgctgtctgtgtgcaagtcccgtcattacggaatccataatccgtattatgcagattttctaaattacggaagtccctaattacggggtccaaaaaagcgtaattctctgaataaaaataaataaaatttaacatataaatttattgattaacaacatttttggcaaatatgtattgtaaattcatttttaatggtttttctaatttcttaaaataattgtccatttgtttcttttgcacagtttttggaattattttttgtctatatttatgtccttaattggcatttttcagattcctccttcaacactctgtcctccctgttgtttgcgtccgccggccttggcacagtgcctgccgccagcgctgtcgtcgctccgggcgctcccattggcattgtgccgttgtcgcgcggcgtcggcggcggcactgatctcagcccgatatttggcaattttgaccggaacggacgcaataatttcaattttggtggtgctactggtgcggaggagaccaccgacgacactggcgaacagttcacacctttcccgacactaatcccggccgacaaagtgcgccaattggtgat

SEQ ID NO: 18803 - DNA, 1441 bp, Heterodera glycines
tgactgattgctggacgatttgatcatgatacatatcaattgacgatcattaaatacgaaatgagaaatataaaacgatcaaacatagaagtgatcagatcataaattatggtccatttgatagattaggcctataaattggacaccgacggaagaagagctgatttttttaaattagattatttcttgaaactaaaataatgggattaaagccttgtcaagagtgatcaaacggctttatccgttttattttccattgacacagatctaagcatgatgcggagcatccccgtgttcggttatgcccggcgcggcggtgccatggcggctggtggaacccaaggaacctttggcggcactttttctaacggtgccccgaccggctttggcactttgccaataaatggtgcggctgggtttggcggcaacagcaacaataatgataacaacaacaacaacaactgtttttttggtgccggtggtggcgaatgtgccaatgcgtggaaccaatttggtggtagtgccaacaacggcggcaacgacggggcgccaggcgatggagaagaaatgtcatcggcatcaatggttggcggtgccggctcattttatgtgggggacggagatggcggtgcgtacgaatatccgttagttgacgagaccgacgcatttggaggagcaccggggcgacggcaccagcagggacaaacttttggggggtcagtgttatgggagaacagcagagttgccaagttggccaagaaaaactgggatttttgaacaagttttcgggctcattgcccggcacttttgggttcactcattttattttgaatttaaatgaacattttgccaaattttttaaaattctaaaatgccgagggtggactgaggagcgggagaggagttgatgctttgtcaaatattttggtatttatttgaaaattttgttttttcagttacatgcgaggaagtgccgaaatgcgtgggggacagatgccgtcgccgtcctatcccaattttggcggctttggaggaggaggaggaagaggaggagcatatgggggaggagggagggaagagtcaccggaagagtgggaggatgaaatggtcggaggaggagaaggagggacagaaatgggacaaatcgaaaggggcggcggaatgccattttggatgggtggcacaatggcggcaggtgagacaacagacggcacgagaacggacagtgaagaacagcagcggtacagccaatatttggttggtcacacatagagcatttattatagagcgtgagaaagagagaggataaagcgagagagggaggaaagagaaatgatagagagagagagatagagagagagagagagagagagaaagaagatagtctctattgatcagagagagacatagagaaaactgaagaaagagagcagagcaagtt

SEQ ID NO: 18804 - DNA, 2247 bp, Heterodera glycines
ggccaagtttaaaccgaatccaaaatgacttcgaaagaacatgtaattttgttggacgactaatattttcaaagcgtttgccatttgggcaacaaatgaactcattagtaaaaatgttagcatcattaaagcagccatttgggatcaattatttttaatgttgcgaaagaaatattcaatagaataattaattaatcaagccgtttaaatatataaaatcattcaaaattttattttattttagccaacaatttccgaacattgccaatttaatgaaaaaaccaaattccgcctcatttccactttgcttgattggtgtccacgattttccaccattaattggctgaaagtctccatttgtcacatttttactgccattacgacaaattcccgggaaattaaaaaacaatttgtcattgactaaaattaaaaaaaacaatcatttccgaattaaaaaggaaaatattcaataaattaatgagaaaacgagaatataggcggtttaagagaattaattgttggcttcgaaagatttcacttccctcataatttttttttacatcaatttcaccggaaatgtaattttttatatgtcttttttaaaaattcaattttggcaatttttgggcaaatttttatttaccgaaacattttagggatatattttttgaatgttatttttaatacagttcttaaggatttattttctatttttattggatttttatctgtttttcgtacgtttcagaccaagggcataaaattttttgatattatgaaaaattataaaaacgataaaaaacgcattccctttttatcaccgaaactcgagacccttcaattgttttagaatttattcgtggcattacccgaaatttctgacccaatcggacttttaagtggtaataaattccacagatttctaccaaatttactttattagtctcattaaaaaaacttcatttcggagcagaaaaaaggtacatagttcaattttgttttttataacttggtttttgatataatgcttgtgcccatgcccaatacatatttcgtaataataagtttaattcattgttccgaaaaggaaaacaatacatatatttgcatataataaacgaatatagagatcgaaagctaaaaatggttcaagaaaagaaataaatcatctgcatgggttccctggctctccgccgcattagcatcgcttcggcgttttgcctgtagggcggcctctgctccctccggcacgactgctaccggccttttgagctgctgctgcaataatattatacatgaaacagtagggggctcggccgggtcaaattgtgccaaaaaagcgtgccaccaaaactccactggccaatccgcaacagcacacagactcaccctgttgctgctgctgcaactgaatttgttgttgctccctctcggccgccgcctccttggccttcaacacttgggtcacacatcgccagccggccaaccgatcgccatgccgttccaccaatttgtccaccaatttctcccgcttctgctggtcgttgtcaaccagttggagcagaaattgcagaatttcctccacttgggcctcgccgtccggctccagcgcctcctcatttgtcaacagtctgtcaatgatggccggcacgttgttgtacagggcgttgtgctgcaatatttcaaaaaattggttttacaggcaaatgtctcagggcgtaagtgtcggaaggttcggacaaaaaccgacctttttgctcagttcacagaacagtccggtggcaactgtgacaatttgtggagggttcgcgtcgcgcttcagtgagtaggcaatgtcggcaacgcaggcgctcactttgagctgatccttcagcaacaaatgcgtgcacatcagcagagacgtgtagcggacgccgttgttctcgtcacgaaccctttggaagggaatggagaaattagtaataaaattgaaattaatataagacggattaggcaaggaaggagtcgggaccccaaaaaagcatttaattattttaaaattgaggagcattgcattattcgggataaatgataaattaaatttgcacttttgaatgaatgtgtcgttgaacttgttgaacacgttggggaagcggaagcacaggtcggtcatcatcaccagcatgttgttgcgcattcgtaccgaagcggcgtcataaaaggagaaaaaagcgggcaaaaatgttttacaacagcgaacactgaaat

SEQ ID NO: 18805 - DNA, 825 bp, Heterodera glycines
cagcagtgtgcggccaccttgcgggacgctcaccgagtcgtcattgaggcgcccgcgtgcctcccagagcaatccgagacggaattggacgggcggaatggcgcccttcttcgacgccaacttggcccacaaatgcaacacacgggcacgcaccagtgccgacttgtccaccatgtgatcctatcgggggaggagattagcacaagagaacaaaaaggtaaatatttaaaaaaaacttaaatttcgtgaattacgctatgaagtatgtctaacgcctcggcggcattgaattaaaatttacccagccaaaatatgaaacaatggcactcaccagcaaatgggcaaaaagcatgtcccgctgatcactcatcgtttggtccaactgctgacagtcgaagcaatggaggagaatctcagtgaacacaaacaagacggagttgcgcaacattgggggctaaaaaatggaaataaaaaagcaaattaattgacaaaaagttaaaatgcaaattaattaaggggtgaataagtgataatttgttgaatttaccaacatcgcttttcaagaatggcataataaatgccaaattccgttgcatcagccgtgggttcaactcgaccgtcgcactgatgaacagcgcgaaggcacgggtcgccgtttcggttgccgcacgaccgcccgtgccaccaccaccaccaccaccaacactagtccccgcacctgctaatcagaaaataacacttacaagtagaatatttgagtgcgaaaaatgcattcaacaaaaaaaggcgatttttttttgtttatgaaattcatcaaaatcatta

SEQ ID NO: 18806 - DNA, 2564 bp, Heterodera glycines
  unsure (1)..(2564): unsure at all n locations
ataagggtttttaagacttaagtggtaacaaattgatattcncaaagggtagattaatcgcccaacaacctgaagctgttcaaatattttgtccaatttctgaataagttcnttcttcttcttttcttttccaatcatgnaaggcattctagatacaaaattacataaaacgaatgaccttttattgaagtaatatcactgtttccgcagctcggcaataataaaggcatgcactttggcaagtcgcgctcgctttataaggtcgttcaattttctaagaaccgcattccgaggcaaagactaaaataatttgaaatttttaaattcaactcttgtatgcctgtaaatcgacgaataagtcgtgttgttcatcttggaaaagccgtcgatttatgtcatagtgcaatggatggtcccaaaaagtgccaatgtaaacacgcgcaacttcaggcgttttgaacaccttgaaaagaaagtaaacaacaaacttcctgtagtgttcacttttccgagggaccacatcagtgcgccgtaaacacgcatcagttgctgatggtcgaccatgtccgacttgtttaacacaattcgaattttgtcttcattccctggatttggttgagttaagcaacaaaatatagcaaaatgatgcctgaaagtgcctcaatacagcgtttgaactcgtcggaaatatccaatttatgtgcgtcgaaaagcaaaataatacgatccaccttgaaaaatcacgttccgaataccgaactccaatgttaacaaatatttaaaaacccactcgttcagcgaaccactcaaggacgccagaaaaatcatagccacgatcaattcttaaagaaaaaagtaaatggaaaaaatgtcttatagaaaccgctgtttttcgccactcaaaattccgggggtgtcgattattgtcacaccatttagcacttcattcttcagcatcgaacattgaaaacggtttaagaaagcatttccaaatctgaaacgccattaaaaccattctaatgataaagtattaaacaaatactttgtcagtgctctgaattgtttagtggagtcgacgacaagcgcattgccaggaataacagcttcttctaaagttgctcaaatgaacagaaacgggcaaagttcaaaaccttcgccgtacatcaccacctaaaatcatttaatgtcgaagtaaatgttttatgttatgctggtcttacgatgaaacgatcggtggtcggctctggaccaattctaattccaggaaagttctgttccaacagatagcgaatgaatcttaaatcttttgattgtcataatcagtttaaaataaaagacgtcgttttcccagttgaatactgtccgaccaacaaaatcatcggtttggcattaaagtcgggatcatctgaaatggtaatgcaaaaagatggaataatgcgtatttaaacaaaacccaaagcgggcgaatggaactcgtgaaaccgataaaaatcctccaatggatacagcttctgcttgtagattttcttcaggccctcgctgacagtttccagaacatcttggtcctttttcttagtggtgtttttgcctagccaagaaaacattattgaagctgaaagagagaacatatcaaacaaaaccaacacgttcaaatgatggaattgcgaaaattttcaaatgtcattaaatcaataagaaacggttgatggggagagaattgaaatagaaaaaatgtgatggcaatcgggagaacacacgttttttgtgcgtttcaggcttttttagtataggtatatgatggaaatttcgatggtttaccataggtatgtgtttaattggtgtaatgaaattacctaacgaacgattgggtgagtaataacgaaagaggacttggagaagagtgaatgactggacctccagaagaacaaattcaaaaaaatataaattactgataacaaaagatacactaaaaaatggtgtacggacatttcgcctactcgacatctcgcctactgacatttcgcctactaagccaaaaacattcatttcgcctactaacctaaaatacctatatatattttgacaacgaatttgaccatatatattctaaattggttcatatttagctattcttatataataattaaatttaacctaaaagtacacgtaagaaaatagatatttattaaactccaaagaaaaaataaaaataaaatgttgaaaatggtaaaattcaatttccattggcatcatcagtttcttcatcactttctttatttccacggatgtgatcatttgagccctggggtgcacattccaaaacgaaatcggaaactgtagaggacattctgttcgagcactgacaacagctaaaattaaactgaattagaaaagaacataggtatgggtaacagttgacaccaccaacgaatttgttctaaatattgtatcatcattttctctgaattttgtcgacctgttcgccatttggtcgagcgcttcatggtgccgagcaattcgaagactgtcagtccgaattttgtgcgcggagttgacatgggttc

SEQ ID NO: 18807 - DNA, 3469 bp, Heterodera glycines
gaaggccgttagggactgtgccccggtccgtcccccccaaccactcccccattcgtttagacttttacaattagcaatgcatttcaggacattactttcgtgttccatcaaaagtcccatgatggtgagacaaacagatcaaattcaccgccagcagacaacgggaaaggacggagagatggggcggaagaagaggacagagaaagcgagggatgaaagacagtggagagagaggagaagggcagagaaggaaaggaaagacggcgttaaaattttaaaagttatttataaatttaaaaagcataattttaaataaattattgtactatgtgattgatttaatggaatgtgcgcagttatgaccctaacattccaatttcccccagggtttgaccgccgtcgtctgtctgtcccgtagattctccgtcaaagggggcgggagggtgaaaagcaaacattcgttcgctgttttgcccccgagggcgggtgactcatcgctttgctttgcttcttacattctctcctccctcgcccctatctctccccattttccgtttgctttaaaattctcccccccccccatttattcgtcccaatctctccttcttcaactcgatcaatctgtgcttcgttagcttcaatcggtcaaacgcaattacatctttgaccgtaattaattttcaacccttaaataccattgtaattgctttttcccgcctccccccccctttctcctttactcttttccgtctctattctaccgcccagggatgtgcgaaaatcacaaaaaaaaattttcgtatacgaaaacgaaatgaaaaagggcattctacacgaaaacgaaacacgaaacgaaaaaagaaattttgaaaaccgaaaacgaaacacgaaacgaaaaaattttgacggacgaaaacgaaacacgaaaacgaaaaaataaccattaaacacgaaaacgaaaaaataaccattttcgtacgaaacgaaacgaaaaaaccgaaaattttttacatattcaattttaattaagaactttacaattgtatcctcatcctctaacagggaattgagatcctagtaggtggaaaagcggatgtggctctaggacaggggtgtgacgaaaaattttcaaaataagaacatcaaggacaaaaaataagatttagggtcaaaaaaggcattttgcattcgaacagttattttaacaaatattcgataaaaaggcattaaattttatgtcttttacggtaaaaacccaactcgtaccgtttcccaaaaaaaaaaatcgtcataacttttgtcaaagttaccaaatggttggttgacgccaaaaaacagccgatgtgccctcgaataaggccgagttcaaataatcggcaacttgctaaatttttgaataaacgataagacaaaaaataaataattgacattacccctgcagcttttgctttggtatcaattagcgacggcgtaggtgatggaatgcttcgaaatacaaaattactggtggactgttcgataaggaatgctttaaaagggtcgtcgttttcttcagtgaactccaaatttgtcgtcccatcggttgtttcttgttgttcatcaataccacttatggccacacgttccacctcttgcaataacatatccttgaaaatttccatgtaaatgtggtcaaaatattgcactttgtatgcagggtcgagaattgtagccaataacaagtccttattccgctcccaatctatacttaaaaattacggaattttccagaattaatacaaaatacctttcattctttcctctaaagattcggcaattctttttctaatttctggaaaatcatccacagccgtccagtgtgtcaaattttgtttcaaaactttgtataacggaagaacaccggaaataccgcttttccgattctgaatgtgcattgttgcgcgttaaattggttggagtattttgcataacgttctcatcattgtccactcgatactggtaaaacaagggaatttggcatcttgggctggcatcatttcaatggcctatttgttttcaagaaaacggctgaccattaaataagttgaattccaacgcacttcgacatccttaatcatagattttgcattgttatttatttgaattttattactttttgtaaagtttttagtggaagatcattttcaatttgcaatgctttgaaatcgtcagcaattatgcgcgattttcttatgcgacggattgcttttttcattcgttcctttacatcgaaaatcccaccaaggagctttaagccatctccaacagccttaaaatagccaaatatacacaaaattaaatgtattttatttaccaattgaattttgtgggcaaaacattgcatggaattataaccgagcaaattggtcgccaatttcatcgcaccttcgtcatcacgtagaatcaagtgtaattttttatcagtaatttgataagcgttcaaagtcttaaaaacacagacatacattttaagctttacccaaaaattaacttttgaaaccatgttggaaaaagttgtgtcagaggaccacgaatcaacggcaattgtaatgtaatcggtgctttcaattcgccttttaacattttgcaacatcaaggaatagctgtactgtaaaacatcatttgtgaaatattttctgcccctgaaaaaagttgatcatcgaaagttttatttatcaaattaatacctagttttatagtgaggaaccaatattcttaataaattttttagcccaggttcttccacaagcaatccagcagtacataccaaatcgttaattgccttgtcaattttcttagtcatttctccgtcgggtgtccattgagctgaaaatgttatgtaaattcatttaaaattaaattcctacaaaaggttttttcgatggttaattgcgacgagttagcagattcagccctcgctatttttttaatcactggacttgaagtcgcaaaaattcgttttaacgtcggttgtctcgggttcgcttccttatttttgaggctttctgcagccttatctttttcttccaattctttcaattttggttgatggtgattttttaagtgagaacgaagtaaagccattggatacccagacaatttttttgattcaaatttgtagctgcaattttcagaacggcaaaaccataaattgccgcttggaattatgtcgcaattaaaatactggagatatttgcttttggaagacattaataggcctaaaaaagactttgatgtgtagtaaaacggaacttataacacggaaaaaacggactaagaaaaatggtaattctgtagtttgtcccccccccccccctttttggaaaaaaacggaatgccaatgaaaaatctaccaacggggccagtagtataaggccccgggggcgggggaccagacccctgcccccgcttaaaaaatcatacatttcac

SEQ ID NO: 18808 - DNA, 2970 bp, Heterodera glycines
cattaaaagtcggtgggagggggagagacgggagggaattgggcgaaggtcaatttgactgactgaatatttgatcagttacaaaattataatgcatattagaaaattgaccaattgaacttctaggcatttgtggttttgggcttcagttcgttcgcttgtgcgaagaaggggaggggattttattgagaattcccttgggagtggggcactaattccaattgccctcattccacaacgagacccaccattcccggccatatgaacatttcggttaaaatcgaccaaattatctctgttcccgcttcgcagatgtcttcacatgatccgacttcgttttccgccgtgtcgctttcccgacctgaacttgaagccggtgttcccgcctccgcttgctgcccccaccaaaccaaccaccgcttcaacagacaacagcagcagcactgttcaaggcactcctaccgttgtatgttgagcatataatcacactaatgactttgtcttggtttattcgccttttgcttttttagctcgctctgcccgttggggtgccgtgcgaggtttacgtttcggcacacgttgacgctgggcatttctttgtccaattgcccacccatccttctttttcatcactcgctttgctcgactcgtacatgctcagcgtttacactcagccgggcggagctccggatttgccgaagccgtgcaacagtaattttcaacatcgcatctttttaaatcgtttatctggctgtttcctttcagtcggcgtgctttgcgctgccccggcgtacaacggatggttccgcgccattactttggcatacgaccaggtggaaagcgttctccaatcattcccattttaataatattttacctgttcattgtcaggaccaggatgagatgttggtccgtttcgtcgattacggcggcttcgcccgtttgccccgggccgatttgcgccaaattcggtcatttcccccgggggttttccagctaatgtcatcatctcttcccatttcagtactgactttgtgacccttcccctgcagggcatcgaatgctatttggccaatgtgcagccagctggtaattaattgtccctaattgggccaattatttcttagggcattttacctttcctttccgttcagatggctctttgcattggagtgacaaggccaacgagttgttccagcagttgtgcgtgtccaaaatcattcaggcggcgctggtgggctattgcaaaacggacggaattccgtgcgttgagcttttcgtgatggacagcgccaacaaaaaggtgggatcagagggcaattgttgtttattgctcaacgaattgagtccgttactcctcaaaaatccaggggattctcgggcgaaaaccctggactctagcaaatccctagtgctaatggactgtgggtccgttccgttctcaacggtgccaatgcctttttcatgccgtttcagactgtgcgcattgaccaaattctgttggagcgtggccttgccaaacagatggatccgactttgatagtgcgaacgccgatgctggtgtaagaaggggacctccgagaccagcacaacaacaacgaaaccaacctccggtcgacaattgaaattcacaaaggaataaatgatatgtttttgcattcggtaaaaatgtttttggacttactctctttttcctaactaaaaggatttaatagtcggatttggaaattcgcttcctatttattctctaattgtccgttcaattggcacagttttcaccactttttgctgaatgcattcatttcctagaaaagactccctcctctaaaatattgctcgttcattgtttctctgttttgttttgtttttgctgttcgttattattataccgtattatattttttatattcctttttaaaaacaaaatatttttatcaaataccccccaatttttactatatgatggtttactttattcctctcgacatattggacagatgttgttgttaggccaggcctcccctccatcacttttcaccaatttgaccccctcaccgtctggtggcggtggtcccctggccttcgttgtttctgttccatctcttcccccccccccatttgatgccctttttcgtttgtttgtttctgttttttcttcctttttgtctgttccatctttgctcttcttttgcttcttcgtttcctctctctctctctttccaactgtcgtttccttctccgtttttcttttccctgctactgatggttggttggttggtgatggttttggcaaacaataaaaatcatattttcaaatgtgaatgattgctttttgagtgtttgattggcaaattcaaatgtgatttgatcatttgacgggcaaaggggacaaaacgaatcgaaaaactcgtcattttggctgctttttggcgctgtgtttgtatttcaaattacaataacataatttgccaatttctttccccccccccttaaaaattcgaattttcttcgttataattttaaaatttccttcatttcgtcccttcaaaaccttcgcctttccccgcggttttccctctttttgtgtaaagttttaggatgataagaatcttttgatgggagtgccaagggcagacgcactgcgcagacagaacaaactcatccctcattattttatgatggaatgaattggttggcccgcgaggtcattcattgttttgtttgtttggacgccgtctgattttgattgggaaactgaatgaaatattggaaaattgccaaattggacgcgtgtttttcaaacggcaacggaatccgccgtttttgccggattttgcggtgcaactgactgcttggacttgtctgggataacagcgattcttacgagtattgggccgagtttttcgacattcccgagtttcgcgtcggaatgttcgaatatttgccgagtctcgacttctctcgatttaa

SEQ ID NO: 18809 - DNA, 1024 bp, Heterodera glycines
gcctggtggtgggcccccccccccccccccccccgcccttcaaaattttgaaaaaaaaataaaataataggagactcagaattttgaaaattttttataaaaactgatgacaagctaatgtgataaaacaggttaattcttttcctttcagtatccctgcaaagtttggggcgcttctgataagtttctgaaaaaaaagttaagcctaaactttttggcctgtttaaaaaggaattaaaaatttttaaaaattttattcatctcccttttcgatagaaaaagcatcagagtgcctaaactaacatgtaaataaaatttggtgcgtttcagagcattttctgaaaaaatatttatgaaataaaaaaatcgattttttcaagtgtccgtttggggtactcaaacaattatggggagcaaaaatccaacgcagaattaaagtacagactatagggaagctattcccgaaggattcggtctccccataaatctgggcgcatcggttcggggggactgccccgaaaacaaaaaaatcgattttttcaagtgtccgtttggggtactcaaacaattatggggagcaaaactccaacgcagaattaaagtacagactatagggaagctattcccgaaggattcggtctccccataaatctgggcgcatcggttcagggggactgccccgaaaacccaaaaaaaaattttttggataaaaattatttaaatgaactgactagataatatttaaaataggttatttctcttcctttcagtatccctgcaaagtttggtgcgcttctgatcagtttctgaaaaaaaagttaagcctaaactttttggcctgtttaaaaaggaattaaaaatttttaaaaattttattcatctccctttttgatagaaaaagcatcagagtgcctaaactaacatgtaaataaaatctggtgcgtttcagaaccctttctgaaaaaatatttaagaattaattttgcaaaaaataaataaaaacgaaagactcagattttcgaaa

SEQ ID NO: 18810 - DNA, 1599 bp, Heterodera glycines
gtaaccaactcaaccaggtcccccccgccacagttttcccgcccggagtaccgtaaccaggggcatagcacctcagacaccattccatataatgccaatcccttgtcactttccccatttttcaccacaactcttcagttgacttcgttcatcgacgggtcagcaatttacggctccacccaatgcgaagcggccgccctccgagcatttgaaggaggtcggctgaacacgaccaatttgggctcagtgaacacgttcgttttgagttgtcttttgtttcttgcatattcacgtgccactattttccagcgaggcactgccccagggggaccaagaacaggactgcaggggaaaggtcggtaagggggtgagggatttggaatagtttaaaaaattcgacattttatttttaatcggctgactaagtttaaagtagggtttcccccgacccagccccgaagcggcgaatctcgactttttaagaaaatttactcccgaccaaggggttgctccccgacattttttaaattttctccagccacccttgaaacaaatttgtcgtggcatttcctccccgatccttgatttttctctccccgagggtcggggagcaacccatcctagttcaaaggatgccaagaattgtttcagccccttttcccgtgttttttggccggcgatgagcgcaactcgcaccagcccggccttaccagcatgcacaatgtgttcctccgggaacacaaccgaatcgcgcgacaattgcaggttaattaatgcacacaaaataagagacaagagagtacggtactcagtcggagcacagcatgccaaataaagggtgacgtaatttatttgagaaatacgctactataccgtatctacctcaaccaaacacagaagatgaactcggcatggaatgacgagaagctgtaccaagagacgaggcgcatcatcggcgccatcttccagcacattgtcttccgcgagtatctgcccaagctgatcggccaacgcgaaggtctgtaaattattgtattgtaaaatgtatactgtattatattgattataccgtagtttctaacctcaaggcttaattggccaatttgattaaaccgcttaaacccttccagtggaccggcacgacttagccccgctaagtgccggctattttgcccgctatgatccgacttgcgacgcgtccatttcccatccgtttgccaccgctgtaatgttcagaaaatgccaaatttgactgctctaaatcattccaaaggcatttcgcttcgggcacacactgatcagacaaatgttcccccgactgaatccgtccaatttcgccaatttcactgatccggtggatttggtggagcacttcaacaacatggaatcggtgtacgatcagagaaggggtctgcataaagtcgagactattcgagaatgggcctaagtgttggtttggcaggtggcatcgacaccattctgatgggtttgttgggtgcgcgggcgatggcatttgaccggcacattacggacgcggtgcgcaaccacctgttcggcttccgtggccagcccctgtccggacttgacctgatcgcactg

SEQ ID NO: 18811 - DNA, 1176 bp, Heterodera glycines
tgcaccgcaaacattttcaatttgaaaggcacatttataatttcaatcaaattatttaaattcaaaaaaatgcgtttagagcagttggaagagatccgtaaggtcaggctgggctccctcttttgtcaggttggcattggcacttttctccccttttccatcgttttttttgtccaatttcggcgcccctttgtttcagaatgtcaaatcgttgtccaaaatccaaccggatgtgttctccgtgcccgaccttttggccaacagtcaaattccatgcgccgattttccacgaatgaatttggccaaatggatggaacgacgtttggcaccatttgaactttaaaatttttattttcccgttctttcagccgtttgttcgattggcaacgcccaagtgccccgaggggccaccaaattgaggtggaattgttttgtaggaagtcataataaaaaaatatgcaatttgcatttctaaactatacataattgataaattttcagttgaaattctgaatatatttattaaaattaatcaaaatttcgtaaattttagccaattaggcacagaaagcgtaaaaatgggtgaatttttgcgccagaattattttttaatgaaatttaatttgcaattaggtcgccatgcgtaaagtgcacgtgcacagctgacggaccaaagtgcaaagtaaagaagagtttttgtatttgaatttactttttaaaatattttcctaatgttaatttacaaatcgcttttaattaaattattttttatttcgatttatttttttcattttgccccaaggcaattcgcgtgctgaactgtcagaatttgttgaacaattttctgttggccgacatccgcgaggacaccgtctgcgtcatgcaatgcgcgtcgattctccgcaacagcagcaaaacagcagatgaaacataacactcatgatgaaattgtatatgtatatatatgaacgtcggataaataaataaaaagtaataatcaaaatgcccgaaaaagaaacacgcaaaccggcaacatatggaccaaaatatagaggtaaaacctgcctaaaatatatcttttaacccctataaaattccgaaaatgtatttatattcaatatttgttaaaacagactaaaaaatacactaaaaactgccaaaaaatggatttaacat

SEQ ID NO: 18812 - DNA, 3011 bp, Heterodera glycines
  unsure (1)..(3011): unsure at all n locations
agaaagcgaaagttgagattgatggggggggggcttactctcctccgaggaattcggggggaccaaatgtttatccgagcccagcggagacggctggtgggacagccatccattcccccgggggcaaatctgtggcaattaatggggcggctgtcatttggcccaagggacgggggaatatgagagggaaggatgggccatcggataaacaaatggccaaaagcagtgattgatgatgggcccgagcaaatagtggaaaatgtgaggcaagcgaaacgaaacggcaccgacggagggcaaagactgagggagaaaaagcggggcaaagcaaaagccatgctgccgaaaaaacggcgccgatcagcgaaaggaatgacggaacggccaaagagcgatttgtaatgtgctaatgggagaaactcaccaaaaaaacaaagcgaaagggcagcgatcaaaaattacacagggaaatcaacataatgtgaatgtttttgttgagcaaatgcttaacaaagtttgtaaatctgtggcacaaatgagtgataatggcaaagggacgacagagcgtaaaagtgagagccatcggcggacggatgaaggattaaattaggcatcacaataataataataacaattaaacaataatattaaacagcggtgccaccatcatcacattcacacgcaattgcccaaaggcccgtcaattgttggaacagtccctccagcgcagccctaaaaagcaaaacaatcagtccaccaatgccacagattattaatccgcatttaattaatcattggtgcctcggcactaactaactttgtgccttcaatccttttgatcaaatcgttcgcctgttggcgtttcgtctccgtactttcaccgggcgtttgcaattttcgcaacagaattctgataaaaaaattaatgtagtttaagagggaaattgggcctcctcacttcagttgtccgactaatccctcgtacaaattcattatccgtcgactttgctgcaccattcccagttgagccgttctcagttcggcttccaatttgatccgcacattttgcgcttccatttctcgtagcagcgcatttccaagcggaaaagcgtcgccgtgaacactaaacgaaaacaaaagaataatcacttcgaacccgaataaaagaatgggatttagtatgatttccctttgttgagttactcaaaatagcaatttttgaagaaaattctcaattttctcccggcggcatcgccggaccccaaaatcctaaactttctttaaaaattgtctcaaaatcgcaaatttatcattttttagacaaaaactgttaacaaatagcattacaactacaaaatttccatggcggtgcctatcggctgctatgagaatcgtaggtaaaaattttaatgttcgcttgctaaatcatgtgaaagttaataaaatgggacgaacatcggccgatcagtgacagtttctcttcccacggcgggagtcagcaacaaatcgacaaaactcgtcgttttggctgaaaaatgaaaattagttaagctaaaattgatgaaatctaagcgccaactactgaagctttatgcaaatggattcagtggggacgggggaatgaatgaaaggccaccccctgcccctacgcttcgtttggtttcgcccctcgcgcttcgttcgccacctttctcctccattccgggcggcggcggattcgggttgaccgtcgcaggcactttgaaacgctccgagtcgtcgacaacgattgggttcagaccgtggttaaagcgacacttattgcctggaaacaaacaaaatgggagagggacaagtcttcataatctgttgaaattgaactgaaatcactaacctcgcaagcaaaatccttttcctaaatgatgcaaaaactaattgtaagcaaattaaattacaaatgtatccgtaccaaaaaagtcgcggcattgggcgcgtcggtgctttgggtgcgcaggcttacgtatgagtttattagtcattattttgttgactcactaatcaaaaggcgagcgttatgctcattttaataaatgacaaactctaaaagaaacaaagttaaataaatgaagaagacttggcaaggccaaaagcagaataatgctttgatttggttttcgaaatcaatgataaaacatcatttttgaaaatcttatacatacatcatacataaggtattcatggtcagaaaacccgaaaaccccacagaggttggcttttcaccagattctccaatattaccgaaatgaaaattcatttgtccttaaaaacgatgttttctttctgcttgattttgtttgtccttttttagctgacatattcgtatataaacaaaattttagattaattttgatcatttcttattttctaatttgctcgtagattttcaaatttcccattttttgacattttgtacgtacctattttggtttttataatccgggctccaaaaaactatttggcttaattaggcaaaatccttggtcaaaattccataaatttcattttgttttttgcatttaagatgtacataatatattaaaatcgtccgtggtttttacggttggcttctccgttccttggattggattaaccggcaaattttacaccgactctctctgctcataatcgcgtaaattaattaactgattttttgttcattttaattttctgcatttaggaggacatgataatcgaaaagtttccagcagatcgtcaccctggactgctccagcgtttgaacgaattgaaacggagcgaaaccgtttacaacggcggagtgttcatcttgttcacaattccttatcggtagggcaaaaatgtgaatgttgatcattaattctattacccaatgcaaattgacagatattatgaggactacgcgtccatcactgtcaaccaagcagttaacgacatcaacgccatggancaagacgggcgttttgcagaatctgaagattgcgtacatcgaatgc

SEQ ID NO: 18813 - DNA, 2859 bp, Heterodera glycines
  unsure (1)..(2859): unsure at all n locations
agaagatccgtgaatacgtgtggcactgatcactccgtcgcatcgcaacaaaaaaaatcggcaacacaaaaatgnatccggatcanaagcagcagcaggatgaaaaaaagacagcagcggcaactggggactcaaacagccgctaccaccagggatgggccgctttgcctgaatacaatgtatgtcgtctaatgttcatctggaatcatatactttcacgtcaaatctaatgatttttatgctcacatttcccgggtcatctatgttacaaaatctatgatttttccaaccggtccctcttaatgatttttccactgtcactttccctggtcatctatgttactaagtctatgatttttccaaccggtcccttttcccgtttcatctggaatcatatactttcacgtcaaacctaatgatttttccactgtcactttccctggtcatcgatgtcacgtgaaatctcatgattttccaaccggtccccgtttcccatgtaatctggaaatcatataattccgcgtcaaatctaatgatttttccatggtcccatttcccgtgacatcgatatcacgtgaaaactcatggttttaccaaccggtccctaatcatatactatttcacgtcaaatctaatgattttcactgtcagatttctcgggtcatttattttatgtgagatctcattatttttctaaccttccatcaatgtcacgtcaaatctaatgattttcacaactggtccttttttccgcgtcatctatgttaaatgaaatctcaattatttttctaaccgattcaatcaatgtcacgtccccgtgtcatctatgttagatgaaaatctcatggtttctcaaaccggtgtcatctatgcttattttagccgccttttatctgcgtggacgcgtccttccaacggcatttgcatcggcactccaacaaaatattgaacagaatccaacaattacatttcctgcacacaattattgtcacgtcgacgccgacttcggcgacgccaactgagtccaaggaggctggcgctgaactgtcacataaagatgacaaaaaagagtcagcaaaagttgctgccaacaacagcagcagtagcagtggctacgagttgaaagtggaattgcccgacgcgttggacaaatggcaaattatgccgaattgggacagggattgtgatcgcgatctgttgatcggtgtacacaaacatggtaaataatgccaaataatcaatcagtcaataaattaattcaatccatttttagtcttagtatcaattttccgttaaaattatcggaaatcggaatcagacggcccaaaaaatttcggcaatcaaaaatcggatttttttttttttgtaaaaacaacaaaatgttaaatacttaattaattgcttcaaaatgatatttttcaaatgcgttttttgttctaaaggaatggaaaattgggagcaattgcgcgcggatgaaaagctttgttttacccaaaaaagcatccaatttccgaacacgatggacctgaacaatcgctttaaacacctaattaatgtgctgcaaagagttgccgtcgagtcatcagcaaaagcaacggcaaaagccccaccgcccgaaacaccaccatcagtggtgtaagtgttgctggggtgtcgttagagcccggacgggattggaattttgtaggattttcccgtggtccccgtcccgattttttttttgaagaaatgcctggattggaatcatgaaaaattggggtttgaattagggttaagccccgactccgagcccccgacccgacccgagacgttttttggacctattccccgacccgacccccgacatgtcgtcccccgaggtccccgacccccgactttttgccccccgaccccccgacactaattcgggggattgtggactcggagcgttttaaaaaattcatctacgaaggcggaaaaatattgaaaatttttgagattttgaacaaattttcttaataaaattcattaaaaattacaaaaaactttccggcggctcctatcggcacccggcggcccctcaaaaccatggtttcgatcggtaatttttcaaaatatgaacaccaaggccgaaaaataagattttagggtcaaaaataataacattagcaacattttttcaaatcagtaaatttttacaatttatttgatcaaaattcccattataaactaaggacaaaacgaggttaaaacgaagattttggacccaaaaataagattaaaaaaacggctttttacattgtaaaaacagggctgctaactgaaaattttcaaaacctgcatttagccaacaagaagcatcatttggggtcaaaatcagcactttggaaattttagtcaaaaaggaaaaacatgctttttttgtgacgcgctttttccgaaaaaaatttttgtacacaggtgccggcgggagaattttttgaaaatttgagttcattttgctcacagattttcaccaaaaatgaccaatttttgcgcaattttgagaaaatttttaagaacaattttgcggactggctgtgccgataggtgccgccggaaaaaaaaattgaaaattgggagtttttgatagcattttttacataaaaaaaatttttaaaactataaatatatttaagaaatttgaacaattttcgtcgctaccccaaaatcagaacattcttataaataacgtactcttgttggcgctaaatcagatgattaaagtgaaaaaaggaagatttacgagcatttaaaaataaaaattgagttttttgttaaataatttcgttgatcactacccacccgatcggggtccccgactcccgacatttgagctcc

SEQ ID NO: 18814 - DNA, 2964 bp, Heterodera glycines
  unsure (1)..(2964): unsure at all n locations
ccaatatgtaaaaaagggtaatcgagaagtcatgggataattaccatgataagaggtcattaattaaaaaaaagataaaaaacaatgatccacaatgtgcggtttttgccactttacaggattatgtgctaaaaaatattttttcaaaaataagctatttttcaacaacaaaaaaaccctaatatttaaacaagggatgcgcgcgccttccatattcattttttggcatctgtgaatcacattttggcaaattttaaaaaagtttagaatttcgcgttgcatcaatttttggcctcccgggtatattcctgatattataaatacaatttttaaattttttgcttacgactgaagctaatagtcagaatgccaaaacaaaataccgtacattatgtcccattccacggatggataataatcgtccaaatcaatgccatcctcgaccagcgcaagctgttccaactcgccccgttcattggtcacctccatttgagtctcattaacagcatccattagcgaaagatgaagcagcccggaagggtaggtccatgagccaaactatttttaaaggttaaattaaaatttggcaaaatttaaaaatgaaaatttgtgcctatttcgatattaattccatccatatttagtcattcgagatttttaacttaattttaactaatttgacaagttttaaacataatttggaaaattttggtacctttcgattgtgctccttcctatagctcaaaattttaaaaaatcaacaaaagtgcatgcggtaaagccatttagcgctcaccgctattttggtggcattgataaaaaaatttcacgaattttatgtcatttttacataagaatgaatattgctgcatccaattttattttggatatattaggtcatctcataattataagcatccttcgattataatcggtacaaaaaatttctgaattttcacattttttttgacatataattggtgtcattctaaagtttcatgggtacgtttgggtgtgcgagaaatgatttttaccgagaatcgagaccgagaaatgatcacgagaaacgatacgagaaccgagacccaaaaaactctagagatttctcgactcgagaatcgagaaatcttaatgaaattaatttaaatgtattttttaaattaaaaaaaaaattgctcggtttccgaggcaaaaaacacgagaccgagaagcgaaaaacccgagaaatttcccggatcgagaatcgagactctcctctacatccctatgggtcaatcagctaactttgagaacgcatttttcggaaattcttttcataatttttttaaatccaaactagacttttggtaaatcggggatggtaaaaatagtaaaacgagaaggaatagggatcatcattaaacaccaccgattatttaagcgtaaaacggagagaattgaaggcggcttttttgatcgttccgctaatttatgcagtgggaatggagcaaaagcttcattcccatagattgtgctttacgcgcgcctttttgttgattttaaattctgagatataggagcaaaaccgaattaacttcgatttttatgcatatttcccaattattttgcatgcatgtgcaaataattagtcatcctatttttgatattaaaatttattttaaaataatttgtataaaaaatccatgaattattttaaaattaataaataatttgatagctttttcaaattgtatattttgtcaaatatttaataatataaaattgactgactttgagaagacaattctgttcatcaaatgggaacctaatttaatgagaatttaatatctaattttttaaataatttaaaaccgataccattggatgtcaatctaaacaaaaaacaaaaaattaataattagtttattttttgaaaacgtttttgcctggcaaagtgacttataaatggctggcggttcccatacaacgcgtccatttggatgcaaagttgcctaaaaaatttaaaaattacaataaacattgtgccaaaatttatttgctcgggtgccaacaattggaaattcaatagggctattcgagattgttaggtctcgatctcgagtcgagaattatctcaagtttttggtgtatcaaatctcagaaagtctctatctggcgagatttcgagttttaatttttattagagatttacgtaccttcgtgtcaattgtgatattgaaggtcccttttgcattctataatttaataaacatttaagataattttaaaaaaactaatttttaaatttattaaaaattacaaaaataatcttaaaaattaaaattaaatttttaaattatttaaatttacaaaataatcttttaaaattattaaaaacaattaataattttggtaaaattaaaatttaataaaatgcgaacaaacatttttttatttactaaagaggataattttaaaaaaattacattgataagcacaatgtcaggcacctgaaaaaggaattaattttaaatttatttatttttgtttttgttttgcttaacccaaatcatttcgtatggcacataaagtaccgatacgccaccgtaatcgtccgggtcccatgcaagtttacggtcggtccacgactgtttgagccaaacttggaatttaatttaataactttaattacttttttcagacatattcatatttaaaatatataaaatttaattatattatgtgccaaagtttaaaaaaaagctaacacaaaaaaaaagttttttacaaaaataaaaatgccaaaaaaataataaaaacagaaagtttttcataaaacttaatatttatatgctataaaaaaatctatttattaaaaatatcgaattanattgtttttaattaaaatgaacctggaatagtcataatttggtccaattcatgctaaaacttggcaaatgatttaagaatttaaaatttgtttcc

SEQ ID NO: 18815 - DNA, 2019 bp, Heterodera glycines
agattattctgcctaggaacgtcttcaatttccgttacgtctaacgttcacaaaattaacaattcaaaatctggaacaacctgtagtttgaaaaccacgacgtaagcgaaatacgggaggatcaaattgtcgatggattgaagacaaaaatttttggctgtaaagatgaaaggtctaaataattattgccatgtttctcgatccgagatttaaagacaaagtttctgactttccggatcttttacggtaaacattgaatacaatcacaacatcacaacaaaatgattgacagcgcacgacacatacgactaccgtcgacgccgcttgcgtccaagaaaggccgaaatgctgatttttttgaatcgaaatcttccaaaaattcattggcgctatgtaatttcgacactgggtaaattcgacactgagtaatttcaacattaagtaatttcgacactacattttcgacacaaagaaacactgaactatttcaaaaactttcactgttttcctgcattttcgacactggaccatttcgacattgaggaaattcgacacttagagaattttttagaaagtaatataaaaaatttgaaaatgttagtatttataataaatttcctatttcattttctaattttaaattaactccatctcattctaaacggttgaactaaagccatcggatttacattaaaaaatattctaaacacccgccttattgcacaggaagagctacagtccaaataccaaattttttagtagcgtttgtggggtgggtgattgtttgggtgatcggagtttcagcggcacagtcacgatcacaactgacctaaatagacatggacaatcaatcggacgtttcttaagcacaaagagtgtaggatttaacacgaataagcactaaaatgccaaaatcaacaccaaaaggcgataaaaagatataaaatttggcatgtaatattttttaatgaggatcacagagaaaaggcgtattttttcttttgaactttagacaaatatcgcttctcgtacaaaggcagtttgtacaatggcagttcgtacaatggcagtttgtacaatggcagttcatacaatggcagttcgtacaataggctttcgtacaatagcgtttcgtacaatagacattgtagaataaaaaattttacaaaataaagcctaagattaagcttatgcctaagcccgagcatgcctaagcttaggactaagcctaggctcaagcctaagcttaatccgagagcttatgattattctaagcgtttataaaatgtcaaatgtacgaaattccattgtacaaaccgcccattgtactaactgcctattgtacgaactgcctttgtacgaactgccctgacccggcttctggcaaagaggtgagatcagcgatccacatccccgctccccgacctttttgggcctgcgccccgagctgtcctccctgactaataaccaatccccgattgcagctgcaggcgtgactttgacggagtcatggagcaaaacacgaacgctgtcttgtcaaaatgaagcgacatacaatgacaatacgaaaacgagtgtgaacaattctccaaggcgcaacatgggtttggcgtctgttggccttgggtacccaaatttcagcaagatccgaattttcaaattgcgcatttcgctgcggagttggaactaaattttttgcagcacaggatcacgcaggattattcccgcataattccatatccaaactttcttattaaaattttcttaagtataggttcattgtcttcttaactcgagatttttttccatcattttttgagtcgaattttgtttaggttttattcgaatatctcattatttacaaaccgattaccattataaaaacatggtggcccaaataacataattacgggtaacatctgatttcgtcagtgagtgatttcgtcagtatgggatttcatcagtgataataattattaagtacaaaaaacttttaatatatcataaattaaaaataat

SEQ ID NO: 18816 - DNA, 710 bp, Heterodera glycines
atattattcaaagccaatttttaaatttaaatttggtatctttaatgccagttaatgattttttctttttattcctttgttttgtttagagttgagcggtaatcggtaattgtaaaaaaaaccggtaccaacctgtaccaactttttcctccggaacggtaccggtaccggtaaaaaccagtaattttccaacattataaaaatttattcattaaataaaaaaataactatatgtatattcagggtgaccaaactttttttaaaattcaggataaaaaacactaaaattcaaatttagccctaaaattaagatttttgcaaaacaagtatgtcagcggccaattttccaattttcgaagggttccggccaagtaaaaatagatgaccttttttttgctttcaacaccgctttttcgcggcgcgttttttacaaaacttcttgggattaatgggggtccagcggtgtcaaaagtctccgccgggaaaaatttttgtaatttttaatgagtttattaataggttttatccaaaaaataacccattctttggttacacaatttgaataattattttgtttaattataatagaatacatattgtcttttttataatttcctattgcagtaagaattaaattttgtttttatcggtaaattaatgttttattaattattttttaattaacacttttttagttactcatggacgaa

SEQ ID NO: 18817 - DNA, 2517 bp, Heterodera glycines
  unsure (1)..(2517): unsure at all n locations
attcatttaaaatatctttataattaaatcattttttttgtttaatattgaattattttgggtttctattatttttttctattgtcgtttttaaattcacttttattaatattatttagaatataaatttataatctgcaaagaaaacgcttattcattaactttttgtattaattttatttttattcggcattttatttttgcaatattcgtcttcgcgatcatctcatcggtatgcattctcgatcagtcttcggtgaatgattgggcttttatttattaatttttgtgaattacatatattaatttatgtttgtattttttattacttatttaaacaataaataatctttctatcctataaaaaaaagaatgtattaattgtattttttaattattttgttttctcatataattcttgttttctttttttaaaaattatttatgagattttttacataaaaattaaaaatattatttaattttaattattccattcacatttaaacttctttaattgtttgatttatataaaaaaatattaatattaactccaattgaattttgcagatagtgcctatcgtataacaactcagaatttattagtcaaaaaggtagccaattaaataaaaaattttatgaatgaaataacctaataatagattgaaaatcatgggtagaaatcaactgcttgtttcaacaatatcaattaattttgtgatttatattaatttttaaataaatagcgttttttataagatttttaaataaataaatatatagctgctaagtcctcaacgtttactcatttataacttataagtattattttttataattttaaataaagttctcgaccatctttgatttaattaattactattttaaaaaaatttaaaagttgttatttcataaatatttttatttattataaaaatgaattaaatttaatatatttttataaaaatgtaaggttttttaataaaaaattttttgtttttttaataatagtaaaaaataaattattcagatcattttttttctaaaacaaaatattatgcttattatacaaagtttttattatattttcaaattttgtaattaaacattgttttattttataattttttcataagaaatactttattagtttattatttttatatttcatcttttaaactcatgttgcgtgtacattagaatgatttgaattgacaaggtgttttgttcatcaatttcttatatttataattatgtttattagtgtaataaaataaaatatttttgtaaatataaaatttttatgtaattttttacataagattttgattaattgatttttcaaatgaaaaaagtatttaaataaaagcgttttatttaatttttagaaaataaaaaactaaatcaaaatatgatcaccttaatagcccaaaggtaggtgtcctttattgagatcctgcagatgaactgccttatgatcaaataaatgcaaacattagccaaaaccggcttgatctattcttttttccttaaatatagatttaaaagtttttttagcacataaaaatccaatccatgttaatatgtaattaatataatcaatttccggatagtagaaaggtgatttgatttagataattattaattttattatgcttttatttatctaaatataattttattttagcaagaagcatgcaaatttttatttttggaagaatatagaaatatagaaggaaacttagattttacagaaaaatttcttgaatattgaatattattcatcaaaattcattaaaaaattgatttaaaaaatttaaaatatatgaaaaatttttaaatagacatatttttattatcgttcagaccatctttaattcttctcttttataataatttttttaatttataaaattatttttccaaataaaataattaaagtattacttattttcattgatgcttttaaattcgacatgacatcggaatgattgaagttcaaaaatttgattttttaaacttatttttaaaatataagaataaatcatatctttttaaatttacttactttttaatgaattctttttgtctttgctttcgaataaaaaatataattttaatcgaattattgtttaattatatattttaatttatttttttttataaatccagtgtatttttttttgtcaccgagtttagcgctattataaaaattgtttaattcataaagtaattttaaaagaatagtttaaatgtatttaattctttaattctacaattatttaaaccattattttgtgtttggtttagcatcagataattaaatttttatgaattatttcgatacaaatatatttaaattttttatcgtgctcctccatgaataatttctgaagatataaagttgtttaattatgataaatatttttanatttttatgtcagtttgaccacacaaaggtaacatgatggtatacggngtgtactattttgactttcacctctgatttagttttaa

SEQ ID NO: 18818 - DNA, 1673 bp, Heterodera glycines
gaattatatggcattccatatttttttcctggactctgggaggcctgaaacgcacgaaaaacatgtttttagcttggtttgaagcttctaggatggatttatatatccatattttcatatttttccatatttcgcgatttatgtccatattttggcatttatgtccatattttggcatgtccatattttggcatttatgtccatattttatgcccaatttatggcatttttccaaaaaactctaataaattattcacattactgaattttatttggcatttgagaaaacattcaaatgtgagcaactatgttccataattttttgagaaaatcacttaaaaattttatcgaattttatacaaggagattgcataaaaatccacaaatcaaattatcaaatttttgaaatcgtgcctaaatgtactcaaaagggattcttgggatttcagggtcgtaaaaaaattcagcctccgtttaaaaatatgaataaatgaaaataaaataaaaaacgctaccaattaaataagattgatcaattaaaatgacaatttagaatataaaaatttattttaaataataatttaatagaaaataattattgtttagagatttttgtcccgattgatgttcctttaatagcggaagtgcaaccagtataaataagcgcccggcactatttgccgtaatgttgttcggtaataaatagtaatttataaattcataaatattattttcattttaagcaattttgttaatatttgcgcataatttgcggtacgcaaaatgaaaaagaatgaaaaaacaacaccctaatccgcacctttttttgtcattaacgagcaatgatcaaaggcttttatcccgcctcttacctttggcttttgttccttcgatggaaaacattttacgaattcattttgctacttaattgatcgctttatttaatgatgtgataatcgctttattttttaatgtttcaccaccatttttatgcatttcactgagataaacttataaactctcgggacttcactgttacatttgacatttcgaagtttccgaatctaacctttggagattttgagggtcctaaaaaaatcaactataacattaatgcataaaactttgtcaaatacgaaaatttctaatatgagatacacaaaaaataaagggtgctatgtcgtaagttaaaaaccgtcataatgggcattattttaaaactatcaaaatagaaaagttttttattaaaaacttccatatgatggtttgttgaataacgacctttacgatgtttttttataatggctccgcaccaataaaggtacaataaaacgggcaaagattttccatttcagattttttacagagctttttatttcatcaacttttttaatttttcaagaattttcggaaatttgcaattattctgcctttattccctattagcatgatttgtttaagtttttttgtccatattttaatccgcactcttttttgtcatcaaagagcgatgatcaaagccctttagcccccttggctttcgttccttcgatgggaaacatttgatgattcatttcattctgctattttaagatcgctatatttaatgatgtgacaatcgctttatttttgaatgcttccacaccgtttttatgcattccactgagataaaa

SEQ ID NO: 18819 - DNA, 1586 bp, Heterodera glycines
  unsure (1)..(1586): unsure at all n locations
agtcaccgtntacaaaaagttgaacacacggcgaaaatgtcaaaaatgatttcttgctcaaactctcatattttttttctgaaccgtaacttaatttttgtaaaattttcaatatagatgcatgcctggaaactggttcttgttagccagtattttccttacatttatttttctaaattttgcataaaaaataagtgtacaggtacaacgaggaatacaagtgctagtacaaacatttccaatttcgaattttttgcaaagcttttttctttcctaaaactcttttttgatttcgacatcaaaaaatctgagaaatttcactcggtttcagcccgaaattccgaaataaacaacgattttgctcgtacatttttgtccatgtattttttgcagaatattttccattctgctggcagctcaattttgatatcattttcgcttgggtctgcatctttcattaaaccatagcccaaaaattggcaaaaatatttgactaaatttggcatgccattgatttgggccaatttttgggccaaattcatttcaccattagtgagaaggtaattaagcaatgttgttccgtaatatcccaacacattcaattgatttcggtaaattgttgacaatttggtgaatcgttctacaaatatttcggtgacataacgaaaaaatgctttgatgaaaaatgcttcttcctccgttggcacggcattttgtattagccaattgtccaaccattcgtttactctttgctgatattccaaaaaatggaacatgaatagaacttctttgtggccatacaaatgcttccatttctctcttttcattttgttttgtagaatggtgcctgattcgtttgtggaagaaatcaaattcttaaattaaaatttacttttattttttataaataattaaattttaatttaccacttgtttgtcaagtggaaatatgtgaacattaattaagtcttgaacattgcttgacattttgatctcaaattcgccatctccatttgtttggattgtgtaaaaatgaacaaaacaatcgcttaaattctccaaaacaattccattctcatatttgaaaaatggcactttaatttccttaacagcgtatctttgcgtgatgtaattaaatttataggcctttaaaattaattggttgattaattaattagatattacaataaaattaaatttattatatccatactttaaagaatgtttattatagaaatattatttattacttttgtcgttatatttttcaaaatgaagtaacattttgctgcagtatttttgcttatttcatcccaaataacaattttataattgccaggaggtgtcacttcgccagcataagttattgaaaacgcttcatttttcattgcaatttgccccaaaaaagtaataatcaaaattaaaaaatagacaaaaatttttcgaagcattattgaaactgaattttatatataatttaataaaaatatttttagatatccatcttttgacaaaaattagttttaatttatttatattattaattttttttaaactttaatatattaatattaaataaaaaatta

SEQ ID NO: 18820 - DNA, 1882 bp, Heterodera glycines
tatgacctttgtttttcgtttcagattttttggaattctttaaaaatttttgaaaattcgtcaattttttggccttcgggattttgggttagttttcgaaaattcataacaaatcgaagggtggataaattttcatgcaattatattataaaaatagagaaaaatcaggagaattttatgggatttatttgggatttctatcttaaaaagaaaaaaagttattccagaatttctgaaaattttcgatttttcagaaaaaaattcataacccccttctgaaaagaaatttttgaaaattaaaatactacaaaaatccgcaatttttttctttataatataaattttatttaacatttttatcactttcttacgaattgttacaaaaataaaaccgattttgggattcgggaccaaaggggtgagcataggatttttgagtttaaaaattttttcaccaaaaatcttcaaaaaatatgtctttatgggttatttgggtccctgatcacgaatacgtaatcagattttacttttgacatagttaagacctcagaatccctgtgtgattggggattctaaggcacccttatgaggaggggagaggcaggttcggacccggacggtgtacattatttttctatgcatttttgggttattttcactgtttttaattaatttgaagatttgttttaaattatttaaatttattttttttaaattaaagaaattattttttgttttattattaataacaaaataattttaattaaatttaatttttcttttgataaatagatttatttttaagcaaaattagatttaaaaatttggatgcataataattcatttcaaaataaagtaaaataaattattccgtttattaattaaaaaataaacttttacattttttattattttgtttttttaaaatttttaaataaacctaattctataaaattatatttaaaattatgaaattatttttgtacatctcataacaagttagacttttgtacctcttctaatcactgttgtacctttctaatcacttttgtacctcttttaatcactgttgtacctcttttaatcacttttgtacctcttctaatcactgttgtacctcttctaatcacttttgtacctcttttaatcactgttgtaccttttctaatcactgttgtacctcttttaatcacttttgtacctcttctaatcactgttgtaccttttctaatcgcttttgtacttcttttaatcactgttgtaccttttctaatcgcttttgtacttcttctaatcacttttgtacctcttctaatcactgttgtacctcttctaatcacttttgtacctcttctaatcactgttgtacctttctaatcacttttgtacctcttttaatcactgttgtacctcttttaatcacttttgtacctcttctaatcactgttgtacctcttctaatcacttttgtacctcttttaatcactgttgtaccttttctaatcgcttttgtacttcttctaatcacttttgtacctcttttaatcactgttgtacctcttttaatcacttttgtacctattctaatcactgttgtacctcttctaatcactgttgtacctcttctaatcactgttgtacctcttctaatctctgtaaggccaacaaaatttgaataacgggcgcgaagcgcccgtatgaaccaacaaactttaaataacgggcgcgaagcgcccgtccaaggccaacaaatttaaaaacgggcgcgaagcgcccgtctgagtccatcaaaatttaataacgggcgcgaagcgcccgtccgactcaacacaatttaaaaaacaggcgggaagcggacgaaaagcacaacaaaaattaaaaa

SEQ ID NO: 18821 - DNA, 2472 bp, Heterodera glycines
  unsure (1)..(2472): unsure at all n locations
tctgttcctcttccactttcagttcctcttccactttctcttccactttctgttcctcttccactttctcttccactttctgttcctcttccactttcagttcctcttccactttctcttccactttctgttcctcttccacgttctgtttctcttccactttatgatcctcttccactttctcttccactttctgttcctcttacactttctgttcctcttacactttctcttccacgttctgtttctcttcaacgttctgttcctcttccactttctcttccactttctgttcctcttccactttctcttccactttctgtttctcttccactttctgtttctcttccactttctgttcctcttcttctcttccgctttctgttcctcttccactttctcttccgctttctgttcctcttacactttctcttccattttctgttcctcttccactttctcttccgctttctgttcctcttccactttctcttccgctttctgttccgcttacactttctcttccacgttctgtttctcttccactttctggtcctcttccactttctgttcctcttccactttctgttcctcttccactttctcttccgctttctgttcctcttccactttctgtttctcttccactttctgtttctcttccactttctgttcctcttcttctcttccgctttctgttcctcttccatttctgttcctcttacactttctgttcctcttcttctcttccgctttctgttcctcttccactttctcttccactttctgttcctcttacactttctcttccacgttctgtttctcttccacgttctgttcctcttccacttttgttcctcttccactttctcttccactttctgttcctttccactttctgttcctcttccactttctgttcctcccgtacccggtttaaaaacttggacccggacccggctttgctggacccggaaatatccggacccagttttgcccaaatacccggattcgtctaatcctaaaattaactcattttgagatttataaattatttaaatttttattaatatttgtttatttttaatttttattcaattaattttaatatttaatttagactttattattctattaattaaaaatatttattattttattaattcaaaaaatcattatcattaatttaaaataacataaagttaattaataaaaaaaataaatttaaaaaacaaaaattagaataatttcaatataatatttgctttaaaataatcagaagaaatgggactcgaacccacaacaccccatgaccaaaggcaagcacactaaccacttgaccaccgggtcgcttgcctccttttaatttccttttcactttccttcttttttggcataaaatatttataattttatgtttaggtaacttattaatttgtctccattttttaaatgattttgcacaaaaaaggtcaaacaatagatttttgggttaaattaggaagaaagaattaatatttttaatatttaaaataaattatttttaataaacttaattaattaaaaaaaagtaaaatcattcaaaaaatgtaataaaataatggatgaaaacacccagaaaaggtgggacccgaaccgtcgcccaccaccaaaggcaaaaactaaaaatttatgctattaaaacagcaataatttagttggaaatatttattgaataaaagtaggagcagtaaaaaactgatgatgtaaatggaaacaattgataatgaactggggaaagaaaaggaggagacattttttgcttattgaaaaggcgaggttaaagaccacttgtgagtgtgcattacatataaaaaaaggaaagaaaggaaagtaatcaatttttatccaaaagtactttgctcctccatattttttattatgcctttctttctcttttaactcactcataaaattcttataagaaaaacatttaaaaaataaaattttaaaccgaataatttaaatataatatttgacgggaaaagcccataaattaatgggactcgaacccacaacacccaatgaccaaaggcaagcacactaaccacttgatgcctgccggttctcggcacagcaaagcactaatacggtgtttgactcacttcaaaaaataattcattacccaaaagttttttacaaccacatattgccaatctaatttcttgcagattgaaagccatccattgcataccggttctcggcacagcaaagcactaatagggtgtttgactcacttcaaaaaataattcattacccaaaagttttttacaaccacttattgccaatctaatttcttgcagatttaaagctatccattgcctgccggttctcggcacagcaaagcactaatagggtgtttgactcacttcaaaaaataattccatacccaaaagttttttacaaccacatattngccatctaatttcttgc

SEQ ID NO: 18822 - DNA, 2471 bp, Heterodera glycines
  unsure (1)..(2471): unsure at all n locations
tcgtaatattgctaaattctaaaatcccgctctatacgaatttggacaaaagtttataaaacatatattcgtcctcttttagaatatgccgctgaaatttggaatccgacgtacaaaaaagatatacctagataaattagaaagatgccaaaaatatttcacaaaaattgcgctatctaagtgcaggcttctttatataccttatggacaaagacgatctctttaaactacagacacgaagaaaggaggaaaataattgatttagttcaggcattcaaaattattaatggtcttacacaccttaaaaaggatatatttcctcaatgttctggtcgaatcccctacaatcttagacgtaaagttgtgttaaaatcacaatccagtaaaaccaaattcctttatcaacagaacaaccttaatatggtccaaacttaacaaagatataacagatgctccatctgttgacagtttcaaaaaacgtataagcaaatggattgagttaaacaaaaatttagtctgtaaaagagctccttggacttgatatttattactttactaaaatctaacgtgtaagtggtcaccccttcgttggatatttttatttcttctgaataaataaataaataaatggataaaaagttgcattatttttcatatctaattgcagaatgactattaaatgctttttgaaaatttatgatatttaggagccatttaattttgatctagcttcataccgatttatattatatatttatttgattatataatttgacaaaaaattaatttgcagataagaaatatttatatatataaataattcgtcaaggattttattctcattattattatgtttttttagaaatgaattaaatccatttttgttttaggtattgtcttaactttcgagtttttaaattgctgaatattcattttaaatgttaatatttagtaattaaatgaattttatttatatttggaaaatttattgcaatgattaaatttgtacaaaatttaaagtcatttattaaatatttacaaaattttattttatattcttatttttttcttataatttaaattataatgcatgttatttaaaaaaatattaaattttaaagttcaatggttttagtcttggaaaaacattttggtatcttattgttatgcaggaggcgggagttagtagattgaaaatgccaattgcataaaattactaatttgccatttctatcgattatttttacttttcgaaccttatattaattaattttctttaaaaattatttggccttataatatataaaattaattatataaataatttataatgaaagctaaggtaatatttcatagttttagtaaatgttttttttattactttttgataatcagcagcttaatgttttaggttgaacctttataatatttaagtaattttaagatttcttattttcagattacagaattaacaacaatttttctcggcgcaaataacacacaaattgaaattttacttgaattaaaatattttgcttttattattataaataattttgagataaactcactacctgtctgtatttgcgcacttgcgccttcattaaacacgaactttagcattgtaaattaatttacaattaattttaaaaccaaaaaaataaaattattaatataataaatatatttcgatttattaaatattataaaattattttatgataatttgaaagataaaaggcatagaaaataaatttacaaataaacccaaggacagaaaatttagttaatttatagaaattcttattcttaattattttaaataataatattggcaaataaactctaaaaactgaaatattaaattctttagtggacttttttatagttttgatatgattttattagttttttatatttaaaatgaattataaaaaatattttttttattcaaaaaaaatatttttttttatgagtcttatcattaataattcttttttattattattttatttgggttaaattcataaatttcatattgaatttttatataatcgcacaaatttatttaaaatttgattgatcagcgtttttacacggccgaagccgtagcttgccagttgagtctggcctggtgtacccaacacggtctgtcgttcatcccttcggccccaagctgctcaaaaccttctctccactccacactttctatcaccagagtatcgccaatttaataatattttggtttttatgtgttttatttaatttttattttaatgtttattattatgattattatgttatttcttttaattttcatatagaaaaattatatagaattggtaattttatttttaaatttatgggctaaacttgggatatttattctctgatttgcataggcatttccattattgttttgttgaactatctttagtggactnttttatagttttgatatgattttatta

SEQ ID NO: 18823 - DNA, 3340 bp, Heterodera glycines
  unsure (1)..(3340): unsure at all n locations
ctcgtgcgcaatggattctcggcgaaccaaaattagttagatggctttgttcgagtgacgaatgaagggcttaattaatcacttttttttttgtcagttgctntaatccgaaaaattggtcattcttacttctttagagtagtgatttttaatgaatgtcaaaagaaccaaggacgttagttgactggaatttaaaaaaaaacgataactcaactgagaatttttaaatttttattctacagtcatggtcaattattgtcccatccttccttcaaagatgattattaaattaaaagcattttctatattttctatgagctttcaaatgacaccatttattaggcaagttaagatttggtgccagactttgattttatactccattttcgagagggcataaactggcaggaaaatagcaaaatgcaaatttgagtatttcggagagaggaaatgttgagatgaacatttgcttgatgaaattggggcccaggtacaaaagcgtattgaaataaatgaagtgaaaaagcggacaaaatggaaaaaaaagaaggcgatcggagagcagatgccccgcggcggggcaacaaaggaaaacattaaaggatcattcccactccatcagtcggattccgtctcctgtctgaaattgccactgattgactctctccacagtccaaatccgttgttgtcgtcccatttccaacgcagtgcatggctaactcgtctcgtccgcgcattacttttgccaacgccgttccgtggtcgagcaagcggattacggtggtaggttacagtacccaaaaggccattagcgccggtccatccgtgctttgtccattgtcatcatttggtgttgcgaaaacggcactatttgtacggagaattctgagctgtataaactcatattgttttactattacctaaattgttttattgattaattattctaattgtatcttaattttttaatcctactttgctggggtttattttttgttttgtatttgctatttttattgaacgatggaagaaggacaaatggaaaccggagaaaatgctgcagttaaactcgtggatcaaaagaagtcggctaaaaagaaagtgcgtataaaacgaagaatttaatcgctatcggttatcacttaacaggtttatgtgccggggaattagccgaattttgaaggcgagcgaagaattggtatacgatgagaaggcgtatttgttgtttcacacattcgaaacgagtgagtggtcacttttggggtgtgccctaagcctagtatttgtgcaattcgttcattttcgtatttattttagactatccgtgtttaagttttgatgttttgcccgactctttgggcgacaatcgctccgattttccaatgaccgcttggcttgctgctggtactcaggttcattttgtgaaatgtttaattccaaaaatcttttttaggctgaccgagcaaaggacaacgaattgctggtgcttagactgtcgaatttgcacgcaaatgaaaagacattggaaaatgcaaagaaaatggcccaaggaaagggcgacgagtcggagagcagcagcagcgaagacgacgaggaggaggaggagacggagggcggcgcaaagagtgcgcggatgcacgcggcagtgatccctcaccacgggggcatcaatcggatgaaggcgagcggagggactgacagaacgggcgaaaaagacggcgggggggggggggggggtaaaatggcacatttttgccactaaccttagaaaataaattctaatggagtcgaaggtgataccgaaaaagtttgtagattttttgcgggagaatatctccttccttctttgcatggcatctgtaaaggagtccaatttttgcaatttatccggtcgtgagttacaataaattggtcacagtcaaaactcaatccggtaatctccgactttttttttgtcagtgccaaacaattggggctagcaatgtgtgcgccgtgtggaatgaccagcagaaagtgcagttgtggaacttggacccggccattgaaacagtgaaatccattggtacggaaagtccgtcgaaagtgcaaaaaatggagaaagacgcggtcaaacaaaatttgttgtttacctttgccggacactccgccgagggatttgcactcgcatggtctccgattcgtctcggcacacttgcttcaggggacctccgcaacaaagtgagtgatcggttggcttttcagaaattatggcaaacatttcgagaatttcatttcgccggcaaaacacaaaaagaaaactgaataatgttgtttgcagatatttctttggagaatgtcggagggcggccaatggttggtcgaccaacgtcctttggcagaacaccaaagttctgtcgaagatttgggtaattcgccatcggtggccaagcaaaagaattcgtttattcctctctttctgctaatttagcttggtctccaactgaagaagcacttttaatgtcctgttcggcggaccacacattgtcagaaaaaagtgaatgaattgtaagcgaaagtcttttaggcgcctttgggatgtccgagcctcccacaaagattcgtgcgtttgtacggtcaaagaagcgcacaatggcgatgtgaatgtgatcagctggaacagcggcggcgagcctttgatcgtttcggggggagatgacgccaaactcaacatttggtctttgaagacaattcaagtgcgtagaaaggggggggggggcaaagttaaggcatacgaacggaaaataagacatttattgttttaaaatgtatttgcaaactgatcaaaaagtgaagaggatgcaaaaacatccatatttgcccgaaacctcatgattttttttaatttcaagtacaaccaaccagtggcacaatttcaacaccaccaaaagccgatcaggttgaaaaattgattttgttattacaatttcattcattgtcagttcggttgaatggaacccgcacgatgggacagtgttcatggcatctggggaagatgaccaaataacactatgggatttagcacttgaagatgacgaattgcatggggaagtcgaggggggagaggagaagacggccccaaatgtcccttctcaactgctatttattcacatgggtcagaaaggtaagtcaacagccaaacgcataaccgaattatcattttaaatggcaattttcgccatttaatagtactggtttatatcgaattttgttcagaagtgaaggaagttcattggcacaaacagtgccctgggttggcattttccactgcgttggacggcttccacgttttcaaaacaatcaa

SEQ ID NO: 18824 - DNA, 2959 bp, Heterodera glycines
atggcagttgggggtaagccagctttataccatgctttacatagtagtagacgcgcacctaaagtgtattgtacacatagattggttaaatttaaataaatcaaagacaaaccgtaatgccaagataaccgcgcatagcatatgcagtttgagctggatgaattgttagttcgttgcaatggacgcgaatgtttttccaggcagggcgcagatgattggtgcgtaaatgaagattggaacgcaacatttccgaaatttctctacgtttgctcagcgtctgcagcagaacgtgaagctcattcattgaacatttgtagtgtttgcagagaaaatcaatcaacggcacactcttctgcttttcattgcaactgcacttgttttgtggttgcgggtgctttggcaactcaatgttgtctaaatttaaaaaactgtttttaatgtctaaaaataactaaataaacctttcacttgttccagttccatttgatcattttgcaattccctcgcccgctcctcctcctcctcgatgattttaagccaactcatttgtccttcctgaaaatttattttatttttttactaatatagttttatttataaacttttttcataaaaaaaaatacttgtgttgctttatcttcttcttcatttcctgttgtcatcttttgttccgggtacgcattgtggagccaatcggtcgcaagaatcgcgtccatttgtttaatagttaagagattattattattatttctgtaaagctttattgtgtatatataatattttttaaacatggataatataagataaaccgttttgcaaaaaaaaaaaaaaatggcagacaattttcaaaaatttgatgaaaaacacttacaactcagacacccgtttacgctgacaatctcagggagcacggggagtggaaaatcggaatgggtgctacgaatgctgaggaatgtgaatgcgctagtttcggaacccatctcggagattttctactgttatggggagttgaatccaaatataatacagcttcagaaaagtggacacatcggcggttgtagggttattgtacatgctggaagcccaaccgaagagcaggttaatcggcgcgcaaaagagtgtgatggaaaactgttgatggtgttggatgatctcatggttggattgggccaacaatttcttgacactgtgttcacccggggatcgcacaattggggggtcagcgttgtgttggtcactcaacatttgttcgcaaaagaactgcgggttgcgcgcaacaactcccactatttggtgctgatgcgtaacccggcgggcgcgctccaagtgcggacgctcgcctctcagctatttccaacgaaaagcaactatttcacggaagcataccgggatgcaactgaaaagcaatttggctacctactaatcgacatgcagcccgagagtccggaattgttgcgcctgaaaacgaatatatatggagagcagggtggtcttcccccattggtttatgttgcaaaatgaagcatgtcaaaagaagaagactaacagataaacatactatgaatgttagcccgctgatgttgaaaaatgctgacttcttacaccactttcgctcaaaatatcgctcaaaaagcagacagcgcaaaatgatagagaacgctttggatgagcagttgctctgttttgtggagatgggtttcaatgtgttgaagggtcgtgttccgttagggaagcgacaaattcaacggttgggtgcattgaagcaccagttgaggcgcttagcacgcgcacgttgcgcaaaaaccgcgcgcagagtactattattgaatcgtcaagaccaacaagtacaacaacaacaccaaaccggtgctggctttccggtggtagccagtatgctgacgagcattctcttaccaatgttaatggacaaattactgccaaaaactaattgataaatagataaaaaataaatatataaaagcgaaacagctaagagcactcgtttaattaaacatttagaagagcgcaaaaaatgcgtcacgcaatgcgaatgtttctcgtcccggaggacgtctttcagtcggtatttgttcaaccccaagcagcagcagcagaatcagacggtgccgacggtacaccaattgggcttttgcgctcacgcatccaacaaattgagcgtagcagggagctgaacgaagagcagaaggccgcgcaataccatcaggaattcaaacggctcaacaaactggtgcgcgagcaggaggagcagccgatcaatgttcgacttcagcacgaaaaggagaaagaaaaaaattcagcaacgccgccgccgccgccgccgcaaacgatcgatcattcaacgccaaaaagattggagaaaaacattgtaccatcagcgtttgggttgaggaggcagagacaccactacacacaaaaggcgggggcattatcaaatcgcagacctgcccaaaaacaacaaagaaaagcagcagcagcagcagaaacaccaaacagcagtggaaatggagaaacggaaaaagaagagggtgatgtagatgatggggaacagtgggacgatgcacaatcatcatcgtccacggcgtcaacaggtggtgccgcagcaaaaagagtgctcagagcaagagatggggaagcaggaaaaggaggaggaggagaaacggctgatcgccttcaaacaaaacacaactaccagatgaccaaaaatgcactgatcacacacattcgaaaaaaggggcacagtctgggagtcagtgatcagggaaaggttttgcgcgcagatgggtccgagtttaaaacgagcaacgtggaggcaattgtcagccatttgttgaacagggacaagcgaagcgaattcaaagggccgcctgtgggctataaggaatttgctgaaaaggcaagagaggatccgttgctaaaaaagtatttgtttccggaacag

SEQ ID NO: 18825 - DNA, 2918 bp, Heterodera glycines
cttttttctgcgcacttttttcgatatattaatcataaataacacttttccacctggtttgaagcttctacgttgacttttattatgccttttcgggatttaaatgcgttttttggcttttttttaccgaaaaattccattaaaaatgaaacaaaattgggaaacccctaagaaatgactcgaaaaaatttcagaaatgcacccctaagaattgaaaattttgtacaaaaaatttcgcaaaatcaatttttttttatagataaaaattttaaaattaaaaattttcgttattcgaatttataatatgtttaattataatcattaaaatgacaaaactaagttgttgtttttgttttgctccctaaaaatcattaataaaataattttttaaatgtccaaaaaatgttagtttttgctgcctttttgttcattttttatacctttacttacttttttcgtgcttattttaaaaattttggtgcctaaaattccgatctctattaatcacccatcgccgaatccgtcgtctccgatccaaatgtcaattcggttccatcgttcacccaattccttaatcgtctgctgtctctcatcgggcaaaattggacaacggatgaacacaaaacaatttgcatctttttgtaaaagtgccaatgtctccccggagaattcgttggtcagtttaaatggcacagcgaaagaaagtgaagaggacggcggaattaaaacagaaatggcgaaataaacaggagaagaagcagcggaaaaggcctaaaacgaagacaaaaaattaaaataaaataaaaagaaatattagtagtcaatcaataataccgctttgattcgctccaccatagataaccactggtccaccgctgaattctcaattctgacatacagcaccttcatcaaattgtcgggacgaggcgagaacagccatttggccaccgcttggccatccgacgcattggcactgtcgtcgggcggaaattcgggcaaaattccgacaccagccaaaccaacaatacgaagggctgggcaatcgttgagcattgacgggaccaattggcggatttgacgaagagtgatggggttcaaaatcatgtcgcgaatggtgtgcttgagcattggccaaatggtgagcagaaggaactccgaaattcgaacattttcagtgccaatggtcaatgacgttgcacaaatggcgaaaaaacggtgaaaatggccaagaaaagtgagcacattttggtcgatgaagctgaaaattaaatgaaattgtgattggcacaaatcattacaaaaattcattttttttttacaggataaaaatgcttccgaatccgatgactttgttcggcaacggattttgtgggattggcaattcttttccatcggaattgacaattttcatttcatttgcgccattctgtccaattttgcgtcgaattttcattttgcccaatttccatttgcgcgttttgaaatgttcgtcaacgaaatagtcaaatcggtgactgatcatcgcaattccgaggccaagttgagatggcggaagcaaatcgaacacctccaaccaacagtcggcagcgatgaagctgaaaacggaaaatgattagcatgggaatacaaatttagaatatttacatcgctttttccatttctttattagcttctttcggattgtcagacatgaattaaaaaagacgaactaaaaaaatttactctaattattacagttaatgaatgaattggtaattcaaaatttagcccgttaaaatgataaatgttgtgtctgacgattccggatcaagattaatgacggacaaattgggagaatcaaatgaaagaagtcattaaataaacaatttcctgtaatgatttttgaatgtactaagtattggtaaagcctaactcgttttttatggatttctaagcaaaacaaatacaacaacaattaaatggcaagtccaacaattggatcaaataataatcgcattaatcaatcaaaacaaatcaattcatttcttctgctgtttctgatcaccactcggcccgggggaaccgtcaagaagacttaaaaaagacaaaataaaaatcatagaattagcatttggatttattaaagctgttctcacccatcgtcgacaccgccgtccggaatgaaaatctcaattttgttctgttgagcagtcttagtcaagccatcatacatctcctccttcaaccattttctctcatcgcctgcagcaattggacaacgtacgagcaaaaaagcatttccattttttgacagtgccaatgccaatttctctccagtcaatttgttggacactttaaatggcacaacggcaggaaatgaaaggaactgcggaaattcaattaaaatgacgaaagcaacgggagaagaagcagatgaaaatgcctaaaatgaagacaaaaaaataggaaaaagcaaatgaaattggacaatcaaataatctaatcaccgctttaatctgttccaatgttgaaagccattggtccacagctaaatcctcagtgctgacaatgagctgcttcggcaaattgtcgggacgaggcgagaacagccatttggccaccgcttggccctccgacgcattggcactttcatcaggcggaaattcaggcaaaatgtcgaaatggaaagagacaacgcgaagggatggacaattgcggagaatggagggggccaattggcggatttgataaaaaccgatggagtccaaatccatctcaagaatggtgtccttgaatgttggccaaatgttgagcaaaacgaactccaaagtttgaatatcttcagtggcaatagtcaattttgttgtacaagtggcgaagaaacggtgaaaacggtggagaaaagtgagcacattgtgatcgaagtagctgaaaatcag

SEQ ID NO: 18826 - DNA, 3022 bp, Heterodera glycines
aacggaataaaaattatggttgcgccgtcagttgaatcatacgatgcagccatcgaaagcctaatggaatgcttccaggactcaagaaaaaattaagtcaaattggtgctgcaaagcccgtgcctggcacgttccttatttttctgctcccccccccccctccatcacgccatttttagcccactcccggctggcacaattgctcctaggggaggaatactgaacatcggtctttggcaccaaccactttgtaggcccgtgcctggcacgttccttatttttctgctcgcccccccctccatcacgcatttttagcccactcccggctggcacaattgctcctaggggaaggggagggaacatcgttctttgcctccccccatattgtaggcccgtgcctcttgcatgttccttattttttggatcacccctcatcacttcatttttagcccactcccggctgtctaaaatatttccattaatttaaaaatacctcttctaatgacttgaatctcaaatagcgggagattttttatataacttataaatattccttcagaaaatgagtttttatatagataacgataaagaaggttgcaacagaaagcttcacattccacaaaactccgtcggtattcacaatcgatcaattgctggcctactatgacctgaaagcaggtagtttcgagcagctggatagcaaaaatttttttttcaaaaggtggcatcatgaatgaacaggtgcaccatggagatgtgaaaggaggaaaaggtgattcagttacgctccgcaacatcgcatacacctgggttcgtttttgcaactattcttaaatattttttctataaaaatgttattaacttttgaatacttttcttaggtaaaaaaccaattccggcaaacggaaataaaaattatggttgcgccgtcagttgaacaaaacgatgcaaccatcgaaagcctaatggaatgcttccaggactcaagaaaaaatgaagtcaaattggtgctgcaaagcccgtgcctggcacgttccttatttttctgctccccccccccctccatcacgccatttttagcccacaatgaacaggtgcaccatggagatgtgaaaggaggaaaaggtgattcagtcactctccgcaacatcgcatacacctgggttcgtttttccgatttttctacaaaaatgttaatgttaacttttgaatattttcataggcaaaaaaccagttccggcaaacggacataaaaatgatagttgctccggcagttcaccagaacgatgcagccaccgaaagcttaatggaatgctttcaggactcaagaaaaagtgcagtccttttggtgctacaaaccgatgaaatgaaagccaaaactatagaggtaaaagtattagggatgtgcgagagtcacgattttttccttctcgtctctctgtcccgggtttttagtctcggaaacagagaaagtttatactgttaggatgaaccattttgggggatggggtcaccggcgaagggtaaaagaggaaaaatgctgaaattttaacaaattctcttaccaaaattcattaaaaatcacaaaatttccccatcggcgtttatctgtgccgtcggcactccaaattcccttaagatttaaaactgacctaaaattaccatttttctgtgactgaaaaaataaaaacgaaaaatttggtaatttttggacaaaatctgttaacaacttgagcaaaagctttcggcgaaaaagcacatcgaaattgcgtttttgaaaaaaatttcgttaagtttgtattgaaagcccctcgcaaaatggccgttgatcccccccccccccctctacagattccttcgcaaaattcccattgaccttttccttttttatagatatttttgttcatttaaatgaattttataaattcttgattttcgcgacgagaaatttaccgatttttacccaaaaacgggagtaaaaatgcactggtaagaattgattttttttggtaaaaataatgatttttcattgaaaatctgttaaatatatagccaaaatttgaaacaaaaatttcccggcggcgcctatcggcaccgccggatccttaaaatccttaattttcttaaaaaacttgctcaatttgcaaaaattggtcatttttgaacagaatctaacaatgtattgtagtaaaattttcaattttttcccggcggcgcctaccggcaccgccggcctctctcctcctccttggtcaccaaaaagttttttcaagaaatataccgcaaaaaattttgcaaaatgaataaagggagtcaaaaatataaagttaataaatgttttgttcgaattacctaattataaaaaataatttatttaagcaatttgaaaaaattttctgatttttgactcaaaaataagatttttttatttcaaatttctctttataaatttttctatatatttttaatttaataaattgattgccctttaaatttgtgcattaaaaatatttttgtgagtttttaattaaattttcgaattactcccgctcccgcccgggactcccgttaaaaatggacgggattttaacgggagcgggatttttacgggaatcccgttcgggactcccgtcccggaaaattttgaactcccgatcccgctcccggaaatttttttttaccggactctagttataagggtacaaaagcactttgaacatttagaatcaatagaaaaaagaataaatttagcattttggttagaaagagctgcctaggacctgagttataacatgataagaatttgaaagtatcacaacttttttctgagatgacagattacttaacattcgcttagaaaaagattctccttttcaaaaactttttttagataccaaatttgttcagtttagttgggaatgaagcgagttatggcagatcaaaataaaaaatacaaaaaaggcattttccagtgtaaattttgaagtaacgcgcaaaaatttacgccaaatgcgctatttgg

SEQ ID NO: 18827 - DNA, 2046 bp, Heterodera glycines
aaacaatttttggacggttttaagcttttgaatccggagcaagaccgtgaagtaccatctatctttatttataatgaaagtggcattcttgaacccgagcgtttgtctcagaaatctatgacgaattaacatttaaaaattagcggaatttattaaaatcgtaaaatttttactgttatttgattatttatggttataaaatttaaaaaatattttgagtcacattaaatataaataagaaaccatgtgaaggaaactaaatttatttatttaatataattttctgtactgaaatgaccccatccctctgaaagtctctcacttatatttttgtcacttcgcccacactgatgcaaatacggtacctttttaaaaataaaattagatttggggacgaacgacgcaggaacgaaatgacagtgcgcctcaaatattgaacaaataatccatttaatttcaattattgacagtataaatgctgtaaagccataacaattctttgacaattcttcattatccggtcaacaattgatcaaattgatgatttgttcaatctttggttcttttttgaaaaatatgtatgggtactttttatgatcagcgctctggctctggaatatccttagaaactgattttaggaaaatgacctacatttaggtaattttatatacgcatttataaaatttttacaaatttttaatgggtttttggtccaaaaactgggtatataaatgctgactttttcctccctcacaacataatttgtgtcccagcaataatgactttatactcctccgttatctttttgctgccagttcaatttctgctcgttgtcatcggcgctgtgttcatcatcctcagccaatgctgtggtggcggttcgaagaagaaaaaggtgccagtttttgacccctccctattcacaaatgaaacgctccctttttttcagaaagccggagcagcaccgacgccaacgccatcaatatcggcgagcgtaggatcggaagcgccgtcgtcactgaaaacgcaagagaaaagcgcaagcgccagctcaaaaacaggtggacgaaacaacgaacgatttagggatgagaagaaaaaaatttgtcaactttaagcaccaccagcgaagaaaggcgccgttgcacaaaaaaaaggaccgactgaagcaaaggcagggaaagcgaccgatgaaaagacagtgaccacaaaaaagaaagaaaagtcgagcaaatcagcgaaaggaaaaccgacgagcaaaccaaagccagagcgaactgagccttcagttaaagaagattctaagccggttgcagcggagaaaggagttgaagtgccgcattccatgatgtcgaaaggagactcagttgtcgatgaggaagacgaggtgggctacaccaccaccactgatgtgtaatcttatcatcttaatggtctgtattgtaaatgtttgttcccaagaattatgtatgatctaatgtcttacccttatccaatgttgttacttgtatacatttattatgtcgtggaagataaagtaaatgccactttgctatggtgtagtcttctaacaaattaagtttttcatgcacataatatgtccccaagaacattttcttggttcgatttggtttatgaatgcgagataataagaaatttggtccgatcgatcaattctctttgccaaaaatcgatctctaaggtacgttataatacccacacacacccaactaatagctgttagcggagactggcacggagaggtgacattgagattggtttcatctttagctttagagtcgctggttgagtttggtgagagtgatggatagctcagcaatttctatttctccaatatttcttaatttaaaatatctgctgatcaatcagtgttctccttcatatttagtctgtctgtgattggatacctcaattacttccctgctttctagcaatcactttattatctcatatgtatcagatgacatcagtgaatgaaaatgttgctttttattacatcaaaacaaaacgaatgaaatcatcag

SEQ ID NO: 18828 - DNA, 974 bp, Heterodera glycines
  unsure (1)..(974): unsure at all n locations
tgaaatgcccaaaaagtacaaaaaagcgaaaaaggacaaagttggtcctgcccttcctcctgctcctcccccgtctgtcgaaccaccggccgcggccattcagtacgaggatttgacctctgatgaggatttggactcaaaagacgccggaggcaccgccacttctcaccttgttgatcagcagatggagtcgcttttggcactttcacccgaaaacagcggcgttttgctggcactttctcccgattcggttgatcgcctacttgaagaccaaaatgccggagaggtgaaacaaaatccagaaaaaataatgaaaataattgttaagtctgtgccaataacagcggagtccaatgaaaaggccctcgagtcgacagttttgaatgaggaagacgaatttgtccaagcaaattcgggcgaaaatgacaaaacgaatttggaaattgtcaaaattgtgagtccgcttgaaaccatgggggcgctaattggggtcatttcccaaaaggatgatgaatcggtcgagaaagggcctcaaggttcttctgaaaaggcaaatgccggagagatggaagtggaaggaaatgaaaaggccctcgggtcatcagttctgagtgtggaagtccaaatggacccaaaaccaatggcaaattctgaccaagtcgagaatgagaatgagaaagcggataaaggcgagaatgagcaattttcaaaggaaaattctcgcgaatcagatgaagaggaaaatttcggtggtggtaagaaaatggtagtttgccaaattcgggaggacggagtcatggtgattccttttggtgaagacgaaagaccgggattcgtctttgtggctaatgatttattaagtgaaatttgggaaacgttgaccaggttttcggacaccgcagtgaaacttgnggacataatttgggtcactaattggagagtgtttgcagtaaacgaatcatggggattggatc

SEQ ID NO: 18829 - DNA, 1084 bp, Heterodera glycines
cccttcagtgccgcaactgacattcatttagctgaaaaaggcatcgcagcagcattgtcgtcttgttttcttaaaaatcggataaaaatggaagagttcgccattgagacaactctccacattttggacaataacggtaggacagttgttgccacttttgaacattttcttgacaacaaacgtaagtttgttgatttggttgaattttgggaggaatatgccgcaattcaagcgagattgaaaggggtaagaaaaacttgtgccaatggacggattttagaggtgaataaatatgtccaaggggggatgcacgtctttcaggcaagaattctgctggcatatcaagctgccaaaagtcacgactccgatggcgacttcgaattcatttgtgaaggccatgaagttgtacttagcccttgtgaatccgcaacggccatggtcaatcggatgacactgttttattcgaattctttcagcttgacttcgtcggagcaaagtggaaccggacaaatttagagagctttattatcatcctcggatgaacagtccttgcctgctcaaatcacggagacgcgactcatgcgtcatccggcattgaagcgccttgaaggtggtcaaaagcagtcggcaatgctcatgcttgatgatcagccgcgcattgttgcacaacaagcgcctcctggcagcggcaaaacttttactttggccgccatcgttgctgctctgctcgaacggcccgatgcaaaatttttgtgcatggcaccattgaacgttgccgtagtaaaaatttgtgatgaattggttgattctttacgggtagaaggggttgccgtaacgccgttagccctatttttaggaaatggtaaagggaaatacagggatcagcttgatcgcatctcggacaatttgcttgaggcagcagccacgtcagaggaattttggaaaaaattgaatgaaaaagagcaaaaggaggtaaaacggtaccaaaaacatgcccgaaaaaggccgagaattgccaaagaggcgaaaattgcagaaagtgtgctctcatttgagcaaagaattttgtttgcatattgggttt

SEQ ID NO: 18830 - DNA, 2572 bp, Heterodera glycines
  unsure (1)..(2572): unsure at all n locations
acatttgtatggtaaaaatttctcgcaaaaaagagatagtcatttttctggcatagagaataaatttaaaaattccctgtagaatagaatggccattgctctccgcgcccctctgcccatgctgggaacatttgtatggtacaaaatttctcgcaaaaaagagatagccatttttctggcatagagaataaatttaaaaattccctgtagaatagaatggccattgctctccgcgcccctctgcccatgctgggaacatttgtatggtacaaaatttctcgcaaaaaagagatagccatttttctggcatagagaataaatttaaaaattccctgtagaatagaatggccattgctctccgcgcccctctgcccatgctgggaacatttgtatggtacaaaatttctcgcaaaaaagagatagccatttttctggcatagagaataaatttaaaaattccctgtagaatagaatggccattgctctccgcgcccctctgcccatgctgggaacatttgtatggtacaaaatttctcacaaaaaagagatagccatttttctggcatagagaataaatttaaaaattccctgtagaatagaatggccattgctctccgcgcccctctgcccatgctgggaacatttgtatggtacaaaatttctcgcaaaaaagagataaccatttttctggcatagagaataaatttaaaaattccctgtagaatagaatggccattgctctccgcgcccctctgcccatgctgggaacatttgtatggtacaaaatttctcgcaaaaaagagataaccatttttctggcatagagctctctctctctctcttcgctgccgttcggtcccttcccaagggggtggaatggagagaagggtgggaggcaaacaagaagtgggctgttgtttgaataacggcaccaccgactcaatttgggggagaagccggtgctcccaggttcaactgcctaagtccgagcactcctgtcagcacttccggcgtgccaactcctgtccgatcgttgcgctcgggagtttcactcccgttttccctctcgctgtccgattcgctgtccaatcactgggggtgattggaaaaggagagaggtggggttcgagtgggcactcctgagagctggagtcccgtttgacttgctgaatcgctccgaaatgcacaggcaaaggggccggagaagaaggtgagttgcgaatcgggagtcggctcccttttgaccacccgcccaaattgatgaacacaaatgacagaaaaatagtttattaacggagcgctcaaacttgggtaattaaaccgtgggaggggggtgggcaaaaaagtgacaaacgggaaaaaatgaggagtaaaagtggatgccgtgattgagtggtgaggtgagagattaagaccaaaaggaacaattttttctccctggaggggagtgagacataaaaatgaatgaatgaatgatgtgacggacaaattagtgatgaaaaggggggggggatggtgattggtaaatattttccccccggggttcggcccagataaatgcaaattggacaaatgagcgaaagaacgatgcgatgagaaaaaagaggagagtcaaaggccggggagaggatggctccctggcatagcaaaatgcgtaaacattgtgaatggaaaaatgtgaatggtccaaagtttgaattaacaaaacaaagggaaaaaatgggaaaaatcggaaaagaatcggagaaggccggaggggaagtgtcggccaaaatgaagacaaaggtgaattcaaaaataaatggcaaagcggcgggcaaaagggtaagagcagacgcagatgtgaaaaagagaagaaaaagggggcgaaattgaaatacgacaaaattgaataaaattacggtagccaaagtggagaaaaatgggaagaaaaagaagtaaaaaattagagaaaaatgcaaattccgatcattttctcgccgcttctcgctcctgttcctcaattgcgacgggagttgctcccgttcgaccacttctttcttttccctctcttctcccggcgggagagtgccaccgggtgatcgagcgcaccccctccaaaatagtcctcctcctcccgcgacagcacccggggttttccgtcgccaacaccgaacaccaaaaagccttcccacaaattgcctctctcgtcgcatttagcgacactgcccccgccggccggcaccacttccatttccgaatcagcaagtgacactccatcctcctccgggaaattgtctccctctctccatttcggctctctggcccccgttaatgaattagcaacgcagatcgtccccaaaatgacaacagtcaatgggggaggggcaaacaaaggtgagatgcgatgtcggggtgtccaaagcaggcggcaaaaaaggccaataatggtgaagtacaagtaaatggcacaaatgatgagggagaatgctccctctgaaaaattgttaggatctcccttggcagtcgtttgtggcgtttcagtcccttaaaggggcccnaagtgccacgaaatctgtccacggttgtcacg

SEQ ID NO: 18831 - DNA, 1402 bp, Heterodera glycines
taactttttttataaataaatttaattaacaaaaaacattaataaataaaattaaattgtaatctttttaattttgttttccaccaagtataatgaatctttttttaaattaaaattttacacatttaaaattctttgtttttgttttaattttaaataaaaattcaaattaaggaataagcctaaaattaatattgaataaattgaaaaataatcaaaactttgctacagaaaagtttataataaataatatttttaaaacataaatttagtagaaatatttccaaattagaaaatcaatgtttaataattgttattgtcaatcgccctataataaccttaataataattattatcaatgcattagtaaatttacaaaacaatcagggatatattaaatattgaaaaaaatttaaacttattaaatgtgaaaaatttttgcaatttcttttgctatttaattaatgttatgtgataaaaaaataattagctaatttttgaaaacaaacatgtattcaattagtacattatattagggatagcaaacatcccaaaaaccaattaaaaaaaccatctgtagtgatttaaagaactaaagtaaagcaataattttatttaaaattttttttatagttaataatttcgtaaaagaaccaaagcatgaccaattaattaatatatccaattcatttgaaattactgattaattaaataaaattaatataaagaaatttaaataaaacaaaacttctgacaccatttatgtcgactcaactaaatatattataaaataaatgaaattaaatacaaagaaaatcatttattcaaaaaacaaaaaataaaaggaatataattttccactttatataatatacccgaaataaatttttgtcacgagctaaaagtttcttccatcattgtgcaagtttatttaaaaaaaaacaaatatttttaaaaaattgacaaatattatataattttaatttaatttatcaagctagcccaaggttcattagtgctcttaaatgatgcgacctaataaataaaacaatgaaaatgaaacaaataaatgaaatacaaaatgaatataaaataaacaaatcaaatcttaaattcacaggtgattgattatatatagtgtaaactagcgggtgcgtgaaccgtcggatctggcacaggataaagcgcttcgcgcttcttgagcttcgctacctagattagctatcgggttgtgaaaagatttggaatttttaaaaaattatcagcgatttttaggccgcttcgcggcctcagacgggcgcttcgcacccgttttttaaattcggtgatttttaggctgcttcgcgcctccagaacgggcgcttcgcgcccgtttctaatttttgttgggcttttcggccgc

SEQ ID NO: 18832 - DNA, 1470 bp, Heterodera glycines
aaaagtgattagaagaggtgcaacagtgattagcagaggtacaacagtgaaaaagtgatagaaaagtgattagaagaggtgcaacagtgattagcagaggtacaacagtgaaaaagtgatagaaaagtgattagaagaggtgcaacagtgattagaagaggtacaacagtgaaaaagtgatagaaaagtgattagaagaggtgcaacagtgattagcagaggtacaacagtgaaaaagtgatagaaaagtgattagaagaggtgcaacagtgattagaagaggtacaacagtgaaaaagtgatagaaaagtgattagaagaggtacaacagtgattataagaggtacaacagtgattagaagaggtacaacagtgattataagaggtacaacagtgatcagaagaggtgcaacagtgattagaagaggtacaaatttgatgaagaggtacaaacaatgattagaagcgtacaaaagtgatagaagaggtgcaacagtgattagaagagatacaacagtgactaaaataggtacaacagtgattataagaggtacaacagtgattataagaggtacaactgtgaaaaagtgatagaaaagtgattagaagaggtacaacagtgattataagaggtacaacagtgattagaagaggtgcaacagtgattagaagagatacaacagtgactaaaataggtgcaacagtgattagcagaggtacaacagtgaaaaagtgatagaaaagtgattagaagaggtacaacagtgattataagaggtacaacagtgattagaagaggtgcaacagtgattagaagaggtgcaacagtgattagaagaggtgcaacagtgattagaagagatacaacagtgactaaaataggtacaacagtgatcagaagaggtacaactgtgaaaaagtgatagaaaagtgattagaagaggtacaacagtgattagaagaggtacaacattgattataagaggtacaacagtgattagaagaggtacaatggtgattagaagaggtacaaaagtgattagaagaggtacaaaaattgaatgaaatttattataaattttaaaaaataaaattaattattcgttttattaattaaaaagagaattttaaatgtacaagaattgaatatttaaatcaatatgaaattaatttttataaattcaattaaaaaaaaatatggaattctttattaaaagataattattattttttacataaattcttttattattaatttacaacaaatctttaaatataaattaaacgcactgaaaaataacacaaaaataaatagaaaaatttaaaagtggtacaacagtgattagtaaattcattaaattaaaatgaaaatattttttaacaaatttaatttaaaaaatacatgaaattctatcaattaaaaaaataattaatttaaacttataaaatgtattcatcaaaaaaaaaatt

SEQ ID NO: 18833 - DNA, 3514 bp, Heterodera glycines
catattttgttaatgatataacgaaaattttacattaccgttgagaaaaagcaaaattgcattaaattactttttaaactacttaataacaattaatctcaaaaaatttaatgtaacaaatgagatgttaaactgtcatttaaatagaaaaatagtgttgtatttacatattataattaataaataaatcagctaattttaaaaataaaatgaaatactcaaatataatttagtcattcttattgatagtgattaagcttaactattgtaaacttaatttgcataccaaaaaatgtataaagaaaatactcattaaaaaaatttaatataaaggatagaaaaagaaataaattattatacattttatatagaaattttctattaattcattttgaaagtaaaatttaacgaatataatgatcccctcacgaagagaacaatgtcgaaaacattgcatgatactaatttaaatattatttcaaatcaaaaactaaaaaaaagaatttttattatattttcatttcatattttaaaggatgttgcgagaactgtaatgtaaattatttttacaactgtttttgtgtcataattttttttaatattaaacattaaatactttgattatttaatttaaatgtcgttattgttacaataaggatagcatgtatttagttcattccgtaaattataaaaatcaaaaaacgaaaataatttaaacaaaaaaaagcaaatttgataaaataaatgattatgagtttcttatgtaatatgagtattgaagaaattgtatgttgaacaaaataacaaaatttaaaaattcactgaatactgtttaaaaatataaaaatattaaatctcaaaaaattgaaagtaacaaatgagatgttaaacattcaaaatttcaaccataaaactgtaaaaatacattgtattagataatttataattaggtggattcaacaaaatgaaaatgcttcgccaatagctagttaaggcaagaagccaacatttaattctgattaatatagtttgatgaaaattatctaaaatattataaacaaattgtccgaactgaatggtatatatttgtttatcagtttagcctttgtaatggtactgcacaaattattaagataatatagattaaatataaaatataactagtatttcttttctcattcttcgagtgaaattttttgttttcttgttaatgattgtgatttgaaatagtttctttcaaattgggctcaagatcttttggttattaaagttgatttttttataaatattgaagtaatttaaaataaagcttgcatgtaaaatatttatttcatgataatatgtaaaatagcattttatttttattttaatgtttttgtcaattcattctattaaaaaattcttagatttattcaacctaaatttattattatatttttttgtttttatataattttttggcatttttgccgaacttaattacaattttcttgaaatttagaaagtattaataatcatttgtaatttctatttatttattaaggaattcattttttgaaaatctaattttcaaaattagatcatttaaattatttctcatttattttctcttgacgctgcggttgattcttgatgaaatttcgtcgatttttgaaaatattttctaatatttttgttgagttttttgcaaaatatgtatttgttttttttcatttattaatcgctttttatgtggataaaccgagtaaaatttcttattttttttaattatgctttaaatgacgtggtctctgtgcgcacggcggggcagcaaggcagctgaaaataacaaattcatcgtatagttattattttttgtttttttatttgattttattttgtaagaagaattgataattatttgttaaataaaataaattcaacatcgatttttatatgttttatgtattttcattttatagtaataaaaataaaagaatttgttattatcaattcttctttccaatcattcttggtaatttatttttataagtatgttctagaaaagcttagattattcaatttcgaacacgaataaataccataaattttgtgattataagtttatcgtaatttaatataaaactatatgtttatacattatatcgtaatttttttttggttacatatcaaaatcattagtaatccttatcattctgcagaagaccctcgcgcctctttcttctgccaatatctgttcctcttcaagttctcggaatattgcaattttttcggatgaaaatttctagattttcaatattaattattatttgtttatttgaccatttctatttctattattattatttataacgttgactaatactaaaactaaacttggtattttcaaatttcgtaattttaatcaaataaacatatattaagttaatagtctcattaaaaaattattgtaatttcacactttttcaattcttttttgcttttttgcgtagcttattttttatttatggtaatcaataaaatataaaaaaagtgtaaagaagttttatggttggttttaattttgtaaagaaaatttctaaagttgtttgtgtatgttcttgtacttgaagaatgttattgacgcaaaaaataaaactcaagtacgaccaagattaacttaaagtattgggttgggctgctaattttacaagaaattttcaaatttttatgtgagttcaaaaagcacaaataaattttcaaattaaaagtgaaaatttttgcgacgattcaaagcaatttcttaaatattttggtgacagaaaattaaatctaaaatagtaaataaaaatgcaatttatataacaaaaaatttgcttttaggaaaaaaacatttaaatttctaaaagaattttattggataaatatatgtgcacgttatttttgaaaaataatgcaattaaattaaaatatcattgagaaaattgaacaaaaacttgatccaaatgatgagtttaagaattaatttaatgaaatttaatttaatgaatgaatttacaacgaatttattttattatgaatattgaaggatataatgcaagaatatatacatttaaaagaataaaataacaaaataagaaagatttaaatcaaatattttaaatgttggatttagatttaatactaacctttttaaccaaaatcatcattttcaaactattgaatatattgcagaaaatgattgtgaaaaaattataaaaatactaattggaatcaatgtctgtgaaaaaattataaacatttctaattggaatcaatgtcaagtgaaacgaaataattaataattataatacatgaaaatggtgatgaatagggttgtaaattatatggattaacatattttttctgcgcatatgctatgacgaataaagtttataaaaatcatgatcatggttctccttcctaatgatttatgtaatgctgccaaacaaaaagggacactatatataaataaatagaagctaattacttaatt

SEQ ID NO: 18834 - DNA, 3343 bp, Heterodera glycines
atggacatgatttaattaaattcaattaaataatataaattaattataaaatcatttaatgagtaactaagtaataaatcagtaaagcataatcaagaattaactcttaaaagtgataaacaaattaaaataattacatttaaaaaaaataaaaaggcaaaaattaatattttaaagcaaagcatttaaaaataaattttaattcgtaaatatagctaaaaatcttagaataaattatcatgagacaagaatttaatataaatgaaattgccaatattctcctcattatcaaataatgaacaatacttaaaatatgattatttttaaatagtaaaaattaaaaacacaaaaaatttaatttacatttaataatattcaatgaccaatttattagttagctttaataaatataattaataaaaaaatatattgatatatatctaaaacaacatttttaacagcaagcaattatatggagtcaagcagacaattaaagttaaaaaacatataatttaagcaaaatgaaaagtttgttaacaaattaaataaatacattgtaaaaattaaaataaattaacgaaattaaaaggcaattaattataaaggtaaaataataaattaacacaaacggtcaacacaatcagcgaaaatttaaaaaaaggaattttgttaaaatttttaaattttcaccaacaacaaaagaataataaacaaaaaattatgcatttttagcgcgccggacattgtgacagaagaatttatcaatagaaatatattttatatttaactttccaagagtaaattaacgaacaattgcttttccgaggcattgatcagtcttaagctagtttattgaattgacaaataaattctaactagataacacatattgtctgtttaaataaaagcaaaataaatttatttattattttaggaaaatataaagcaaataaacagtttaattatttaaatattataaattaatggcacagaaaacaatgtttattttattgtaaacttttaattaaaaaataaacaattcatttaaagcatttaattaaatacagaattgattttattatgctcaaattaatttattttaattacctttgttaaatgatattttaattattttaaaggattaaagcagtaaataaaaggatgaaatggttttacgaaaaattatttttaagataatataaaattggatacaataaaaaataaattatttaaaatacatcgaaatttcaaccggcgatgttttgttaaatcatttaattaaatttttattaattaagtaccattacttaaagaaattagcgaattttgagctctttctataaaaataaatataaattctcttcagcaacaatacaaaatgattgaagagatcgtgcacgagaagattaaaaaataaaaacaaaataactacacaacattgccattgaattaaagcattttaaattaaaattaaaaggttttctaaacagagaaacaataaccttattttacatttatataaatcaaccaatttagcctcatattaattttgaatcagataaattaattaaacacgcaaataaaaatacgaaaaatgagatcacaattttattttttgaatgtaaatcccgagagaacgagcaaaatcgggagtattctaaaaactttgaaaaatgataaaaaactcaaaagtttttattaggttaaatttcaaaaacattaaaagaaataaaaggaattaaaaatacagtgtaaaaatgattttcccggcagcaggacgggtcagttcagtttgtaaatttagaattataatatttattttacttaaagtgagtatttctggggttttcgtgaataaatgcatattatgacatttttggaaatttttggaaattttcacaagaaaaacgcaaaaaaagcgaaagaaacacctctaaggatagactttttgggaatttaggtcacggcccggacccggtcaattgtctaagccctgtcacgggcccgcccggtactttcaaaactccgggctcaactaacctaatgatgagagtttttttctttctctaaaaatatgcctaataaaataaatcgaaaatacaatttaagttgggaaatattaatgaaaaaagtatttaaatttaatgaatttttattcctttggatatttttctaaaaattctgggttgtttatcagtttattttttgtttttatttcatcgtgaataaatttaaaaaccaattaattgtattcaaataatatacaaaataaaatcgtaaaaatataattatttaactaaatttaaagataatataataaatttctacgaaaataaattaactttataatatataaatttattaataaatgagtcaattaatttaatacaacaacaaaaaaaaataacaacaaaaaagtttatggtaggaaaaaaataaaaatttttaacttttttaatttaaaataatttttatagaaaaaaacattttcaatcatttcaatgagattttgactttgaaatttcaaaatttagagatttttttgcgtatattaacaacacatttagaacatgcattttttgaattattcttgtttttatttttttatccttccgcacggctcccggacaatcggacagtaaatcacacgaaaagataagaaaagccatcgctgaagggaaccgattgtgccatataaagaaaaaaggaaaataggcaaataaaaaagtgcgaatgtagtctaaaacattatttcattgctaattagtttaagtttggcatttcataaatgatggttgctcatttgaagaatataaaagctttttcttgccattactcgcacacaatgccgtcttctggattatggcacaatcggtcccatgcggcgatggcatttaaatatcgtttttgtgtgttttactgtcggattgcccagtcacgctctgcgccaccacctcacaaatcagagttattcccttaaaaaccattctcgaggaaaaccttcaaaaataataaatatcgactgaaaaatttaataaaaaagaaaatctcaaagcacaaatcagaaaaatcaaataattatcaatcgtttcgattcgaagagatggagacataatgaaaaataaaaaaaaataaaaaattaccaaatcgaaatatgaaaaaattaaatttaattaattatgcaacaaaaaaaggatatattatttctttaaaattattgaatctattatctcatataattttgtcttatttaaaaaatggcttaagtaaaataaaattaagattaatcatagaaaattaatatatgtgaaaatgctgaaataaatcaaatgaaacagcaaaa

SEQ ID NO: 18835 - DNA, 2409 bp, Heterodera glycines
cttcggtgacgcgctttttggcattggacaaaccaaacctaaacccacggagacggttcatccaattccttcacattccaattgctgaaggtgtgcaattgtgcggttgaccagttactgatgccaattccaattgagacgcccctttggacctttgctatgacccccaatggttggccattcttcgcgccaccgaccaactcaccgaattcactgacaaagtgagcatttccattgctcacaaattcagaaatggaaaataaaaatacccccccccctctccaaagagtgtgtttatgcccagcgccgttttgcttccaactacggctgacattgactcacttctgcactcttttggcgccgacttgcgcattccttcgaactttctgcacacagcgccacccgaaagggaaccgtggaattgtaaaggacggccaccatcgctttattatcggtgggaatcgaaggatcaaaccaaaatgaagataaaaggaccaattagtatttttgaatttcagcattttacttcctcccaactccgttctttgacttggccaatttacagtgccattgctaatggtttcactttgttttaagcaacccgcagacacaacagttctgtgaacgccttggcattcgtgacctgaacctaatgtttgcccaggcatccgccgattgtctcggaataccgcactttctttgtgttacacagccattggaatctgtgcaaaatcccgccgaaacaacaaaagtggtgccaaaccccgacgaaatcgacttgggcgaggacgaagtgaaaaaggaaaacgaaactccaatacaatttattttagtttgatggcgaagattttatggttgacattccgtcgaaagaagcggccaaatgaaaagcggaaaaataatgattttcatctaacgaaaacagctgtaaaattatcatttaaaaaaaataataactggggctcgaaactatatggattaacatattttttctgcgcatatgctatgaagaaaggggctcaaaaatagcatttctacgttaaaattttttgatttggcgaaagtttttagtccatataaatccatattttaggggttttcgggaataaatccatatttcgccatttttgcctttttaatccatattttggccattttgtggtaaaattacacaagaaaaatgcaaaaaaaaaaaaaacgcgaaaaacaccccactaaagactgattttgtctatgactttttgtcaagtatttgattttttcaaaaatttttaatcttaaatgaatttggggtaaaaaatatgctgatcacgaattgagctctgatttagcaagaatcttaattttgtcgatgatttttcatcagatatcataaaaataataaatctcagccaagcggactcgaaccccagcccccgtctcatatgacccttagggattaataattaatttcaaaaaatcatagaaaattaaatacttgacttctcaatagattattcgaatgctttttttaagctctacaacatctgtgtattgagttttttacgcccattaattttcataaaatttttgggaaaatcagtacttgaaaaaagtcatagactaataaatcaatgatttttcaaaatctgagttcagattcgtgatcagcgtatttttctaccccagaaaaatgctttttaaaattttactattttttcctatcgggaccacaattctgcacctttgcccatttttggtagttttgtatatttttaagttcgtttaagcaaatattgaatatttttgaaattttttaggggttaaaatttaatttttgtcagtttttagtccaaattttggtccatattggacatttttgagctttttactccatatttctggcatttttagtccataatagggaccggacaagagggccggtcggtcggtaaaaaaccgaccggtccgatctctactccatattagacttttttttagtccatataatttcgagccctaataataactataccacactcatttttgagaatattcatttttcaacaaatggaaattaaatagcaaatattaacatttgacgcattcaaaaataactactgggaaagaaaaatttgagcacaaatcgttgggaaagacgctacagaaccaattaagttgggacggatcattttcacttaaatatagcatttttccatcaaaatttcttcgaacaaaagcaatttggtctccataaatgccatttctgaagtagcaattgtattgcgcacgaaccgaaatattgtgattctctgtaattaggggaaacataacatgaatttcaccaatgtaaagtcgtaagataaaatttcaaaatttggagacgatttgctaactaacgaattgtcaaatttcaaaaaatcacgcagc

SEQ ID NO: 18836 - DNA, 3380 bp, Heterodera glycines
cgttttcgcgtggccgttttcgcgtgggccgttttcgcgtggccgttttcgcgtgggcgttttcgcgtggccgttttcgcgtggccgttttcgcgtgtccgttttcgcgtggccgttttcgcgtggccgttttcgcgtggccgttttcgcgtggccgttttcgcgtggccgttttcgcgtggccgttttcgcgtgtccgttttcgcgtggccgttttcgcgtgtccgttttcgcgtggccgttttcgcgtgggccgttttcgcgtggccgttttcgcgtgggcgttttcgcgtggccgttttcgcgtggccgttttcgcgtgtccgttttcgcgtgtccgttttcgcgtggccgttttcgcgtggccgttttcgcgtgggccgttttcgcgtggccgttttcgcgtgggcgttttcgcgtggccgttttcgcgtggccgttttcgcgtggccgttttcgcgtggccgttttcgcgtgccgttttcgcgtggccgttttcgcgtggccgttttcgcgtggccgttttcgcgtgggccgttttcgcgtggccgttttcgcgtgggcgttttcgcgtggccgttttcgcgtggccgttttcgcgtgtccgttttcgcgtgtccgttttcgcgtggccgttttcgcgtggccgttttcgcgtggccgttttcgcgtgggccgttttcgcgtggccgttttcgcgtgggccgttttcgcgtgggccgttttcgcgtggttgcatacaaaatagaataattactcacactatattttaccaaatttgttgctcttatttctttttacttatgtaattcattttataattaagtgagtttataaacttaattaagactgtttcaattatataatatggaccagcagcaaaaaattaaaacaaaacgaaacaaagttaagttagaacatgacggcgcactctatgttttcgaccaattgagcgctggttgggtatttccaatttgctactgtcttttaacatcgaagtgtgccgcaatttatacgcgtatgttacagcttcttttggaacgatggccgaatttcgcgccgcagacaatttcgatggacttcgagttggcaatggtcggtgcggtccgaacagtgcttccggcatgcagtgtccgctactgtttttttcatcttgtccgcaacatgaagaggcagatcagaatccttggcctcacacatgtcaattgaatttttcagatgataaatttttttcttagtagtttaggcttacaacactgatcctgctttcgccgagaagtctaagatgatcacttcattggcctttctgcctgtgcaccaccttcaaaatagccttaatgttcttcaaggacaaattccaccacaacttaacggcgttttcaattggttaagtccgaaggcgaattttataattatttttatttttctaggtttttggacaactacatgggccgaatgcgtttcaatgttccaatggcggcgcctctgttccacccgcacgaatggaatgttcatcagcgcaccttagatggtgctgttcgtaccaacaacttcgccgaggcattccatcgcaaacttcagcggcaatttagctgcactcatccaacaatttggcgcttcattgacacgatcagatgtgagcagaaggcaattgacgcggacatttcacgttgtgtcatgggagaatccgctccacaaaagaaaaagaagtatcgcgaagccgacgcacggattctccgactcgtccaccgttataacgaaatcaataacattcacctccctcaaaatgatcacaattatgccaatgccaatgtgaatcccgaaaacattatcaattttctcactggtgtttcccgaaactatgaaatgcgaccttagtttgttctgaaatttgttattttttgttatatttttataaaattttaattattttttccgtttgatgcacatccgaccaaactgacaaattattgtagaagatactagccgcaagaaataaaaaaattaaaaagtcaagaaatttgtccgaattcgggttcgggattcgaaacatggatgttttgcacaaatccgaccaaattcagtcctaaacaggtactcacgcgaaaacgtccccacgcgaaaacggccacgcgaaaacagtcacgcgaaaacgaccccgaccgccctattcacgtatttaggccatttccctagtaaaaatttttcgaaaattcgtcgaaaattgaatatacataaggggaatttaagcggttggatgcttatcattagggctgtgaattttagtgacgaaaaatcccaaaatagttaactaaaatagtgagtaaaaatgccaaaatagtgaagaaatagtgacaaaaagtccgaaatagtgacgaatagtgacataattttcagccaaaaattgagcaaaaataatttttattcactgattgcagttgcaaatgagtaggactgggaattttaagaccaaaaaaccccaaatagtacctaaaaaaatttttaaataaaaatttttgccaagaaagtaaatttttgagaaaatttttttcatttcataggagtatattttgagaaaatttttgctcgattcttaggggtgtatttttttgaaaatattttaacgcagaaatgcgttttttgagctcctttcttcaaaacaattgagcaaaaaaaaagttttttcactaaaagttgcttccctagtgataaaggttaatggaatgaaaaaattggcaaagttattacgaaaaaatatttaaaaaaagattttttttaataaataaattaataattgagacaccgagacaaaaccgaacattgaacaatagtaagggaattaaaagtcccgttccgaattacgatgcagacacagattcaaaggttcaaatgaaataattaaaaataaatttatttacttaagtttgaacctttgcttcggaattacaatacaaatgacatgcaaaataagcatcatattctgcatggtaaaccattattcgaattgtatgaaaatataatatgccattaagttggaagctcaaaaattaaagctgatgcaagtgccgaggaggaggaaattgaaacaaaagtgttaaaggtaaaaagaataaatgtgtaaaaatcatttaaccataaatggtgatgaatatgggattcgtttttaggcacaaaaatcgcgaaataggcatgcacctaagcattaattaggcaaaaaaaaaaatcatcgaataggcgctaaaataggaattataaagtccatcgtaaactcccaaaacaatgggcaaagcgcgttttcgtgcttatctgagcgtatcaagagcgctgaaatttttaggcatttgcctaaaaaagaatccctaatgatgaagaacaaataa

SEQ ID NO: 18837 - DNA, 2601 bp, Heterodera glycines
aaaagcgcgccgtaaaaaaaacccattttataaacaaaaaaagtcgtcgcatggcttaaaatcgcaaaaattaggcagtttttggtgaaaatctgttaacaaattgcattcaaattttcaaaatcttccccggcggcgcctgtcggcaccgccggacccccccccccccccccctctgtcccacaaaatttttggaaaaagcgcgccacaaaaaaagcgtttttaacgcagaaaaaagtcgtcgtaaatgaagaaaatgatcagcggaaacaaaaaaatattggaaaaaaacaattccggtgaaaaatacaagccatttgaataaatattaaccattttgcattgcatataataaaaattttaaatgtccttggatttcatgaattttccccactatgttcttgcaaatcggcatacccgtccttggaaacggaggatggacgatgggagccctggtgtatgagctttttcggcccattaattttcgtgggagtgcttttttcaccccattatttgtcctcctcttaaagatttaaaaaatacatttttaaatatgaaaaatgcattaaaattatttctttgtttaaaacaaatgtaatctgtcattatgaagtggataaaaatcgatgtaaagtgaaaaagcttgaaaatgagccctcaagcacaaaatttcgacttttgaggccctgtaactcttgaagaaagcaaaatgcaccgctaaaattaaaaattcacaatagaagtcgaccctgctctatccaatgatatgtcatttatatgcattttcctagttacagctcggaatgttccttgtaagtataattccaacgaaacattcacaattcgaaatatttccttgtgaacagcgccagcataataaaaaattagcggtaactgactttggagaaaatgaaattgtgaaatattcgaacgcagtcgacgtaattctgaaaagtgatggccattttaagacggatgactgtgatttttatttgggctgatattttcaactatttcttattgtaagtttggaactcatgccgtgtgctggtccctaaatgcgttccgttatcatttccatccgccgttttgtttagtgcccactttgaatggcatatcggaaaatgcatttcgacactttggacagaattcaattggcccctcagcgaagcggtgatgttttcgtgcacttcggtgcctttgccaatgtgccatagtttaaccgcgtggtccatactcgcagtggccaaaaaagcgccggacgaatcgaaatccttgtgaattgcaacaaaataagtcattaggaaaaattgatggacgactaccagagaaatcacttggtcacggtgtccgttggtccccccgaggatggccaaacattgcgagtaagtgacgttcctcaaatcaatttactgctcaccactcgtaaccaaacgaaccaaattcgcactgtcagatccttactcgctgaagcgacaatcatcggagagacgggcgaagtgcacaattcgttgatggagtcgccgtgaccgattaatgcctaattaacagccgacacaaacataattaataaatatgcaacaaattttgaattacgcaatgaagtcgcccattgagtgggctaatcacacggatgattccgcgaaatccgccgacgaccaacacatgttgtgctttttcaaggttataagcccaagtgaccgtgtaataaaactcgtccttctgagaaaatgtgtgaaacaaagcaaaactccaaaacaaaagaaagtccaaccgaccgcgtcttggtcttcgaattgccgcaccaattgaaagcccttttcgggtggacaaaggtacacagacacctgaataaaacaacactcattacgtatgaatttgcataaccaattacttcccattccaatttgctcaccctatttttccctacagtggcaaaataaatgggcgcttccgagtgagtaaaaggattgaaagacacggaataaacagtgccacgatgattctcctaaagacttcggctagaaactattttaaggatggatgctccaactgattattttcaacttaccacaaaacttcctgctaattcaaaggtaattgtataatttttcttatttaaaaatttgccgccgttataaagcattttataaatctaaaagtcctagaaggtacggtttactttaagtatgaaaaatttacgaactgctttcctcctcactttcttgttttgaaacaacttaaaaagaaatttaaacgcatctaatggtttgacctttaaactctaaatgcgaattagtgttaaattccgactttttatttgagttttcgacttttagctgcccaattaatgaccatcctcatttgtcgttttttttatttgttagggcactatgggtcaagcccagtgttagacaaaacggcgcgcctatgattcgtctactcgacgattcgtctactcagccaaaaagtgacgattcgtctactcagccaaaaagccacgattcgtctattacacgattcgtctattcgacgattcgtctactcagccaaaaagtgacgattcgtctactcagccaaaaagccacgattcgtctacta

SEQ ID NO: 18838 - DNA, 903 bp, Heterodera glycines
acgaccttttccccggattacggtagcctcccataccctagcgatgaaatcaatacttatggaaggggtgcatggccaactgagcgccagccatttgagcgccagacttttcagtactgaagacaaaacctattgcgcgactttttgcaaatcccaactattgcgcgactttttcttgcaaaccaaacctattgcagggggtgcgcgacttttttcttactgcgcgactttatgcaaattattttaattaaatttatttaattttaaatgtcttaaaggtcaaagacgttgaatttacattcatttaaaattctccaaaaattccccgcaccaagcggatccgaaccccagagggggcggccagactgacgcactaaccactcaaccacattggcaatggatgataaacattaatttgctctcataaagggaaaatttgacgtaaccagcagggagaggggggcgagagcgggcggcgcgaaggggagggggtcaaataaacaaatcaattatgaagggagcggggttgttggaacggtgccaaataaacaaatcaaattttttaattggtcgcgtactttgtagtgccgcccacactcccgcacgcttattttgtaatctgacaccttcagacaataaacaattgtataattgattttttgtccatttggtcatttttcatttcatttaattcactttacggatggaaaatccaatcaataatccattatcatttatttatgccttaatttttccttctttggcatttgtttacccatttacctattactttttgacatttatttatgtgccagattggcattattctgccaccgttttttgtgccattttgcctcaatttttttggcatagttctgccccctttttttcatttttatttgc

SEQ ID NO: 18839 - DNA, 2535 bp, Heterodera glycines
  unsure (1)..(2535): unsure at all n locations
ttttctcaaattnaaaaatattttaattattggcattctgttttctcaaatttaaaaattattttaattcttggcattctgttttctcaaatttaaaaattattttaattcttggcattctgttttttcaaatttaaaaattattttaattcttggcattctgttttctcaaatttaaaaatattttaattattggcattctgttttttcaaatttaaaaattattttaattcttggcattctgttttctcaaatttaaaaatattttaattcttggcattctgttttctcaaatttaaaaattattttaattcttggcattctgttttttcaaatttaaaaattattttaattcttggcattctgttttctcaaatttaaaaattattttaattcttggcattctgttttctcaaatttaaaaatattttaattcttggcattctgttttctcaaatttaaaaattattttaattcttggcattctgttttctcaaatttaaaaatattttaattattggcattctgttttttcaaatttaaaaattattttaattcttggcattctgttttctcaaatttaaaaattattttaattattggcattctgttttctcaaatttaaaaattattttaattattggcattctgttttctcaaatttaaaaatattttaattattggcattctgttttctcaaatttaaaaattattttaattcttggcattctgtttttctcaaattaaaaaaaatatatatttaattcttggcattctgtttttctaaaattaaaaaaatatatattttttcatggcattttgtttttcttaaattaaaaaaaaatatatttcaactcttggcattgtgtttattacctttcttgtcattgggtttttaattttaaaattatttattttaatttcggcattaataaataataaacaaatttataaaaaaaatttaatttgatttattatttttattttatttttacaaataagaaaaaattttgttgtgattattttcataattcgttaagtgttatttgtttaatgtttaaatttatttttttcataatattctactatactactataaatcttattccaaccatttaaatatttttctatataattgtaattgcaataaaaaatataacataatttatttttaaacgttaataaataatttgcgattttctgaaaattcaaatcatttatatatatgatcaagtgatcatcagcaatttttatttctcattattgagttatattatttttatttaaatttatctcatatcagattatttttcttgcaaaattcggtttatatttatttcatattacattagaactgatttacaaaatttaaaagtaaaattaatttgttattaaattttaaaattaaacaaagtttgtgaataaatccattttcattgtgatgtaatgacgagtgagattcgaggtattcggcaagcttaacctaacccaatttttcttacttattgaaaagtgatagacttttatattgtaaaaccaattatcttattttaatttttatttacagttatctagcagtcgaatatatacaaaagcttataattagtgatagtaaatttttcaatttacttttatttttgcacattgaattttttatctgtactaggcagataattctgttattcaatatataattgatattttttaaataaatttatccctcaaatatgatgattcatattactccaaccaattaaatttattttccatataaattgcaattactataaaaaatataatttgattcatttttaaatgttaattaataaattgcgattttcttgaaaataaattgtaatttttttaattcaaaaaatatctatttgttttaattaatttttcaataaatttttttttgttgttttcttagcattttttgtgttgttgcttttttatgaaagaatttaactttttgaaatttaattactgaaatgttttgaatattttaatttacacatattttatttatttacttatattagtggctatttgaaacttattaaaaatttttgcatttgaaatttttatgtttagattgacttctttattctcatgttagcaatgtttgacctgataaatgccatagacaatcaacaggctattcagaaaaatgaaagaaacaacagcagacaaaaccccaaacgtaaaaataaggaactcggacatagttagctaaaaaaacataagaaactaatttgtataaaaaataatatctaccttttaatttttctttcagctttaactataaaactttaaaaatagttaaaatttaggattcaagagataatttgtcattttcaacaaaaaaatcaaaaatatttaacaatcaacaatttattcaaattaaacactcaaataatcaaatgaattgacaattgatatttcaaagtcagtggcgtttattgagccatcctaaaaaaataaaaacattaaatttaaaatttttcttacatttttaaataaagacgaaagaaa

SEQ ID NO: 18840 - DNA, 1158 bp, Heterodera glycines
ttttggaaattctttgaatttaattgaaattttttcgattttccaaaatcccgcaatcccgcacgggatcccgcaaattttaaatgcgggatttgcgggattaatcccgcgggatcccgtcccgcaaaaaattttgagttccagtcccgcagcgggatccgcaaatttgaaatttccggtctctaaccccgaccccctctctttggcactttgaccccatttcattttgccccattcaaatacatgtgtattccttcattaatttttttttcgcaaggtcctaacaaatcaaatctcattttcaacaccaaatttacgactttcattttcgacacaatttttcgcactcacaatcacaagatggagaacaacaggcaaaatgaagaggtcaaaattaaaaagaaaatttaattattcctttttaagcatatatttattttaaaaaattacattttagactcatttagaaaaaaaatgttttttctataaatccgattttttagtcgtcaacttcggcagcgagtgctcctgaagcagtgacaaatggtgaccaccagcgcgagtcgaccgcgccaattccatcggccagcggttgtggtcgacagccaggcagcagcggaggtggcggcggcgagtcgtttgtaaaattttaatttataattaattgattaattaactaattaattaaaatgtgattaggtgaagcaacggtgtcgtcatgaagttggtcggctggaggaggagcttcgacgtgcgcagcgcgtcaacatggaatacaagcgaatttgcacggtacttcgcctcactgttgatgaacaaaagcgcaagctgaacgaacagcaaaaggcggtgaaagtgagaaaaatttttaattcatttttttaatttaaatttattaatttatttacacaacattttaattttgctgatgaccctccccccatcccccgaaaatttagaaattaaaaaaaaaatcgtagaaaattttctcatacacgagttttatgaaaattaattctcatcagaatttttttcctatttctgtcgaaaattttcaaaatttcgatgtaattagagtttgtttctgaattcataattgcatggagtttatgggaatgggttttctcttatcttgctcttgaaaaagcttgccacccg

SEQ ID NO: 18841 - DNA, 2411 bp, Heterodera glycines
actagggacgtgaattttaggttttaactattttttttgctcaattgatttgaagaaaggagctcaaaaaacgcatttccgcataatgtgccaatgcaaaattaccatcactaatttttgggccaaaggctcaatttttggtcataattttccaactaattagtaattgcaaattatcgaagcaaaaagagcaacaaataacgaatgataataaataagctcaatctcggctgtcattcaattgcattcccgttaatgaaaaataaataattaggaaaaagcaaaaactctcaaattactaattcacctattttttaattaattctattatttataccttataattattattataaaaaataactagccgctctgagggcatgcgtggggagcgtgcacttgcttgccctagcccgtcgaggcgtagccagtaacgggtgcacagtccaggttgttagtgcagtagcagctcaggcgcagatgcgtgtctggatgttcgtgcagcagcagctaccggcacatgcgcgtggcacccgtgagcagttgtaattggcatgcgtggcgcccgtgctcagttggaacccaaggggcttggcgaatgggcatgcgtggcacccgtgagcagttgaaatgggcatgcgtggcacccgtgcagcaattggaacccgagggcttgttattattataaaaaataatataattaaaataattttacataatattttattataattcacaccttagtctttagaagggcccagattaatatggatttttttttacttatttactttttcatacatatttttcgacatttgcacacgaaaattcgaaaaatactgcttatagattagaaatcctaaagaaatactctcctattcagtgaaaaatttgtggtaaaattcgaaattgtcaaaatgaaaattacgttttttcaaagagaaaaaattgttttcataaatttaagcatactgtagaattgagttaattcattgtattgaactaattaaaagttgcaaaaaagtgttaaattttatttaatgtttttatttgatcattagtgatcacttcgtcgcccattctcttccatttatttctttctccagttccaccaattggtattgccaccgctccaatagttgccccattggtcataatattggcctaaataatgaaaatttcaacaatctctgctttaattttgacaattataaaggcaaagaattaaaatggggacaatggaaatcttagttttaataacggcgtaaagtgtcaaattatggtgaaagcattgaaattttggttcaaatttgtcagggaaaatattaattatcgagaaatcactgtgatcattttagtgaatgttgaaaaagccgaaattttatttttaacaatttaatgtgccaaaatattgaagagagcttacgacgagcgcgaataccagttgtgtcaatttgactttcgccaacaacgtgggccaatgccaaacacaaaaaggctgaaaagcagcagatgaccaacagaagaaggatgtgaaaacggggagagggggaggacatttttaattgtcgacaattaattaaaggcaattaaatgtgaggagagagagaaattcaacaccttgggcggacttttataggcaaaccgaaattggcagttcaaatgcgcacccggcaaaataatagcacaaaaataatcaaaaacaacaacaaatcattccacacaaaaaaggaaattttcagcaattttcgtaaatatttacaaaataaaactctcttgccaaaggcaaaacatttgctgatcagcgagaccaattaccaaccacaccaatttaaaacctgtttttattttgcaaagaattcatggcttggaaattgtggtactcagagataagagttattgtgaacaaattaagtaagaggaatttcaaaaaaacaaagcaaaaaaaatgttaaaagcatatgcctaaaccaggacctgctgggttccatgttggacctgtttttctggacaaaaatccaggaaacagtccatgaaaaaccaaaataacaaattctctaatattatctaagaatccataagaagtcagtctcattatttttcatattaagtgggtcacttcgagtctcctcctttaacataatattcttaccatccctattttaatttaaatctttaataatttttttgcattaaatttaattatttgcactattcagacttcgtcctggcagccatattgacatttacttttcctatcagaaaaatatctcagccgtggttggtcgattcctaaaaagtgcaaaaatcaaaaatctgatttttcttacgattttttatcaattaattaattaaaaatatgttaaactttaattaaattggtgcttaaatacacattcttctacaagttt

SEQ ID NO: 18842 - DNA, 2477 bp, Heterodera glycines
ggaagaattgctggtccataaaatttcttcactttttcatgatggactttttttagtttgccttttccttcaatttgttgtaaaatgacattttttctgtctttatcaattccaacacaacgcaaaggacccgaccatcgctgatcaaatttatgttttaaaacttcttttttgagcagtaacaattcaccaatttcaaattctttctcctccgcttttctgcttttatcattctcttccttttgtgtaatttgtgattttaaaatattttctcttgctgtctcccaagcccttgaggcattttccgcgtgctttcgagtgtaaattgaaatgtcagacgttacttcgttttggctagggagtttaagcaagcgatcagttggcatttttggatgacgcaaatacaaaaggaaaaaaggtgaatattttgtgactgtatgtattgaagaattataaacaaaaatcgcatgtgggagagctttatcccaatcatttcctttctcattaactaattgagaaataatgtttgccataattctcatacagccttcgatttgaccatttgactgctggtgataggcagtcgatgtctgatgctcaaaaccataaattttagaaagatcactaaataattccgaggtgaatagccttccttggtcagttacaacaatctcaggtgtagagtgttggtgtaccataatttccacaaatgtttccacaattgtttccgccttttggtttgggattgccttacccattatccattttgtaaagctgtcaatggccagaaaaatatacgaatttccattttcgctctttttcagtggtcccattaaatcacaatgaatacgttgaaatggccctttggcaattttgattggtacactgggagcacttttaacatttcctggttgaatttttcttttttggcatgcttcacaagtatcgattaacagttttatgtcctctttcatcccaatccaatgaaaacgatttttaatttcgaaccaagttttttcaaaaccaaaatgtccttcattatgtatttcattgaaaattttttgtcttaattcatagggtataaccaattttgggttttctgcattttcttttcctttttgaaagtaaattgctccgtttaataggcaataatctgtcataactcctttccatttaaaaatttctttcggatattgtccagtcttcaggatataaaatatttttactaattctttgactttacgttgagcatcaattatttgcattaaagaaattctactttcgtccgtttgtccgtttcttgtactatttttatcactattgggtttattttctgtacttgaaatttttattttgttttcttttttaccctttttgtttgtgtcttcggactcattgcctggtatattataacgtgaaagaaaatcggccgccttgtttttgctgccagggcggtaaacgatctcaaggtcaaaactttggagagtgatctggtatttctctagtcgcccttttaattctttggctttcatcatgctcgtcagtgcgctacaatccgtaatggttttagttacgcctgaaccaacaatataaggcgaaaattctttgaccgcatacactaaggctaatgcttctctttcgattgacgggtaatttgtttcatgtctgtttaaagcgcgcgaagcatatgcgactggaccatttgcttggagtaataccgctccaattgcttttttggatgcgtcgcactcaattatgaacggtttaccaaatcttggggattgtaaaaccggggcagaagtcaacattttcttaagtgtttccagagcctcttcttgttcatttccccaattttcttcgatttttccctcaaatttgtcttgtgttaaagtttggagtggccttgctatatgggcaaaatttttaataaatcttcgaaaataggtaagtgcaccgagcaacgattttaattccgttaggcttttcggtggtctaaaattttggactgcctgtacttgcttagggtccattcgaattcctttttcacttagcaagaatcctaggtaacggatttcggccattccccagtggcacttttcaattttcaatttaagtccgacttcttttaagagtttcaaaaaattttctatgtctattaggtgaatttcctcattttcacttcctattattatatcatctaaataaataagcattgctgctgtcaagcgtcttctaagggaattcattacacgctgaaaagtgtctggtgcggcagttaaaccaaaaggcatagttataaattcattaattccaaggtgtgagataaatgctgttttttcaatgtcctcaggtgccattggtatttgcatgaaaccactttgcatgtccattgctgtataaaacttttttgaacccattaagtctaaaagttcctgaatatttggtagatggaacactcgttttttcgtcattttatt

SEQ ID NO: 18843 - DNA, 1239 bp, Heterodera glycines
tctagatataaaaaagatttatttgttaacaaaaactaggaatatcagccttttaagtgatatggaaaagtttgctagtattgaaaacagtggaatataaaaaaattatcgtaattttaagcaaaattaaagatgagcccaggggcataattgagaaaaattgaaatgttgagggggtttaagcaacaacgtgttaatgttatgaatgataattaaccacattacatatgattaaacactgtggagtaattagagttatttttttaaatgtctttctaaattttaactatttaatataccggcaaaaaggaataaaaaatttgaagatatcaaatttgtttgaggatgctggctataacatagacttaatgtaactgctccaaaacaaggtgcagaaaaaagtaaaatatttgattaaaacattttcatcctatttattcaacgctctagatataaaaaagattatttgttaacaaaaaataggaatatcagccttataagtgatatggaaaagtttgctagtattgaaaactgtggaatataaaaaaattatcgtaattttaagcaaaaaattaaagatgagcccaggggcataattgagaaaaattgaaatgtgagggggtttaagcaacaacgtgttaatattatgaatgataattaaccatattacatatgattaaacactgtggagtaattagagttatttttttaaatgtctttctaaattttaactatttaatataccggcaaaaggaataaaaaatttgaagatatcaaatttgtttgaggatgctggctataacatagacttaatgtaactgctccaaaacaaggtgcagaaaaaagtaaaatatttgattaaaacattttcatcctatttattcaacgctctagatataaaaaagattatttgttaacaaaaactaggaatatcagccttttaagtgatatggaaaagtttgctagtattgaaaacagtggaatataaaaaaattatcgtaattttaagcaaaattaaagatgagcccaggggcataattgagaaaaattgaaatgttgagggggtttaagcaacaacgtgttaatgttatgaatgataattaaccatattacatatgattaaacactgtggagtaattagagttatttttttaaatgtctttctaaattttgactatttaatatacccggcaaaaggaataacaaatttgaagatatcaaattttgtttgaggatgct

SEQ ID NO: 18844 - DNA, 1597 bp, Heterodera glycines
  unsure (1)..(1597): unsure at all n locations
atttagccgcgactgtccgatgatcggacagttgtcgaatgaaaagaaatgcgggggggagagggagaaaaaaacaggagaacngggaaattgggcgaagaatgagaaaaagggggaccgcaagaggggcttttgcatgtgaatgggaagaaagaagaagtgaaaaagcggagcagcccccgccgcgcatgtgaatggtgcctaagggcagaaaaagccgatcgagcgatcaacgacgacgaagaagaagaacgaccaatcaacccaaatgatcaccccatcatttttattgtacccgcccattttctgatcctatataagcaacacaaattgtacatttcgatggcttgcgacaaataaagactaaaaacccgtccattttgggggtttcttgggtagtctgggcagcccctctccctctccctccgctttcaccccaccccgaaccaatggacgacgaaccgtcccgttgcggcttgtgggccgagccgcttcatgtggcgaccctggcagggattttggtggggttttggggtttgtgagcaagggtagggggagcatgccggccccacaggtttttcgtaacctgtggcgtctggcattagcgctattccattttgcgttccgcgtttctggccccttgggttttttgtaacccaaggcgcctgcattccgcgccatagggcccctcgggtcttttgtgacccgtagcgcctcgcctttccgcgccttgcattccgcaccgtttggcctcccgggttttttgtaacccggggcgcctccattccgctccattccgcgccatacggcccctcgggtctctttttggcccgtggcgcctcgccttccgcaccacagcccctcaggaaagaatggtcatgcgcttaggcagcgagcctatctcgcactcattggcggcattgtgccgagctcacaaagagggcagtgagcctaatctgcgcaaattgttgaagcgcattggagcagcgcatgttgaagcgcaaattggagaaagcgcattggagaagcgcattggagcagcgcaaattgttgaagcgcaattggagatgcgcaaattggagaagcgcaaatgagaagcgcaaattgaggaagcgcagaccgaggcggaatggaaaattatcagaggaagcgcaaattgaggagtcgtacctctccgggtgcgggataggaaaaggggtgggactgactgtattttggacgattggggaaggaaatgggggtggtcaggtaattaaaactcagaaacacaattacggggacaagattgaatgcttagtcaagatttaacggagttgaagagaagcggagagaagacgaagagaattgttgccttacaaattggcagcacctcgtagtcaaaaagtcgtctgatgacaaacactttgtgatcagaacaaattaaggcgatttgaagaacaatttatttttaaaacacggagaaaaaaagacaaaatcggagaatatcaagaagtaactaaagacgaataaaaaacctcaaaacgaatatgaaatttaaacacaaaataaacgcgaaaagtcatcgttttaaaataattaaattgtcattcccagtacg

SEQ ID NO: 18845 - DNA, 2348 bp, Heterodera glycines
aaatccccaaaaaccccacatactccaggcgtgctgcccttgttggactggatgagttcgatgagtgggtttttgtccgccgatttgttcaacagctcgccccgtggttgaacagcgttttcatgcacaacgggctggccgcccgcagcgcgaccattgacggcgtttcgcccgcattgttccgcgaattgatcaacgccttgcccgcctccttttcaagcagtgtctccaacatttgggtggacacccgggcagcatagtgaagctaaaaatgggaaaaatatgtgaaatttgtttgaaaaaagcaataaaatattgaggatgtgctgccattcccaccgatgttaccaaatttaaaaagtaaatcgcaaaaattcgattttacaaaaaaaacgaaaattttctatataaaaatattaaattttccaatttccaagtgccgcctatcggcggtaacatatgacctccagtttcctttttaaacaggcaaaaaatttaaattaaaaaaatgtttactcccagtcatccaaaaaaccgtaaatttttaagactttttactaaacaaaatttcgaagagattaagaaaactaaaaatagaatttatagatgagaaacggcattgggcgggggcagtgtcgtgcccctaaacacacagccttttaaattacaaaaaaaaatttgttgtccgactcaccgcattgttcccaacgtggtcatgcgcggtcaggtcagccccatgcttgagcaaaaagcggacaatggagtcctggtttgtctggacggccaacatcagcgggtagaagccctccggggagcatgtcactttgaccaagtcggtgacggagtagttaaaccgttgcaggtaggccagcccgtcgtccgtgaagatgtccacgcgttggcacaaaattgcaatgtgcgccatgcgcaacagcggatgctccttcatctgaaaaaaattgtgggaaattttgtgggaaaaatttaaggcattgtccctcaaaaaaaaaaatttgggaaggtctaacccgaaaatttagtttattgttgcctaaaaaaagttattgagttactaagactttttttgctgaactctttttatgaaaatttactcgattttctcatgctatctccgacaaattttgtcagagaatttgctcccagagggtttcgaggcttaagcccaatttttaaaaattttaaaacaattgcgccagtaaagctggatttgttaaactgatccctattataaattgtatttctttttatacataccataactgtgacgtcccaaatcagtttgcgcaaatccattttcatgtctacaaaaaataataatttttttttaatttttgaaaaatcctctgccacctgacgtccgaaacagcacaccgcactccccgtagcgacgacaaaaatcgatcgcctcctcctcactgttcgacctgcagagaaacggaaaattttttttaatccagtgacgaattttttttttcagaattcgaaggaaaaaaattgaaattccatcaaaatgcaaaaccaaaaaattactgccataaatttgaagtgtcattttgataaagtacaaaatttcttgagaaattttcttatttgcgagggatccaccgaaaaaactggaaaatttctcgtattttgagggaatatacaaaaaaaaattttgcgaacctaaaaatggtgaatgctcgccgtcttccgccgttctcctccaccgtgtacaccacgtggttgtccggctcgttgtcctcgacgcagccctggacaaccatcagcggtgagctgacgccattggctgcggtggtgtcctccactgccgggaacacaacagaacatgagccgagcaactcggagtggaaaccgaccacctcgaaggggtcgcttgggagggaaaaaaagaatagaaaagagaaaaattggtacaaatgtggaaaattaagggcatagatacaccaaagagagggggaaggaccggaaaaaattttaaatgggggcgatttttttgaaatttgaaatatttttgtgtcagcgtcgaaagactcaccctcaccaaaaaaaatcatattttttaaatttatattagtttcccagtcagttaataaattgcggcaaaaattgcttccaggccatcgacaaaaaaacgccagaaaatttttcgccgtcaaaaaaaacacagccgccagacgaatgcacggcaggatgttggcaaggcttacaatagcacaaaatcgaatttaccgccctttttttacaaaaaaaacgttctccaaacctcggaatccagcagtcctcgccgaaaacgcgctcctttgcgtttgaccaaagttcattga

SEQ ID NO: 18846 - DNA, 1742 bp, Heterodera glycines
agtttcgattttttgttcgaattcgggtttaaggttagaattttttcgaaagggggagggggtaccatcggcagctgttactttttaaaatttttctcgcaaaacttcacttaacgcactggaacctgtcatggttaaaaataaacgtcagattcgtaatcagcataaaaaataagcctagaaaaaatttttgaaaaaaaatttcaggtgggtgacaaaacctacaagtaccgacttttatgcttattttacaaatttttttttttttgcatttaaaacctgtcaataattattatttttttttcattaaaaaagttctatctaatttttattgtatgagaagtttttaaaactcagaaacttattcttaaatctattcttttgatttctattttaaaaacccattatacaaaaaaaaaatttcataaaatataaagaaaactgaatgggttagttgaaaaattgttaaattaaattttatgaatttttacgcacattttttgtgaatggtcgtgagcgtgggtgcacaatttcttacaaaaaatgaaaaaatttattttaaaaataattaaattcattttaaataaatatttttccaatttacgggtgtatgagatggtaaagtgatggcaaatcggaagaagtgacggcggttgggaccaagcggctcagatggaattcggcactgttttaacggaaatggaatttttaggtgctaaaaaatgccaaaatcgtttccttttttatggatttttaaacaatttagtcttgaaattttaaatttaggcaaatttttgattgaaaatttgggattttttaataaaatttctgttaaatttttgttcaaatcgccaaaatggttgaaaatagttttttttttaaatttaatttttgcaattttcgaaaaacttcccagaaaaactctaaattttttcgtagtgccggcatctttcaacacgacaagttttttccacctacttagcgccaattttaggtgggtttcttggaattttagtatcctttttggcatttttttagcatatttaggtgtaaaaatccgttctttactgatcagacacgtgagcagattggctgatcaaatcaaatgccaatttttgctaattatgccaatgccatttctcactttgtgcattgttgcacaatttgcaaagccggcgaaaaccaaagtcgaaaagtgtccgggtcggtgcttctctcgtcgaccaccgtaattcggacagctgcagcagcagcgtcacgtacggtagtgaatacggtagttctcaacggtcggcaaagtgccgtgaacaacacgcccttcggtgccgtcgccaattgggccattgttttgtcggcgtcgatgaatttgccgaccagcagagatggctttaaattggcaaactttattttaacatgatgaattcatttttttagtttttattcaaggtttccacgtaaaattatatttaaaaataggaaattttttggaaatttaattttaatatttttaattttggaaagcctgtttttggaccaaatgaaatattttattttatttttttgagttgtaagtaagttttttaatttctcgtttttagggtattttcaaaaaaaaaattttttgaatttattgaaattaaaaatataaaaaataaaaattagtaattaaaaaatgaaaaatatacaaaaaaaaaacaaggataaaagtgaagagggcaatttatatctttatatgtaatttt

SEQ ID NO: 18847 - DNA, 1276 bp, Heterodera glycines
  unsure (1)..(1276): unsure at all n locations
aaatgcaaaaacaagccccaaaacaacgttttaaaaaaatgtacttaatttgaccccaaaaacttattttttactactgattttacttatttcggaaaattttttgatgcgacctctgttataacttgaattaaatcaattacgaacaaatgccaccgcgggtttggcattttgagcttcgattaatgtgtgtgacaatgtttgatggtcccggggatcgaccagatcgtataatgaatcgccttgggcaacaaattcgtcctgaaaatatgccacattttgcatttatatgcctaatttagaatctttgatcaataatgagttatttttaaaaaaataaccttctaaaaaataacaaaaaaaaaatcaccaaaaccattaactgaaatattttcttgtgttcaatctttttttagttttttttaagcgccgcaaaggaattttttttttgaaaatttgagttaaatttttaaaatttttggaacttaatctgcccctttcctctagcgatcgacgaatctcaaattattagagtcggtagatcaggaaaatgtttaatcgataatttgttctcgttgctaatgagtgatcagatttacagtgctaaatgttgggtcggagtggaaattgtcgctcagagtgatcagtttgccatgatcagtggtcacgagtaggaatcgatcatggagaaggtcggcaagtaaggctgcaagatgatggtttaccacggatggcactttcggtttgagcgagggtaaaactttgcaaaaaaacaaaaaataaaatttcattttggccaatttggccaaatgcatacttgtgccgttgagcgcatgatgctttcgaatccacacacagcaaagtgccatcacctgaattgttttgtttttttttggcatttgatataaacattgtggccgtaatttgtaatataaacttagagttcgacctggacttggacccaggcctttctcgtagtccaggtccagtccatttttcagcaacctagatttttcatggacctggattttgctgaatttttgtgtaggaaaccnagtcaagcattgaccccagcccagtcccattaggcttttatcaaaatgtatactctaataaaaggtggttttaaatttaaaaaatttagtaataaaaaacaaagcataatcatttttagaatgccaacttttagcaaatgatacaaaattacctttttggaaggtaatgagggggacaaatgaggtaaaattttattgtattgaagcttggaattttaatt

SEQ ID NO: 18848 - DNA, 1667 bp, Heterodera glycines
  unsure (1)..(1667): unsure at all n locations
cgtccaaaaaanatttcggaaaatccgaagctttcatcaataataaaaaaactaaaataaagaattgattgcataaaacgacaattttttgatcattttttttcatgtctaatcgttaatcagcgaaaatcggtgattgaccgaattcacttttccgattcaagcagtacacccaacgaccgctttcttctgcgcacaaaaaatcctccaattgaacaattccatacacacacacacacataatgaatgacctggaattttaattgggtgctgcaaaaactttaaaccctattttaaataagaaaaaatgaatataattttttagaaaatgtatcatacagtaattttactgatcatttgccatctacttcatacagtaatctcgctggcttctgtgctcgtttcatcgccgtttgataatttccgaattgagtgcccacagtcatcgggcgcacaacggttgtcaattcgtatggtcgaatcgcaaggccagaagcgccaggacactgtattcgtgctcagttgtcagcacattgttgaggtaatgtgtagtacggtatacggtagtttacagtgagaatgggtggcagtttttccaaaataattaattattttaaatttcttaataattgcaaatctctgtgaaatgtgcaaatcaggagtgggtttgaggcttactgcaccactcttcttaaaaattaacacaattttttaaaattaatcattttgctaaaaaatttagaaataaaagaggaaaagtgcaaataattttaattgctaatctttaagtcccgctttacatttgaaatcatttaattcttaatgtcatcatttcaaatctattaaaccaaaaagtaattagccgattatacaatattttaaattcatgaaaataaaatcagttatattttgcaaaatttgtcaagctttatccatggctttgtcttccacaagaaagaaaaaaggaaatatacaaatatttttaattaataatgaataagtcaattttttttattaaaatcatttaatagttaatgtctatcatttatcaaaccaattaataaacagtccccaaaaacaattagccgtttccataaaatgattgaaaataaccaaaatttttcaaatttacagctttatccatggcttgatcttccgcaagaaattgctgaccaagaacgcgaagattgtcgttacactaaacaatttgacattttgttggagcaaaaatttgatttgacgtgcaaagagcatgaatatttggcaggaattgctcgactggccgataccaggtcaattcaacagcgggatttgttaatagattttgtccaaataatgactaaattttgcgattatgagtttttttttaaagaaagttaagcatttttcagctctgatccacacagctaggaaattttgggcattttctctcagtttttaaaagattttcgccaaaaattgataattttttagattttaagaaaaatttcgcgaaattttttgggaattatgatgaagtagatatttgaggggtaaaacaaaaaaaattgaaaattttttacaattatttccccctcaatgaatctaaaaatctttgggagcccctattanaactaaaaaaaaaaaagaaatagcaaatattaaaaaaataaatccatttatttttt

SEQ ID NO: 18849 - DNA, 1454 bp, Heterodera glycines
attagggcttctttttttaggcaaatgcctaaaattttgcgcacttgatacgcaaagataagcacgaaaaacgcgttttccgcttggtttggggtgtctacgatgacttttataatgcctatttttgtggtttttgtgcctaaagtgcctattttaggctttttgaaaaaatccataagaaaaatgcaataaaaacgaaaaacacacccctaagaaatgacccaaaaaaaattcagaaaatagacccttaagaattgaaaaaattttcaaaaaaatgatcccaaaatttaatatatttttttcttaataaaaatttttggtttaaaattttgtccttatttaataatttcatttgcacttgaaatatttaagtttttacttgttttaataccaaaaaagcgttaataaaaaaatgtttgcctatttttgtgcctatttaatgtctattttgcgatttttgtatgcctttttatgtgcctatttcgtgattttttgtgcctaaaaaaggaagccctagtaatgattgtttttaggcattcaaaaatgcacccccaatatctgaaactttgaaacataaaaaacggttttggcattttgaccgaaaccggtcaataattaattttctcggcacttttgaaggttggccaaaaaatttttaatgccacatgtagaggaccgatgaggctagtaaaatgacacgaaccagattttccaatatttatgcgacgtggcacccagtaatgtctttgggcttttcaaatttttaaaatttaattttagataattggaaattttcaaaatttcgtaacaaaactttaaataaaattttttaaataattattattcagatgatattatggaagaaatggcaaagacaacaactcgactaaccacaacggcacagaccaccacttttggctggtggctaaacaaaaatgatgaaggtgtaattatttaaaattattgtaattgatgattttgataaattaggacaattagcaacgaattttcagacctataagtgccaaaataagaccaaaaaaggagcgaaaattgtaaaatttttgatttttacatttttggacaaaattatttatttatagtgtttatttttcatttttttcattttttaaggaattttgaataaaaagcccaaaaaataggatgaaatacgacgcccaaaaaattattttaggatttataaacttaaaaaataatccaaaaattattaatatatcgaagatggtttaaaatagtacttaaaaaatttaattgttttattatttttcaagaaattcctggccatccgatattgaaccatccaaaattgcgcaaaaaataccaatggccaaacgatgatcagttgaacacaattggcccagttgcacacgtgccaattccaatacaaacggcaaatccaacattggcacctccgttgcatccaacacttcaaa

SEQ ID NO: 18850 - DNA, 3105 bp, Heterodera glycines
tatccattccttttccttcccctcccattcactttctctccgctgctgcttctgctgccgattgtgccgtccctttctcggcttttccctaccgcttttgtcggctcttttctcacttcatcccccgcttttacttttccctcctccatccgtttttcctccttctcttgtgcttttccaatggctttttgctttgtcctttcttttgattccgtaaattccctcattaatgccacaagtgatggaatattcctttcgtacgaatcgattaagctattcggggtggaaaattggccattttcatcgccgaaagacccatcggcggcgattattgttcgcgcatttgacaaacccatagacgaggcaaaggcaattagcaaaacagcgacggaaaattgggaagagagcagcagaacggacatttaagcataagcataaaataaattaaaattaagagagagcagtgaataaattaatgatcggagtgattggtctgtcaatccaatgccatggcaatgcccaaatgaaagtccggtcaaaaaggtttttgttgaccgccttttttatgctccaaatgacaaatcaaatccatgctgatcatccggcttttgattatcataagtgcaatgcttctcatgggatttacggaaggagtttggcgttatttgggcgccggcggtgttaaaagggtgccgctttagcaggtcgagggcagaaatgcttccacccaccccgcctcgcgaagggagaaatgcttttcaccccctccccaccccctctctttcgtttccgatcattccaatttttgccctttctcattccgccagttcctgcgcttctttttccgttcccacccaagtcgcacactttgataattttctgcttgctaatgggattacgctaatttaaaaacttggaagcgaaaggagaaaaggcggcacttcggatcagccaatcattcattaattcattcacaacgccatccgccggttgagaagagaaagagacagcgaacagcagaaagtgcaatttgcgctggttttcttttgggtgcgaaatgcgatcactttttagaagatttaacttttttgagatatttacaagttgtactcgaaaacaaacttaatgatttatttgaaatgaaaaagaaaaagacacgttaattaagttaattcattaagcatgcggatttagttgctttttaatttgtccatttcttttgctgtgctcatttgtcttcgttcctatgcgtcttacgtcaataaaaaagccatagcagcagaagagtcaattaacaattaattagttcgattgatcactcacattcccattgaccgcctcgacggactgttcaaacattggctccaatgcttctcaaatttgcgttttccattcaaaagtaattaaacattcattaaattaacttattcttcttcaccaatgtttaattattttttgctttttcttctcctttcaatcgctttcatttctttgagtaggttaattaattattattaatccaataaaaaattgacatttaatattttaatttcagtcagtttttctgagcaaaaatcattttttacaaaagttggcgatggtttcaaaaaaaccgctaataaaattggcaaaggatcgcataaaacgtggaacaaagcaaaaggaacagtaaaaagaggaccaaaaaaagcatgggagaaggcgaaaggaacgatgaaaaagggatggagaaatgtgaagaggaaagtgggatgagaatgaaggaaaagcggaagagagaaaaggaagaaaagtgaaaggaagagagagagagagaggaaaaggaaaaacggaagagagaaaaggaagaaaagtgaaaggaagagagagagagagaggaaaaggaaaagcggaagagagaaaagaaaaacggagggaggaaaaggaaaagcatgatgtaatttgcatttttttttttggcttgatgctattctgttttaattgtccattttattatccgtcctcattagtctcatttatgtaatttgtttaacagtgatttatttttttattttattgtttgttttctttattacttgctcttttactacaatttcgatagttacagattaagtggtgtccccgcccttctgtgacttatttttcttgctgaaattaaataaattaaaaaatatattttgaggtttggcacaaaaaggatgtgatttacgcccttttgccctttttaaaattttcatttatttttaacaaatgccaattttttaagtaaattcacaacagtggtcctttttaacaaaatctgttaataatttttgccaagtaattccaaatttttcccaccgccggttaccactcattaggcactgtcagagaatactgtagactaaaaatccgctacttaaaattaaaatttgttctctattgctcagatttcacaaaaccttataacgctaaaacattgtttgattgtttccaaagatacacataaatataactgctgaacatttttgatgtaaattattgagatttaacgaataatttttttttgaactaaaagtgatttttatagtacaaaagtttttttaatgtccaaattagttttttaaaaattaagagatgactaaaaaaacaacaattctttcattgattcgtttaatcatcttccgttccatcacatcccttatcaattgttcgcaattactgctaattagccaatcgatccgtttgcgtgcaattttgtatggtaacagcagcaaattgactgttcattcgtttctggtcccagtgattgctgcttctcctccccctcttttaattttccgtgccattccctccgtcgagaaatgtcgtcgccttcgcttcgcatttgcgtggtcggcgcgggggccgctggcctttgtgccgcacgacgcgccgtcgaacaattgcccggggcggaagtgagcattttggagcaaaatgaccaattagggggcacgtgggtgtacacggagaagcagcagcagcagggcgcccagccgacgcactcgtcgatgtacgcctgaattgaggtggtggtcggcggaggttaaagaagcacggtagaaaacaacagagaccggaatt

SEQ ID NO: 18851 - DNA, 870 bp, Heterodera glycines
  unsure (1)..(870): unsure at all n locations
cacaaaaaccttcggataggcactaaaataggcaaataaaattttttattaacattttttaggtagcaaatcacgtgaaacctaatcaaaaaattaaattttcttatatttcaattgttttaaagttttttcgaataaggacaatttttagtcaaaaacttttatcatgaaaaaatagtaaatttggtgatcaattttctgaaaatttttttcaattcttagggtgtgtattttctgaaatttttttttggtcatttcttaggggtgtgtttttcgtttttaaaagtcatctgatttagacttaattttttctaatttgcaccatttagataaattacggtgctgcgccgggtgccctacggtacgtggaactgatgggactaatcgaaggtctcttcaacatgggcgccaaataccgccaattgctcacttacatttcaaatgtgttggatccgaattttgaccgagtaatgcctcccgtgctggccaaaatatgcaccaaagggcccgtggaatcgcacaaattgttaccgtattaaattgaaatatgctatttctaacattcgggcttaggtccgacatgctatttgtgcttatttcttcattattttgattttaaaaacaaaaaatgtgattttaaaccaaaaatttataaaattgattattttggtgcaaaatctgttaacaaatcgcataaaattttcaaaaaaaacaaattttaaattgctctttccgatggacctaatagtttttgtattttataccccagtagcactgccgtgcgcggtatacgtgctggcgttgggatttggagcttcaatttggtagggggaattgggtgcattggnattgcacacacatactcccgac

SEQ ID NO: 18852 - DNA, 2261 bp, Heterodera glycines
  unsure (1)..(2261): unsure at all n locations
tcagggtataatatatgcntaaaaaaaacaatatttcaaaggtntagactgcatnttcttaataatattgtattttcctcataatttcttgaaaaaatttttttacgcctaaaatttattgttattagtaaataaatgatggtatatggttacatcatcaaggcggtaaaggttcccaaataaatcactaacataattattcttttaatggactctaaatgtttttccccaatttaatccgtatgacgtgttgtgtcatgtccttaaccgtgtgtgtgtgtgttgaaattcatggccattttcttgacgttgacgaatttattgccagcacgaaaaaggtgttttctaaagtcgctgtcgaggatagccaaattacgagagcatttcggtttgcctcttcttcctcgtctgctcatcacgagatgggggacctggcttagtggagcggatgtactattgtgaacattttggtcaagttgatgcagttgttgaatgtttctacaagaacgattctgacgccataataaagtctcaaattacattctaaaagcccaatgtgcaagcagatttggcaattttctggaaaagctgtactcgggcgtgggctcggtttaaaaatttggacctggaccagaaccatgcgttttttgtcacggaaacccggacccggttcttcccaaatacccggtctcgtgtaaccctaataaaaagcgcgaacccccttagttataaatagtaaagttgcttatttttgagatttgtgattttgataagcatgggaacaatttaattgaaaaaactcacgctcgacttgaatctaaagagaaaatgttccaaaatgtcaatgcaactcaaccggaaaagccgctcccattttcccttttctctatttcctaattaattacatatgtcatagtctaattacgtgctgggtcgtttcgtaaacagtgtcactatgggcgtttcgtaaaaatgacaattttacagctcgagaaaaattcgttaaaatttttcaaacactatgtaaaattggcacttttcagaaacgaccaagcaccgtctaattaccgctcccccgccccccccccaccacattatggaaattaaataaaatggcttaatttgctgcccaactatcaatccgtccatttgtttatttattgttgacttttagcacaatgtttggcccgaccaattcgtcccatttggacatggtccaagtcaaatggcactttggctttgtcctgcttcagctgatcacttcctctctccttatgcttatgcaattgagcattatgccggtctttttttccaaattttaattgctttacttccatttattttgtctcagctgtttctgatctatgccgacctccgacgacgcattctctaccgaattacgttgtgagttgaccagtgagtgagtgtttgcatgtgaccaatgtgttgatttgttaattgcttcgttccattttagttcgctagcggtgtttacattgttgcttgggaccatttgatcgttcagcactttttgctcgccctcaaccgtctgatcatcatcgtgcgcgcccattattcgcctgtctcatcctcgattcagttttttcccttcctctcctggctgattatgttcctgctgatcattcatgacgccgctgtgcggtggcgtttgggatcatcaggtggtcggcttcttctacgacactcgttttgactgcagcaaagtgtacatcgatgtggagctgtatttcacgatcgctttcccggctctgtccgtgctcatttacctcgtcattgtcgtcctgttaaaaaaggtcatcctcatgtaacaccaataaattcgctggctactttaattaaattaattattcttttatttttttcccttttacttaatagttgacaggctactttagcatgagaagcgcattctgctgctgtctgtgctgcagttcgccatcatcaccgcgctgatcttcgcttggtacaacaactaccgtagtccgccctggactttgtgttggaaaattgttgtggccaaatggcaacgaatgggatggagcgggcggtcggagcgcagcggaacattatgaacagaacagggcgggtaaatgatgtggaaggactgttcatcagacgagggcatccggtgacggcacaaggcggaacgaacggctcaaaagcaaacagatcncagcctcagtgaaaagaatttccagtacgagcaggcccgtatctaggggggggggggaatggggggg

SEQ ID NO: 18853 - DNA, 3263 bp, Heterodera glycines
  unsure (1)..(3263): unsure at all n locations
tttcttaaaactgccacccctctaatttcaagaaaattattgaaaaattttgaaaattgaaaaatatctttaaaaatttttggaatattataaaaacatgggaatattaaatattattagtaaattaataaaaaaaattaatgaacttttcgaaaaaaatctttgatttgcattttaatgatttgaaatttttggattttaaaacttttgtataacctattaaacattagaatttcaaaaatttcaatgattttcaaaaggtcatggccaaaaaattttaatttaaaatttttaaattttaatacaatcattttttatactttggtaaaatttaaatattaatattcttcttataaaaaataattaaagctattgaattatgccataaaatattggttgcagttaagtaaagctatgaaatttttttttaattttagaaataattcttcaaatattctaattttctcttataatttttcgttgaaatttttcattgtttttaaaaaaaattaatttttgaaaattttttgaacaattttcaaggatggcaattttaagaaacgcgctgacagttttagaaacgcgcatctttagaaattttaagaaatgcgcatgggtggcagttttaacaaacgcgtcagcacgaataagaacaaatggaagatctggtttaaaaaccagcttggactcactcttactggcgctagcgaaatcaatgattaaagtgaaattaaatatagttcatgagacataaatttaaaaataaaaataatttaccagaaaatgttataaatttaaaaaaaaattcgttaccttttactgattacgttgtgctatttgatctgaccaacgaattgcctcggtaacattggataacatcgtaccaggagtgtctattataaaatattaaaaaaagagactttaaaccaaaattgaattttaaaattaaaaaaaattataaggaaatcaatcattcctaagacagtcacaatgtacattgttaaataaaagtaaataataaaaaataaattcacttgaatttgttcagttacgagctatgatcaaaacaaaacctaataaaacattaaggatagccaaaagactaaaaatgaaaaaataaacaaaatatgaattaaataaaaataataaaacccaagtaaaaataaaattttggttataattgttataatgccaaaaaatgaaaatattttccaacaaaatggagcagaatgcagttttattctattttggctaagaaaatttaaattgaaaaaagtgctaaaagagattaattatcataactacaaatttttcaattctagaaaaatatgagcaaaaaaatttcaaaaatatatttaactttttttatcgtgatgaatttttaaaattttacaggcaaataaaaaattttctattttttgataaaccaatttcaagtaaaagcaattcatattgaaaacacgctactaaataagaaaaattgtacattatttttataaaaatagttaatgggaaaattagatgttaattctttaaaataaaataacaaagcctatgggaggggtgccgccctttgaaagtgcccgccacttaatgggggacaaaccgaacctattggctcctttgaggctgccgcctcgtggatattcattatccccaaatccgcacggatgttttttttttgcacacacaatccgcgccgcgcagcgccgcggaaatgttcatcaatcatccacctgtcaccaaagtgacaggtaaatgaattanaaaattttttctttgcaattttttgggagggttattttttcaaatccntgagatttttttttttataatgttttttctgatcctgaaattaaaaattcattttgaaaattgccaaaaccgtgcggttttttatcatccccccctccctccccgcccgcccccgcgccgcgatgccgccgccgcgcaaagcaatcgataatggaatttggaagaagtgtgaattaattaatgccgataaataaattaccgaattggacaatatacttattatttaaattcaatataaaaataaaattgacaatgaataataaatttaaaaaaaactttttccaaaagtaggtcacctgtcaggtgaatgatgggtttttatttctcttccattgatttcgcaatatgcacgtgactttttgttccaattatttcacaatatgagaccaaattgcaaacatgtcaataaaaaatgattgattggttcttcatttatccgttcatttcgcaatacgcacgtgactttttttgtaaataatttcgcaatatggacccatttttatttgatatggtaatgagtttttatccgtttcaaccattatttcgaatgtgcacgtgactttttgtttttttggctcaattgtttcgcaatactgtcccaaagttaggtcacctgtcaatcaaatgtagtattatgtagtgtcaaaacagcccaggtacaggaatgacccctcaaaatcccgagcctattgaagaggtgttttcctttgaagttgccgccccgggataggttcccgcaagatcctaaacctattggagagttgttttcctttgaatttaccgccttgggattttaccgcaaaatcctgagcctaatgcttgagtgtttctctttgaagttgccgcctcgggatttttccgacctcttaagcaaccctttgaaggtgccgccgcatggatatttattctcgccaaaatcgtgcgggtgttctttttgtccacatctcattctccgtcggttctccgcgaagtcgtcgtggcgcgccccgccgcgcaaagataatcaatcatttccctgccacaaatgtgacagtgaaaataatttcaccaaacttcaattttttgcacactaaatcccaaatatttgtcgctgttttctttgaatgccgctcattaaattttaataatacgtgtaaatttccaaatcctaaattttaaaagagtgcgatttaaaaaaaatgttcgtaaaccgcgcgttttttcttcacttccccagcaccttccccccgcctcagccgaccggagcggtcatcactcaaacgacatattatagccaattgcgagaaaagaagagcgaaagtgttctttaaatgaactataaacgtaaagaaataataggccgatgaaaatcttaaaaccaaattaagaaaatagacgaaaaaattaaatttataaattcaactagggtaggactttcaattgatgatgagtgtaccatttttctttcc

SEQ ID NO: 18854 - DNA, 1275 bp, Heterodera glycines
ttactccgaattgtacaaagaaatacaaaggagaagcggaaaaaaaggaaaaaaagtgccattcccgtcggaaaaagcggcaaggtgccacctggagctaaagttaaggggaaagggtctatttggcgccagccgaatattttgatttaacttttttctctgtcggccaattccaacatcttggtatcatttgaaagctcttcgcaagctatattagcttttcaaaaagctacatttacccagcattaaaaaatttattaagaaaaaacttcaaaaatttctattttttgtaattctcatgttataaccttttcggtaattgtctaatctccaagcaatatctggaaacaactcgggctggcgccaaaacgtgggcgacaaaacgacccctactctgagttttaagtgccactattctcggaacttaagctgcagcaaattttattgctggaggggtaagaatcggcttcatctactctcgagcaataaaagcgttagggtacgacatattatcgagctaagacagcattgaagcggagtgtaagttcaaagaacacacgcacgcacacactctcgacggacgacgacactcgactcactctcgagcgagacaaaacacaaacactcaccactcttgacccctatggggcgctgctgcacggcaccgcgtcggcagtggcggacaccattcttgaaataggagaagcgattggagagatgggaggcgggggggggaggcgggaggcacctgtgttaaaaaagaggaaggggtaaattggggggggggagaggaggaaaagccaagccaaccaaccgacggatttccctttgaacgaaaggaactccgagaggaaggagaatgtggcacacacagcggggcaccaccgtctcgaagttggagaaaaagtgccgaaatgggtggggtttgctcgggttgagtagtgtcaaaaattaagggaaaattcgaattgagacggtttcggcatcaaagaaaatagaacggcattccgtctcaacctgaaaacacggggaggggtgagcctagactcaagaaatgagcccctgaatctcgagaaaatctcccaaccccatggaaatacaatagcaattgaaaatgccaaaaatggcatgggatttttttgattttggcaaatttggggggaaggagctgagaggtgcagatattcttggcactttagaggggacaggaagctgatgagagacgaggatattcatttccctgaaatggaaaacggtgaagcgcggcacgaccag

SEQ ID NO: 18855 - DNA, 1807 bp, Heterodera glycines
  unsure (1)..(1807): unsure at all n locations
ttcccccacctctggctacgggcctgaatgaaagtaaacaaattagagtccgataatgaacaaacaaacaaaaatgaatattattttgtaatatggcagctcctataataaaaatggatattattacacattgtcatgtatgttccggttaagcatcgattaaataaaaagcaagctaattgatttaatgatttcataaaaacaaagcaccccatacagcggggccccccccccccncccccccggggggggggggggcagcgcccaattncactttcaattacccgctcgtcccccacatttttctatgacttctctgtgcgctctctcctaacagcacactctctccccctatgccaattatctcgcatgatttctctgtgcggctctctcctaatagcacacactctctccctatgccaattattcatctgatttctctgtgcggctttccccctcagcgcactttgtcgccatgccaattatccctccctctctgctttctttgtttgccctctctattcacagtgcactttctcgactaagccaattacccattgtcaacaaccgcagttctcgggctcctccttcaaaattttctacagtccgagtgaactttgtccgctgtggaattatcgccccttctttctatacacacactctctcccgccaatgcactgtctcgcctatgccaattatcgctctcgcttctctgccttgctctccaccgtcaatgcactctctcgtcgacgcaactttttgtcctccccccccccctctcttcttttgcgcagttgagggagggggagagggcactctctcgacaaaaagttcctcccttctccttctctgtgccgctctccaccccataacactctttctcgctcgatctctcgcctcctcttcaccggatgcagcactctctcactcactccctaataaatatttatgtgtacgaatatgtgcaacaataaaaagcgcatttgtcgcgctcttcttctgtgccgccaccgccctccggggggacaaagcggcgccgtcgccgcttgtttgtgtgtttatcacgcccgagggcattatgcgcccatttatgtgtttgtatgtgtgccaccgccagcgccgaaagggtgccgcgctcattagcatattcgcgcagggcatggcatgagtcacccacccatccatacatccaacggcaaataatgagcagagcatttgataatttgttgccggttggggcagaaagtcagttaacgagcaaacaaaaaaaaaagcgagagagacaaaatgccaaaaaaggaaaattcaaaaagttttacgcctaattgcccacgagaatgaagcgaaaacaagattaattgtgaatatgaaaaatattttcaaacggaacggcatgaagacagttttggcattaccatcatatttacgccttaagcaggcgaacagatgggggataaaaactaattagtgattgtccaggcaattttgcattttttttaaattcccgaggcaattctcgacattagctttcctcgagtcatttaagtgtcattatttgtcaaaagccccccccccccggcttttaaaatttctgtgtttaatgggtaattaattagaaataaattaatcaaaaaaatcaaaaaatttcttccgtaagaaattaggccgggaatatgtggaaatgagcagcagcagcaaaaaagcttaaaagccttgctccccccccgtccattaaacttttctcgtcgtcctccgaatgtttgtttcccgtccaccgaccgccgctccgttgacatttttttttgat

SEQ ID NO: 18856 - DNA, 2849 bp, Heterodera glycines
cttcgaaactaaattaaaattaccaataaaatataatttttcgtctatttaccctttcggaaatttttggcaatttgtttgtttcccgctttcttctgccttggttttttgaacattctgtttctgagtgcttcgcttcattgcaaattggaatgtttgtgtcgttcagtgggaattcttcgttatctctataaatataaaaatatgaaggcaaaagaatttttgaaattttcattatttcttttgcaatgttatgaaataatttatagaatttacagattaataaagaacagaagctgaataaagggaaaacaattgtaccgcagagtccgttggctgttggtttcggcttcaaaattggaaagctcatttttagcttcctttgtgagtgctgatggaagtggagatttggaagcatccgaaaaagacgccgatacttttggtatagtaaatggaatgggaaattttgtgtccgatgcaacctgacataagtttaaaaaattgaaatttcattttgttcaattaattacttgagggtgcacagaatttgatgtagcgtcacttttcttgtcacttttgttgcaatttgaagtgtttccattcggtctttgtgcatttgaattgtcacttttgtgcccggtcaaaacagaatgttccatctttttgcctgacattgcgttctggtcacaatcggtcttctttgttccgcttttttttaatttcttcatttgtcgtgtgttgtcttgttcttcgtcatttaattttcgcttttcactttttttgtttgctttttgcagatccatcaaaattggatcagtcgcaagaaacatttcagctgcaacactgtgctgtaaattttattcagaaagacttcaataaaatctttaatcacctctttttgcatttgattttgacggtttgcattcactgaaggggaatgcctttccgtgatgtcctttttgcaagaagtagaaatcattgtacgtgaaacggccaacggatttggagccgtagatggaacactaaaagtttgtagaagaaataatttggaattgtagttccccagtaaacaaaattaacaatttatgaacaaaaagtcaaaacccaaatttctcgaatttcgttttttgattttcgatatattcaggtcgggttcagaattggtcaaaatgaatgttatgcatatttgagctcgatccaaaaactgtttatgcagaaaaatttaaacttgaaaagtttagctctgacctcgattggttctctttgtggtaatgaggtggagatgccgtaaattgcaatcttggcgatttaccattgatgtcttggaaggagtttttggagatcttgtttgtcgtagagatcgtcttaacggcaagtgaggaaaatggaacatcggacaaatgcgaaggggatggagaatatgaggaagacgatgttgaaatatccattgagtcagagtccatcggtttaattaggtcggcttattatgcttaatatgtaaattaaaataggtcataacaaattgtaattaggtacctaattagcaattctaaataaataaatataagtgatgaaagcatctcaaaaagatattcatacatttgtattacctatatgcagaattacaaattggtctcatggttttatgcttatcagaaatttgacaaaaacaaaattaatttctaaacaagagattaaaatttgaaaattaaaaaaatataggttttaatttagtttgattcttagcttagggataggtgttagccgatttccgaaattttgtgagggaagcggtaaaaatcctgatgtagagaagtagataagttaaaattatttaaaatgctgctactaaagagtttgtgaacggatgataaaaaagtattctattaatgtctctctctgtccatcagaattatgtattatttttttcatatttttctttaattttcagtcaaaatgagtgatgatggtcctgcttccaagcgatccaaaaatgacgactcatctcaaggagcggcacaggttgtgtaaacaattgtaaaaacaaattaaatgtttttaaattggttaggattgtctcaccgagtctcagaaagcgcttgaggatttggacaaagtgcagacggaacttgacactttaaatgaaacagccagcgacgaaatattaaaagtcgagcagaaatacaatcagatgcgaaagcccttcttcgaaaaacggacacacttcatcaaacagataccaaatttttgggtgacagtggtgagtcactacgagcaattgcccattttataatgcattttgtcagttcataaaccatccacaaatcagcaatatcctcgaggaagaagaggaagaatgcttgcactatttgacgaaagtcgaggttatcaagcccaaaacattaaatttattacttttatttcaagattgaggaaaatgaagacatcaaggccggttataagttgaaagtaattaagggacagacgctgaaaagttggaccatcaaaacaaataaattctttcttttagttttctttcgacccaaatccattcttcgagaactctgaaatagtcaaagaattcaattggactgcagcagaaccgaacagtgtgacaactgaaatcaaatggaagcaaggaaaaaataaagtaagtattttcttgaaaattggctaaaaataacaaatgttcatttttggacaaaacttgttagaaattactcaaatttcaaaatttttcctggctcggactcccaggtggggggatatttcgtaaataaattttgaccacccccttgtccgttataatccctaatgacttttgaaatttagaatctgggtttactttt

SEQ ID NO: 18857 - DNA, 987 bp, Heterodera glycines
ttaaatttcgtcacttaagtctatgcttgttttactattgttctttagatccaagtgaggtgcaacttcaatcgaaacgaacttcgtccaaaaatagggctggattaacgggttccgctcggggtgccattcagccaccctctaaggaaagtgccgaaagttctccggcaccatcgtccctcgccactcatcaccaatctgtcgcttccatgactctgtccatttctgccaacaatttgcttaatttcaacataaattctcctcgctcttcctcctctcgtgcctcgccaatggcaaacggtttttgttttaaattttaccaaaattacgaaacattaattatattgtaagtaaaattggaaaaattatccgaatttccatttgcctgcgtccgtttgtgaattatgccaagacttttatgtggattaaaaactcagggttcttgaccccgacatttaataaaaggtggctttgcttttcagtttcaaagttgcgcttccatagcacgaagggagtgaatgtgtatttacagcatgatgaaactgttgcagttcggaagcacggcgaatattaccagggatacgttttcactgaaaggccaataaaagtcggagaaaaattggttattttggtcagccaaatcgaggactctttttccggcagtttggcgtttgggctgaccagctggtgactgacgacgtcgattgtccgttgtagataatactgatttagtgacccgtcaaaagtgctggcctccagactgcccgtggacagcgacgaactgttagaaaggacggaatattgggtgtgcatcaaagatgttgccgcgacaccgcaagtcggggacacactctcatttcaagtggacgcggaaggtgatgcccgagggtctgggatttaattcaaccaatatttgtagggcgggtattttttcaaaaatgatgcaccgtcgcgagtgattatgcacgtggacatcagcattccctt

SEQ ID NO: 18858 - DNA, 2040 bp, Heterodera glycines
tcttcctccatccgatcgttccttccgcgccgagtgcaacttcatcctcagctccttcttccaccactccgcctttctcctcctattcgtcgattgttgaccctgcggagttggcacagattcgggccaacattgctctgcgaaggatcaaccgaaacagcgacacttccaccggggaaagtgtggcccaaacttcgtcagcgactgcgggtgcgcctccatttttattgagtgctctcaattcaaatagcagcgcaatttcggcaggttcttccgccaccacttcaacaaatgttgacttggcgcctggtcgttcaccgccaacgctcaacgaactgttggccaatcgacgaattcagttggaggcgcgaatggcagcattgacaatactgagggacaaccaatcgccgattcgcgaggacagcagtgcgtattcgcaaaggaaccaatggcacttcagcagtgctttggacactccaaatacgaccttttcgggcgcatccgttacagtgcgtttgtcctcctttatttagccatttaattgtatgatatgtccgaacttacaatttcgcgatgcgtttatgcttttctcattttcttttaggctcctttgcttcctccaccgcttttctctttgggagtctctgccgagcggtcgaatcggccgatgcgtcgccgcaacttatcggatttgagttcctcgagcgattcgtctccgactggacgcttagaagcagcagaaaattctgagcaacagctccagaacaatgggaacggcgatgaacagcagggcagcgaatgttccatttgcatgaacaacagagtgaacgcggtcatctaccggtgtggacatatgtgcatgtgggttcagcagttgtgtgaaacgattagcacaataaattattagacagggaatttaatttgggttcactgatcggttttacgcattttcttttttgattggaattttaaattaatattttgtattatttcttcgttttaacaggtgttttccttgtgccaaagagacgcatcgtcgttccggagattgtcccatctgtcgaactccgataagtatgttttttgttgcttattgttcgttgtttagtttagatgtttccccttccagtcgatgtgatccgttgctaccccgtttgaagaatttgacagtgtgcgagttgctggcaattgccttaattcaccttttctttttcgtgcggcctattctttttaattgcataaatatctctcggtcacttttcatttaataatacaaaaaaaagcacactcattaaagtttttatcctaccaaacatcgatgctttccttaatcattcatttttgtcttggctgtcattgttttttgcaatgttttctcctgtctgtatttgtatgccaatgtgacttatttgtcagccaaaagatggcgaatttgatgtattttggtcaaaatatgtgatgttgagaaaatggcaggtgaaatttaatgagcgtataacattgatccacagaatataaatattttattttgatgttttaataacaataagaaattattaaaaggctgattgaataatgcttttctatttggggtttgaccggcgggctttgttttggaagctcttcattaaatgcatcaagctcaattattgtggcataagcgttgtgattgtttgccgaatcagcgccatccttccaacgattctctgagcgaagaaaatgccaatggcattggccgttgtttttacctttgtgcttcgatcaatggcattttctgctctttgtttgtccgtctcccaacactttcgcctccaattggccttttcgcgtctgacgacgataatttgcttctctgaggcggtgaaaatggcgttggatgggactgaaagttccaatgggcgaccggcaaatcgggcggttggtggtaaatgggcggcggagggaggggagagacggaagctgaaaaggggggggggggttaaaagagcaaaaaacagcgagagattggccatttgagtggaattggccaaaaatagccaa

SEQ ID NO: 18859 - DNA, 1653 bp, Heterodera glycines
cgatcgagcagaagaggacgatgtcagccccgagtatgatgtgacgtcttgggatcttgtacgacaaggcgcaatgcaccgtctgtggcgttgttcgattttggtacctaattaggtacccaatcatccgatcaccagtacctcaaagatgaggaagttctcagccatgtaaaattagcgagaacggggatttaagaattgaaatgcattttatagattgggtataccctcgctcgtctgatggaagctgtgtatacccatgcagctgttgccggtgccatcaacataacgagagcacgccaaatgtgaggaaattggggcgaaaatcagcaaataaacatcaggaatttagcgaaatagcacgggtcggtggtgcccaccctgagaactttgaggtgttcgggctacgcaatgcagaaagggtacccttggtaatgatgagtcatgacatggcaacagccaaatttttgatttaggaccaggttttcccccgggttccattgcccattgaggaggtggtagtgcgcatcgaggggaactctgacgaggaggaggaggaggagcagcagcagcaacatgtcgaggaggaggaggagcaggagcaacatgtcgaggaggagcagcaatgttgtggatacaattagggatttaggcataaatattgataataaattgcaattttccaatcatgtcacacaaataataaagaatgcatatttacgtatgcgttctttatttcgggttattaaatcaaagtcttctaggatttggattattttgtacaaaacttatgttagaccgttattggaatatgctcctgaggtttggaatccatctcttctaaaaaacattaaaaaaattgaaaaaatgtcaaaaatatttcaccaaaagagttcttttcaaatgcagccttccacccattccataccaacaaagattagaataccttcaattgccgacacttgaaagcaggcgaaagctgtctgatctgttcatggctcataaaataatttatggccgaacagatctgaatccctttgaaatacttaaaccttctaaacgctttaacattcccttttatagacttaactcgaaatataaattaggcaaaaaatttataattcttattaagatttatatattcaaattttgagcagttgcctctgcctcaggtgcgtatagcgtgactattgaatgctatactccatatttttgatcaattctgggatggctaaaattaaaaggatttaaaccttaattctttgtttaaatattaaaaataactttaaaaattatattattattctgctttatcttttttttcctttgttgaaaagcatcacaataaaaacaaatagaatatataaatatattttttttgcagtttttttacacacctagttattctaatagagtattaggttaagtaattaaaatttgttatgattagaatgttatattcaataggtatatagatgctgaataggagcaatgggtattttcttatttatctatgaaaagtttactttttttttatctcgtgcagctgtccgtttttgatttatgatactaaggtcacattaaatattttgtgtcataaagtgattcattaaaatcaaatatttatttaatttcttattttaataaaattca

SEQ ID NO: 18860 - DNA, 2718 bp, Heterodera glycines
ggttccttccgacaaagggaatcgcctcattttcgttcgacttatggtccaacggattacccaatcattggcgggagtttgtctctcccttcctttttgaacaaaccgcccaaatctttaaaaaggtaagtaatcaaaggcatttctgctccgttcatcctaaataaatttggtttgcgtcattttcagtcgaaagattgccaataaaagaaagccatgcaattgcacaaaatcaatgtgtctgaaattgtactgcgattgcttttccaatggcgagttctgtttggactgcaactgtaaggactgtcacaacaatttggagcacgacgcggaacgcagccgagcgatcaaacaatcgctggagagaaatccgagcgcattcaaaccgaaaatcggtcacccatcgaacagctcatagttagcaattacggattttctacgctttaaggagttgctgcaaaaaatatcggaaaagcaattgacatggagcgtttgcatcagcgcgggtgccattgcaaacggtcgaattgtctgaagaattactgcgagtgttatgaggtgggaggagcagcgaaattgtcataaaaatagaaaaacatggacaaacaatggtttaacgccctgtaagccaaaacatagactttcttaattatttcgcctattttctatgccgacaattggttggcattctgtgcctaatttggcttttcttttaggcaaaagttccgtgcaccgaccgttgcaagtgccaatcgtgtcggaacactgaacatgaccggcataataagttcaaggacaagttcactaccaccgcgggtggcctcgcccaactcgcggcagcagcggccgccgagtcgcacgcgcgcgcgggcacgccattgagcgaggacgacaccagcgacatttgtgtaggcgaagacgaaacgacgagacaggcaaacccaaaaacgtgcgaatcgaatgtttggcattgtccattttgagatttgtgattcagtcagccgtggttttatatgacagaggacgtaatcgaagcgacgacaatgtgtttggtatcacaagcacaggaacttgtaaatgaaaaacaaaagatgtcaacgccaacaggcactttattttcaggagcaaagtctttcggaggaggcgttggaaaaaagcgttttgcgggagtttggccgttgtctcgagcaaatcatcgaaagtgccaattcgtgcctacctcagaaaagtaatggcgctccgcaacattttcaccttacacccattgaaaaagctatttgagggcaattaacagactgacttttttctgcgacgccctcttaatttgattgtcacttctcatttttggtctccctcaacccaacattcgtttttctgctattcaatttattttttaatgatataaaagagagtcagtcagccatttgccaatcactcccaatattttcgggtcagaggcctttttttttgctttttccaactcatcgcggaaaacgaggatacaaatcccttaattatcgtctccgttttgctttttatcagcacacatgattttctctgtatttgttgtccgaggaaatcgtcggtcttcgaaatttgccaatgttcggatggggggggaagggattatgtgcctttttctttcgccatttgtccgagtccgccgctgcttattccttccttcatcacatcagtggctcattagtggataatgaatggggcggggggtgtggtgcgatgccatcgggtttaatgccggcgagggaggggcccctcttcggcggttagaaattagccaccacttcttttcctttgccccccaccccttttgcattgcctttggctatgtcttcgttacgccatcactttttccccaattcgagtcgtccggccacttccttctcttcctcttcccctgctctcttccacagtgcttcttcctcctcatcctcctcccattccttcttctcttcccccaatttgtccccccattctttcctcccccctccaaatggaaatggcgatttgctgtggctcagtcttttgctcgttattgtggccgtggtgatgctcatcgttggaattggtgagcagaaaaaaacgaaggcgggggaggggagagaaagcgacggaagtgtcgttttattaacaagcgaagttaggaagaaagaggatggaatattttaattgtttcggtgatttttaaaaaccaacaaaaagtagtttttaattttggtcgtcgagcccatccttttggttttaggggtgtatttttccccgtccccggcggggattgagtgcggggattcccattttcggggattggactttgatttttgattcacaacttttttttttttgcaatttatctgggattaaatctgagtgggggaagggggggggtaattaattcgaaggggattaaaaaagcaaagacagagagataatggtacggacggaagagctaatgatggaggtacagaaaagagaaatgaaaaagaaaaaaaagaaattgcaaacgcaaaaaaggcagctgctcacgcacttttcagtttggagtgcctttttctgccacagtaatttgcctttggacgacgaaatgcgaaggaaaagggcacaattttgcgaaggggacaaagggaggcggcggagggcgacgctttgctgggggaaaatgaacggaagggaaacggtggccgaacacgcagccgacgcgcg

SEQ ID NO: 18861 - DNA, 2794 bp, Heterodera glycines
gttacactctctctgatcagtccgatcactctattcccttttttgttacactctctctgatcagtccgatcactctaatcccttttttgttacactctctcggatcagtccgatcactctaatcccttttttgttacactctctcggatcagtccgatcactctaatcccttttttgttacactctctctgatcagtccgatcactctaatcccttttttgttacactctctctgatcagtccgatcactctaatcccttttttgttacactctctctgatcagtccgatcactctaatcccttttttgttacactctctctgatcagtccgatcactccaattcctttttttctctctcttctccgttaaatcccccccccccaatttctcgtcgtattttttccacttctagctgacttctgtgctggtgatgctctcgctcggctccgccgtttatgagccgcccggcaccaccttcgtttggatcaccgccgttttggcactgatcactgactgtctttccatgttggcactcggcttcgaaacggaaagcgcactgttcaggcccgactcgatgatcggatggccgctcattgtcagcagattcactgcccaatcattagcattcccgaaaattgaaaatgccgagaatttaattggagagaattgacccccgacgacattcgaaaatttaacaaatcaaaattacccagaaattctgtaaattttccgaaattgggaacttttctaattggttttttaaatttttcttttattcatttatgttttaggaatgtgtgttctcctcattcttcgccatcaactattttatctcaatttggctttgcattaataggtaaacagaattgaaaaaagtgccgttgatggaaatggatttggcagagtctcaaaaatggctaaattttgggattgaaccaccagaaaagaggtcaaactgtggtaaaaccgaacagaaaatttagcaaagtgttcgcaatgctcgacagctcaatgccttactcattggcagcggtgggttcaaaaagataatccaaaaatcagaataaaatggcaaaataactttaacattctaaattaattagttcatattataacaaattcagaagcgaattcgtaaaaatgataaattaaaataaattattatttaataattttaaattatgtgaaaatggaaaataattaattatttttaaatcattcgaataaaaaacgattaaattgtttaaattgccccataatttggccattttccgcttagactttctctttggtcgcctttgtccaatatgtgcttaacgtgcttttctacgtacgcatttgggccactgaccagcgcagacagtcgcaggagatcaacccgagtcggcacggctacacaaattacggggcgccataggaaatgggggaggagcactaattgaacaataattggcccattgaagggctaattaaccaccggcgcaatggcaacaattagggggcaaattgtggaaaaaaattttgcaaactggagattttggctaacaaaaggccccaaatggatgggccaattagctaaattttgtttacttctttgtgtatgggttcctttttaaataatcatttaaatttgtaaattatattttaatataattgttttttaccaacaattaaattgtcaaaataaatattcattatttttaaaatatttcaaatcaaaaattttacaattagactttaatttgatcactttacaaattttattttcatttttaatgttaataaattcatttttttaattaacattatttttcacaatgcatttgatcggcatgtaaatcatttgtattttattacatatattttaataaaattcatttattgtttttcctcttttttttaaacgcaatgcctaaaattgtgccaaaacaacaaattggggccaacgtgttcaacatggtcagtttgttggtgggaagaagccagacgaaaaaccgaaaattgagtgattgtatgtatatcgcaaaaactgaaatgtttcgatcagttcgcccctcccccaatcgattatggtcaatggtaactcatataaaaggcaattagtattctacagaataaagcctaagcctaggcttggcctaaaacttaggcctaagcctaacctaagcaatgtacgattgccttttgtacgagttgtcatgccaccatcgattccgatccctctgatcaatcccgatcagtccaccgccccctccatcaaaaattaaccgatcactcacttactgccccactcttcgttggcacagatgctctccttctgtcttctgttggcactgtcctcggctgagctgttgcccgccacgctcggcgtcgcgctgttcgtcggcctcgcctcgttggcggtttcctctgtggcggtggccatgatcacctcggggctgcattggcaggtggccaaattcggccttttccacgcgttcgctccctacggcgaaattcagtggcgacatttggttgttccatttttggcacttttattccctttccatacgatgacaatctcccgcccaatttccccaccacagcaattcacttatgcggtggcattggcctcctccaatggaatcggctttctgctgaattgggccatcgcctcgtcccttccgcgtcctttccatcggtcgtattccatcgcagcggttggcacaatttggcatttattaatgaatcaactaaaatgtctcggcttccgaaggtctgaaaagcgggttttcggtcaaagttagccgaaa

SEQ ID NO: 18862 - DNA, 2799 bp, Heterodera glycines
  unsure (1)..(2799): unsure at all n locations
aaaaagggacgaaaaatgggaaaagcatcagaaaaagtggacaantcatcacaantttccgtacaattttatttcattttccgaccaattgttggggaaatgtgttggcaaatgaaaacggaatggacaatntagcatcaaaaaatcagtttatatttttcagaatttttggtccactcggtagcccaatgaataagctaatgattggtataacgatctaaaatctgctaatagtagaaaaaagttacggtgaaatttataacaattttttggggtgcgttaaacatatgaccatgactgtaccaagaattattggcttcaattggatttttacattgctctcagtcatggcacgcaaatccgtacatttgcgtgcggtcggtagcatgaatgacagaagacgcatttttgtgattaatcaaaaagaatttcttaaattaattttcaacatgtccagaaattattttagtgcaatttgtttaataaattgtccaaaatggccaattttgcgtcaaaattttgataatgccataaaatttgaaaaatttatgactaattttatgaaatcagaataaaatttggtcattaccccaaaatcaacaatatttctaacaaatcagtacatttttattttgtcggatttggaacatccaaaaaaaaattgtcagtgatatcagaaaaaaaatcagatcattgatgttcaattgatattggataagccaatcaatcatttacaaagtctcaaattcctttgacagttcgtatttgaagttgggaccaaagttggcctcgaccgcggccaagtgatcaaacaatgtaacggtcgggtaaaggtcagccgttccctcgtcaacgtacaaattggtgatgtcttaattaggcaattagccagtttatttatgtgaattgccatcatgaacacaaactcaagcgttgtccattcttcgtgaaaaacacagcgtgttgcccaattcagtccgcatccgaccacatcgccagtgcgaaatgatggcacattgtccctaatgcttatttcatttccattggcatttgtgcttataatctcgccaaaatttgcgtaaccgtacgaaacacggccatttccaacccaatggtccaatggcacttcttttgttgatagtccaataagtatgctgaatttaaattttttttgtcataaaaaactgaaaataatttttatgaaccgaataactaaagacttgcgttaaaaaaacaaaaataaataaaatcaaattttttttattcataaaatttttgatttcttgtatttccccggttggtcccgggttttcaagaaattcttgtccagctcagctgcttttacaaaaaagattaaaaagaaattcagactgtaaatttttgattttggtagataatggagtttatatatttttttttgctgttccacaactcacagtagatttttagcaagaatccgaaattccgtataaataatgccaatgcgaacagcagcagatgacattttaattggtcctgctcggcatgaacgaggattagccgtgccatctttgatggaaaactctaaataacatttaaaaatagtgaaaatgattcaattccaatgatttttagtcgtgctggcgcgtttgttaaaaactgccacccatgcgcgtttgttaaaactgccaatgggtttgaaaacaaaaaatgggtaaaataattaaattaatagcttggctcaaattcaaccaaattaatatttcggggtatcattcaatagctttaattgttctctttcagaatataattttcttatatttttaacttaagtataaaagaagttataaagcattgaacaggctatgttttttgcaatggtaatgcatatataataataaacatttaaaattttaaagtctttaaaatgaaatttaaccaaaattaatttatatttcgatagccctaagaattctctatttactagcggggnacttaaacgtcccctctgactaaaccggccagactaaacgacccctcccggtctatcttttattctttgattctctactaatttccgaataggacgattcggtgccgccgattcggtgccagggtgggttcactgccaatacttttcggacactatattaaatttataaattaaatgaaaacatattattaaggggttttgaggttgctgaacacggttatgacagcttaggggtaaatgttttttatctgcaaaatcgaagacaatctgaacttcgcaaaagggagcatgcgaagacggagcaagtagtgggtccaccactcgccagtgggggatgatgatagtcatgtgctcatttggacgtgcatggacttaaaactcacctccattttgcaaagaaaatttaaatcattccaaattaagccaaaaaaattctttactctattaaataaactcacttattttgccatggaattaatcagaggcgtgaccgacagaatgtctgcaatgttttcggtgttggtaattgttttatgcaacataatacagaatataatattgatttattaagggccgcaacttttagtgacgaaaaaacccaaaatagttaactaaaatagtgagtaaaaatgacaaaatagtggcaaaaagtccgaactagtgacataattttcagcccaaaatttgagaaaatatattttttattaactggtttgcagctggaaatggagtaaaaagggctgggacttttaagaggaaaaaaccccaaacatagatacctaaataaatttttgccaagaaagtaattttttgagaaattttttttt

SEQ ID NO: 18863 - DNA, 1024 bp, Heterodera glycines
  unsure (1)..(1024): unsure at all n locations
catcgctctctgtttgagtcgcaagcgtagtaatctaaacggaaaatgaaaaagaacaaatgacgagacagcccttctccacccacacacctttttaacaaggttgaatattggatgtttacaatagtagcaagctgaaaattggagaaaacaacattagttcgacttggtcggacgggaacctatcagacactccggcctttcgacattggccgcgtcggagattatgtaacggttgaagacgagagaattcttttcagcatcgaattggacggagctgaagcgagtggacgatttgcacttcttcgcttaaagcttaacaattggatcgaatgatcatttaacttacaattccatggggtcagctcatcaatgggcaaatctttgatgctccgtaccactgctccgtccattatatacacaaaagactctctccctttggcatcaggcgggcgatttggtcgtaattggagcactttgctgaggtcaacacttaagcaaataaatatttttgtttgaaatttgatgtggcgcaacatacattaagccaatttaatttattttaaaaattatattatgtaaaatcaaaaaattttgacaagcttccctctcgatcatgtaatgaaaaaccacaaactcactcaccaattattaatgttaaagacgagtctcgctgcggtttgtgaggatgaaataaattctttagaataccaattttccattttaaatactttaaaaaatttagtattattatgtacatatgtaatataatgtacaatattataatactggagaatctgggctccacccaaaaaaattgtttttttctgtttggaaagaccaacccgggggtttcggggtttcgatcacgaatatgatatcagatttgaaaaatcattgattctttcattgatttgaacatcataattttgtcaatatgttnnaaatgttgcacccttttttcgaaatgagtaaccatatatgagcagcactttttattagccactgagatgatgatagaaca

SEQ ID NO: 18864 - DNA, 1053 bp, Heterodera glycines
cttcccttttcacacgcacatttgcaagacacctttggaaacaatttttaatcatacatatatttctagagcaacaagtcactcataaagtggaaaaattaatactataataaaaagaaccaaattaaaactttatatatataattacataatttcgttatttagtcagaatctatgctttttctttttttattcatctcccgtttttccgggactcccggtcccggcctttgttcaaaatactagaactgggagtcctggccaatcctttcgggctcccggtcccatccgagctctagtatttatgacccataacaattaaatttgcattatctattgttatatatacggttaaggattaaaaaatataattcggaatgggattttcgacaaagccaataattattgacggaaaagatcatttgcttggacgtttggccgctgtcacttcgaaacagcttttgcttggccagaaaattgttattgtgcgatgtaagttttttctttgtttattctaaaatactattcgatcaaggcgaatccatcaacatttctggcaacttccaccgttccaagctcaaattcctcgcatttttgcgcaaacgctgcaatgtgaagccatctcgcggacccttccactaccgtgcaccatctcggattttctggcgcacggtttcttttcatatttaggctaggctaagcgtaggcttgtttgggcctaggcttaggcacaggctttgtaaaaaaaaaattttattgcacgagttgccattgactcctccggtaaaatatgatagaaaccaagtaaattttgaatcttattcatttaggttcgtggaatgcttccgcataaaaccgcacgaggtatggaagcactgaaaaagttgaaatgttttgacggatgcccgcagccgtatgacacaaagaagaaattcgtacttcccaattctcttcgccacatcgcattgaaaccgcgacgcaaatattgcacaggtgagaggcattactgctcccccacataatcggaggtataaaataaattggtattactgg

SEQ ID NO: 18865 - DNA, 3852 bp, Heterodera glycines
  unsure (1)..(3852): unsure at all n locations
tataaaaagaatttttacttaatgaaataataaaatggatttttttgaaaaaaatacgaaaattatctgtggtggagggcctgtcactcccaaagtaaatgatgaaaacccttcgacaagctttaaataaaagattcaattacaggcaacttatctatgaagtaaaaatagaaataaaatattattaatatggctaacaaagtgtaaagcaaatatacttaaatcaaatatggtaacagtctaaaaataataaaaatagatgcttataaaactaatttttgcaagtattttttgataattggttaaaaaaacaaaaataatgaatatggtccatttaaaaatcaataaaagagaatttattttttaaaactactatttaaaaaatatgaatagatttttcaaataaattaatagttattaaataatttatcaatgctataaaatattcaaaactaaaaaaatagaagtatttaaaaaaaagttgataaaaaataattaagaataaatgcttactaaatcataattaagaaacttttaaaaattatcatttaataaatgatgaaaacccttcgacaagctttaaataaaagattcaattacaggcaacttatctatgaagtaaaaatagaaataaaatattattaatatggctaacaaagtgtaaagcaaatatacttaaatcaaatatggtaacagtctaaaaataataaaatagatgcttataaaactaatttttgcaagtattttttgataattggttaaaaaaaacaaaaataatgaatatttgtcagtattttttatctcgaaatataattcaaaataatggaaaaaaccatgatcaccgaccacaaattgaaattgacctaccatagcaacaagtgaaaatattattaaacaaaaataagcaaaaagaaaaaaaatcaacaaaaaatgtaaatttaaagagaagataataaaatcattattgattaatatcaaaaaacgattataaatttttaaaaaattaaaattccaaagctgtcgttactgatcagtacaaattgaaaagtttaaatcataaaaaatatattaatcaaaaaataataagaaaatcaaatattagaaaaaatggaatttcatttaaaagcaattgtaaattatttaataaaattaaagaaaatttttttattcaaattaataattaagattttattcatttcaaaagataaaaataaaaatcaagtaaactaaaataaagtagattgtaacaacaacaacatttttatttttttaatttttttatcctatactgcctaaaagtgactaaattttgaaataaaataataaatgttttcattaaaaatctagcattttaaaatgtttataaatgaatagtttgaaaaaagaaaaaaaataatgcagcattanaaaatatttctcataaaacagtttaattgcccaaatttgaagttaattaatgagaattgtattaatttattaaaatatttaatgtatttttgtgattaatcttgaattaaaaaatgaattatcggaaactgtaaaatttttatgatttttttacgaaatttcttccaatttgatgctccaaaagtgaagtaatgaataaaataatgttatatctataaatatactaaaaaaatattcaaaaaatatttaaagaattattaaagctaggatgatcccataaaaaaatattaaaattcaaaaatataaataagcataaagaaaagcttatttcattaaatagaattttaaaatatatgaatagaattttcaaatataataaaaccttataaatttagttaatgctttttaaaattcaaatatacacagaaaaatgaaattttaatgtttatattaaagaaagtgaatttcttttcgaagaaaacgaaacttgtggaaagatgaggagctttcaagcttgttgttcgatcatttttagcaaattaaagatattcaaaaaataataattatatttggctcaagaaaataatttgcataccaaaattaatttaagataaagagaagtgctttagttaaatgcgatataactaacatattttaaacaaatttactaattcagattattttggtattattaaattagttacatgaaaaaataatatgaatattaaatatattttttataaaaataataaaaaacataacttaaaaataatttgcacttttttataaaacaattttaaaagaagaaaaatattttaaagttagtaattcaaatagaaattaaaactaaataataatgtttctcttctatcttattgtgctcactctaaaatttacaaccaccctttgtcgtactcgcattcatggagtttattaaagcaattccgttcaaaaacactttttagtaaaaatttaaaaatagattaatgtaaatacctaaaaaaacgtaagtttttctcataaaccaatccgagattttattcatgtatataaatgatgataatattattatacaaatattgatgtcatataaatttgtttatttattgtgagatgcgttttggaacaagattttaatagcacatttaatattccctttcggaaacaaataattaataatttcataaaatttagtcaaaaataaaattaaattcccttaaaagggttagccgactttatattcatgaattaaaacatcatcttaaatatatttttacacaattattaaagttttattataattttaattataattatgtgtttttaggaaaaaacaataagatttaaataaaaaaggtttctgagaagcttaaataaaaaattcaaaaaatcacattcgacttataaaagaaaaaaaaacaaagtcttatttacggttgaacaaagacatattaataatgcaaaattgatatgaggtaattttttcattaaaaagatggggtaaaaatagattcaaaaccatataaaattttttatcttaaaaccaaattaaattaaattttatggtttagaatatccattataagttttttttattactaaaagatacctacaataggaccagataattaaagattctattgaaatttataaaatgtaaataaattttaaaataaattaatcattactataaattaaaaaaactaattaatagctttgaaataaattatttattaaattaataattatatctgcttctgaatttacacaatgttcttggaaagccgaaacaaatttagtcttgtggaataatgaaatgaaaattaaaaaattatgaacaaagcggcgaggatggccaagagatctatgaggttgaggccatcttggccatgtcggtgctcacaacgagcgagcggttatactactttacgtggaaagaaaaatttgattttcattgagttcaataatttgacgtcaaaacttaaaaaaatcaatataatcaaaataaaacttaataaaaattaaaaatatatacgcacggaaaattaaaaataattaatttttaaattatcatatataatgttattgaaatgaaaattatataaatttaagaaagcgtatgataatatttgtaaattcgaaaatttataagaaatatattttaaaaaataatattgttattctgaaaataaaactgcaatatatgtataattgagctaattttgcatgatgaataaaaaggtggctaaaattaaaataatggaaataagaaagttttcttttatttaatataaaagataaaatgaatcaatttaaaacacacacaaaaattatattttatatttagaggctttcttttacaggatttcatcctaagaatgaannttcaaatatggacgtgacacagacaagaattttataataatttatttttantataattaa

SEQ ID NO: 18866 - DNA, 3131 bp, Heterodera glycines
agagaaagcgaaagagggatagagagaagagatagatagagagagagaaagaacaaagtgatatggagagcggagagagatggatgagaaagagaaaaggataaggaatatagagagaaaggataaaagaaaaaaagtcttccacggtcgtactgtccaattgtctggttccaactaaatgacttcattatactatagtaatgccactgtcaacttagactctcgaacaatgaattaatgctctatggaaatttaaaaattaattattttaagtgattacaaaaaattaagaaaagacccacctaagaatatatttagattgaaaatttcgttttttaggcggaggtttccattttcagtctcttgactcattttttggaaataattcgagctaattatttcttcggccatttctagtttatactctatattaaattatattaatattttttactaattctgcaaaacgttttgcgcccatcatgtggccaaattttattctctcatagtccatcaaaatgcttgtaaaattttcaatttcatcctgtaaaatttgatgcgaagatggagcgatgtcaaccgaagctgaaagtaaaacaaattaacaaattcaaacattaatacaaaaatttcaacgataaaatacgaaattcatttttgcaaatatattcaataaaaagagtgaaaaattgttgaatttggattaaaaagtaaaaaattaaaaattggagccctagttacaactaacccaaagaatttttggcccacaatttagctttgtttttattcagtactcaaaaacagtttcggggaattttagtggatgcggagcatgaatctaaactcccatttgcccaataaccgaaccccggagccgaattcaaacaaatattgaaaaataattggaagcttttaaataggaaataagtggtaatacttgccgtcagtgccaagcttaaaatcacaaaatcaaaaacagatatccccacgtatttcaattgggctccaggaatatgaaagcacccaaatttttcgtttaaattaaatagttgaaaaattgctaatgaaaataatattatttttaaaactgttatgaccatgttgaagcaaaatcatgcccctgaggagaacaaattcttccatactcaaattaatttctttgaaacacttaattgattcgcaaaacacgcgaatcgccacattaaaagtgcccaaaaaaattggagagaatccgctgggaagagttagcgtttcggcatttggacaattgacgcagctgtagaaagttttgttgaacacagcggtcagaattatgttgttgagtagcagagaagtctaaaaatgaacactttaagctcattaataaataattattattttttattacttcagctaattatatgatggatttataacctcattaataaataataattttttaaattgctttcgctaataattagatggatttacttagcgtgtcaactcagttatgtcgcccttcgatataaaattcaacaaaacataagcatgacttaaataatttccatcacattcgaaaaaatttgccattttcaggtatgacatcaataccatgaacatagaatttaaggaataagagttaaccaagtaaaaaaatcgaaaacccacagaacttagttgacatcctaagtaaatgaaacgcgtcagcagggattaccatagcagaaaaaatgtaattatgtagtaattagtcaattagattagtgaataattaattgcctgatcaatcaatgggagttgccaaattgctggtatcgttttggccatttcaatgcacaaaaagcagtcaataaatagccatcgcactgcctctttttgcagcggtttgtcgtcaattgttggcgcatttggactccaatcatttgcaattaggtcaagaaagaattgcttatagtagggaacgcgtcttttcatctttttaaataaaaaaaaattttcataatttaaaaagacagagacatttttgagtgctagcaattcaaatctgaaattttgcacttttatgactagggatacgatttttaagtgctaagaactctcaaataggagctaaaaatggaaaatagtctctaaaaagtcttaaatttaggggtgtaaaatgacaaaatttattcaaaaaagtaacaaaatcaatattgagattattaatttttaaaaccaaaaatttttgtcaatcaaaatttttttagggtgctaaaataaggcaaatgtaaaatttatgagcacttgatttttctcagataagcatgaagaacgcgttttccgcttgatttggagtttctacaatgactttttttaaaaatttcagaaaataaattatttttcacaaaaattcgtcccccaaattttttttctgttcaatatttgctaagaaaatattttgtaactgcaatcagtgaaaaagttgtttgccttattttaaattattttcaaattaaaaaacagcctatttaaaaaattacacccctaaatttggaacttgttcgccatttttttgtcaatatttagttaattattttgggattttttgccactaaaaatcctcgccctacacatcaattttcctctggcttttcgcatttcatccatcccttctcgccaatttgtccaaaatttactaacaaaaatgcaataaaaaagaacaatacacccctaagaaacgagctaaattttttttctaaaatacctctaagaagcgaacagaaaattttcaaaaatttgcccgtttttaacacctaatttggggtttttttaggacctaaaaattaaggtgttacgacaattgcggaccggcaattgcggacgacaattgcggacgatatttgcggacctgacaattgctgaaaaaataactggaagggtgggcctcgtcagtacggtcccttccgcattacaaattcaaaaacctaagtgtgtttcggcccttccgtagacacaccaaataagaaagctcacagaaataaattaataactaacaaatagaaagcagaaattaggagcagaaaagcaaagcatatgattctaaaatatataattatgtttattttattggcttgctgaaggccctaaggaaagcttctacgaataca

SEQ ID NO: 18867 - DNA, 1112 bp, Heterodera glycines
aaataaagtccatacttttctcctgatttttctctatttttaaggctttattcctgtaaaattgatcaacccttcgatttgttatgaattttcaaatattaggccaaaatcccgagggccaaaaaattgccaaaaaataaagaatttttaaaaaattccaaaaattttgaaacgaaaaataaacatcatattcgtgctcagcacctcaaaataccccagaaaaatatttttgacctcctttttcaacccaaaaaaattttttgaaaatttctagggggcctagctcgaaaatttttgaaaatttccaaacataaaatacaccattcgatagcatttaaaatgctctacaaaaatgttctaagacaatttttcgctaaaaccaatccctgacgagttatgagcccaggactcaaatgtcccgctgaggccaaaatttttttctatttccgggaaaaaatcgaaaattttccaaaaaaattaccaatcgatagagctcgaaaaactatgttttggaagtggtcttcgtttttctgggaaaattcgttaaaaaatcctaaaattcaaaaacccgaaaaccgttttttaggcctagctcgaaaaattttcaaaattttcgaaattttaaaatttggaaaaatcgagctttcgaagctctacaatagtgccgctggctaccctgcgctcaggtcaaaacctaatgagttattcaacggggactgaagtggacaaagttggtactgaaaagttctagaagcacccagcccagggggttagagatagaggtctggaattttttttaatttttagtcaacatttcaacttagggccctcacagcgggaattttttgatccgagtttcagaaaaaaagttatgggccgtcaaacgcacgaaaaaatgagaaatccgtccctgggactcagtcgtccgcgctgaatttttttctatagttttcccggattctcctcaaaaagttgtaagacccttccactactttcagggcgctcccagccttcggccgggagattttgtttttgcaaacgaaactccttgtcaatataacatatatagtaactagcgggtgcgtgaaccgtcggctatttcgctgggaaaa

SEQ ID NO: 18868 - DNA, 1302 bp, Heterodera glycines
ttttaggccgctttgcggcctcaaacgggcgctttgtccacatcgaggctcaagacgggcgcttcgcgccgttatttaaagtttgttggttcatacgggcgcttcgcgcccgttattcaaattttgttggccttacagagattagaagaggtacaacagtgattaaaagacgtcaaaagtgattaaaagaggtggtactacagtgattaaaagaggtaaaaagtgattaaaagaagtacaacattgattaaaagacgtacaaaagtgattaaaagaggtaaacagtgattagaagaggtacaacagtgattagaagaggttcaacagtgattaaaagtggtactacagtgattaaaagaggtaaaaagtgattaaaagacatcaaaagtgattaaaagaggtacaacagttattagaagagttacaaaaatgattagaagaggtacaacagtaattagaaaaggtacaacagtgattaaaagtggtactacagtgattaaaagaggtaaaaagtgattaaaagacatcaaaagtgattaaaagaggtacaacagtgattaaaagacatcaaaagtgattaaaagaggtacaaacgtgattagaagacgtacaaaagtgaattaaaagaggtacaatagtgattagaagaggtactacagtgattaaaaagaggtacaacagtgattaaaagaggtacaacagtgattagaagaggtactacagtgattagaagaggtacaactgtgattagaagatgtacaaatttgattaaaagtggtacaacagtgattagtaaattcattaaattaaaatgaaaatattttttaacaaatttaattaaaaaaatacatgaaattctatcaattaaaaaaataattaatttaaacttataaaatgtattcatcaaaaaaaaaattaattttaaatataattttttatttattaactcaacaaaatattttaaattaattaaaatcattgaaaataacgtaaaaatgcacagaaaaataatgttacaccgtccggactcgaactttgccccccccccaaaaaatgatgcctcagaatccccaatcacacagggattctgaggtcttaacgatgtcaaaagtaaaatctgatcacgtattcgtgatcagcggcccaaataacccctaaagacatgtttttggaagatttttggtgaaaaaatttttcaactcaaaaatcctatgatgggccctttggtcccagaatctacaaaatcacatgaataatattaaaaggaattcttaaaaaagtgataaaaatgccaaataaaat

SEQ ID NO: 18869 - DNA, 2406 bp, Heterodera glycines
ttatttttgggtgtaaaacagagtggccaagtgtccttttttaaagattgtcctttattttaggcttccccactttttaaattttttgtgctttattatttatttcgctgatagaaatgctacaaaaacccaatttcaaaaaaaatttcccggcggcgcctttcggcaccgccttcccccccccccctatctccaagtttttttaagaaaaacgcgcctcaaaaaaagcgttttttaaaaataaaaaaaggcgtctcctggctaaaaatcgcaaaatttgtcattttttagacaaaatctgttagcaaatcgcatttaaatattacaaaaatttctcggcagctcctatcggcaccgccggcctcatatactctaatttttttggaaaaagcgcgccgcaaaaaaaacttttattgattttttaaattttgaatataatcatccaaaaggatgattttttgtcggtaaaatgctgattttgaaaattcagttgacaggccatgtttttacgctaataaaatgttgttttaagtcgatttttcatgtttttattacgtttccttcgcgctactattagttgtagaaaaatcttatttttggggtcaaaatcttagttttagcctcgtttgtcctttttttgaaaaaaaaacttggccactctggtgtaaaatccaaaacccaccaaatctcgcgcttcacttccggcccaatttgcggttcgtcgatttcggcatcgaatttggccttcagctgctccaactcttttcgcttgttctcaatttcctggtggccaagtgcgactgaaaaagggcaacgtcggtttctttaattgaacaaatgttgccgatttgttaaggcatcgaaatattttcaagggcttctcagagtcactgattaatagagatcaggcgggacttcacgtaatgattgtgatacaggtatatttgcaaagtcccataatgataataagagagattttttctgaaattttaattaggaattttttgagtttagagagaaagttccgtctcattgtcagtgtatatgaagtcccgcctatctctaaatatgtgatattaatttgtcattcctaatcaatacgaatccctgaaccaatttggatccgttaaaggtaaagcccatattcatgaccagtgatccggaaactctacagaaggcattggcattataaccgaattcattcaaaaaaaaggggggaacacaaattgcagtctcataaattcactcttccccctcctccccccccccccccaccaaaacaactcactctccgacttgaactcgtcgatttgcttccgcatcttctgcttgaagtcctccatgttcccgtagcggtcctaaaatgagaaagttttttgcattccgtcgatggccccgtcggaacaacttcgtctttgatggtcacacggcccagaatttgcaacgccattttgaatttgtcattgcgttttgaggccgccttgttgaaggtttgcatggaggagaggagttccgattttttcttgtcgaattcggcgttggaccttgggaatgggaatttaacattttaaatgtaccaaattggcggtagtaaacacagagaaatgggacggaattcagacaatttttggttagaaattcgcaatttttgatgcccggaaatccatccatcccataaattttgcattttttgtgctccttactcttcgagtgccttctcatggcattcgagcgattccttcagttggcgcagtttgtgctgttggattccctcctccgtacgcacttccgtcaacaaattctgttctgaaaaaatacatggcaaattcgtctgaattcgaattatggcccctaatttttttttggggggggggggggggttacgacaaattattcgaaaattcgcaatacgaagcctaaaaaatttggacccagcggagtgaaaccgaaccaaccgtcactgagctgtttctgtttttccgcattgtccgcttcaatttcattcagttccttttgcaactgttcaatctctgcgcaaatttttcgtttttattaaaatgaatttttaaaaattaatttacctgcgtccaatagttttttcctttcctggagttgatttgtcatattttggaatttgtagagtaaaaaattgataatttttcctggcaatgaaattgagaatcagaacaaattttatttgacgactattaaaaaagtgatggggatgtgaaaagcggtaggggacggttcggtgccagcccaagttttggactacaacttttttcattgttaaccaaatctaataatcttggtatcattcgaaagctttatatgtttagaagctttttctaacctattgcttagcgataagacaattaccaaaaaagttataacagaaataacaaa

SEQ ID NO: 18870 - DNA, 2022 bp, Heterodera glycines
cggcacacttaatcattttcccattacctccgcttcctttcgcagtttggccacttccgcctccatgtgcacaattttgtgctggtcaatgttggcctgtgttcggatgcgttgcaattccaactcggcattcattcgcatttccgtctccttttgcttctcggcacgcatatagccaatgatcacattcatccggtcactgtgctgctgctgttgttgctcggccatataactaaaaaaacaccaaattttaaatttttagttccgcaattcggaaaataaaaaaaacttacgagccctggttgaccgtggttgacaaacgcctgaaaatagattgaaagagtaaatttttttctaattttcgtttaatcaattttgttccgtttttctgggttattgaatggaaaagttaaattttgcttaaaatatccaattaaatcaaatcaaatatcccaaacttacgatgtgttcggtgtgccagcaatgaatgatgcgttgagactgctgcttgatgtcggcgatgcaatggtttgattgaggcgttccatgaatgaattttgttggaccaactacagaattttttgaaaattttccaaataaaaaaaaaaaactgaccttttgaatttcgtccagatagaccccctgtttctgcacattctcctcgtcccgcttcatgaactccttgatctcgtcattcaaacgcaatttttcttgctccaaaatttgctaaaaggaatgaaaataaataaagttaaaaaatataagaatttacaaatgattgctggtgttgctcacgctcggcattcatcaaattgttggcgtccgcaagtctccgctcaaactcctcagttttggcaatttcgcgtgccaaatcggtggtcaggcgcaggttggcgtcggacagttccgtgaatttagccaagttctaaaaagagtcacgtgccttacaagttttcagaaaaatgcaatttagattggaatcacgaattgtgccgaactaactgacctgctcacagtcgagctgcaacttttcaatttcggcctggcattgtgccaccttgagctgcgcttcgtgtccagtcttctccagcgtcatttgctgctgttcgtattttgatcgttcgtcctccgatttgttgaccgtttcgctcagcgtcttggcctgctccaagaactccatttccttgctggcgagctcattgcgcagagcttcgattgttcggttactgaaaagagaatcggacatatttatttcaaaaaattagtatggaaagtctcaaaatgccaaattggacgcgaccactaacccaacctggatgcaaggtccttctcaagctgttcacgaactgcttgcatccgctggcgttcgatggttccatactgttgaaaaaaaaattaatttaattatataatattaatgtcaatttttgaagaatgggtggttgaaatgttaaaattcgacctcagagatggcatttcaattcatttggtctctcatgtaatttttaaaaaatttgtgagacctcaaaaagagcaaggatatcatcatcattgtcataattgtggggggaattcctgcagtttactggtcccgttttttttttgtaaaattctgggaaaacttttctagggctattttagggtactgagcatgaatccgaccttatttttgacaaattctgaaccccgaacccggaatcgaacatttttcaaacaaaaactttttttgcaaatattgcaataagcataattaataatgtgttttttatgagaaatcaatttctaacgccatattatattatagctagtgttccttatggtatgatcaaattttccgtcgccaacgctgtttttgttattgcattgaatgtttcttcgattcattctttggttcataagatttcataatatttgtttacgacttgattctatccgctcatctgacactgtatcgcttgttctcgtcttcatttttgaccacattgcccatattttccccgagactgcgtgatcactttgaaa

SEQ ID NO: 18871 - DNA, 877 bp, Heterodera glycines
aaactagaaaaaatttctagcgattttttgaatttttttggcttcccgtcgccctcgcttttcccttcactcacttctcattggtctgtctgtcgtcgttcacataggacagcgtttcctgcagtcgttcggcctttgaacgccacatgtacagctcgctctgcagcgtgtcaatgctctcccggcgtttctgcatttgttgcggcggttggtcgacagcgttggtcgttgttgctgccgaggacagcgacgatgcgtttgaatttgcgctgggcgccgtcaaccccgtggttgctggcgttgtgttgtcacccatcatctgctgctgttcgtacagctgtcggtactgctcgcgctgctcgctcagctcacggatgagcagctcctgcttagcatagttgtcacgcagcagtcgcaaatcatcctgacaacaaaaaaacggggctgaacaaattaatttctaaaatatcccgtttttatacacaaatttggggtgcaattcaccccccccccctctccgaaatttctttaacaaatttttttcggtgattttgtaggggtttttttttttgaaaaatagtaacccattataaaacttgaattggtttttcacgataaaatcgcttttcattacaaatatgaaccatttatgcaaaattatatgtataatgaacctgtgattggtgattggcttgcttcagtgactcaattctaaaacaaaatatgggaaatttagtgatgaaaaaaggggcgattcatttttagatttactcggtgttgtgataattggcgatgattttgtcctggttctcctgcattcgctccaatgcctccgacaattcaatgtttttggtgtgcaattcacgaaatgttgttg

SEQ ID NO: 18872 - DNA, 1569 bp, Heterodera glycines
atatgcattgtttcgcggatttcgcgatgcattttgcaaatgggcgtgtcgtcagcttatcaggcaaagatggaatgtgcgcccatatgtattcctgaatgacatatggaactgcgtccaggtctgtttgcgccacaatgtgggcatgtgggcctcctcggccttgaaactccatggattcaccgtaaccaaggattgttccaaagaactttttctcataaagttcttctcggaactcagcgatttttgctggtccaaacacgcatccacatgtcaaaacggtcagtaaatacttgaccgtttttatatatattctctttgaactcaggccattccctgttgttcgtgaatgtgatgaagagacgcgcctttttcgcgtcatgacaccgtgcaaaaacggtgttgcaatcctcatacattttcttccaatattggagagaatttacgttgtgttcggaaagccgaacaacactgccaatgtcatcaacagttttctgttgggcattggggttttgccgtgcctgctgcctgttgtattggttgaccaaatactgcagcagattttttggagtgctgatccgcaggtccatgtcaggtctacgcaaaaatgttgcaatttgccaatcaatttttgcagcctggtcaaggatccagcgctgaccaagtcctccaccacatgaaaggatgtggtggtattgcaactccatattttcatcccttattgcgagataatacttgcaataatctcgcagggagataaattgtttggatttgtcaatccgccggtgctgcgatgaaacagatgctacagattcagcatctgaatttgcgactgacccagcatcagatgatgcaattgactgagtctcgcacgactcattatctgactcggcttccgagtgaaataggccagatgcattctgagcaccttttcgcttacgcgatggtggcttagcatatttaatgccagttgtgtatccatcatcgcccattggcttgattaatggatacgtaagactatcagtccacggactgaaaggagcaatttcatttaattgcccttgtttgttctctacccaaattcctttgggtggaggagcaccagtggggtccgcatgaatagcgaacatcccttcacccgtagaaggggtgattatttggtgtgggtgcaattttgggtctttcagaccagctggggccctgcgctcattcaacaaagtcatgcggaagaagcgaagctcttccggagtttgttgttggagtagctcactgagctgctcacgcgcctgcttatatgcttgcgcagcaggatgatgcacttggatcatttgttctaagatctcaagagtctgctcatttagctggtgaccctgcacaaactcatcttcgtttgtgattttctccccagtaaacctggggttgtttcgacgctgttccatagcctcgactgggtccagaatgtacaactggccaaagccaggaatctgagttgtaccagcctgcatgctgcttatgcggcgatggaattctccgttaagaataacggccatcggaccgccagcagggctt

SEQ ID NO: 18873 - DNA, 2082 bp, Heterodera glycines
cagcagatgtgacctcgttcgtacgacactatggtgaagacctgcaagtgtacctgtcgaccattgcgacggctaaagcgcttgagcagccgatgtcttcgaaaaatgtttttgctttgaaaaagaagcataaaacgcgaaagaattccgaatcgtcgaaagggagcagcgaatcgtcagcaagccagaagagccaccgatcgcaaccgaagtgttggcgttgcggaaaatggcactctcccaagcgttgttcgcatggcaagtccacctgcagaaagtgcaatgagactggacatttggagaggatgtgcgaccagcacaaggcttggcttaaaagaaatagggagaaaaaggatggaaaagccgtgaacacatttcggcttggaggattatttctgccggactcagaaagtcggagaaaactgatcgaggttctgttgaagatgaatggcactgaagtggaatttattgctgattttggcactgaaagaactgtggtcacgaaggacgcacaccgccaaatcggaagtccatggttgagccgttgcactgaacgggcaaaataccacgacggatccactcgccctcttttgggaaaagggcaggcaaagttctcgatcggtgatcgctcatgcgatggacaattctatgttgccaaaggaacaaagaatttgcttggcatagacatgcttcacagtttgggactgttggatagcttcaggaagagcctggaagggaatgtccaagtggcagaagcaaacacgaagtccgattcaactgatgctcaaagtgaaaacccgaagaagaaacaccacggaaataagccaaaatttgctttgggagcaaaggtcattgctagtttgggactgcaaccttggcgcgctggatacgtcgttaaccgtcaagggacgatgtacgaaatccgttttccagatggaacaaccggcaaattcccagaaaaaggtgtagaggcatgtgttttggactcggacgaagaaatttttgatggtttggacctaagagaggcaccatccgatggaaaaacgtcgaagggcttggtcggcattgattgtgaccagcgaaagcgtgaaaacgtgatcgcctgacagccgacgaaccgatgagccaccgccgaaggatgaagcggatggacggatcaattttttttaagggggaaggtgttaggccggtacccaaatgtccgcctcattttatttattttgtatgtttccctcgtcccccttatctctgtctctccctccgtccataaatagcccgctttttgaccttccctcgtcatttgtctcattcgcatcattttcccgcaattttgttatttcattttatttgctccataaatatcgacttatttgtttgccactcaacggcataacaagttctgattctctgttcatcttctatctctcgtataatgcactttgttcagttggttgcatcattagcagccggaccgggaaggtcgttgatctgtcatgtgttcagttcggtcggtcgtttgttcgtccgttgatgttgacgcccgggggtacaaagcaaagctccttcaattttcaaagataaagaaacataagtacagtcgaggataacaacaataaaatcacataatatttcataatctttggttgcaaaatgcaaaaacaaaaatgggcactttcattttgtggcctttggttcaagaaaattgcatcagcaacagaaaattgagaacgcaaaacataaattttgaaatgaaaagcaacaaaaaggaaaagctgcaaaagtctaaaaaaaagttcatcgaggccaaagaataagcgtggattttccaaagaaaattggtaatttgaattaaaaaattttatccgtcctaggtctcatctggtgcctattattaagacattacttttgccgcttgtaagggagtgaattgattatcccctggagaaagtgccaaattggcattttggtgtgtgccatctcgcaagcagctcacaaggattgctgctaattcccgtaaatctgttctgaatcccagatccgattgctctctggacacacgacagcctttctgactcaatgacg

SEQ ID NO: 18874 - DNA, 3281 bp, Heterodera glycines
tcccccaccctattaattacccctttaattaattgcccttttaccgctttctttttaattgccccccttttctgttacttaaggtgcgcccgagtcggaagtgcacaaatatttcggcactttgctcaaatcgatcgcaagtggacagaacagcaacactttggagatggccaacaaagtgtacgtgaagaaaggcatcagagtgaagaacgcgttcaaaaagaaaattgaggaaaactacggtggacggatggaaacggtggactttgaggacatcgaagggacggcggaggtgggaaattgttttattggcatagtgccaaacagttccgaaaatagaaaaatttcgagctaaaaaacgccggccctgctggaatattttccccattttatggtttttttttttgcaaaactaaaaggttttccccatgggtttttgataacggcaatttgcgatcattaaaaaaagctttccacaaattggacagcctttttttgcctttcagataatcaaccattttcgtgaaaagaaacgacccaacaaaaaaaatccacgaattttgtcacccccccgacccactttgaccaaaaaacctcggtaaaagggcaaaaggaaccgcccctattcaccctttttttttaaaaaaaaaacccaaattttttttttcaaatttaccccctcaaaaaaaattttggggaaaaaatggggaaattttttcaaaaagggggagaaaaattaaaaattttttaaattttttttgaggtgtgggggggtgaaaaaaccgccccttcttcttaaaaggggggtgggggggggaaaaaattctaaaaaaaaaaattccccccaaaaagaggggtttttttttttggggggcccgaacacccaaaaaaaaaagggggggggggagaaacaccccctttttttttaatttttgaaaaaaaaaaataaaaatggggtttttttttttttttttgttgggggggggcgggccccccccccaaaaattcccccgcccccctctttttctaaaatttttttttctccaacgcgagaaaaaaatttttttttaaaaaaaatatttttttttttttttttaaaaaaaaaaaaaaaaaaaaaaaaaatttttttggtgggggggaaggagaaaagaaaaaaaaaagagagacgcggtggtttgtgtttttgtttgtcggccttcccctcccccttccaaaaaacaaaaaaaaaaggagtgtgtgttgttgtttggttgtttttgggtgggggcggcgggcgggggggggggggggggaaagaaaaaaaaaaaaaaaaaaaaaaataaatataatttattttttttttttttttttttttttttttttttttttttttttttttcttttctctctcctcttttttccaatccaacaaaaaaaaaaaaaaaaaaaaaagaggggggggggggggggggggggggcggccgcccccccccccccccccccccccccccccccccttctttctttttattttgttaacagatttcgtttaaaagtgacccaatttacaattttgatttttaaaagagatataaaagatagaggtcatccggcggtgccaataggcgctgccgggaaaatttcaacaattttgaatgaaatttgcgatgaaaaatgagttaggtaattaaatttattatttaatttattcaaaaatatttggcattctgtatttgaaaaattttcaaaaatgcaacgcggatccctcgagatcccgcacaaaaaaatcaaatttgcgggtcccgctgcgggataaaatattttaacaattaaaaagaaatatattaattaaattttaatattttaagtaataaataaacgaaaaaagtaaaaaatattttttatattgataaattaacacctgcacaaataaaggacaatcgcatttgatccagcagaagcattcaacaaaatgccagaaatagaaccaacttgccaagctcgaattgggggccttaagaaatttgaaaaatttaaaattcaaattaatttaaaataccccaaaattgagccaaatgcatacagcaattgatatatggccaaattggtcagatatccgccaatattaatggacaaaatgatgatcaatgaccgtaaaactcgtgtgttcgtctgttgggttactgtaaaaaatattttgaattttaaaatgccaaagaaatgaatgccaagatttaccggcatttttgcatctgatgatcacaaaaatggacacataacagcaagtgctacccaatgaaataatgaatgtgccggcgaagaatttataaccaacggggcccagcaaagtttcggccacaacaccggtggttggactgaataaatttaaaattattaattaattttaatttttgatttaattgcgccatactttcccgcattttcgaatgcaaatgcgagcacataattcagtgtaaatgcaccgtaaattacacaaattaacagatggccaagcaaatatgagaatttgtatttagtgaaaatggaggagtgtctaaaatgaacagtccaaataaataaacaattaagtattgttaggataattagggtttgtggcagctaattaaatgagataaattttttaattcgtttccatccgtacttaaatggcaatgcaacagcaaaaagtcggtcaaaagcagcacaaaacattgccattaagccacaattcacagcaaaaatcattggctaaaaattgaaaaattaaatcaaaataaaaataatttgaaattcagaatttaccgtcataattaagtcagcagtgagcaaactgacaaaatttgtgcccaaaatgacaacaaccacaaaaaaagtgtgccacaatttatagcaaaaattggaggctgaaaaataggaaataaaaaaaaaatttgaaattttaaaatataccgtcataattaagtcagcagtgagtaaactgacaaaatttgtgcccaaaatgacaacaaccaggaaaaaagtgtgcccaatttggtggaccaattcacaaaggcaaatcaatgccatcagaaaattggctgagccgcggagggaactgaaaaatgagaaattgaattaaattggtaaacagaaattaattaaattgatttaaatttagaaatgccctggcatttgcctggatttgacagtgaccaccaaaactgtgccgttcaacacaatgccaaccaacgcaaccaaatacaccgcaacggccggcacaatcaagtcggcggacggaccggcgaaacggtaggccaaataaa

SEQ ID NO: 18875 - DNA, 2334 bp, Heterodera glycines
  unsure (1)..(2334): unsure at all n locations
cgccgaaacacgagcgcngaaacgggagcgcngaaacgcgtgggtcccacccatagtgccagtgcaaataagtttgttatttatttagtaatcagaacgccaaaactttgcaaaatctaaaatttttttgtgattttcccttgtaaaaatgcaagagccgatctcgagttagaaaagaaatttttcaaaaaacaaaagagaatttgatagagaaggccaaaaaactagcctaggcaaaatttaaacaaaatcccaactgtggaaaaatttttccaactgggcgaaagttttgaaagatttatatcttttccagctaaaataaatttaaatgttaaatcaaatgaaacttcaaaaattcttcagaattttctacagtagccagttcgtacattaaaaattgttgtgtccgcaacaacagatatgaagaaaagacaaatatttatttggaggaaaaataatataataaataagtcaagggaagggaaaattgcaaataagaaaatgaatgacagaatgaacgagggagtgagggaaggcatcgcttatatgtgggaaggaatgtgcctaagggaaatgagtgaacaaagttcactccacttattgattggtcacaacaccacaaaaataattacaaaataaagcataagactaagcttaggcctaagcccaagcaagttcacacagcggcccaattttgggctccaagtacaattatgctggatttttcgtcttagtggtctgtgagttagtcatcaaaaagggggtctcaggttcaaatcctccttgtgtttgtgtataaatttcaattttttaaagcaaataaataaaatattaataaaacagaacgccaaaagaacaaatacaaatagtggaaggtagacattatattttacccttgattttattaaatttttttagcttataactttgtcaataatagaccaaataaaaccattttatgctcattttgaagggaaaattctgaagaatatttcttaattagtcaaaagtttaaaaaaatcgtttatcgacaaaaaaatgaaccacgtgttattttatatcgttagagacatcggaaatagtgcgtcaaaatgagagaaaaagaaaaaacttcgccctcggaaaaaaatttttcccgttggtattttttctcgaaattttgcataaacacatattttaacccaacctataagatgatgctttgttttttatcaaatgctttttaactcgagatcggctcttccgtttttacaagggaaaatccccataaaatttttaagttttgcaaagttttggcgttctgattactaaataaaaatccagcataattgtacttggagcccaaaatggggccgctggtgttcaagcttaggcctaagcctaggcacaagcataagcttaaaattgaaaaaaggcatgaaaaaggcacgaaaatcccgaaaaaggcatataaaagtcaacgtagaaagcttcaaaccaagtggaaaatgtgtttttatgcttaatatattagaactaatggcgtagaaaaaaagtttatgcctgaaaatggcgagctctatttaacctgggacccttttttggtgactaactcacagaccaccaaaaagaaaaatcctgcttaattgtacttttactcacccgatcatgttttttgccagactttataattggttgggattttgttggtaaatgtttttttttcaattttttgtgccaacctttgtaataggaattgtgtccggcaccaattggctgctgggtgatggtgggaaagtgcacacgccggtatcgaatccttcttgaaatttgtttagcatttagggagtgcttttttaattagcgttaaaatggttggaaaaatttgtgccgtcggccccgttttttaattttatttgtgtctcgaacatttcgagttttctagtgaccacgaattctacatttatttcgtaaatttcgagctccaccggagcccccgaaccaaaacaagaagccggaatcaaattttcctaagcatttcatcaaagagagaaaaaaactttttagcatttgttgaattaccctttttgggttttctaattttaaatttccaattatccatgtattttttttttgtatacaattcaaaattaaggaaatttcggcaaaatgccagaatagatccgtccaaaagagttgataaaaaaaatagctcaagtacagtttatgcgttcaatcgacttttgtgcgtccaatcaattagtttcatccggtggtcatgtttcggataactctctatttcggttgacctgctgtgggatgacacggcttaatcagtgacaaaatcggatattt

SEQ ID NO: 18876 - DNA, 801 bp, Heterodera glycines
  unsure (1)..(801): unsure at all n locations
cttgagccaaaaaaattncctaagtgtataaatgtgagctcaatttttaattaccctcatccaatcgtcgtcgatgcctttctgttaaattgcttttcggtattttggtcgttttgctaattgccgcggttggcagacgttgtaattgtccaatctgatcaggattgatcaccaattcggcggcacaattcatgtgatcatccgttttggtacaattggacaagtcctgaacactcgaaaacatttaaatccaattacaatttttttttgaaaacttcttgcccattttctaaaaatcgttgggtatctaatatttttgcaaaaagccgcttctaaattgtcccaaatccctttgaatctaattttaatgaaaatccagtccaattttccaaaaatcttcaatcatttcagtttttgacgccctattctccagtgttacccttatccaattttccctgaactgcttcaacttcttcttcttcttcacctgttcgcccaacagttggagtgtgctcgtgtcgttgtccatccgtgcccaaatggacacgtccctacagtcgtcgtccaccaccatctcgttgacgctcagctcgcaattgaaaccgctgccattggtcgcctcgcggcacgccaaattttctggcgcaattggcaaaaagttgttgttgtgctcttcaaaacaaatgcaattatagaaaggcgggaggggatgattaatttaaatatggagaaaattaattatctttattttaaataaatttttgtttttttttttttttttaaaaaaaaaaaattattttt

SEQ ID NO: 18877 - DNA, 2336 bp, Heterodera glycines
  unsure (1)..(2336): unsure at all n locations
atgttttcaaattttttccagcggccctgaggcttcttaggagcttttaaaaaaaaatcgaaaatgcatttctcatcaaaataaaactgcagaaaaaaaaaacttacgaatccgcaccctaataatatacaaaaagtttatgaataataaaatagtataataaagccaaatagaatgaattataaattgttgccattatttttaaaaaactgatataaaaactaaattcctaaaaagtgattttaaaaatgttaacaaactcttattgcaggcaacacatcattttcaacttgaagctggaaattatgtgattataccatcaacgtttggaagaaatgaagaaggggagtttttattgcgcatttttacgacagggactattggaatgtagtaagtttttgagtccgagtattttcaaaaatattctccataatgtagtttaattaaatttcttccgtttgaatggtcggcgtcagggatggcattcagaggccccaaaattttctgtaatcggaatcccgggacccaaaaattgttggaaattgaaattctgaccccaaaaagtcggaaattttgaataaaatatcatcaaaaatttaaaagtgaaaggtgatgtcaaaaaatttaggttttttacttaaaaaaatattctgctttttatcagaatctttttcaaattgtggcaggggacccggcggtgccgataggcgccgccgggaaattctgaaattttgcatgcatttgttaagattttgtcaaaaatgaccgaatttttatttgaaagccaaatgaagcagaaattacatacaaaaaactaattgtgtctctattttaaataaatcattttggtttggcaaaaaaaaaaaattcctactttttatcataaatttcagtaacccaaattccggtcaaaaaactttggaaatactgaattcattgccatccctgctggtcagcgtgaccaaatacgaaatggggtattagttttaaaaaagcaacaaaactgcttttggtaatggcagggtaatatgtgtggaggtggaaaagtacaaggggtaaatatattaatctttctcattaaaaaaagtaaaaataaaattcgtaaaaaattcacttttttctcgaaaatttcggaacggagttcggtatgacaaattactttggtatcatgcaacgtgctaggtcgtttcgtaaaatccgccatttttgcaattttttcgacaaaacattgtataacattgcttaaaatcaatcaaattttatatgtaccatgcgatagctaagctttttctctattagcctgcaaaatttcaaacaaaattatgaaatttataccaagttatggcagaaatgtacttattttaatacaactttttctatagttgacaaaattttttaaaattttgcaggctaatagagaaaaagcttggctatcgaatggtaccaagaaggtaaaatttggttgattttaagcaaagttataccatgtttaaaatggcggattttacgaaaagctcaaggtggcggattttacgaaacaacctgacctagcaccgtcaaattcgatgttaaggtgggttcgcaaaaatttcggttaaaccccacaccttttcacgtatttttaaaccagggcttccatcgaaaatttttcaaaataaaacaccaagcccaaaataagattttagtatcaaaaatttttctaatcagttatttttccaatttattcgatcaaattttatttttttagtctcctattatcaattttgataattttggggaggaaaatgcaaaattataaatttcagtaaattcgggattaaaagatcaaaaaaaaaatttgcggcagatcattaaatttcttgaaaaataatgactagggtgtaaaattatatgcatataaaatcgtaaaatatgcgcataaaatatgcaccaaaaatcgcgaaatatgcacataaaaagtgaaaaatatgcacataaaattttccaaattaagcgtaaaatctctcaaaatttcttccaattcgttaaatttaagctaaaataactaaatatggtataaaaaatcattttttaagaaaaaatacaaaataaagcatttatttattaattttggcgaaaattgaataaaaatcgaaaatttccgttttttaacttatttttgaaataaattaacaaattttaagaaaatttaaatttaatcattatttcgacaaaattttgctaaaaaatgtctttttcggaaattttttcggtctttaggagtcaaaaaggctaatttactcatgnnngcgttttaaatagggggtttttgggaaaatgcccaatatgcacataaa

SEQ ID NO: 18878 - DNA, 1572 bp, Heterodera glycines
cgttctcaccgtcgccgtcaaactgctcttcctgcgccgtcatccaaaagtctctttgtgttcgcctcgcaaaagtgcctttttggccgtatttgtttggggctgcgagtggtttgaacgggctgacggcacgtgaataccggcacttttgagagaaatggacaccaaaattgagccatagcagacgacgatgaccagcagagggatgaagtagaccggaaaagagggggagagaaattgtgagagagaggggaaagagagagacaaggaaaagggaggagagaggggagagaaagagagagagcggacctgtacaatgttaagcacggaaaaccaatagacaactgaaggcgacaccattccgatgacatctgccgacacacactgagtgaagtgaacaaagcacggatgatgagcttaagcggaaagaaagtcggaaagggaagaggaaaagaaacggacgaatcgaaccagtgcggaagatgtagatctgaaagggcggacattaattagcaacgaattggggggggggcgaacttgagggatgctgctcaaaaagctgacaagcctaagaggggcagcaaaatggaaaaagacgacgcaaaaggggagggatcaccaggcaacggagagcatccactggacactccgtttggcattgatcacgtaaagagggaacagaatggagtagaacctgaaaatgacgggaggcactgaatgaggggggggaaagggtggccaatcggttgggtttggcattggcacctgtccatgctcagacaaatcaaaatgccggcagaaagtgttacgccgaagacatcgaagaatttacagaatcggcacaactgttaaaacggggagagcacatcagaaattgcattcacctcaccaacactcacaaagtcgccccagagccacgcgatggtcaaattgtgcacaatttctttggggatatataccaaagtcactgaacggagggaattgacagaaaaattggaaatgaaaatggaaatggacgacaattagccaaaacaaattgggacgaaccgagaagctgagcaattgtcatgtggaagagaatggtattcactcgtcgttttttgatgcattggtttctgaacatggattatttattcggtaaaaagcagaatagtctgatcagatgagttcgtctggtcagttgttctctatgcttctctaaaagccattaatttacctgattaacacagcaatcaccaaaagattgccaaacaaagcgatcacaaaaaccttttttgaaaaataaaaaatgattctctgtgtcattctctgagtaagaaatgaattaatttggcactttcattttccccgcccctccacaaataattgcatagttaaaacggacaatggaataacaaatggccacgcttccgttgtgtgtccaacgaaaaatcatttgcggaggaattggggcgtcgccagagcaattcatcgctgggggagaaatgtgaagggaagacgaataagtcattaattagtacggtaactcgggaggttcactaaagggatggtggttaattggtttggcctttg

SEQ ID NO: 18879 - DNA, 1146 bp, Heterodera glycines
  unsure (1)..(1146): unsure at all n locations
gggagggcgaaggcgccgggggggcacaaagtcaaagtcaaaatgccgttttgccgtgccacttcaatccgactgctaaaattcagcccttctccattcattttttccttaaaagaacaaattgcaaattgaaagaaaatggagagacaaaggaggaggtgaggtgcaattacgacaaaaagagggaaagaaaaaaagccttggaattatttggcttaaattgaaaataaaatcgacaaatgatctcgaaactgtcgtcgctttttattcaaagttccaaagtaattcttgttctcccccggcctctttttgtgcttattccctcgcctcaccgccccatttggcatccaaatgatgacctcattcatccttttgggccctgaaattcgggcattaatcttattgccggggctttccctttatgcatggtccatttgggtcgtccatcgatgagtaacaaaagggagcaaatggaatgaagattcgatagcatccgctcgaatatggcccgaaattcctcttttggtagttaagtggcaaaatgggaaaatgaaatttgggggggggggagatagagagagagagaattgagttaaacggacggaggggggcgaatgacagatccgacagaggaagaggaggaaaagcgaccatatttatttggaacatctgctgctgttcaacggctacaaacttttattttcgaattcgatgattcaaagaaaaaaataaaataaagccaatgaaagacgaaagatgacgaaatagtggggaacagagagagacaatgccaaagagttaaacaagccgaaattgctgctgaccgatggtttttccaaatttgcacccctcccctttcaattttccatccctccgaattctctccccctccaaattgcccatcattatttccgatcactctccgtttgaagtgtctcttttccccatttggccggtccatgcatcagcagcagtgcgttggccagtcggctgttagtccgggcatccttcactctcgagaggggggnnggaggaggagaattatgcacaaaaggacaacgatcggacggaggagaggcttnncacacgacagcagcagcaacaacagaaacgacaaattgtggccactgtcgtccaattggtcgt

SEQ ID NO: 18880 - DNA, 770 bp, Heterodera glycines
cgcggggggggggtggaaggcccaccacgaggccgcgaagcggccgagtgagtaccttcggtgcaggaaaattattaaggaagagagttcattatttatttgttttttgcataattaattcataaatatttttttcagaaactgctctgaaacgcaccaaattttatttgcaagttattttaggcactcagatgctttcactatcaaaaagggagatgaataaaaaatctaaaaatttttaattgctttttaaatatgcgaaaaattttaggcttaactttttttttataaactgatcagaagcgaaccagattttgcgagggcatcaaaaagacaaggaaaagcactgctatgatgctaactccagtaattctgaatttaaaattttttattaatttttaaagcttcactattttatttttttagcaaaatcaattcataaatattttttcagaaactgctctgaaacgcaccaaatgttaattaaaagttaaataaggctctctgatgctttttctatcaaaagggagatgaataaaatttttaaaaatttttaattcctttttaaacaggccaaaaagtttaggcttatattttaaaaagtttcatcgaacctagcgcactaaaatcgatataatctctccaaattttgcaggccttctccattgtaaaggactaacttaacctgaaaaaatgccaacgcttgttgtttttaaaatttttcgaaattctgactttttcattacttatttattttttgcaaaattaat

SEQ ID NO: 18881 - DNA, 1019 bp, Heterodera glycines
taggcttactctgtgtcggttttgtgtgggtcgtcgctcggacttagcgaatcccttgcaatcggtctgaagtattcgataactgagttttttcgtcgaaccatcttcagagtatccgtttcttccgcttttttttccaaatcctcgcaggacgaagagcgtatttcctctgcttcggaagaactcgtcgaatgcgtcgtccgtgccaatccgctgtcctcggaatcgtcggttcggactgcgggagaggtgttgccgccgcaggaggacgagtccgaaacggaatgaccgcgcgtgaccgtctctttgtcagccccggcaatgacgacttccctttcgctcgcttggcccgtcaatttcttaaaatttccatttgagtaccctcttataagcgatagaaaagacaccttaacaaaagagcccaaatttagacgaaaattgaagtctccaaaaaggaagcaattgctctcgccctctaaagtgcctccgttaaacccctcaaatctgtgcagcgtatgttccaatgccttttgccgattggcgctgtattcgtttgggttcttaaaaaggcattaatcagaattctaattatagcaattaaaaagaaatgtcacttcaataaaattgagattagactcgtcatggaacaagtgaatgttgataaagtcgaagactctgacaaaagttacaattcggaaatttaggaataaggttttgaggtttgttttgagtttaagtaatttttgacttgcctcgcgccaattttccaacgcgtgtgaagaaaacctttgcgagcccatcgaaacgaaggccaaaaacaatgtgagaatttctctttgcgtataaatccaattttgttcagaccattgacaattgttacacttttttgtgcaatcgaacaaaatttttggcgttgaaaattatacaagaaagtgtaaatcacagctgaatgatggacaaaaacagcgaagaaagagcctaaaaaaccaaacttgaaaagactgagaagttaaccgact

SEQ ID NO: 18882 - DNA, 2144 bp, Heterodera glycines
tccagcagccaattcgagacgaaatgatgctccagctgctgtcgcatttgttcagagtccggcatcgtcttccacagttgctcaagtcgccgccacacggagtgcagtgcctcatctcctgaaaatcacaacatttaaaattgaactcaaaaaatgatatggtcccaccctgctcatgcaaaagccccaaaaatcggtgttggcgcgcaaatggaacaaagtggtgaagcagcaaatgggcctttgtcttttttgaaagaagggttcgcaccattggttgttcgtcgagaaatgccttgaactgctcaactgctgttccagtccgtccaaatcacctggggacaatagctgggccttaaattaaaaaatatttacacaaaaaatgaagacaatcactttggtgaaaatttggattttccccaaatgtgccatcgtttggcaaattgttttgccccattccgtctcgaaaagggcctccatttgatcggcgtggacgaggattttccggatgctgttccccgtcatgtctcgctttctgaacgcttccctccttggccctatccgtctgaagaatttctgggcgacttcggcattttctcccgcttccaactccttgatcagagcattttccgaggccttggaagacatggaacggagccaacagcatctgctcaacattgatggacggcagcaatggtgcacaaacaatggccgtaaaatcgccttcatccgcttgtacgccttctgtattccaagttgagcgagcagcaaaagcccatcctcagcgtccatcccctccttccgctccttgcccttctttggcgtgtagtgcgcgaatttgtgccggatatctcggtggatccggtacagagatgcgcggctcgcggaacgtgagcgatcacgatcgatgcaaatcgccgattggtgtgacagatgtcgacggcagtgaaaagccaaattccaaaatttcctcgtccatttccggcgtcggcactggtcctggagttgatggcagcggttccatcgcttcttcgacggatgcagcagatgttgacggccctgcttcgtcctgcggtggcatttcggcattgggattcggctgtggagcggttggaatacaaaaaaaaatatttttaagtaaaaaatggtgaaaaaattacttctcttggccaaataggcttgtctcgccttgaccgtttgcgcttgtcgctcctctcgcttgttccagcgcttttttacagattctctgccgattagcttacttaataattttcttttgccataaatacttaaagaatctatatttttatttattagcacaaaaaaaactctaattcgacctattttaatattaacttgacctattaaccgatgcagaattttttctctatcgatttgcaatatttggtgtggatttaacaagcaggaaaaaagttaaacaggatgaagtgaatgttgtttttcctaataacaaaaatattagatagtacgccaaaaggagacaaaaaattagagaaaaaaagtaatgtttttctctggcactctctatttattggtacacatctcgttttttcggacggtgtgttaacagattttcaccaaaaaattacttttttgcgattttgagatgcgaccatttttacattcaaaaggctttttttgcggcatttttcaaaaaaactttttttaggcggggggagtccggcggtgccggcaggcgcccggaaaatttttttataatttttattgcgacttttttgttaaaaaatatgttcaaaatttaataatttttcctcttgggggggggaaggcaactcgacagattttgttggatagaataaaactaatctgcgtatatccataaaacagtgatttttgtgattttatataaaaaacagaaattttccccatttttagcattcgctgtatatttgaatttaaattatttaaagtaaattcatttgaacgatcttaaatggtttccccatcaactgtgtgcggcaagtgttgtgcgtccttataaacataattattagaaaaaataataacaagagaaaaacatgataaaaaacaagtgatgatcattagggcaatgatttaattcttcttaagaattcctgctgtttccatagaatagtaatttt

SEQ ID NO: 18883 - DNA, 2644 bp, Heterodera glycines
tctctgtctctcgtccctattgttcgtccttcctcctcctcgggagtgcgcacctccgtcccttcccgtcccattgtttcctcgggagtgcccttctccgtcttcctcggtcggcttcttccatttgtccctccgcctccactgttgcggtttcggatccgctgcttcttccattcccttcttccgtttcgatcccttcagaatgctcttcggcgacattcccagcaattctttgtctccgccatgcttcaacggttgatacgcctccccttcctcttcctcctctctctcttcctcctcctttttctgttgtactatcattggtctcctttctctctttctttctactcctctcccccctctgtctgtctgtttctttggcgtctcttctccactcagttccggttccgtgtccctcacttccttctctttttccttcctcttccccccggggtgtctcttcttctcttttctctttgtcggctctttctttctctcctcctttttcctctttgtcattcctctccgtttgtacggcttcatcagcttcttcttcttttccctcttcttcattttcctcccgttgtttggctttttctttttgctgtgcctttccttctccgttcgcctttttctgccttttgtcccccgttttctgtgccttttttgaatttgtatcctcctaattcttctgattatcaccggcagcggcggatggtaaattggaatcatttgcattggcattggtaccaatcgcactcgtctcagttttttgcccttaatcccctttaatgtattaacgctaatgcgccgaagtcgcattttccgtgcccgaattggccgattagttttggtgccaaaatgtgccgatttcgtcggcatcgcatgcgaatgggacactaattttttcaagtgcactttcttaagtgatgccacggccattggcggcgggggaaaggagctcaatttggaagagacaaaaggcactaaaaagggagacaaaagcattttatacgaaaaacaaaaataccaaaaaagaggaaaattaagaaaatggagttgaaagtgacgacaatgacgagaccaatgtgaagggggaggggtcgagaagagggggaaaagcttttcataatggagacgacgaaaggcgaattaccaccggagaaagggcggtcatttcgcagaaaaaagttgaaaaatcaaaagacggtttactctgatcactttgaaactgacttgattgaatgagtgtctctaaaaaggcaaaaaaaaatattttattaaaatacgaaatggcaatgaattgtgaaattaatcaattggaaaagcagagaaaaatgccaatacataaaaaatcagagaaaaatcgatggaaatgtcgatggatacaatctatgctagcaaaaaaacagcacaaaaaatgtttgccaaaatggcattttaaaccaataaacagcatttacagaagagtgccattactcagagatgggaataacttagtccgtttactgtatacttatttgctgttccatcactcgtcctttattctgtgcccacttttcttttctttttcttcgtccgccgttggctaagcaggcgacgcaaatgccaaaatgattctttacattcaattaggtgttaattaccaaattttcaagaacttacgaattttctcgctttattttgcaaatctaaatgcttttgcttagccttttcttcttcccccccccctcccccactaagtcttggttgaagtaattttttgctgcaaagtctccggccccaacaacggtctcaaaatccacgccaaaatgtttctctgcatttcgttgagttgacaccgctacctgtgaagaaaaagaacagtttgcgcttatttcaattggtttcacttgatggatgttgcaccgcttccatttccctcccctcgacctactgatgttacggtaagtgttgtccttaatccgtttaattactcgagagtctcgactcgatcttttttatggtaattctcgagcttaatttaccattaaattttccaattccttgttacaacacatgaacccgtccttgttcaggtagcaggtcggcaccggaaaagctgttacaatataacttttggcaattattgtgctaataaccacaaaagaacgaaatgctaaagaatgtttgctaattgcccaccattttccaccgctgcgcactccccagcagcacatcctccgtaactcgtctctctgagcggaggttggggtggaggatattgtggcccgacttggaccaccgccggtggcggataggcaggcaacgcgggtgtcctcgctggcggaccgtaaagaggcgccgattggggagagggagccggtcctccggcagaataagctgaaccaatgtttaaaatggcaacaattagccattttgaccattttgttgcccatggacgcgagggaaaagcgatgagaggagaaggaggaccaccaattcaatagaacaaaaaagcaaagacggaaagtgttggtggaaaatgcaaagcatcggtggagagattatgggataagcaaaaatgaataacaatcagcagagagaagaagcgcaattggtgatacaagaagaaaagaaaaagccgatggacgcggaaggaatg

SEQ ID NO: 18884 - DNA, 2550 bp, Heterodera glycines
agggaacaaatgtgaaattgaacgcatggttatatggccagacataaattttatttttgcagtgtcaggatagtttaattcatttttgtaaatgtctacaattttggccacagaccataatgaacgaggggtttctggaacatggactaaaaccaattctcctatttttggggaacgttgggaggaaatttttaattttttatccttttcacgaagtgataacagataatcccatttccacttcgaataaaataattgggtaagggtgctaattgagccccacatgtcagataagaatttttggggcaatagaatgaatttgttctttccgtttcaaaatggcgcgtaatttttcttttaaagaatcagtgttccatgtatcatctgattctttggcaataaatatttcatctaggataaaacgggggaggcgttcttcaatggccatttggaaattaacggtgtcatatggaaggcttttctggcccatttgaatacatatggattcaaattggtcaatgagggagcgcaaatcagtacaaaaattttcaccgccgcgcacatgcggcaattttctcaataaattgtgtaatgcgcgggcaatttcctcggtattatcgtaatttttgattaataagtctagagcagaattataagaaaggtcggaaacggggagagaattgacaagagcgagaggtgggcctgacaaacattgtttcagatatgcgaatttaatagagtcgggaatgggcaaatcatggacaccaattttaaaggaagtgacaaaatttcgccagaggcggactggacggaccagactttggaatttccaaagaaggaagaagcagtcgcacccatactggaaagaattcgattaaacgacaccattctcagtcgagacggaattgaaaagctgaaaaacatcatccgacagaacgagagcgcttttgtgaaacctggagaagtcggactctttaaaggacaaacgatacaccgcatcgacctaatcgatggcgcacggccggtccaacagaggccctatcgttatcctgtcgcacttcaacccgaaatagagcgtcaagtcaaggagttgctgcgtcaaaatgtcattcgaccatccacttcggcatggtcatctccaattgtgcttgtccgaaagcctgatgcctcctatcgattttgtgttgactaccggaagctcaaccaattgacgaagcgatcgacatattatttaccgaggattcaatcgatccttgacgaagtctctgggaaaaaatatttctccgtggcggactgctcaagcggattttttcatattaaactggcgaaaggacacgaagaaaggagcgcattcatctgccacatgggactgttcgaatggctacgttgtcccttcggattggcgggagcaccaacaaccttccaacgagccatggaagaagtccgacaaatgtgctcagcgacatttcttgtgtatttggacgattgcataatcggctcaatgactgaagatgaacatcttcgggacatcaatacttttctaagaacgatgactgaagttggattcagactgaaaccagagaaatgaagatttgcattgatagagattcgctatttgggacatttaatttcggctaatggcgttcggatagatccaaaggatttggagccaattcacaaattgaggaaaccgaaaaatatcaccgaactccgatccttgattggaatgctgtcatattttcgaaaattcgtctacggatttgcagaaatactccaacccatttatgagttgacaaaaaatgaaagcacgacagaatggggaccaccacatgagaaagccttggaggaattgaagacaaagctgatgactgctccagttttggctccaccaaaattcggacaaccattcgttgtggaaacagatgccagcataaaagcaattgccggatgtcttctacaagaaaaccgtgaaggcgaagtccatccgatttgttacttcagccgagtgctaacaaaacatgaaaagcgctattcggtggtcgaattagaagccttagcaatttgtgcttccctcaagaattttcgaccatatttggaaggagctggaaaatcaacagtgatcacggacaattcggctttgacatcattattccggcggaaggacttggaagggcgactcagtcgataccaattggctatcatggcattcgatgttgaaatcattcatcgccctggaaagcggaaccaattttgtgaccatctttcacgatacttggacgacaacgacacacaaattaattggctgaaaattgaaccaaaaatttcacaaagtgaaatgcgcgaggctcaaaaacaagagacggacacacaaaagagacgggaaactttaaagaaggatcaaaattcagaggaaccaaatgaattctctggaaaatggaaaatacggaagatcttttgtgtgcaatggaccgaggcgaatggaaaatttatgtgcctaatagtctgaggcaaagagtgatgaaggaataccactctgaccctttcccaagg

SEQ ID NO: 18885 - DNA, 2947 bp, Heterodera glycines
  unsure (1)..(2947): unsure at all n locations
ctcaatatacattttgagacgcaccaccattgggtgcaatggaaatacgtagaagctcactcattgctcttacgttgagggaaaacgcaatatacccctttgggttgcgtttgatccaagcgctacggctgcgctttagatttgcttttggcttagaggggatgaatcaccacaaataaatattatttcaaaacaaaattgatcggttaatcaatttttggtcgctttggcgacaataatagaaaaaactgagaatgaaattgttatgtcaaacataattataaatgaagacaatttgttacaattttcaaaatatagaaattgggaaaaaattattcgaacgatggcaattgttctaaaagtttcaaaatattggttaaagaaaattgggaaagtagcaatttcatcacatattagaaatatttcagaagaacaatttattaatccacaggatttcgaaaaagccgaaattttagtgattaaacaaggacaaatgaattggcaaaattatgccggaaaagaccaaattagaacatttattgataatgatgacctgatcagattagactcacgtattaaaaactgcgaaatgcaatattcgtttaaattcccgattgtttttccaaagggagcagcaattctcgagttattagcatggcgatcacacataaaagtcaaacacggaaaagttgatgcgactttaaatgaatttatgtccgagttttgggctccaaatattagagcaacaattaaaaaggttataaagatgtgtgtaaattgtaaaaagttgagtggcccagcattctcattaccaatcatgccatcacatccacaagaaagggtaaaaatttcccaaccatttaattcagtggcaatcgattatttgggaccctcattagtaaaaaatgaaggaaaaacaataaaattttggatagttttaatcacatgtttagttacaagagcagtttatcttgaacctgtcttagatttatctgcttactcatttttgcaaattttgagacgatttgcaagcagaagaggaacaccaaaaagaattatatccgataatgcacaaacattccgattatcagcaaaagttgcaggtgcatatgaagcaagaggaggaaaaggaaaagatgaattagaaaaatatttagttaaaaacaaaattatttggagatttatagctctagcaccatgggctaattctttggcagaacgattagtaaaagtttgtaaagatgcgtttaaagcatcacttggaaaaatggtattaaatttggatgagttgcgcacatttataactgaagtcgagtggactatgaataaccgaccaatcactcatgtatcaattgaaccggaaggcgaaagagccctccgtccgatcgattttataaacccaggattagaattaggaataaatttacaaaatgctgatgatgataaaaatgacgaagaatttactttagagccagaaaaattggaaaacaaattaaaaattcaatggaataaaacgaacaaagttttagaatgcttttggaaaagatggcaaaaagaatatttgaccatactaagagatcggacccaatggcaccacaaagggcctaaatcacaagaaaaaagagagccaaaagaaggcgaaattgttttaattgaagatgaattccatccgaggaatacttggaaaatggggaaaataatttgcctaaatggtcaaaagggatcaattagaagtgcgcaaataaaattagcatcaaaaggaaatgaaacaaaaggaagaataattgaaagaccagtaaataaactttactcattggaagtgaataaagcaattaatgaagaaactaaacccagtcaaaattctaaaagcgaaaaaagtcttgaagaaaataaaataatacaaaacaaaaatacgcatccaatggttacaagggcaaaaactcaaaaaacattcactctataagagaaaaatgtagcctgaaatgacgtttgctaaaaaaataagcgagcggttgctcatagcgggatgcggtttgcgcatccttccggcacttttcgattgcggatcgaatggtgtaaagcgttttttgaaattttcacgtaaaaaaaagtttcttcagaaaatttttgaaaattttcggaaaattttagaactgttcgcacaaaagggtccatatctcggcggggagtgccgaaaccggcttagcgatgttttggaggataaatgtcgacactcgggcggttcgaatgagctattaagcatctttctagcataaatttaaaattgagttttgctctggacacgaattaaaaatttttggaaaaatttttgcctcaagaattaggggggatacgcagggattctgaggggttgatgagtaattataaaaaaaaatttacactggaaatacttaaaatataatattattacgccctacgtgcatttgggcattacatgtcaaatactcaccaagatacttcatgggaaattgtgtccagaatccgaaaaaattcaattttgaaaattaggttaagtaataaaagtaatacatcagaaagtcttaaaacagtgtaaaaagatgtttgacgtttaaattttggatataacttcaagtctcaccaagatactgcatgtgcatcttggtatgtaaaataatcaacttttgaacaactcacgaacaactaatgaaccactgatgaacaactcctgcactactcttgcactactcttgcactaataaaaaatttaataattctgggggtgcaaatttttttggaattttaaagaattttttatactggaaatatttaaaatatagtgaaatacgccatatatacatttgggcattacatgtccaatactcacncagatacttgatgtgggatcgtgtccagaatccgaaaaattttttttataagaacaaagtatacatcagaaactcttaaa

SEQ ID NO: 18886 - DNA, 1413 bp, Heterodera glycines
tccttgggcccttcaccgacggacttggacactcattcctccctaggtcccggcagtgtggaggggatccacccaggaccctcatgtagaacataaaaggtaactcgcccggtgggactcgaacccacgaccccagcaatccgtgccgtgctctaaccaactgagctacgggcgcctcttttagaggttctctcaggtcctttatcccactttctcccacactccgttccttctggcatcacaaaggctttattgggtgtgtaaagtgcaaacattgggatgaaaacgagaaaaagaaatacaaaaagattcattgacgcgttgttcctcaatttgtcactcctattacataaactcggattgtacataattaagatttataccttcttggcaaataatgtaatgtaaattagaggccggaaggctctaatgcactttatgagtccaatcaattgacaatccctggtttttatacaataactttgttcatgttcgaacaaaccctatctttttggtatcattcgaaagcgcaaagtctaacgaagctaaaatatataaaatcgcagcgttcaggcaattacaaaaaaaagatttgattaattaagcacattgttgattattttggtttgtaactttcttgaaatgttagaatgggacaaattcgtttcccattttgatttgctgattttgagtgtcgcactcattttgttgtttggagaatgaagtgccagacaaatcattggcctcctgtttctaaaaatatagttaaaaatctgggtaatagttaaggtagtggtcggtccctgtttttagaaaaaaaaattaaaattattttcgagttgaagttgcttttgggctgttcacgattggataatcaaattatgacacaatcattctgaccacgaactcgaacaaaacaataaatcgaaaatgcaatttttaacaaaattcacagattactactaatttacacaatcattttactcacttggcaactatataaacccagcaaaaaattcgatttttgaggccttacatatcttttcggtttacagtacgggtggttcccttatttattattacaaaatcagtaaaaatgatgcgtacaatttcacaccgccgtcgattttgtatgtatgaaattgttttaaataaaacctcaatcttatcaatggtaaatccgcggccttttttgtcgcatttggatcatccgcagttgagttgaaactgggggtagtggtcccgtttggtatacaaattttttctgtaataattgtgaaaatgcgttcccaatcccgggatttttggggttctattgtgacgaagttgttttttacaccattccaaaaaggagaaaatagagagagagaaagagagcaaaaaaatcattttggcgttctatttgttatcatt

SEQ ID NO: 18887 - DNA, 1462 bp, Heterodera glycines
ttaataaatcgatttttttgaaaatgtaagatgcaaaatgaatatgtgccgctaatggtcaaatgcgtacggcggagtggacagcacaaacagaggaggaggagcggggagaagagagatgaatcaatcacaggccagcggatggagagtattcggcgtttgactacccccccccccctccccccgccgataaattagcaacaaattggggagaagatgaatggaaaattatggcaatgtcagctgggtagggaagcaggtggaagagctgtttttgtgggggacgccggactgtggggggggggggtaattcaatggctttgattttctgctgtcgacgggggcgggggattcaaagcccctttttttacaggcatgccgacgggtgaatggacattacggggaatgtgttggacgtcccccgcggccacttttgtaagtttcgcttcccacattcatttcaaaaaaaatcattttgctcacacacacacacaattttaatttgatttactgtttatatttttagatttttgtaccccaattgaaaatggaagcagcaaagactggcggcaacagcaaaaaaagtcgcgccatgagcagcagcaccgacccagcggaagctgggggcaagaagcgccgcaacatgcatccggtttgtggccccccccccccaaaaaaaattagcaaatcaggaagagcctgaatatacccccaaccaaaaagtagaatttgggtcccgattccttccttatctcggggggggggggtgaatatggaaaatttgtaaaacaccccaattcatttgttttcacatttttttatagcaaattgttgacatcactcaacagcagcagcaaaatgtcgccgaattttgtccagtttcaaccgggagtgttcatcagcagcagcagcagtcggatccgcgcgcaattatgaacgtaattatggggggggacgcttttttttgctcggttttaattggggccaagaaatgttgaaacatgctgccggtctggccgcaaacaaaataggagaagcctaattaacccctccaaaaaggagtaaaatttcgtgttcatttcattcttatccggggggggggggtgaaaattttaaaccgccaaattactttgttttcgcatttttagcaaattgttgacacccctcagcagcagcagcagcagcagcaaaatgtcgcccaatttcgtccggcttcaaccgttagtgttcaccagcagcagtcggacctccgcgcaataccgaacgtaatttgggggagggggggtgtccttttgccatgcttagatttgtaattatgtgcgccgcctatattcagcagggacatgttggggttggcgaatttgcaatggccggcgaccccaccgtacaacaacaacaacagcagcagcagaatttgcttgttccgcgcatttccatttcggttggtttatctgtttccctc

SEQ ID NO: 18888 - DNA, 2236 bp, Heterodera glycines
cttcaaaatttcgacttttggcaatttcatgtataccttttttggtaattgtctaatcatgaatcaatagcttagaaaaatcttctaaagatgttaagctttcgaatgataccaacaatgttggatttggatggcaaagaaaaaaatttatagaaagttatagtggaaaagcatgctggcgaccaacgtgagcgtccaactgagatagaagtaaatagctttttcctcttatcctcacttctcgtgtctttctatttgactttccttttctctcttttctctttcattttctctctcggtttactttttgttcttacttcgccccctcgctctccatttccactttctctctccctctctctctctctttgtctctcctctctctttctctctctctctctttctctctctctctctttagttttctctttttctccgtccatttgactctcttctctcttatttctctcctctttcctttgtacgaatctctttcttctttgacgtacgcactcgcagccaatgggtgtataaataaaactcaatttaccttcgtttgcttcgtttatcttgtcattttaaaatctcccattttattttttaaaacaaataaaatttaatttaaaaacaatgttttctttcatttaattttattcgctcgatttcaattatcttgccatcatttttttattttaagtgtttagcctggaaatgatgcttgaaaatgaaagtaggctggtcaattcgcctttaactaagctgcaaaccaacaattctaataacaacaatggtcaacagttgcatcaaaccaaaacaacatttccatcaattttattgcttccggatcgaaataacgaacagattattgtaagttttttcaacttaaaaaatcaaatcggtttaattgcattatatttattaaactaaaaactaacgtttattgttttagaatatggaaagtcactatcattcacaaattgaacgactttcttcactcactgaggtggaaatggctgaattggtatcgagtaatacgaatctgaacaacgtccaggctttggagattcttgatggcttgttttgtgcttttcttatagaaagtcaaaattcttctaaggtattattttgcttttattgtcatgccaagttcgtctttcagtatttgaactgtttgccttcttccgacatgtgttggaatcacatgctttacaatgccaattacgtgttaattgaagaattctcgtttctcaaatctgaatatcgtcatcggatggttcaattcttggcttacactatcaaaatgaatgttccatcggttgattcttgtctttcaaatttatttcgtgcactttccgatggtaattctaaaaaactcattaattatcatcctatcaattaaggaactgaatttgtggagacgtgcaaactcgtcttttctgtttctcagatactcagcacaaatcagaagtggctgattggcctcaaaaaaaattcattggccctggcggatgcttttgccttcatggcacgttttgtcaccgatgtgcctttggtgatcgctaatgtgtcttccgtttctatcgacttgttcaaatctgctttggtctccacttgtgaattactcatccgcgaacgtttcgttgacctggccaccacaatgggaagagacctgatgatttcgctgatgcgactttccaaattaacgcaattccaaaatgtgtggaaggcattgcttcacaacccgacttccctgatgcccaacttcagtatacaacacactcattttaattacgtttgcaattcatttaggtcttaagcaactgatgcttagtgtaccgactgataaatttctcgggtcgcgtgtttctgtcaatatcagtcggaaaattgatcaattgttaaacgttgtcagaatgctgttggggcaaaacaaaatttccgagttgactaaacactttgaggccttcaaaaacacggtttctgaattttgttatttcttcactttattttcaattttagcatttgtctgagcctgacagtgggacaatgcgtgctgagataatacgccatatttgggctcatttaaaacaagaagagcagagcgctgactgttgcgaagctcgtgcttggcttatcggctggcttttgcgctcgtccaaggtaaataaacacagaattgtcccattgattaactaaatgtttatacaataaaatgcccacttttcaaattcattag

SEQ ID NO: 18889 - DNA, 3190 bp, Heterodera glycines
ttttgaaaaattttccggggaaaccatcggcactgccgggaccccctttttctcaaaaaagtttttggaaaaagcgcgccccaaaatttttttttcatttggggacaaaaaaagctttgcaaaaatctgaatttttttctaaacttggtagccctgcaaaatgcccaatccacctcagtgagcttcgttttcttttcattgaactgctgcgccaactcctccctctttattcaatttaatagtagtgagggaaaaggggattggcgcccagttggcggcgcccagttgggctggcgcccggtcggcggcgcccagttggcggcgcccagttggcatcgcccagtcggcggcgcccagtcgtcccggtccggtcctgggttcaattcccagatcaccccaacatttttgcatttttcaaaattattttggaatgtttttgtttttatttagcaacattttggtttagaagttgtcagcattaagtgtgcttccgattaagaatgccaaatatatgaatatcatatactaaatgttgttctgatatcggcgaaatgtgatttattttttacttgcaaaaactggcatttttggtcgtttctaataaaagttattaagtgtcaaagtgcgtcagaatcaaacggtccgcaattagagatgaccctgtccggcaaacggggactaggtcgtttcggcgcgaggcgagcccgagtttttggctataattctttgcaaaaaaagaaaaaaattacaacggataaaagcattgaaaaatagtttcaaaaatgttattcttataaatagatatttcttttttaggcacaaaaaattgggaaataggcacctaaatgtagaaaaaaaaatcgcaaaataagcattaataggcacaaaaacccacgaataggcacaaaaataggcaatatttttaggaagaataaaacacataaaaacttaccaaaaaaattagttccgttataatgcgcagaactttagacatttgtgatttgaagctttttttataacgactcatttgtcagcaccatttgggtcatctctgctgatgactcatcgataaatgaccccatttggtcagacagagtatcaataaagtactgtatcaaaagcagtaagacactgtacccaatacgattttcattcccttaataaaatgcattttattctgttttctgacttgcatttttataaattctctttgccaaaagcaaagaaatgacccaacagaagaaaagggcatgggaagggacggggtcatttcgctgcccaattagagaagtcattaattctttcataaataaatgaccctaattagtgttctccttcatgactaatcgttaattgaccccacttcgatcagagcataaatcctcccccctcattaaactcatttttctcttcttatttcattcatttttctttgttaaaattatttttcaataatcttggtatcattcgaaagtttaacatgtttatagactatttcgaagataatgcttcgcgattagacaatttctaaaaaagttatacatgaaaattgcgaaaaagtcgaaattttgaagttttttcttaataaaaatattttccagataatattcgatcatttagtccaaaatgattaagtgtttgaaataaatgacctaaatttaatattattaatttggtttaacttttgaatttttaaaaatccccggttgttcccggttccagacgaaaatcgatgtcccagtcccagtcccggcttctcaggtcccggttttggcaaaaattcccggtcccgtggcactctattataaaatgtattaaaactcgaaagaaaataagagcaaaacaaattttggtaaaatatagtgcgcgttatgaattctcttttatatgcaaccacgcgaaaacgaccctgaccgcaaaacttaaaatcaacttgtagatttacgattctaaagatacatacaaacattattcattcatcaattccattttcataactttaaaaatgttttgtttttcgccttgcctctcattattaaaaaacaattctaacgcaattaattattctgctatctgtgtgacagtggcaaaattgtgctcgaattgccacaaaaatgaaccgacggtaagcaatttgaaaagtcacaaattcgtcgtttatttgactaaactgttttcccatttcagttggatttgcaacgacgtttggatggacattttcccctgttttgaccatgctcaactcggcctcaaattggcattgctttcgccacgtttcaatgcgttggtggacaaacatttcaatggcaaaagcgaattgacaatttggagatcaatcgaaattcgtcgcaagaacagtgtcacaacagcggcaccagaatcatcggtgtttatcaactttgacaattcagtgccatttccattgcctgactaccgtccgttgcccagcaaaatccgttttaagcgccttcagattgagtaattaaaatcagagctatcgcaataaaagcattcattcattccattatttttgcagttacatcgatcattctgtcatcaattttcttcgtttaaatcgccaaattttcgacaaaagaggcaccaatttacagttgttttggatttcttcaccacacaccacggacggccagctgattttggacatttttgttcgtgaaatatggccaatttttgcgtcaaacattcgccatttgcgttttctcggtggttatcatttggacaatttgcgtcgtctcatttcgccgacatttctcaccgatctcaaccaattgaattcaatcgattccgttgatttgttgcccgatgcaattggtgattttgataggccaaatgcaacaatttctgctggccaagcgttgtccaaatggttgcactctccaagaaaagatggccaaccaaagcaattgcattgcacacttttgaaccaacaagcgtacttcgattgggtcaacaatttcaaggaggtgtgaccataatttcggcaaatcactgatttttgttttccattgtttagcattttctccgtgccaatgccatttcttccgtcaattaccaaattcatttttgtgtttttgtgccgtcaatgcaactggtgccatttgaattggtgaacgaatggacaaaggaaaagatggcattggccaaagcaaagaaaacggacaatggataa

SEQ ID NO: 18890 - DNA, 864 bp, Heterodera glycines
cattccaatcactggcactcaattcccaccagcatttcaatctctgggactcaacccaccagcatttcaatcactgggactcaacccaacagcattccaatcactgggactcaattctccagcatttcaatcactgggactcaacccaccagcatttcaatcactgggactcaacccaacagcatttcaatcactgggactcaacccaccagcattccaatcactgggactcaacccaccagcatttcaatcactgggactcaacccaacagcatttcaatcactgggactcaacccaacagcatttcaatcactgggactcaacccaccagcatttcaatcactgggactcaacccaacagcatttcaatcactgggactcaacccaccagcattccaatcactgggactcaacccaccagcatttcaatcactgggactcaacccaccagcatttcaatcactgggactcaacccaacagcatttcaatcactgggactcaacccaacagcatttcaatcactgggactcaacccaccagcatttcaatcactgggactcaacccaccagcatttcaatcactgggactcaacccaccagcatttcaatcactgggactcaacccaacagcatttcaatcactgggactcaacccaccagcatttcaatcactgggactcaacccaacagcatttcaatcactgggactcaacccaccagcatttcaatcactgggactcaacccaacagcatttcaatcactggtactcaacccaccagcattccaatcactggcactcaattctcctgcatttcaatcactgggactcaacccaacagcatttcaatcactgggactcaa

SEQ ID NO: 18891 - DNA, 2154 bp, Heterodera glycines
tttttcgtttaaaccatcccctcccttttttgtgcactattttcgttttcaccatttttatcaattttttggttgtcttttgaaataaattgtgaaaaaatatacgaaaattattttcgcttttaattatgatgtacaatgcttttaagccccgccgtgaggcggctcctttttgtgcactattttcgtttttaaaattggatccggattttttggcttttttaaataaattgtgaaaaattcaaaacaaaaaacttttattgcgctacaaatgcttttaagccccgccgtgaggcgggacagttccaaaatttgcaccacattttactgtggaaagtccaagtaccttaattggacaactacgtgtcaatgagcacagtcgccgttggccagttgtgaaacagaaaaatgggaatatcagatggggtgcgtcccatcctaaaaattcctcttttcgtctaaccatcactccctttttgtggagtcgggggcgtttgggccccagtttttgggcccccgcgtttgggcccccgtttttgggccccaagtacagaaaaatttctgttcttcaaaattttcaaaaaatcaatgaaatcctgccggatcctgcacaaaaatcagatttgcggatcctgttgcaggatttgaattcaaaatcttttgccggaccggatccggccggattaatcctgcaaatcctgcattttcaaaaaaacgcaggattgcggattgggatcctgcaaaatcctgcgcaggatccggtcctgctccggtatctaataattaacaaagattttggtgcaaaaccgaacgtgtctgtacgtgttgatgacaaatttgtggcttttccgttgccggaccgtccgctgcccaacaatattcgctttaacggactttacattcagtaattttaaacttgtgtgtgtatttttgaggatattaaaactaaatttttaaaaaaaatgaaaagaattatgtggtgcgataaggtacaaaaacaaactgatcatccattgccatttcgaaaaattggaattttctaatttttgttcgaattcgggtctgaaaatcggaatttatctaaataaatgccggattcgagatcagtgaccccgaaaacccttataaaattattttaaatgactcttaaaagttaaatgtttttacgaaaggggtgtcctcaataagggtgctaggtcgtttcttaaaaactgccatggcgggatgcattaaaaggggctgatgggtcgactaagatttttcgattggatccgacggtaaaaagctgatcggaaatcaaattagtaacggttcataaatttgactatttttttcttttcaaaaccacttttttgcggtgcaatttttcaaaaaactaggaacagggggtccggcggtccttatcagggatggcattccgaggtcccaaaaattttcggaagtgtcggaaatcggatttccaaccccaaaaacgtcggaaatcggaaatttttcaaaaaatatacaatataataaaaaaatttctaaatattttaataggctaaatttttaattcttaaccaagtaaaaggtatttcacaaatgtttttagtatattcgcttgaaaaaattattcaattattttatcaaaatctttttttgtcatttttcattattttagaacatttttgggaaaaggagtgactatttacacgttttttagcgcgcgattttttcaaaaactttgggaacttggaggagggtacggcggtgccgataggcgccgcaggggaattttaaaaaatttcagttcaatttattaacagaaattgtacaaaacttactagttttttgaaaaaaaaaatttaaaaaaattccgacttttcatcaaaaatttcggaagtcggaattccgaccccaaaaatgtcggaaaccggaagtctttccgtgccatacctggtgcctatcgacatctgcgagaaattttatgaaatttaatgcgatttattaacagattttgtctaaattgaccaaatgacgcagtttttgactcaatttctacaggattattaagtaaagcctatccgacggtgccgataggcgccgccggggaaatttcacaattttgaatgaaattgcgatgaaaatgaagtactttaattaatttattattta

SEQ ID NO: 18892 - DNA, 1551 bp, Heterodera glycines
  unsure (1)..(1551): unsure at all n locations
cggcgccgttgctaacaactttttcctgatcacccaaaattaaaaatttttgttatcattcgatagctcttcagattctctattagcctgtaaaatttcaaaaaatttcgtcagtttacaaaaaagttatgcccaaaaaccctcaaaaattaactttttcttggctttttcggcgccgcgtggcataacttttttatttttgaatcattcatttctatttttacatgtaaatatagagcacacatagagctttcaaatgatgccagattggctaaagctaactgacaaataaaaaagttatagcatttcaaaatttgcggcgccgaaatggtccgcgccgaagtgaccccgacccttgtgaagtttcataacggaatattcgttcgtaccaggtgttttcgacagtacttttaaattaattttctagataatttcttgtatatatgtatgaattaatattaatatacaacttgcataataaaatttcttattgaagtaaataataaataagacttgtatgtttatttttgtcaaaagatttatcgctttcaatttttctatgcaaatatctcttgctgaactgttgtcaaaaatacaactcgaatcgtgtgggaaaatatgctaactaatgccgcgtttttgtggcaaggtgcaaatctgcaggctctatcagaattcgaaaagcacaagcccctctacaataagagcctgtgcttaccatttaattttcaaaatgacaatacttatacataccacatagaacatgtttttttcctaaacaagctttactgtcgaaatcaatcactgtcggaaccagggctgggcgaagctcggcttagcactcgaagccgaaggcgaagcccaatttttttcgaagcacgaagttcgaagcccaaaaaccgcgaagttttcgaagcacgaagctcgaagtttttgaaaaaataattttaccctaacaaaacttttttttcaaaaaattttcgtattcactaaaaattaattaaagctttctataaattaaaaaaaactaataactaatgtttttcctaataaatttttccttttttaattttgatcagggctaccaactgaaaattttcaaaatcagcatttggccggtaaaaaatccgcattttgtaaattttattccaagtttaaaaaactcaataaaacgttttttgcggcgcgctttttccaaaaaactttttgggaacgggccaacggcgccggtaggcgccgtcgggaaaaattttgaaatttgagcgtatcttgttaacaaatttaagcaaaaaatgtaaaaattttgcgatgtttgagcctattttttaagaaaaattgggggcggggtaggtgccgccgggcgggtgaaaaggtgcgaattttcaacttatatgataaaaatctacacttacatcatatttttaaagtcttaatttgtgaaaaattgaaagaaaaacaattacttggagggaactgatctaacgcaaaaatcaggaacggatccaagagaaaagcaaaattgtaatgagatttanatttaaattcactata

SEQ ID NO: 18893 - DNA, 1427 bp, Heterodera glycines
  unsure (1)..(1427): unsure at all n locations
ttacttatgtttgttttttgtcagcaacaacagcagcagtgtcaacctcgactgggccaattgtctgtccgacgtcgacggggccatttcccctgcccattcgtcgtcgtcttcgcctcgtgcgtcgtcaccgtctgagcggaagcaaaggaaatttactcttcgaattgatcgagtgacttccgtcgattcacttccttttaaaatccgtccattgcctggaaagggtctttttgtgagcgaagtttgtgccgagaaaatgctccattgtcattcagtcgctttgcgtgttggcgaccgaattgtcgcggtgagtctctttgaatttaagcaattatttaatgtttcacaggttgacggcatgtccgtgataggttacgcttgggagcaagtcgttactgagatgatttgtggtggacccgaaaagactgaattggaattaacggtcgaacggacccttccggacggaagtgaccaagcggaggagcaaactttgacagtgacacttgacaagacgcagaatggcgcaatcggtaagtatttgactcatcttcctcgtttaaatttttttaaggactcagtttggccaaacggatgggctccgacggtgttttcgtgaggaatattgcaccggactcaatcgcagcgcgagacggcactttgcgagtgggggacagaatttggcgggtgcagggagagcaaatcgctttgggagaaagtccggcgaatgtcgtcaaacggctcaaagatttatccggggaattcatcatcgaagtgcggcggaaggcgtaatttggattatcagagtcaggaagcgacaccaccacctctacccactaaaactacttaacctttgcttcgttttcactattgtccatctctgccttttcactttacatttttcaatgtgctcatttctcccctcatcagttctaattgtgatataatacttaattccagcgcattaagataactaataatattatctcgttaaattcgtcaataaattaaataaatgctatccttcgctcaaaaaacagatattttccgaataaatttacaaaaaattcaattaaataaatgccatttttcatcgtaatgcacccaaaatttctgaattttcccgtcggtgcctaccccgggccgggctccacgttattaactctaaaaaattggcttaataagcaaatttgggaaaaagtgaagaatactgatgtaatggctgatcgaaaatagctgtgggagctcaaattgctgtgggagcaaaaagacagggggcaaaatgaaggaaagatgccccataacaacagtcatccctccagcggtggatgtggtctagtggctaagacaacggatccacgtaaggatccccgagcggcggttcaaatccggccttccaccccaatttttcgcctanataataactg

SEQ ID NO: 18894 - DNA, 940 bp, Heterodera glycines
  unsure (1)..(940): unsure at all n locations
cagagcgaaagccaaggccctccggggggaaattgtgctgttcattgnccatctgtgaantgaaaatgtaagagtatgcgatttgcctcttntagggggcagaacgcttccaatgaaaagctccattatgttcaaattaaaaaaacaaataaattacaagttataaaagtgcaaagctgtaaatccatttcctctttttgccgcttttggtcacttgggaaaacacggaaaactaagccatttttcgaccattttgaatgaatcagggaccataggtgttaacacctgtttataggcgagttgttgctgcccatggacggagggtacgccacacgtcggcgattctgtcgagccaaagtacggggtcggtcttcaacttggcccagctgtccgtaccattctccttattgtcgtcaaacgaagccgacgatgaagcgacctgtggaggcattgagttggccagagaaggtcagtgaataatcagctaatctgggtggaattgaatttcaacccgcccaattcatggcatgccattcggggatttgtaatgattccataaaaatgcgacgttttttcttcgatttaaaaattgtgtatatatttgttataagaattctttcattgaataaaattgcgaccaaacctgagtaactcttttttcaaagtaagttactactttttgctttggaaattcgaaacgtattttataagtaatgtaattttaaatcgcctttttggataagaaaccaaaaaatttctatctaaaataatattttgaaaaagtaaaatttttaaaataaaaactcccaaaactgaaatggaaaaaagaaatctggcattatccctgacctctccaaggcgggcgacagaccctgagcaaatgcgactaagacacgcgcgtagttggtgagcaggcaggtcgttgatcagatgggcagat

SEQ ID NO: 18895 - DNA, 2678 bp, Heterodera glycines
  unsure (1)..(2678): unsure at all n locations
cctaacttcaatttgcatggatattgctccgttaacaagtgtcctttagcgttaatacacttagaagtgaaatggcttctcgacccttggtctctatttataatgagaaaaatgagccaaccggcaagcaaatcaagcttccggccgttttccgggctccaattcgacctgacattgtgagcttcatccatgaccaaattcgcaaaaacaagcgacaagcgtatgctgtgtcaaccgctgccggtttgaataaaatatcaaaagcccaataatttgttgtctggtctcaggtcatcaaacttccgccgaatcgtggggcactggtcgcgcagtggcgcgtattccgcgcgtccgtggcggtggcacccaccgctctggccaaggagcgttcggcaacatgtgtcgtggtggccgtatgttcgcaccgaccaaagtgtaccgtcgttggcaccgccgggttaatgtggcgcaacgtcgttacgccattgtgtccgcaattgccgcttcggcggttcccgcactggtccaagcgcgtggccatgtgattgaccagctcaacgaaattccgctcgtcatttcggacaaaattgagtcgttcacgaagaccaaggaagcggttggctttctccagcgagcgcatttgtgggacgatgttgagaaggtttcatttaatacattttcgagataagtattaaggaatgctttttaagtaaaacgaaaaatatcagttggagaaataaggcatctacaggaaggaacaggcataaatagtattatttccaataaattgttagcattcctctcgaaaatgggttcagataaaggcgttgcttttctgtgcgtggtttttgttaatctctgcacaaattatatcttttctttaggtttacaaatcgaaacgcttccgcgccgggaaaggaaagcgacgcaaccgtcgctacaaacagaaattgggcccgctggtcatctacaacaacgacggtggcattgtgcgcgcatttcgcaacgtccccggcgtcacattgctctccgtcagccacctcaacttgttgaagattgcgcccggtggtcacttgggtcgtctcgttgtgtggacagagtccgccttccgccagttggaccccctttttggcacatggactcggcagagcaatgtcaagaagggctttacgttgcctcgtgccaaggtatagtatttaacaacaaaccctttgttggtaatcatgttccttcgtaattttatttgtctgttttttaagatgaccaattcggactttgcgcgaatcattcgctcggaggaaatcaccaaagtgttgcgaccgacgatggcgcgaaaagtgcgccgggtggccaagattcatggcaacccgctgaagaaaccctcgctgatggccaagctgaacccgtacgccgctgttctgcgccgtgccgcggtgttggcatcgtcaaaagttaaaaaggcggaggcaaatgaatcggagggcaaacagaagcagccaaaacagcagaagtaagcggttgggctggttatgttaccatagatttttatgactatttgttgaatctacgtagtttttaaaaaattgttaagaacactgcatattgagtcgagtcaattctattacaatattagtaaacccttgggataagaacaattctctctctgggtttgtttgcgactaaaaaagtgattaccattcaaaccgacaaattatctatcttccctttaattttagagcaactgcctaattgaacgaaaacaacatggaacaactgattggcgatgctgactttggcaacacacatttatttttgttgggcgataattgtttttgttgagtggataaatgttgattttgtttcgttgggacttcttataattggttttttgaatggtaattccgtaaaataaagaatgagctgtaggatttgagttgagcatttgaggaaatgataaaatgagggttggtctgtcatgttaaaagagtggtcgtctcttggccataatcttcctcacatgatgagtcactttcgaacgttccattcgttcggatcaaattgtatcggttggcccgaaggacgcttgtccgaaatgccatcccatttccacaacttaattttagcagaagttgaaaaaatccattccgacagcataaaaatgggttggggtttgaaggaggttatattgctgtcctgcccatttctcggattatcattagtttattccccctattctctgggttccgcggagttcaaattattgcacaatttattttttaaaagggcgaccattttgatcaaataaagattgagaccatagttaaaaaaaagtggcaaataaaaagatttatcatttttaattagctgtgatcgatacaataatacacaaaaaaagcatgaatgagtttcaaacggttggatgggttttgggttagtctttgagttggcgatggtcacacacttcccattccctctgttctttggttcgttttttgcgggtattttatgccatcgcccgggctacaaaaaacagaattttaaacatttttgattgaatcaacattaaattggttttattgaatggaaaaattctttaaaaaccaaggatattttaaggtgtaatccttttggttttttcaagttttgctgtttttcgcantagttttgaagtgccgtgt

SEQ ID NO: 18896 - DNA, 3132 bp, Heterodera glycines
gtgcacctagattggatggaggcgtgggttcgattcccacccgatggctaacattttgtcaacaaatctgagatgagaaaagcaaaaaccaaataataaattttgaacatctggactcaggtcagggaagcacttgtgaataatatgcagcaaaagaatgccaaaacgtgtagagcagcagaagatgaaccaaaaaaagctgctattggaggcactggagatgaactggatttgttgagcttgctgatcaagggtgatcgaagcaaaacaatcggtgaggacgggttcgatttggagctgttcgaccaggacgacaacaacaacaacgacggggaagagcagggcgtgaataagggcaaaacgacgacggcaccgcagaaagccaagcgaacaccgtcccagccgaaggaatcgtcgttgagcaaagcgatgaaagaggtttttacgggcaacttcgagttttttaaaattagtctcgagacaccccgagcctcgaaaaatgagcctaaaaattcgagacttagactattcaaaaaccgagacccaaaaaacccgagactttctcgagtcgagactctcgagcagcactagtaattaggcattttaaaagtgccatgttgttaagatggacttagaccggagcaagcaaacaccatcatcaacagaaaagccgccgtccagaaaaggttcccgtaagggagcacatctgctggagatgatggaccaagaaactgcagccccaaaaacgacccaagcgagaaaggggtccgttaagcggggcaattaacacactaattgcgtcttaatcattggccattgtgaaaaaaaaacaattttagcgaagaaaaaacaacaagattttgaattcaattcggttgtcagtattaaagtctcattaaataatgaatgtgatataatttgaaagaaaaaacacagggaaatttaattaatctggcaaaattatttgttcaatgttaatattatatttaattttaaaattccgggattttgtttcggcttttctgattccaatcccgtattttcctaaaaatctctatctcctcccccctctctacctgtaatatgcaagtgtcgggttgtgcatcttctgtgactcgaacttcgtacacggactggacaaaatgcacgcgttgagcaggttcggcatacacgaagcggatggtgacattggcgcgagagtgaagcggcgacggatggccaaagtcttcggcttgcacttgaaatgtcgacaaatcgtccatcggacaatttggaagcttaattatgttaatttgtaaacaaattaagaaagatttttaaaaatacactcagtttccttaaaaaattttaaatcccctttagggaggatctccccaggttagggtctgtccccgaaatccaggcccacccaagagctcagcagaagttctaccttaaataagaatttattaaaaatgaatactcactttatcttcgtcaatcagcaaaatgccttgttccggttctatgctaaacatatcagtgccgattaaactgtaacgaatgcgtccgttctctcccgcgtccgcatccgttgccacgaggcgaatgtaattaacgtaattagtgccggtgctaatttgtgtattcacatattcatttgatgtaaacccatcatcatcaaaattgtcatttgaattctcattgaattcgtaaatgccaagtgtccattgaaattggaactgtgtttggttccatcgtggagcattgtcattgatgtccaaaagagttaagctgaaaggatccaaatatggaagacgagagcccaatttaatacagaacacgacagggatttttgaaatttggaatacagtagagaagatatttatgaaaagtcgggattcggtattgggaatcatgccgatacaggattaccctatcggatttaaatccctatttgccgggatcctaatcccgacctttttcttcaaaaaagcgtcaggctctatatcaggaggatcccaggaaaatcccgacgggatcccgattctgtcctgtctcaagacccaattttctcgactctcattctcgagagcttttggaaacacacgaagatcaatatataaacaataaaagacaccatactgaagtgggtggtcaagcagtacatcggataagtttcgcaccaacaaatccatatgcaatgttggcatctgttctcgatcaaatggtccgcagatgatcagcaagtaaatgtgttcagtgtcagtttcacgaagacaaaccatggattgtgcgcccaacaaagacaaactgacaaaaaaagaaatcatgggatagaatcactgtccaatattgatgcccccaagttgcggtgttggaactctaattccaaacccaaaaatgacgtaagtctggattccgtctcatccctgattttcgacctcgggatcaagtctcggtaacccactaaactgaccctgcgctgacctaataggccccagggagaaaacgcactttaagttatccgtgaaatatgcttgttgatcctttctaatggcatcggcaccaaaaattgagaagggtcgttcgatggcaatacgtgccaaaacataaccaagaggcaatctctctggcacattttcaccactgccattgtccgtcagccaaatgacgctgagcgacacagctaataaaccattgacaaaggagtaaaatatcaaaaaaaaaattggagaaatgaattttatgactaggcactggatgctaaaaatccacaaaaatgtgctaaaaaattttaaaaaaatgcctaaatctgcaaaaactagacaaaaagggaaaaaaattttattagatcattttttcgtttaaaatttgtatgataaaattcacaaaaaatatatttgttaatttataaaaattaaattaaaatattttacagaataaattgtcaaaataatagtttttgtaaaaaaattatttaaattgtttaaactttatgttttgccaaaaaatatgagaattttttgttccgacgaaaattagacggagaaaatagtaaaaaaaaacatataaaaaatataaatccctgccgtatttataacatatattttaggctttcaccatttgaagtgccatcgagcacatcgcttt

SEQ ID NO: 18897 - DNA, 2294 bp, Heterodera glycines
tccgtcagcctcagaattgtccgcgtggtcgccagcgggtcgaactccgttttgctgtcggtcggcatcagccacaacatgttcagacactgctccatttcgtcgaggatggccaaacggtccaccaaatcctggacaactcccaactttttgtgtggcgcattttcctgaaattggcagcaaaaatgcttttccatgtgataaagcaaaccttgagtttgacaatttccttctccgcatttgtcaatttctcttccattttaattacattttctttcccattttgcagtgccatttggattttatcctgacaatcggcgagaccgatgtaacttggcacaaagtcccggtatttgagctccaaatccttggccacttcattgattgctgaaacaaatggaattaccaaaatattacaattacaagagcaaacaataacatttggaaatttcctgttccaattcggcaatttccttgtcgatctccattatatttcacctaaataagatgaaaatgaaaagtaaataggtatatcgaataaatcgatggatggggaagtatgataaaagatgactgggcatttcggcaaaggacagatataaaaatgaaaatttatggttttccccggcgtcagagccaataattcgttaatctcctaaaattgactcaaaaactagtcaggtgagggatgggatttggcaagatcccagctagcaatcccgaattttttggaaaagcatgattaatcctgcgggatcaggtcccgcaatttttgaattccaatcccacatcggacggacccgcaaatttgatttttttttttgtgcgggaaacgggctcgttgcaattttaaaattaagacagaatgccaaaaatttcaaacattactaaattaacaaaatttcattcaaaatttatgaatttttccagcattgatttcggccgcaggccattttctggcaatcatgtcttttactggtcccgaaaaaattgttttttaaacttttctgaaaattctaataacacatttcttggggggtattttgaggtgctgagtacgaatccggcctactttttggcgaattccgaaccctgaacccgagttcgaacattttcgaaaaaattttttgtgtgctaattgacttcatttcaattttaaattattaatttctgtggcgtttcgtatatttttaagagactcaatatattttgtgatgtttttggttgttgttttatgatttaattttggagagaaattgtgctggattattttattttgtttgtcgtcgctattttattttgtttggtataaatttatttgtgttttgttttgttttgtaaagacagatcgcagagaactgttgacaatcaccgttttgacatttgaattgggaaaagtggacgcaaacaagcttttgttttcaacttttgttttgaaagccatgaaaacacatttccaagggttttcggggtaactgttcacgaatccggcatccatttcgaacaattcacgaaccccggacctaaatttgaataaaaagtcgaaaatttaaatactccgaattttaaaaatggttaaaatatgtaaataattaatgtcatccatcaatgcttcaataaaaaaatcatttaaaccacttttaaatttttaaaattaattccaaaaaattttttcgaaaaatgttcgaattcgggttcggggttcggaattcaccaaaaaggaggccggattcgtactcagcgcgtcaaaacacccctagaaacatattattaaatttttcttgaaaactaaaaaattttgttcgggaccagtaaaagacatgattgcccattttctttagtaatcttttttaaatttttcaggccaataaatactaatagcctcttgaataatatcatgaatattttattttgagggatgcggtaggtacataaaattcatgtccatctttataaataatgtattaaagcattattatattaaaacaacaaaatgggaaaaatacaattatgaataaatataaagttaacaatatgattaaatggaaaaaagatcatcaaaatttgaacggagaatattaaagagacgtccgtataatttgtgggggcggtttgttcagcttgacaatgctctaaattaattattcaataatataaataaaaaaaataaaataattttaaagctaatacaacagcatttaccaaagaaaataccgacataattagacatcacttataaccatttagcatttattcaaagacagactgacttcgacggctcccggacagggaca

SEQ ID NO: 18898 - DNA, 1722 bp, Heterodera glycines
  unsure (1)..(1722): unsure at all n locations
acttctacttaaattntggtgtatattttctaacccttttcatgcactttttggtgctttttatgtcccaaatatcagcgctgattttgaactacttgaaaatatttaatgttttactttctttcaaactaacaataaaacgaaaatttgtaatttcacatttggaggagatcaaacagtaaaaaaaggcaaaaaaaaaaaaatcattattttttgctgaaaatttttccatcagagcaaggcttcgtccttgaaaaactctctccgaatgtccttggaaattaatgcacttgcgaatcgttaaattctaagccgtgctctgattttgaacatttatcactggaaaaaatctcctcgcggtgcatttttttgctgaggaataatcggcacattctgctgaacatctttcagacccattagaagtgccaccaattgcatttgcttataaaaatgattattgttattgttgtacggtggcatttctaaaactgtaaaaaaattttaaaaaaataattaacatttattttaccattaattcgtggaaaatgggcaccatataaattcggcaaaagttggtcaggcaagttcagattataaggcaaatgactaccagcagcagtctaaatgacaaaaaattaaaaatccattgtttaaatacgaaaattgtcggttaggagccaaaaaatgatttgtttcaataaatgcccatgggtgcagggctgcatgaaaactctaaaaaaaaattttcgtatacgaaaacgaaacgaaaaaaggcattcgatacgaaaacgaaaacgacacgaaatttcgtgcagccctggaccggaaccttttcgggttgaaaaaccgggactttttggatgggaaaaccgggaaaaaaccgggatttcggtactcagttgtccgtccgtgttttggtcccggtcccgctcaactcttgttttaagacatttttcgttcatttttgcatcatccatttttaaccaattgggcatcagcgaagacgtgtcgtagatccatcattcaaaggtcattttgtagaaaattttgtcctctttctgatcccctaggaatttttttttttcaaaaattttcccgatttcaagccattttcgcgttttcagatcactaagaaggagtgatctggtgagcataatgtaattgcttttttgttaagcttcaaaagttaggcttacatgaattatttcagattttaggtcgactttttccgatattatgatttttttgaaagtgaacctgtcattttgttacactgtatgatgagactaattaataattattactgctttaaaatctttattttgtagaatattttctatttaaaatatttgagtttcttttattttatataaatatttagtatttttaatagaatttaaaaaatttcaaagaattttctattttatttgtttaattttcttttggttctattatactattattttttgaaaataactcatgaccagttgcgcttgaattactgaaaagaaaacaaacaattattgcttttttatttatttatttatttttaaatttatttatttatatcgtcacgaatttattatgattttttttattatttcattaatgtctttttaataatttaaatctaagtaattctatttggtaaatgctttttatattattcattttatttttatttagcaaaattatttctgctaattatcttatgaaattgag

SEQ ID NO: 18899 - DNA, 1441 bp, Heterodera glycines
ttttgaattttttggctttttcaaattcgtaaatttataatttaattttgaaaaaaaacatttacatttttgaaatttaatctgttgatggatataatataaattatttctatttattgaaatagattttgaaaaataatccattaaattactattaatatgagaacactcttttttaaaaaatttattttttttcgcttaattcctttttttcttcatatttttaataatattattttattaataaatttatatttttataactcatatctcgtagactaccttcaaataaaaaacgttacgaatacaagtgaaattattgaatttcattagaaaataaaaattcaaaataaaaaacttttgaattagattttcttttctttatttataatgtatttttataagtatttttctgttttcatttcctaattagggatttttttcgattatttatttaattaatagtaataaaattttcctttgcttattcattagtcactcttttttgtttatttctcttcttgtgtttccaaggatcaccgttatttatataaggttactatttcattttcattaataaagtattttattctcgtaatttaagtacctaattattaacttttaaatttaatgtccatttgcgctctttctgtccgctgtattcgtcttccacgaaaatttttttccaaccccctaggaattttaatctgaaaatttcccgatttcaagccatattatggaacacccgatttttcaaaaaaattttgtaaaatttttttgtcttgttcgaatattctttttgagctaaaattttatttattttttaaaattatatcttatttttttttacataaatattttcaatacgctttgaactttttttctttactattttaggtttttattgtgcaaagttttaattaatttaatgaaatcatgactcacaagatctgtagagacattattggtgccgaaagcaccaacgggaaatttagaatgttttgattagttaataaatttaaatggcgattttaatttttgatttgctattaaggagtatttatttttctatgttgataaaagtaatcatgatgaattttttttttttaaatttcagaacaaatatttatatacatatattttttcatctataatgttttttacgaatttatatagttgtttttgatttatttggtagttaaaattatatttctttaagtcatgcaaatacttacaataaatctgtatatttttcagaataatttataattgacggatttccatatttaggatatgtttaatttttactttgaattatttttaaattttatgttaaatttttactttgaattatattaaattaattttttttttttttgcgattttaaattagttttttgtcgatattgaattaggtttttattttacttttattctcgtt

SEQ ID NO: 18900 - DNA, 3283 bp, Heterodera glycines
ataaatcacccatttgtaacaccaaaagcaccccccactcacccctttttttgtgttagcatcgctgattttgattgttgcaccagggtcattctgatcacattttgtgaagttcatatcaagccgaatgcatgaatataagtcattatttgagcgttttggcgtatctttatcaaggtagtacgacatgccattcttatcaatgcacatcagttccccaatataattcaagacagtgtttggccttacgcatatttcaatggacaaattaggcggaattaaaaaacaaatgatagtggtgactctaatgatgagaagcatgctctagaagatttctataaaattattatttttttaataagtgaaatgggtaatcactgagtaaaccgtgagtaaaaaagaaactatagatttattattctctaaaagaatgaaactaaaaattttcataaagcaattttcgaaaatatttaaaaaaattttttgaagtttatctttcttaggttttcgaaaaaacattcaaagatgtttgattgcatggagcattcttttggaattgtttaatataaacacaaattttagacattttaatttccaattcgtaaatttcatttgaaatgaatttcgttttaaatttcttaacttttttacgatggatttgcaaattttttcaaaattatagatacctaatttttgtgaaaaatcgttagcaaaattcatataatcggttaaaaagcgcaaatttgttcgataaatctgtttaacaatttgcaatcaaattttaaaaaattttcccgccggcgcctatcggcaccgccggactccaaaaactcttgtttaatgttcgtaataaaatttagaacgaatctatattagtattttagtaaaaaaaatatggtttttattgattaaaaaacttttcaaaaaaccctgatccgtatacgggtccgtatttttcctgcatacggacttatacggagtaagggttttccgggtttttagtccataagtctgtagtccgtatggatgcctagtccgtagtcctgatcctgatccgtattttcgccaaatatcgctctctagaaaaaactatcaacatttcaaactttacatacaatttcctggcagatttaatacaatacttcaagaaatatcttattttttcttaccaaaaaagtcattcttaagggtgtaaatattttcgtctttttcgtccaattttgctctgacgaaaacaaaacacgaaacgaaaatccaaaattaaaaaccgaaaacgaaacacgaaacgaaaaaactttggtagacgaaaacgaaacacgaaaacgaaactcaaaaagtgccgaaaatgtaggacgaaacgaaaacgaaacgaaatttcgtccatccctgggggcgagagtgtacagtcaagcaaagttttgtaagcaaacggcttagcagccttaatctccgttgagatcagaggaaaaggaaaacagagaaaaaggctaaacagccaaagcaaaggccgatggacgatagatagagaaaacggctaaacagcagggatgggccaaattgaaaaataaaaagctaaatgcgaaaagcgaaattcgcgaaactgaaaaatgcgaaatcaaaaaaaagcgaaatgcgaaaagctaaaatatgcgaaaatgcgaaatgcgaaattttttctacaactttttaatagttaaaatcataaagcaaaaatcattttttaaaattttattccaaatttaaaaatcaataaaacgcttttttgaggcgcgctttttccaaaaaaaaaaatatgttgatccatataatttatagtttaaaaaaagaaaaatatttaaaatttttataaggaattatttaatacctttttaaatcaatattttgataaaaagtttaattttttttatttatctttttttaactgatttataaattatctggaaactaaaatttttccaattttaatccagggtatttatagtataatttaatttttattttttatagtttttcaagtgatttcactagaggctgagtggacacacatctaaatgaataagtggtcacattcgctgacagtgcgatttatttattccttatttgcttgttattttaaatttagtttaaatatttatacaagattcctataattttataaataatatgaaaataaaattatttttaatagtttgattttcaagaattaaaatttttaaaataaatattcattttattttttgttgatataatttgttttaataaataaaaaatcaactaaaaattcgtacttgatattctaattatagtgaaattactaagtaaattctaagggaagaaaaaaatataaaagtctgaaaacataaatattaatttttttgtttttaaagggttctaattaacaaaataattatcattttttccttggagtagcttttcgcatcctcttcgatgtttgttagagccatatattttttgactgtttgtcaaatttaaaattcttgtactcaaattttttcaatatttgttcaattcaacttttacaaattttgttcttgttttcggaaatattcaaactcaataaaaatattattttttcttataatactattttttacataattatttttatttttttatgcacagaaaaaaagccttttaatattattttaaagcactttatgcttaatatcttgtggagttagtttttcaaaagaaaagtaataattacctaaaaacaattagcagttattattggtctatttcttatatttaatgtgataaaacatataaaatgattataaacattacagtaaataggcataaaatgtcaaaaaagcaaaaaaaaaaaagtgcaaaatcgcaacgaaaaaaagcaacagaatttttttaatttaataatgaaaagtaaaaatataagacgaagattgtttgtaaaaagaataagaaattattaatttaatataaataatttatcaaaagataaaaatttataataaaaaagtattttaaataaaaattagttaacattatcaataaacaaaacttctctcaactttcctggtaagttctcgcaaatacatgtaccgattttgaataaaaatattaaaatcattttatataacaactaaatctaatcaaatagcatgtaaatcacaattcaattggacgaaaaccgaatatttaagatgaagtgatctaattatttatttgcaacgccccaacagatgtaaactattatttaaaattaatttcgaaaataactaataaaaccttatcattaaaa

SEQ ID NO: 18901 - DNA, 1279 bp, Heterodera glycines
  unsure (1)..(1279): unsure at all n locations
gtcattggatttcggagtttctctgctggagcttttaatttataaaaaaatttatcggaaaaaaataataattttactttcgagcaccttgaaatgtatttttttgcaattgtgctggcgaaaataataaagaatatgattttttggaatatttatgcaaaatacccttggttttccaatttttaacacatattatggaccagcaccactgttcgacacccccgcccgagggtagtgccaaacagaggtgccgggaaaaagaaaaatacaaacaagtaaccgcccggacggcgtaaatgagtgcaaaatggaaatacgtacaaccgcatccgggtgcggagggagaacaaatgggatatgggaaatacaaaaatggaccagcaccactgttcgacacacccgcccgagggtagtcggtgccaaacagaggtgccatgataacccccgccccaacagttcacaaataataacccccgctcccgatatcatcttcagggccttcgtcaccgctgtccgcctggcctcctgcattgaatgcgttcgcattttcaagtgcgaatctctcactttcaggtggacccccgaagaccctaaaaaagcaaagaaatttttagactaagagtaagagggacagaaacccctatggattgacttatttgaaattttcaaaaaaatactgcaaaaataggaaacgttgagattttcaaggaagatatatttatatttgatagtaaattaattccaaaattttaaatttttcatgagtaaatttgaaaaattaataattgattttatccattctttgaatttcaaggaccaattccttcgaatgataccaagactgtgagattttgtttagaaaaaagttatatccaaaaacttgggttggcaccaaaatagtggcgctgaactctcccattttgaatatgtattcagcatactacagggtttttagttgatccatattttttatcaatacaaacccagaccctagtcctaaaggtgcatttaaaaaaaaaaaataaatttttgcttcaaaattcagtattttgaatgaccaagtcaaaatgagtatttttcattttanaaaatcttctcatttttgtaatgaaatttggccaacacaccagaaaaacagaaatttcaccatttttgctgaatggcttgagcagcgagaggagagagaaagaanagaaagagacattggagaaaagagggataaagataaagtaagagagaaaggagcgagagagagagagagaagagagcgagaaaaaga

SEQ ID NO: 18902 - DNA, 932 bp, Heterodera glycines
ttttaaaaatttaaaatgttaaaatcattaaaattcgctcattaatcaatttaccttatccatttgcgtgaagtaacgcgtcaatacggtcactgcctttgtgtgtgcgtccttaatgcaacgccgcttcatgttgccaaaacgcgcatttgttcggtggccggcggggatctgacgccaggcctgcgactgccgcacgagctgaatttttcaagatttttcaaccccaggaaatttgttttaaatagaattgaacccctacccctcggggggggggggggggtgttggaggccggagaccattggggggctgatgtcgggggtcggactgggtgagttaaatagtcgggggtcggggaatccgatcgtggaatacccaaaattttattttaatgaaaaaacaatttttctttttaaatgcacataaatcttctttttgttaacttaataaatgtaccaatttttgcgtgttatttttaaaaatattaaagcaatatcaactattaaataaataatttttcaaatattttgcttattgcctaaaaataatacctttcctgcaatcgtgttccactcgggcaaatcgccccccgtgtgaccgatggagcggccgaacagcattctttcggccaccatccccccgaaactgatgaccatgttggcctgcaattgtttgcgcgtgtagtgcttccggccccaataaaatgtcgcgccatcggtgtcgttcgtcgcccggttggtcatctgtatttttgctcacattatcgcctcgcaaattttttgtaaaattctaattcgaaatgaggccatttttgctatgccgataagcccttggaatgcagattttaaaaatttatccttaagctttgaatttttcttgaggaagattatttgatctttaaaatttttctttagaaaatctttcacgttca

SEQ ID NO: 18903 - DNA, 3594 bp, Heterodera glycines
  unsure (1)..(3594): unsure at all n locations
tgtcataaccgttttcagcgacctcgaaaactcatactctccacaggccttgtaatttatgaatttcgaattttggttccctttagggttngggattnggaattatgaaaaataaatgtnatattngtgatnagngnnnnaaattannntagaaatgantttttatttgaaaatttnaggggggggggtnanaaaanagaaaagaannttgnaanntaanaatnnaaaagaaaattttaaaattttcgaatttaggttnagggttngaaatcgagnagngnctcagattacacctagaaattgtttcgtaaaacaaagttttcgggaccaccaaagtttctgcccaaacattgtccccacctctctcttcgcgtccgtcccccgcttagccatccgccgccttccccgacggtcggacacagcgaatgacgcagtttcgtcgtggtcgctgcgcttgcgaacattgcgtcgtcgtccccttcgctctgccgattgtccacacggccccatttgtcttaaccatttttaatgatgccaaattttggctattaaattgatgaatcgtgccgttgtcgtcgtcttcatgctgcttcactgcgtacagctcacttcgtcctctcccttttggcattctatccgccgatgacatcggatcctccggcaccgtgccaccgctgttcaaagcgatgtcgaagaatctgtcgtcgtcctccccccctcgccggttgtcaatcggacggaaaccgaacccttcaacaattaattgtctttttgccgcttcaactcccattgttcctttttcaccttcgtctttctcctttttgcctcgctttttgtctccgccccgcacgaactcttcgaaagagaccaattcttctcggctttccctgccgaatccgttctcatcgaccagttcggctattgggcgaccgatgttcgtcccgaagcattcgtccactgggaataatccttccgctttttgttggccactcatttcacacaaaaaaactaaaataaatattaaatgcgcaaaattccgacaaaaagcgacggggggagggacacgaaaagtgactgcgtgctcaaatgagtgactctgagtttgacagccggcactttaagattaattgtatgtatcacgaagtgtgagaaaacttctcgcgcccattccatttccgttgctatggctacaacttaacacaaatccattttctgcctaattcactgaattctttaattgtacaaaaaaaggctcgattaaatgcacgtgacgttggcttttttccttaatttattcatgcaaattcacttttgtatgtgagtcgctcaacggagagtattatgaaaagcacaacttttctgttttagctatatgtaataccgatttcgcttttgaacaaatgactttttccagcaccaaaaaaaacaaaatgctatttttttaacaaaatggattggaaaataaaaatttagtgtcacactctttgctgaatgcttgaaaattcggtcgggtcaaatcgcagctcgacaaggtccaagagagggagggactgttgtccgtttagtgcgtccgttgtcccttcgtcgtcctccgtttgcccctcctcctcgtccatcgtccgtgcgtcgtcttcgcccgtctcctccccgcccgtgatcagttcctcgccttcctcgtccgtcgagtgcctttgcttgtctcgtgcccctccaatgcaacattcgctttccttttcctcccccctttccatggcacttccgttgcataccgcacaaaagccgtgctgctgctgtggttgtccgacttctcccctcacgtatgcttcgagttcatcggaaatataagtgggaaactgttgcgagtgcgttttgttttgttcgctgcccacctgcgattgtgcagtgtctcttccgtgagcgcctctcatccaaattcagcgattttacggtgcgacgggtcgactggcgcgtggtcagcagagcggagaaccattggttttcaattcgttcggactgacgacgaaggccaaaggcaccgatgttttttgccgtttcgcattctttgctcatcacaaaagggacctgaaagttggagaattatatagtaaactcaaattaattggcgagatgaccttcctcttcggtggacagcacatgagtttgaagtgctcgcgaacttcgccgttggaaatgaaatgggcagggaaacggagggcattcccaacgacagtaagcagagaagaacagtcagaacttatccttgagggagagagaagtcataaacaaattttagattttgaagggcgaaaaattgcaaaaggggcaaattgaaattaattaattttatatttgtttgttgtgatttcttgaacggacctgtactggtgcggataattcttttgcagaaaacctgaaaaagaaagggacaaaacaatgggaagagacaaaaaagaaaagacggaccgggattgagaaaagcaaagacggaaaggaaaaggctgagcaaattggagattaggtaaatggaaatgatcagcagcaaagtgttagtcgccgcgcgaatgttccgacggcgaactttcatataatcgtagcccatggtcaattcggtgatcagcaaacgcaactgttgcacattttgtcgccgtaaccttaacaaatggaatggaatgtgaagatggcacggcaaaaatgtacagaattaatcactcacatgagcacaattccgccgttaaaaaacaccaatgtgccgaatggaatgataacagtgagcaaattgaagaagttgggaagccattcccggtgggtcatttgtgcgggaatgtaacgacggaaaggcacaacggactgttcgttgaagagaatgacgacatcctcaaaaatatttatgaaaaataggagtcgggaaaagtgactagtcgtcaaaacccaaaaatttgaagggaaatttatggaataaatagtcagtaaaaaaatatggaattgttttttttgatggacttaccaccgaagtcgtaaagcgaatgccaatggaaatgaaaaggacaacagtgagcaaaagccatcgagtacgttcctcaaaaccgctgaatgtccaatgggaagtgatcaaataactgaaaagcaaacaaaatttcaaaattaattaattgtacggtatttatggactaaaatggctgcactgatcagagcccaccaaaaccaccgcttcgaataaaggcacaaaaaaacagtcataatccaaaattattcatttttcacgaatcccctcgttatccggatttaaatagccgatgaactgaccgttcaaagctcgcgattataaggcaaaggaccgatgaaagtttgaatatctgacccaacaaataaagccatttaaagtgataaagccatgagagataaaggtggacgagttggagttgctctaagaggacgggagggatctgaaaacaaatgcgttaaaatttagatgagccattaaaagactagtttttgttaaactatataaatacagtaaatcgttgtgattgtgagcacggaccaaacgctaataaagcgacttttataaattttaaaacaaataattcgaataaa

SEQ ID NO: 18904 - DNA, 3538 bp, Heterodera glycines
ttactgggtttttgagttccttctggccataacttttttgaaacttaaccaaaatttttgagattttgcaaattaataataaacacatagactatcgaacaacaccaacaattcttaatttgattgacagtgaacaaagttatggttcaaaaagtcttccgacgacgtttcggccgacgacgttttggggtgcaccgctaaaaatcccatccctacacatgacccaaaatttggtggtggttttgggtgttggtgacagaatggggtcaccaggacagacaacccatcggtgctatataagacattagtaaaaaacaatcagatgaaaaaatttttggtataaatttactcaaaagcaaccaaattttaaaagcttaatatcattcgatagtcctaaatgttttctattaacttacaaaatttcaaaaaattttgttaaggttcaagaaagttataaaaactaggcttgattttttagttttctcaggtcaaaacttttttgaaattttgcagaatgataaaaaatgtttagagctatcaactaaaatttaattcatttttaacgaagttgtgagtaatttctgtcaaaaattttccataacgaatgcggaatcactgaacatttgaatcctggggatgtccatcgccatccatggacagttgtgggttccgatcaatcgaacaaaaagcgccgcagtgtcaaaattccattcactgaacgcaaataccgtgatattttcataaaaaattttcgcaaaacacttaaaaaacaccaaaattttccgcaaaatatcacggtccggcggggtctgacccgctcggaactgcgagccttgtaccagcttaggactcaagcatatgaaatgaataagtccgaaggactgttcaaatatactgtcgttgacctttccattatcacattgaaaaacccacaccctctcaaaacatgagaaaataatgcataggggtcatcgaacaaaccactacaaaatacgaaaatggcaaaaaaccaaaatctctcctgtatactcattaatgcaaggtcaataagcaataaggtacaggaaataatttatttaatggaaaccaagaaccgggactaatctttataaccgaaacatggctgaaagaaaaaatacaattatttctgaattctcaaatatggggaaatataacccaatttttgcaaaccgtccaacaaaagggggtggatgtgccataatagtctcaaataaaataaagggggattaatagagactggactataattagagcatatacatatattgataattctaaagcttttgatagtgttccaattgaattacttctacaaaagcttaaaaatatcggtattaatggtaagattcataaatttatcgaaaatttcttaaatgaccgttcattcagagttaaaatctctgagcgtattcaaattcaaaaaacatttatagtggggtgccacaaggtagtgtcttaggccctttgctttttcttatttttattaatgatccccccgaacaatttgcctaaaaatgttggtattaaaatgtttgccgatgatattaaaatttatattgagcataaaaatgataaaaatagagagaatttatcttccgcgcttgaggcaataaataaatggtcaaaaaataatggaataaaaatatcaatagaaaaaacaatggtcctttactttggtgaaaataacacaaaatttatttattttcttgatggcgaaccattgcccgaaacaaaatgtgtaagggatttgggcattttaatcgatcaaaaactatccttttctaaccatattaataaaattttaaaaaattcatatttttcttgttttcagcttctccgggcgttaaaaactcggaagcttgaaacattaattttggcatataaaagctatatcagaccagtgttagaatacgccacagaaatttggaatccattgaaaaaagaaaatgtccacaaaattgaagcagtccaaaaattctttacaagaaaagccttcaataaatgtgggcttgtccctatgccgtatgaaaaaagattaatgttttgcggaattaagacattggaaattaggcgcaaaattaatgatattacaactacttttaaaataataaaaaaacatacacatcttaaaccatctaacttttttgctgttgctaaacgggctattcgcaaaccctttttactacaaaataggatatatattacaaaaacaaaaaataatttctttaatagggttattaattcatggaatttattaccgaaaaatattatggaaataaatgaccccaaaaaattcagagaaattgcagaaggaataattaagcaataatgcatattttccctattgagaggtgtgatttgtttcatttatgtctattgtttgtttaatttgacacctattttgtgatttgacacttatttttgtgatttttgactaccatttatgttttatttttattctcacttttttctttttacaccactgttagagtgcatagcaccttgtggtttgttcgataaataaataaataaataaaaaatgtcaaaatagtgaaaaaaatagtgacaaaactccaaaatagtgattttaactattttagtgacgaagtcgccaaaatagcgatttctagtgaccgataatgacatcagaatcgaaaatttttaatacagaaatgcgttttttagctcctttcttcaaaacaatcgaacaaaaaaatagttaaatcattagttgcttccctagttatgtgaattaaattttacctcgtactcatcttttgaaaaaacttatgttaataacaaatctgccgttggttccgcacagcacttttctaaaacggcttacacttgttggtgatttgatcaattaatggagaaaatctgttcgaaaattgagcccagttttttaaaatttccccagcggcgtctgtcgacagcgtcgcctcactcccattcattggttttttctaaaccatttaaatctctgtagcattaaaaaaactaattaaatatttgaaaataattggcaaatgtgataacatacatacaagggatgcgtcatcggccggcgcaccccccccccccccccctccctcgaaagccctaattgtaatctattaacctgcatgcaaaattttgaaaaatttcgttaaggtttaaaaaagatatggccagtaaaaaaccagacagattttccaacctttttggctcttttgaacttgaaattttgcagtgaacagagcaagtgaagggctctctaatgaaaacaacaatgttggatttggggtaatactgccgctggtatcacatcttttttgaaaaaaatattttgtgatttgaaaattactgaaaacatgtttttaggggttttcggggcagatgatcacgaatcttgcgttcatttcgaccagtccctcaacctggacccaaattcgaacaaaaagtccaaaattcaatttaatcattttgctcaaaaaacgcttaaacacatggaaacaaattaaagccaccaatcctg

SEQ ID NO: 18905 - DNA, 2120 bp, Heterodera glycines
  unsure (1)..(2120): unsure at all n locations
cccacctaataattgttgctgaaaaaggtccataaaatgtggcttaagcccatattgcgcataattcgcatgcatttcgccaagctgttcacatgcttcatacattttgtcctcgtccatttcgtattcgttgatcattttgtcgaaaaagttgaaaattgcttggctaataattatttaaattaagcagtttaaattaacgaattaaacccattaattttctttctgaccatattctgtttagttttggccatttcgtcaggtctctgtagcaataatagccgcaggcgataacctcgttcattttcgggcttgactgaatgcatttcagcattgtcttgtggaacaaatctcttcggcttgtcgctatgtcattacgccaacataaaaaaatcctaaaaatatttcagcatatacttagggtggaacataatttttgatacccaaattttttttattaaaatttttttttaaatttcaacaaaacacaatcatgattcaaaatacccgccattattatcaataatatgttgccattattctggcaagagatcaataccaatggaaaagtatttagggagttagagttaagtaagtaaaaatggtcattttagaggtaggtatttttgatggctgatttaaagaaaaataaaagagatacagagccagagaaatagtgattaaatagagcaaagttaggactataagaacacaaaaatataaaattttaattacaaaaattgaattattggagagccgagactgaaagtggtctccaaaaacggcatttttcaagaccaccaagtaacataatgttttaaaagtggttttggaaattctgaatttaattaaacaaggtaaatcgggtatgttgagttcgaatatggtcttagatttggtctctgggatcgcaacaaatctgtacagctcgaacttcatgcatggagttggagcagtacaagctcaggttgaaaagataggtcccatttaaggccatattcggattctactggtctaaattgtatagaaaaactaagattttgttatatcagctttggtttttgaccataaaaaattcgagaaaaattagtgggccaattttcaattttggcatggtcgggaaaaaaggcagaaaaatctatcaatcaaataaaaagtgaaacgatagtaagatataaaagaggacaccatgaagaacaaaataaaaaaagaatcatttaaataggcgcagaaataacggagttatgaatttttaaaaattggaaaaaatttgggtatcaaaaattatgttccaccctaagtaccaaaaagaaaatgtttttcctatatccgactacgtagaatccaggaaagaaaaatatgcatttgcatattttggacagccctgataataaatataaagctatttttcttaggtatgacaattcaaatttttttgaaaataagaaactgaagtttgagtcaaatgttgcattccaattacgaaaaatgcgcattgagaataacgaaaaggcaattcttgaatttaaaagtgcggttgaacagctaattggacccattttgctgagtcaaattgaaaatcggcatccatttttaatggcattcggtaatgggaaatccatttgatgaaaagagagcggacagtaggcactaaaaatgccaaaaatgcacaaaacaacaaaattttatgcttttcgaaaattgtttgcataaaataaataattaattttaacttacaatagaaacaaaataaaaactaaaaaagaataaaaacccagagaatttaaaacaaaacttaaaaagcttttggtccatggcaatcaaagcgctctcaaaattataaaacaatttttcgaataatcgcacaatatttaaaaattgataatagtattattattttgttttattaatattttacttttctcagatttgtgactaaatgcgaatgggcggacgaatatttgctcattttatcaaaagagacattngtttgcgggcattggcgaaattcgaatttcctcgcgcatttatntttctcgaatttttgaanntatccaaaaatttatttactgcaacgaaaatatttgcataagacggatgcaaaaatcagcaacattttt

SEQ ID NO: 18906 - DNA, 1577 bp, Heterodera glycines
  unsure (1)..(1577): unsure at all n locations
aactagagttgtacggaccgggaattttgagataaaccgggaccgggacttttctggttgaaaaaccgggactttttggctgggaaaaccgggaaaaaaccgcgggacttttcccggtcccagtcaaaactggtcgaaaccgggacttaggtactcagtagttgtaagtttttatcagtttatcagtaccaggtcccggtcccgtaactctactgtaaactataagtaccgattcttaattgctaaagaaatgcaattaacggataaactccttaaataaaaatagaaaaaattcgttttttaaatcttgcaagaaatcgtctcgaaaaatagcaaaattccatttacggaccaaaattacggaagaatcgaaaaaatctgtaactcgtaacccgtaattacgggatccaaaaacgccgtaatccgtacagccctgcttagcagccttttattttgttttggcacgccaacctcatctcgaagaaaggacccaatgccgagctgtacatcagcggcggctccgctgtccctttgtcggcatcgcccctttttgtgccatttccgcgccgccgtctccgccccgttagtctcagcgtcgaatggttgtaaaagcgacgtaagaaattttttgctacttctaaacgggactcagaagcgcccgtgctcagctggtcgctctcgcaaatggccgactttcggctgcccggcacactctccgcttggtgctcaaccggtggcaccccttcgcaaattcggtctttccgtctccgaatggctgtcccaagcgaaagtctgaattggcacatttcccgtggtttcccttccccggggcttttgtcctctcacttcagtccgttgtccaaacttttcgttctcttccgcgacgtttcccttcccaacggatcaatgacaaaggaaaactgctgctgctggtggggcgaatggcaaagtgagtggggactcaaattgttgtgttttgggtggagaatatgtcggagcgggcgttgggcgggaggagggcacgaaattcgacttggacacggcgaaagcggcacggggcaacgcagcggcggcacaaaaagctcttccagcgaacagccggcgttgtggagccggtgcgcaaaggcagcggaggaaacggacgacggacaaaacggcgaaacggcatgggacgcggccactgaagagtttaattggccagataggtaattgtcaagaaaaagtaataattgactcactaatagtgatgctggggagtctcgatcttgagtttcattccaagattactcggaatcaaagatcggtcttgaatttcgagtcacgaaaaattttctgtctcgcatcactactcactagcagggaaagtgccctccaatcatttttaaaatataaatttttgtttttttaactgattttttcggaaaattttaatttggcgaggagaaaccaaaataaaatgggatcaccctaaggttagttcaattccatataanacatttttttaatatatatatatatttttataaatttgctaattatctaatcatgaatcccccatcgccttaattatgtcatca

SEQ ID NO: 18907 - DNA, 240 bp, Heterodera glycines
ttgtggaaatgagatgaattggcatcctcccttcctccccccccccccgtgggtttcgccattattcccccccccccccccgtcttttgcagccattcattgcgttaattacgtcgccactttggtgtaaaattgtctgattaatggaaacggatgggtgggcaaacagagagaaggtgaagccggatggatcaaagctgatccgtccgatctgttctgatcggatcgttggccatcgat

SEQ ID NO: 18908 - DNA, 1245 bp, Heterodera glycines
tattagggcaggggcatcggaaaatttgggagggacgggaaaaaaaagcaaaaattatttggcgtaaaaaacaaaaaatgcaacattcaaaccaattcagagtaccttagacccttttttcggcaacctgggttttttctggaacttaattttcttggattttgtttaaaaaattcagggttcaggtcaaatatgaaaaaaacccaggtccatgtgtttatcaggcacgcataacaggaaagtaccgatttttcataatgtattagatcaaatttttcaattttgtcaggccaatggtgtgacaccgttcgaatgtttggccgccacttttgactcgatgttggcacaatgtgcgctccatggcattggcagttccgcggacggaagcattcacctggtggggcaaaggaggcgaacgaaccacctcctgatcacttttttttaaaacttttcattgatcatttttgagccaggcaattgacaattctctgatcacatttcatttagggggatgggagtgatcagaactagcgatgccactgatcacttcttataaaagcaatttttgatttttttttaattagaaaatatatgtattcgtttgatttatttgaaaaaaaaatcctcgtaggaattttgaattttgaaaatttaaaattttttagcaccaaaaactgaaatctcaaaatcttgctgggtttaataggcattatatgcctcgggttttttgtgattctcgcgactgattaattcatggccactttaattagccccccccccaatttaaaaaaaaatcgtccttaagtttttcttggttttgagtggcgtctaggcctggcactttgccaagagtacattttcttcaccgtttaggtgcccgactcggcattttcacactacgagaaaggctgcatattgagtgagttctgtcatgagtttttttaaggaaatttctggcatttttttcagctgaaattgttgagctgtgccgaggctatccaatcatacggtatccgcaaaaggtaggcgccgctacagtaccgggccatcattaatagggactccatttttaagcaaatgcctaaaatttctgcgcacttaacacgcacagataagcacgaaaaacgtattttccgcttggttttgggtgtctacgatcacttttataatgcctatttttgcctatttcggggtttttgtgcctaaagtgcctattttaaggtttttgaaaaaatccttaacaaa

SEQ ID NO: 18909 - DNA, 894 bp, Heterodera glycines
cgtggtgaggcgaagcgaaaaaagtatgcgtgtggcgaagcgaaaaaagtatgagtgtggggtgatcggagggggcgggtcatttcagtacggaagagttgttctaatgattagggatggtaattatatggaaatccatatttttttcctggaatgtgggaggcctgaaacgcacgaaaaacatgtttttagcttggtttgaagcttctaggaaggatttctatatccatattttccatatttttccatatttcgcgatttatgtccatatttccatatttttccatattttggcattttggtccatattttatgtccatattttggcatttttcaaaaaaacctctattagaacggcccccagcagctaaattagcctttttgagcccaaaacccgaaaaatttttcaattgaataaatttaaattttcttaaaaattaataaattatgtcaaaaataagcaaaaaagcgaaaatttcgcttttgttgttgattttgcgctaaaaaaattaataaattttggcttttatgttttttttcttttaaaatgattgcacgtaattgccgaaaaaattcgagaccaatttccgaatgttgaccgactaattgcaaaacgaaagccgtctttgtcaaagcgccttaccgagtcaaaaaatctggaaatgtatctcatatgcaatttcaaccaataaatttgaagaaattttacattcaattttgaaaaatttatgtccatattttgacatttttgccattttatgtccatattttgcgatttttggtccatattttatggccatatttcgcgattttatatccatatttttaccagccctactaatgatcaattaataatagaaatttttaatctattaattagatttgtgaccataa

SEQ ID NO: 18910 - DNA, 2138 bp, Heterodera glycines
ttattatttatcgaacaaaccacaaggtgctatgcactctaacagtggtgtaaaaaagaagaaaaaaaatgagaatagaaataaaacataaatggcagtcaaaaatcacaaaataagtgtcaaatcacagaataggtgtcaaatttaaaaacaatagacataaatgaaacaaatcacacctctcaatggggaaaatatgcattattgcttaattatttcttttgcaatttctcggaattttttggggtcatttatttccataatatttttcggtaataaattccatgaattaataaccctattaattattttttgtttttgtaatatatatcctattttgtaataaaaagggtttgcgaatagcccgtttagcaacagcaaaaaagttagatggtttaagatgtgtatgtttttttattattttaaaagtagttgtaatatcattaattttgcgcctaatttccaatgtcttaattccgcagaactttaatcttttttcatacggcatggcgacaagcccacattttttgaaggcttttcttgtaaaaaatttttggactgcttcaattttgtggacattttcttttttcaatggattccaaatttctgtggcgtattctaactgtggtctgatatagcttttatatgccaaaattaatgtttcaagcctccgagtttttaacgctcggagaagctgataacaagaaaaatatgaattttttaaaattttattaatatggttagaaaaggatagtttttgatcaattaaaatgcccaaatcccttacacattttgtttctggcaatggttcgccatcaagaaaataaataaattttgtgttattttcacccaagtaaaggaccattgttttttctattgatatttttagtccattattttttgaccatttatttattgcctcaagcgcggaagataaattctctctatttttatcatttttatgctcaatataaattttaatatcatcggcaaacattttaataccaacatttttaggcaaattattcggaagatcattaataaaaataagaaaaagcaaagggcctaagacactaccttgtggcaccccactataaatgttttttgagttggaatactgttcagagattttaactctgaatgaacggttatttaagaaatttttgataaatttatgaatcttaccattaataccgatatttttaagcttttgtagaagtaattcaattggaacactatcaaaagctttagaaatatcaatatatattacatcaacacaacttttattttcaatcgatatataaaaatcatttaaagttgatagaagttgtgttgtggtggatctttgtcttcggaatccaaactgaaatggactaaaaaattgatttttattcaaaaatttaagtatttctagctttattattttttccattactctgcatatggacgttttccatatttcagggattttagatgaatctaaaattattctaaagagttcagttagtatgggtgccaaaggtaatgcgcattcttttaataatatgtaagggatgccatcaggcgatgtcgaatttcttctagggagttttttcaataaattccaaatattatagacattaaattcaatgtctgtgatctgattagggttttcatggctgagtaagtcattgttattttccttgtacaaaaatgacttttgaaagacatcagccaataaaatacatttttgtttattccgaaaaataatttgccctcgttcatcaataagtgttggtattccggtgttagttttaagccgatttctaacaaatttatagagagaatttcttccatttgaaataaatttagcttcattttcacagtataatttgtggatatgttttttgtactccctgcataatattttatatttaattttaagctcacggcactcagcttttccttttagcatgctatgggttcgggctttttcccttactaaagtttttattttttcatcatgttttttcttaatagttgttttaagcaatttcatgggtacatttttatcaaaacgcttttttaattcagtggtaaatatgcagtatttctcatttatgtctgaaactgtaattggaaagggaatttggcccatt

SEQ ID NO: 18911 - DNA, 3071 bp, Heterodera glycines
ataaatagggctccaatttttaggcaaaagcctatttttttcctgagctccccgtggcctgaaacgcacgaaaaacatgttttttttgggctgttgttaagctattttttgtgttattaatgcctattttctaggcttttatttttagagcccaaaaagattaaaaaattttgaaagagcctatttttgcctattttggcgttttgccgaaaatttgttaacaaaaatgcaataaaaacaaaaaatacacccctaagaatcgatttttttggaattttaaaaatacacccctaacaaataagcagagattcaaaaatttctgaaaataaatcacctaagaaatgaagattttctcaaaaatcgtctttaaaattttttttggacaattttttgaatttaaaaaataatgtaactcaatactgatctgacttatttttttaccatttgaataaaattttttcattttacacccctaaatttgagactttttagagcctattttccattttttggagcctattttgggggttttttagagcctaaagcctacctattttagcggtttttagtgcctataaattggagccctacttcatatacatattttgaccatcattttcaaaggttatctcctttcgcgggcttttcaaattttcaatgaaaacgaatgaaatttcagtggatttataaatatcctaacaaaaacaacctcaaaattagaagaaaatatcttttttgatactaatccattgattttacatagaaataacctacaataacgataaactgttaatccccaattgtttaaaatgactccgccctctttttatggatgtgccaataataagaaccctcgaaaagaaggcaaatttgagtccgaaaatcgttgtttctgccccgaggcggagctgtacgccgtcgaatgcaaaaaggtgggaaaagcggtcaggttttgtgctgtttgtgtgaacttaacaagtgcggaccgaccaattccataatgattttgctaagtcaattaaaccaagaaaagggtttggaaacattcggattttgaattatttaatctcaaaattcagtcgatccgcttttgcccatgtcccatatttattaatgggctctctctctttcgtctttttccacttaatgcatttttttcccttttaaggtcgtgtgcaataaaatgaatcggcgcaaccttttaattgagaaatgctggatggcgattggcttcattgtgcgtaaggttttacccacaaatttgctgctgctggtggcaccgctttatccgttctttgcccgtttagtttgtggtcatggtaaactttggccttattggattacaaatttggctttggtataaaaaaagtgagaaagatgatcccaccggtgccaaaacatcaaatattgccaatgctttctctgatctcggcatactcattccgaccatcttcgcgtgtatttctactgcatttgttctcgtcatgttttgtttcactggtgtggttttttcttcctttttttgttgttcgaaacaaattataaaatactcgaatacttaattagcacttctttcaaataattatgacagaatttttcattaatagcttttcttttccgaacttttttggtcaattttttgcaactgacttaggtgttgctttaaattttttttattaatttttaaatctttacagattttacacacagcgcactgcaggtgaagtacaaatgtcgccagtgtggccacgaagtgcacaaaacatacgaaatgatgggtaatggtggaagatgcaaaaaatgatcatttaatgttttgtttcccgtttaagaagagttcagcaggggctttagcgacactttcagcgaatggggacgctacacaaatttgtgcgagccggaagtgatgctcaagaagaccgattacaacgacattgaggaagaattccgcgccatgtgccagtgctacgtacatgtgttccatgacagccgagtgtggaccaacaaattgatgaagcgcatcagttgaagagacatatgggaaatagcgaacgaacgaacgatggacaaatggaacaacaatatttgttaaatgaccaaaaaaagaacccctgtttattatgtccaattgttcatcatcgtgtaaaataatgtctgtaataaatgcgtaggaacttacactagttttattgtgcacagaaattctaaaaattcgaatgaaacctaattggtcctggtttaactgtttgaaaaggttagaagtgtctcatttttttacattaaaaaagtgcatttcgccacgaaaagggtgcggcacttaaaactgtcatttttagggctgctaattttatgtaaatacatattttttttcctggattctccatgctctaattagtaggaaaaacactttcttttttgtgtttgcgaacaaaagttgggacttttatttacatattttggactttttcgtacatatttttcatttttttacatattttgaggatttttgagaatttatagaaattttttgtaaaaaattaaaaaatttttttgaaaatgtatccctaaaaaatcgaatttttttttcaaaaaatgatatatcaaaaattaatttgtaaaatattcaaatgtgattctaagcctattttggtcatttttatggcattttgtgcctatttcactttttacgaagaatttttttccaaaaaataactagggttgtaaattatatggattaacatattttttctgcgcatatgctatgaagaaaggggcttaaaaatagcatttctgcgttaaaattttttgatttggtgaaggtttttagtccatataaatccatattttgggggttttcgggaataaatccatatttcgccatttttgggtttttagtccatattttggccattttttggaaattttcacaagaaaaatgaaaaaaaaacgaaaaatacacccctaaagatcaactttttggaaatttttaaaaattacaccccacaaaacacgaacaatttgagttttcgtcgtcattttggcattttcaataaatattttcgtcatttttt

SEQ ID NO: 18912 - DNA, 2611 bp, Heterodera glycines
aaaatttagcatttcaatgtttcggaagccgaaaagcaagaaagttggcgccgatatacgcaacattcggcgtcgcgcggatgactctgaaggagaggagaacaacagtgggccaaggcgatctccctccacctgggctgatgagatggacgattaccaacaacaacaacaacaaccaaacattggcgctgaaagccaacagcacggcgagggtcaaatgacaacgaccgcagcacgtcccgtgggactgagttttgacgagagagagggtgaggagcaaagcgataattattatgctaatggaaatgttaaatgccaataaaagggatatccgtgtaatttttgaaaatacttagttacgtggtttttcaaatttcatatgtgccgcgctcgatggagcgctgcattcattgcttaaggggacgacgtcactcatttcaaactgaagcggcacactgcgagcggtcactcctctgccgccgccgcgcgtaggcgcagcgttgagaaagcggcgagacacaaacagaaaacggtggcggacgaagagcaaacggcgggtacaaacgaagcacagaaacaggttttaaataagccaaatttggatcacttaaataaatatttacaccatttttaacaggtcaaacaagaagtgctgccctctagcgaatgggaaaagccgaagcaagggaaaatggaggattctcagcaacaacaagacggcaaacagcaacccaaattcagagaaccaacgggagaaaaagtgagttagcccccccccccctctccgcaaaaacttgtcgtttggctttgaaaaaattagtacatgcagaccgatgacaatggggcgactgttcgtgccgcatttccggcgacaatgaccgatattcctgacgcaaaagcagtgtatgaagcgcgcaaaaaaagagaaatgatgagacaggttcgaaattggaaggagaaaaagtcattacaaaggtgttatttagggcggattgcccgcctcccaagactacattcctttggatgacaccattagtctgaaaagtggcagacaatctggggaacgggcacgacttgtgcgcgaagacgaaaatgacatgtcggacgaggaggagatgggcaggttgaaaagaaatggaatttggagaatttttctgcttcaccatttctgcattttttgaactttgttcttctcacttagtttttactctgccaaacaattgttgcaaagtgaggaggacatacggcgtgaagagcaggcccattttttggcaatggaacagggtagcagcgaggaggacgaggctatggaagaaggggcgaaaagcaagagtcgaatgggagaaactgtcagagggaggtacaacggaaaggcagcggcagggcggcagcacaagttggtgcagtacaacaacggaaatggagaggacgaagaggaagatgatgacgcattgcaacggtgggaacgcgaacagattcgcaagggggtcagctcgcacaaggttggcacctacgggaaaaacaagaagatttttcattaaaaaaaaaaccgataggtcatgcaaatgcaagagcagttgaacgccacttccctaaattaccggggacgtcccctcaatatgctcgactctggtgaggcggacatggacatcgaagtggacatactggcgatggaccaacagcaaaatgcacgaggcgcaaatgcactaccgccaggtgttaagcagaagcggaaacagaaacaaacaaatcaaatgactctttaagaattgaggaacggccattctgctaaagtcgtatcggtggacgacattctcggcacaattcgccaaagattggccgacaaaaaggagcaacggagtgccaacgacgaaactttgatcaaaattcgcaaccaaatgacggaaaatactgaactcattcataaagtaaataaaaaagcgaaagtgaaaaatatggggtacaactgcattttcgagtttacccctttggtctcccatggtgacagtcatttggttaaaatggatttgtgaatattttagaattctttgtttattggcttcagttgcaaaaaacttcttccttttattttcagtttgaacaagggatgccccaattggagctcaaatttcgaatgttccaagagacgcggttgtatatacgagatttgctagattgtctgaatgaaaaggtagcgcaataaacatttcatttgctaacaataagtatcttagaatttgacaaaataaatcatggttcttattaattttggaaattgttattaggtttataaaaaaatttcttaaaaatataacttttgaacgttaattaagaattttctataaatcatttttaaaggaccacaaaaaaaaaaattaccataggtccttaaaatagtcaaaatatgttgtggttttcaaatatcggaaacatgaattataaattctctcttattgattagctgaaaattaatgacttttgattatcgttctcaatatccatttcagatttgcctaattgatgcattggatgaacgtgtttcagaaatgtggcggcaaagaacaggtgccaaattttggaaaaaatgcaaaaatcctctacagtcagaacg

SEQ ID NO: 18913 - DNA, 3209 bp, Heterodera glycines
tttggcgaaaaaatgatttttttgtaaattttccggtttttggcctcaaaaaggcaaattttaacattacctcgttcttttggtacgggcctgggaggattattgttcaacctcctcagaaaggggggggggttaatggagacggggcgataattagagataatacggtaattgactttcctcttccagcacgccattccctttcatcatttaacctcttcattcgcgacttcgtctcttggcaaccaaaaccaaagatttgccccatcaatttgaatgctgtaaatacgaagagccctcctttggatgtatacacttgtcatctcctcctctatttaatgttcggaaatcattgaccacttcatttctctccggtgagtgagcagaggcggtcgacttacttcatttttctttcaatatagagctccgaacttatgatgtgtggcgctgcgaagacggaaacgaatgtgcaagtggctgttgtgaatgtgaactcgggcgtcattggggccaatgggaacggcgtgttattggcggaaagggaaaccgactcgcgaaatggcgccgaatttacaccaaactttgacaacactcaccaggtggaagattagttcgctggtaaatgggcgggcgagcacaatttttcctaccgatgttacacaccaaagaatgcattcattgttggtgtaaacctaaaaaagggtttgatctctgatcggcgcgtcaaagatcactgagctgtacaaaattaggaaccgaagtgatcggctgctcactcgatcgttttacaacgctgcactcagagatcagattgtcaatttccaaggtcaaacgcaaaaaacacttttccctttccgttggtgtttaattgccgattattaacttccctcccactaatcatttttgtcgtcagtttaattgtttgttcactgttcagggcaatttgttgccctcctcgttttctgcctgcggtgcttccacctcgagcactttgttgtcgatgccattcgagtgcagccatgacttggacacgaattcactgcaggcactgcaccacgacgagtttgtgtcttgaatgattatcaaataaatacattaaaatctgattgttttgattgctttttattttttccatcataaaaactcttcggccattgtccgttttgcataatgttaattgactcggttcacttttcttttcagtgatgaagaccaagtccaccgtgcgcactctttcttccaaaaacaaaaaggacgtgaggaaggggccaaaagcaccaatgtaaagccaggtgggattcatcaaagcattgctttttcaaattaccaatgggctaatccaaaccttaggatggaaaagttgggcggagttatttatttcttaagatttctatgcttttatatttaatttaaattacaatgaccatttcttcccttttagacgaactttgttctgtttgcggtgacttagcctccggaattcatttctccgttctttcgtgcaacggctgtaaaacattttttcgacgcgttgtaattgaagtgagcagaacatatagaaatttgatgatcaattttaatgttttttcattttaagaatcggacatattcctgcaaaaggaatggcaattgtcgcattgacaaaaactgccgttgctcatgtgacttttttcaaaaatttatctctcaaatttgcacatttttttttctctttaggtcgggcctgtcgcttcaaaaaatgcattagcgttggaatggatgccactggtcacatttttaatttttaaataaattttaaattatttaatgttccgttcagaattgaacattgaacggcgtcggaaacgccgcgttgtcgaaagtgtggaaaagccgtcgatgtccatcgaccgaatcgacgaccctttggtttttaccgtttgttattcccctaaaatttgttctgcttttcgatccgtgaatcggtcgtgaaagagcgccaatttctcaaattgctcacttcgaccaccgccccaattcatccgtccgtcactgacgcactgtcaaaaccgagctgtttccgacagtttgtgcagcacgaacataaccaaatgaaattcggtgggttcaaaaaaatgcaaataatttttattcgttcgaattgtcaggggaccaaatgaacttttcatattggcgagcaaagattctgtccacttcaattgaatgggccaaatcgtttgaagaaatcgaggtggcggctttttcaatcctaataaataaaaaaaattgcgtaatttcagaggatggacgactcggacaaagaggcgatggttgtgaactcggccttttcaattctcgtcttttctgaagcgtttcacacccccgagcggttcaccgatcgcattatgttcccggacggactgtctgggttccgcaatttcagtgccaacattatcaaggagcgcagtggtctgatccccacggttgttgccgttatcaacaacattttggtgtgtgttttgacgggggttgaaaatggtgtctccgtttggtcctcccaaaataggtcccaatccgtcgaatgcaaatgactgaaattgaatatgtgctccttttggccattgtgcttttcgactcaggtccgtccacatgcctccaattgctttttgcgtttccaattttgccccttttgtcaatttttccttcgtttgtctcatttttcagaatgtctttccctcagcaagtcggccgttgccattatcaatgaaaaacgcgccgctcttttggcgagtctaagacgtcacctgaacaggaaattgcgcgacagaatggaggcggcggtgcgaatggcggaacttttgttgaggatttcgaatgtccacgtgagtggccaaatgtgttcttttaaagtgttttcccttcatttcgcattctttcattttccaaatccgtttatttagattttttctcttttagaaagtcgctgcattcaaacgggaaactctctgcaccattgaaactttcaatttgatgtctccccatccgtgggtttatttttgacatggaattttgattatcccattttttgctcccttttcagtctcacgatggagatctctaagaagtacgccgacgtgtcttttttctgagtcttgcccttcgagttcgatgttccgacaaatcccaagaagggtcttgccatgtaaaaattgtccgacttgccaaccact

SEQ ID NO: 18914 - DNA, 2445 bp, Heterodera glycines
atttttcatttttattgcatttttcttatgaaaatttgccaaaaatgagcgaaatatgctctaaaaacccaaaaatggcaaaatatgcatttattctcgaaaacctcaaaatatgcttttatatgcactaaaaatctctaatacagaaatgctatttttgagcccctttcttcaagccctcaaaaatgcataaaagttaaaaagaaggaataaaaaatgaaaaaatgtaaaaacatcgtccaattcatgacaatggaatgacaacaatttcattagctccaatgccacatcctaaacaaattgaaaattttaaataaaaaattttcattcgagaaaggacaggatcaggcacttaactgtcgcgattttcccgggatactgacccagaattgttttcaggttcccggtaaaactgggatttccggaaaacaacacgtccttgaaaatttcccaaatcctgatcctgatttggtgttcaaaatcccggcaccggtaatctttccctggcccggttccaaaatagtgatactgatcacgacttcggttcaagatcccggcactgttaatcctatcccgggcccgattcccaagttctgaaagcatactaaattttcaagaccccggcacagttcgtcttatctccgccccagatcccaattcctgatactgagccagacttggttttgacgattccggcactgttaattaattataacaaatggctaaattttagagtaatatttttaataattatcaatcaattaattaatttaattaattaactaattaattacttcccaacggcggcacccgatgcctttgagatgatcaaattgaaggcaattaaattatgaaaaaattcatttacaaaagaatatttaaaatttcaattttttattttaatttatcaataataattcacaaataaatgttttgattaaaaatgatcaaatggatgaaaaggacttcaatggaaaaatgatgacaaattgaataaattaaatggaaaaaataaatgtgcggaaaaagctttcagcacattttgcagcagagattgttgtattaatgaatgtgtcaacataaaccattaaatgcaaaatataaaatatctttctttatgcttgatccactgaaaaaaacaacaaagtgtaaaccataattaatggtacaaaaattaattacaaaaactatgccgaaaataatctatccaattaacagagtgggggcattgattagtgaggacttagcaaaaaatcaaaaagccataaaaaatatgcatttattagttctgcaattttatgtaaaaaaaataattcgtttggtttttaaattttatacaaggattttcaatagtgttttaaaaaacatgttttaaatatgatagttcccaaaatagagccccaattttcgtccaaaaaaaatgcgatttcctgaagacaaataatccgtgtcccatcgatcactcgtcatcgtcaaaagtgacttcgatcactaaagttacgctttgcagttgcttcgaacgcgcaattttgggggaaaaattggcacatttcgcgcggaagcgaatgatatttatagacattgatcaattaaattaatccaaagattttaaaaaggaaaaaggaattaaaattttcaattttggcaaacaaaaacagacaatttataaaattattggcgaattctttttattcttaaattcgatttttaatgaaattctatgaaatatatttcaaaaatatgcttcaaaaatgaaaattgactatttttggtacaatatctgttataattagggctgggatttttatgtgctaaaaatcctgaaatatgtaataaaatatgtgctaaaaaaacccaaaatatgtgctaaaaaccaaaaaaaaggcctaaatatgtgttaaaaatgcaaaaatatgtgctaaaaattggaaaaaccaagtgtatttacgcaaaaaaaaatcatatttaatatcagtctttatcaattttcgcccgacctccaatgaaaattttggcgatatcaatcaatttgtaaagtcccggattaatttttccatcagttgaataagttccttccgggaactttgaaatccagtgacgatttaacacagcgtttgatttggctgctttaggcatttaaatatataaagaaattttctaaatgcttaagaaacgtaaagtagtcaatttttagggtgcattttcagattttcttgtattttttttacgatttttctcaaaaatgccaaaatatgtgccaaaaccccgaaatatgtgccatatgtttttatgtgccaaaacgccaaaatatgtgtttttatgtttttataactcgctctaaatcaaaaattgttcggagaaaatgctatttttgggcttcgctcgccataactaagccgcaaaaaaaaaatgttaaaacataaaaatcccagccctagttataat

SEQ ID NO: 18915 - DNA, 2023 bp, Heterodera glycines
  unsure (1)..(2023): unsure at all n locations
tctgagccactccgtctcgccaactccgtctggcccctttagggtgagngcctaaggggccaactccggctcagatactttaaaaagagaagaaaggnnncaacgaannngaaaanacatcccnaagaaagaaaaaagagncncaaaaactcatccgttaaatctacttatttattttcatgataagaattattcattaaaatagtgtctgacctaacattttaaagtaccataaatattttagcactacgaaaatggaaaatgctgaaattaaatctcaacgaaaaaataaaaaactcgaacatgaaggctgcctttatgtcttccatttgtttaatgccgatggtgacgtaaaattttggcgctgtgaacatcagcacggcgaattcaaatgccgagggcgagtccacacaacgctaaatgacgtcgtactgaagacagttggtatacacacgtgcaaccgcagcgcggcaaatgtcatcgcacaaaaaaatcaccaccggcattaaacgacgtgccgctgaaacgatggaaacgccagcagcaatcagggcacacacgcttcagcaaattccaacgccactaatggcaaacattccaacaaagaacgcgacaaaaaaaaagtgaaaaatctatttagttttttactttttcacatttttggttttaagcttgtgaagcgagtccgccatgaaattgaattgccgccgccagtgccgttaacgcttcaagaattggaacttcccgagcagtaccgaatctacaaacgcaccgaagaagctcaggagcttttccttctggcggattcaggaacatacaccgaaaatgggcgagacggacaacagcgttgtgtttaagggcaattttcagccattttttaattttataattctcatttttggccgactttctttcggaaattgggcttccgaaatgaagtacatttacgctgacggaacctttgcaagtgcaccaacgctcttttcacaactttacgtcattttggcggggtacttttttgtcaattttgttttacattcgtttttcaccaaatttcagtcgtggaaaatgggtgtttccggttcttcattgtctgcttacgtgcaagtcgcagtccacgtacgaaaagatgtttgacatgatcagaaaccgctggccgacatttgcaccgaaaaacgcatccatggacttcgaacagcgatggtcaacgccctccgcgcaaaacatccacagtctcaatcaacttttgtctcttccacttggtgcgcaacatgaaatctcgcctaacagacgaacaaactcgcgtaagaaaaataaaaatttattgattttgaaatctcaaatttagcgtttcacaactgacgctgcctttgcacaagctgtcaaaatgatcacttcgctggcgtttgtgccgcttgaggacattacaccggcgctggcagcgctcgaagatcatcttccggatgagcttgagggcgttctcgattggttgtttgagtttaattttttttttcaatttcattagtcattttaaaggtttgtaatcaactatgttgggcgacttcgcaacaacggcacacgcactcgtccattgtttcgtcccgaagaatggagtgtgtatgagcgcaaaatgaacggcagcgaccgcacaaataacttcgccgaagcgtaccatcgcacgttgcaacttgcgatcggacatggacatcccccaatttggaaatttatcaacattttgcgcgagcaccagaaaataatcgacgtggacttcgaacatttcctcgccggaaatgctccgccgcataaagcaaagcgttgccgtgaagcagacagacgaattttgaggatcctggagcgctacaatcaagaaaaagagcggccgcaaatcgaaaatgatcaccaatattgccaaaaccaaattaatccgaatttgattaatgaaatgcttaggggaattccagcaaattaccaaatgaatcaatgattttctttttaattgcattattatttatntgtattttcg

SEQ ID NO: 18916 - DNA, 926 bp, Heterodera glycines
caattcccattcgagtgactcgatttaaacgtttatttctttggatggacatttattagtactaatttgcccgatgatgaaaaacaaatgaattgagtccaacaaaaagcgctttttaggcgtatttggtggacggagattgtcaaagattatgagatttgagggcatttagtttttgtaactttttaaaaatatgccaaaaaggttttttgtgtgttaattcaagaaatgcactgatcgacaaaaaatttttttaaaaatcataaaaagaaaagttacgtaaaatgttttaataaaataaataatcgatcatttttttgttccaaaaaagccaaatcaaaaaccttttgtttaaattaaaaagtgtaaattcttcactttttgttttccaattgaaaacgctcgaatttttccgtttttattgccaataaaattttaggccgagctgaacattgcgtcgttgaagcgttttgaggacatggaattggagcggcggaagcgccatcagaaaccgacaaagcgactcgcgttggacgggccgcgtgtgcgcgagctgtggacacgggacggaaagcatttcatcacatttgtgcccgaaccaccgccagccgagcaatgctttccaaagtgtgtgtgggttttaagtcaaaaaaaaagagctaaaatggttacttaaaggagtggtgctacgtttctccgcccctgcaaattttttcatttcaaacggaagtttttcaaaacaaaatttgaaattttttatagaacaatttgcatggaaaagtttttttaattttttttgtaatttataaacaaaaggaaatttttaaaaaaattgattttggaagcctgcatttttattttttagtatgggagggtggattttcttcatcaaaagtgttcaaagcattaattgtatttttgattat

SEQ ID NO: 18917 - DNA, 1959 bp, Heterodera glycines
tcaaagcattaatggaatttttagattatttttaattgtttgataaattaaaattagatttttcatactgtaatattaatttgtctttctcatattgtttctccgtttttgcggattgacaatagaggatgaaaattaataattgaatgaattatttatagttttttaattacaatatttaaattatttttttgcattttatttttatgaagctttgacctaaaaattgataaattttcgaaaaattgctttttcatcttctccggattttcgtttcttggattgacgatgtggcggacagacgactcattccttattgacttgaatatgatggtgccctaagatgatgccaaggcagttccgcgagtgcgcaatcaaagcacatatcgcgcagtttcattgacccgctgactccgttgccgtacgcagacatgtacgcgttccgtgcgttgcgcgaggagtaccgtcaattcttggagacataccttgaccatattcagcatagaccgcatgaacatcagcggaagaagtcggcggcaaatgattaaattggtcattatttgatttttttaatttaaagaaatgtaccatctttttttattcgtttgtcttcgtcgtccattcatttcatttgtttgaattattgcataaaacattcaatttgacaagggcgtagccagcaacagacccttggctttggagggcttttgccccttctgcctcccccccccccccttttgctggctaagcccttgcaatatctgatcagcaagcgggtcaacgggggggggggattaatcagccgccacaattcgtcactacccataaaaaaggcacattgaattttgctgcccaattattaattagccaaacaagttttatatacatattatgtattaatggcaatccaaaagttctcacgaagacatggttttttgccacattgaattgcattgttttttttttttgaaaaacgaagaaattaaattgaaatatgatggaaatagcaagctgctgccttattgttttattggatttgattaattgataagaaatgaaatagtcacgtttttgcaacatctccgaatcaattattaattaatcccccatcatttcggggtggtgacgacacatttcttccatcaatgaattatggcttaattagatgtgtgtatccgccgtcatcagcgtatcaaattgtgctcgttgttgttgctgctgtttttgtagcggtggtggtggtggttgtgttgcgaatagtgctggtcctcctccacctcgtcatccctcttttgttggtggtgtgccatcgctgccgccgcggcaccggaagccgtactcgtagcagcagccgccgatgatgacgaggacgccgccgttgcggccgtgcgcgtcttggcgaactcaatgcgaatggcgagcggcgtcgcccatagcacgctccatccgccgtcatcagttgtgattgtgtttttgtggcggttggttgtgttgcgaatagtgctagtcctcctcctcctgatcactcttcttttgttgttggggtgatcgttgccgccgcggcacccgtattcgtcgcagatgtgcgagagtgcaatttttcttaacaaaagtctaaacttcccgcttgtactgtgctttgtttccttctttttcgaaaaaaaatttgtcgtgtaaaatgatgtctttcctgagcttttcaatgtctctttgtcacgaatatgacacatttttgagactatcaaccgctcgaaatctaacagaaagccgaaccaaaattttctaatttactgcattatgttcgaagcgtgtcgcgacatttgcatcattatccaaattcggttacaaattaagttttttaatccctaatcgccttgaccgaattgtatgatttgttatcatttgatagcgccacgttactgttgcctatttgtttgccaagtttgggctctgcgttca

SEQ ID NO: 18918 - DNA, 2285 bp, Heterodera glycines
catcacatcactgtccaagtcggatccacctgatgtcttatggatggaaaaggaactgacggacggcacagtgctctgagacatcggttggctgccacgggtttcggtgggatggcgtcggcctgcactgccaagttaaagaacgaatactgaaaagcgaaccttggtctaaaaacaaagaagttgtcatcgaatatgccatcagtttctgcgtaaatttaggctttgaataaggcaccatcgcatggggaaagtgtccgccgggtttaattggcgtcgccagaatttgctcactccattgcgcttccaagttaggcttcctaatggcaaaaaaagaaagaaaacaataaaagtaattgacaaaaatgcgaaattttctgagaatttcagtgatttcactcacttgtgtgggttgacgcgaagaaataattctttttgtttgaagggaagggcaaattgttcactcccgagcatttcaagccacgaaataagtgacaaatccgctgacgacaatttctctttatgagaaagcaaatcattaaagtgtcgctcacaatgtgttgcagctaaagaccaaaaattgttaatttgcaccaaaaaaaaccagaataagcacgaaatatgcacagcacaaaaaaaaaaaaaattaagttcgaaaaatcaaatataagcataaaaatacttaaatagggtaattataatgaaatcaaaaagaagccggttacttaataataacagaccaaataactttcaatctttttttttaaagtaaccgtgctttattatttcgctggacattaaaaaatttgcctcccaatgttttctgaccgtttctcccttccattgcttgctcttgacaaaaagtcaatgcatattcatagagaagtcccctaacaacgagctgaactaatcggtcgtccgttgaatgttttttgatgccttctaacggagcattgcttttctgtgaaatcccatccataaaaccggcgatgtgcggaagaacggcttgaaagcaatccattctgaaaattggattaatgagaatgacaccggcatgaataaaagcataacttgcactgtaagggtcccacaaacgaaaatgttcatcctcagaaagttttggcaatgttaaaagtgcacataatttacgaaattcgtccgcattctcacaaaaactttcgagctcatttaaacaattaacaatttcctaaaatggaaaacaaaaaaagtatttagaagggctaacctcaaccgcaaattcgcaattttgtaaggggccgggctcttgtttaatgcaaagcaattcgaagaatttacacttggcaatctaaaaataaaagaaatgaattgacaagcacaaatgccaattaccaaaaaatggattctttttgaaggaaatcccaccaattctttgagtggcgcaacgaattgcaaagccgaatcccattgaccatcctttgttagaaaacaaattatttattgtgcggagaagaaaaaccaaaatgagttgacgtagaaagagaaggtcatcggagaaagcaccgttgacaagacccgtctctctttcaagtgaagcctaaaataagaagaaacggaggactatgacaattaaacgaaaattggggaaggataattcggcagcggcggataattttaaattattttagtaaaaaatttaatttcccggtattgccgaatagtccatcctgactacgggctttaacctgagttatgtgaatacgccgattttccaaaaattcaagcaccaatttgaccacatcgcattcatcaattgttaaatttactttttgacctaaactaaccatcccacaaacgaacttaagcaaaaattttatgttgaaaaaaaaattggaaaaatatgtaatcggaaagacagttgatttttaagagtttttattcatgagaaatactcgaaatcagtttattacatatatattagaaaaaataataataacagttaatgagagatcgaagatcatcccaaagacaaagccccgttgagaaactcagtcatcgtgtccgtgtcccatttttcaatgctgagagttttgtgcgtttgcccatcgccactcttcagcaaaattgtaggcaaaactccacggacctgcttgaccttcagcttccctccccattggtccttcatttcactacgtacaaaggcttaatgtacttgtaataattttatgtattattgacaaatgctataaaaatacctgcaacttgcggaaatcggtgcaaattgcactcacaaacatgcatttcag

SEQ ID NO: 18919 - DNA, 1224 bp, Heterodera glycines
acgctgactaattagctaacatttataaagaaagtagaaatttgattaaatgcatatacaatatacaaaatattacttttttaaatttgtataaagttcctattttgtctttgactttgcttttttttccatttatttcaatcggctagtgctttaaggttttgtctttgactttgcttttttttccatttatttcaatcggctagtgctttaaggttttgtctttgactttgcttttttgtccatttatttcaatcggctagtgctttaaggttttgtgttttgactttgctttttcttccatttatttcaatcggctagtgctttaaggttttgtctttgactttgcttttttgcggctagtgctttaaggttttgtctttgactttgcttttttttccatttatttcaatcggctagtgctttaaggttttgtctttgactttgcttcggctagtgctttaaggttttgtctttgactttgctttttttccatttatttcaatcggctagtgctttaaggttttgtctttgactttgcttttttgtccatttatttcaatcggctagtgctttaaggttttgtctttgactttgcttttttttccatttatttcaatcggctagtgctttaaggttttgtgttttgactttgcttttttttccatttattccaatcgaccacgttaattcattctctatacatttagtgtcttatttcatgaaattatattaatttaattttaaataaagaggcaaatttttacagaaaataaatagacgctgactaattagctaacatttataaagaaagtagaaatttgattaaatgcatatacaataaatattacttttttaaatttgtataaagttcctattttgtctttgactttgcttttttttccatttatgtcaatcggctagtgctttgggccgttgtctttgactttgcttttttgaaaaaagaagctatttcaatcggctagcgcggctttaagggtttaagtgttgacttgcttttttgtcggcattgaacggtgatggctgctgctggggtgccacctttgtcgtggcttcattttttccagtgattggcagtcggcgaaatgaataaaacatgcagctcgactttgtgttaaagaacttttggcgagttctttgactttgcttttttttgcctaaggcacaaatgctgtggggaactccgcacctggggatgctgaa

SEQ ID NO: 18920 - DNA, 1170 bp, Heterodera glycines
  unsure (1)..(1170): unsure at all n locations
tggggaccagtgtgcttgcattcgaaaaacnacgagacataagcgcccgaaggcctttggcctgaggaagtgtcctaaccggggaaatccggagtgctcgtgtgagtgcctgtgcactgccctcggagctgtgtccagcggcgagatggttcttcccaagtccgggaagctcggatgcctggccagcgctgtgtcattaccacttgctcggtcgccttcgccgccccatgcgcacgcttgcgctgaacggagttgtttctgctgaaactatccgtctttacaagacggctgtaatagcggcgcttggcaacgctcgctagcagctatctggttgatcctgcctgaactgatgtgttcatttcaaagattaagccatgcatgtgtaagtttaacctgccagacagggaaactgcgtacggctcattacaccagctataatttacttgaccttgacttcttacttggataactgtggtaattctagagctaatacatgcaccaaagctccaatctccccagagcggagcgcatttgttcgccacaaaaccaagcgccctccgggcgtccagtgttgactcagaacaactaagctgatcgcacggtcttgtaccggcgacgtgtctttcaagtgtctgccttatcaactttcgatggtagtgtatctgactaccatggtgatgacgggtaacggaggataagggttcgactccggagaaggggcctgagaaatggccactacgtctaaggatggcagcaggcgcgcaaattacccactctcaacgcgaggaggtagtgacgagaaataacgagaccgatctcttatgaggccggtcatcggaatgggtacaatttaaaccctttaacgagtatctatgagagggcaagtctggtgccagcagccgcggtaattccagctctcaaaatgcatagaattattgatgcggttaaaaagctagtagttggatcagtactagccgtccggtgcacactatgtgtgttactggtttggttggcttttctgccggtctttccccggcgttggcctttaccggtcggcgtcggtgggctggcgagtttactatgaacaaataagagtgcttcaaacaggcgtttcgcttgaatgttcccaggaagaataatagaagaggatttcggtcacgattttattgg

SEQ ID NO: 18921 - DNA, 1621 bp, Heterodera glycines
ccccccccacaacccctgccccatgggcacctgcccgccagcgacttttgaaatgagcattcagacccccagccccaccaaccccctgccccacgggcacctgcccgccagcgaaacgtcgaaatgagcactcaaacccccagccccatcaaccccaacacaactgacggtcgcgaagcgacgcaagcacgcctctcctatgcatctacccgtctgctaatgaactattttctgatcaaaaattgcttaacttccatagaagggctgaatgaagacaaagaaaagtgattcaaaacaaatttacaaatatgaaaaaaacaatcattgtattcaaatttgaatgataaataaaaatagccaaataaaaatgaaaaatgtctgaccaaattaaaaaattaaaattgaaaaagtgaccaacaatttaaaacattttcacaactttcggtttcaaaactaattaatcaatatttagttggagaaaaaaaacattaattactgattacataattcttaggcaaatatgaaacgaaacattcagtgccagcataaaaaaaggcacgtgatcagcgatttcgcaattgtctagggggacgggtaaatcaaaggggtgccactccggtgccagcataaaaaatgcaagtggccagcgatttcgcaattgtctcgagggtgaatgaaaaggggtgccactccggtgccagcataaaaaaaggcacgtggccagcgatttcgcaattgtctcgagggtgaatgaaaaggggtgccactccggtgccggcctaaaaaaggcacgtgaccagctatttcgtaattgtctcgagggtgaatgaaaaaggtggtgccactccggtgccagcataaaaaatgcaagtggccagcgatttcgcaattgtctcgagggtgaatgaaaaggggtgccactccggtgccaacataaaaaaaggcacgtgaccaacgatttcgcaattgtctagggggatgggtaaatcaaaggggtgccactccggtgctggtataaaaaataagcacatgaccgcttttttttttggttaacagaaacggtcattcattcggtgccagcctaaaaaataagcacgtgaccgcgatttcgtaatgaccacccaaaatttaagtgggcgtttctttcggtgccagcctaaaaaataagcacatgaccgcgatttcgtaatctttggtcacatgaccacccaaaatagggaggtgtgtcatagggtaccattataaaaactcgagatttcgtaataactggtcacatgaccagtgcagtgtaaatagccaagccccaatgttttttcaaaattttcccttatctaattgcaatcctaatgaatttggaggccgtcgttattaacgacaaaaaattcaaaaatttgaatgcgataggcaacaaaattgtggtccctcttcaaggctattttttgtgcccgttttttacacgcaacggccaatgtacttctgctgcccacagccccgccttttacgttcctcctcacgaggtgagtaaaactgtcatttgagagatttgaattcagcccactcatttgcaaaatattcctagtaagcatttatttatattttggttttgtatttttcactttta

SEQ ID NO: 18922 - DNA, 2503 bp, Heterodera glycines
attggtgtcttctttaataatgcctttttaacatttgtaagtatctattccatccgttgttgacattcttggttatcagcactaaaaatcttgcaatgataaagtgattacaaatcatttatctttttttgtttactttactaatatccaaaataaaataaaaacacagaacaaaagaaataattattttattttatttgctaaatcatgtaaaaaataataattttttttaaattggatgtggaaaaacctgcagcttaaaacccaaagaaagaataatgggatacgaccagcagaagcggggggcaggggcttaacaaaacaaagcgccccttctgactttgactgatcagcggggcagtgattagtcattaaaaaacaacaaaaagtgtgccccgggcatattaatttcgatgcgcagcagcaggataattaccattgtgttattgtcgtttgggggcgactcgccgccctcgggcgataaaaatggaaatggggaggcgcactgatcagcaaaagaaaataatgggcaaaaaaaatgccgaaattgccgtcgccgccaaacccaccaaaaacttgactttgctgccgattagcagcagaagcgaaattcgtataaaagagtcggagaaaacatgggaacacattataacgtgctctgttctcacaaagctataagtttctgataaatttcgctgatcaaacgactaaatcagtgatcacaacagttgttttttggggggaggaggacgctaaaaaaagcgaacccatcacactaattaattaatttactaacacatagacgtgttttgagtcttcatttgtgtaagataaacaaatttatctaattaatttttttaattttccgagtcagtcggttttgccatatttcaggctcaaatgtatttttcagtgactaatgcctaaaaattgtgataaaaattacgccctttaagaataatttccccctgaccttttaagcatttgctttgcttttaaaatggcactcgaaaaggccgccggcgtggccatagcgatggccgtgtgcactgtgctgctgtgtgtggcgggcattggctttgtgcagcgcgaagtgcagtccatctgggccgagttggacacggagatggaccggttcaagctggacacggacgacctgtggcacgacatgttggccatgggcgccggcacggcggccaaccgccaacgacgaaatgcgtacggcggcgcgtcataccaagcggccggacagcaggcggctgtcggcggttacggtgtcctggtcaagacagtatgcagtaagtgattttgcatactgtagtgtagtgatgggaatgataacattattgaaaatttagttgaaaaataattatgtaaaatttgcttgaacagaatgccaaaaaagaaactcttgcccaccgggtccaccagggcgtcctggcgatgtgggttttgctggcagaccgggcattcccggaagggacggagtgccgggcgtggcagcggacaattggcacaacgcaccgttcaaaggatgcattgtaaaattataaaaacattttaactttttaaattttttgctagaactgtccaatggggatgactggtgccccgggggcagcgggaaagccgggacagcgcggaatgtaagctaaaatttatgaaataaatcttaaataaagaacattcagtatttaatttccaataaaaatttcggcttttttaaaatcaaattaaattaaaaaaataatattaaatgtacatttaaaatttggttaaattttaactttttttaaattttatttgcaattaaatataaaagttcagtcaacgaccagaatttttttcgtaataacacatccatataaaatgtaattcattggaaaaattcaggcgtggtcagcgtggcagcccaggaatgccaggacgtgatggcatcccgggcctacccggcgaacaagggcatccaggcgagaacggcaaggagggcggcacgggagtgaccggcgagaagggcatcgatgcggagaagcgtatcggccgcaagggcttccgcggagtgccgggcgaacatggccccgagggaccattgggagagccgggaaagccgggcccagtggggccaaagggtaaaatgataaattttatttgaattttaaaaagcctcacaagagtagaaaggaagtatcaggagagggatgagggaacaaagcttccgctccgcccccgattcctaaatggttaataaattttgttactaacaaatttataaaaatgccaaatttttccgaccggaactctctcactattcgcgggattgattaccttttttcaattttttgaaactttttgtcaacaaaatcccattttcatgagtatcatttgaaaatttttggagaatagaaactttttctgtcaattgtatttcctttggacctaccataaaaaataagttttcgtatttatattttttaattttgttaaagcaaccaaaaaaccaatt

SEQ ID NO: 18923 - DNA, 1674 bp, Heterodera glycines
caaaaattcttcacgggccgggatcccgcgggattaatccagcaaatcccgcattttccaaaaaatgcgggattgcggactaggatcccgcaaaatcccgcgcgggatcccgtccccgcggcggggcctagtaattatgccatgaatagaaacaagtcataaattgaagaagacaaaacatatgtttgtattaataaaataaattaaaaaagaatattttgaacagaatttagccataacaataaatatctaaatattcgtattcgacctggaaccaggcctgggtttttccttgatccaagtccagacccaggcaatttttcggcaacctgagtttttcctggacctggattttcacggatttttggccaggaaatctaggtccaggtcaaatgtgaaaaaaattcaggtctaggctcaggttcggcatgaaaacctggatttccgggataatattttaaaacttattatttcgagtgacaatttttttatttcaagttaccaaaaaatgatatagatttaaaaatatcatattataattgtcatatattttagatgttcctaagaattcattgattttttaaacatttgcttgcttttaaaaacaaattaaaaaaaaggttcaggcctggatccagccaggcctcaaggagccggaagttttcctaagccaaagattttcctggatttttttccgggaaattcaggtccaggtccaacatggataaaaatgaattctaaataaatgtaatttaattgccattccgccccccaccccccgccccaacaattttgtgccgtgcctaattaccacgccagtttccaacgccatccgaacatcattaacatcgctcaacggcacccaacactcggccacaaaaaatttgccaatcccatcaaaagtgaatgtgttcagtgtgtggtaaatggatttgtgaattcgcacctaattaattaaaaaagtattcattttttaaacgagcatttttgttcatttcatctttaattaattaatttaaattagatgttattaattaaattaattttttgtttatttctctttaatgaaataattaattctaaattaggtgtttattcatttttgaatttatttttgaaaaaactctctcacttgttttaaccattttctgtgatttgctgccacttcgtttaacactctcatgcgatgctccctcgtttgagacatcacctaattaaataatcatttattaataaataatcaaaaataaaaaagcaattaatataaaaaataatcgatttgtaaaaagaccattcgcatgtcgtgaatgtttgtgtgcacttgttgaagtgcagtttgccgatctgcgctcgtcttcgggcactgattgaactgcttagctttgaagccctcacagacctaattaaaggataattaaagcaattattaaattaattaaagggtaattaacccatttatttttaagacaaggaaaaaatgaaattaaaaggattaatagcaaaatatttcttaccttatcaatgatatgccgtaaccgttcaccattatagaagacgatgaagacagattccttgatatcttcaccctgtttatttattattaattgattaacaaaattctttgactgttactgattcaaggtgctcaagcagttcatcaatttcggcatgtcg

SEQ ID NO: 18924 - DNA, 1305 bp, Heterodera glycines
gcttcgcaacggaattccaatgtcacttctacgacagtttgtccctcatttcttgaacagccgcatccgtaatgccctcaaaatcaaaaaaaaaataaagaaaatttccataaaattttatttttaccccctgaaaaaattcatccgttttgctgagcacatattgccattccttgagctccaaaaaatttttcttcaactgctgatcactgtcattcatgctaatgatatcgcgttccttgtcaatcaatttttgctgtaaaaatttttaaatttttttgaatattttttaatttaaattcctttatattacctcaacctcgttgatctcaccatgtgacattacatcaaccgcttctccccatgtgttgtccacaattggttgattttctttgcgaatttgtacctccaaaaatccttaatgtttcagaaaattttaattttaaacaatttagaaagttctggatttcaaatttaataaaattaaaaaaattggaaataaaattcgaaaaaaaattactcaatttgcgttccatttcatcaaaacgccgaatgtctttcgtgaacattcgttggaagacgttaacttcggcattcagctacatttaaaaatgtaattatttttatgaaatttatttaaaaatatattggttaaatttaaatttaatttgttttttattattacgtctttgaattggacgaatggatgcttgccaagctcagcaacacatgaaaaggctgcgtcccgttcaacaatcagctggcaaaatcgcatttcctccgagcggtaaagcgaacccattttggcgaaacaatttttgtgggtttttcaatttaaatacaaaaataaatgttagccgctataaaattattatctaaaataaattttccacaaataaattaaaatatagcatatttgttttagcccaataaatttaaaaattaaaattccaatttattagttccatttgaatataaattcgcataaaaattgaagggatttatttattttttttttgtttttaataagaatcagaaagtacatgaacatattggagttggatgaacgagcgacgacgacctaatgggaaattgtctatgaaaaaatgagggatttttttcaatttcagattttatctcatctcttttttgtcctgtctcctctcccttgggaacaaaacatttcctattggtttttttggatttgagtatttatcgtcgtcggattacgaacggaaaataataatgatgctaaatgattaaaataataggaaacaatttttaataacgcattattttaatgaa

SEQ ID NO: 18925 - DNA, 2570 bp, Heterodera glycines
  unsure (1)..(2570): unsure at all n locations
cctcaaaaatcccagtcctactcatttgcaactgcaaatagtgaataaaaattatttttgctcaatttttggctgaaaatttgtcactattcgtcagtcactatttcggactttttggcactattttctcactattttggcatttttactcactattttagttaactattttgggatttttcgtcactaaaagtcgcatccctagtaattaggtgtccaatgaatattaaatttaattaatatcgatgccattttggcgacaaaaattccattggcataatcgaaaaatttactatattcttaaattttatgtagatggtataggcaggtataacttttttaaatatggaaaatttttttgaaattttacaggcttagggtgataaaaaaaagtaaaccgaattaatttgggcgaatttatgacaaattttatgctgaaaagactgggttttaagaaacgccaaaggtggcgggtttttgagaaaaaaaaaactgtaaaaaaataaaaaagaaattctggtattaaaaaagctccatgccccttcaacttacatcccaaacactcgaataattctggatattattcagggtatctagaagccgccaaggttggaaacccagaaacgttgtcgattttttgagatatctcctggccttgaaatttccaatcaccaagcaaaaagccctgtccctaaataacccaaaaatctgtttttcgggaaaaactactacctccaggccccggaatttctaattatggggcaacaacactgccccaaactaaaccccaatcgggaaaaactacttcctgagcctggccctgctgtcttaattggttttattttcaaataaaagcacagaaagacaattgattttttaaaaaatagatagaaatcgtaaaatgatcgtcatgcaaatttaaattaattaatttgtataaaattgtgtgtgtttaaagtcatcgcaaaattttgttagactttttcacaattttctttcccattcttggcacgtttcgntttggcattattcattngactaattggcattttccctcgtcgtcgatcaatttccgcctgaatgtcctccaggcttttgtttttcgtttctggcatgaattttgccgcaaatgcaatgaacagaacggacagtgcggtgaacacgaagaacacatactcatccagaacggactagaaaaaacatttttttagattttttataaatttttcgaaaaatatatcccataaaaaacacagtcaaaaaataattctaaacataagagaaattccatgaattgataactagggagcggatttttagacgcgaaaaattctaatttagaggggctcaataaaggcgaaaaatggtaaaataggagcgaaaattttgcaaaaatctgggttctttttataggatttttgttaagaaatttttcaaaaatgccaaaaagggacgcctcttttaggggtgaaaagtccaaaatagggattcctaaaaaaataaattaaaaacttaagaatccgctcccaattgataacctaggatttttgaaaatattattttcccatgataggaaaaccgtatttaaatatgcggaattacagtaatagaattagtctaatgtacgtaaacatacatttagcattggaaagaagaagccaacaatggcatttgagccccaattagaaaggaccgcaattgaattggcattgccacgagcattcaatggaaagatttcattaacaaaaaaccatggaatcgagcctaaatagctttttttaattatgattgaatataaatattactgtttttggtttatttattttttaattttttaaattttaaatttaacggtattaccgaaataaaaacaatttagttcaaaattaatagattctaataagatccggtctcttgttaattaataatttatttgctatttgatattgttttttgctggaaaaaccggtatcacatttaattaattaacaaataattaattaagtttaattgatcagctaatgaatttattaagtttaattgattaactaatgattaattaattaaatgacctggcccaattgccgccgaaatgacaaaaagcagaacaaataaaatggaaaaatatgaaaaccattgaactgactggaaagcaaatgtttaaatatattttattttttaaacaaaaagccacctttgatataagcattgaaattgcgataaaagcgcttgacaaaagcaggccaacgaggccagtaatgtgcaaagttcggcgcccaaggcgttccacctgaaattcaaagggtaggcttcttaattaaggctagagggctggaaaaaggcaagtactttttcaaggacacataaaatggattatgttttttcaaggacatcattagcagcggtctaattaaggtgttaatgggtgattgggcacacgcaaaaatagagccctttttcaaggacgcgaaagtgatttatttcaaggaattaaattaggtccacagtccttgaatatacacaaatttttaagggcgcctatagaccatatgccttgaaataatttgttg

SEQ ID NO: 18926 - DNA, 4092 bp, Heterodera glycines
  unsure (1)..(4092): unsure at all n locations
tgttgttagcaaatttccggcatcttcatttattgagaattttcaatcgaattgtccgattgtctcctcactgtgtctgtcagacgacggaattattctccgaacggtttctttcaacgtctttccttttatgttcgtttttttatatatgaaaaataactggtaaatggtaccacagatttaatgctcattaaaaggtttcctctcttcccactttaaaaattaagtacaaaaacgttctacgcctaagcctactggacctgtccgtcgagttcccgctgttagcatcggaagtgatgtgcgacaaaagcattcggaaagaaccgcaggaaaaggttgccaattgtattagttaggaattttctgacaatttaggtgatggaacaaatggattctggcaaccatggaatgcttcggatgattacagtgaaattaaaaaacgtcttttgcgtcctccgaatgatttctccgagctcaggggtttagttgaagaataagataatcataattaaacacttgcagaaattatacgcaaagacattgaaagaatggcacagataaaggaggaaaacgtaaaaaagaggaagggaacgaccaaagggaagaagcaaatgacggatgagcagaaggaagcacgggaagaagaggggcaggaggaggacgaagtgaactcacaaacatttgaaaatagaaaaactaaacaacaaacactgaaaggaactccattggcattcttaaatacaccccaatttcctttttcccaatttagactcgcaggaacagaatgatcaagcgaatgttcttcgttttttgcctgacctttcctttctttgtgatgttagttggaaattgtttgctctcaattagaaattcatttttcctttagccactattggcttaaccatcgtttcgattcattcctgttgcccatcgatcctaattcttatttatctgtccttatccaagtcccttggagcgattttattgaacgcattgtgcctactggaactgtaaaaattcattgactgtgattttttaatttacgtttgtttatttttcaggtgtcaaatgttcatttgaaagtttctcgtgggcctgaaagaagaatttccaaaaaagcactggtcacagttatgccgggtgcgcggtggccggatggaaaaatggtgagagtttttaaaagcaggtttaaaaaattgttgatatagttaggctgtggctagtgccctccccccatttttttagaaataaagaattctaaaagtattaatggctttccgattttatacccagcggcgcctatcggccacccgccggacccacattttaccttatattttgaaatgttgaccctttttttggcacaaaaacggctataaatccctgctttttgcacttcggcgctgaaaattttctggagaaaaaattttttcagttgccaaggatgttttttgtaaatgtgcccgacattggtcgagtggaacaagaaatcaggaaagcggtacttaaatgcgtaatttagcataaaaataattctaattgtcagtttaggaagtggatgctgggcttgcccctgaacattggagcaacatccaatggatgcaaccggggccaatgtccgttcatatgttttccattttcattccacttttaggtcattgattataccttctctggtcattcttgctttatttgtccttccatttggttttccttggtcgaatgatgactggctcaaaaaatgggcaacttctccgaatcgatcgtaacacatttctcaaagcagtttcaactgctaattttgttcagtcttccatgatggggcatcgtcttcgaatttatgacccggcattaaaggatggtaaattgaagatcaaatttcgtgacgtggcaggccttcacgaagcgaaggtggaaattagcgaatttgtggattatcttcgtcgacccaacaaatacacgcgattgggcgcgagactgccaaaaggtttttctttttgaataaaatagcgtcccaagtctctgttaggtgcccttctgactgggccgccaggctgcggaaagactcttttggccaaagcactcgccgcggaatcgactgtcccattcatcaagtgaataaccaaccacgaaacaatttattttcctaaaattactttttcagcattaacggcactgagtttgtggaaatgattggtggcctcggtgcttcgcgaatccgtcaattgtttaaggcggccaagtcgagggctccatgtataatgtgaatagaccgattagcaaatgtcgcttaatgttagtttatttgattaagttacattgatgaaattgacgccatcggtcgaaaacgtaattctgggtaattaataatataaaaaaattgattatattgaatccgcaaaaattataggcatggaaatgacgagcaggagcacacactaaatcagttgttggtcgagatggacggaatgttagtttgaacatgagaaaaatcacaatatttaacaaattcagggacacggcgaagggaattgttgtcattgggagcacaaatcgccctgatatgctggacaaagttctacatttaagccgtatcactttttattgatctcccattgaaaggctcttcttcgtcctggccgttttgatcgaaatgtcagtgttgacttacctactctgattgaacgtcgtgagttgttcgacttgtacttgcgcaagattaagaaggacaaccgactgacaggaattagccatcggctggctcaattgacccccggatttagcggtactcgctaattcgaaccaaaaccctaaaaaaatccttttcctttcgagctatttcatcttttctgcattaaacactacaaatttacttcgtccaagtttccaggtgctgatatcgcaaatgttatcaatgaagcagctattcatgccgcgacaattcaaaagaaaatggtggacatcgatggttggttttaaggaaaaattataattgttaacccaatgccgtagccagaagtaattttggtcaagtccaacaaaaactttccaattaatagatgtggattacgcactgcagaaaattttggctggaccagaaaaacgtagcaaagtattggtaaaggaggagcgtgaaatagtcgcttatcacgagtctggccatgcattggtcggatggttgctggaacacacagaagctctgctaaaagtacagagacccaacaaatttataaccaaatttatctattattaaggtgacaatcattccaaggacaagtgccgcccttggatttgcccaatactcaccgaaagaccgaaaactgttcactcgtgaggaattaatcgacagaatttgcatgatgttgggcggacgagcggcagaaaatgtgacatttgggcgaattacaacaggtgctcaaaacgacttggaaaaagtaattagaattatgctattgcactaataaataaacataaaatgaatttataggtaactaagcaagcacaagcgatggtcaaaatgtatggaatgagcgatgttttgggacctatcagtttcactcccgaacccggcgttgacccacaaagtgttcaatttcaaccgaagccttacagcaaaaagctaggaaacatcattgatcaggttcgtgcgaggcgtttaatacccaaaaaattgggaaggaaattaaaaaaacaatttgttttttgccttaaaaacattttgtttttctgaaataacgtattctttttctgtctgaattttacggattgaaaaagcgatataaacttattttggacaattgtttaacgaagaaaagaaaaattataatttattttaattttatatagtattcttgaggtaaattttcaacattctattttcaggaagttagccgacttgtatcggatgcttattttgttactgaaaagctccttcgcgaaaatagaaatatgctagaaatggtaaagagtcattacaagtttacaaccatgtctttcttcattataagntggcgcgtgccctacttgaacgagaaaccctttcgtacgacgacgtaaaaaaactcattggaccccccaaatttggaaacaaaa

SEQ ID NO: 18927 - DNA, 647 bp, Heterodera glycines
tttagtaggagaaatgtcattagtggatagtgtcagtaggctgagatgtccagtaggcgaaacgtacgcacaccctttttgaaattttgcatgctaatagaaaacaactagagctattgaatgatataaagaattaaaaatttggttgattctaagtaaagatattgaaaaaaattggtacaattgatggttttttgaccaacatcatagcaccgaccgaagaaacggtgagcagaaaaagggaatggcacactgaattggaatggaaggcaacagaggagaggaggaccaccaaagagaatattttgcaaaattatggccatttgccgggcgttccccgactcccgccacccttttatcatctaatcacatcatcagcaggggcgacagagagagcgaaatgacccacacaccatggcagagggacccctattcccaatataccccgaccattggcattggcaccccttttgccattctcccccccccattggcattggcaccccttttgccattctcccccccccattggcattggcaccccttttgccattctcccccccccattggcattggcaccccttttgccattctccccccccccattggcattggcaccccttttgccattctcccccccccatggc

SEQ ID NO: 18928 - DNA, 773 bp, Heterodera glycines
  unsure (1)..(773): unsure at all n locations
aaaattttgtttaatatttgctctaaattctttacattgctttcgtgaatgttttccattttgcataaattcatttttattttaaaatatttttctacagtttctgttttttgctcatatttttgattttttattggttttccattttttaattgtttcttccaataattaatgcttatttctgccctaatgttttgctattattttttgacatttttcctttttccatacaatttttgatttaattcattctttattttacatataattgatcaaattgctttaatattttaaattttttgaactgaaaaattttctcaaaaattgatcgcaagattttaggtttaaaatttcgttattcgaaaaacattataaaatatttaataatcatttattaccaaaattaagtttttttttggttaagttttaggtgtttttctctctaaaactcattaataaaaaatttttaaattacttttttatgcttttttcacaatttttgtgccttttttgcgagctctacttattagatattataaaaggttaagtcaagcaatttgaaggcaaattttataatacagtcatggtcataagtgttgtcccatcatgctttgaaaaaaataattgcgtataaaattgtcattttccaatttcaacagataagtagcatgccattggatagcattttttatgggctttccaatgataccatatttgcatttgtgacataaacatttatttgatttattttaccantattcacaatnnttgat

SEQ ID NO: 18929 - DNA, 1626 bp, Heterodera glycines
tagaaaaaataaatttattatctaaacaataaacgttcatttaaaaagcgtttttatcttactaattaatggtttctcgtagtaatttgtgttttggtctttcttgaccatggaatgctattgtcatttgaagccccgagggggcaaatgacgtcgaggtcattcgtattgtggttttaattaatattaattagtttataattaacattaactcattgctccactatacgaaaatgctgccgaaaaattaactaataataatcacctaaattaacaagttaaaactttcgactcggaaatgttacagcaatagtttttttttatttaactaaggacttaccacacaatttatatttttacaattatcaagcctaaacttgatacatagatcaggttatagtcaagataacaagccaataataaatagagtaaattgattgtttattaagaaaattaaaatatttgtgtacaattttttatattaattttattaagataatccgttttctaaaaaacattatcaagatgacggttttcactttatctgttgcttttttgtttttatatgcgcatcaattagtttcttcacatggaatgatcgctgaaaaagcgcatatgaaaatggtggaatagaattttcaaataattaaaaaccttaaaaattttagaaagaaaattttgtatgggcattttcaagaaaagtgaaatattttacaacttttttgtgcactatcgtctcctctttgtaattctttattaatgctttagcttttttgatcattttatatgtcattttattaaggtgagtctcgcaaatttatccatcgcactttctcaagttggaaatgatcaaagaaacgatttgcaagtggacaatggcacagtgtgcaatttgcccttcttaaatcatccgtcgatgccaaagtcgcctgaccgatttgtgtcgctggttttaatggtggtgtctgtttttgtttcacataaattgtttgtcgtagcttttttgggattctcgagtgtcggagtaaaatctatgggtggactaaatcattaaatcattgattttgaaaatgaacttttataattcagaagggactgcaggcaaaagtggataacttgcatatttaggggggggggggactttacagaaaaaattatttgttaaaaatttttcaaaaagttactataatttttttttaatctaacaatcaaaaattgaaaatttatttttaaattaaccaaaagcaaattgcatgccaaatttacgctcattacctaaaattaagaccggacgggattctaatgtttttaataaaatatctgtcttttttgcgggttttttctgttttttctatactatatttcaagacaaaagcaattgaagcagttacgccagcaggtacggcatataaaaggtgaaaatcggacagctcgagaattaaatatttcgggatttttcaaaattgctttcatcaacaaaaatcgagcaatttatttggataatataaaaaaaagcattataagtagaaaccggatttttaggtgctaaaaatcctgaaataggtactaaaataagtgccaaaaaagtgcaaaatagatgttaaaaacgcccaaaatgccaaaata

SEQ ID NO: 18930 - DNA, 3275 bp, Heterodera glycines
aattaatgcaaaaatcggtgccattgtgaggcggcgacgtctagaagacttaaaattcttggcacagattttagtctaaaaagtcaaccttcatttttgccccttgctaatgccattgttaatatcattatctttgttgagattgcagcacaaaaatatgatttatttgtatatatacatacttccattaattttgctttttattcagagatatttgtttaagataatgtctgtatattaatatgataaacaatataaaacttattttatttgcttgtgttttacatattcaaaaaattcagattcaattatgggtatacaaaatccccccaaaaaacgagaggaacccaataaatagagagcgcagagaaaaatgcacctctcatttcggcatactaaatactagtaaattttaaaatttccccggtaccttttaagcgaatccgatttcagtttcgtgatcagaccctcgaaaagtccagaaaactgattttagcacaaaaaaaaaaaaattaaattagggacagcaaaattctttacattattttattttaattaattttttcgtcaaaaaaaaactaaaaattgttccttgtattaaaaatttcacattgcccaaataaattaatgaataaactagagaccgagatttccaaaaatgccggatcggaccgggctgatattttcagaagcaaccggtttccgggcctggcctctcaaaaaccggtcaaaccggatttttccaaaaatcaccgggccggtttgccgggcccggtaaaaaccggtaccgggcccggctcggtctctagaataaaccttgaaaaagatcattttcctatgtaccaacgcgaaactttacaccgaatgtaaatttgaactgaactttttttgtcaacaatttatacataaagaatttacaaaaaaaacaggaaatatgaaataaactattgaaaaacggatagcatcactcatctaatacccaaatagaaaatagaaaaagcatatggaaaaaactaaaagaaaatctctctttgatcagtgcggcacattgtatgatgtcacacccgcgatcagcagcagcagacacaccgcaatcattcttaaagaaataaaatttacatttttttaaattttattttagcgaaatttcggcattttttaaaccctcagggcacaaaccaccccagatatatttgagtcaccctaaaattcgtatataggccttactcgtactaaaatgcctgtttttttatcttcccctaaatctcatctatttggactgcgtgctgaatggaatagaaaatttgaaacagataaatgattttttccccctatttttatgaaaaaaatgattaatttttgaacaaaccaagttccttgaatgcattcaaaattgtttgcttcagggactcgtttgaaggaaatgaaacgtcataactaaaaaatgttttaaaataaataaattataattaatctaatacaacaaattattgggactgctcgagagtgaggagtcgtaatttttcaagacttgggattgaccccgagagtcgcgactctcgaccctaaaaagccgagaaattcctcgactttagagccgaaaactcgagcaactcccctataaagtatcattataaggattttgcgcgcacattaccgctttgtcaatgcttcgccgatacttttggaaatcccctccggggtgaaactgccactgcgcggatcaagcacaaccgcagcgcccatgcgtcgcagcttttccgacacataaaactgttcggcaaacatcggcagacaaagcaatgcttttccactgcttaacgcatccattacgatacgaatatcgcattcgctgatcaccaattccgtctttttattgcctgaaaatggtggcacacttttacaatatgataccgtagacagaggccagccatactgtattttacggggggggggctaaaaattgaaaaaacgtaaagaatcggttgacccaagcccatcggaaaattttttgaaatttttcattaaatttgccaataaaaatagtaaatttaaattccaaatttttgaattttgcgccggccgtggtggattagcctagattagcctaaccatgccatggcatttttttgatggacataaaatttacagaccaataactgtggcttgatcgtaatgctccacaagatgcacattaggagcatgcttttgcaagagtgacatccgaccatgatcctcctgtttcgcatatttccaaatcacttccttttcacacattccaagtccttgaataaccgtcttaaatttgtccaatggcattttggatggttctagtaaagaactcatgctgaacacgatcaccggttttggttgcccaaaaacttgcggtaaagccttaatttttagggaaattatttaaatattacaattataatatcgtttttctgagttttcggcatcgcgtgatttgccgaaaattttcgaaatttcaaatcatttttattatgagactgttttcaatttcttaaaaattatttgcttttaatttaagagaaataaggaatagactcggatttaaatttttcaaatgtttcatatgggattttcttaatctgtgtatactgttttactactgaatggtattacatccttgtgatcgggctgcatcagatcaatgccaccaatgaatttgacgcgttttggcaaactgccaatgtcataatccaataaaggcgttgtgttgacgaacaaagcttttgcatctccgaacaatttttccagagtaggaaatgcattgttcttgaaaaggtccttgaatttttgatccttaaaagaaaaattttatcaattaaattatattaatttttattaaaataaacttacagcaatttcataaacttttgagaaaatatccgaactttcgttatgcttttccttgtatgcaccagcttttccaacatttttgtcgttaatgactgctgagaacagttctgtaaaaatatagtttattagtaaaatgtaaaatagttttatttgtttatttataatttttaattatatttcattaattaatttataatttacttaccgtatttccgatgatacagtcccctccctccccgaatagtgccccaccccagaaaaaagccctcttttgaaggttgaaaaataaagcccttgggggctttatttcaggaaattcggtatgtttattttaaaataagtaataattaattttttcacctggccactcccttgccccaatatttgttttt

SEQ ID NO: 18931 - DNA, 2184 bp, Heterodera glycines
aaaataattttataataattaatttatctaattgtgagtgaaaaactaattattgataaaatggattattgaaatattagaaaaagaattaaaaaaaaatctatttgtttagaaataaaaatgaagtgatgagttttataattcgtacataatggaatttttaatgtacaaatgattttttgaaatttaaagatgacagttcatctttgttatacttatctttttactccgtttaaatcaatataatcatattaaaaaaaaaattaaattcataacatctcttttttttactttcgctaaaaattagattgaaaatgaatacaaaaagatttttcattaacggaaggaaaccaaaagacaattgaaaaattagtaaatacgaaaatattcaaattcactacaaccaaaatttctttctaaatttataatttatttaaaacaaattaaattaacttgggaagacatcacagtccacatttggcaggcgtttgaactcgaaaataaacaaataataatagtaattataataaattccaaatttgatcattaaacatcacaaattgttacatagataaaccctagaagtgccacgggaaccgggacctggaagcggacaactgagtaccaaggtcccggttttgaccgggaccgggactagtcccggttttttcccggttttcccagcctaaaattcccggtttttcaaaccgaaaaggtcccggtccagggtctgcccaaaattcccggtccccgtggcactctagaataaacacaagtagttatcccacggtacccgtccgcgtccggtgtgaagtttcacacctttggtgtgaaaccggcaccgtccgtagggtttaggacgtggttttcgcgcacttagcggacggtaattaatctcccaattaaaaccaaaaggtttgggaccaatttttcgcgcacttcttgggggagggggctaccgtaataaaaaatttaaaaaaaaccaaaaggtgtggagccgaattttaagggggttaccgtaatcaattcgaattaaaataaaaagattcggaccaaattgcaaaaatgtaaaaatattaataaaaaataactaataaattataataatttaaatttattgccctcagcaatttttcggcaaatgattatcccccgtttcccattcacagcgtctctttttttgaatgtgttggaggatcaatgatgaagagaatggggataaggggcaacgaagggggggacgaaggggggagggggggggcaaatgagggagagggcagaaggggcacaggattacaaaatcaattaataaacgaagtaaaagtaacatttattttctttacaattatgagtgttttaatgaattattttaattttcatttcaattttcaattattaattttttcccttttgattaaaagacaattcatttccaaacaaattgttcgcttccaaattgttcgcttccaattgttcgcttccaagttttcaacaggatcatgccgccaaaaaaggtaagtttgaaaacaatttttaaaaaataaagataaaacaattttttaaaaatgataattttataatttttttcagaaattgtccgaagtcctgccaaagccggtgatggtcacacggagtgcgaccaagcgtgagacggaggtgccaaaaaggcagatggccattcgcggcgctggtccaccaaagcaccgtgggttaaaaatgcgcagaatttaaattaatttaaaatttaaattaataaaagtaaaatttatatttaagcattatttccaccaccagcagcagcagcatcaactttttcaacttttacaccgccgacaccaccaccattttctactccatttcacaagcacgtctcatttttgacaccttcaccaccaccaccagcagatgatttggagtatggacctgcaccaccaccaccaccagcaacagttgatttggatcaaattccgcttccgccaacaccaccaccagcaacattttcagtggaattttggctacaacctgcaccaccaccaccagcagcagcaacagttcatttggatatgaatcccacatcatcttcaaaagcggcagcagcagacgaaattgaacgtgaaaaaaagaggaaaaagcggcgaggcaatcggtggagcaaaacaaaggtcagattggattttatttttt

SEQ ID NO: 18932 - DNA, 2945 bp, Heterodera glycines
gttttcgcgcacttgcggacggtattctcccattaaaactaaaaggtttggaccaaattttcgcgcactggaggaggggctaccgtaataaaaaaatttaaaaaaaaaacaaaaaggtgtggagccgaaatttcagagggttaccgtaatcaattctaattaaaacgaatatgttagggaccaaattttcgcgcattttttttgcggtgggggtacagtaatataatttttttcaaatgaaaacccaaagtttcggaatactttttcacgctctttttaggtataattatgctacagaaatgtaaaaattattaataaaaaataactaataaattataataatttaaatttattgccctcagcaatttttcggcaaatgaaatatgcccccgtttcacattcacagcgtctctattttgaatgtgttggaggatcaatgatgagcagaatgggataagggtcaacgaaggggggggggggtgagggagagtgcagaaggggaaaaggattacaaaatcaattaataaaatgaagtaaaagtaaatatttattctcttcataattatgaaagtattttgatgaattatttttaattttcatttaaatttatttaaaattattttcctttttgattaaaagacaattcacttctaaacaaattgtcgcttccaaattgtcgctgccaaattgtcgcttccaaattgttcgcttccaaattgccagcaggatcatgccaccaaaaaaggtaaagtttcaaataatttttaaaaaattagttaaaaaaagtttttttaaaatgataattttagattttttttttcagaaattgtccgaagtcctgccaaagccggtgatggtcacacggagtgcggccaagcgtgcgacggagatgccaaaaaagcagatggccattcgctccggtggtccgccaaagcaccgtagggttaaaaacgcacagaatttaaattaatttcatttttaaattattttcataaagttaaaaataaaatttatatttaagccttatttccaccaccagtagcagcagctgtgcaattggatgttggattggagacaccacctccaccaccaccaccagcagcagcagcagcagcatcaacttttacaccgccgacaccaccaccatttcctactccatttcacaggcacttctcatttttaacaccgtcaccaccaccacctgcaacagttgatttggatcagattccacttccaccaacaccaccagcaacattttcattggatttttggctaccacccgcaccaccaccaccaccaccagcagcaacagttcatttggatatgaatcccacatcatcatcaaaggcggcagcagcagacgaaattgaacgtgaaaaaagaggaaaaagcggcgaggcaatcggtggagcagcacaggtcagatttggaatttatttttaaatttcaattcgattaaatttactttttttatttttaactttgtattacgaattataaatttgtttttttaaaattgtaatgaaattatagaagcgccagactgtgcgcgtaaagaagggtagtgtgccggcaaaggtagtgccgcgccaccctgagccaggctattttggcctcctgcgaggtcaaaagccgagaggtcactagtaaatgctactacatagactgggccggtgagtcttccccccccccactgccctccaactgttttgattaaaaaattttaaagaccagcgtggtcaggagagctggattctgtccacatgcaacgacgcattagaaattaccggcgaacatctcgaggattcggctgtggatgccgcatacgacgcggtgtacggcgagccggtcgctgaccatctagcgagaaaaatcgtaatgagacccaaataccacgatcgtgagttttttttttgtcgacaaatttttaaaataatttaaattgtgaaattcagtccggcgtcgaatggtcggagtcaatgctgcaccgatttgccgtcagcactttgctttccacacttgtgtcacaaaggaccaatttgataaggtgggttgggggtctgctgctgtttgcctttgtctctctcgctctttcttatatttttctggcattggttagcaggcatcgcttggtatttgcccccttaccaatgctcttttctgtaaagtggagagcataaggcaggcatctcctggtatttgcccccttttgtttttcatcttttatttatttttttttgtaacgaaagtctgttgttttcaaagaaaatcattctaaaacttttataaaattaaggcggagcgcctttacaaagaattacttgtcagggaggggctcatcgaggatcccccctcccacggggctcaataaattggaggaaaggcgccttggaagcaacgtgcccacagtggccataattgttaatccaatgcgtcgcaggcgagacgggacgttcagcaagattgcccaaaaaatgaaaacctgaaattaaaccagtattaaacatttgaaatttgaaatttcatttgaaaattttttatgattttattttaaaatatttaaaaatcacctgagtcatgaagatgaagagaaaaaagacaaaattcatcgagttgacgcagcccgtccctttgatggtcattccagccaccaactcggtgacattgaagttgctggtattgtcgcacggtttgctgaggagatggtcggtaaacgaccccaaatgggccacattaatgcactctaccggtttcgtataatcaaccggccggttgcatacgcaaccctcaatgaccatccaggtcaaattggtgggacgaacagaaatgggaatgatgctcattagggtaagggaatatgatcagttgtgctaaaaaaaaggaaaagggccaaatttgtacaaatgatggtgaagatgtggcctgtgggtattcgggaatgacta

SEQ ID NO: 18933 - DNA, 2501 bp, Heterodera glycines
tcacataatacggtcctttggtcgtccgccctaacaattacttttattattaccaaaggaattctcccgggctttgttcgtccctcaaaaatggcattcctaattaccacagtttcatttgtaattctcttgtcgtcggtgttgagtgcaaaaggtgatttcttctgctgatgaccacagttctgctgatgttgacgatatcgatggtccgcccttttacggtcgcattttccgcacttttcccttaggcgcgttttcggagaaaagtgcggttgttgtggggggggggtttaccatcgaatgggtcactggcgaagggttaagtgaaaaggaattactgaaaaggtgtcgccgacctcagctgactaatggctgtttgttttgtcccttgcctaggtacgccaactctaagctgatggtcattagcggcgttaggaacgaatggctcagaaaacggtgccgcagggagacaatgttcgccgagtgatgcaactgctgagttctgtgaacacttctaagtgcttgcttagacccgtcgaattcatttacttccacgacaaatggtggaacgccacacttaacaaattgacctcctttttattagcatttttttgtttaactttattgtaatttatttatgttcaaagcattcgatcatttggatgggctgatgagtgttttcattttatcccagcagccccattctccaaagttgcaacttcgtctccatggcattgtttcggaatggcctgcccgtccctcttttcccgaagcccttaacaaaattgaattccaaagcattctttctccagctaccatcatcggaatggtcgccgggtcgaactcggtgtccctcttgccaaagccgatcatcggaatgccggttcccttgatgaattggtctgaatagacccccccccctgttactgtgttctgcaattgccaattaccgtattcgacttcgcttcgtttccccatcttttcaaagttgtccttctcaatcgacgctgtttagagaattttttaaaaattaacttaccaaaaatcgttcggtcgataagctcaaaggtatcaccgccaaacattcactaaatagcagaaaaagtgggagagtgccgagtttgaacttcatcaaagcttcgcgacggaaactgaatgttttcattcgacaatttgtcctcaattttttaaagggtgaagtcacacataaatttacacgtcctttccctcggcacgggttcaatcgaccgtaaaaaaagcggacaaaaagggcggaaactgatgaatggacgagaggatgagcagaaaacagtgggcaatgaaaaaggcaattgccacgaaaggcattcattccgggatgattgattaacaattagcgtacataagacagaaaggcgagtcggtctttcatatccgagacaaattgattcagcgtcttattggggacggaaaattgaacactgagagattggacaacagaatttatttttggaaatattattatatactgtacattaagtaaccaaaaataattgattgaagagattactacagggttcgaattcgtttttgaatggcaaggacggcctagaaatttgaccctctcacttgaaaagttgaaagtatccttgaattcaagatgtacttgaaaatgagcattcgaaagaaaagaaattcaaaagtttacatttaattttaaataaattttattataacaaaatgctcgtcgccaattgtctaaaaatcgcaaaaacctgccttttttgatgtatatcattaacaaattacactctaatttcaaatttttcgtcgacggcgcctatcggcactgctggacccccctgtatcggcacatatgaccaagtttataaatgtccttgaatttaatggaattttccccttatgtccttggaaaccggtatacccgtccttggaaagggagtccgatccgaaccctggattactatcaattaacgtttgatgtaaggattaatttttactcacgaatcaacaataacttaacaaaatcctcggattttccataataagaggaacatggagggaagaggaacaaaaacagcagaaggggaagaggaacatgaaggaaagagtaacaagaggagaagaggaagggaagggaaagaggaaagggaagaagaaacgggaattttttcttgccctacaaaaaaaaaattatttatcatcaatgttttgaacccataatttcttaacagcaaattagggggaattttcggaaaaaaatttgtaaaaaagtctttcttctaaattttgattttttttttttgcgtggatcgtaatacatatttatgaggagggtattggtaaaaatttcagctcggttgggcatgaaaagttggcgaagtggctgaaaaattcttgaacccataattacttaacagactgtatatcagatttaaaaaatgttcctacatatatcatttgttggttgcacgataagcacaacagcggcactaattgta

SEQ ID NO: 18934 - DNA, 2582 bp, Heterodera glycines
aatttttatatttataaatttaatttatgtgaaaaatggcaaattcaattgattttgccagcacatttttcaaaataaattaataataaaattgattttttatttttattaaaaaaagtgacaaaaaaagtaatgtgattttgacatacatgtgaaaaagtaaaattgttaagtagtaagaatattttaaaaatatatttttaaatattaaaaaaacttgaaaaaagaaaaaaaaaattaaaatcagtaagcgttggaataattaaaggacagttagtcctctgtctatggagacatatccttgtaaattttgattctattctgatcacttttttttaaattatgggcactaaaaccaaaaaaataattaaaaaatttaaaaaaattaattcaaaaaattactttctctctttaatatccattcgtaagccataaaagattgtttaagataaaataaatattttaaaaataaacgaattttttaattatatttatcaattttagaaactatttttatttgcgtaaatatgtaatcattaaatataatttggaaaataaacagaatttttaaattaaattttaaagaaaaaataaataaaaagcttatttaatcaaaatataaattttttttatttattaaaaaattaaaataaatattaaatgttttaattcaaattttataataaaccaccacacatttgttccattgttctttcaattttgccatttttggttgaaaaaaaatgttgacgtgaattataaacaaattccgccgctaattaactaattaccgtttaattaggcggcaggcgcgcgccacaattagtgtgcccaatcgacacaaattttcgcgcacagtcaattagcgcccacaattaaaaatttcattaattaagcgggacaaaatttcaatttttcatcgaccaaaaatcgtccgtcctctgtatgtgttctataaatcttactcatcaccaccgcaaaacaatgggcgtgggtgggggatgagccaacaaattagcagaaaatccatccttaaaagatgggacgggacgaacggacggttggatcattagcatcatcattaacgattcaattcaacgcctcattaatgtcggccggtcattagtcactaattgacgacgggcggctgattcagcagacaaagaaaaacaaaaaatgactgcagcaacaaatagaactgtgtgtgcctatacaaatagggtgtagatcaaaaaggagagagtttagaggtgttttttatgtcacaacagcagcagaaaggctgagcgaaaagggagtgtttttttaatcgaaaaattaattaattagccgtaattttattataaaatttattgtcttttactttggtagcatgcatttttacacgacacggcaattaatggaggggggaagtggctatgaaaaaatgtacaaaaattccaaaatattctctccaattcgttaaacaagaaattttttgttgccgggataaagaaaataaaaaacaattttaaaaaacaaaaaataggtgaactaaaaaactttttattgaaaataattaatttaaattttatgttatgttaatttaaaattatttcattacttttgttatttatttttcaaaaaaattttacggcaattttatgcgatgaacacaacaaatctatgacctccattttacattaattctttttaaagtgtataatagactgatccagattaaaaattaaaaaagattggcacttaatccgtgacttggatttcagagtgccacggtctatggactgtttaatagttgaacttgctaaattataacccattatggcatgtctgattttatatcaatttaattttgtaaaagggcatacaaattttgaaattgttacaaaaataaaatttacatttcaaattttaacattttgcttttcgcgagtgtcccatttttgtaatcacagtaattggatggaccattgttccaaattacagtcattatagtacgcaaaagcattggcgacacgatatccaaaatccattaacatttttttaaacaataatacgcccaatcttggcaacacaataccccaaattcttttacaaatcctttcaatcaattaattcatttaaattttttattgtatgttttttgttaatttctcataaaaagtgattgacctcagcatgcgtactgtagcaacaaataccgtatagccgcgccgcgccgtcagacactttgatttttctaccataccgtatctttaaacagccaaacttctctcgtctaccgtacctgcctgcgtctaccgtaataaatcgaattttaaaattaattttttgtttttcgacgccagttaacccaccaattctctgctaacactcgctgaacccaggccaaacatggccattgtcgtggccacgcttgacgctctgcgctccgccgcttcggctggcggccgctcgttaggcttgtcattgcccatggcattgctgcttctcacgctccttttttggcattggcaccgcgggcgccgggctcatcggcacacattccctccggggccaacgccactgccgttgatcgggaa

SEQ ID NO: 18935 - DNA, 1432 bp, Heterodera glycines
tcctcgagacctggatccaggcctggacctggattttttgaaatttgttttaaaagcaaacaaatggcttgaaaaaatcaattatttgctagaagcatctaaaaatatctaattaataataataatgtgtttttaaatttatttaatctgtttttgaaaacttgaaaaaacatcggtcacttgaaaaaataaattctaaaatttcgtctaggaaaatccaggttttttcctgttttgcctggacctggacctggatttttttcacatttgacctggacctggacaaaaatccaggtccaggaaaaatccagattgccgaaaaatggcctggacctggatccaggaaaaatccaggcctggatccaggtccaggtcgagctctactgatcacaaaaaacagtaaacaactaaaggacaaaatcatttcataatatattgctcacaatcagtagattttgtcgtatgaaattttgaattgtgctaattttaattttacacaattttcagcaaacatatatggcaaataataaaatttatcatagcaaaaagcatacattgttcgtatcatacgataaccacgaggcttttctatagcaaatgcagctcacttgaaactttccaaaaaatcaaaaccgaaggaagtcgaaaagattcgtcccattttcagcatggccgcacttctcttttctcctcctccaattgttcttccgttgcggctgcccttctcccctccacctcgtcttcttcttcttcctctgctgctgctggtcccaatgctttgctccgcgacgcgcattttgtggacagcggacgcaccggcgaatgcgcacagtgcgcacccatcacattttacgcgtcccatcacattttacgcgtcccataacactttacgcgtcccatcacattttacgcgtcccatcacattttacgcgtcccataacactttacgcgtcccatcacattttacgcgtcccatgacattttgtgtccatggtagggatggcattccgaggccccaaaaattttcggaaatcggaattccgtgccatccctggtctcatggtattatagttgtcctaataactaagagaaaaactttttttgtcaggtattcagtagtttttaattaaaaatttcgttgttaaacctaaggttatcatgacaacttatacacaggcaactcgaacaatggcttattgttagaacgccacactcagcattcaaatgatcacttatttatttgcctatgcaaaatattgtgtgccttccctaattactaattaattaactaattagtgtctcctttcatcaaacattattttgttgtgcaattattacattccgaaaatgagctgttttatcgccaaaatctcaaaaaaaaaaactgttataaataaacaaaatttcgggtaggtgcacgcgatgacaatga

SEQ ID NO: 18936 - DNA, 3385 bp, Heterodera glycines
atttatcgggcgtattacgtttccctcgcaaggccaaaaaaatgtttttttaaacagaaattttcggaaaaaactttgaaaattttatataaattaatcttcagcgctttttgaaaaaaattaataataataagaaattttaaaatattttttttttctcgaaattttcttataaaaatttttaattttttttttgaatttctgtttgaatttttttagtttttcggggggggggggagggacggatggggaggagctgctcacttatttataatcccatagattcccttaatttttgtgttgctatggaataaccgccagcggtacttatggaaaagtgacctctgcctttggagtactgtttcgtctcgacgatttacctcaagattttttctgtttcctttttgttccctacctgttgctgttgttgctgctgtactgctccatcttgatggtgttgctcggccgccagtagtgatggcaatccacggaacatcagccgaccgtctggctccatgctgaacaacctgtgcccgtccgcgcccggaccggcatcatcctgctcgttgttctcctgctgatcatgccgctggtgctgctgatcaccatcaacccgatctgttgctgctgcagcaactgaactgatttgaaagcgaacagttccgtgcgctccatcgtccatgtcgacggcgctgaaccgggccaacagtgtgccgggcggactgagtcggccgagcgcaatcactcgtggcaacggctccacaaattgggggaaattgtcgttgacgtccagaatgtgcaccgtcacatgggtctcggcacttcgattcttggccgggtcgaaagcctacagtaaaattgtacttacagtatactatgttgcaaggggcgaaaattcaactattttttgggcgtactgttcatccatctgctgttgtacttttctttctatctgatcagtattgatctgtcctatcgtacccacgaagattagttagatggaatgtttactctactcctttttcccatttactccgattctgtgtggggtcgaacgcctacagtaaaacgataggtagtcattgtaaccccggtgatcagttacagtaatcatgggaagggatactgtaccccctttttccatttaaaccagtcacttacaaattagtaccaaaatgtatacgatacacacttaccataacccggaattggtattgtgcctgctcctcccgatcaatttccgcaaatgcgatcagttcaccggtgtcacggcgcacaaagaacggcaactgctgctgctgctgaggctgctcactgcttgctgggatgatgctgaactcgacgcccccgggcattccgtgggccaacggctgtggccggagggacagcagagcaccgctgttaccgtaacgaccctataacgttgagaaaagggtcgatactgtagctccactcttatgtgttaaagaattatgttagcctaagcttgatcagaaaattgagtttgatggtacaatgattgtttttgtgtgattttagtcaaaaaatttaaatttaattgcctctggcaacatggcccggtactgatcggacgcaaagtgcacttcgttttgttgctgttgttgatcaacaccaacaaccggtgctcggcttctgctgctggacgacgaagactgatcagactgatcaacagaagatgactgatcactgatgttcgtcgatttggcgttggaggaatgatcagcagaagcagcagttctgctggtggtgctactgcttgttgtagacggaggcgttgaagagaatacgttagccactgttgttgttgctcttgtcgacatcgtactgctgaatcggttcggctgttgtgacgatgtagatactgtagttggtgatactgtagttgcagttttacgacgtgtcgcaaatgttgaacgtgagcttgtgactggtgttgatcgtggagatgaagctgctgctgctggcttaagcgaaccaatttttgtctctgttggggcaactgttcgactcgcctaaaaagaaaaagttaaagataccgtacccgaaatagacattatcggaaaatatatatggtatccaaaatgtacaaaaaataaaaatttatgggtgaggaaataacgtatacgaaatatacaaaaaggcgttacggagtgagcaaataccgtatcaaaaatgtaccaaaatagtagatacgataaaaataccgtatctgaattacaaaaaataattacggttccctaaattacaataaatacacgttttttataatttttgcaaccataaatctttaaacttcaccaaacttagtgaggataattatagctaatgcttgctaacggcacccattgtctatgtttaaaaaatgatttttgattttcaatttttaaaccaattccttggcattccgtccacttttgggcctcacctgatcagaactttcggcaatttcaatacccgatggggttgcgagctgttgttgatggtgttttttgtggccaatggtagccgcctttggaacactttcatcaccaccaccgacaccggcaccggtgccaacgctgccggattttggcggtaaattcaaatcgactaccacaaccgcgtcggcccagtggccgtccagggcggtcaaatgggcacggaattcggctcgttgccggccgaacaattggtcgggtacttcgcgcaagtacagctcgccactctgcaatgaattggcgtcgagattaaatatcactgatcagtccactggggtagaacatgattaagaaataaagcgaaatccaacaaatcccgaatattcccgataaaattcaggtcactctgatcaatgctaaccaaaacagaaaatcccaaccaatcccgtgagcagtggcgacaattcgaaatcatccttgatcaggggatccaacaaaaaattaaaattcagcaaaatttccttaaaaatttcgcgtgtggtgaggtcttgcccccccccccccctgggaccgtccctgtcagccacttctttttcttcttttttttcggccagcaaatttgattaactttttaattagtgatttaaaatggcatttcccaccttttggtcaagctgaaaccatgtgcggaactgtggcggttcaatgaccacactgtccaacagttggccgtccccgcgcgtttcgagctttccgatcagtgactgtttggttggttccgacactatcctggacagacaataatgattgatccattttgaagagatcagaattaaaataaatttgtggcaattacttttaaaagaaaattttctagaaagaatttttcaacaaattttccagcgattatttagaaattttatgatgaaatactaaattttttcaaa

SEQ ID NO: 18937 - DNA, 1044 bp, Heterodera glycines
tgctacatttcttttataaaattctctttagaaaatattgatattttttaaatcaaaaattttcttatgaaaaaaaaatttgggggaagaatttttgagaaaatttccaattcttagtggtgtgtttttaaaaattttcggtcgattcttaggggtgtattttccgttttattgcatttttgttaacaaattttccaaaaaatggcgaaatatgcataaatatgtacaaaaagccaaaatatgcaaatatgtaccaaaatctcgatatgcaaaaatatgcaaataaaagtcccgatttttatacgcaaacacaaaaaagaaagtgtttttcccactatttagagcatggagaagccaggaaaaaaatatgcattcgcataaaattcccatccctattaatcaattaagtgaaagttgtaaatttttttattaatgattaaacgaatcaataaagataataatcgaattcttttattcgtattcattttaaattacttaaatgatttaatatcatttattaaaaagtggtgaaatgataaataatctatttaaattacctatccaagagcaaaattcaaaaaccaaaaaattaacatatttagaaccattttttgtggaattgttttttcaacaaaaaatttttttataaagtaaatagttgtttaattttaaaccttttttaaatttaatattcctttgaggacccgacttttaggctttattaatcgtataatttacaaaattgagcgcaacaattgaagaacaatcagcaatgtatcatgataagtagagctcataattttgaaatggccagaaccgggacttggaaaatgaaccgggacgggacccgtgacctggactcccgttttaaacgcgactcccggtcccagtttttgggccgggatccccccgggaccaggactttttcaaaatttttgaaattttgattataaattttaaattgcttcaacttctataatgtttaaacatagtttaatttaaatcaatttgcacttttacaatggttttttttattgaaaatca

SEQ ID NO: 18938 - DNA, 1483 bp, Heterodera glycines
taaaacatttcgccaaaataattattaaattttttcaaatttgggcttgtttcactggtgaaatttagtcctgtttttacggtccaaatggaccgggacgggacccgggaccgggactcccgttttaaacgggactcccgtcccggtggcttgtccaaaaaaacgggaccgggaccgtgagtcccgttttaaacgggactcccgtcccggtggcttgtccaaaaaaacgggaccgggaccgggactcccgttttaaacgggactcccgtcccggtggcttgtccaaaaaaacgggaccgggaccgggagtcccggcaaaatcccggtgggatcccggtcccgtccgggctctaatgataagtaattgaaagcaaaatattagtgaattttgtgaaaaataatgcttataaaaataaaaatttataaataatggagttaaacaagaaatattttcatacaaatcgtcaaaaagttgtttaaaaactttcagaaataagatttattctccttcatacattgaatcaacaaaaataaatattttatatttaaaaaagaatacaattaaaaaaaacgtgaaaataataaattaatctaaatgctgatattttttattgtagaatcttcattgatgtaaattattaaattaaaagcaatattacaaaacaaataagcaatgaaattaaaaaacctttaatacaaataaacggctaagaaatagatgatttttatattaattttggtatatatattaaaattaagatttttcgaataaacattggcttcaaaaaaacagaaaaaaatatattcaacaaaaaatattaaaaataaaaaaagcatgttcaaaataagaaaaagttaattaagtataaaaagtaaaatgaattttaatgaatagttaaatttgtagactcgtttatgagcctttgtgagtaacaaaatcaaaataataacataattactgaaaccttgtaaaaaaacttataaaacaaaaatgtatgactgaaaatatatataaatttcttaatatatctattctcaatttaaaagaaaattttattatcaaatgagacaaaatgcatcattaaacttataaaccaagataataatttttgactaaaatgaaactaatttcgataaaatgaaaaactcaagttccccaaaagagaccaataattattcaatagaaattagaactatgttttaagaactttgctattaatttataaattaaattcatcgcatattaattcataatttctacattgtaaacaaaaataaacaaaatattattttaataattgattaaatttcatatgataacaaaaattaatttaaaaatttttcatttttaaatgaatgataaaggaaaaagccattttggctgttgattaaaaagacataattatattttggttagctttcaatgtatttataattttaaaagacatttttttgaattttatcgtgtttaactttactttta

SEQ ID NO: 18939 - DNA, 2354 bp, Heterodera glycines
  unsure (1)..(2354): unsure at all n locations
ccttgaacccgtgcttccaatccttgtccccgttgtccaccaccaccaaacgttcgcccgggcgcagtgtgcaatcagcgccgatgtattcatgtgtcacgatgtgcaaaattgatggaataactacaaaacaaactatgtacatagttaatcatatttaattatttttaccaaacgaattttgcaacgattgttgtacagtaagggtggcacggtacttctgctgctgctgatccggtacggtaggcaaacgtcgcggcaaacgacgtgcaaaaaatgtggcggcggagggcgacgagctccgctgcacgcactggtcaaagctgtccgcatgtgttcgtgcggaacgcaattgcttcatccctaatgaaaatttaaaaaataataatttaaaaaattaaattttaatgaatttcaaatgatttggtatgctttaagtctaacaaaattttcgatagataatcaaagaaaaaagaacaaatgttcgagtttcagggcatatctgtggtatatcccctcataaatcacccctctcctctgactacaggccttgcccggctacagtagcaaggcgatgaacttactgtaattggggtacacaccggcaatgccatgctgctgccggtggtgatcagctgaggacggtggttcagaacagtccaatgagaatgatttcattttttcagtcaattttatgcgaacgcttctgctgctgctggcggtgtttggtgcacttgaaaacagacctaaaaaacgaaaaaagaatattatttttctaatatgtgtaatatagaagttagtgaaaaacagtttaaaaacctttcatttaaaaaaaatatattaaaattattataaaatttcttttcccaaaatttttagaattaggaaaatattttagaacatatgcaattaaaatgaatattttgggcatgaacagcaattatttttattattatcttttttggaatctcattaaattattttaggaaactatgctaataaaatgattatttttggtcaagaacattaaatatttttagtttttatagatttttttttcatttgagtattccaacagccaatttttgccgtttgaagcgtaaaatctattgattgcaaataaaagtatttgccaattttaatttgggcaaacattctcaaagatttttatgcccatttgccgatgccaccattatttgtatgctaagaaacggattagagtgtgctcatcagtggaagaagcggacttgaaaaaacgcgaggcatacatttccggttattattataattatttttgaaattaaaaaaaaaattaaaattgcattgcaaaacaaaagctgtacattttgttttctcttttaaaaaatttaataaaatatttctttattgaaaagttattttaaaaaatttaatttaatccaaatttttgagtaaaaaccaaatttttataaatttaaagcattagaaaatgattaatttccccccttaaatattcaaagaaaaattaattaaaaagttaatctaaaataagagaaacttaaactattttcaggggaacatattgagaagaaaaatgacgtaaaaattttgcaggtgattttatttataaatgaaatgtcaaattcccaaaaaaagaaacaacgataaatgccaaatcttaatttaaatatttaataaaagtgaccctttttcagctgcttctcagttgaatattttatcaaaaaaaaacgttatacaaaaattacatttgtgataaaaatagaaaccttttaaaaaattaaaaaaagatcaaaaaattatccgataaaaatgtttacattaatttcctcaaaacagaaattaaattgtcgaattttttaatgaaaaatataatcaataaaaatattttaataaaaaataatttgagtaaagattcttattaaataattgcttctaattgaaaaagggattaaaatgaattttccttaataattttcaatattaagttattaataaaaaatttacaaaaaataaattttttttattaaaattaattttgctagcaaattaaaccaaacaatttaaacttttcgggacatttacatttatagtatttccctcttcccacgggcaaatttaaaattctgacaaatttaaacaaatttcgcaccatttgtcccattaaatttgctagcgctgaattcgaacaaatgcaattanacccctaattgtcgcgtgagtgaaattaaactcaaggtaattagtttccacaaaatttcattttttaaattggaaaattaagaaaaattaaaagaaattntataaacgaatttatgactaattgtgtaattgngtgatgaatttttatgaaaaaa

SEQ ID NO: 18940 - DNA, 1763 bp, Heterodera glycines
  unsure (1)..(1763): unsure at all n locations
ctaaaaatcgaaaaagaaaagcaataaattntggtttttccttccagcattcacagacccgtctccgatttcgtccacattaaatagaatttgattccactgatcaaaacattcccagccaatcgcttcctcttcccattttgcccatttgctcgcatcacgcacaattggacaacggaccaacacaaaacagtcgtcacttttgtcagtttctttaaatgccaattgttcacgggtcaattccgttggtcaacacaaatggcacaacagggtcagcaaaagacgaaggaataaaacaaatgacgacaatgaaattgacgggagatgaagccgaggcaaaagcctaaaaatgtggaaaaattggttaagaaatatgaaaatgaatgacacttttcggttgggagggggacatgaaaaaccaaaaggtttacaacttttatggttgaagtgaccaattctgttagagccaaaaaaaacaacgaaaaaaagccaaaaaaaaaaaatcattgaaaatcaccgctttgaaggcttcaatcttcgacgccaaattctcgtcagccatgtccaacgtgcagatcaacacctttggcacagcgttttgaagtggagtgaaaagccacttaaccaccgcttgtccatccgatgtgatggcactgtcatcaaatggaaattcggcgaaaatgtcgtcaaaaatgaaagagacaatgcgaagtgatggacattcgttgagaaatgatgggacgaatttatgcaaagggctgaaaacattctcaaacaaaaacatcccacaaatgtttttcgcgatcattggccaaatgttgcgcagaatgaaggccaaaattcggtgtttggtcgtgcagatggccaaattaattggacagaatgaggcgaaaagtggacaaaaacggtggagaaaagcgatggaattgttatcgatgtatctgaaaaagaaatgatactaatttatgtatatttgacaataaataatttatccattttactctattgaaatggctttaaatccgacgactttctttggcaccggtttttgcgcaattggcaatggatttcgatagcaattgacaatttccatttcgttggtgccattctccctgattttgcttccaattcgaattattccgaatgtccatttgcgcgtcttcaagtgttcatccacgtagaagttaaaacggtggctgatcagcgcaattccaaggccaagttgagaaggctcaagcaaatcgaacaccgaaagccaaccgtcgccggagatgaaactgaaaaaatggaaaaacaaaattgaaaattgaaaattagcatttttaattttacattgattttgccattttttcctctgcttcttttcggttgtcagacattttgttggtggcaaattattaagacagttttcggcagatttaaatttgcttattagaaaaacagaaaaagaactttgtaaaaccaatttttcctttaaaacaagaaaaaccgagaaaagtaaggaaatattttgcgtaaacaaaacggaaagaaaaaaatgagcgaatgaaaggaaatgggagaggagagaaggcttttatagcaatgcgttttgaaatacgactgattataaaaatcgtgaaaaattgtaacaacaaaaattagtataaaagtggttgctcctctgccacttttcgtcattattcattctccattttcgcctcttcaaatttttcctcctgacaatcccttcaaaaaatgactttgtacgttttgtgcgtttc

SEQ ID NO: 18941 - DNA, 863 bp, Heterodera glycines
tcaaaaaaatccgaaaaagaaaatgtaaaaacagcataattttcaaaaaattttgcaaagctgataactatataataaaaatagaattgaaaagagatgaaggaattaaatgatgaaattaaagagagagaaaaggaagaaaaagacgacagaaagttggcttacaaattagcaaaggtaaaggaaaaaaataacggacaaaaaaatgtgcaaaaaaagagaaacgaaattttaaacggacgaccaacggacagaaaagtgaataaaaacgacaaaaatcatcaaatcaaaatgcaattgaaattgccaacctttgggaagaatttgaggaaaaaatggaaaaattgtatgaaaaaacgaaagaaaatgccaaggaagaaaaggctcaaaaaacgcatttctgcataaaaaattttcgattcagatgtcactatcggtcactaaaaatcactattttggcgcttcgtcactaaaatagttaaaattcactattttggcattttgtcactattttttcactatttcgacttttttggaaaatttctcaataaaaaaatgcaataaaaacgaaaaatacaccccctaagaatcgacctaaatttttttaaaaatgcaccccctaagaattggaaaattttctagaaaattcttctcacaaaatttttttttcttgacaaaatttttgatttaaaaaatgtcaatatatgctaagaaaatattagaaaggaaatgtatctcatttgcaactgcaatcagtgaataaagattttttgctcattttttggctgaaaattatgtcactattcgtcacaatttcgcactattggctactatttggatatactatagtcaaccccccggaa

SEQ ID NO: 18942 - DNA, 1191 bp, Heterodera glycines
  unsure (1)..(1191): unsure at all n locations
ttccaattttccatttttattggggctttttcccacccacacctagcataaattatggcatggattgccaactgcgatactataatccacaaaacttttgcatagtaaaattaaaaatagcattaataaatgaattcctgagacaaataaattttaattaattcaattatattttattaaatacatattagctagcagcaaggggattttgctttagagaagagagtattttatactcattaaccaaatttttggaaaaatttataaattttacaaaataaatatttgtatctgtttaaggataattaaagaattccgtcgtatttagtttataacatttctaatttgtaagctaaaaatgtaaaaattaaatattaaatgaaaaaccgctagttttgcaacattgtataaaatgtttaaagacaccttttaaatatattataatggaattttattttattattttttgatgcaaaaagcaagcatataaaatggcactagttccggattggcacgcgcattgatttattctatgagtgggtgttcacaaaatcaaatactcatattgtttatcgttgttggaaaatattcgttgttttttccggaaatttaattaattttttaattgttttagcattaaacaagtcaataggctccggtttcaaaatgatatcgtcaaaccctataaatataaagaagcagccgaaaaaattggaaagtgtaaaaaaaaagtttatttattttgtattttcttttcatgtttttcatggatcggattttaatattttatcttttttgttagatttatgagagaaggtcaaaaaacaagtttgcttcatccaattttcaaatatcagcgagtcataaatacctaaaataccattttggaaaatatgaaaatttatttatttttgttatttcattggataatcattaatcatgttaatttgagtttttgagaatttgcttttttggatcgaaaaggtcgtctccttctccttgttgtccttcgtcttcttcctcagcatccgatagaaaaatttttttttggagtttggattagtggccaaattactaattgcttttttctaaatgaaactttcctaattttatagggttttcaggaatagaaccanctgancatcgggctcctagaaagggccaatttaaccgtcgatgagctcaacactg

SEQ ID NO: 18943 - DNA, 2113 bp, Heterodera glycines
  unsure (1)..(2113): unsure at all n locations
gtgtggtattagtgactttttgaccctttatttgattgtttgaatttgtttggcataatgtttgatttgaattgacccaaattgtttcgtttttcttcagttgtggttggtggattagttggtcgttggggataatttttaggcgttttgttgattggtcgtcgattgatttttgttttaatttattttgttgttgacttattttaatttaatttggattgtcttttaattatttgttgcataaatttattttgtttggtattggatttttaaagcaggttttgccatttcatagactatttgtgcaagatttagaagtgtggcaaagaaacccccgacaaatttcttcttcttttccaacatggcgctcctggtaacaaaggttagctcagtggcggacggctttatttttcttcagtgaatttctcattttaaaaaaagcgactacctaatttggaaaaaccctcgtgttgggtttatcgactgttttaataccctcgtgttgggttcgtcaactgctcgtcaaattttaaaaccctcgtgttgggtttatcgactttttcaataccctcgtgttgggttcgtcaactgatcgtcaaattttaataccctcgtgttgggttcgtcaactgctcgtcaaattttaataccctcgtgttgggtttttcttcatccgccttatttcgtccacgtttacaaattcgtctaaagcactcgtgttgtgctcgccaaaaaatcttttataaaaagctcgtgttgctttatacatttggattttttgttttatctcgtgttgataagacaaaattatgcggacttcatcgacaaatttgcatccgttgaggtacgaatcttatgaggtgctcaaaaaacatgctaacgacattgacaaccgattgcattattcacttcaacggctcgacaattttactcggctcaactttttggtggaagtcgaacggaaaggaaaaacgaaaatgcaggaaggaaatgaggaggacgcatacatactttacagcagagccatgaccatttatcttatgatgagtgagtcaattgacgacaaattcaaacgaagctgcggaggtcaacttttttatgaaacttcacagcgtttgtgtgttgcttttgacaaggttgcagtgagtttacaacagcggtttatggagggacaaggcgatgagcctgaattttgtgatccagtggaactgcgttgggtcgaaatagttgaaaaaccgattcccgaaaatttgcactgtagtaaggactccaattcgtcggatgaccaggacaaaattcggtccctttcgccggcaaacgcaacagaacttgtggcaaccgaaaaattttcaaccaaaattaaggcggacaaagaaaaccacattttgcacataaaggacaagacggacaggggcattgggatgattagacatgccgtgaccaataacctggccacagttggacagtcaggcaccagcgagttcatctccaaattgttcgactcgtccatctcatcaaagcagaatcaggatttagttactcaatctctgcacctcaatgaggaagcacgcaactttttggagctggataggctgaaaaagtccgaaaaaatggagaaaccggtaaaagtgagcaaagaaaataagaaaggagaggaaaagtcaaaggaagtgaacaatgaggaaaatgagtacaacgaattctgcaagtcaacgactaaaaacattgacgagccattagtccatgtgcaattttttgctgaatttgagagctccttcaagtccattttttacgtgccggaaacgttgaccacagacgaattccaaaatcaaaatttggcattttcatcagggacgatgaaaaattcgagggaggngaagaaattggcagcagtgagacggacaatannaatggcctaatgagaatttggcgattagaanagttcagcgtgaaaaatggacgaatcttattttcagtggacagtgcaaagtggctcanaacgtggatcttcatcaaaatttccgataaatttctttggacaacacattaaatttttcgagacacaaatgccacatttttaaagcgtcacgtcactagctgaaaccttggaccc

SEQ ID NO: 18944 - DNA, 3452 bp, Heterodera glycines
  unsure (1)..(3452): unsure at all n locations
aaatgtagcgcagcgacttcagcaacgccaagtaggtgttggaactgatgtttgagggctgaaaaacagtaaaaaaaatttgttagtttttaaggggcaattaggcattccatgattaattggttaaaatttcgaaaaaacaattaatgtagtaatttccgttcactttgatgcacttttcccattgcttacctagaattgccaatagcttttggacattgttgaggaattcaaagttggcgcccacaacttggcggagtttgtccgggtgttggcgcatgttttcgatgacccggttgaagagtatgcagatcgattccaggcaccgcttgtcgtcgacatacacgagccgttgggtgaggtcgggaaggcctgccaaaagggcattttaaacacaataaaaaaaattaaaattttattaggaacgtacaatctttgactagttgaaattcagtttgggtgacgtgaatggcgcaattcgcggcaatggcaaaagccaaacgttgagaaggcaatgaaaaaaagtcgacgtgcgaaatggtagacgcaatgccgccggacaacagaatgtttttggcattgcgacgcgacatcacttccaaggcgatcagcgactgttcctttattaaatgggggacagatttggcggttaaattcaaaatatgtattaaaaaagtaccgcaacgtcaatgtattcaatgcgcttcagcttttgaagcagcagcggaatggcctccgtaatgacgggcaaagcgcgcgggagctgaacaaattaggcaatgaaatacaataaatggtaattaaagagagatttagatcaattaatcagacataatataacaaaaatagtgctctgctcgtaagtgtcttggttcttcaacgggcattataaaataacaaaaaaatactgaattttctacagatgtctgattttggaggtctgcaaaactttgatcagaaaataccagattttgggtgaacatttgagaaatttcgaatttaaatttatgtcgtaatttattaccgcctcctgcatgttggtgatgcaacgagcggctgtcagcatctgttgaaaaaatgcatcaaataaaaaatatgaaacaaaaaaaacaattaccaattcaaaattttggtccttttgcaacagtgcgcacagcgactgcactatttccacaattggcaaattgggaagactgtcctacaacaaaaaaagtttgggtcttttactgatttgctgggtgggagtggggtacactgtttgcccgcgaatcaaaaacattttcgacgaaaacgttatgaaaaggacggcaatcatcaagaattggtgtcccgacgaaaacaatgttaaaaatttgagacttagaaaatgcgctgatcacgaatctgagctcagattatgcttgaaccttaattttacctctgattattcatcaattgtcataaaaaataaatcgcagccaggcggactcgaaccccagacccctgtctcatataagccctagggtttcaaaaagtcgtaaaaaattgaaaacttgacttttccatacattaaatagctcattcgaaactctttttatgctctacacatctgtgtatgaattttatgccagactatttnntcttaaatttgaaaaaatcaagtagttgatgaaaaatcctagataaaaatcaatgatttcaaaaataagagttcagattcatgataagcgcatttttaaagccagaaaaaatacctgtcaaattttaaacattttttttcgtcgagacaccattgatgattgccaaaaatatctgcctccgttttattagtgtgtctgtctgtcccacctcattgccaagcagcaaaatgtcagccaactctgaagccgcttcggattggcgaatttcattgctcgacttcagcccttcgacgatggaaagcattgcaggagctgaaaagggaaaatggaaagtgaggagaatcagcaattcaaaagaaacaactctacatttacaacaaaaagtgcaagtagtaaaaatgacgcaagtaacggataaataaatgggaaagttgctttcgaatgacaaatttccattgacaatgaaaaaggattcagaaaaattgaccataggcaaattagcggggatggggaacagaaaaacgggtcatgggaatggcaaatggaagaaattatttggtcacgggtcgtcttttaatggaaaaaagttaaacaatgtgatacggacacagacttaggaaaaaggataatttacaaaatatagaaaaagaataaaatttttcaaaatttaaaggggggcgggctttcgatttgaaaaatcattttgtatgatgacatcaactcgattgttcggggattttgggttgctgaccatgaatttgacatcagttatcgaaattcgggaatttcatcttgttagggttcgggttaagaattagtgtcgaaattggtgtcaaagatcccgaaaaccaatacatacatgtacaaggggtgtctcagcccaagggccatacgacggacggttgggacagggggatgtctcgggaccgatttttcatacgaaggtccaaatttttctccggcgacgactttttttttctattcagaccatttttttctgccgactttttttttgcttttcaaaaacctttttttcggcgcgctttttccaaaaaaaatttcggtatcaggtgggccggcgatgccgataggcgccgccggggaaatttttgaaaattcgagtgccaatttgtcaagattttcaccaaaaactttcaaagtttgcgattttttggcaagtcgacgactttttttgttaaaaaaacgtttttttgcggcgtaatttttgaaaactttttgggggcggggggggggggggggggtggtcgagaacccccttgtacatcatgtatgaaccaatacgaacaaatttccatgatttgttacgacaaaataaaaccctgggactcacttgacacgtgctggtggtgtccatgcgtgtgcgagaaatggaaggtgggcattgctgtggcgtcgatgagtccggcagctccgcccgcaatgttcaggtcgagcgcagcggtagtcgttgtgccaccgcttccgccactgcccccgccggtggtcgagccgagcatttgctgcatccgcggcacaattgtggacagaaaggcgttggcacgctgagccctaaaccaaaggaaagcgttttgtaagtccattcagcgcaaaaagtgaaacgttcccataaatgaaaaggattttgtttaaatagtataataggcgtaaaaaaacctggcgtcctgttgcacactcgacgaactctgaggctgctgatttgtgtggtggtgcggtcttcctgacgaactgaaaacagattgtaaaagcaaactccaatccaatttatacgcccccaagtttatcggcatttttccctnattttccatttgttca

SEQ ID NO: 18945 - DNA, 3500 bp, Heterodera glycines
  unsure (1)..(3500): unsure at all n locations
tcgctgctgctgctgacgcccaatgggcatntttgccaccttctaaatttaaagcgatttgttgaaattaatagataattcattagggaggaagcgggaaacacctgctgctggggaaatctggtgtaatgctaaatatttggggacttttaataaatgtaaatcccatccctaatcatttcttatgtaattttcccaaaaattgaaaatccgagacttttgtcgagtcgagatgagattcttgaacatagctattttcctcccattccgtcactgtggctataaaaggttagttaacttccccacttggacagactcaagaagtggatgactctcggactcgatgactcatggattctcggatctcagaccccttccgcactcatccttttcctacttttaattcccgacttaattttaaataaatattgaataatttgaagtgattttgggattgggtcggaggctgattgggagctcaaaccggagtgattaaaaccccggaaaacttccaaacaatttgagaacggaacagtgcagcagaaagagtgaattaaaaacaaacaaagaaaacccttttaagaagccgcttttcctaggccttttaaaaagcttcggtcgataaaaaagtaaagaaaatattttaaaaagacaaaagttaaatggaaataaaacaaaagaaaataaagtgaccgatccgacccaccgatgagaacaaaaaggggcactgattctgacaaaacattcgttcatttgtacaaaacaaaacaaaaaaaatgcaaatgaatttttttgtctgacggcggccaatcacagacacaaatttccaattgcaatggatgagaatgattaacacacaaacagcaagccataaagctcaccagtagcagcagaaaagtatcccccccatatccattcatattcataatgtacatttatttatcgccggcgggggggggggattattgatgaagccaaaggggggggggggggagggaacgggggacgacgaaggacgagtaaactccgtaaaaaaggctcttttcattgaacgcccacaggtgcgaaaaaaaaattcagtttcattgtgtgaaattgaaagcattatggggaagtacacattcccattgtgccagagaatgtgtggaaaatttgccattcaccgttttactgtaaaatgcacctgtccaatcgatcgagaaatattgcaacaccaaccgaagcacaaaaaatgagagaaatgagaaagacacaaaacacaacgccagaagagaggccccaataaaaaagaacgaatttctatcggattaaagcataaaattcaccccccccctatttaaatgccgatcagtgccggtttatgacaatcatcaagttcaacatccgcccgactgatcacttccgtgatcagttaaagaaaacatggatcaaactcaccattttgtgccttggcattccgccgtttctgttgttgtttccgtgtgctgttgtcggtgttgccgctgtcgctgaacggcatggcatggtcgtgccgttggcgatggtacacgcggccgtcgctccgacgccacaagacgcggtaggggcacgtgttgccaaagcgggcacagcgcaagtaggagctgctctggcgacgcatggtcagcttcagcgagtgctcacggcacagtgccaaaatggcacgctttccgtacacgccgctggcgagcacacgccattcttcgcggcacgagttgcggacatttacagtggtaggtggttgagataaagcggaggccgaagcggcagagcaaggggaggagagcgtcaagcggaccagctggaaacgggggacctcaaattgtgccaaaaatggagagatttgatcaggatgtatccaggggaaagtgagggcacagaaatgaaaaaaattacaaaaataaacaaaaaattttgccaaatttcttgtttttctcacgcggcacattttttgataaattcactggagtttttttagcctaagcacaaaaaagaaagtctcaaagaaggacactgtattcgtccgtttgtgcctcccctggaatttgtttctgggtatgacgagcctagacttggtcgactagcaggacagggttcgaatttctacccgagctttttcccgggcatttttttttttttgctgaataccaaggtttgtgatcgtgtgaaactggtaaaatccttgtcttgatctcctgcccgagacctaacactcatcagggatgggtttggggtcggcggatcagcaaccaaatcagagcccctcggaaaaggcccaaccaatcactactgattagattatctaccctctgcttcccaggccccgcataattatgatgaatggacggcttcttattcgtccattaattagtgggtaattaattaataattaattaattaattaagaaaagtgcaaaatgctgacagcgcgaggagaaaaagtggcagctgctggcgaggaaggggaaggcggtgaagaaggattattgtccagatcagttggcaacggatggttgtgagcagagcgacagtacaacatgtgtttatttgcgtcgatcattgttctgttgaatttggggccattttttgacaaataaaattccaaaaatattttttaataaaattaaaaagccttataaaatggaaaaatgaaataattttagacgaaaatccttcgacgtttcatcaatgttttattgagttatttattgtgtcccaaactttctaagctgagacacaatgggtctttttcttaaaacagaggtcgcataattccaaaattgaagttaattttaaattcaatatcccactttttgaaatggggtcggagggtcgacggtgccaacggacgccgccggaagaaatttttgaaattttcggagaaaattaaaaccaaataaaaacaaaaaatataaacaccgaaaatgacaaaataattgtgagttttggtgctttgtttgttttttttttgttccgtttcgtcccccttttcggcactttttgagtttttcgtgtttcgtttttgcccttcaaaaaatttcctttcgtttcggattataattcgtttcgtttttgtttccgaattttttcgtttttcgtgcagttcccctggggctccccgtggtcaaattctttccttatcagccttgtcacaaaataaagtgattgatcactgatcgaaataggtcccttgtgattggaaatttatggtctcaattcaacaatttccccccccccccctcccgcgctctgatcaccgattgttttggcaacaaaaattgatcagataactctctctctctctctcaatttgaggtcttcccaaaacccacttgtaattgcacttcacatttgagcatctgaagtagaatttgccgttttttgcaatgccactcttgtgcacgtaatgcaattggcacacctcgcggcacacctcgtccatggcgcccctgatttttcccaacggaagccaataccgaaaa

SEQ ID NO: 18946 - DNA, 1708 bp, Heterodera glycines
  unsure (1)..(1708): unsure at all n locations
acaaaaagggaaatccaagcgaatcactgacaaaatcacccataaagaaaaatggtcggaaancgaggaccaaattcgaccttctctcggcgtcgcgattcccgtgagaagcagaaatatgccatgtccaacgtatttttggatctaatggatttgtccgcccgtttgttacgtcccggcggtcgtttggccttttggttccccgtttgcagatccgagtaattctcgagtccatttcccacaaatcccatgtgtttttcagatattccgaacgtattttgccccgcatggattgcatgcgattggtgtgcaactgcgaacaaacactcgcgaaggattcgtcccggtgactaaacgccatcgcttaattgctccatttgactgctatgcttttaaggcgccttttggtctatgaaaagcttcgccgtcctctgactgatggccaaaccaaaccaagtgaaagggcattcttcgaattggactgttatgccgagaaaacattccaccagaaagtgttcggaagcatcgaaaagaacgaggccaaggagtgtgctgattaattgcttcgtttaaactcccattctcttattttgtgtttgacgcttttcatatcgcttaaaaagaaaaaattaattttatttcaaataagagaaaacgaaaacaattgtctgccgtgtatcttaatttatttcaaattccaatggcttcttccgcactctcttcgtctctcctttcgtccattttcctctggtatttctccatttcgtgctgttccatcggattctcatagtcataatacattgccgcccacactccctccccactgttttccttcattagcctttggtgctcaaacaatggtttcttaagccaattcgcctggtagttgatgtccgggtattccggctccagtttttcgtctggcttcagtttcaccaacttttccagccgtttccgctgcacttcccgcctgaccgtttccgggttccggaacatgttcaaatatctgaaagaaagcaatatgtttggggtagttcgaatagtccgtttgtagcctctcactggtgaaatggcatcggcttcattgggaattccttttgttccggacccatttgctcattccattcataccaataacgtggtgtcttcagacctggaattaatttgtacaataaataaattcattggtttggcaattcaccgcacccaatcgatgcaatgtttggtcgcaacttttatcccattttatttggcaaaaccgaagcgcagaaggactcattttgtcctcgaattgtttgtaaaaagcatttgtgctgaatgaacgtgcgaccagcgaatcgcttcttaaaaaggaccaattgatttgataaaagtgctttggtagtggggcacccttcgaggccgaattcggcaaaatcgatgcgctgtcggtgtcgaaaaagcaaaaaaccgaagcgatggtacccagtaccttaattggcaatttattaaaaattgagcaatggaaaatttatatgaatacgtgccgtaaaaagggacgggcggtaaatacggcatcaattcgtcccccgtctgaactccatcgcattcatcaggaatattcgaaatcatccaatggagcaactgatgtctccccagcttgaccagcagttgatcctgtgacgacggtgctgaagaaaggcttccttgcgacatatgtacatcagtc

SEQ ID NO: 18947 - DNA, 1758 bp, Heterodera glycines
  unsure (1)..(1758): unsure at all n locations
ttctgtctgaatgtctctcgggcaattcnccgctgtaattgcccatttcgattttggagtatctaaatgggacataaatatcgcctcaattagagaattagaattctacctgaagtttttggctgattccgttgattcgctttcgactctcatccaattttcgcacgtacgcgtccaaatcatagggcaaaagctgttcatccaccaaattctttaactctaaatatgttcagcattttttgcttcaacaattacaccataacgttttaaaaatgttcatttacacgactctcttttgacttgatatgattaattgctcacccactttctgatgtttggtcgatgtgattggccaagaacagctgactcttcctggtgttcttcacctgttcgtccatgcgttcaatggcgggacggaccatttgcataatcgctgaaagtaaaaacaattaaaatttacgaaacgactaacgaaccctcgctcatattggaaccatcggcggaagtcattggaaattctaaaacctatcagaaatgcagataaattgatttgagaaaaaaaaaatatatatatatatagcgaagcaaatattacgtttaaaagtgcgtaaagacaaaatgaccaaacagaaaatatagaaattacgtcaaaggattcaacagaaagcgcaaagtacaaaagcaaaatgtaaaataatcagattataaagggacaagggcacagctcacctcctacagattcccaggccaaaagcctgggaattctttctggccatgcctcgctataaataaaatttgttcgaaagtcccattttcaattattttattcgaaggaatgttgcacagggtttgtacatggccgagttgagctgtgaaaagtccaaaaaagaggtgcctctgattaatctggtttgattcggatgccaagtttgagcaaatctggtgcctgttttgagtttggcgaaagggccttcgctgccttgccaatggtgtccaaaatgatcatccattgatcgtcgttggtcacacatcgggccgtgttttggtgatcaaatggctcctcaatgaacagacggaaccgttcagtgtttggtggcaattcagtcctttcgtgaaaagcattcaaataaattggggacacttgttttacaataccttgggaaaacacagccccttcgtacggaaatggcaaatcgattgaaatcgaagcgattgaaatagtcgaagaaagcgatcagcaattcacccacagtcctgtcattttgctgtatttctgaaacatacaataggtttattgtcttcgaaaatcactttgttgcttcacccggcaaaggagtgggcaaatcctcgaaatagaccaagtcagtgaatgggcgtcttaagctgaacaagtccgggtaaagttgctgcaaattcggaagaaccggcgggtcgacgccgcactgaagaaaatggagaaccatcaaaatcagcgagtaactgagcaaaagggcaaccaattaactgtcaattaagcgttagtcattcagtcacctgttgaggtaaccaccgctggcatcgctaatccctttgactttcgcccaatgtttcacaagcaaacaaatggcagggaatctgtcgtcgattctgaaaggaaaaagccttcccaactgaagttacggaaagatagtacctggagtaataagggaggagaaaanaatgtaancncctgtggaaaatgggaggaaattagggacggagaggaaaagtaaatgccaa

SEQ ID NO: 18948 - DNA, 3202 bp, Heterodera glycines
  unsure (1)..(3202): unsure at all n locations
tctccaatttcaatcagattttaccgtaagaaatttacaaaaaattcagttctattaattttttttttgtaggccaatacaattattcgtttcctctttggatttccgtgaggctcaattaacaccgaatggtccaatgcgtgtttgtaatgctatcctaatcaacggggagggaaagaccgttgaggtctcagcttggcgcttacaagcggatgtgttagcatcagccatgagaggctatttgtacattttcgtaaactgccgtgccaaaccaccgcgagaacggaccaattgttggttcagactgaacattgatgccatgagttcatacatggtacaggtccaggttcgagcgttgagagtagcaaaaaaatacgagattattttagccacatattgcagtgccacaaaatacaattgctcccgctcaaagccaaccgtccggttcaattatgcctaatgaaccgccggttaaacctttcttcagatttttaaattaaaatctattttcacccccagagatcacaaattgtcaattccggggcaaatttagtggctattcaaagccaacaaaatgaaaattccgtgcctatcacgcaatctgccccggtaaaaagtgttgtatttcagacaatttgatttttgaatttaatttatttcagtctaatcccttagctcatgatcaaaatttggtgcccagtggggcaaactcgcatcacactgatgagatagtggaggtgttttttatacaaataataataataataataatggcttttaagaccattttggattgaaaactttttttaaaaatgtttaaataacaaaatattcttgacttttcatttttttattgaaaatatattcaaaaaaagttattccttatgaagttgttttgaaatatagaaaataaatgtatttaaatgtatattagtgaaaaaatcgttaatgttttttcaaggtcgaacgcaacaaatcagcgggacagggaaatcgccaacagcaactgaggcgttcgaatgttgatcacggacgtttgcgacatggcggggacgacccgactgaatcagtgcaaaatgtacgctacgcgtctaagaaatgcttttttacttatgtttttcatttaatttggcattttttaatttatgaactttttttgttactatatttaaaattcaaaaagttctttacgttaaaaaaatttggggaatcctaagtggctatttttagcatccctaccgaagaccttccagggcacaggagcctgttcttgacgagagacccagcacgtcagggggtactgggttaactcgtcctgagcggcagtcccgctaatcggtgcgtcctttagttgaacttactttgtcatctataatggaacccccgcctcctcccggcccttacccgcttagtaaaattaagcgtttacccacttgccaaattaaccaataattgcccatttgatttcttttattatgatgctatgtcatgttttggtgaattaattattgatgataaatactgctgattatttaacaattaaaaaattaacctataattaatatttgagtaaaaaaaagattaattggtaattatttaaatgtttaagtggacttagctaaaagtcttttggtaacatattttgcaataaaagttgaaaattcggttatccttgtagtcctatgttaatcttttattaaaaattttaaattattcttttataaatattttgttttataaaacttttggaaatttagtaatttctaaattttttgattaattattaagatgctgtaccttcttattttgaacatttttataaatcatcggtttttaatttattaatgtttttgttttttttaaatgctaattctttttaacttattttttaaatcaatgataataaatttgttctttaaaaatggaacttgttgattattgttaagtattaaaaaagtaaatttaaacaaatatgaattttttaatattttgaatgctttttttgaattaaatctcaaaaatgaataatatttctttcttaacatgtacacttttgctaataaaatgtgttatttattattattagcaaagttcccaaaataaatcagctttttaaaagttttttgctgtttatttttgaaattatgattgttttaaaattgggcattgtgtaaaaacattactatttaaaaatctgatataaacaaacttttggctttcttattaggttgtacacttatttttcttggaagtttaatttttttcattaaagatggtgcgtcaaatgtaaacgaatgctttgtccttgaaagaacgacaacaatgagaaatgttatgcgcaatacgagggagaaatttgtgaactacggtttatgccgcttgaggaagcggaccgtcccgatctcgttcttgaagcgctcatacagcatttgcttgatagagttctaactggccatcctcgtccactaatggtcggattacaacttcatccgccgggattcgacagaccatatattattcgactccgtccaccggaacaaaataatgcagcggcgctcgcagctgctattgaacgactcaatgagcagtctgcggccgggattgatctactttctggcacaatggtcacaaaagtgctcgctgtgtggccactagatcccattcgtgccgatccgcagagaggcggtttttaaacaaattgcattttaaattaataaattataattaggagggtgtgatctaaatgatgaacacaacgtgtcgcataacgtgcaatccatcgtgcgcgtagagaatcctgacgaccgtctatgtttagcacgtgccgtgctaatagggcttagagacagtgagtccaggatgcctaatggaggtggccttgacgcactccgtgcgtacgttggacatcaaaatcaacatggacctgaagcggtttccttgctgaggcgcactgtaaatccacacaacaaggacatgtacacgctacgggacgttgagcaactgcaaagatggttgaacaatgctcatggcattgggcagactcggctcgttgtatttgagaaagagcataataccggatcgtcttcaagggagaggngtgagccttggtttttanaattagaaattttttgcataaagtgcggcacagtttaatttgtgtctcctattgnagcgaggccacttcaattatataggccgaatt

SEQ ID NO: 18949 - DNA, 740 bp, Heterodera glycines
cccgagaaaatttttaaaaaaaaaatttgctaccttaggacttttttgagtgcggcgtgggaaccgagactggggcaggcactgatattttgggggaaacggcggggtgggaaacggcgaggggggaaacgagctagctcccatttatgacacactagtttcgtataggagttttgttttttaaaaatttggtaaaagtttgggttttttagaaaatttttttttcatttgacaaaaatgttgccttctttgcttttgaatgtaaaatttcgacagggttcttctctattgctagctttgcacaggtgtcgtcctcattttcttctgccccaagacgttcggcggctgccgacggcgacgagtcgggcagcggggcggaggaggacggtgatggcgcgtggagcagtggcagccgcacggaacgccaaaacgaggaaattgcacgacggcagcaagaaggtgaggcgtgcttggtggatgtacggaaagaaaatttcgctgattgtgagcctcaaaaatgagtcatggttccaaatccgccggaactccgccaagaaaaatttttttttatatttcaaaccgaaatttttcaaagaaaattcgaagaaaaagaaataatatttcaaaaaaaatttcagcgtttttcaaaattgaattcttcaaaaaaatttctaaaaaccactggaaaggcccagtgactacgagtgggagggggcggcccgtctcccggacaatccgtc

SEQ ID NO: 18950 - DNA, 1350 bp, Heterodera glycines
gcttttccgtcttgacttgtcaggtcgggaagaggctaaacaattactttatattcgtttagtaagtgaaagaacgaaaagaagtaactaacaaaaaagtaatggccggtgtcaatatctgtgcaacttcaggtgtcgtaatggcgcatttatgtcatgttcattcaaacgctctttttcgcgatcaataaatgttgtcaatctctacagcatcccgtcaaaagattgtctcaacatttgctggtactctgtcctttcactgaccattgtcacttcattgacagtaagtggttggattaactcatagatcaaagtcataatgatgcatttttgtattagtttaaattgcgaaataaagtcacttcagatcggttgccaattgacaaatgccgtctttttcatagcgatgtcttaggcctgaatcggtaacagtttcggcataagacaacaatccagcatagacctaaaatatgggtaaatgtaatcttaaaagtattaataactccaataatatgtcagatggactgactgaagcattcaaaaacagatgcataatcttcaagttcagtcttctccccacaccccccaacccccccgaagctgggattgccaaaaatggtaacgggtcaaacaaattgttggcacaacggacggagtctgtcgtacttgcttttgagaatccacacgccttcccatacacattatttttgggttttcaaacccaatttcgcaatgttcagcccggcgtcagccacaccgtgcggcacgaggacgtggtcagcattggcaccgccgagcaaatttggctgtcctttcacatccacagcggactgaacacgtgccagggctgtgagccgggactgttccccagcggcgacggcacttgtgaaaagtgagagagtgcagaaacaacggggcccaagggtccacccaggaatcacaaagattcaaaaaatgacgcacgcgttcaagaattctcaatgaaaccccgatttcaaggcctacgcatgcagccgtgagccccctcttcccccaatagctggaaccattcagacgcaaaaaatttttgtgaggcgaaacgcacaaattcaggggagcgagtcgtcgtttctcctccccccgcgtcgtttcgcccccgaaaaattttttttaaaaatttcaaaccgaaattttccaaaaaaattcttaagaaatttcttaataagaaaattaaaaaaacaatttattgaaaaactttccagcgatttgattgaattaaaataatttttcgggttaaaaggagaaactgagaacgaaacttttttgatgtttttttgtttgtttgtttgaacagtgatgaaaggccaaaaa

SEQ ID NO: 18951 - DNA, 2612 bp, Heterodera glycines
cgaatttagcggctgatcgtggctcacgttcctaacatatcaattaagaaaactagccaatgtcattcactggtagttcagtggtctgtctctctgtaattacttttgtctggcgctggttcaattccctcttccgttgggttttcccgtttacaaggcgctattatcttctcaactttgttgtagctaaatgtgctggaccatgtcccgggaaaattgtgaaaattcggactgagtgagactttaagtgatgcggagtcaatgttggatcacctattctaagtggtctgacgtgttcattcagcccacagctcttttttgcaggattatttcaaatagtacacaattttggttgtgagcaaacttttcaagaccattattactggaacgggacaaaattttaccgccgaaatttttcgtcgtcaattttttttctaaaaaatttccaacttagaaattttctttaaaaaattgtataaaatttttttataagaaatttcaaaaaaatttttgaaaaatttttctaccgattttttgaaggaattttcatgcaatggttaaaacttttttcagaattcatttggttttattcctcctcagaattcaatgccttagtcttcggttttgcatttcccaattttcaggcccttcacaacatcaacgtgaagcgcagtgtcacttggctgctcagcgcactttccgtcactcaaaggcaccactgatcaattaacattttgtgatttttcaaaaatgccacacaaatacctgtaaaaattctatacattcattatcccactgctgattgtgaactgtgatgaaacaattttatgatagatttttgattggcatttgtctttttaaaaatttgcttctttgacttggaactttctgtcattatccaccattagttcctaattatgtccaagaagcaataaattttttatgaatcaagctaattttgcataattaaaaagtcttggggcgcatgcgtctgtttgcctatgttttttcgatgggatttggttttataataccctttttttcctcggttttcatttaccataatttgcccatttttattaaaaggatgatcaattacatgctgctgttctcgcgccagggcaaactccgtctgcagaagtggtacgtcgcatatccggacaaggtgggcaacacacacagcgggagcagaccattgacagtggggtcgggagcggttaattgcttagatggctgctctcacattggattgactacttattgtttgtgatggcaaaattgcgctagcccgttgtgattaattatctgattgtttagtttaatttttgtcccggtttatttagagattaaacaagtggtgagcggcacggtaaaatttaccggccttttttgtgaccggtagatttaccgaccgactatctctgaaaaaccggttgtttttaccgttatgcatttgccgttcactattagctcttacaaaattgtttaaaaaagactgcattttcaggcaaaaaagaaaatcacccgcgagttggtaaccaccattttgtcacggaagcccaaaatgtgcgcattcctcgagtataaggacacgaaagttgtgtacaaacggtgtgccatattgaaaaccaatttaaaataaataatttaatttctcagttacgcttcgctttacttttgctgcgccattgagcagacggacaatgaggtgaatgaattgaaatttatgatgaattactaagatttttcaagaaaaaaatttccaaaaaaacgctgaaacattttttttcttgtaattttcttataaaaaacttaataagattttttcttgaaaaagtttctaagtttgtaattatcacttggttccatgcttattccgaagtttgtttttgaaattcgactcgatttttacggtaattttttccgaattcgccccgaacttcgttcagttgctttgtctggaggtcatccaccgttatgtggagctgttggaccgttattttggcagtgtgtgcgagttggacatcatcttcaacttcgagaaggcctacttcattttggacgagtttttgttggccggcgaaattcaggagaccagcaaaaagcaagtgctgaaggcgatcagtgcgcaggatttgctgcaggatgtgagtggtggtggggacggcactgatcactttgttggacgcaataaaaagccaaacaaataattgttgaaattgttgatcctatctcattattccacagcaaattgtaccacctttgttattctcctgatcatattttgattcataaattatatttcttcctgacaatgagcattcattcactgttgatcacttttaatcgacattgatcagtcctctactttttttaatgtgctttgatcagatttaatcttcttctcgccccttaattgattgtttatcctttcaagcataggtcagagtataatatttgctcgtcactttaacattttatgcgtcccggtagcattaagcattaacgctgcattttcccagcgcaaacattattaaggttttatcaccgtgggatggggaaattctcaatattccgaaattgtattcatcgctggtgctcaaatgaaccgg

SEQ ID NO: 18952 - DNA, 2539 bp, Heterodera glycines
  unsure (1)..(2539): unsure at all n locations
ctggtgctgtttgccttaaatatgttaaaatcatgaggtgtttccatgtccatggttatattaaaaattttctcacgcacaaaatagcattaacaaattttttatcattttcacagtcgttttttattcttcggaattttgcgtgatcaaatttttttgtgagagtcagttaaaccttaacattttgattattgtctttattattaataacattcttcatcggatttaagctatctatagagcaccaattgatgtttttactttcagaattaccagaataaacgatttttattagcacgttatattcaattaaaagtttaatgccgaaattaattttctttttttttttggttcaatatacccactcattttttcatcattaatcatgttatctattttataatgaaaatattaaatattgttatatccttacttatcttttaatcctttaaattgaaaaaagattaaccccttgaatttaataaaagtatgctcttaaattttaaatcaaagatagcttctgaattaaaaaaaatatttttaaattttcctgagatctttgcatatatatgatagaatgaaatttttatctaagttcaaaatttttaattttttactctttgtctagcaagaatttgaagtgttttatgtagatttatttaattttttaatttctttatgcatttgattggaatccttctggcacttattattagtccatttccaataatcagtttatttatttgtgcaccttatccttttaaaatttttatattgttcattttattattgtagctttaatttttatatcttaacgataatgacccgtactgggacgaacgaagtccgaatagggcaagtaattaaatttaatttaaaaaaatatttaaataataaattaatgattttaattaatcaataggaatggttatttccaaaaaaatgattcacgtaaatacgtgaacttaatttttttttcttgataaaaatttttggtttaaaaatcgtccttattcaaaaaaaactaaaattttaataatttcatttaaaaatgaaatactataaacaaaattaataagtttttatgtgttttactatctaaaaagcaataataaaaaaatatttttttatttgcctatttttgtgcctattaatgctattttgcgggtttttgtgcctaaaattcccatctctctatttataactcggctcctactgaaccgattgggacgcattcgaatcatctattagagaactcattgtagaaacaatatatctatatttttatacccaaaaatttttctttanttaagcaaaataacatactttttaaacctntttaaaccctgggggaacagaattcttccaaaaaatgccgaaataagtcaactgagattttgatgaaggtattttttgataccaagatcgttaagatttgacaaagctacggaataaaatgggggtgtcgtaaacatatgacaatgattgtacattaaaacacatttaagtataaaaaatagcttcatttaaaaataaatttctaggttaaaaagctaaaagtgtattcaaatgttttaaaattataaaattaacattttataaaataataaaaaaaatttaattaaatttaattacttgccctattcggacttcgtcctagcaccataatgaccataatatatttattatttttttgaaaggacatgccccattttagaaattcctacattcgatttgagccatccataggattttacatcaattaatcatattatctacctgataatgaaaatttcttattattttttaaagtaatgcttacactgaattcaacaccgatctgattactaaaatttggtagtttttagttgtttttttttgataaagcaaagttcattttttaaatttcttacttatatttctcagaaaatttaattaaataataaatatataaaatcaattcatatatgtttatgacagggatgaaattcgttttgttactacaaaaaattcaattttccctttcggcgacgtatttttcgagttctttgtgcttatttctaggttttatttttagcacctataaaactaaaaaaattaaaaaaaaactattttcaactattttgcgttttgcccaagatttttataataacaaaaatgcaaattatttgcggtttattttccttatgagaatacattcttttctcttattcaataaaaatgttttgtttataaattagttattttaattattaaataatttttttattgtttttaattaaataatttcagcaatattaaaactccatttttgaaactaattttatagcttccccttatgttatttttatgaattaatgttcttttcaatactcgagcaaacattttagagttaattgggttgcaaatttctttatgtttgttttcttaattttaattgagtaattaagaattcttttcccttccaataattacagctgaattgacaaactctgattacaattctaatttggagttttaattattattattaattttt

SEQ ID NO: 18953 - DNA, 4033 bp, Heterodera glycines
  unsure (1)..(4033): unsure at all n locations
cctccccccccccctccgccccgctgtgatgtaccacccttctctgccacccaatgctgttgtggactttggagtgattgaagagctaaagttgctgatcagatcagcaccagtaagtggtaaaaggatgcccatcgaccgcacacagcggcagcagcagcggcggcccataacacaaaagtgcggcgactgttgctgcaattgttcacgtgaaaatcagcaagacattttgttatggctcgagaagatcggtgcgagaaagatgcgaaaacagcagcggacaaaagagtggggggggggggaggcgggaatcgcattgcaaaggtgatcaagaaagacgatgatcagcagggtgctggcggttgtccgttggctgatcggtgatgggatgggaaactgtaagaagaaagtgcagggagggggggattcataaaattaaaagtaaaatggttgggtgctctgcgcgcgcgcgggtgcgctccaaattgcgcgtctgtctcctcgatttgttttgtacgggtttcgcgccgcaggggtaccagcgccggaggcaagtcgtaattttggcgcattttgtcatgactaaatcacgtgcagcgaaactacaattttgaaaagatagaattaggacaagcaataattataattttaaatggtacaatgccataaccatcagcattggagtgtacatgaaaaggaaaaaaatcggaatttctgagaaaagcatcaggccgttgttacaaaatttatagcctaccgaaattaaagaaaactcaaaaaaactagctcattaaaaaaacgtcgcaatgaccgtaattaggcattcaatgaaaacaaatttaacggaacggaaaataatagggaaagaaaattttttattattccttgagatgaaacagattgtttttaccataggatttgataatgtattgggatttagacattgaagataaaaaagtaatgtcaatttaataaattaataattaaaatatatttttataaaatattaaaactaaaaaccgaaattaattattatacaaatttaaaaaaaaaagaaaaaacgaaaattcagcaaaaatttagtgtaaattccagcagacggaccaattttgcatttgtttatttaactaatattttcgattgataaacaattcacaaaatgagtgttctatttttgtaggaataaacaaaagcaaaaaattatcgaaaatattctaagactttttttacaaagaaatttaaatatccagtcaatttgattttcacatttttaacattaaaaaatcatattttgtttagtgaagatattattccaaaattgtttgaattctccttttcattttaatccaccaattttgtatcacttaaatacgaattactggttctctcattaaaaaaagaaagaaaaaaaataaaatttaaaagagaattaattaatgttcatatttaaaatctcgactaaaattggacagcaaaaaataataaattaaattataaaaaacagcaaaattagttttttgcggtaaccgagtttcagcctcacaaatcaaaacaaaataaaacaaactttcttttgctcctttggattattaaattcttttcctttttttttgtccacaggtttcaaaccaaaaacaaacactttattactatttttgattaattaaccaattaattactcccgatcctcccataatttgctgctgctaatgacactggccactcccctcaaattagtccaaaattacaaattacacacacaatttcctgccgcccatttcgaccacttttgaagtgcacccaaatgggttccttctcccccccccgcacattccctcgggggatcgttcgtcagcaatattttgccaccacttcacccctcccccccccaccactggcgaagtgttcaaaacgccacagttggaccaaaatttggaggaataaaacagcaaaaaaaagaaaaaaattactaccgacaaaatcaagcacacaaattgggccaacagaagaaaaaaatttgtttgttaacttggctgaacaccaaacaaaactttacgattttataattggaaaacgggcaaaaaaactanaaattttgtacaattaaatatacaatcactaaataagataaaaattggcctaatttattaacaagcttggtcaaatgatagtctaaaaaatgaacgattatttgtgtattgcacttaaaaacaaagatcgaaaccagggatttgcaatataccaattaccaagattaaactttaaaattaggtaatttttaatttaccattagcctagctattcaggaaaaaaatatgttatgctgagcacaagtgaaacaaaatgtcaaaatcagcgaggagcaaatgctaagatttcatttctgtttaggggaatgattcatttgaataaaaacggagaatgtaaaagctaattttggagacaaattgtataaagtgaatgaatggttgttcaattaacgggcattttaatttaacaaaaaaaaagaatgtcaaaatttatgtacattatttttttcaataaatttcttattaaaaataagttttaaatataaactttcttttaaagaacaaaaaaacctaccttattacattttgagaatacacaaatttatttattanagctatttgcaaaactanatgataattnttaaaatcaaaaaataaattatttaaataaacatcttttaatccgaaacttaattatattttgtaaatttttttttaaataatgagataaataaatgtgtttgggatttagattctaaattctctctcaaaagattttccatttaattgttttagtgaatgaaaaacttatttaaaatcgaatttttgtaagagtttttttctctttaattttgatataaaattttctcaactaattaacataaacttatttctaaaattaaatgataatttttaaaaattcctaaaaattctctctctttctctgctgatgacgataatagctagaattgatgaatgctaataatgcattagcagtccctcggcggacccctcatcccctcgtcgtttccttccatcatcattagttagttttactgcctttcgcttgcgttgggtgtgggcgatctcgtcaatggcggtacattccacaacaatcctatgaataattggtgagtgcgtctgtttggcctttgtaaagattgaattagcgggatttttttcgagtaaaaaatgaaaaaataaattgaagtaataaacaaatatgaagagacacgttggaaaagagatagggagagaaagagagatagacatagagagagagtgtaaaagagtgagggtgaagagtgagagtgagagaaggagagagagatatggagagaatagctgagaaagagagagacagagagagcgagtacaaaagagagtcctgctgggggtgtgaatgatagatgatgagatagatagacttcgtcaacaccaagaaggagaagagaaagaaacataaatactcatttttttgttttaaaatttgactagcgcgagcgaagcgagccctagtaataatgataattaaataaagaatgataattatcctgctgctaatgtccgatccaactaagccgccgattgatctgatcgcaccgccgtatcggcggcgagtcgacccaaatcatttgttatgatactttgagtggtgatggattaatagagattaatcatacgtcatcatagcgggatatcatttggaaaatgattattttatttttcaaatgatatgatcagctgttaagggcatttagcagcgaatcgctcaatgtgaaaattcttcgaaaaatttttaattttttgttgggtgatttaaaataaatggacctaattgatctctgcgtttttgtttttaggaaaaataaataaaatatggacttggagcggatttaattgggaatagaaaaattttaataatggattattaaagggatttataaattgtaaaatgacgacacatgaaatattattattattataatgaggcaagcacaaaa

SEQ ID NO: 18954 - DNA, 2764 bp, Heterodera glycines
tggagatgcataaaaatcagacaaacacaaaaatacaggactgatttatttgggtacaaaattgaagaaactcctgatcaaattcttttaccaaccactttgaaagactgtcatcaaatggcaatttacaaaaaatgtgaatttggtgttttgtcaggagaaattggccaaatacacacaaacaaaaaactaatcattgaacaatcgtggtggaaaattgggttccaaaaaaccgagtccgaaaattgttttttgtcaaaaatcagtttgtttggaaccccagggtcagagataatacattcaccagtagatgacacaaagaattgtaagtactcagatggacaatgccagttagaaaatggtgtttatcttttatgggaaattaagaaaaacattaaaaatctttttgatgaaaaaacttgtgtttataaaaaggaaacaaaaatcaatggcacttatgtcccaggtatttggatgtcaaatgataacaatcgggctttggtttttgatcaaaattcaaaaagggtagagtcatgtggtgaaaaattgcgtgttagtgcgcaaggatttgcaataattgaggaacaatttaaggaattgatgaaaaatgagcaaaattcgttagacaaaaacacgagaaacgggataaaaagattcaaacgttggaatactgctttctcaagtgaaatagagaatgctcccttggacggagaagttcgagcaagccaattggcaatgcaattacaagccggtgctttttatcaaaacaaggaaattaagaattcttttcataaattaattgaaatggtttgtaaaacattggatgataatattttcaatgggtattctcatttaaacccttccttgtttataagacaaaaaactggtcaagcttttttagaagggcgttggatttccgatgaaattttagaattttggggttgttctgcaattaatttctcctttgtcccgtcgttagatggaaaatgttatgaatttattccattaaatttttctttagaccataccgaaaaacttttgataggatttttggatccaatgacaatgattgttaaagaaaatagtgaaatccaaacatgcaatgagggacaattcaaaacccttttactgaacaataagctcataaaaataaaccaattaactggcaaatatacttttattggagaaccaactatttataaaatcgatcaaaaaatatggggtgaggaaaatttacctatttttcctttacaaattttcaaacaattaattttaacaaatttaacgaacaaacaaattgacatgctggaaatgcttcatgcattccgtactagccgaattattgacaatagaccaaatgaagaccgaaaaatttttgaattcaaaccaatttcaagcatttacctttcaaaatttaattactgaaattgattggtggaaatatgtaattcgatcagtcgttttagtcattataattaattgggtctacaaaatttataaatggaaacaaaaaatcatgatcagaaaagaaattgaaaagaggaatagtcaaaactttcagcaacaaactggtgccattcaaattccactggccgctctgaaacaacgtttcgttgggggagtgtcggcgcccacgaccgacgcagccgagatgccagagaatgccgagaatgccgaaagaattaaatgccaaaaacagaagagacggaggaaataattttgaacaaatttgcatttaattatttattaatttaaatttcattctccattttattattatcatccatatctttcagcctttgcctttgcgatcactttattcatttatggtaaagtcgttggagacaagaagaaaaagagcgatagggaatttcacagagtttaacaaaaggcggaaaatgtccgtgagcgaaaaaagggggaaagatgaaaaaaaaatccgttattcattcgcttaactttttaaaaaatctgttcaacgttcttgctctccgatttaaaaaatattatttgtcaatttcgtatttacgccgtaataaatacttgtcaccgggacattttttttgaaggttacggtaggggaaaatttggtgctaaaatttgtttcaccgggaaacgggagattggtccaccagggactttttgaaaacaacatctgtaaaatcaaggggcccaccaggaattaagaagtgattggcaaactctaatttgttccaccaaacaaaggctgattgattgattgattgattttattttgccttttttcaattaaatctttcaatttaaatatttaaaaatatatttatacttcagctttttttgcaattttttatttttactaaagaattcatttctgattaacctagtttgcttattatcagctaataaatgagatgttgttttgttggtcctctcgacgcatgcaataattgttgtaaataaatttccattcccaagaaaaatgccaataaatcctactaatgttattcgtttactgcaagagcattatcttaataaagctccaccaccgaccccattgacagccgaggaaaagctattggccgaagattttttgaaaactttggaatttggtgcaaaacaaggggttgaactcgagatttcggatgagcttgtctttgatgagttttcaacagttcatcaaagggaagatttgcacattcagacgaagaatttgacattgaccttgaatgtaaagctgaaagtgatgacagtggcgaacttttctcatcgccagcaagtacag

SEQ ID NO: 18955 - DNA, 3005 bp, Heterodera glycines
  unsure (1)..(3005): unsure at all n locations
agtcaaaatgaatttatttattcgatagtactaacatttaactatttatggttaaaatttnaaaaaatttaattgagtattaaaaaagttntggtaaaataatttgattcttaaattattgaaaattttggagtataatttttttataatttaatataaaaattttataaattaatattgtaatagaaaagatttaaagttattgtataatagtatgaaatataaatttggtttaaattgggttaagatatgaatttatatgttttatatttttttgtttttatagtagttggaggatttaggaaaagtatatggtggaggtttttaggaaagtgataagtatgttaaattttaaatattattgatgaatctgtttttttcagaatttatctacggaccagtgccagttttggaggtggatggaaaacaattggcacaaccagcagccattatgcaatatttggccgaaaaattcggtgggtttaataccatttagcgggataaatgtaaaaaaaaaaattatcaactacacattcattcatccatagaaaatatttgtaaaatgttttctcaaaatcccattgatcaagctttatttatatctttagctgattctcactatttatgtaatcatgtctgggagttagaagtcataatatcatttttccactttaaaatcacattttgatttttatttttgcatttattttattattgttgaagaattggccggtcaaaacgcgtgggaaacggctaaagcattggagatcacgtgttatgtgaatgacatcatcactgagttggtaccctatcttggcgcaacgatcggcttccttcccggggacgaggtaaaaaaaatggaaaatctaatctgatcatgatcatagtacaatgatcttttgattgagattagtgattatcagcaaatagaattgcttattgtttttttggttatatggctaatcaatccaacgaatgaatgagagaatgaggccatgttccttttttgcaaagcagatttagtccgatttttttccatcaattaactaaaaagaattgacaaaaaaataaaataataaataaattgcagtcattaccgaattaaattaatataagaattcttttatcactaattgtatttttgaatgtgtttaatctgctctaatagcactgaacattgaatttatcagtccggtgattaaacagtgattgttcatttttcttttctacatgctgaatatttcacaataaagtacaaaaagatttgaatttgggtattagttgtcctaattactctcctaatagcttgtattgctctaatttgttcattttaaccaacattttccactttaggccgcccttcgttcggatgttttcctccggtgcgtgaaaaaagcatttcctcttctgatcgctcagcttgatcaatcaaagtccggcttcatgcttccgtccggcttgtcctatgccgattttgtggtcagttgcgccttcgaaatgctgtgccaactcgacgcggctgccgactttttgccgaatgagtacccgtcgttggccaaactgacggaacgggtcaaagcacttccccaactccaaaaatacttcagcactggcaagaatcagaagcacaaaatgtgaccatagagaaggattgattgatagtcttgtcaattggacgaaaaatcattgtgaaatttgtcactaaatttgttaattaaatacgctttttgtgcggttattttgtacagatttttcatgccgcttcctcacccctcccaataaattcattcattcacagtccatcaaagttatggcgaatgaatggacaaaaaatgtcttcgtgtcgcaagaaaactctgatcactctgttcttttgcttccatttttcttacataaattgatggatgtccttctcatcgccaaccatcgctactcaccgatttttgcggggcgtttctctcccataaatttttgctctttgggaaatgaccatccttttattgtacaatttgtttaagtttactaaattttatggaaattagtcccttttaattggcactaaaaaacggcacgaaaaaggcaaaaaacttttttaaaaagacaaaaaaaaatttcattcgtagttttaagacatacgattatcgggtaaaaatatttttgtaaacagaaaatagtcgatggacatcgcaagaaatgaggggggcatttttgtaatcaaaaataagcacattttttaacgcgccataaagttaaattttttaaaactctcaactttttaatttaaaacttactttgtttttagctgcatcacttctctttttctttttctctttttgctgttctgttgtctcaatgttcaaatttggcacgcgctttttcgcttggcaatccgcttatccaaaacgggaggtttttgttgtgtttggagcagatgcttaatttttacgtcatctcacagcacaacaccttcacaaatctgctggaatgttctggcaaaaagaaatgtttaaacaatcacaagaacaccaatacgatttatcgaaaagcgacttttcaattatttaatcagtcgtaaatttaaattcacaattttaatatggaagtaaaaattgttttaaaattaattcttctcggtctaaggcacgggaatttaaaatctcggacatcactagcaagcaacccaaatggcgatttgctgacttttttgcaaatatttgcacaattttcataatttgttctatttccatttctcccaatttttcctattttgaatattcataagttaaattgtcaacaatttccttaaaaaacaaaagttttaaaaattatacaatttttggctaaagctactataaaaaattttcacaaaattttctaacattgcccgcgtgccaaacatatgcccctcttttttctgctttgtgcattgacagtgatttcgatcctgaattttctaaaatatatatcaatgattttctctgatttaattgcttaaaaattcccaa

SEQ ID NO: 18956 - DNA, 1070 bp, Heterodera glycines
ccctagcaatcaaattcagcaaaaaacgccaacccccccggtttttgtcgacaatttctcgcaaacttttcgcagcatgacccctctttttcatgtgttgatgccattgtatttattgcacctgttgccattgattgtgagcaaatggacgtgccgcagacggtgagccgtgacggcgatgaattctgcggctggtggttatgtagttgaacatgatggtcatcaacggcagcggaggaagacgacgacggcgcaggtgccgaggagttcagcagcgcgttgccaatgccatccgcgcgggcctccagacgcatgatcaaattggcggtgtacaaatagtaggagaaggtctgttagggagtggatttttttcaattttttaagaaattttggcagaattttgtccaaaatatacattttagggcgtctaataattatttttgcacatttctttaaaaaaattggcataacttttgacttctcacacttttcttgacacaatttagggcgccaaattattaaaaaccgagtagtgccaaaatcagaaaaaaacctgtaaaatacaacagacctgcatgtacgcgtcgtaggccttggccaactcggtctccgcactgtcacagcactggcgccggtcatcgtccgccgcaatgccaaactcggacacatgcacaatggtacacgtggtcagcaaatctgaaaattaattcaaaatttcaaaaacgatgaaattttgcggtgaatttcgcagaaaaatttctgggttttcgccattcttgaaaacgggggatttgaaatttttgtttttcaggttcggctttggttcgttaaattcgaacgaatatcattggtgcctgagaatttgtagcgtctcgaattcgttttagagtttcaaattccgtaaatgccccactcgctcaccccgaatttgtcgctcggtgccctccatggtctgccagctcatctccgactcggcccgcagcgtggccaaccgtttccgaattttggtggtgccgttgcctgaactcgtccgccaacgaaccctcggccaccgaaatttgtgcgacatg

SEQ ID NO: 18957 - DNA, 1844 bp, Heterodera glycines
  unsure (1)..(1844): unsure at all n locations
taagaaaaggggtctgcttttctcggtaaaaatgaaatgcnaaatccnaatcattgagcagccccccccccccctcgggactttgggactcatttcaaaaaacacatacaaaaatttatgtcatcaaaaatagactaaagattctaatgaagatctcttaattgtaagacaagtgcagcaacaaatattgatttcccagttaaattgccgaaaaaacggtcaagaattccaaaaaaaatttttctcgcatattggaatttgtctatccccattaattgatggaatcaccatcgtaccgttcatctccacttggcacgccgacttgcgtgccgtgatcatgttctgcaacagcaaactcagccaccagtccatgccaaggtcagtgcactgaaaatgagaaaaaatttttaaaaattcccaaaaaaaaattgtacgtcgattaagtcggaaatgtcgtccgcaaaaaatttgtgcaacgaagcatttgccgcatcgatgcacagcaaatattcgttgcgcgcccgcgtgcatttgagccgtgccgacgcgtatttctcgcttttctatttaaaaaaaattatataaaaatggaatttttaaacaccgaaactccctattttctcatgctttttatttaaatcagcattgttctacctaaattctaaatctttctggttttatttgctagaatacaaaacaaaacggcataaaaattgcggggtttcatttgccgcttctaaaattcagcgccaaattttttttttgtaaaaaaaccacccgaaaaatcaggaccacaaagaaaacaactctaaaacttataaaaataatggataatcacggaaaataaaacgaaaattcgtggtttcccatttcctccccgccccctcactttgtcgtatgttttttgtgccgatcgttgcttgcgcgtcgagctgttcggccccactttgttccgttgcgcctccgcctgctgcagctgtccgccgagtgcgttgaattggcaaaaacaatgctacaaaaaaacggcaaataattttttagaggatggttttctaaattctttcccatttttgatgaaaattttaagggattttacaatatttatctttttgtggaggaattgaaaaaaaatacatgaaaaagcgggaccaaatattatgccatttagtctcgagtaaatgccaacatatatttttggcgacttttgggcaaactaatcaaaattgcggtccgctttgaaattaatttgtgcaattttgaaaattgctcgtccacctggtaggttttcatcgcggtgtgcagctcatgcagcacacggaccacctcactttgggccaacacgccaatctcacgacactgaaatatttgccaacactgttttctaattttcatcgattaaagtattcaaaattttcatccctcgccctccccgcctccggtggccacctttttggcaattttttgcagtgccattgtccgctgcgcaattgccgggcacacataattggcacacacgtcggcaccgatgctccgctggcgcgcctcctccttggcatcgtcgaccaactgttgccacagttggcacgtggaatggagggcccaattggcacgtcttaaaaataacaaaatttattcgcaaatttttaaaaaaacgataaattgtaagacaaatggacaaattccgggtttattgtacgttttatatggttttattttattttaaaaatttccaattanagaggcatgaaaaaaatggacgccgtcaaaatttttggcgaattntttcgcgaggacaaatttntctgtcaaagtatatggatatgtgccatagtangtaatagatg

SEQ ID NO: 18958 - DNA, 1331 bp, Heterodera glycines
tttataacattggtttgcttggtatttgtacaaatatttattttgaatttttgctattaattatcccatgtgcgccatatttttatgattactggaaaataaaaattggttttgatttttttataaatgtatatatttttctttccatagtctgggtaccgaaggatttcccgcattcttttttctaacaaaattgatttttattattttatttaaattaccaaacatattaaattttttattcaaaagtactttgttataaaaataaaattaaaaaaagtttatatggaaaataaaaaaatctttatgatattgtagaagtaattataacaaaaacgatatgaaatgtaaaataaacaaaattttaaaatcttttggccgtttaatagaatttattcctgttaagaataaatgttattgaatttatcaatttttaaagttatttattatttagcataagctaatggttgaaaataaaattgaactaggtttactccttgaaaatcggaataattgtcgattcggggcatttggtgctaagaaaatttttaagcctgaatcatacatatgcaacctagatgaaaataataaataatggaaaaatgactatttatcaatctggcatcaatcgtattcagatcaaaaaaatgaattggttggaattgttcgttgtatttgctttccttgtgcaacaaagttcgggcactatttaaattatgcatatttaacctccatatgaattttttttgtctcattaattttaaatgaatatttattttatttggcaatatataagcttcagtatttattttctttaatcattgatcattatttcttaggaatttttcaaatttttggaaaaatgtaaatcagtagtgtgaattttgttttttgtttatacaaaaccaaaaacagcaaaatttaattaataaaaaattgttgtaatgcaaaaaaggttgtttatatatcaacttttaattaattactaatttattgcaaaaaaatggggtgagatgtggaacattgggctcagtgtggactgctcgaaaaagctgaaaaagtttgccgccgtgggccaaattcaattcatttcagagggctattgataaagtaattgtgcaagagtaataatgaagtggagatggaatttatgacttttaaaaattcattaaagaattgtaaaaatttaatttttttttgtttaactttgtttgtcttttttttgtaaattttatttttagaaattaaaaatgggtataaattttaattaaaatttataaattatgaatttacttagaaaaaatatggacggaaccaaaaaaattaaaaat

SEQ ID NO: 18959 - DNA, 2339 bp, Heterodera glycines
taattaaaatttataaattatgaatttacttagaaaaatctttgacgtacaaaaaagattaaaaatgtttgggttttaatcgaaccaaattttgcccattaatagtatcataatttaattgggtaggtaaaaagtaaaatgattttttacagtaaataaattcaatttttttttgttaaagtaaaacgttttaaaaaatttcttttgcactgtttttttgacttaaaaatttatcatttaattaaaaatgcattaaattttattgaacccggaatcaatattatatggcaaattggaagggggttctcatcgccgctttttccattcgcattttgctgctgcaaaattttatttgtgatgcagcaacagagaaatgggtggtgaatcacaatgaaaaagggtcggtgcgaggcagaggagagggaggactgaaaataacaatttttgttttttgcatttaaaaaagttcgttttatttagatgttcaaaaatggaaaaaattttttgcgcaatttgcacactttaaaagaacggaatctaacagacaacattttaataaataatacaaatttaagtcaaatggacaaattttgtgttaactgtagcaattaagccagaaatatggaccttttaaattgataaattaatgaaatgccaagaattgtccataaaaattgctaaaattatttttaagcaaatatttgagtccttttgagtagataaaaaatgggatgggataagtgtccaacgaaacgggaaaaatttgttgctgttaaatattgaaaattcgcatttttaaccaattcaataatgaatggctaatttattgttatttcgtcgtggtcatcgccttttttttgtcgaaaaaaataactggggagcagtaaaaggcgatggaaatgaatttttgtggtggttgcgaaggaagaagagacgaaagagggaggggagtgggggacggataactgcattatttttgcttttattaaaatatgttgaacataatttaatgaaaaattaaataaatttttaattattataatggaatttttatgaataactgtttttgtgtgattgtttttgttattaaatatagtgcaaatattattttcttacacgtaaaattaatgaagtctaacatgtaccaaatatagcaaaatgttaaaaagcttttaaatcagttataacgaatgcgttttattagtcttttaaaaggcaatttttaaatgcttacgcaaaattaaaattaaaatttgaaaggtctggtgaattaatctgtgttttgcaaaagattttttttggtactctttgcagtcggagttgaaaggaattggccttgtgttttactgatttcaattcattgagaaaaattttgcatgcaagttttgaagagtttgaataaacaatatgaaaaagttatatggcagaggattattagcataaaaataggtgttaataattaaaaaattgctattttcatcgttaatacaaaaaaaagctgctgggcaaaaatagaaaagaggagtggctcttaagatgtaaaataaatgacattgtatcagagatttgtaaaatttattaaaaatatgagaatattgtatagaccaaaagtgccgattaattcgtatattaatcaaaaaaacttgctttcagaaaatattttaaaagttttaaacaaaaatatttaataaaaagaatatatttttaaatgcaaaaaagtaataataattaatttttatacacaaatataaagttttttttaaatttcttttcaaaatttgttgccaaagaaatttattcaaattcttatatggagtggaataataaaatgtcagctttcactcacggcaacatttgtcattttgctcatcgtatttgccattcgacattgccgcacgcagtcttcctttttgcaaaaattttgaatgtatttgtgatcaaaccaattttttgcaaaataattgaaaattttaattatagattataaaattaaaaatggttttgagtgatttgtcgaatgccgtcaacaatgggggaacactgagtttgcaagaactgcggcggcgccgtaggacggccattgtggttctggcgcccgacttggcggcccgacagcgacagttatggcgagaacgccaccgcagctcgaatgcaatcgaacagcaagatgttattgaattggattagaagatgacggcggaaaaagggcaatttggatgcttttttgttaattttttgttcgaatttctggtaattaatttgcttgaatctttataataaaaagtttaaatttttattttttttgtaaaattaaaattcatttaattatttgcaatttt

SEQ ID NO: 18960 - DNA, 2811 bp, Heterodera glycines
ctgcttgatgtgttctaatatactctaaccgatcccattctatttttgccgcttagtctactacccactgttgaaaaagcttttttgcatgaaagtgaggcataaattttccattttctttaataaataataaaaattttgtataatcgcaaagtgaaattttttttccatttaagtcctttacttcataattaaatccttcatttgaaactgggtaaagtaatggataacacattggttcaacgcatttatccaaaggatatatttcctttaattttttttcaccctttgggtaaacaactattttagctggtgggatatcgtcattcgcatcacaaaccattattgcacatacttcattaatatgcggtaaattgtatctcctttgatcacaattttccttaagactaaaaagcaattttatctgaggtattttatttccttcattttgacatttttctttttcctgctcataaacagttttcattaatttatatgattgcgcaaatttgttattttttctaataaatgcatcaatatacttcatgatatttacattgcatccctcattcatgccacaccgaatgtcggttgcttcatcagaatcaataaaatacagctgcccgtttgttgggatttcgtgttcactgagagggattgcatttgaattaaatctatgataaatttggccttgtattttataacatggaggcccaggcgtaggaaatttaaatttaaaacaacttattgaagcacatgcaaaagcactattgtagcgacgaatgtttgttataaaatttttataataaggatgttcagtatcgaaaagaattttcaattcttcaggatattgctcaattttttcatctaaatttaaaagtttgccgcccttacaacaattagcaaagctattttcatcattttgattttgtcttaatgattcttccggaaaatgtaaagaactacactttgaacaaaatattttaaatggtcctaactcataaaaaattgcttttttgggctttgcagcaataccgtataattgatcataatccattttactccgctttcttgatatttcaacgttttgactatgtgattctcttgcatattctaactcttcattaatcatatgtattttttttaatgtataactaattctatttgcttttctttcgctctcaacttcttcttcagtaagttgagctcttttttgactaattctttttctatttgcttctcgttcttcttcaattctgttttctgtaatactcatcattttcctttgttttaattttctttccgccatataagatttactcagaatattggtgttataagaaatatcaataaaatcatctatctcatcaagatttattaacatatcactgtcattttttttagttctcttgaaaaatgtttcattccgcttttgattaccggagctttgaaccggttctatcaccacttttccgcttttttcgggagcttttaacccgtcattacattggagagcagaagaagagcaaggaatgtcagaaagaaatttttgtttattacgtaccattttatctaaaaaaatattttttaaaaaaccgagcttagaaaataggtaaaaagttaaaaaaagtgaataaaaatgtaataagaaaaataaagaatggggggagggtaaacaaaacaataaaaaataatcgcaattaaaaaatgactgatcgattttttcacgacttgctgttatggatttttaactcaaaaaaaattgtcgactcacaaagatatggtaaacaaaaccctacacatttggttctactgcaatttacatgcccaccatatttttcgtattaattttcgtttataaaaactataaccaaatttacaattggtcgtccaattaacataaaatttttagttcttaatgaataaaaaattattaaaaaggtgttaaccgtaataatcacacacaaaaacgtttttaattaatcgcgcaaattgtggttgaacgtcgtaaaaattgattggagactaaaactgtagcagaactgcaaatgaatcctaataaatgagaaaggatttttaaatgggagtaaaaattttaaaaaatagaattaattacttttataattgttttcgatcaattggaaatcattacaatacttgaaaaaatcaaaccggtaataaaaaaaaacactccattccaaaaaaaattcggcagcaagtccagtgaactaaccatgaaataaattacttcagagattttatcatttaagtgatttttgttaaaatgatactaaatcgacaaaagcttttgattgatcgcgaaaattatgattggtcacctaaaagttgattgaaaaaactgcaggagaaacgcaaccccaccctaatgtaaaatcaattaatgagaaaaggctttttacaaagaggggattagagtttaaaaatctttttagggtacacaaataattttttttaattattgtacacattcgaaaaaccattaaaaataactattaaaatcattttgttaaaggaaacggaatcaaaaaacctaaaaatttgagttgatttctttatttttatcattcagaataatggaataataattcaataataataagaaagagaaatcgaatttacgacactttgatttcgtaaatgttatcgactttagttatttggtcacaactcataacaacaataattctcttttccccctttcatctctctttgtttttgcaaaggcattcgcttcgaaaaattgtccattcaaagtgtgacatacatagtcacacatcaaattagtatagt

SEQ ID NO: 18961 - DNA, 1541 bp, Heterodera glycines
cattcactagggatggaattcgagtcccccaaattttttttggaaaatcgtaatttctatgccaaaaatttcagaaatcggaatcttttacatccttcggtaccaatattaaatgttaatgaattgtgggcattcattacccctggtgggaggggggggggatttaaaagtcaaacagaaaatttttgaaaatgtttcccaccttttgaaatttcaaaatttttatatttttgatatctttttgaaatttaattaaaattttattttcccttaatttttggtggataaatccgtggagatattcagctgctgcttctcttccggataaaattgtttatttttgcttctttttattaccacaaaatggagtgccaattccgcgcacagtatccaccgtggttggttacggtaatggaggaggagacgccacacagtgaaagggacgacgaaatagcgaaattcgagcaaatgggcggggacgaggcaggcagaagtggacacggcgaaggcaacctttgaaggtgctgagtcgttatataaaaaccatcaaatggaaattttcaaccaaaatctgtccataacttttgtcaaagtcaaccaaattaaaccttcttgatatcattcgatagccctaacatttctctattagctcacctaaatttcaaaaaatttggtcaagtttaagcaaagttatggccaaaagagtctaaggcaccgggttttcaaacttttttggccataacctttttgaaactgagcgaaattttttgaaattttgcaggttaatagaggacaaatagggctatcgaatgatagtaagatcactttattttgttcgttctaagaatgttttgatcagaatttttgataatcaaaataattttatttttaattaaaaaatttatgttagaaattatttttgtttttaattttcttgctattagtcgatagctctatgtgtcctctattagcctgcaaaatttcaaaaaacagttttttgttgaaatttttcatttgatggttttttatataacgcccattttgatgggttttattagagattgacattttgaaaaaaacctggacctggattccatgttggacctggaccttgatttcctggacaaaaatccaggaaaattcaggtccaggaaaaatccaggttgccgaaaagagggcgcagaaaattgatccaaaaaatcgaaaaaagaaaaaattagaaatttaatttattttgtagcgcctgccgaaaattctaaaataaattagaaattaatctgttcctcataatatcacactctgtttctgggctcgactctcaactcgagaaattctctggccttttcataaattattgagccaattagcgaataaaatttaaaattaaaattaaaaataatttgctccactttagtcacagtgtctgtttccattgtgtgccaaatgaacagggcacaaatggcataggccggcacgagggcataccctttgggaaaaaaatgatgggcaaaaatgccgaaaaaaataattcccaatcactt

SEQ ID NO: 18962 - DNA, 1622 bp, Heterodera glycines
  unsure (1)..(1622): unsure at all n locations
gggggggggaaaatataattttgttttagaaaaacactgaaaatcaattaataatntaaaggaaaaataaagtttgtttatctgtagaaattntaaaagaatttcttgaatttttaacttaaattaaattttagaaatgattttaaatgtaaaataaaattatattattattatttaataattgttgtgcaaatttaattagtgcatttcattatttatgtaatttccaattcttgtaatatttttttgctagacaaaagtcaaaaatgataaacaaaatttgtttatcccaattaaacttatcaaatgacactataaaaacaattttgtcaaggcaagtaaatgtgcagggatggccgagtggtctaaggcgctagactcaagcgatgattggcttgcccgctatgctgggtcttctagtgggcgtatgcccgcgtgggttcgaatcccacttcctgcagtaactttttttccaattttaaataaaaatttttttttaggaatttaagagaattattaattattggatacattaattaattgcaatttttccttgcctaattcctcgctttttgccccgaaaatattctcggaacaaacaaaaaatgtaattggcaaaatgtggaaatgccgaagcagcagtaaatgcacaaaagtacaacacttgtggcacatggagcacaggctgaggggaacagttcaacaacaattaaagcattttgccaaataaaaaattaattggaaaaattaataaaattaatttggcatttaaaatgcgcttttttcaatttgcaaattcacccgatgcgcagaacggtcgccgagcaccacggaaccaccgtttaagaacagaaaaatgatgaaacaagcacacaaaagggcatggggccaaaggcgacgaatcttcgggaaaaataatttaaatacattttattgggatcgggatttcgattcaggaaacttttttttagaccgggattccgatgtttttttgtgggttccgggctctctatccgtggatatgtatgtttaccaagaaaatggcagtttgataaagcgacatttgcccttggaggaaagagcgtaaagaatgccaaacaatgggaaaagcggagaaaaacagccaaacaatgtttgtctgaagaataggtaataatcaaaactgaatttaaattaaatattcattcatccacctgccgcacaaaaagtgccaatgcaaacactgaaaacattgggaacggacggtcggagagggacagtgccaatgccaacaaagtcagagacaacaaatcggtgtaactttaatgggcgacaaattgggaacaaggagcgaaaatgcccaaattaagacaatgggttcgaaattgccagaaagtcgggattttgcacggaccaaagtgtcgagatttttggaacccaacagaaaattcatcaaattaaacgcattttgaacacacacaataataaagaagtgtccaggagaacgggcaaactgagcacagccaacgcggacacataagcatcagcatcaaaatgttgctgatcaccaaattgagacgttttctgatcataattttccatttttcaaaaaatttttgatttgcaattattatttatcgtat

SEQ ID NO: 18963 - DNA, 3132 bp, Heterodera glycines
cgctgctgctgctgctgctgatcacactacttaagattctgttgatgaacaacccgccatgcaaggcaattgtactgcttgacccggaaatgatcatgtgctgtcgcatgtgagtcgcgaacggttgacgaagcgatttaaacaaaaaaaaatttttacttaatttacaatagatttatttgaattcgaggttttgagcaggcgtgaaaaattgggagccaataattttagcataatggcagacaaattttcaaaaaatgccatccattgaatgtcttggaaaaagttggatgtgatacccgatcccaatttgtcatccattgacactgattttttttagtaaacttgatcagctacgtgccgtttttgttgctgcaagtcgcaattctgttcgtattttgttacatcagatgatcactgacaaattaatgtgcgttaaattaaattttatttacaattaatttatgactgccaaatttttccatttttatttcaattttcgataatttttggcgaagaatgtcagtaaatttgctgattccttaattattttacaaattgtttgtgttatgttgtcaactttattcttcagtgaagtgggcgtcaaggccaagccgtacatgacactgttggacgaatttgttgccgccggggcggtggagcgcatggagccgcaccagtgtgacaagagtgggctggtgttgcgcgaattgttggcctgctcaattgaaatggcggcacgcgagcggcggaaccatggcaacccgaaactgcgcgttctgttcttgtcaggtccttttttcttcctttatgatgcaattttgctggaaaagtcacgcctctcaccccgaaaatatcaacaaaaaacatagttttaatgggtgggataagttcgtgtttggattagacgtattgaagaccttttttggtaccagtttctttatttatcctattaaacaaatttatcggtctggtgctgcctattgacgctggtgccgaaaattttggacagagcgtttggatggggtgggtaccaatatgaaaaacccctaaatttaccattttttacattaacaattttggtgagaggggcacagacgctcataatggggggggggggggtgaaaaggtgaacccccgattttgttttaattaaaaaaaattccagcaatgattggccccaagtcggacgatgctaccaaattgggcaacagtcaaattgaattggtaaatgctggccaatttgtggagcaattcaaatgaagtgcccgggaaagaattttgaataggaaatagctcggcattacaccaaaaatattttccaataaacatattcgttttatttatttatttttgttcccccatttaatttgcgctcctttttgagacttgtggattttggggaaaatttcaccgaccactcaaatttatttttgccttcatttgtaggacttaaattgctaattaaaataattttaattccactttactataataaagcatagaccattttgactttagtaatgatgaaaagctttcaaaaattacataatttttccgctcggtttttattttttgcaaaaactccaaagtccatttgtctcactgatttaatagttaaaattgcgacatccttaatttatttgtttcacttttctgtttttgtttctttctttcttttaatattgttgtttccttcaacaaccatacatatttgattgaaaattcactttttccttttacacccgcttcatcatcatttgcttgctatactggttcaccacaacattcaattacaaatccaccttaatcctttttctttgtgtttgttttgatgaaaataaatgtttgctaaatagccaattttgctttttgacgaaaaaaaactactgcaaattcttccggcatacggttttataatgctttaagtaaaatagagaagggggggggcagacatagaaatagaagttgagagccagagaaagcgcagaaaaaatgtgccggatgagaattaatgtgtgcgcgaaaatggcattgggagaaaatattacatattcattattaattaaatacgctaatgaagggggaaaggggggggggggtagaaacagcacaattttaaaaagtgtaaatgaaaatgaaattgtttggctaatgtaaaaaataaaataaattgggcgaaatttggtccaattcagacagaattccgagattttcagctataaactttatgtatatggatgatcagaaaaaaatttgatcgggcaccaaatttcgcccgcagggcataatatttatgagcattttttagaagaaagtggggaaaggggaatcaattaatgatcagaggagaataattaaaacctgtctatcactgtgattactagagccctgacgggcttttaccgggcgacccggtcccggtcccgtttttttttttgaaaaaaaccgggcccggtaaaacgggctttttttgaacgggctgcccggtcccagtcaaatggctaagcccggtcccgggcccggtactttcaaaattccgggctctagtgattacgatttgctctgatcagcaaaaaaaaaacggtacaaaatgacaaaaataaacgaaaaattaaaaaaaaaatggggcaaaatagaattttgaagtgaacagcagaaaaattgtaattgagcacatggaagaaaacatttttcttctctcagcaggcacataaaagtagagaaatttgaaagatttttcggtttcatatttgttttttttaaatgttcgtttttggcgcccatgaaatttaaaaaaccgaaaatttttgcggattaattaccgtaggagacgggagaaagtatggtaattcgatcgtatcataagacattttggcattctctctctctctctgtctttgattcacaaggccaaaatcgcacaatttcgccttactttttttattccaccaaattctgttctcatggtctctgactttcgcgcctaaaaatttaattattccttttttgttttgtaattatttcgttttttcaatctatttttttttttttttgaaaaatattttgagtaagagatttaattttaataaaaaaaaaaataaatcttttcttaaaattctgataattaaa

SEQ ID NO: 18964 - DNA, 2766 bp, Heterodera glycines
ttttcaaaaaagttataaactaaaattcacagattcactaaaaataatgttttttgtgaattttactttataatttttttgagaaatgattaaccgcttagctattgctaactcatatgttgtaaacatgaagagctttgtaatgttaactaatttataaaaaatggttggctatgaaaaaagttatggctcttggcaacaaaaaggccgtttcccccacctctgctgatggttcttgccagggttagtgcacggttgcttgaaaacaccccccccccatctttttttggtttcgtattttaaggtgataatcgtttaactgaaaactgaaagcggtttttggccaaatgccaattaccgacattttcctaaatgaagcttcccactgaaataaatgaaataaatcccccctttgaggagggttaaaaaaatagatcccccgattttttgtcaagttaattccattcaataaaaatgaaattaagtcgataattgccagaaaataacccctagaattttgcaatccactccgaacatggttttggggtgaacgatacttatacatttaacgatatatattatatataacaagatactttcgtggttacgaagcctggtcttacgacataatatttagataacatctttacaaggacagaaaatcaagataaaaaattttgcaaaagatcattgcaagaaatcagtttgtttcattcaaataattgcgtgataatcctcttactgcgcgttcactttccgtccaattgcttttgtcccaccaaatgggcccctcttcaacagccaataacaacgtccagccgtttttggtgtaactgacaggcgaatgggcgttcaaaaatgcctacaaaagcgagaaacaaacagttaggtagtagagttaccgtatttcctctaattgaaggcccgggtcctttatttttaaaacctcttctatggggtcttcaaatggaggggcccattggagggagacacatatgtatagaaaatgcagaaacaaataataaagaatgaaaatgaagagaaagtgcagactaacgacgacatacctgtatgggccaaggatttgaccggatgccgaaaatgaaagtccggaatccggacattttttcaatcaaaaaatcaataacccttgaaatttctcaaaatttgttcagccgaaaaagcttaaatctcccctttttggcgcgtttttgagcagtttctgaaaaaagatttatgaattaattttgcaaaaattgaaaaagtgcgtaaaataggaatctcgaaaaatttcaaatgcaacaaaatggaaaggaaatttaaagctaatatctgcttcttctgagttgttaccctgcaaaatctgggatttttctgatcacttctcgtaaaactatgagtgattgaaatttcactaaaaagtttagcctaaacttttgcgcatatttaaaaaacaattaaaaaattttttaaatttttattcatctccctttttgatagaagaagcatcagagagccttatttatcttgtaaataaaatttggcgcgttttagagcagtttctgaaaaaatatttatgaaaatggatagcaaaaagtttaatctacatatctaatcccaaaaaagtgcggacaaacaattgacccgacggaaaagaaacaacaacaacaacaagcaaatggggtcaattagcattcatcattctttcgtccgccttcaattttcatggcttcaccattttgatcttggggccccacttgttacatagctttgcacccaaatacaccactcattatcaacctttcttggaccgttttctgaaaacatatattaggtattattattgtcatatgcatttgttctcatatgatgttttgtgtggagcctaagccaaagaaaaaggccctaaaaaacaaccaatcgcacaaataaagaaatcaatccaatgcttattaagcccattatttccgtaaatattaagtgttaccgctcgggtgatagttctggttatttccgcgtccgttcataaaagcaatcagtgccgcttgacaatcttccttggttttaccgcaaatatcttcgccattatacatagcagtagcgaataaaatttgtgagatgttgacgaaagcgatgattgtgaagaggattttcggcatggaattagtcatcaaaaattaaacaattgacgacaatttctattgctttttggttgaaaatctgttgaaattagaattgtataaaagaggcatacaaaaattgactaaaaattataactcttttcgttaaatgaatgaacataaaacactcttatatagaaatatctatttcttctaataaagtcccctgaaattctcctaaaaaaattccagaatccgttcccctccctgatggacaagtgctgttgcttggaggaattgggggggggggggggggtaaatatgtatattatttattttttatgatgcaaatggaatggaaagttatttgatttcgccgggtaaatgatgaatggtaaaaatggtagtgccacaatcagtttttatgcggccccctcatcaggcagaagaatgacgaaaatgaaattgagaaaggcacggacgcgcgcgaaaatgtatgtggacataaaatgcagggggaccgccagtgctcttgaacctccttatgccctgatcaattgctgatgcagtgaatccgcccatgccgatttgcgccataataacctacacgctgaattgcatctctaatatgtgatgtaccaaaccg

SEQ ID NO: 18965 - DNA, 1518 bp, Heterodera glycines
cgttgatgcaagcgacagatgaggtaaaggtgggatcgttaaaaattaggttgtctgaaagtgggcggaggacggcctttaaggaaaattggcggtgttggaaggtccatacgaagcaatggctgtggggggatttttggtggttgcgacgtgataagaatttgtggtgggatcattctcatcgcagcgacctaagacaaaaacaataatcattagagattaggcttacaatttcaaatatgtattaagcgagtggtctcctcaccctgttatcactcgttgtcctcctcttgattatgtccggtatgggcggtggcggcgtatttctgatgaattctaaatcgaccataattgggacttctcgcgatggtttcggttgctggctgtcgttgtcattcactttcttcacacagttcgtttgttgttgccttggcacggatgtgcccactgtgttgtttggcatttcgtcggtctttcttaaagctgtctctggagttggttcggtcaaattaagagaaagtagggggacgggtcttgtggtgtccattgttgacgttgttgcaaccattttctgatgaggaccaatacgttctccgacatttcccttccttgacgatgccttcgtaggcttcggaaatcgcaatggaaattgttttcctcggtttatttttgaacgtcttgagtgtcttttgaattgtcgaacaactgcaggaaagtgttcttgatcagtgatgaatgcataagtgttgaggttttcagaagaacgaattggatttggatggggagaagattggatattcggtggcgaaactttggccataatttgcgacggaggagacgacttgaagtgattttgattgagagatgaggactggagaagaaatgatgcattctcttctggaatttactaacttgttttgcttttttcataattaattcaccgtgcaacggaggaggagggggaggcggtggaacaatgaaagaagaagcctcacaatcagtgccatccaaaattggaggtggtgccggcggtggaggcagcagaccatttgagaaggaaagttcccccgaagaaacggccgactgactcgaaatttccatggcatccatttctaaattgtccgccgcccgttgctccgactgaacctttggcaatccttcagacccaaaggatttgttttcatcctttggtaggacaacgcttggaacgggactgaattgagtaatatgagtgccaatgagacaacaaacagcaaaacgacctccgtatcacattggtagttgaacattccttgtccgattctctctccttttttgttgcgacttttttaagcgatgcaagaaaagtggtcagtaaatcgtccatcttcaatttgtccaatttatggagttcatcgccaaaaaatgctcgtatcatttccaccgaaaagccagtaaccgagcagaaatttgtcaacatttcttttgatgcattttcttcggcagaggagacgatttcttttttgaagccttattatt

SEQ ID NO: 18966 - DNA, 1476 bp, Heterodera glycines
  unsure (1)..(1476): unsure at all n locations
ggggactgggcttattcctgaccaatgatttctacncctccatttccattcttttaagtgtttataaaaattaccacaatatttcgattgggcagaatgcttcctgtcggtttcgcttccgcttcaggcgccgatgataggtttgttcctggtgagccgggcggagtcattggacctcgctttagggctgattgttcgggcgtttccgaactatttacttcaggtttcgtgccaacagcaacatcatcaatcgtcgcagcagaaggcattgccggaaaatccatgtcaaattcagttgggcttagcttaaaatcaaatggaaaaataaaatcactccaaatttctgtacttcataatcgggaatcgtacagttgtccaggtcaattttgatcctaattgtagaatacgactccactcgtcctttgagcattttatatgccaatattcgctgcatcaaatcgttcctttccaagaaggtgtggaccatgccgtgatcttggtcctgtcgcgctagctccattctgttcaaagagcggtaggaaccgggcatcggagttggcggcagttgtcggctcgaacacggcgcattgtcggcctcatcttcttcactctcaacttaataggaaagaaataaaacagtagagaaagcctaaaaccatggcattataatttacctttctttttcttgtttgccgtatcaaaagcttcgatttcgtccaaaatcgtatctaagggattgacgccgttaatcgtttgttgttcgattgtcgctggcttattgttaaattttctaaaataaaaaaattacttaaataaaaaatcggtagaaattgttacttttcttctgtctttgactggttttggaccattttttcaatttgtcctttgggcattagtttttgcttccgttcattcgtttgttccagttcatcggttgtattcgttttacgttttagaagagaagttggtttctgaggaaattgatttattgttattatttgaggttataaaaagacaaaaaccttttgacgtttcccgtcattttgcccctccgtgtccgtcttttttctcgctgtttcatttccgttctgttgttgcgtttctgccgtctccttttttgttttttgggttgtcacttgaatttgcttttgtgtgaagcttttccgacttatcattattggtaacaaaacataattaattataatttattaaatcagaatgagtgcttaaattaaaataccattaaaacaaaattcgtggtgagcaaatcgcggtaatagtgtgtacatcattggttccaaaatgtgcgaaaaaatttcgaacgccaaaaactttttattgcgcctcacacccacttgtaagagatggatagtggtgccgggaataaggtaatccttctgaattggtgtcccgacggaaaaaaataaaaaaaatttcttagtaaatcactttttctatgataaaaaaatgcgctaa

SEQ ID NO: 18967 - DNA, 1214 bp, Heterodera glycines
ttaatttcggcttttataaatgttgaaaccttgaaattgggtgaatttgtgctagggcgaacctaaaaaaatatcacaatattcatatttaaatttaattattatgacaatttatttcacaataataaaacataattttgctcaaactaatcaataaaataattttggtatttttgcgatagttgctcgtgccctctattatcttgaaaaaaatataagttaaaatttaaaaacttgttaatcaaaaactccgaaatacatatcaattatttgccctaacttttttgaaagtaaataaaaattaacagaataatagagaattcttcgagatatctattataagactttagagctattttataaaaaaaaataatttttaattcaattccttttaaaatacgcttttgtccatgtgttcagtgtgttcatttgtcagggtttccctgctgtcccggcagtcagcagctcgtttccctcatgtccggttacgtcgtctctttcgcttattccgtcgagaattacggccctcgagaattgtgcgaaattttgattgaagacgttgaggggatgaagcacgatttgcgagcaatggtcaattgcagcaaaggtggcggggaacgaattgtggacggaatcgatgccaaattggacagaaaaacagcaatagccgaaggtgaaaagatggcatttatcaccggcatcgatttggccatttgataaccaatattatggcttactttttttctcaattaatcacgatttaatatttttcgaatataaaataattttttaataacagattaagaattaatttaaaaaatattaaatataaatgatttttaaaatttttaaagaaaaaatcaaacaactaagaaattgataataaataaatattataatttacataatctggtccaagggtttcggtcccggatttcgaagcttagcgttccctaaagctaaagattatattcggcaaccttaaaattttacatgggccaaaatcttggacccgtcaatattcttagttattcttttttgtaatatttttgttttttatgacattatattttgtcgaaaatatttcaaaaatgacaatttctcaataaatttacttctggtcgggccattggaatccacggaaaatttttcaaattttccgaaaaatattaaaaacattaaatctgtttaattaaaaaaaaatattttatata

SEQ ID NO: 18968 - DNA, 1457 bp, Heterodera glycines
ctgcaaaagcgactggacatatcggaagcacaaaatgggacggagtcaccgacacttttgaagagcaaattcgcatcatcgataacctttgtcaagagctcaaaatcaccatcaataagaaggccatattcagagacccattcagaggtcaattgaattaaaagtgggccattttacgtggaaaaccaggcatttcccttttttaatccaattccgtattttgccggaattggatttttcgaagattttctatttttcactcaacgtgatatttttaaaaaaggaagaaatattcgtacaaattgttttaactttccatttactatactttcaatagctttttaaaagttgccgggtttttgactttggaaaggcagccctaattaattaattatattccaaatacttttacattttattcactcgaaaagaggactgaacagaagagactcaaagcctggtttaaggaatttgtgcccatgacgaggtaccaccgcctgaccaagtgatcaccaacccgggcaaaatcagtgcctaccgccaaaaggaggaggttggaccagcagaagaagcgaagggatgaacggattaacaggagatgatcattagagacaccatagtgccgcttatacagaacgataattctactaattgatacctatttttctaattgagcccccctcttctcccctgccccggtggttcattttgtgtggggctttacgtacataaagtgggtccccttaaaaatggggacactctccaactcacattatttaaattcataggtttttcctctttgttctttcaaattcttgaacctcaagtatgaaagaacaatatttgctttacagcaaacaaacactttaaaacattctttgaaacttatttaaaatatttgaagatttaagcattccatcagttaaattcggcaaaatttaaatttaaacaatttattgtaattttaaaatgaacaatgtccgcaccaaaagtttagtggaacacgctgaagcaaaaggaatcgacacaaacacaatcattctggccataaagtaagttcaaaagcataattaatgctaattgatgacaataattaatagtgcttttcgtatattttgatctaaatcagggtttccatcgaaaatttttcaaaatcagaacatcaagtccaaaaaataagattttagggtcaaaaataagaacatttcgcaaaattgcttcaaatcagttatttttataatttattaaatcaaactgtattaaatattatattttcacctcttattattgattttaacaattttggggaggaaataagcaaagcgtatatttcagtgcattcgggatcaaaaaaatcagattttaacaatttttttgcggcgaattttccaaaaaacttttggtgaatgggcaagaggagagggggtccggcggtgccgattggcgccgccggaaaa

SEQ ID NO: 18969 - DNA, 2227 bp, Heterodera glycines
  unsure (1)..(2227): unsure at all n locations
tacgagtttaatccnngaaattttggaaatgtatctcatttncgtaaatattctggaatttttagtgttntcgtaaatattttcgacgagttttttcgtaaatatttatttaaatatttttgaatttttcataaaaataaatccaccccctaattatgattgaaccgcaaatgcaaggcatctgcgcaactttggcttcgagggctccgaaaagaacaaatgcatgaggatttttatttttgcagctttgattttaatgtttcgttttgcgtcgatatgcataaatataaaaaaatattttagactcataaataaaatatttaccaaatttttttgcatttttatcaatattttggtaaatattttggcattttagggtttttttgtgaaatttcttatttaacaaaaatgcagtaaaaactaaaaacacacccctaaaaattgcgtaaaggtgttttcgacagtgattggtttcgacagtactttttaattaatgttctacataatttattgtacattgaattaatattattaatatacaatttacatatacaaaatttataattgaagtacgtaataaaaaataagtcttatatgaatatttttgtcaaaagatttaatgctttcacattttctatacatatgtcttatgatagattatagtcaaaattactacaattttcttaggtaaggttctcgaattgtgtgggaaaatctactaactaatgccgggtttgagtgccaagatgcaaatctgcaggctcttcaacagaatttgaaaatcgcaaacgctctttaatgtataagaaagagcctgtgcttatcattgtaattttgaaaacctaacgcgacttatatcatatagaacaattttttaaaaacaaattttattgtcgagatcaatcactgtcgaaaattaacagcccaagaattgaacttttggaaattttaaaaaatagataaaatttaaaaaatatttttaaaaaataaaaattagaaaaacaaaaaaaaagtcgcgtccaatcttaaaaataatttgtcgtaatcgtatgaactttatctcggcaacgcaagaaatgtaattaatttgcaatgcaaatgcaatattgaaatttttttgttcactttttggtttttatatttcaattagaagagattttcaatatttgttgctcaaactttctcatttttgtcaatattttttaatattttggcattttttttaaatatttatttaatatttcgggatttttttgtaaatataaattctcaccctaatgaatgagacatccgggaaaaatgctctgaaaattgcttctcttatatttgcggcggtcttttatttttacaattaattatttgagtaacgaaacaagcaaatgtcggctaatcaattcaaaaatatttaattttgggtacaataatggcctgcaccgattttgccaggatttgcctttccgtctgtccttcgaattcgtcgcatcttcgctgcccccccccccgtttttttgatgctttgtcatttgaattttgtttttcccccttccccctctcatcaaattcaaaatcccccctttcgctccaacttttgacatttgtcaacaaataataaatgtgtaaagaaatgggagggtccgtccgtccgtccgtttgctggcatttgctaaatgcacaaaatgggagaacgaacccatttcttaggcaatgcaaacattgttttgctgaatatgactgctgaaaagtcacttttttattcggtgatttttctttccataacttttcacttttattgacccctgaaaatttaatttaaactttttagctaggggttaggatatttttggagaaccaccatttaggggttggatcatccaaagattttttacaacaacaaaaaaaagatgtggaattgtcacactgaccaaaaaacagttgaggcgatttctttttcatttgatattcaaaaattatctgagaatgagtggataaaatgtctgccctcttttctgcctcccttatcttttttgtttggattatccgaatcatttaatcccttctctaataaaactctcttcaaaaatgccgccgcctcattaattatgcggagaattaattcccccatttttgcataaatcattaatcataataaatattgtcaactttttagttaggcatcaaattatgcctaanatttcagcacaaaattaatttaggaatttggcggggg

SEQ ID NO: 18970 - DNA, 2212 bp, Heterodera glycines
attactgaaatgccagccaaacccatctcttctgtggatcgcatgaaattgttgctgagttcgggggatggggcggacgtgcactttttggtgggccaaagggacccaaaagaggcgagtgccgtggaaattcaaagcattacaaaattgttttggcttttagcttttgtcggctcacaaactcattctgatggccgcttccgacgtgttcgaggcaatgttccgttttgactccgcaaatgccacgacttccacttcaaaacgtaataaaactgttggcctaaaaacattccctcaagattttggggaaaagtaaaaatctgagattttttggtattttacagttaattaaatgaaagtttcaattttcagcccctttggatttggccagcagcagcaaccctgtggtggtcagcgacgtcgacgccgatgtgttcagggcgatgttgggctttatttatgcggacgatttgagtgggatgaacggcgacaatttgttcgacgtgctttacgctggtaaaactttaaaattcattattttcttcgtttattttaatcacttttagccaaaaagtacaacatcgccggactggtcaaagcatgcgccgaatttcccatttctgagttgggcaatgtcttccacactttggacgaggcgcgacttttcggagagaaagtaacattttcaaggaatacgaattaaatgggaccgaactgctcgagagtgaatctcggcttcaaatcccggcacaatcctctacatatggaaaaactcgtttttaaaggcattcgccgaacactgcttggaatacattgaccaaaatgcggacactttgctcaaatcggaggaatttctgcgcattgatcagcaaatgttgtgcgacattttgaagagtgatcagctggtgatcagcagagaatttacgctttggaaagctgtaaaattggatttttaaaattgtttaattaattaaaatttgttttttcggcactccgttgggccgattggcaatgtgagcaaaaaggcatcgaatgttcgggagagaatcggcgggaaatgctcggcttggcactgttcgaaattcgcttcccacacatcacaaaggaggacttttcgaagagcattggtaatgccaattttatttattaaattttgtctaatttgggtaaaattaaaaaccaattaattctggcgtcacgcggaaaataaaaaattaaagaataatttataatttatttttaaatttcaacaaaacagtgccgtgcggtgtgctaaccgaccaagaagtgatcagcgttttgctgcaccattgcctttcgtacaacggcagcgacgatacgcccgcggagttggagcagtatccgttgcgattccccgacgaagctcgcggttcgcttcagcaaatctgtgcgcattagggaaattttttggcgaattacgatggaccggaaaattgacgacaaaatgggcaaatgtgtgaagttttacctgcaatgctccaccgaaaatccttcgcggttttccagattttccagacgaggttagagagaaggcaaaaaatatgatttgtctgctcagagtttcgatcgaaagaacattcagttccgaaaatcagtcctcttttttctgtaacaaccaaaatttgtaaaaatataagcctttctagtgctgccaaaaaccaaaccgttgccaactctcgactttggcaataaatttatttttaccagcgacgatattttttgccggctaattttaaaataaagactagtgctgaatggcatccaccacctgcccccggacacaaaatggcatttaatcaaaaaattatcttttcatttccctcactgcgacccctgtcctccccgtccactttgttttctcgctcgaactctgtttttgaattatcccccccccccccctccctctggcaattacccatacgccccattaatcgcattaattaggtgccgttttgcactgttcctgttgggccactcgtcgaattgtctcgcaaaaggagggcaaaaaagaccacgtgcgcgagaattcacagctcactttcaacgccaacacaaacattttggagcttggagacccaatgccaattgaggtgaagccctcattagattattaattacaaactttttaatcaaattaattctcagaaattgatgtctgctgacaacggatggtacgacgaagcggacgaca

SEQ ID NO: 18971 - DNA, 1761 bp, Heterodera glycines
ctcccccgccttttcttctaaactctattaattaatttctattatagttccattatgttcattatttcccatggtttacagccctcctgtaaaaagaaagaaaattggaaaaagttaatttggctaatttgccgcggcggaggcaattcgattgaaagcattgaaaaatgagcgcactttgggtgcaaacaaaagacaaaaaacagccaacttcagcccagtcagcggggacagtcatttttgagctttcatcgcttagcaattgccctttttcaccatttgccttttgctgcgcaaattttccaaaaagagcgaaactggcacttggccacttccccgcctcccccaacgttcatcctcttcctccccctcccctccaacgttcatcctcttcctccccctcccctcttccccctgcattcccttccactcccttcccttccccccccccgcgccccctcccgcgccctgccaaatttgtctttttcccttccattaattattcgccttccgttagtgcccttgccgcctcctccctccatccgaccgacgtgatgacggcacacaaacacctcatccattttgtggctcattttcgctctttccgttttaattgtctgttggcagctccgccgcttcatctggcaattttggccaattcatgataattggccaaaataggtcgttggccgttcccttcccccggggccaccgcttctttttcttcttttttttgcgtgaaatttgtcccattgttttttccctttcgattaattggaagacccaaaagaggaggtgtcgggagggcgttccttatatcgtcccatgccccggttcaatccctgaaatatcccacaaaggcatttgttccctcccctcctttccatttcgttcggcatccgcccaccttctcctcatgtggtacttcttcatgccgtgccatccatctcaatcaatcttccccctccccttttccctcctttcctttggccccgcccttcgctttcccaaattcaatctttcagggccttttgttctttcgccatttatctcaaccgtttttccaattctttgttcattttgttggacttttatgcaaaagtgccactcgtagggcgaaaattaaaagatgggaataagaaaaagaaaaataaataaataaaacgcgaaagcaaacgttcatttgctttttggtctgtaagtccgtaggttggccctcccccccccctccatttagcctgccattcgctcgttctaaggatgaacaaatgcgatgataatgaagatgaagcacttttggcatttgctctctttgccccgtctcataaaacggagtcaccgccactctctcttccccaaaattggagtttcaacggaaacacgaaaaagtggccaaatgaggaaattcgagctgaacatccccccccccgccctatgccgtgcccctcttcaaacatttggtcgttattcatttattgcttttattttagcatattgagatgatgtgaatgtgccggggtgggaagcaaattcattgcgtttagtcaacgcgtaattgtcggtgtatccttagcatgcaaatagtgaacgaacgcattgagtaaagggtgccaattgcgtgggccaaatttgggagggaaaacgtgacgaaaaggtgtccaaatgaatcgaacattacgatgaaatgcgcccttctgttgtcattccctataaatactgctccctctctcagtgccctccactatttcaggtcatttccat

SEQ ID NO: 18972 - DNA, 1078 bp, Heterodera glycines
  unsure (1)..(1078): unsure at all n locations
tggtaagacggacacttcagcttcgtttaagtacagttgccaaatgcacttcctcttcagtgtttatgagttttgtcctctgttctgagtttatcccggcaacgaatgcgaacgaaaacggcagaagcgcgccgtgggggacggagaggtgagaggaaacagaggcagtggataaagcgaaacgaagcggaagaattcgggggggggggggggtcaaatggagagacaacgaaacgaacatccggggagacaaaccgaaccaacgaacacacagctgcttaaggagccttcaaagtcatcgcctttcgtccaaggcgtgccttggacattttggaatcggatggttttggcggatttcggaaaagagcattggatgtgatggacggcgatgggttcggttcatttcaaaagagagcgttggattcactcgaaggcgacgatttcatggggctgaagaaaaagaaggctttgactacagcggacggggacggcttcactgatttgggcaaaagagcattggatgttcttgacggagatgattttgttggcttcaaaaaacgcagcgaaatgcaaaagtaattttggatttgaaatttggggggggggcattggcaaattgcgatcgatggcacttccctcaaaacaatccctttgtttctgcgcaggaaactcgcactgttagaccaaattcagcaccgacaaatgagggcgagaagagcattggacgccctagaaggaaacgctttcggttttcggcgataagcaaaaagcctaagaaaaaagggctttacgtcagtctttggcttgaacagaccgatcacaacgtcaatttatgtgattttcgatcatttgatcaaacggttgataaatgttttgatacgcttacatacctcttcaataaatgaaccacttattaatcggttacaattaaaaaggaaaggccgagagaatgaggcgagaaggaaattgtgactgactctttcaacagaaggtaatcattgataatttcaaaaaagaaaaaaacaattaaaccgctgaaaaattaaactgcataattttcaactnaatgcttaacaca

SEQ ID NO: 18973 - DNA, 2081 bp, Heterodera glycines
ataaatgtaaaaaattgtttcatatttcgtaaatttctttgattttaaagctaaatttagttaggtagacttaaaaaattcacataatttaaacgctgtctatgccattcaaaaacgatgaaacatttttgaattttaaaatgattttttacaaaaataaaatgggcaagtccccactccccggtgccctcttcttttgcagcaacaatgttttatttattttggtgtgagcacgccacgttcgatcaggtcgggaatctcgacagccatccatgggccaaggccaagtgagaaggcatgggcaatgccaaacttcggcacatttctggaagcatatggaacagggctggccgtgatcacggaaatcacggggtttttggggtgccgtgatctcggatcacgggtcacggattttttcaaattttccgtgattttgatccgtgattggcattttatatagggaatttttattgagacgaaaatagtaaagtggtgtgaagaaatttttgagaaaaatagataaattctttcctgcttacaaattagaaagtaaacatatatatgtagtctgttggttaagccttctgtctttcgttgtctgtcccttgcgttcaattccccattgggataggacaatttatatattttgttttgataattttaattgaaatttaattaacaagaaatttcataacattgaaaattatttttctttattttttaaaacgtccatagaccaataaattaaccaatgattggacatattttggacaaaatctgttaacaaattcactcaaaatttttcccggcggcgcctgtcggcaccaccggcagacggacccccattttaccgtatttttgaaattttgaccccaaaatggcagaaaaattaccatttttggcatataaactgctaaaaaccctattttttctctccgtcgcttaaatttaaaacgacaggcctaatcaaaattttcagaaaattttccaaccctctaagaattttttctaaaattttcccgacgttcagtatcttttggggtgttcagatcgtcatgaagaactgagcatgttggtccaaaagattttttcagcatcaaaagttagcttacaaattagaggaaatttttctctacataaatagatttttggttaaatttaagaaaaatttgaaaaatcttaataaattagttaaaaataaaaaattttccttggagatttctacaaaaagctctaattttcctcaaaaaattgccaaaaatcgtaaacttagtcattttttggaaaaggtctccgcaaaaaaagcggtttatatgttttggtttctttaaaacattttttgggaatttttcccgcgattaaattccgttttttaaataaatttaaataaaaaatcattagaaaattttttttttataatcacggatcacggctcacggatcacggaaatcacggggattttggggtgccgtgatcacggttcacgggtcacggatttttttaaaagccccgtgatcacggctcacggatttccgtgattggaaattcaatcacggccagccctgaaactgatgaattttttttgtttttaacacaactttgcggctttcttaggagcttgcaaaagacatatgttttttgctgtcacttggaaccggaagaatgccaccaagaaatgtcgaaaacattgacatagttttgagccaactttttcatcgcttgtgcggtctatcgatgccatgaaaaacctcaaaacgattatggttaatcaggtgcatcttttgagctccagttcgcattttgaacattttgcaattttttcaggtcaccaactctgatggagctcagttgagcttgcccgaacgaaatggtttttttgtcattttatttttttgtatttttgtgattttacaaaacattattaccgagcccggatttatatgcaaatgcatattttttgctatgctctgaaataaattttccataaaaatgtaagaaaaagatttacaaaaaaattcatgggttggcgagtgtccttgtgcttttccggcacccgagtagcagggaacggatttatatgt

SEQ ID NO: 18974 - DNA, 634 bp, Heterodera glycines
gaagcattttaaaaaggtgggtgggcgctcgcgctatataaataagtgcgcgtgtccccatcggcccatttcaattttttcctgtcaaacatttcgccagcagttttttgtcagcagcatatcggataaaaaagcattgtttaagcgtgttatcgcagaggttgacctcactataagcacgggcggcataactttgagcggcccccgtctgtctgttccccgtttcattccttttgaggaaaacgggcgttgccgcgcatgtaaaggaactgaggctgaggtggacacaatggtcaccaaggagggaatcaccttatggtgcacacgaatagaaaaggctcagtttgtcccttttgatgttgtctacgagcttcccggtcattgtttctttcgcgtgaagaataaggcacgtgtgttcagcgttccatatagcgaactgtcgtcctcagacaagtgcgtccagccgctaccaccaccaccaccaccaccaaaacctcaacggacaccggacgacgaggaggagaagaatttgagacgtaaggcaaaggtggcgcttgacttagtggaagccggacttatggcagacgcaatgatgcaggatgggacgcgttggaagaaagccaaaaccgcgatc

SEQ ID NO: 18975 - DNA, 2780 bp, Heterodera glycines
ataaacaatttgcagtgaataattctggatctgaggttgaatgtcttatttatctcgttatatttctttttgacgcaaatatcagctcttctctcatttttataaattcttgagcactattgggcccataaaagttgaagctcaattgacctttttgacgcctatagactggaaatttagccatttttgaatagctcagaaattttttggaccgcacaaatttttgagcacacattttcaaaaatcgtatagcggttgaaggcaaataaatttgggtaattttggaagctcggggaaagggttaaatgtgtgaagaaaattttcgattttcacatttttggtctaaacatggctcaaatgatcttttattgaagcaatgttgaatttcagttcgtttccgtgtatttaaacaaagttgaaccaaaaatgtgaaaatcgaaaatttaaattttcgactttttgttcgaattcgggtctgaggttcgaaattagtcaaatgggcgccggattcgtgatcagtgaccccgaaaaccccataaaaagtgtttttatgacttttgaaaacataaaaaaatttgaaaagcggggggcagagctgtgcgaaaatcacaaaaaaactttttcgtatacgaaaacgaaacgaaaacgtgcattcgatacgaaaacgaaacacgaaacgaaaaaaaatattttgaaacccgaaaacgaaacacgaaacgaaaaaattttgacggacgaaaacgaaacacgaaaacgaaaaaataaccattttcgtacgaaacgaaacgaaaaaaccgaaaattttttgaacttatttcaatcataattaagaaacataaaactttaaaattgtatcctctaactgaaggaatgaagatcctagtaggtggaaaagctaatgtggctctaggacaagggtgtgaccaaacaatttttaaaataaagaacatcaatgacaaaataaggtttagggtcaaaaaagacaatcttgcaaaattggttcgaatcagttaatatataattttttcgataaaaaatgtattaaaatgttatgtttttcacatcctattatggattttaacaatttttggggaagaaattagcaactgctgaaaaaaaagattttcaaacgttttttttgcagtgtatttttttttacaagttgatgaatgggaagtgggtccggcggcgccgataggcgacgccgggaaaattttttgaaaatttgagtgctattttatagcagattttcaattaaaatcggtaaaaacatgattaaaaaatcggtaaaataaagtgcggtcatgcgggatcgaacattaatgcacagcacaaagcaaacctgctgttttcaccactaaactaaaatacttaaataataaaacttattatttctttccaaaaaagtcattcttaagggtgtaaatattttcgtctttttcgtaaaatattgctctgacgaaaacgaaaacgaaacgaaaatcctaaattttaaaaaccgaaaacgaaacacgaaacgaaaaataaaattttgaaaaccaaaaccgaaaacgaaacgaaaaaactttagcggacgaaaacgaaacacgaaaacgaaactcaaaaagtgccgaaaatgtaggacgaaacgaaaacgacacgaaatttcgtccagccctggggggggttccggcggtgccgataggcgccgccggaaaattttttgtaaatttcgttgatttattaacagattttcaccaaaaaaggtcaatttttgcaattaaaagccaagcgacgacttttttttttttacttttaaaaaggctgtatgacatttcgcggtcagggtcgttttcgcgtggccgtttcgcgtggtttaatttgctaaaggaatgaacaaacaaaaaaacgcaggaggatgggtgaagaatgatggtaaattcattgcctattttcctttttcttgaaaatcggtccactttccaaagctttttcaatttttaatggaaaaaacgtctaatttctagagcccggaaatttcaaatttgcggatcccgctgcgggattggtactgaaaattctttgcgggacgggatcccgcgggattaatcccgcaaatcccgcatttaaaatttgcgggatcccgcgcgggattgcgggattttggaaaattcgaaaaaatttcaattaaattcaaaaaatttccaaaaatcaaaaaatgctgaaaaataaatttttaagggctggcgggatgcattaaaaggggttgatgggtcgactaagatttttcgattggatccgacggtaaaaagttgatcggaaatcaaattattaacggttcataaattgactatttttttcttttcaaacccacttttttgcggtgcaatttttcaaaaaactaggaacagagggtcccggcggtccttatcagggatggcattccgaggccccaaaaattttcgaagtcggaaatcggaattccgaccccaaaaacgtcggaaatcggaaatttttcaaaaaatatacaatataataaaatttctaaattttttaattcttaaccaagtaaaaggtatttcacaaatgtttttagtatattcgcttaaaaaaattattcaattattttatcaaaatatttttttgtcatttttcattattttagaacatttttgggaaaaggagtgactatttttacacgttttatacagcgcgattttttcaaaaactttttggaaacttgggggagggtacggcggtgcggataggttcccgccgcgaaaattttggtaaccgatttt

SEQ ID NO: 18976 - DNA, 1190 bp, Heterodera glycines
aaaaagggatagccattttttgaccgtccatacttcacatatactcaaacggcccgaaaatcatttttagagcataacaactgatgacagccactgtcattgtttccaaagagattttttattaccagattgccaaaaaaagagatagccattttttttggaccgtccatacctcacatatactcaaacggcccgaaaatcatttttagagcataacaactgatgacagccactgtcattgtttccaaagagatttctattaccagattgccaaaaaaagagatagccatttttttggaccgtccatacctcacatatactcaaacggcccgaaaatcatttttagagcataacaactgatgacagccactgtcattgtttccaaagagatttctattaccagattgccaaaaaaagagatagccatttttttggaccgtccatacctcacatatactcaaacggcccgaaaatcatttttagagcataacaactgatgacagccactgtcattgtttccaaagagatttctattaccagattgccaaaaaaagagatagccatttttttggaccgtccatacctcacatatactcaaacggcccgaaaatcatttttagagcataacaactgatgacagccactgtcattgtttccaaagagatttctattaccagattgccaaaaaaagagatagccatttttttggaccgtccatacctcacatatactcaaacggcccgaaaatcatttttagagcataacaactgatgacagccactgtcattgtttccaaagagatttctattaccagattgccaaaaaaagagatagccatttttttggaccgtccatacctcacatatactcaaacggcccgaaaatcatttttagagcataacaactgatgacagccactgtcattgtttccaaagagatttctattaccagattgccaaaaaaagagatagccatttttttggaccgtccatacctcacatatactcaaacggcccgaaaatcatttttagagcataacaactgatgacagccactgtcattgtttccaaagagatttctattaccagattgccaaaaaaagagatagccatttttttggaccgtccatacctcacatatactcaaacggccccgaaaatcatttttagagcataacaactgatgacagc

SEQ ID NO: 18977 - DNA, 2240 bp, Heterodera glycines
tacgctccgggactcatcgagccgttgatcatcggcgacgttgtggcgcctgtgctgcgcgttgtcaacatccgtgggatgccggatgagattgttgaagaatgctacaccgctgtccaataccagaagctgatggtgaaggagatttcggatattctgatcgagatacggaccccgtccggtgcattgatgccattccagtatggaacctgtacactgactttacatttcaaaaagactccctacttctgaatttgtattccgtttatagacacttacgcgcataaaagttccatttcccaacattgtgagaaagagagagacaaatgaatagcctacaaataaataagatattgaggcgctgtgccttgacccgcgagcacttcctcggctgttttccggccgaccaaatcccagacccccgctcatcgtatccctattgcatggtgttgaacacggacacggcgctggagccaggcacgcattgggtggccgtctacattatgtcgtccaccactgttgactactttgactcgttcgcggactggccaccgacaagtgaaggcattcgcaccttcttacaccgttttgcacatgtcaaccgctgccccatgaatgttcagtcggaccggtcgagcgcgtgcggaaaacatgttatctacttcttgtaccgtcgctgccagggctggacccttgcccaaattgttcggcatttgacaaactgcaaaacgccaccggaccgtctggtggcagcgttcacacgccaattcatttttcacgatgctgacgctgccaagactatataaaacagcaacacaccagtacacgctttgacggaaaaaaacacatcgtctgataagcggtggcgaacatgcacgtagactttgatccgctcggagtcgactggacccccatgttcacatgcgcccaaaacgacgcaatcgtgcactcgggccccgccgacgcgggccacggactcaacagcatcacgacacctatgggaaccgccgaggccgccgcagcagcacacaactatcttatgattggtggtggccatactacctaccccgtgttctccggcctaccgtaccagcgcggcgccgggcttggctccatgttcagaagcttcctccgcttcctgttgccaattggtcgacaggctggcgccgcaattgggcgccaagggctcgagtccggcgcccgcgttctctccaacgtgctcgacggacagaacttgaaggagtcgctggtcagcgagggacgcaccggcctcaaaaatctgctagacaaagcggcggacaccgtggcaaagagtcggcagaacggtggcggcaacttcgacttcaaacgatacagacagaatgccgccgaactcaaagagggcataaaaagtggaaagaaaggcctcttttccacaatgggtccgccaacggcacctgctaagcaacacaaaaaggagcttcaaactctggaacgcatactccgccgacaacaaccgggctcaacaccccgcaagcgctcccgcaccgtgaaaacgcccgccaacagcgacgacaagaagcgaccgcgacgtgcgccccgctttgacacactcggcgcctactgagagccacaaaaaacatacgcgcatacaatgacttgtgcgaagcgcatcagtcagcagagtgcgctagcgttcaacagtgcgctcaacatttttgcggtaccacccaccaacgtgtcggtggcgcgctccttttttcgcgaactccttccattgtcaacgatcagccaggagggaccgtacctattccgcatgtacaatgatagcctgtgggccgacctgtcccgtgtgtacctgtacctcgaaatgtccgttgagaaggcaaatgcgcagggcatcatggagccaattgacagtgtggtggacaaggaagtcggcgtatgccagagcatcgggcaaacatttgtacaacaactaaaggtgggtaacagcagaagccctcgcagacgcacacatcagtattcaggttgaagtgcaaaacacggagctgtacgacagcgggacactgtacccgttcaaagcgtacatctccaacgagctgtcatttcccgcaaatgcaaagagccatttcatggcttccaacggctactacgtaagccggacacacgatgacgccaatgatgatgggttcaagaaacggtgtgcacgattttcgggaggggtaaggcggagtttatctcgcgcctcgactttgact

SEQ ID NO: 18978 - DNA, 1863 bp, Heterodera glycines
  unsure (1)..(1863): unsure at all n locations
tgacaggaaacggtcccttttccatccatcgctcattaattccctcncctcttttcccttttcagcattcaaacggtaaaaacggcttcaattaattatgctttgaattgagaggtgcctttatggtctgcctaatgagtccgatctttttcaggtccgtcttacgctcacacccctcccttgcaactttttcctttggtaattagcgaccgtttgccttttgagcgaatgttcccttaggcttcccttctgcgccattaatgtcatccaagctttttggggtcttaatttgctgagtgagtgttgtgcttaattcgtcgtcgtccaattgactttctctaaggccaagaagtgatcctttgcgtcgtcatccttggcaatttgaatgcttgcgtatttttatcttttcgattttaccgccatttttctgttaaggtaaacccatggatttatattctttggaacccgcgccaaacgcgacgggcattgttctcactgattcgaaagggtgaggggaggggagggggggaaggaaaggccgaacgataaacagcagaagaaagggtggcccaccgggggggggggggggggtcgattgattcccctctgggcatttttatttgatgactgattgaccaaaatgtaatttaaacacaaaagataatgagctgatcaccacctcaacgagtgccacccgacagacgagcatcggactgcgcatgtcgggaaatacgaacagtgcggggggtgggccgattcgttagccgtctcccgaggcgttctcccccccccccgtcactggtgattaatttttgttaaggttccgagtgataattgtcaatttaaatctcgtgccaaaatactctgtaaaaaaatttcacatcttttcgcattatttaaacgatttgaaatatgtggaatttttttcttatgaaaacaaatttgttcttgagcatatccaatttataagaaataaaagggcttcaattcggctttttgactcaaaacaaccgggtttctgtataagtggatttggaagcttactcaaacgctgagaaaagaacacagataaaaatggatacatcaccaataganaattattcgctttttcgcaatcattcttcatcatcaattattttgtttaatatttattttcttttatttccatgttttcaacaattgtattaataataaaacgtactttaatttaatttatttttttgtaagggattgtcacagaatgaaagagcaacgtattaagaaacagacaaaaggaacaataaaattaaaaaattatttggctctgaatgtatcacaatacgcatttaaagggggggggggagaaaaaaaatataaaaatgaattgcaaattatacagtatgagaaggcatacagtcaaacgcaacaatacaaaaatactgtagtactgcccgacaaaatgggaggataccaaaagggataaaaatgtgagattccgtttgtgtcgagaaactgttggtaaaaattctcactatcagtccatccgttcgagcagtactttcagtcagtgagaaaaatggatctctgtgtggggattaggattattcatgtcagatgattatgagatggttggggggggggggggtcagtgtgaaattctgttgctaagagtggtcgctgacagtacttatgcccgagtcggatgtttcgttgtggcagtgattggccgcctccgtgccgggcgactgttccatggcccttgccgtccatcttccgcccgtccctctgtcgtcgtttggtgccgacgcccgcttgacccccgtctcttcctccgcctcttcctagaggttcgtttccgtctcggtcccttcgtcctcttccttt

SEQ ID NO: 18979 - DNA, 3530 bp, Heterodera glycines
catcagaaaacgaatccgcgaggaattaattaattttgaataaaaatttttttataaattattcatatcccaaaaataaaaatggtaaaaaattacttttttctaaaaattacaaatacacaattttttgagcgagttttccggcggttggcgaatgcgtgtggcgttggcccgtgcactgttcataaaaccggatttgctgttgctggacgagccgacaaacatggtcagcgtcctgcatttgcggaaaatagcaattttaattcttgatttgtttaagttggacatgcgcgctgtctattggctagagaatcatttacaggtccatttaacatccaattgcattttaaatttaaaaaaatcgtaatgaaaatcgcatttttggatacattacgtgaaaaactttttttggcggttttcggctttggcgcgattgacgccgttatcgttggagagaatttcaatagttaaaaattttgaagttcaattcggccatcgttggcctcaaatagggatagggaccatcttaaaaattttgatttttttagaatattttttatgtgttatttaaaaacatttcaaatccgcttcatttataaatcctgtaaagaatttgtaatttggcatggcctttttgtatatgttaactctccccccgttttaaaggaatggcacggcaccattctgacagtttcccacgaccgcaaatttttgaacaccgtctgcaccgacattgtacatttgcactcacgtcggttggacgcgtacaaggggaactatgacaattttgagaaggtttcgtttttgaattttaaattttgttttttcaaatattcaaattgccaggcaatgcgcgagaaactgaccctccaacagcgagaatatgaggcacaacaacagctccgacagcacatccaggagttcatcgacaaattccgctacaacgccaagcgagcctccatggtgcagtcgcgcatcaaaatgctggaaaaattgtaaacattaatacattaaaaagatttgataaattctaaaactttagataaacaaaaaagtttctaaatttcctttaatttgcttctctatttaaaattatttgcttcgtatcttctatctgtcttttatcatggaaattgattacaaataatagtatgataaaggggacgtgtcaaaatttcaccgccgaaacaagaaaaaaaattattgcaaattttttaataagaaactatccagaaaaataaaatccttcagtttttttgaaattttctgatgaattactaagttttttcaaacgtttttccaataaatcgctaaaaatttttcaaaaaattttttcttagagttttcttataaattttcaaagtttgaaaaaattataattaattttcggtggtgagatttttgggtgcaccctatgataaaatgttatttttcgacatttttttaaaagttttcgcgttattttgcattttttgttgtggtgctcactttgcgttccaatgtttcagaccggtgctgcaacccgtcgagttcgactcggacgtggtgttccacttcaaagactgcgacaagttgggcaacccggtgctgcagctggacgaagtggccttccgctactccaaggaaacgccgtacattttccaggttgcgtaccataatttttttatgggccggggaggttgcaaatcgctgggatagggaagggatgaccgaattttgggatgggtccaagcgcaaatttacatctgtttttgttgggaacagcttatcccccctattttataaaaaaagaaaagtttttgatttttctttgaaataagaaaaggataaagaattttttgaaaaagaaattccaggggggagaaacgcttgcgcccgttttgtgctcttccctgataatttactgcggatgaatacacttttgtaatattttttaaaaaaatttgttaaaaacacaaatgctaattttccattttttggtttgaaagttgaaagttgaaactttttaaaaaatatatatttttattgaaaatttcttgtgaaattgtgaattgattaacaaataaaatgggaaaacaggtgatcattttaaatctttgtttgtttttggcgtttttctttatgattcgcttaatattcccccaaaaaatatattttttctgcttttccgattcctaatttttgtattttgcagaaggtttgcatcggttctcgctccgactcgcgcatttgcattgtgggcgaaaacggggccggcaaaacgacgctgctcaaactgttgctgggcgaccacagccccaccaatggcacacggagtgccaaccgtcggctgaacattggctacttcacgcagcaccacgtggaccaattggacttggacgactcaccgctggaactgctcgcccaacgctttcccggccttggccaggtgggcgccgcaattttttctggcattcagcattttatttcaccgtatttcctaaaatagagcctccgggggctttgtttttcaaccccttaggggggggggcgggtattttaaggggttctaattccaaaattaacaaataattttttacataattacattaattgcactaaaatttccggccacaaaaattcataaatttctcttacagaatttttttttcattattttttgaaaattaaaaattttcgggctcttcatttttctaaattctaattattatttttgagtgtgtattattttattgatgttggttgcgttcataaaaccttgccaatttatttcttttcccaggaggagtaccgtgccgcaatgggccgttttggtctgtccggtgacattgccttccaatccatcgccactctctccggtacttttccgttccaaaaataatgaaaaaattaaatctaaaaaatttaaaaaaaacatatttttctatttgaaaattattttcaggaggacaaaagtctcggcttgccttcacttgtctttctcttcaacagtgagtttttcggagtgttaaaatttataattaaatttaaaacaatccttaaaataattttaccttatttcttggcaggcccaattatttggtaatggacgagcccaccaaccatttggacatcgaaacggtggacgcacttggcaaagcattgaacgattttaaagtgcgttatttcactagtttgaaatttttcaaccaaaatcttacaatttagaaattttttaaattagaaataaattccactaattttttcagaaattcttgcacaaaaccgctagaaaatttttcaaaaaattttttattttacctattttaataaaagctagttttttcttgaaaattttctaaattttaatcagaagttaacaagcaaagcgtaaccaactttaaaataaaatggatatattttcaagagcatgatatttttaaatttttttgaataattagctgtttgaatttaaaataatgttttttttgcttcaaagggtggcgttgtgttggtttcccatgtcgagcggctcatcgagttggtgtgca

SEQ ID NO: 18980 - DNA, 2266 bp, Heterodera glycines
catgggctaaactttgacttcgagtttcgaaaactttgggtttttgaaatgcctaaaaatctctcattaaaaactttttttaagaaattattcagggtcggaggtgaccaaaagaaattttttttttcttaaaatcttgataacaaacagcataaatattcatttaaatcaaagaatgtgaacaaatttaaagtcagttaaatcattttttttacaagaaaattcgaaacaaaaaatctgtaattttttcttctttttttcgtactattttttgttaatttaaatgtatttgtttgtttacacttttatgacctttttgcgccaatttttattggacaccattctcaattcaattattttgtgtgaacaattaattgccttatttgtgcacaattttttttcctctaatttcaatggaaaatttatttttatttttcaatttcatctatttttaaattcaaaataaaactttaaatttaatttaattaagttttccaatgttcttgaaatttaattccattatttgtgcgtttgcttttattattcgtaattatggctttttcgttcatggcggcagcatgggcttcaactcaatgtgtgaaagcacaatttatagcaaacaatttgaaaatttgaaggctcaaagctatgtatgtaaataattttttaaaaatttcaaaaacaatttagatattaattagaaaattacaataattagatttaatgaggaaatgaataaggaattttcaatggcaaaaattaaaacaagcatcaaaaattttttaatgattaaaaaaagaagtcaatttagttttttgtagaaattgataaattttgtaataaatttaactttttaaaaaaagttaaaaaataaaataaaaatttatttaggaatagataaaaaaaaattatttgatagaaaatatatttttaaaggaaaatgtatgaatattatataaaaaaatttcctattctttttaagaccaccaaaaaaatacaaaaacaaattatttaaatatatttgtaatatttaatatatttttttcacagacattcttcattggtaattatttcaacggcgctttagtgacagccccgaacacaattaatggactctattcgggtgttaacaaaaatggaatttattgcattggaaatgcgtcaagtaaaacggaaaatttattttaaaatttacaataattataaataaataaatttaaaataattatgcaattaaattcaatgattttaagaaaatttttaaattttaaaataatttaaataaatttaaaaaatatgaaaagaaataaaattgaaattcaattatttccatagaaataatgttaaaattttatttaaaatttaattttaaaaaaatttaaatttatttttaaaatgcgtttaaatttattttaattttaaaaatcaatttcaaaattaaattcactaaataaatttaacggcatcaccccgctccgtgatgcctatcatataccaaaattcactgcttaattgtgtctaattaagtattgtattgtatcatttagccgataataattttaatattacaaggcacgtttgccggttgaccttttaaacgccgcaaaagcgtcaattggacggacttggctagtcatactgaatgggctgggctcaaactggagcaacaatttgaccgagaacgagcaattcattcgggaatttgtcagctattttccggtaaaatattacataatattaaatttaaaatttaataaagggaaatctaatcaatttaataccaggattataccaattttactgcattcaacaattggttattagcagttattaaagaattaataattggttaagctaggcatttttgggagaaaatggaataaaggatatgggagaatcattaaaaatgagcacccatagttcagtcggttaaagcattcaaccgtatggaaaggccgtgggttcgattcccaacgggcgagcaaccttttttgctctatataaatgatataaaagcacttaagttttatttacaatgtccatttaaatatttagaaatttaataatacttgtagacaggatcgtccattgagtcccgaaatttttctcgccccgaatccatgatgactcgtcaaattttgacagtcccgaccgaatggcgactttaagacacttttgaaaatttattaaatatttaattggttttattgaattaggtatcagccggttatgcaccgttacaactgcagcataagcatcattgatg

SEQ ID NO: 18981 - DNA, 1172 bp, Heterodera glycines
  unsure (1)..(1172): unsure at all n locations
atttcgcgtttttaaatgcagccanaatttccagaaatttcttgtatttgttttctgcagtaaaccgtgcctaaataaatttttaaaanaatgaaaatttgcgaataaattgaaaatatttaccttgactcgttgcacaaaatttaaagctatcgaccaattgctattttttttgctcattcaaatccgaaggttcagcttaaaaaatttaacgtaaaattattgaaattgtttaaaaaaataatacctttttcgggaggaaaggcagaagaaatatctaaataaaaattaaattaaattttaaaaaaattatttaaaaattaccggaatcgaaaattaatgaaatgtaaaggacgaccgccacaaagaaataatgcatttgaaatatcttttaaatgaaaaaataatgacaatttattcagttattgtatttatattaaatttacaattctttctttattttttaaattttcataaaaataaagccttaaaaatcgtgactgtgtattattttaatataggttgtataatatagagtttcgtgatacactttcggtgtgtatatattttcgaatatatatatatatatatatatataacatcagtgatataaagatatatacatccggaattgcatatgaataaatgccacaaggcaaccaacatgtttttagcatatgcatatgcattcgtgtatgcatcctgaatttatattaataaacaacgaataaatacacacatgtttaccatatgcatatgcaccagtttttcaaacatttttgattaaaactttcatgaaatttaatgaagctttttttgaaattttacaagctactatataaaacgcttagtgctttggaatgatataaggattaaaaaatatgttgcttttaagcaaatttatatcaaaaaaatttttcagcacagcaaatatcttaaaactgggagccggaaaatccgacacttaacctgaattccctggaaaattttcattaaatgcccaaaattttcaaaatcaattaatagtttcggtttctgccgaaaacagaagattttatctcttaaactttattcaattttttaaagagaatttaaagggttttcttngttnttnnntttnnnatnnctgcatcataaagtaaatttaggaaacttcaactgaaaaattcaaa

SEQ ID NO: 18982 - DNA, 985 bp, Heterodera glycines
tacaacaactcttcgggaatttgtagtagcccagtgggttcggatagcactcccgctcaatgcacgcctcgtgcacaacacggtcaatctcatcggtggtcacctgatgtttaatacaaataatggcacttatttaaatcgaatcatacgaaaaattggcgtttttatttgattcgaattttttgaaaaatgaaaaaaaattgaacaactttctttaaaaccaaatgtctaacaacaaccaaagaccataaccaatttgaaaaaaatcagcttggaaacatgaaatggataggatttaggggaaaaaaactattttccggaatcccctgatccggtttgtatttttatgggattttaataaaaaaaaaattcattacgccaggctcaatggcacgtgccgcctcgtcgagcacctcgcggcccaatttggcggccaaacgcattcccaactgttcctcctcgttcaacaccttaaaaattcagatgaaaattcaaaaaataatttttttttttttttgatcagaccctcccatttatttcgcttcaatacaaaactaaaaaaaaatttttttttgaaaatttaccccctaaaatcctacacgaatttgtccactgtttcgtgcgtttcgttcctccaacgaaacgccttccggatgcaacgcataatcaggcctcggaatatgttccgggacagcgcggcgcgcactttgtggggcgggcctggaaaataggcaatttttttaattggttaaaaagtcaggaaaatttaaggcttcaaaaaaagaagtttttatcaaggtgaacctaaaaaattgaatatgttgttaaaaaacggaaagatagccaaaatattgctttttaaactattaaaaattttgggaatttcctaaaaaaattgcctaagcgttccactgaattgatacaaaggccacgggttgtactcgttgatattggacgaatcgtctttatggcacaacttatgttc

SEQ ID NO: 18983 - DNA, 875 bp, Heterodera glycines
acaccacatggagctggtcgatggagctgccccctgaaacgccgccgccagcctcgccactccacttggacatggagccgctcgcgcacagcacgccactgcgcagccaatctgcacatgtatgtgtttgcaaacacatcatcgattcctcacttaatcccttgcagtccatcgtgcacgctgcgagccctgtgcgtgcggctgcggggatgatgcccgtggtgccttcattccacgggcggacccgctggacccctggcgagttggtgctgctgcggcgcctcgtgacagagacggaagggatgggttcgctgtttggtctgcgaagagcagcagcgatccgcaacgcggctccggaggacagcaggctccggtaagtgtcctttgctcatgctttttctcttaatgatgcttttgccattaaggaccatgcgcaacacccaggtccacaaccaggtgcagtacctgtaccgtgggccacacccaccgcttcccaacttctgatcgggcgcggcgacggcaacttccccccccccccaatcttcatatcccaaacggccctctttagggccacaaacacacaaatgagcgaggtggcttgcctctttttctctcttttctctctactctctctcctcttcatcatttttgttcctttgcatttctctctctcaatgttcattaccgttcctccctatttctctctctctctcctctctctctcttcatcagcattccttttcatttctatttctcttttttcatcattgcttctcactatttattactcgctctctctctcaattaatcggctcccggacttttcgacagtggaattgcgacagaggacttttcgacagaaggactttcgacag

SEQ ID NO: 18984 - DNA, 1255 bp, Heterodera glycines
attttatctgtagaaatagtctcatatgaccaagacataaaagtgctttgcgcaacaatctcccctctggtgtccttcatttagaaaggcactgaaccgtatacaaaaactctcacattctaaaataactcagttaaaacagcttttaaatttaattgttctgaaaccaataatttttatctgtagaaaatagtcccatatgaaccaagacataaaaagtgcctttgcgcaacaatctcccctctggtgtccttcattttaggaaggcactgaaccgtatacaaaaactctcacattctaaaataactcagttaaaacagcttttaattttaattgttctgaaaccaataattttatctgtagaaaatagtcccatatgaaccaagacataaaaagtgcttttgcgcaacaatctcccctctggtgtccttcattttaggaaggcactgaaccgtatacaaaaactctcacattctaaaataactcagttaaaacagcttttaattttaattgttctgaaaccaataattttatctgtagaaaatagtcccatatgaaccaagacataaaaagtgcctttgcgcaacaatctcccctctggtgtccttcattttaggaaggcactgaaccgtatacaaaaactctcacattctaaaataactcagttaaaacagcttttaattttaattgttctgaaaccaataattttatctgtagaaaatagtcccatatgaaccaagacataaaaagtgcttttgcgcaacaatctcccctctggtgtccttcattttagaaaggcactgaaccgtatacaaaaactctcacattctaaaataactcagttaaaacagcttttaattttaattgttctgaaaccaataattttatctgtagaaaatagtcccatatgaaccaagacataaaaagtgcctttgcgcaacaatctcccctctggtgtccttcattttagaaaggcactgaaccgtatacaaaaactctcacattctaaaataactcagttaaaacagcttttaattttaattgttctgaaaccaataattttatctgtagaaaatagtcccatatgaaccaagacataaaaagtgcttttgcgcaacaatctcccctctggtgtccttcatttttagaaagcactgaaccgtatacaaaaactctcacattctaaaataactcagttaaaacaagcttttaattttaattgttctgaaaaccaataattttatctgtaaaaaat

SEQ ID NO: 18985 - DNA, 2281 bp, Heterodera glycines
cctttagatcaattttttcgtttcgaaggtggcgcggagattacacaggcgaaaccgttcaatttgtgttcgtttctcttttaattattattttcatttctgtcccctgctaatttcagtgccaccgttgtgcaaaatctcaagagattttgggtgaggtccatcgtttccgtaagtttggtgtgcttttgctctgcttccattgccatttcccaggtgccaattccgtcctgttcaatgcgttcgtcgttcggcgtttggaacaaagagatgccgacggtgccgccgccaacggacactttcaaaaaggagactttcgaggcaattattcccgaaaaatcggttaatgatcggccgcttcagttgtttaaccccggctcggctgctcagctgatcagtgaaatcagtgccttgccatccgaagggcgcccccgggtaaattttaattgctttttccctattaaagtgccgttctcccaagaatttcttccctcagcagcccactccacagccccaaccaaatccgaccttctttcgagctaccgtaagaatgaaattgctgtttttcgaaatcctaaggctttttctcaggaaccgacgccttttgttgttgccacgacgccttccttcttccgacccaatcagcaattccagcgatttggccaaaattctggtggtttgcaaaggatcattgcatttcaccgatcaaaacatgttcagcttgccgtgacgcgacttcgactcgccattgcttacaatgggtccaattttgtccgacaaatccgtggatgagccaattctgcaaagcaacttgtcggatgtgctgaccggcgatgtgtctgaacggtgcccggtcgttgctgatggtcgacacgacgaccgatttgaaaatgaacggaccattcttttgccatagaacgactcggaatttgcttacgaatttctatctcattttaaattatgaaaatattggcaaaatattaattaagggaatgaatgtttgtgaaaacgagcagcgaattggcgtaaatcttccggaggaactgaaccattttgaacaattagtccagtccttttaaatgaaccgcccattatgggtctctgactctctctctctctctcctccccctacccttcagtctctctttccgttctctctctctctctctttcctgccaacgacatcgtcgtctttctgcctctgtttccccttctctttccttttccttctcctccccacaacattgccaacctttgttttttgtacaatctctactgcagttcaattgatctgctgttccgtcatgtcattagttatctccctgaattttaggcataacaaattaaaaaataaataaaaaatcattaaaatatttggacttttttactttgatttcttttttgatgctggttaattaatatttgattaacctccatctcttttcttccattttattttagcttcgtttgttttctcctctttttttctgtgtgttcaatgtgtcatccgtaaatcgagaacgacgtctcccttttctcaccaatcccttaatttactttttcttttgtaaaccaatcaaatttctcccccgactctcatctattgtcagcttttcttccttgattaagtcatcgcatcttcttcctaaattatttgtgggtcaaatttagaggcggagggggcggggcacaaagcgaagtaacagaaatttgaaaattcataaagaacaaagtatgtgttcctcacaaaagtgctaaaaatgataatataatttatgttagaaatttcgttaagtcaggatttgtacaaattgtgttcgagcatttctgtttttgattgtgtcaacacaaaattgttcgtttccattccactctttcagatccctaataatgcatccttctcagtacaatcaattgcatgcctatggcactggtgcatcttcaaactcagcaaattcggtcggctatggtctctcttttccgctgattggtgttttttgatacagtcacccatgaaacgtgcccctccagcggcggtgtctccgttggcctctccgatggagtcgcgccgactgttcatgcctcccgcttctgccaaaccttcggtttcttcctccaccgatcattccatgctcaacgccattcaattcggctacactttggctgggccccaacctgccaaattgctgatcgacccccaaaccggacaacagtattttgttcccacaactccccaaccgatgtcatattacgctgcccccgccccacttttttatccgaa

SEQ ID NO: 18986 - DNA, 3356 bp, Heterodera glycines
tattctaatattgtggtgagcagaaagtctttgtatagtggtcaacaatattacttaaaacattcaaacaattcaaataataagggtttataaccaaatttgcaggctaatagagcagcatttagaatcaaaaaaatcagatttttaacaattttttttcggcgcatttttccgaaaaattttttgggcatgggtgagggaagagagttcggcgttgctgatttgccgataggcgacgccggggaaattttttgaaaatttaatgcaatttgttaacaacttctgtcaaaaattaccaaaatttgcgatcttgggctaatttttaagaaaaaataggagtttttgggcgccggcggtgccgataggcgccgctggtggaaaattttaagaatttttaatgaattttgttaggaattagcgaaatttttcagaaatttcctcttttaaatgaaaataaggcactaccccaaatcagaacatttcttagaaataataacattttcattttcttaatttttttgacttgcagactgactatttttaatttgctttttcatttagaataatattttaactttaaatatccagtttttaaaagagaatattcagaaagaaaataaagaaataacaccgacacatattaaaataataaaaagaattcgtaaaaacgggacagttaaccaattaaatttttatatttttatttatttaaaaatttttaaacatttaaaaaaataacaaaaaaaagataaaaatacaatgcttttacaaaattaataagaaaaactaattataaacttgtataagctcaatataaactaatttaatttaccttttgagaaagatcagaaagaatgattctgcgcaagaatttaaaacatattaaatcaaagaaaaatgactaatttgcagatttttcttttcaaatagaataaaaggacattttaaattcaaaacattcttctaaacgtcataatttgtttaaatgcaacaatacatcgggatcccaaaaaatcttcgggatgaattggatttgtactggaccccgactcgggatacatctcggtctttttccaaatcttcgggaatgggatttggtcggggtccctccaaccttagttttccggtctctagtttctaatagaaaattactgattcatttatgaatttagcgtaaaataaataattaaagtcaaaataaactcaatcaaagaaatttagcaaaatttggataatgaaataaaaaatagataataaaatatataacaagaaatattacacatttcgaataataatggaactccagaagaaaaaaaaataaagtttaaatttaaaaataaatataaaaaggattattatagaaaattcaaattaaaaataaatataaattaaataaaaataacgcgagacgaatttttaataataaataccattgctaccaagattccaaacaattattcatagtcagtcctaaagtcaagaaaattattgtgagataaaataattttataaaattgcaataatagattttcggaaaaaaaattaaaaaatataatgctttcatttaaaataaacaaaatcttaaaaattccgattaaataaaacttcagaacacatttaagtttaataatttgattctttctgaattttttttacatattttgcacaaatttgtttttccaagctaacatccgagtatcgggttcatttgatgtgcttcatccaaccaatagtctatcgtaaattatttaaatgattaaattaatttttatgtttatttaatctaaagccatattcagtttcagcgtagagttttatccagactaattaaatctgaaatttttcatgcatgaagtttcagctgtacaggctcatttgagaacccagagttcaaatataaataataaaaatatattaaacaaaaataatacgtccagatggaatataaattaattaaacaatttaaaataaaaaatatttatttagtcaaatattttttttaaatcttaagttaaaataaaatttaaatactttttttttattaagtataatttgattttaaaaacacataaaaaagccaaatgagtgcgtgggaacatcgacagaatttgtttgcgaaaatctacacaattgaaaatattagaaaattaatttctaacttttttaaaaatattcatgttaaaaataataaaatactttaaactaatattccatctctttgtatgaatctttggaaattaactatagtttttgcgtaaatttgatttgatatgaagtaaattaaccatgttataatcaaataaacacaagacgagaatattaataaaaaataattgagtaaatttttataaactaaaattaaatataatttaaaatataaaaatgcgagtaaaattgattaaaataattaattatcatataaatatgttaagaagaaaatagcaataaataaagaattaacttaggtatgaaaggtaaagaaagaaagaaattattaaacaagaaaaaaataaaataaaaggaattatttaaattaattagtatcgaaattaaagtataaaaatttattccattcgtaatataaaataattatttattttcaaaaaattttaaaaaatcatttttttaatttttaaatgacaaataaatttaaataaatcctttgttattaaataaaatgagcatacaactgggcgcatatgtttacacgagataggccacaagattaaaattataaaagaaattatcgcaaaagtgatttctttcaaggatacatttatatatgaaaataattttttaatttaattttgtaatttaattttaagataaataataatttagaaattgaataaaatgagattaaaatattatgggtttaaattaaaaaatgggacaaagcaatgaaatcggtcagtgctcattaaattaataaaattattcgctaatgaagtataaattaaattaataattaaaagataacacataggaaaaaacaaaaaaaaatagaaaaaatataatcaaattttaaaaatagaataaattataattttaaatgaatattttaaaaactaaaataaaatttaaaactgacaaataaaatgtataacaaagttgacagtgctaactgttttaatcatgatcaatcaatgactcatgatcaattaaattcaaaattttatcttaatcaaaccttttttaactcattacaaaatgataaatttaatcaattaaaaaatttattataaatcaattgaattcaaattgattttataaaatatttatacatataaacaaaaaaacgaccatggtctctacaaaaacaggacaaataaaaacttgattgaaaatattcagaa

SEQ ID NO: 18987 - DNA, 3097 bp, Heterodera glycines
  unsure (1)..(3097): unsure at all n locations
ctcccggctattctttttgttattttttccccgatcggttcagcacaacgggatttgctgctggatcaccactgcttgggctggacagaaaattttgtctgctgctggccgattggtgagaggagtgctgtgaaaacaacaatgtggccaaagcagatcaatggtggtgatcggtggtgatgtggccaagccatccatcggtcggtgaaacattcgtcccccgtccgcccccccccatttagtttcgacccattagtcacagttgtttttgttgcttttttaaagttgcccactatttgttgagaatcagggatgtgccggaataccaccgctttccgaatgccgaaaatttttcagccgtctgatgaatgccaatttctgattgccggaattttttttagtgcatcggcacacacatccctgctatgtaggtacggaacagaatttatgaaattcagtgccaaggcgcttggcgattgaaaaaatatcgggttaggttccgaatcagaaatttcagggttttcggggtgacacaaccctgtttgttacatacctctctgttcattgaaaaaattcctaaatttttgtattttttttctttatattttcagtttttaaaaccaatgtaaagccattttctcaccaccccataaatccgtgtctatttaagttcgccagcattccctgacatttcaaaaagtcgtctttgtcctcctctaccccatacttctgctgctgttcagcccctgttcatttcattttatgtatgaatggccaagccgccccacccttggcccagcagtccgtccaaccaaaatgtgttacaactgcctccctctgtgatgacactgactgatcagacggggggtgagcacggcctatggaaaccggggggcgggggggagtggctgctgctggtgtgaaaagcattgaaaacgggtggggtgttaaaaaaaatggcgaggggtccgttgcccccgccaacccatcaatcaatcaatggggggaggggggaggggggggaaaaaggacgataaaaacaaaaaaaaaccccccgggtttggccccccctttttccggtttccgggtccccccttttctgggttggggcaattttttttaaaaaaaaaacggggttttttgccccaaccgttttaacccccgaaaaaaaaaaaatttttttttttcttcccccccccaatttttaaaaaaaaaaaataaaaaggggcccccggcggcccccataaaaaaaaaaaaaaaaaaaaaaattgcccggggaaaaaaaaaaaaaaataaaaaaaaaaaaaaaaaaaaatttttttttttttttttcccccgcggggggggtggtgggttttttttttttaatattttttttttataaaaaaaaaaaaaagaaaagtttttttttttttttttggggggggggaaaaaaaaaaaaaaaaaattttttttttttttttttttggggggggggggggggggggggttttttttttttctttttttctccccccccccccccaaaaaaaaaaaaaaaaaaaaaaaaaaaaaaaaaaaaaaaaaaatttttctttttctttttttttttttaaaaaaaaaaaaaaaggggaaaaaaaaataaaaaataaaaaataattttgggcgccctagaagcctctttttaaaaaaaaattataaaaaaaaaaaaaaaatatttgttttttttggttgttttgtggggggtctccccttttttgggggggaaaaaatcccccggaatataaaattcggggttttggggagttttttcgggggagtttttttccccaaaaattgggggcccgggttgggggggaaatcccgaaaaaaaaaaaaattttttttttaaaggtcctttgggggttttaaaaaattttgggggcaaaatttccccccgaaattaaattccgggtttaggggaaagtttttccggaagggtttggttttcccaaaaaatttggggcctttgttttggggggggtttccccggaaacaaaaaaattggatttttttccaggttcggtttggggtactccaaccatttanaaaaaattttaggtttttattcattttcctttttgnatagggaaagcatttgagtgcctaaaataccttgtaaataaaatttggtgcgtttcagagcagtttgtgaaaaaatatttatgaattaattttcgctaaaaaaataaaatagtgaagctttaaaaattaataaaaaattttaaattcagaattactggagttagcatcatagcagtgcttttccttgtctttttgatgccctcgcaaaatctggtccgcttctgatcagtttataaaaaaaaagttaagcctaaaatctttcgcaaatttaaaaagcaattaaaaatttttagattttttattcatctccctttttgatagtgaaagcatcagagagccttatttaacttttaattaacatttggtgcgtttcagagcacgttctaaaaaatatttatgaattaattttgcaaaataataaataattaatgaaaaagtcagaatttcgaaaaattttaaaaacaacaagcgttggcattttttcaggttaagttagtcctttacaatggagaaggcctgcaaaatttggagagattatatcgattttagtgcgctaggttcgatgaaactttttaaaatataagcctaaactttttggcctgtttaaaaaggaattaaaaatttttaaaatatttattcatctcccttttgatagaaaaagcatcagagagccttatttaacttttaattaacatttggtgcgtttcagagcacgttctaaaaaatatttatgaattaattttgcaaaataataaataattaatgaaaaagtcagaatttcgaaaaattttaaaaacaacaagcgttggcattttttcaggttaagttagtcctttacaatggagaaggcctgcaaaatttggagagatatatcgattttagtgcgctaggttcgatgaaactttttaaaatataagcctaaacttttttggctgtttaaaaaggaattaaaatttttaaatatttatcatctcccctttgataaaaaagcatc

SEQ ID NO: 18988 - DNA, 1654 bp, Heterodera glycines
  unsure (1)..(1654): unsure at all n locations
gaagaaaaaaaattgagatttgtgaaccaagcaaaatcctccanttatatttttgggtatttgactgtcctcaccanagccttttggtcccttttatcacctttccctttcttattatcactatttcatttcctttatcacattctcgtgtcatttgtattccttctcttaccttctcaaatcattagaaccttttctttgtctgcacagggataagcatacggaatttcggtttccgaaaaattggacgtcggaattctgatttccgaaaatttttggtaaaaagtcggaaattttttttaaatgctccgcgaaaaattcctttcccaaaacgttctaaaacagtttttgatgaaaaccactgaataattttttttaatgaaaaaacagtttttgatttcacctttcactttttggggaacggggaaaaaatcggcgataagagtaaataggtcaacagaaggcaaaattggggatcaacaaaaaatggacgcagaaaaagagaaggagaagaaggaaaaaggaggggggcgccttgattaaatagcccccgagcagaatatgcaaaaacacgtgaataaggagaaaagtgggcatttttgagagacaaagggaaagaggcatcgctgaatatgttggggggaatcagagtacagaaaatggatgaaaagaggggatggcgggcaaaaagataatggtaaacatttagagaaatggatccccaatcgggccgaacaaaaggaatttgaaaatgtgaatgaatgtgaaaatgcaaatggggcgaagaacgatggagaaaatgcagatgtgaaatggtggacaaattggataatgagaaatgaaattgaaaatgatgatttaaataaaaaggagaaaactgggaagaaaaggaaaaaggggccagattggcaggggtttcgtcatctctccgatcttctgctccgaccgacctaccaacgggaatgttcccgatcatcaatggtaccacggcttcttcttcttcgggcaagtgcgcctttggggagccgtaaaccaggcatcctgggtggcccatcggttctcctcctcctcgtcaattttacgggcattgtagtgcccgcccgagccccgggtaaaggacaattggccggacccttcaccccaactctcgtcgcggtttcgcgacacagcgatttggaacaagattttatttcgatactacaaactagagtagagcggtaccggtacaggtactgaaaaaagcggtacaactgagtaccaaggtcgcagttttgaactttcttatttccattattttataaccggccaaacagcaattgcccgagaattttttaatttccaaaaaaattaatatgggatggaactggtcacagcatcaatgttgagcggtttttcgatttaaaaaaaaacacaataattgattttcatgtttaaaattacaattttaagcataaaagttttcttcaatttttcaaagaaaaatgtttccgtttttcaatttttgaattgccgaatgcaatcaagaattagagcttagaaaaatttgaccgggtaattttgagaaaaattgaaacttgcgcagcaatccgcttttgccattgaaaatgttgtccaccagcgcatcgaaacgggccgaaagcagtgccaatttgag

SEQ ID NO: 18989 - DNA, 648 bp, Heterodera glycines
tggtggtcagcagcgcagcagcgaggaacggcgcgtgcacatgtgtgtctgtgtggtgtgtgtagggagggttagagaaatcattagagagtgaaggtaaaagtgagagagtgagacagcgagagtgaaatgaaaagtggaagagggagagagtgaaagagagagtgagagaaacaaagagagggtagagtgatagagacaaactaaacgatgaccaacaagtgaacgcatagtggacattattagcgtcatttttcggaaaacgggggggggatgactgcaaatattttaattatttttctcgtgttttttcaggtcaaaaaatttttactcaaaatgtccggcaatttggttgtggctgaaagtgacaccagttttgacgcaacaaattctgtgagtggatggggagggggattaaattatgaagaaattcaatttttatttttgtttagtcaatcattgacaccaccaaagcacggcggtggacgatggcattggcataacagctccacaggaggttataggggggggggtcgagatttaagaagttttaaagaaacaaaaacttttgtttttgttttgcaaggtccaaaacagtggcggaacggtggaaaacgacggcaccgtcgtcggtggcacaacagtcgg

SEQ ID NO: 18990 - DNA, 3091 bp, Heterodera glycines
ttgacgctggccatcaagttgtgtcttaaaacaggaacggacacgaccgacctgttgttgtagtagtaatcgatgagaagtcagctccatctcggcggtatcgccaggcggaggcccgttgagatggtgctgatgaattgttgttgccagcgctccgattaattccgttccttccgagtgcccatccgattggagagtcccaattggagcaccattctcaaaagaggccgtgtcttcacgtccaatcgaagaactggacgcattttcaggccgatctgtaacaagaaggggattcagacgattgaacagaggaagaggaatcaaagtgctaattgtaagggattccccgacaaaccctccccgtgactgtcactgctgtccacaaatccgctgggcccaggcgctcttttgtggctgtacttcttcagatgcatcttcagactatggcaatatttggtctgataagtgcagtcctggcagcggaactggtagacaggagtgtgcgacttcatgtgggaattcagcattgacttgttgacacaagctgaacgacagaagcggtgtttaattgtagtccgtccttttcttactgtaatcacaaatggagcacttaaaaggtttctgtccgttgtggttacggtagtggtactccaagtggtgcttgtattctgtcacaaagtcacaaagttcgcaagtcaactgcttttgcttgggtatatgcaggcgtgcgtgtgcccattgctcctctttactgcggctgatgttctgacatgtcttgcatttgtactgcttcggcttccccgatcttcgtggcgtgtcctgcttctcatcgctgccgttctgtgctgcgttttgttggtgaatggcatcacttccgataagcgactgaaatggcgcttttgcgtgtctctttttcggtttgctttgcgctgcttaccgcttctggcccaatctgtaactctgcgatgttcagtgtgcctgctgtcgatgtattcagcagggcggtgtgcctttccgtcagggccctcagctgttcaagcggaatgtggccgaagtcccccacctgcggcgacgaattgagcatttttttgttgggaccattgttcgcaataacatcagtgcatatcttaaggagggcgtcggtggagttggagaaggcaacagaattggtattggtgagcatagactgaatggactctaaggcgagtgtcccgttggaattgtctcccgccgacaacatgctaaatcagaaaacttcgttttttgccattctcattatcatccaattgccacctgtttaatatgcttatgccatccgggggcattccttgactggcaagtattttctgactcaaacatttatcgccacttaaatcgccgttagaaggtggcgaattctgcttgagtgtcgttggtgtcgggggcggcgattggatgttaatgcctgcagcaagcctttgctctcgcttgtgcgactgcaacatgtgcttctttagacgcccttccgtgcgagtctcaaacttgcaaattgggcattggtgcgtgctgaaaatcatttgttcagttttgtcattgctcgcccaacggggccacctgtgcgtgttgcggtgtgagttgtaatggaatttcgaagaacaactgaagccacaatcaggacagaccaacgcatttgtggggaagtcgccactgttctcatccggcgcttccaagcccggcgcgcggaagaatgttctgccggtattccgttggtggagctgcggcaaaggctcaattcttccgttgttgacgatggtttctccagttgcaatgtgctcggtggtgttttgctgcagaatattgtcgtcattgctcgatgtagcagcacacactgtgacatttacgctggcacttggagagagaacgacggatgactttgttccgttatttgtacagctcgttatgttttgtgttgttggagaagagcttattgtttctattttgatagaagaattcgggacagaagtttctgtgaactggtgatgttgttgggaattcggtgtgacattatcactgactgagagagacgcgggtgcaggggccgacatgttggagatcatgcttggacaggaaaaagttcgagttttttgttaataccaatggaacatacttgagcaccgtctccatgtctttgaaggttcttcaaccccttttttcgactttcaatgtttgccattcccgtgacaacttcctttttttgccttcaacattttcttccacaaaaatagctaaacaatgagtaaaagtaagtgataaataattaaaaatatagcaattaatcatgtattaggtttcttcacctcccccttcaggccattcatacacagttggccagagttcattatgcatttagcaagaaagacaactgtaatggaagacgagacgagaaagacagcaagtcataagactgacaaaaataactgataaagagcgaaaagtagagtaatataaaagagagagtcaaacgaacgaagagagcatagaaaatgcagacggaagaggaaagagtgaaaaaaggacatctttttcactcacctatttcttataggcaaaaaattccttttttaagttcttttcattgaattttactttctctcttcccgttctccctttcttttctttcttctcttatttccttttccatcgctctttcgcactctttcatttctcttactctctctctctttccattgcttttctcattctttcccttctcacttcccctctctttcttctgtcccttttgttgcctgttcgtttccaaccctttgattatctttcttcgattcttcgcaatgaaaaatacctggagaaagattagcagaagagcgacaaagagaaagagagaatgaatattgaagaaaaagaatggcagagaaagaaagtgaaagaaacataaagggagaaacgacggctgaagaaatagaggaaattagtggcaggcaactggtttttctttttgagcgaatgcaccacaagaaatggaaaaacactcattgcctctcccccgccgcatgtcctttcttttgctcatttttgttttggtagggaattt

SEQ ID NO: 18991 - DNA, 1718 bp, Heterodera glycines
  unsure (1)..(1718): unsure at all n locations
cccccccccccccccccgcccttcaaaattttgaaaaaaaaaataaaataatagaagactcaggattttgaaatttttataacaactgatgacaagctaatgtgataaaacaggttaattcttttcctttcagtatccctgcaaagtttggggcgcttctgataagtttctgaaaaaaaagctaagcctaaactttttggcctgtttaaaaaggaattaaaaatttttaaaatatttattcatctccttttttgataatataagagtcagagtgccttattcaacttgtaaataaattttggatcgcgtttcagagcagtttctgaaaaaaaatttatgaattaattttgcaaaaataaataaataatgaaccctcctccttaataattttcctgcgcccatggtactcactcggccgcttcgaggcctcgaggggggccttcggccacccccccccccgcccttcatttttttgacattttaaatataattagtataatgagccggactaaaatcttaatctacgatatgctgaaaagcttctgatgaaaatgggagaagttatgaacaattctctgtcacagattatctagttgacattttttatgactatcgccaatttgatagattttgactatcgtcccagcgacaaccctactccaagagaatttatatagactactcatgcacaatattcaatagccctacaatttatgtgttcaattcggcaaatcatagataaaattaattaattagtgggcctaataaggaatataaaaatattttcccttcgattttcattaaccttttcgtgcatattttctcgctgttcgcctttgaaagacatgaagcagtgtgccgcggtcagcacatgctgcggcccaatgattgatgccgtacaacagaatttgttgccaccaccgccacaaatgccggcctcgcgggcaaacagtgccaccaaccatggccatttgttgtttgactttaccggattaccgtggctgatcttaatgggagaaaaaagcacaataagtaggcaacatacaataaggccaattataggagaaagatccttaaattgtggaaaatttagaaatttttgtatctgagtctgcttaatcattgttatggttttcgtatattataaagcggattttatctaaaaaaaaatctgaaaaaaatgcaaaatttcattttcttaaattcaaaatgctaaaaatagatttaaagatgagtattgaataggcaattcaaaaatgttcagcaattatgccgtttttttccaaaacactgtcaaatgtatgctaggattaacaaataaaaaatttactttaaattgaaattttgccaattctgctgtttcttggtaatatttgtccctttctcgaaatgtgccgcattcgtaagcatttattcggtgcacaagcaccaaagaaaatgccaacaaaaaatatttgtaaagcatttaccaaaaataaatgattattatttttatttaaaatatttatgaataagcaaaaatgaaaatggaagtgtaaatgtgataaaacattgaataaattanatgtttaatcatcacatgtttttctttttgancaagcgaccaaatttattctctccatttacgaaatgatttacaccagtgtaaattattacgatgaatatgttaaaaaatttaatataaaaaaaatttttatgaaaaaactgtttttaatccg

SEQ ID NO: 18992 - DNA, 1541 bp, Heterodera glycines
  unsure (1)..(1541): unsure at all n locations
gaaaaaaaagctgaaaaatttttccaattgcatcagatgcagactcaaattctcaaacaacataatgtaaaaaatattacgcaagaaattatttttacatcctttttagaaatgctgcataaatttttattgtaaatagtcacaaacaaactttttatcactcncaatatctaccatttatcattacaaaaggcaatggttaagcactgagatataaaaaaatcgtctagaataattatctcaacaatttgtcgggaaagatgaataaatttcagttgcaataggcatattggctcaatacataaatgtagagcaggctcaaaatagaggaaataccaagattaaaaaattcgtgtttatcccccactctgctttggctggccataactcgccagagagtggagatagaccctttgttgatacatttgaaaatgtagagctcggctagcgcattcgaataacacaaaatttgttttcatttgcccccaaacaatccgcttatgacgcgccgaaagaaaattcacaaaaatttggcaccggaaaaactccatttttttatgggccagcatagtaaagtaaacccaaaatgtaagggaatttaaattggtgatgagagatgtttagttttttatttgccccatcctttttctgggaaaaaaaagctgaaaaattttccaattgcatcagatgcagactcaaattcttcaacaacataatgtaaaaaatattacgcaagaaattatttttacatcctttttagaaatgctgcataaatttttattgtaaatagtcacaaacaaactttttttcactcccaatatctaccatttatcattacaaaaggcaatggttaagcactgagatataaaaaaatcgtctagaataattatctcaacaatttgtcgggaaagatgaataaatttcagttgcaataggcatattggctcaatacataaatgtagagcaggctcaaaatagaggaaataccaagattaaaaaattcgtgtttatcccccactctgctttggctggccataactcgccagagagtggagatagaccctttgttgatacatttgaaaatgtagagctcggctagcgcattcgaataacacaaaatttgttttcatttgcccccaaacaatccgcttatgacgcgccgaaagaaaattcacaaaaatttggcaccggaaaaactccatttttttatgggccagcatagtaaagtaaacccaaaatgtaagggaatttaaattggtgatgagagatgtttagttttttatttgccccatcctttttctgggaaaaaaaagctgaaaaattttccaattgcatcagatgcagactcaaattcttcaacaacataatgtaaaaaatattacgcaagaaattatttttacatcctttttagaaatgctgcataaatttttattgtaaatagtcacaaacaaactttttatcactcccaaatatctaccatttatcattacaaaaggcaatggttaagcactgagatataaaaaaatcgtctagaataatta

SEQ ID NO: 18993 - DNA, 1265 bp, Heterodera glycines
agttttgaaccctctatcccattaaaaaaggcataaacattttgaatttttttaaatgataatggaaagccgaaccaatttgggtacctccaattcgattaacaatgaggaaaattttgtttgaaaatcggttaaaatttaaaccttgtatttcacattaaatgccccgttcgtctccataatgcttcttccgttcactttcttcaacaacgcattgggcaagtggttgaaaatgagcaagacggccgcaatttccaccgtgtcaaggctgaccaggaagtcggcgatcagaagcttctcgtccgggagcagcgcatttggcatcaaatcgacctaattaaccgggagtaattaagaccaattacacggaagttttgaaccctctatcccattaaaaaaggcataaacatttcgaattttttaaaatgataatggaaagccgatccaatttgggtacctccaattcgattaacaatgaggaaaattttgtttgaaaatcggttaaaatttaaaccttgtatttcacattaaatgccccgttcgtctccataatgcttcttccgttcactttcttcaacaacggtatgagcaggtggtcgaaaatgagcaagccggccgcaattttcaccgtgtcaaggctgaccaggaagtcggcgatcagaagcttctcgtccgggagcagcgcatttggcatcaaatcgacctaattaaccgggagtaattaagaccaattacacggaagttttgaaccctctatcccattaaaaaaggcataaacatttcgaatttttttaaatgataatggaaagccgatccaatttgggtacctccaattcgattaacaatgaggaaaattttgtttgaaaatcggttaaaatttaaaccttgtatttcacattaaatgccccgttcgtctccataatgcttcttccgttcactttcttcaacaacggtatgagcaggtggtcgaaaatgagcaagccggccgcaattttcaccgtgtcaaggctgaccaggaagtcggcgatcagaagcttctcgtccgggagcagcgcatttggcatcaaatcgacctaattaaccgggagtaattaagaccaattacacggaagttttgaaccctctatcccattaaaaaaggcataagcatttcgaatttttttaaatgataatggaaagccgatccaatttgggtacctccaattcgattaacaatgaggaaaattatgtttgaaaatcggttaaaatttaaaccttgtatttca

SEQ ID NO: 18994 - DNA, 825 bp, Heterodera glycines
tgaaaattaacccaaaattatttattattaataaaataaaaatattttaaatgaataaaaattagaataacagaaaaataaatagaaaaataatgtgttacaccgtccggattcgaactttgccccccccccaaaaatgatgcctcagaatccccaatcacacagggattctgaggtcttaacgatgtcaaaagtaaaatctgatcacgtattcgtgatcagcggcccaaataacccctaaagacatgtttttggaagatttttggtgaaaaaattttcaactcaaaaatcctatgctcacccctttggtcccgaatctcaaaatcacttttatttttataaaaattcttaaaaaagtgataaaaatgccaaataaaatttatataatagagcaaaaaactgcggatttttgtagtattttatttttccagaatatcttttcagaaccgagttatgaatttttttctgaaaattcgaatttttccagaaattctggaataacttttttccttttttagatagaaattccaaataaagtccataaaattctcctgatttttctctatttttaaggctttatacctgtaaaattgatcaacccttcgatttgttatgaattttcaaatattaggccaaaatcccgagggccaaaaaattgccaaaaaataaagaatttttaaaaaattccaaaaattatgaaacttaaaatagacatcatattcgtactcagtaccttattttaccccagaaaaatatttttcacccccattttcgtccgaaaaaaaatttccgaaaatttctagggggcctagctcgaaaattttt

SEQ ID NO: 18995 - DNA, 1370 bp, Heterodera glycines
ttttgtatattttggattcttacagggatctggcacattttttttcatattatgtcatttttttttttggcattttgggcaatttttaaaatacgaacttttcgaccatacaaaaagcaataaaaaactttttttaccagtttggtagtcaccttgtcgcactctttttctataataaaaatatttaaaaattttaaattaaaaaaaaaccaaaatattttttaagactgagtccaagtctattaagccaatgtttttttaaaatttttatagtccacaaaaattaaaaatctatgaaattttaattaatctccactgccgcccacctcaaatgggtgtccaatgtgccgggttggccaaacgattgggcacacacattgcacgtgtatggcaaatgtttgccggatgaggacgaggaggaggatggcctcttcaccgctttggaagtgaacgatgatgagcatggagaagcggatgaggcggatgagcaggaggggactgagccgggagcgttggaaggcttaaatttcaaaaaaaaaaatttttttttttgaaaaaatttacggcattaattggactgggaaatcgttaatgggaccttttgctcgagcacaaatctcgagagtcgagactgaaagccgattgaagtgatttgagatcagctagtttcccctccccctcggagaaattcataaaaatgcatttttttctcttgttgagatcgttcgtgcgattacgcaacacgtattttcatattttgttttgctatgtcgggcgcttcgcgcccgttttttaaatttgttaagttcggacgggcgtttcgcgcccgtttttaaattttgttgggccttttcggccgcttcgcggcatagtacgggcgcttcgcgcccgtttttcaaatgttgttttgctctaacgggcgcttcgcgcccgttttttaaatttgttaagctcagacgggcgcttcgcgcccgatttaaaatttagttgggccttttcggccgcttcgcggcctcagaaagaggtacaaaagtgataaaagaggtacaactgtgattagaagaggtacaacagtaattagaagaggtacaaaagtgattagaagaggtacaaaagtgattagaagaggtacaaaagtgattagaagaggtataaaagtgattaaaagaggaagaacagtgatgagaagaggtataaaagtgattaaaagaggtacaacagtgatgagaagaggtacaacagtgatgagaagaggtacaacagtgtgagaaggggtacaacagtgtgagaagaggtacaaaagtgattaaaagaggaagaacagtgatgagaagaggtataaaagtgattaaaagaggtacagcagtgat

SEQ ID NO: 18996 - DNA, 1753 bp, Heterodera glycines
  unsure (1)..(1753): unsure at all n locations
ttgtttgtcacaaaaaggccttttcaatgtttatattggcccttacatgaactccctataagattatggaacttgttaatatgagaaaaaatgctgcagaaaaataacctgaaaatctaggagaacattattaaatatgtaaaatcaaaaaatgataggttctgaagtcatatttacaattttcatattggcttttttgtagaccattataggtcatttctagagatttatagttccttttacgtctgattccacgaaaaggtcagcttcatttcgttgttttcattggtggagcttcttcaggatctgctaagtccccaccacaccnaattatcgggttagaaataattcttcatagcaaatcattggctctgttgcattggctttgtttgtcacaaaaaggcctttcaatgtttatattggcccttacatgaactgcctataagattatggaacttggtaatatgagaaaaaatgctgcagaaaaataacctgaaaatttaggagaacattattaaatatgtaaaatcaaaaaatgataggttttgaagacatatttacaattttcatattggcttttttgtagaccattttaggtcatttctagagatttatagttccttttacgtctgattccacgaaaaggtcagcttcatttcgttgttttcattggtggagcttcttcaggatctgcttagtccccaccacaccaattatcgggttagaaataattcttcatagctaatcattggctcggtttcattggtttgtttgtcacaaaaaggcctttcaatgtttagattggcccttacaatgactccctataattcaaatataaataaaaagaaaaaaaatattaaaacgaaatataatcaaaagaataagcaacaaaaaaaaatttaaagtcagaaaaatgaaaataaatatataattaaatcagagaaatatgaaaaagccaaaaaatttttagtatgaagattttaacattattgtaggctaaaattattataacacagaaatgtttatatttcattgggtattttaaattcttaattttcaattaataattcaagtatcaaaaagcaccaaaatcaatagtgtgaaaacaaaattaaatcgaaaaatcaacgttaaatcaattttaaaaatagtcattgaaatagggatacgattaaaaattcttcatagttaatcattggctctgttgcattggctttgtttgtcacaaaaaggcctttcaatgtttatattggcccttacatgaactccctataagattatggaacttggtaatatgagaaaaaatgctgcagaaaaataacctgaaaatctaggagaacattattaaatatgtaaaatcaaaaaatgataggttctgaagtcatatttacaattttcatattggcttttttgtagaccattttaggtcatttctagagatttatagttccttttacgtctgattccacgaaaaggtcagcttcatttcgtcgttttcattggtggagcttcttcaggatctgcttagtccccaccacaccaattatcgggttagaaataattcttcatagcaaatcattggctctgttgcattggctttgtttgtcacaaaaaggcctttcaatgtttatattggcccttacatgaactccctataagattatggaacttggtaatatgagaaaaaatgctgcagaaaaataccctgaaaatttaggagaacattattaaatatgtaaaatcaaaaaatgat

SEQ ID NO: 18997 - DNA, 1059 bp, Heterodera glycines
atattgccccttacatgaactccctataagattatggaacttggtaatatgagaaaaaatgctgcagaaaaataacctgaaaatttaggagaacattattaaatatgtaaaatcaaaaaatgataggttttgaagacatatttacaattttcatattggcttttttgtagaccattttaggtcatttctagagatttatagttccttttacgtctgattccacgaaaaggtcagcttcatttcgttgttttcattggtggagcttcttcaggatctgcttagtccccaccacaccaattatcgggttagaaataattcttcatagctaatcattggctcggtttcattggctttgtttgtcacaaaaaggcctttcaatgtttatattggcccttacatgaactccctattaattatggaacttggtaatatgagaaaaaaatgctgcagaaaaataacctgaaaatttaggagaacattattaaatatgtaaaatcaaaaaatgataggttttgaagacatatttacaattttcatattggcttttttgtagaccattataggtcatttctagagatttatagttccttttacgtctgattccacgaaaaggtcagcttcatttcgttgttttcattggtggagcttcttcaggatctgcttagtccccaccacaccaattatcgggttagaaataattcttcatagctaatcattggctctgttgcattggcattgtttgtcacaaaaaggcctttcaatgtttatattggcccttacatgaactccctataagattatggaacttggtaatatgagaaaaaatgctgcagaaaaataacctgaaaatctaggagaacattattaaatatgtaaaatcaaaaaatgataggttctgaagtcatatttacaattttcatattggcttttttgtagaccattttaggtcatttctagagatttatagttccttttacgtctgattccacgaaaaggtcagcttcatttcgttgttttcaggggtggagcttcttcaggatctgctaagtccccaccaca

SEQ ID NO: 18998 - DNA, 2091 bp, Heterodera glycines
  unsure (1)..(2091): unsure at all n locations
tttcagcagcaacgcgccactcgcgttcctccgggatgggtccctttcgtcttccgcctcctcttccgtttcgtgcttccgccattcgccgtcccttccgcctgcccaattcgctttccttctcttccgcaaccttcgtcctgtcacttccctcccttcgtccacctcaatttcgtcctcacagccgcacactgaactgttcattggtgccccatttgaatccgtcggattacgaatgggcgatcgaagagagtcggaagacaatcggacgaatgggacggatgacgggcattgaatacccactcgagaaattgacggtagtattaagacagactcggaatgtgataactgtttttgtttgttattagttggtatcgtcgcctttgcagacgggaaacgacgccattggggcactcggattggcacaaatccgcgacagttgggtaagacggggaaagggacagacagacggggggagagatcggactgatcagaccgagtcgaacagtccgagatcatttgtttggcagctgtccttttctttagatggaatatcccaagttcgtccacacccacgaacttctgattggtcagctcattcgccaatggacttcgaatgtgctgagtttgtgcgaccaatgccttcagaatgggttcggcctttacttggaatggctggtcggctctgaacaactcggcgtggagacaaacaccgaatttgaccgccgactcggcgaagcgcgcgaccgattgatggggggaaatgcgaagacagaggcaaaaaacgaacgaaaacgaaaggagcgaaaggaaatggccgactttagggcccaaaggaatgcgcagaacgaatggcagtcgtactgcacatgttggagaggacattcggtgcgcaaaacatcacaaacttcgtcagccttttgttccgtcggtacggatgggcgccccgctgcacttcgaccgccgagctgagcaaattgttcaccaccaccgtcggcatgccggaagctcgttcgtttttctccctatccctcacccgatccctccaatttgcccatttcttcccctttttctaatttgcccatttcttcaatttccccgtttattccctcccctctttttgaactgctccaactccttccccttcagaacgcgtcttcgattcgttcctccgtccctctgtgtcttcgccttcccaaatccctctcgtgcacatttccgtccgtcctgcccattctctgctccgtttcactcaattttcctccccaaatgtttcgtcccttctgtccattcccgtcgaaattgtcgacgacactctcaaaagtgtgcgtttggtgttgaacacttcccaattggacgttccttttgttgtgtcctctttcgccgttgctcaacccaaaagcacttttgcccgttttgtttacaatgtgaggagacggaaaatggcactcaaattttggccttcctttaaaaggcagaaaattacgcaaaattggccaaatgtatcagcaaaggacagaagcaatcggacgaatgcccagcaataagcgaatccatgctgaaaaatgtgtgggacgacctttgttggtaattaaaatgaataaataatgaatgggtccaagagccccggggggattttatttgggtaattaattaacattcttcttttcttttggggctttgttcaacgggcgactgagtccgacgaccgatgaaaaaccactggtcgccgacgtttcagtacaatccgacgattggccgtcccttttccgagttttgactacacgcggtggcgtaaatgacgattgcgcgtgttgcatgaaaacggaggaggaggcaatgggcgggccgtgccggtggacatggctggacagatgcgcacgggtgatcatgccgaagaaatgattggacaaagttcgagacaattttcaattccttcaatagctgacaaatgagaaggacggggagcgggagacggaactganaaccgaacaaaattggaaattttgggtcggtcttatcgggtggnggcacatcaaaatttcacaccttttattaaaacaaaaacccttttgctttttgctcaattga

SEQ ID NO: 18999 - DNA, 645 bp, Heterodera glycines
tatcaataggtaggtcataggtcctaaaaatccccaaaataagtgctaaatctgcgataataggcgccaaaaagttcctaactttaggggtgtaaaattgaaaattttcatcacaaaccaataattttttatcacgtcattaagaatatacatagaatccagaagcgggcattctactctagacacatatcgtcaatcacacccccgaggcgattttctcataaataatttctacgttagcaatttttttaaaaaaaattttctcggggggaaacgatgcgggggggaaccggcgggggggggaaacgagctgctccctatactcccacccccccccccctaaaagaaaacaaaattgacgaggatcggttgtaaaaagcagcaaagtgcagaggtcattcaaattgcaacacaaatagggaaaggaacggcacttggagtgagacgaaacattggaattttactaaccaattcagcatttaattttatccgatttgaagtgccgaaaatcctttccgtattaaaaaatgggccactcagtatggcttgggacataaatattttggggcagattcataaccagaaaaacggaggggggggggaaatcgtctttttccttactatggacccaaaaagttatcgcaa

SEQ ID NO: 19000 - DNA, 1012 bp, Heterodera glycines
ctcctcctcctccttttccttttcttccctcttcgctggttcatcatttccttccttcttcttcacaaacgtgaccatcacctcctcattgccgttctcgtcctttctcctcgtgaactccatccttacttcccctccggggtccttcttctcttccttgtctccatgatcttccgcttttctaaatgtctctgtttcttttccatccttttgtgcttccttttccgctttgttgcgcgctttttcggccttatctccttccttttcggctttatctctcatttcttccactttatctcccttttcggcgttatcttcctcttgttccactttatctccctccttgtcggcttttccgcccgttttggtagcccattcgttcagtttgtccctcctcaacttcacttccttccccacgtcgtccatttccactgtggcttccaatgcttccacgaaaagtgccaagtcgaactgttccggtgccgttgcttccatcctattttggttggtctccaaacattcccaattcattttgaccaatagtgctgcttgggcaatgcttaactgtgaagaaatttgtgccataatttcggccgggcttttccatgggttcagtgccgaaatggctgaattgacggcaccgatgtccgatcggacgcactcatctgagaggggcacggaaaattgttcaacatttgagtacgacatggaagctgggctcaataggtcttgagctaggctcatgcaacgtctttggcaccctgcttgaattttttgtctaaaaaaccctagcaggcggtctacccttccagttcggccccgcacggttaggccccagccaagttttttggctgtaacttttttctttgtcaaccaaatccaacaatcttggtgttcttcgaaagcttaatgggtttagaagctttttctaagctattgcttggcaattaaacaaatataatatgaaaactgaaaaaatcaattttttgaagatttttcttcataaattttt

SEQ ID NO: 19001 - DNA, 1578 bp, Heterodera glycines
ggatggatcatgtgatggccacaaaagtgcattgcccctcctccaaaattaggttagagtgataaaattgatggcattttatccatctctctttctggttggcattcattataaagggcaacaaaaattggccgattggcagggggcggggaagggtaatgctttgccgtggaatgtcgtggcataaggccttcaacattgtatatttggggtgaaaaagtaatttgtggccaaatccaacaattgtggggcccaagcgattgatgaatggataaaggatggccatcaaagtgcatttatttgccctcccctccaatttgctgagggtgccgtgaatgcattggcacataccatacaatgccatgaaattcatgcctgattctattacaactattgtacaattggggggggggggggaagagggtaatgccatgccatgaatgaatgaatagcgacggcatgccaaattatcccatgatttcttctccataagcacacatttccatggcattaacatttacacatgtcatatgattaaggatggcgaattttctgttgccctttgcactttctctttctctaaaatttccaaaaattaatagttgggatttttagggattttgagttgttctcaaaatagtcattctccttctgctgtttggctaagctctaggacaaggcctattatcttaagacggccaacaaatccctaaatccctgctaaatgccaagggtaagacgagatttatgtttcaagaacagtaacagaaagggcatagagtctttgaaaaatcaaaaaaggacaacaaaaaaggacagaccttggaaatggcaaatattgatcgtaatggatggtcttgatcagaaaaaatacatcattgttgttggtcaacatttcgggcgacatgtgtccagcagccctgctgattgattggaagggtcgtgggttcgagtcccatcgggcgagtaatcttttttatattttacaattgtcggagcaaaaaactttttgttttgtcgcaaattttaattatgtacatcatttgattgtttgatctgcctttggcagaataagctcacttccgcgtgatacaacaaccatttttgtattaaaataaataaatagaaaaaattcggataccataaatcttgcaattcgaaatttaaaacgcttcaaaaaaaggcaaaaatttactcaactagaaaaaagcagagaaatgggacatcaacaataaacagagaccgaataatatgatcacagaaaaatgacatttaaattttgacagtaatcaacctaaaaaaaacgggaattcgatcaatcatcgatggaatctccgatcagatccatcagcagcaaagcgttcattcatttgccaccctatttgcccaatttgctcaaaagtgtgtccaatttttggtcgagagtctcgatttgtttctgttgcttttcaatcagttgcataatggcactaattttgtcaccattgttcttcaccagagtccacatataaatgggctcatcaaaaatatctttattggttttggccacacctgaaaataattaggaaaaaagaaaat

SEQ ID NO: 19002 - DNA, 1602 bp, Heterodera glycines
tgacaacaaaatttgtttagccttttcaaaagcttgttggtgtttttcggtccaatcccacttaatccctttctttaacaactcgtccaacggtccacggagttggtgaatgtttttgatgtacttcccgtagtagtttattgcgccgagaaatgaacgcaaagtggtgatgtcatgtggtggcggcatttgttgtaaggcaagcgttctgcatggatcgggacgaattccatcagccgagacaatctgacccaaaaatttgatttccttcaccaagaacttgcacttttccatttgaacgtgaaaaccaaactgttgaattctctgaaagaatttgaaaatttgttgaaaatgttcggtgagttttggacgcaataataaaatcatccatatagcctaaaactcctgaaattcctgccgccaattgatccatgatccactggaaaatgccaggtgcgcttttgatgccaaatgccaaacgttgacattggtacaagcctcggtgcgtgttcacgcccaaaagctgcgtgattgctcatcaacacaaatttgaagataagcatccttaaaatcaatttgtgagaagaatttggcaccactgagtttggcaaaaagttcatcgggacgtggaagtgggtggtggtgcggttccaatgcgttgtttaatccggtgctgaagtcgaagcacagccggactttgccattggcttttctgaccgcgacgattggtgctgcccatttgctgtagtcgactttttgcagaactcccaactcaatcattacatttggaaactgagcctgtaactcttctttgagttgtgtcggcgtgcactccgtccctttgatctgaacactgtgcgtctttgcgttgccgtccaacagtttgagacaacgatgtcgcaattcggcattgtgttcgcctaaaccggtgatgaaaattagactcttaatttgatccttggtaagatccaatttcgctttttctgccattgcgttcacatctggtgtttgtggttgaatgctctcagtgtaacgcttgtacacatccgtccccaatttacttacaatgagtcggactttgctctgctctgacatcggcttaccctcctgttccacaaatgggccgaaccgttcataccattcctcgaaagtgcggttgtcgtggggctgtaaacgaattctgagatttgggcacttaatttgcaaaacaagtccatgtcattggactgtgactgattttgttgcggttgtgcgttgccgagttgaatattttgcaacaatttcatgaactgtgactgttgatcagccaaaatggcttttagttgctccgaagtgattgacatgattgataggaataacagtgaatagagaaagtgaacaaaatttggccgtcagtgataattttgttttgaatttttattggcagtaaaattcgatgtttgttgagtgatattaagtgtcctttggcgagtggaaattgcgaatttgaactgcacgcagcggtcgttttgacttgcgtgtcccaaatccgtctttccttaaatgggtgttcacagaggcctacttatcagcttgtgaagccaataaaggcttttccctact

SEQ ID NO: 19003 - DNA, 659 bp, Heterodera glycines
agattttggcaccgaaggaactgttcttcgtgaggacaccgtgcgcaaaatcggagctttgaaattgagccgttgtgaagaacgtgctctgtaccatgatggaacaactcgaccgtttgttggcaaaggaaatgcaacattttcgtttggaaatcgtacagcatttgggcatttctttgtttccaaagtcggatccaagaacttactcggaatggatatgatggacagactgggattgtcggacaccatcaggaatgatctgaaagataacttccagactgagactgccaaattgaacggagcgagcccgaagaaagataagaaattcttcagaaaagacggccgtggtaagaagcagaacttcttcgccgttggagcaaatgtgatcgccagcttgggagatgaaccatggcgtgccggacgtgtgatcagccagaaaagaggcctttacaacgttcagttttcggacggcacgaccggagaattcccggcaaagagtgtacagccgtacatgccggacgaagacgaaaatttgaattttcttgacggatttggactgaagagatcctcatccggtggacctgtcgggaagcaccaaatcggcagtgacggccgacgagatcaattggaagatgatctccgagcttccgactggaaca

SEQ ID NO: 19004 - DNA, 1576 bp, Heterodera glycines
  unsure (1)..(1576): unsure at all n locations
acagttgccaggttacntctttttttcactatatagtattctaaaagagaacataaagagctgtattaattagataaactcttttccgaagggaaaattttgaaatttacaaaaaaaaaatcaaatttccgattaacttttgacgtccaatcaatgaccatcctgttttttggccataactttttgttactttgtcaaaataaacattcttggtatcaaactaaagcttagaagaaagcaaaagttggcacaagaaagcagtcacaatgagaaaacaccaaagtgcgcgaaaagccattttttgtatgcgacaaagtaaaatcaccttcaaaattgagatttaagttaaaaaaataggggaaaatataacaacaaaaaaacggcttaataaccatagagttcttagagtttacaacttgcgaaaaattgaagggaaacacaaatttttcatttttgtttctggattttttttaattgggcaaaatgccaaaataaaataaaactaaaatttttgaatttttagaacgcaaaaaggaaaaccgtaaagcagagaattaggaaaggtggccaaacatgaacaatcgcttctagggattgcatttcatcaatattgaacaaaattggacatattttttaaaattttaaacggcataaattagacattttttaaacacatgattttctgcctgcctacttaagttaatgtcaattaacattttaattaatgatcaaatgtatttgttgacgttgttgttgggcgctctttttaaaaaacagtaatttaccataaaactttgaaaaaatcgctaaataaattttcaaaaatttgtttcttgaaatttcttataaaaatctttttttaatttctaaatttgaaaaagatataaagtttttaggaggggagaacgagcagtgctctcagaataaaccgttgtggattcgattattaaattaggtaacaatccaaagagaatgaaatggaaacaaacaaatttttttttttttgatttatgagaatggagagaggtataataacatataaaataaaataagataaaaaggagaaaaaatattgataaatttgcaattaaaatatggaaacgcaaaaaataaaaataaaataagataaaaaggagaaaaaatattgataaatttgcaattaaaatatggaaacgcaaaaaataaaaataaaataaaaaataatatttgtgtgtgtttcataacaaattgagaaaaacgaaaagaaaaagagagactagactgatcacaaaaaatctcctagcagcacacagaagagagagagaggagacaatttggtggatcagttgtaattgtggtggtggtggtggtggaaaataaggcggggagggggtgaactgtgttaattagccttccccctccccaccccgataaaatgtttaatataaaaatgattgagtcttattagtgcagggggtaatattataaaagggtttgactaatgctaggttggtgggggggggggggaagatgtcgatcaaatgtaaaccaattttagaagaattttaatcggtatctgtcgaaaaatgaaaatttt

SEQ ID NO: 19005 - DNA, 1431 bp, Heterodera glycines
ctagagaccggcgggatcgggactcccgcgggattttacgggagtcctgctcccgactcccgcttttttcggtgaacgggatttttaacgggagcgggattttaacgggattcccgttcgggactcccgtcccgtaaaattttgaactcccgatcccgctcccggaaatttttttttaccggtctctacaccctgcttttcatttatatttgctaaaattgcaaaaatatcaaaagtgctaaaaagtagaaaagatgctaaatttgtactaaaaacccgaaaaaagtgccaaatttgcgctaaaaacccgaaaaaagtgcaaatttttgctgagaaaatgccaactttgtccaaattaattttatcaatgttatccacccagctagaccgcacttttaatgaatagtcggaggacaatcctcggccacaatgtgggcaaaaatgtgcggacggatttgtggacgatttgtgcgactttttcgtgcccttgctcgccgtcgtcgtcgtcatgttttgttgttgttgcgttttttcggtgcccaggagtgccgtcgatgactgtgccggtggcggtggtggtgccgttgagctgcccgtggggccaatctgttgcaaatggtgttgttgctgggattggttttggtgttgtgccattggttgtgggtgctgctgctgctggtgatgatagaatggtggcatcggaagcgcacccgaagcaatcggatggtcattaccaccaactgttaaaaaatggcttttttaaatggtgccacaattcgtgaccggaaaatgggtaattgtaaaacagaaagggacaactgggcgatggccaactgggtcacgggaatcttcggtcttgagtgccatacaataatttaggcaccagggatgtgtcggaatgccgatttccggcatttttgtgtcattagaattccgattgccgaatttatttggccgttggaattccgatttctgaaatttttgagagcgtttgcacaaatccttgttaggcatccccgaactaattggtcgcacttcattagcaattaatgataatcgatttaaatttagcaccacggtgaaatctgttgtgatgaggaagatgatgatgatgttgatcatcaccaacagcaatattattgggcggaggtggaggataactcgtcgcaacatgttgcggatggttgtgatgcgggagttggacgttgccatatgagtacagttgctgctgctgttgctggtggtggtggttgaacattggcatttgctgctgctgctggcttcccacatttgcacctgctgctctcattaacattgtgccatcaccgccggcatggacaccaaaagggtggtgaagttggtggtgtacacgctcgtcctgtaaaagaggaacaaaaaatcaaacacgattaaagccaatcaatcaatgat

SEQ ID NO: 19006 - DNA, 3654 bp, Heterodera glycines
ttgtaccacacatttttaccgtacttgctgtagaaatgctctgaccgtaccgcaccgccgttggccgagatcagctgaccgtctctgtcgtaatagttgtcggggttgttgaactgctcgaagtcgaagtactccggaccgaccactgttgtctcagtcgtcgcttggtccaggtagcgccgccacgtctccgtccggttgagcagcagcaaatcgccgatgatgatcattccatggctggcgcgggagatggcgacgtccacccgtgcggcatcagcccagaaaggctgagagtcggctccactgtcgaagacggagcatgttgtgacgacgacggcaagtgacgactcgtggccctgtgtcgcgtccgccgtggtcactaaaatgtccgggatttcttgttgggccaccaaccgttcgatctccagggcttgggcggcgtagaagcaaatgcagcggatgagtgtgccggggaaggcccgcgccaagcgccagagggctctcatcgctgtgtcggtttgtccaggattgggcgaagaggtggacacttcgtcgcgttgcgcaggtgtgctctggtggaccaaaattagagggactccctttttcggcaatttgaaggccgtttggtcggtcatgagtgcccgctcagagtcgtcgcgtcctggtgtcaactactcggcgtgcggtttgtaaaatccggcctccgtaccgcggacgagagcagaatgtgagcgaaaactgaccgataatgttgtgacgtccgtcccttgtgcaacatccatgttttggatgaccgtgtccatgccgaagtcctcacggacggcgatcggcagggagggcaagtggacgcgaagctcggcggcgatcaccggtgatcagcacctcggttaggcaggggagttggcttactaagttgaggatttggacgtatggcgcctcgtccggcctcgtcgatgatcaaatgcgtcgtttccccaaacagtgccggcaattgctcacagaaggacaaggtggcgaagcacaggcggcggtttttgtgctcctgcacaattttggcaactgccatttcctgggccaggcgtgagttccgctcgcaggcgtccaggtaccgctccaccttgacgcggtctttgtccttctgtaggagttcctgaaagtcctgtgcctccaccgcggtggcgagcaggtggggggaaatccgctcaacttccttggcatatctcaacttacctgtgccggagaacaaggcaagcatcggctccacgtggtttccggcggccagtgcgtcctgcatctccagcaccagcttaacgacggcgacgttcggcggggccagcgccaacacacgtgccgtgggatccgtggccaggaccgtggccacgatcgatgccgcgctgaacgtcttgccggtgccgggcccggcctgttgggagaccaggcgcggcacctcgtcgagcatgcacagcgcggtgtcaacctgtccctctttcaattttgaaagagtcccaaaagtcattaatgggttattggcctttgggctttccggttttaccggtcggcccaataaaattgacatgattcggcccacctttccttcgtccgttgccactttcgagcagtcattggaccgcaaagtgaacatccgttcctgcagtgccctgactgacgtctgcgggatgagttcaacgcatccgtcgagttcgccgcagcgcatctgatcgaattcctcctgcgcgtcctgatccttcgcttcttggtaggaaaggatcaccttaacatcaatttcgtacccccgacataacgccccccccctagatacgccattggtcaccttcccccgcttccctcatcaaataaaaaaaatttggggaggaggggaggaccaaaaaatatagcaaaatttggactaaaagaggtagctttataggcaaacttttggtccggcgaagcctacagatcgtcgggtcgcttcccgtgccccggaatttagttagaaacaaaatatttatattaataagttcaaaaatgaatttatttttttaataaaaaacctccagttccatttctctgatccgccgggtgttcaatttgacgagtacgtaaaggccatccggcaaaaacacctgctccacataatcaatgatatcgcctgaagaatatgcaatttttttcttaaaaaaattgaagtaaaataaaaaagtaatttaacacagggggagagtaatgcatcctaaaaaaaatctcaatattaaaaaaaaaatcacgatttattttaaatttttcaaggcgcaaatgctcctaaaatcatacatttttgggaaaaatttagacaataaaaaatattttaatttaaaatgggggatttcatttaaaaatgctttgctacccaatgtggtcttctcaatccgtgccttcacccgtcgtgccaacttttcgtcccgctcatcggccaatgccacggtgatgatcggcgttgaaatggagcggaccgcgttgatgattctatacaaatttgtaaatttttttaaaaatgccaaaaaaatatttttattttttgcttactcttttatcctgggcacgccttgggtgatgttcatggacgcaacgccagcaaagtgaaaggttttcagtgtcatctgagtggagggttcaccttaaagtatataattatttaatgagacaactgcaaaaattatcggataaaaaaattatgcgaggtaaatttttaatagaaaaaatgttgagcttttctgttaaaattttttatcccccagtggagcggagcagatcgttcccgatcatgaaatttttttaatttaccgaattttttagaagaaaaaaaagaattagattttttgaaaaaaaaatttttaaaccatgcttaatatcgcagattttgaaagaattttcttttttaattaatggcgaggcttaaggtggagggagatcattttttgttaaattaaaaaaatctatgaaaatttttttctttaaaagttcggatttttctgagtatttttgccataagtttgtgaaacaaaaagaattttttaagtaattaccaattgatgtggctgcaattgcaccgacgacagcagtgcctaggaaaaataaacaacaattgatatgattaaatgaatcaaaaactgtttcaatttatattaaataaaattatttaaaaacattgtttactcggctccgcagttgctcggctttttcccagtgcacaaatgtccaaaaattggtgcatttggccaagactgaaagttaaaaaaatataattatttcattaaaaatcatatcaattttttcattttctaggatgtttaaatgcggggaggggagagggggaattaaatgtacccaatgaatgaaaattttgtttttaatttttaaaaattaggaaaaaatggcattttcgacaaaatttaataaaacttattttcactaatttctaaaacatttataggcatttgaaacatacaaaaaataaggaggggtgtggtctaaaatctaaacaatttaattggtttttattgaacaaaaatttatttaaatccgggcaataattcttcattttccccctctcagcagaaagcaattttcttttgctttttttttcatatttggtttaatcattcggcattggttttt

SEQ ID NO: 19007 - DNA, 1227 bp, Heterodera glycines
caccgtgaggcgggacagttccaaaatgtgtaccacattttctgtggaaagtccaagtaccttaattggacaattaattgtcaacgaacacagtcgcctttggcctcttatggagcagaaaaggggaaatatcagatggggtgcgcgtcccttcctaaaaatttctcttttcgtctaaccatcccccctttttgtgcactatttcgttttaaaaattgggaacatttttttgtttgtttttttgaaactaaaatgtaaaaaattttaaaaaattatttctgattttaaataatgcttctgtttcgaatcttttgactctaagaaattaaactgcaatttttagaacaaataattctctgaagttttgaacttggcttttcaatgtttttaagcccaccgtgaggcgggacagttccaaaatttgtaccacattttactgtggaaagtccaagtaccttatttggacaattaattgtcaacgaacaaagtcgcctctggcctcttatggagcagaaaaggggaaatatcagatggggtgcgcgtcccttcctaaaaatttctcttttcgtctaaccatcccccctttttgtgcactatttcgttttaaaaattgggaacatttttttgtttgtttttttgaaactaaaatgtaaaaaattttaaaaaattatttctgattttaaataatgcttctgtttcgaatcttttgactctaaggaattaaactgtaaaatttagaacaattaattctctgaagttttgaacttggcttttcaatgtttttaagcccaccgtgaggcgggacagttccaaaatttgtaccacattttactgtggaaagtccaagtaccttatttggacaattaattgtcaacgaacacagtcgcctctggcctcttatggagcagaaaaggggaaatatcagatggggtgcgcgtcccttcctaaaaatttctcttttcgtctaaccatcccccctttttgtgcactatttcgttttaaaaattgggaacatttttttgtttgtttttttgaaactaaaatgtaaaaaattttaaaaaattatttctgattttaaataatgcttctgtttcgaatcttttgactctaaggaattaaactgtaaattttacaacaaataattctctgaagttttgaacttggcttttcaatgtttttaagtcccaccgcgagggggggacagttcccaaattttgtgccacattt

SEQ ID NO: 19008 - DNA, 2577 bp, Heterodera glycines
  unsure (1)..(2577): unsure at all n locations
ataatacccctggggagaagggagtgggaaacatgatttcgaaattttaaattttttgtactctaatctactcaaaccggttcagaattcaataaaaataacattcacggtgcgaaaaatggggtatgaaaagtttatttgggaaaaaaagactttttacaaaataatacccctgggagaagggagtgggaaacatgatttcgaaattttaaattttttgtactctaagctactcaaaccggttcagaattcaataaaaataacattcacggtgcgaaaaatggggtatgaaaagtttattggggaaaaaaagactttttacaaaataatacccctgggagaagggagtgggaaacatgatttcgaaattttaaattttttgtactctaagctactcaaaccggttcagaattcaataaaaataaaaaaaatttcaaattccacaaaatgggaaggaaatttaaacctaattacctcttcttctcagctgttaccctgcaaaatttggtgcacttctgatcagaacgcgaaaaactatgagtgattgaattttcactaaaaagctaagcctaaagttttcgcatatttaaaaccaattaaaaaatttttagaatttttattcatatccctttttgttattaaaagcatcagagtgccttaattaacctgtaaataaagtttggtgcgtttcagagcactctctgaaaaaatattaatgaatttattttttcaaaaattcgaaatgtacgcaaaataagaataccgaaaaaatttcaaattccacaaaatgggaaggaaattcaaacctaattacctcttcttctcagctgttaccctgcaaaatttggtgcatttctgatcagaacgcgaaaaactatgagtgcttgaattttcactaaaaaagctaagcctaaagtttttcgctcgtttaaaaagcaagtaaaaatttttagaatttttattcatcgccctttttgatagtaaaagcatcagagggctttgttaacttgaaaataaaatttggtgcgtttcagatcactctctgaaaaaatattaatgaatttattttttcaaaaattcgaaatgtacgcaaaataagaataccgaaaaaatttcaaattccacaaaatgggaaggaaatttaaacctaattacctcttcttctcagctgttaccctgcaaaatttggtgcatttctgatcagaacgcgaaaaactatgagtgcttgaattttcactaaaaaagctaagcctanagtttttcgctcgtttaaaaagcaagtaaaaatttttagaatttttattcatcgccctttttgatagtaaaagcatcagagtgccttataaacttgaaaataaaattttggtgcgttttcagagcactctctgaaaaaatattaatgaatttattttttcaaatatttgcaaagtgcgcaaaataagaataccgaaaaaatttcaaattccacaaaatgggaagggaaacttaaaccgtaattacctattcttctcagctgatatcctgcaaaattaggtgcatttctgatcagaactcgaaaatctatgagttcttgaattatcactaaaaaagctaagcctaaactttctcgctcgcctaacaagcaattacaaccttctagaatcattattcgcgacccaaccgatggggcccactcggcggggcccaatcggcggggcccaatcggcggggcccaatcggcggggcccaatcgtaccggggcccaaccggcggggcccaatcggcggggcccaatcggcggggcccaatcgacccggtccgccgctgtacccccaccccttcaaaaatatatatatatttggaaaatcgagccgaaaataagaggccgaatcttggttctcggccaaaaatcgccaaattcccttgcagtatttgatcatggattactacgtgggcggtgacctgctgacgctgctcagcaaatttgaagaggagcatggacacgtgccggaacacatggccaagttttatgtggccgaaatgattttggccatcgattcggtgcatcgacttggctacgtccaccgggacatcaagccggacaacgtgctgttggacatcactgggcacatcaagctgggcgactttggcagctgcttgcgccgtcagccggacggcactgtgcgcggacaaccgcggtcggcacgcccgactacatttcgcccgagacgttgcgggtgggaaatgggggcacgggttgtgtgttgtgcatgcgcctgggttgcccatcggccgctcgagtcccgagaggaatttgtaaccatttctcacccaaaaaaaactatgttttttgggtcaaatttccaagaatatggtaaaagatgggggaaaattttttggaatttaatgtgatttgttaagaaagttgcttaaaatcttcaaaaatttgcccatttttcttgataattttttaatttttcatttcgggaggcctccactgctttgggcctgctacagtctcctaatttttttttacaatggtcgaccctgttttcaggccgttgaggacggacgtggacgatacggcgccgagtgtga

SEQ ID NO: 19009 - DNA, 2354 bp, Heterodera glycines
atcactagggtggggatttttaggggcgaaaaattccaatttagggacctaaataggggcaaaaaattcgcgaaataggggcgaaaataggggggaaaaagtttcaaatgtagaggtgaaatttattaaaattgccgttttctctatgtaataagttaaaattaaggcaaacaattttattcactgattgcagttagaaatgaagtacattccgaaattttcggggtttaagggtcgattcttaggggtgtatttttccaaaaatttttgggtcgattcttaggggtgtatttttccaaaattttttgggtcgatttttaggggtgtatttttcttttttattgcattcttgttaataaatttcctaaaaatcgcgaaataagggcgagaataggggcgaaacgccaaaatagggacaaaaacttattttaggggcgaacactcaaaatagggatttttaggggcgaacatccaaaatagggattcctagggtcggataggggcgttaaaacgaaagtttttcgaacaaaaaatgtgtttttcgtgcatttctcgtcgagttaaagccgcagaaaaaataagtaaaaacttagaaatcctcaccctacttatcacattcatcacacattttctctaaaataaaaagcaaataagcagggttcgcagatgcgagactttgaggcctacataagccgaaaatgaaaagcggacatttgcgctccgtttcttgcggaccatttttacccaatccatttgccatgccatttaatacactgcgtttttttgcccgggaaatcaaatggacggcacaacaccagcaaagtaaatgttcaaaattttcattgtaatcaaacaaaaatcatttctggccatcatagaaatggggacacaatgagtgattatacaaaattggcggctggcataactgaaaatgatgagagattatggaaaattaatgacaaaaaaaacgaaggaacaattcaaaaacattttgtgttgtgtgtgggctatgggattttactaattatgattcgatgtaagcacagaagaagaaaaaagaaaatcaaaaatgagaggcaaaaggaggagaagaaggagattttgtagtggctggctggcaaatgtaattagcgattcattggcgataatgagggtaatttgtggcggttttttcgttgtataggcaaaaacaattagcgctgtgtttaaacattaaggcaaaaaaagaaaagaaaagaaaagatgccacacaaaatcattttctttttttggacacttttttccgtcttttattgtttttggtggtcgtcgccgcttccgccggtcgttgcgctgctcaacttccccagcaaatcgtcaatggcactgatctgatgttggcgttgctgcttcagctgatgatcaatcgcttttggcttgcctttaaaaatatattttggtttttttttgttttgtttggtttggctcttggcaaaatgtttggtgacattttttgttccgaagcgaaaaaacgaattacgaccaaaaaatccggtccgaattcggaattccatttcaaattttgtggcaaaacaacgctattacattacgagctggaatggcatgaaattcgaccagtaatgaaaccatttaaaacccgaattcacaatcaattggttgcattttcattttattacatggcggtgatgacgcaattcgggcggacggagacggcggcaatttgtccagcgccatcgccgccccaacggtggaaggccgatgctgcgcattgttaccaaacgttggcattacactgctgttgtcgtggaaagagtttcttcgacgagccggcgaaggatctgtcgggaaaaaaaatttcgaaaaaatgccaaagaacaagggtctaacaaattgatgatgatgacgctgccgttgttgttcctgacgacagcggactgctcattctgggcactcggctggcaacaacaattgttgcagatggttgtgctgctgctactgcttgtcctcctcctcctcctgccccttcagcagatgacgtggtcgtcatgggttgttgcatcgccacgcttcctgatgatgccccggatgatgccaatgttcgcgcgccgccgccgccgctgtacagcgcgttatacggcggtggactgacgacgccgtacgacgactgctgctggtgttgttggtgacgttgtactgcttggtctcgagcattgggtaccgtttgagttgtaccgccgttgcccaaccgaacaatgacaggcggcggcgacctgtgcacatgttgttgtgctgcagcaacaacagtcgacggcatttgttgcccatgccgttgttgttgataagattcccctctg

SEQ ID NO: 19010 - DNA, 2033 bp, Heterodera glycines
actaatgttttttcaaaagcatgacacacattacgtgtctcacactaaagtcacagaacaaaccactaatgttttttcaaaagcatgacacacaatagtgtctcacactaaagtcacagaacaaaccactaatgtttttcaaaagcatgacacacaatagtgtctcacactaaagtcacagaacaaaccactaatgttttttcaaaagcatgacacacaatagtgtctcacactaaagtcacaaaacaaaccactaatgtttttcaaaagcatgacacacaatagtgtctcacactaaagtcacagaacaaaccactaatgttttttcaaaagcatgacacacaatagtgtctcacactaaagtcacagaacaaaccactaatgttttttcaaaagcatgacacacaatagtgtctcacactaaagtcacagaacaaaccactaatgtttttcaaaagcatgacacacaatagtgtctcacactaaagtcacaaaacaaaccactaatgtttttcaaaagcatgacacacaatagtgtctcacactaaagtcacagaacaaaccactaatgttttttcaaaagcatgacacacattagtgtctcacactaaagtcacagaacaaaccactaatgttttttcaaaagcatgacacacattagtgtctcacactaaagtcacagaacaaaccaaagatatgcatttctatttcattaaaagttcaaataacattaagcataaacataattatttcacgtaaagaacacaaaaacaaaataaacaaacaaacaaacaacaaccactaaatcaaactcaaacaatatactgataaattttttcgtttacaaaaaacaaatttataacaaataacttaataaactatgaacatacataaaaaagcaaataaataggtacaattttaagaatgtttattgcaaaacaaattgaaaaatcaaaaccaaacattttcatttttcaaatgcttttttaacgcaaaacaaaacaaaaacatttatatttttcaaatgcatttttaacgcaaaacaaatacaaaacgccatacaaattcaaaaactggaactgacaaacacttaactttattatataggatttgtataattcaactgtatgatttttaaaatttttccagtggcactatcggcaccaaggattgaacagaagcgccgcctgacctttaatgttctttaaaaaaaagacatgaaaaatattttgttgaattgaataattttttcaagcaaatattagagttgcacggtaatcggtaattgtaaaaaaaccggtaccggtactgaccgttaatgcaaaaactggtaccggtaccaacttttaccaccggtaccggtaccggtaaaaaccggtaattttccaacgtaaaaatttttggacaaaatttttattcagttttcgcgcgagtgcctgttttttagcattagaattgttcagaagtatatgtatattgagggtgaccacgttttttttcaaattcaggataaagaacactaaaattcagatgtagacctcaaaattcagattattgcaaaacaagggatcagcggccaattttccaattttgcgaaggggtctccggccatgtaaattaatgtaaatcaatgaccttttttgctttcaacaccgcttttttcgcggcaaatttttctcaagacttttggggaacaaggagggccggcggtgccgataggcgccgccgggaaaaattttgtattttttaatgcgatttgttaacagaatttgtaaaaaaagaccaattgattaatttttgggtttttaggatgcttaaaatgaaagaaaaaaagttggaatattttttttaattaaaatttcaattaaaataatggtaaataaaatatgaagaatattctatcccagtgaggaattgaacccaagcgaaaaataatgaaaggcagaaggtttaaccattacaccacatatgcatagatattaaatgaaataaaatttaattttttgtcaaaaatttctccttcttcaccaatt

SEQ ID NO: 19011 - DNA, 1281 bp, Heterodera glycines
aaaattttttaaaaaaaggacaaaaaaaaggtaaaattttctttttttttttatttgaaattaaaaaaattttggaaatcacatttttcttttcccttcccctttttaaaaataaaatgaaaatttaacccaaaaaaatttttttttttttaattaaaaaattttttttttagtccactgaccttaatttttttccccgaattctgctgaaaactgggaaaagtttccgacttccgcttttcgctattttgacccattttcctgttgggaataatttacttatttttaaatccgattccaacctcaattgaaatttgatgataattattttttaagtgattattactgtgcatttgctcgcttatgctgcgtaatgaagtgataatgaatttagatgaaaaccggaagaatgttttgataatccaaaacggtattaatgattaattttatcttaagataattccaaaaaataactgcttattaatttttcaatttttttttaaaattggaagggatgtttgcataaagtgaaaaaaatgcacctttattttttttttcaaataaaatttttccaatcttcaaataataatttttctatcagatcacactccattcttacatgtgcataaaaatgtcttgtttcgtgccgaaatacgaaacacgaaatgatcaacatccctgctatacaatataaaaagatgagattatgcttgtaaaagattatttgatgatcgaaatcgcaaaattattttatttatcaattctgttatttatatacaatatttatgaaaaacaaatttattatttttggacccatgacagcctggtttattttaatggctagtttgttttaattatgaaaagtgtggatgatgttgagtgtgttcatgcttaattttcgaatgaatgcatcttttggtcatttctgtcaattgcctttggatttgaattggcttttgaattggctgtgggtaaattcgtgctgtgagttttgtgggaaattggagaaggaaagcgctccgatattcgctgctgaaatcccaaattaaagagagaaaatgaggataaccaaacttaagcctaacgaataaacccaacgattaattgagggggggggggggaatatgagggattggagaagacacaaaagaatgaagaaattggaccacttccaccccatttgtatggttatataatactgaactacctgtacgtgtacaaaataatgggcgaaattgacatggaaaagtaaggggcaattgtcgaagtgttgacgacgta

SEQ ID NO: 19012 - DNA, 3331 bp, Heterodera glycines
  unsure (1)..(3331): unsure at all n locations
aaaaagaggggggggggggggcataaataaataaaataaaaggcatgtagtgtcggaaaatgaaaagaaatgtgtgaactttattcattcatttattcaccccccgagggatgagtcatcggactcattaaaaagggggagagaatggcaaataaacaaaatgaatttgaaaatattaatgttgaaattcattaggggatgataagcaataaaattatcaaaatttcgtctttttggcccaattttctacgtttggctaagttggacaaatgaaaaaaaaatgcaaatcaaagccgggattaagaatcccacttttttcatcttaggattataaaaactaaagtgggccttcgtcgctgttgctttgctgcaacagccagaaaaagttggtccattggtgctaataaaaaaaattgcttctcctaaaaaccaatccaatttcccccgtgggcactttggcgacggattgagagagacacacaattaattaattaagcctaattaaccccagcccattctctgagcagcagcagcagtgggggaatgagaattttcagggccaatgcatccaaaccattcttgagaatgtgtatggggggattcattgtgccataagagagcatcgatcagcaacgaatgccgagcaatggcatttggttttgaataatggaattttattttacagtggcattttttttaattacctttttaatggaatgactaaatgttgagtctcagtttcttcgagaaattcttgcttattttcccgtattagccattctttttcaatttatttaattttaaatgtttttaaagcccccgggtgtgctaattgaagaaaaagcgacccaaaaatccatccgatgggaccattaattaagccactgcccaaaaccctttcgtccagcggaagaagaaaaaaagatgtggggagaggggagaagaaggatttgctcgattaatcgcaccttttgccgctgaaggccatccatcggcgggggcaaattgaggggaaaatgaaattttcaaccaaaaattgtgacgatcggagaaaggaattgatcgaaaaaacgcaaaaatttggggggaaacgccgcgagggcactgaaaagaaaagaaaaagaaagaggtcgacgaggaagaaaagtaaattgggaaattattggaaacacttctatttaaatggataattaaaatgaattaaaaagtttaaaatcggaaaaagtgtcaaattaattaggcattttggagcaaattgcgaattgtgtgccaaatatgtcaaccaaattggcacattattggacatttggtgggacgaagaaatgagaagcgaaggaagagggagggacgaacggcagcagaaaatgagtcattatcaacctcaatgttcccccaaagacaagttgagagggataagagaggggaaagagagagagtggaagagggaggaaaagacggaggagaggtggggagaaaggcaaaaaaggaaatggcgagagagtagggagaaaggggcacgagagaagcaagggaatgtaaggaagagatagagagaactttgagagaagacaattagagagagagggagggatatgctggttttattgccctaaatggccccgccctccccctgtcgcccaaggcaaaattaggggacggacgaagatgattgggaataatgagagccactttaaataatggcgacgatgatgatgagaagggagggcgcgaaatcaactgaagttggagtcccatcaaaagggggcgcagtgatcaaaggggaaattttggaggggaattttgggaggagtggaagaagtgatcagaaaatgggagagggacggaacagtgatcaaagtgaaaagcaaaagaccaaaagagagagcattggaagaggatttggaggagaaaggggaaaaagtgatcagacaatggcagaagagtgatgatgacggagagaaaagagatcaaaaaagggatgaacgatttgagaggtgttgaaggagcgatcacttaaacaaaaaccaaaatgccgaaggcaaaatggattctttttgctaatgatgatgatgatgagacgaaaacggatgaattgcgagcggaggacggacaaagtgaaaaggacggacggacgaatgaatggaagaattgcgccgtttagtccgtctgctgatgatcatcagcaaagagaagaggaacaaccaattaacagcagcagcagctgaacaatacgcaatacgatgctgcattgtgagattatgctaatttatgggcagataaagcggaggaaaaaggagaagcaaaaggatgccctgaggggaggaaaaggggggggggaagaggaattaggaggaaagagcacaacgagacaatatgaatgatcagcagcaacaacaacaggaaaacgtactcctaactgcttattctcaaaattttaggcattttttcctaaatattccttttatgaaagtgccaacctttgaaaagccgaatcatttgaaatgtaaaggaaattaagaataatgttgattgcttttagtatttaaaaaaacaactgctgatgaatgtaaaaatgtaagaaatgtaccagccgacaccgttgggggggggggacgaacgcagctcaaaccatcatttcatctgtcgtcggatggaacagaggatgaacatgaccaagaagatgatgatgatgaggaggaggagggacagaacaacaaaagggagggacggattattacgaaaagggacggaagagtcaatggaaggggggggggtgacagacagacagagggagggacggacgtcgtccccccgggcgagtggcggtgagtgactcttccaatttcgcgaccgcatttccccgcgggtgcttctgttggtgctcctctttgtgggcggtgcttttgtccgtccgtgttttccgccctttccgcgccgccaccgacgggtgacttttgctgctttgacctctccgccgatcactttcttcactttttgcttgatcaaaaatcggagcggatttttaattgaaatttaatccgtccgtttcggataaattttttgggctcaaattttgtggtggcgatggaggagaaatgaaacaaatttggagcagctttattctcaacatccatcagcagaaatatgagaagagcagcagctaattttttgagaaagaataaaatggatgacgattttatctgatctgatcagagagattnaaagtgtttggacacacttataaagctattggaaggataacgtttcattgacagtcaagagtagagaaaagtctcgaactttctgtggcttcgatcggtctcgagctgac

SEQ ID NO: 19013 - DNA, 3256 bp, Heterodera glycines
  unsure (1)..(3256): unsure at all n locations
gggggggggggaaggtcgaccgttcgtcgtggatgcgatgagtgagtggtgggtggtggtggtggtggtggtggtgtttcttcccggggagagtccacgtttcatcccttcgtcggtcgtttgagtggcgccctccaaaagtcccgcggcctcaattgttttgtttgcncaaaatcgcatttgccaaaattgcatattttggttcactgttttgagtggaaaattgtttctttttttgcctcaaagctccgaaacatttaagcgggccaacaaattgcattttcctggccaaattcgcaccttttccgaatgtttctccaaaactgaggagcttttcctttctcatttttcccatccgccgccctaaataactttcgcttttccttctccaaactttgccctttgttatgcacaaagtgagcgctctgttcacaacgcaaagggacagaaattgcggcggcaaaacgaacggagtgccgtcgatggtcccccggcaccacgtggcgtcgtcgcccgcactgttcgaacacgcggccaattcgaacggcaaaagtccgttgggcgacgacggcatttcgctttgcacaattttcaaattgatagcccaaaaacgcatttgtgtggtgagaagagccgggtcggatgttgaccagcaggtgaacggagggagaagaaaaagaagaagcaattgccctgggtcaacaatggcaacacttaaaataatttacaaaataaaagcctggagttagcctaaagcttaggcctaacctatgccattgtacgagttgtaatggcacgcctttctcttggcttttccttcactttcgcccggttttccctcagatttcgtctctgatcacttccgcttttcgtgccgttggcagggccccgcccaccgatggctcttcaaccgcccatttcctttccgtcgatcatcactgtgccggcaaaatgttggaccgcgtcgggcggcggggactgccgctaattttcctcaacggcgattgtgtaggcggtttggccgaactgaaacaaatgacgaggaacggctttctggtggagtctctttgcccgcatgacttcgatttggcagtgattggcagcggcgaagggaacgcagtggcggagagagcggtggaggtgagacagagaaagaaagggaaaacgacggcattttgggagaaagagaatggcattttgagaggaacggaattttaaagcggagagagggaaatagcattttgggatgttcagctattgacaggcggcactcaaattgggcaaaagagtggcattggtggaggttaagcagacaagcggcaggaaaggacggtctaatgccttcgtagacgcacaaatagcaaaacaaatggccaatcaggcggcactgatgcgtcattcaatcggtgggaaactgtgaaaataaacacgacttttctgatggatttcagaggaggcgcagcgcaacggatggaccatcgaatattcgggggatggcaaaatcaattttggcttggattggcaatgtgtgcgcgaagcgattgagcaagagactaagcagaaaagagaatggactcagaaggcatttgagaggggaaaggtgggcagagaaaggcatttaaaggggaaaggcggcattggggcggacaggacaaaatttcgacgacaaattatgccgcgttaatttttggggtgcaccgtacctaaggcaactcgtatcaagcctaagcctaggcctaacctaagcaattgtacgagttgccatgacaccaaatcacttaccccctcccgccccctccataggttcaaacgtttcctacgactgcctgccatttctccgggtcccatcagctctctttttgccatcagctgaccgactccgattcggcacagaacaaattggcaaaacttagcgcagataaatttttgctggtcacaaagagtgaagcaaaagtgttggaaaatgtgcccggcgcgaaggaattttgcatttcgaagtcggactttgccattgccaatttgcactttgaattccgtccgtccattcagtgacgaattgttcactttggagcacaaccccggcacgactttgttcttttgtgacgatgaagcggaccctcaaattttggagtcggccgccattctgagggcccttggcaacgaagtgacggtctgtctgccgagacttctgatcagcggactgatcagacgccgctttctctgactcattttaaggtcatgacgaacacttattcgcccagcggaaagggcaaagacacgtcaaaattggagtgtttcgattcggagttcattctttcgatcaaagacaaactttgtcagttgggcattcgcttttttatgtttgttaaatttgtccagttttctctcaaaatgtaccattcagaagtctaccgacaaaatttgaacgattgagagaaccatctgaagacaaatcggctattttgcgcgtttacgcgacaaaagcatggagcaaatcggcggaaaagggcgcccctggcgattggactccgtttgtggaggagttcaacacggtcagtccatggctcctttcagttgttttgttaattgtgcttctttctacatcccttccaaaaggtcgtaatttccgtcggacggcgtcaccatttgaccgatggttttgtgctcgacaatttggcatttggcacttcaaaatttcccaattctccgtccatttccgactcaattaatggcacaatgaacggcaccaccagcagaagaatttctttgtcgtctgaacttttgcaggcgccgaatgtttatggcattggcgatttgcgaatggaacaccggtggaggggggagacgacgccgcaggggcaatcggaggagggaaattgccaaagagtgcaaaagttgctgagaaaaatgtacgaggccgaatttgaaacggtgaggagcaattgtaggcaattaattaaatggctaattgggttaattggttaattgattgtcagatggacaccgccgattcaccgattgtcagcaaaacgatgcttatcccaccaatggaatacagctgttgtgggctgaatgaggaggagatggagatgaaatggggaaggcatttgacacgcgtgtacagagacggagaagtgccaataacggcggagagggcgaaaatgatttgtgtgatgaagggggcggaccagcgcaaaaaggtgggcaaaggcaattggaggattttgggaagaattcgaaaaggacgggggggggg

SEQ ID NO: 19014 - DNA, 2014 bp, Heterodera glycines
aaacatctgtctgtgcacaatggtatttccggacatttaattatcaatttggcaattttttataatatcactttgttttgatatccagcaattgcaaataaaattcataataacaagaaataattttgtaaccaaaaaaaattctttttatttactttatgttccaatctcatgatcaggttttgctctgtgcattttataatctaaaacctcaaattagttttattggtttttttaatatttattttatgttcttttaatatttggttcattcgtttggaaacataattttttagttttacttttttacaattctcaatattttgttacatattattcttcttattttactttgatacaaatattgatagatctgtagataatttttctttctaatttcagtgcgtattttattttttgatttatttgaattattttcatatatatatatgtcattttttgtaaataatattcttcacctgccaccataatctaagcattttgtaactctcattccttataaacaattaaaaataataatatttcagaatacaaactctaaattaagattaatcaaataggtattgttaagtaaatgtaaattctaactataaaaatttcgttcgagttaaaaattttaaaggaaatatgcatttgattggtttttaaatattttttaatttttttttaatttcaagattttcacctttatctagagccaaataaattaagtttccaattaaacattttttattcatatacttcaactatttatagagaaatgttctatgcttttgcgtagtttagttcattaattttagcattttctaatgtttaaactatttaatggttcttataagtatccccactttcagaggaggttgaaaaaatccccccgttccatttatccacccagggggacaaatggaatttttaattttcgaaaaataatttctttttaatatttaataaaaaaaattccagaaaaatctcattctttgtaaaaatgttgaaaaaaacttgattttttgagcttctcagggtcataaattttgaagcttaacgaattttttggaattttgcagaataatagaaaacacttagggctatcgaaagatatcaaggttttaaatattaatatcgtcagcattcatagatactaaaaaagaagtcatatttaaacagctatgatattatgcaatttaagtaattcattcttgctaaaatatttttaagatcactttttctttctttaaaatctgtccaattaaatattaatatgcatttttcatgcacatttacagcactaaaattacaatgaaaaattcaaatgaaaatgcgcattttcttgtaaataacaattgtaaaattataaataaattgcatttttccgttaattacaatagataaaatagtcatgcggcgagaagcgctctccgagaagaagagcggagggtgctgtagcgcgaaactacttaccttccggtgggattcgaaaccatggtctttcaaaactctggaatgctttaacagactgagctgggctgcgtcatctttagagagttattccaatgacaattctcttttatgttttaccactttccacagaattaatcaaatttgatttttaagaattttttttaccataggcaggcagactgggctaagtcattcgattaagaccaacatgagcccaatggtttcaaatttttagcatccgcctgctttgttttaattgtttctcacaaatttcaaaatttttctcgactttgttgttgtttcaaatgaacccaacaagggcaagtgaaagtaatcatttcaaagaaaattggcatcaaatcaattcccatccgtcaatgaatcaaagcgatttatcgtttctcaaataattaattcacttccgctgagtttgaccggtgggcacaaaggcctaaattatttatccggagaatatagtttattctagaaaagcaaacgctattattgcttagaaaaaaaaatctagaaaaaccga

SEQ ID NO: 19015 - DNA, 848 bp, Heterodera glycines
caatgtggacactgtacaaaatgctcgtcttcatgctgttgctgctgaaccgccgccgtctttccaataattggggcatcgttccattgtccaccaagaaatctctccaaaatcgtcttctttcagtagtgtcagcttctccttagtccgttcattgaccaattcaaattgcgcatttggctgtgatacattggacacagcaaaaggaatcaatgcaaaagttatatggtaactgactgaagtggtggcacggataaatacctggataaagaaaatgccaaaattaaatgccattattggagtccggaggacgggctcgggcgggtgcatttcattccccacccccccccccccccgccaagaaattgtttccaaatttaccaaaacataaaattttttgaaaaagcaagaatttttctacttaagtaagaacatgaagttccttccttacccccccccccagaaatttagaaaaagcgatccgcaagtgttaacaaatagtttttgagattcaggcctctagtcatcacaaaaggaaaatgtaatcagcaactgaatcacaaaatacgagaaacgacctctttgaaattgttgatccactcaaagtttctgcctggtgatgcagaacaacaataatttaaggaacgcaatctcttcggtcgtccgtcggtagtcggaatgtgcaaccatttggacaacacttggccagcagttgcagttggcccatcatcggcaagttggtcggggaacatgacgtaagagaggatagaatccaatcggtggaaatcgcagaaatttgttagagaaatgagaccagaaaaattgtctaagtgatcagcatcggggga

SEQ ID NO: 19016 - DNA, 2991 bp, Heterodera glycines
  unsure (1)..(2991): unsure at all n locations
ccaaatctntcgggccaagacccaattttatggcattttctcgttggaaatgccatttgttaatttgccacctggtagaagtctgggccgattttgaaccgttcgtccaccggaaaccgttcaccgcgcaccaacgcaccgttctccacatagcggacggtgcccggcaccaccgcattgtacggaagctcaatttgttcgccctccggaaacagcacaaaatggccgtctaaatgctttttatatcatatataggctattttctagatttttagcttacatttagtgaattgggagaaattttgacaattttgccctcaatttggaaacgattatgtgcatatttctcacttctatgtgtgtattttctatttttattaatattttatgcgtatattttgagattttatgtgcataggtatttattagacacattttaattaattaccgtcaagttggcgatgttctcgtaacatcagcgaaactttgacacgagttccactcaaaaaattaagcaattcgcaccttattgcggacatttgcttaattacagtaacttctatattgatatttgtatactttttttgaaattacccataaaggagtgtctccgaaatggtccataagcttaaattgagtaatttttctaattattagattattagctaaaacatctgaccaaattgcttgcatgatcaatgcgctcaatgatgtcctggtggtccttgaaaattgtcttcatcccgtccaaatggttcattgtcaccagtacaatttctgacggctctttgcacagcaaaaattggtatttgactgccattgtcatcagatcaaacagtttaaccatgcttaatgtgtttttgatcaaattttgaccattcatacagtagtgtgatggtttttctttaaaattctgcggtaccgtaacggaaatctcaaaatccccaagatttaaatttctgtttcttgtttggaatcagagggtggagcgcgatcgcgatccgcggcgtttttttccttgatcaaaagcgatttgtcattttcaatccgccatgattccgccgatccgatcgatacccgcgggatttttttgtccgcacctccacccttgctgatttgaactttggttctgttccgagttttttactattttatccggaatttgctgctaataaatcccattacccggcttaatctaagtgcctcattatgtgcttatctacctggcctcgttgaggcgcatcaccgaagaatgcgcaatttgctcaaagtgttggcgaagtccttgtctcgtgtacatttcacggggttcaaacagttcgtccaggaaacttttgctcagcataaccgcaacaatttcacacaaaaccttcatagttttttcgtcaccaacattttgggcctggcaaaattattaaacattccatgaaatttttaaatttttttaaaatagtggaatttattagtgcctgcaatcgttgctccaaaatataggccatctcgccgcccatgttaaggaataagaagggcattgcctgttatagaaattggtttaattgtagaaaaattattaaaaaaaaatacttgaaaactcattttgactgttttctcgacagctttagctttgattattacgaaagttttaattaatgcgtaaaataacagcgacagaaattacgaccaatttgcgcatatcatatccaattaataactcacatatccaccacaataataatgtttagcccattaatagttgttaaattgtaaagaaattttttgttggttgtcaaggtgatggaagtcgggaaatattgtcaatttcaaaagaattcaaatggtaaacttcgaaaaatgcattaaaagagaaaattaaaacaaacaaatatggcaaatgtgggattggatataaatgattaattaaatagtataaataaatttacttataaatattgggttttttatttggtaatttttatttatttaaaaaaaataaaattgaaatataaattctgattaagtaatttaaggtctttaacttttgttcttttttaaaattaatttccaactgtaataaatctccgaaataaattttatatatatatatatatataaaatacctaattagttaagggatgataaaaataaataatttggcaacaatatgtaatttacgtgattttaggtctccgctattaaggatgggctttgttctggtccaacaaacagttcgccatcatcttcatcatcagctgatgatggcatgcattattcgctggagggcagttggtccgacttattcaaattggacgaatttggcggaatgttatgcatcaaaaaaggattgcatttggagcaacacgggcaaaaaatccaattgaaagcgatagccaaacataacggtgataacaacattcggagtttcaacaccacattttttgcctatggcaaaaaaattcttttgagaaaaatttttaaaaatactagtgatttcgttggatcataaaatttcaagtttttcttgacgagttcgagatcacgaaaatttaaaataatttaagcaattaattttttccaaaatatctcatgaaaaattgctggaaattcttttcttttttttgttgttaatttataagcggaagaataattttgaaactcaattttaagtatttttagttaaaagataccctgttttgaacagcttttttaaccttttcgactaatttagcatatattttaaaaaattttgtgggtttttagcagttattttgatggtaaatcccaccacagttcacaaatgaaaaattttactattcccccatttatttacaaataatttaaataaaaatttgagatcaatggcatattggctagggcgtaaatgtctcgcaattattattttatggcaccaaaaaaataaatgaattttttctgtttcaagatggcactgttgccgaggcacaggtcattgtgaatattgaggantgtgaataa

SEQ ID NO: 19017 - DNA, 894 bp, Heterodera glycines
  unsure (1)..(894): unsure at all n locations
attaataatttactattttattcaaaaatccttcaaatatttggttctctttttttcaattattccaatttggcaataaaatttggtgctttttttaatatacatataaacccttaaaaatttgttgttacttacttatttttttaaatttttgtatattaaataataatatttagcaaataactctcttggtaaataatggcagttctcgaacaatttggttcctttataaattttgacaacacaaactaagcaatttcagaaaacaaataagaatatgaaataaataaaacagaaaagcaattaaatctgaaggaaaaataaaatattaaaattattttacttttattaaatcattcaaaaattactaataaagtttttaagaaaaatttaattttaaaatatatttaataaaatcaaagaacaggattaaaaaaattatttaaaaattacattatattatttattttgtaaactgaaaataataaatattgagtcatttgattgaaaaagacaattaaatgtgttatatcgttggaaataattattaaagaatttaaatcaattatttagttagtaaaataaaaaaaaactgttaaaaattaaaaaaaaaatttaaaccaacattgataaaattatttatttgctcaatttagattaaaaatgtaatttaatatttcaattcttttaactatctataatcaatttttaatagttaaaataaataaaacccacaataaaaaatttcatttcatttcanataaataaattaaagtttaacaaatacacaatattgattaattatatccaaaaataattttaattttctaccctaaaaaatgaaaatatattaaaagtgaattatattgagaaatatatcaaatttaatgtact

SEQ ID NO: 19018 - DNA, 1406 bp, Heterodera glycines
aattttatttgaatatgtttaatcaattttataatttctttgtaatattttttaaatttattttgagcttgcaaggctccttcatttgcattattctgtgtaaattagttacacacgtacaagtctaaacgttttccattggctaagcaatatagcaggataaggggaaggttttcttcgtctttgtggatttctttctgctttccgtttgcatcctgaaaacagattttatgaacgtgggatttggcagggcaatgacagagggaataccgtgccgtgttgtcccgttgggaggcccctccggcagctccgatgagagtggataatacggttttagcagttttaaaggtttttagggaattaaataacatttaacaaattataaaactgattaaacatattcaaataaaattagtttaaaaaattttaactttaataaataaaccaatataaataaaattatatttattttgcttaataaaatttatttgctttgcttggttgctgtggctttgtgtgtatacggtttagggccgaaacacacataataattaatttaaattatttatattataacaatggcactaatgctatttatatgttaaagcaaatagaaaaggaataaataatttataaaataaaacaaaaatataattttaagaataaaaaatcataaatattataatttacccagcagtgatgccacaaataaaataaaccaaccttatcagatttttattggtaaaaaacaacaattcataattgggcatataaatggggaaaattaagcggtaacttggacaaggatttaaattgaagaattaaaatttataatttttttatgaagaaggaaacaaatacattaataatgtttaaacaaaatgaacatcaaaaccataaaaagaaacggtccctactaacaccaatttataaattgtaaatttggtaaaattttatatggaacaattctttgttttattagaaatgcaaagaacaaaattatatttgatttttttaagtctcctgatatttaaataattacaaaaaaaaattcttgagaagcttttaaatatttttttttatttcaaaactcaaaatattaaaaagacggataacgtaatcagctcagtatttattgaaaaacaataaatattatattttaaatataaacttttaccttaacaattaatatatattaaaatattaaaaaattttaaaaataaatgaataaaaaattttatattatataattatgaataaataatattatgttttgcatagttggctattctataataaaaggtaataaattgaaataataaaaagttttagagaaaactatttcaatcgcatcctgaaaattgtatcctattaattatctatgaatggataaacattattaaaaa

SEQ ID NO: 19019 - DNA, 2023 bp, Heterodera glycines
  unsure (1)..(2023): unsure at all n locations
attataacaattaacgataatatagcttaatttagaacaataatccacatatgattatggtaatcaaaaaaacattaaaattttttcaaaagacaaagacaactttgtaatataatgaattttttaatttcaataaatgtgtgttaaactcaaaattaactttccaaccttaaatggattattgaaaagctaatcgaaatttttaaatttattttagcccatttcttccggcaatgggaaagcgcgcgttcgatcgcctggacgcgtcatcgcttggcttaagcggctataacgcctattggccggaggaggagccgctgaatcggctggcatttggccaacgacaatttgcggatgccgaaacggagcaggaaaagccgactggcagcaaaaagcatcgccgatggtcgcgcccactcgcgggcacaaagcgccgagtgaatggcttcggactgtttggccaattgcgattatagcgcgccagtctctgatcgatcctcaatttcttttttttgtatcgggccgcttttgtcggatcactgtcctgaactgaactagtccaataatattattgatcaacatttctgatcagaaaatcacattggattgaaccggaattatcccttatataagctttggattttgatctgattaaattacttttctgatcaaaaaattaagaactgctagttttaaggtgttatgtatgagttgacatgatcagctttaaagaaccgtgtttgatcagtattttggcttgttttttttgatcacttgtatttggttacggttcttttgtctgatcgatcataaatgtgttatttctaaaattggttaatcaatgaaattttaaaaaaacgaagataatttttcaaacccagtaaatttatctcatcgtaataataaaaacttattaaaaaatacataattcagtggaaggtattttcaaaattaattttaatccataaaagaatttttttgtgtgaaaaatgacatcagattaataagaagtgcatgtattactaacaacaaaataaataagcatcattcatcaatacatccattatatggctttgaagcctaaaagttgactttattttcaaattaaattttttttttgtttgtcatgaaaattattttatttttatttttaattttaaattttgttttgctaaaaatgatttcatcgttttatgcaacttttatttttgtttctttttttacaaatattttttgtaatttgagcattattaacgagaaacaatgaagtaaagtctgaagacagaaggacgaacgcggacaattttacttttttttaaaatttttcaaacctttctcccttttgactcaaattatcattaaaatttaaaactttgttgactaatgagtttttttgtttggctatatttggaccaataaatataataagaattagtaaattttgaaaaaataatttgaatgattttaaaataacaaagtctgcttaatatttgttttatgctttgacagtgtttttaatttaaattttctaagattctatttaatgtagtaaaattctaaattaactcaaaatttctttattttatgcaaacaaaatatcttcctcgttcttacgtaagtaaagaattttttttaatattttttaatctttcttccgactcatttgatgctttcatcatcaaaatgcatcatcatcattgacaaaatattaacattacgacaattcagtaaacaatataaaatatattaagtaattacctttttaatgggaataaaaaaaattccattccattcatttgacgtcaaatttttacacttttattgggttaaggcggaagaaaatttgttgatcaaattagcatggataaaaaatacaaatgcaataataaattttattatgagctaaatagctaagaaaaacccaacaattttataagaggacaataattttgtgtgcgctgtgtttganaaattttggttanagtatgtttttcggatggaaatttcagattagattattttt

SEQ ID NO: 19020 - DNA, 2047 bp, Heterodera glycines
tatcaattttatttgatttacctataaaattattattgtttgcctaatttttattagacgtcataagtcatgctaacgaaaaaagaaacactaatttaatttaattgaaattaaattataagaacatattggtcgttgatgttttgtgaaaacgccaaatataatttgattttttttttgttttaatttttttacagaaaattttattatttcgtttacatcttttaatgtgaaaattaaaaaataatcacatttatcgttcgcgaaaaagttttttgtttcatttatttttttattttaatttccatttattccctaataatacacaaattttatatgcttataattacataattttttgcatttttctgaaaaatttgacccaaaaaggggacccaaactgcattagtaccgattaacccactctaaagttaattagaaataattagcgatcttttaaacccccgcaattctcttttctaacacatgaaaatgcaacatcaataattaataactttgcgattaacgggatatactataaaagttaattagcaataattagccagccatctttaaaccccccgcaattagaaaaaaaagagaaaatacaatggattttaatgagttttctcttagcggcaaagtgcgcaaaaatttaccgcatcaacgcattttttaattttacactgttttgaacattgttgcaatttggttttccgttacgtaacatccgtcaacaattatatcgtctaccataaaaagctcaactcaactcaacgttttccggtgccattgtaagtaaatgtgtagctgatgcggatttcagtcacactttaggaagatggcattttgtgccggtttacgtgtcggtaaacatcaaaaaaaagttggcaaacagagtacccattcatttggtaattttgccagcctctttaattgccaaaaaaagccaaaatatatgtgctattttccgtttacgtaaatccgtcatctggcatttactcgccaccatccactttgctaacccatattttccggtgttaatgccgaacagaattaatccaagaaagctggagatgggatggcattttgtcttccatttcacttaagtgtgtttgcgtgtttgtgtaaataaaaatgagagaaaaactggcatatttttgacattttgccaaacatttaattaagtattttgattttgctaaaatatattttttcatatttttacagatttttttatcattagtattgttatttgtgcataaagcaacgatattacacctcttttgtgcccatgcccatcatgttcacatttatcattataactcagctgctatttgtgcaacagtttttcgtggtaaaattgaaatttttaaattaattttaaataaataaattttgttttttttgcaggttgttgccaggaatgttaatgggcattatcctgaaacatattcttcacaaaatttgctgtttgacgacggcgattcaatgccaaccgaaattaaaacgtaaaagttttttagaatttataaaattataatatgatgcaataaattagatgaaaattcatttataaagtttttgcctaattatcaaaatttgggttctatgatgcaaacagacgctcccttgctgtcattttctaaatatttctaattttttctaatattttttatttttcggagcacccaaattaaaaattgtaagatattttttgattgctttaaagaaactctattaatcaacgaaaattgaaaaaatttcactaaacattaaaaaaattatggccaaaaacagtgattttttgcaattttataggcgaattgagaattctttaaaaatgttaattttgatgcttttttcaaaaagttatgaggcattaaagttgtcatgttattttatggtcgtgtaaattttttatggttgtgtaagctttaatttagccaaattttctgctttgtttttgagggaaaattaaaattttacaaaatgatttaggccatccacctcggtcagacaattggtgttcaacatcccgcataaa

SEQ ID NO: 19021 - DNA, 819 bp, Heterodera glycines
aggtgcctatttcgcgattttttgtgcctaaaaatcgcatccctagttatgagaaatgctactaaaattgttgcacagactcgaataaattttaagaaaattagaatttatattcgtttttacaatttttagcaatttttccactctccgtttttatttaaaccataaaatctgtcaatttaaccattaaatgcttttctaccgtttccaatgtccagttaatgcattttgtcacttccatccttttaaaatcagtcacaggttaaaaggaggcaaatttaggcgcgacacgccccgacaattaatggacagaaaataaattaaagaaaggatggaaagaggaggggaagagaaggaagagcaaaatgggaaaagagagaggaaatgaaggaagaaggaggaatggacgaataaggaagagagagagagagggggaagggaggggaaacggaagaagaaaggaggtggatgaaggaagacaaaatggttaggaagaaaagaagcaaagggaaaaagaaggataaaaggaaatgtaaaacaaagagaaaaaggaggaatggatgatgaaggaagagagtgagaaggaggaaaagagaggaggaggatgaagatgctgaaggaggaagagaaagagagagaggagggaagggaaaatggaaaaggagatagaaaaaggaggaagagaggtagaggatgaagacaaatagatatgaagaaaagaggagaagagggagacaagaagaggtaaaagaaaagagaggaagaaagtgagaaattgcgagaagaataattgcatcttccaacagcaaagagagtaag

SEQ ID NO: 19022 - DNA, 1279 bp, Heterodera glycines
cgccgcattggcaaaaaaaggacaccatcagcagaatgggaaaagcgagaatggcacgtcatcgacggcagcagcagcgacagaaaacaatgggggcaaattgcgacgcaatcggacgactttcaccacttttcagttgtacgaattggaacaggtgaacagcacggcatgatcagtagcagcttgattaatcataatcggatttgggcagaaaagaatttgtttctttactgtactttttctccttattttttgtgccttttttgttgccccaatccgcctatcagtagtatccgacggataattgggcatttaatttgagtatcatttttcgctttggtcaccattatagattcaaattaaactgtttttttatccttaatttgtttcccttttccaggctttcgacgagagtcattatccggatgtttacgcgcgggagaaactgtcgcgcaaaattcacttgcccgaagtgcgcgttcaggtcaaactttgtttagctaataaattgaaataatcaaatgatatttgtttgcctttttaggtgtggttccaaaacagacgcgccaaatggtaagagaattgggggagagtcatttgatcattaatttaatcaccaaaatgtcaattcaattgttttgagtattggcacggggccaaaacgtaacaaaaaatgccaggaaacttttgccgaaagaaatgattcggaatcaaatgacaatttttgagttttcaaaaaaaataaagaaaattgaagtgaaatttgaaggcgtcgccacgagaagcaggaggagctgagtctgaaggcgttgaaaatgcccatgccgcagcagaacatcgacggcattggcattggcccaacatttggccagggctgcaattatttggccgggtcggcgactgcgaactgctggccttggacaatgatgagatttgccacatcgccagtagaaaagtcagtgcaaggcactgactgactaattattggataggcttttggaaacggaacttttggcacggccttcccttccccgtgccattatccccagaataaatttcttgaaagtagagatagaaaaaccaagatctcgaaaagcctgataatttctcgactcagatttaaatgtgccattttcagcgtctttccttcggcaatgccatcgtcgccttcttctcccgtgccgctctcctctctttcggccgacaatccctcgtcaaagtccgttccgtcgatgaacaatggtgcccaattcgcctccccaccgatgccgcccgcttt

SEQ ID NO: 19023 - DNA, 2897 bp, Heterodera glycines
atctgttgccaaattcaactaaaattttcaaaatttaccccagcggcgcctatcggcaccgccggcccacccaagtttcccaagttttgtgaaaaaatgctgccgcaaaaaaattgtttaaaatctgatttatttaaccctattgctctgaaatgtattatttttaatttcttccccaaaattgtctaaaatggataatgggatgtgaaaacataatattatgtgcattttgatggatcaattataaaaataactgagttgaagcaattttgaaaaattccttatttttgactcaaaattttattttttccttggtgttattaattcgaaaaattttcaatcacacacccctgtactagagccatatccgcttatccacctactatgatctgcatacactcagtttgaggatataattttaaagatttataaataagttaaaaaaattttctgttttttcgtttcgtttcgtacgaaaatttttttttagagtttttgtgcagccctgatcggggtccggcggtaccggtaggcgccgccgtgaaaattttttgaaattttaatgattttattaagaaaaatcgataaattttttatgattttcataaatcagtaaaaaaaatagtttcgacaaaaaagggatacctctaaattgttgtggctttccggtttatttctgtattttgtttgtttttatcaagaaatggaaaaacaaaatatttagaaagatataaaaatagcatacaaaatgagttgatccaattaacgaatatctatcctttaaactattataattataatttttgggattagaagattttttgattattaattttgttaaactcgaaattctaagaattaaatattttaataaatttatttgtttagattaaatatttcaaaatctcttaaaatgatcttctggagtattttgaagtgtcatttttattatttttatcttttttgaatttattcttttactttgaatttgttttttatttgtttttcttgtctttggttttttaaaatcaattttcattcagttcaatcaaatcaaagattttaattattgttttgaattttacttcttatccatccctttaataatgatatacaaatgcaataaaaaaatgacaaaacattatcaattagatgcaataacattttgaacaaaaaaaaaatatataaaatttttaaagtgtttaaatttatttcaattttaaatatgttatttttaaagcatttttttgtgaaaaattgtttaatatttagcagatgtgaaggtcatatgggatacaataatatttaatgaattgtgtgctacttaagcataggaaaaatagatccaaatcatattgctaaattaaataaataatatacatcataattaatggcactgctcatctatatgtaagaatgcttttttattaaattatattaatgtaaataaatttattttaaattgttttttcattaataatcacttgtttctgcaacgcttattttctatttgttggagacattttaataatcacattttttataattttgactaataaaaaataatcaaaatattggagggaaaatatatatagaactaattcattaattattatttttaaattcaaaaattagacttacatgacaataactttatatggtaagtttattttgcgatgtattatatttaacaaaaaataaaaatgttttgaaaaatcaatgatatatgagaaaataaaaaaacattttttttaattttgaaagatattagataacatttttactatttaatcttaattatttatataaaatgattaatacaaaaaagaaagcttgcaggctaatttaaaatttatggaatgaaagaactcttattcgttattattttttttcaattaacagtataagctttttttaaataattaattaaaataatttagtttaatattataatagcatttaaaaattaaataaattaaatgatttttaatcaatgttaaaaaataattttttataagcctgaacaattgcgttaatattaaattattattattatttaactaatattcaggtcatattcatcaaagcatcaaacgagacacaccaaagaaatgataagtttaaatattgaattttatattaactttgtatttaatttttatgtcttaaaattatttaaattttagtttaaatataaatactcaactaactatagtgacggaacaattaattggaggaaaaaaaagtcggcaatattttaatatttgaattttttaatcatcctcaaaaaaataaatataaatatttttcatttttaataatataagcttgaaaataataacaaatgcatcagccacgaatatttaaaaataaagggcaaaatttaaaataaatttttagtaaaattaattttaaaaagctattaagtttgctccaaaggaaatttgttagaatttgagaaagtgcaaagtcgaactaacattttatttacacttctgaattgagttaaatataaaaagtcctgaaaaagaaaaaatctaattgatggagaattaaaaatagattatttacacaaatgggctcggaggctgaaaaatctgactgtttacgagtctatttattgtataatccaataaaaattttaattttaaaactatattgtaactcaataaaatagtataatgataaacacatacaaactttattataaatttataaaaagaggatttatttgccctcaacaaagcattagtaaaatgaagtaaactgctaaaagaaaattaaaaaatgcatctttaatccaaaataaacgaataaaaatgataagaaacaaatgaaataaaatgatatttagaatggattcccacaaaaaaaagatattagaaaatctacctatt

SEQ ID NO: 19024 - DNA, 725 bp, Heterodera glycines
ccccatgtttctattccgggataggaaatatgtaaatgcttgagagtctctctctctctttctcactctctcgtaaaatctcggattttcgcgcgcgcgattattgacaaatttatttttgtggtgtcaaattctcggtctcgacacatttttttctttggttttgagtactttaaaatttcgaagttcgaacaatcccattggatttcgatcaaaattttgtacaacgtttcattgattgattttttcacattttttataggcatcggcgggataaattgttttgaaattttaacgaaattttttttggaaatttaccccaaaatttatttttgacagttttagggaattttacttctatatttatttgaatgaaaatttttttggaaattttgtccaaaatttattttttcgaagagttttgcgggaattttattctgaatttattttaataaaattacttgggaaatttattccaaatgaaaatttttgtaagttttcttccaaattatttcaacgaaagttttttgtaaattttcttctagaatttatttgaataaaaatttggctctaatgcactttatgagtccaatcgattgacaatcccgggtttttatacaataactttttccatgttcgaacaaaccctatctttttggtatcattcgaaagcgcaaagtctgaataatgtaataatacgagaaaacaagagaattctaacattt

SEQ ID NO: 19025 - DNA, 1217 bp, Heterodera glycines
gattttatacattttaacttcgttagacttgtgctttcgaatgataccaaaaagatagggtttgttcaaacatgaacaaagttattgtataaaaaccaggtattgtcaattgattggactcataaagtgcactaaagccgaatcttggtgattgttttttcgtctttgtagacatattagattaaaccctttttgtttcatgtagtttaaccaaccattgatctcctcaggtggagatgattctgagtatgatgttacgccgccaccacgaattgggccgggttcatttctgttttgcgttgctggataaagcggcggtttatgccaattcattctcttgttttctcgtattattacattattcagactttgtgctttcgaatgataccaaaaagatagcgtttgttcgaacatggaaaaagttattgtataaaaacccgggattgtcaattgattggatcataaaagtcgattggactcataaagtgcattagagccgaaaattttttgagacggaaacgcatcattaaaacgccaaataccgcgtcttccgctttggggcggcaaatgttttgagttttcaatttcaactccatttgaaatgccattaaatgcggcggcgggagagatttatggcggcacgggcaaagggtcgggtcgtaaaagtaaatggaaagtcgcaaaatgttattatccatccaaccgcggtcggtctatctcctgcgcagcggatgggatgaatttcccacttccgaaacattttggcatcggaaatccgattttcggcatttttgggaataaattctccaatttccgagaaattttgttctggttttcgacatttttgggaagtaaattttaatttctgaaatttttaggcccttggaattccgaattttggggaataaattcacaatttccgaagtattttataccatcgggattccgactttttgacattttgtgttcgttttactgacttcagaaatattttaggcactagggattccgaattcaaatatatgccatcggcgactcaatttttttttggggttagttaaattccgattttcaatttttacattcacaaacttccgaatttgaggtgcgtaaatgccgacttaaacgattttttttctcgaatttcgattcggggtttttgaagagcgactccctttgatgtgcagcaccattttgacggcactgtgtccacaagc

SEQ ID NO: 19026 - DNA, 1700 bp, Heterodera glycines
cataaaaaaggagttaaaaaatagggttcccaaaattttgaaaatttaagcaaaattattaattatcatcagtcagctcaatgacccaaggtaaattcaatcccatttaaaaaataataaaattgaaaattctgaatgtatgttgttaaagtcattcgtagcaatttaaaaaataatttttcttgataattttttgctcccttcacctcttccccataaattgttttttttctgttattcatcattatttttagattttggatttagggaagttaaaaataattactcttatgtctttgccaagtaattctcgttgttcttctttctatttcaaatttaattgaatcccaaactcaatggtaggggattttcatctaaagttttcccgctgagctaaattatatacaaataatgctctggtaaaagattcccttttaactctttaacgtaatttattattgtttttgcatttaaaaatttgaaatatttcaataaatagtttaatatgaaaaggcaatccttttgagttcccgaaccttttcttttgaatatatattttaaccgttctacattttgaatgtttaaattataatattaattttcttcccttgaaaatgcttttttgtgacataagatggtatacagcttttgaatatgtctagataattgaaaacacttcctaacttagaccttttaaaatctccaagcttaaggcattgaaaaagatcgggacgatattaagatattgattactcatgtaaaaaccccaattaatattttagtaaaaacaaaaagctttaaaatcgcaaattttgtccaaaaattcattttaatgtaatgattttattagattacacctaataagattatacattttaatggattaaaaggtttgagtatctcgttttcctcattaaaccttgctcactccattcatagattggcagagctatgacagaaaattaaatgaacacctgtgcagattcgaagcgcctattttgccaacagccgccagcgaaatctttaacaaagattaaatttaaaaataatatcaggcaccgaatgtaattctgagcaggcttttgtgggattccaatctacaatgatatattttaggaatatttgaaaaaagaatgaaaattccattcatttcaaataacacttttatagctccctaaaaaattattttcgatcaaaaagttatcaaaaaatctaggaacaaatatttttaaaggtttcaaattttcaaatagaattagggatttttaatatagatgaaaaaataaaatatatctttctttcgaccgactgtttattaaggggtaattagtatttacatgactttaattatttttcataattttgcaaatttgtttaccgttctcaaaaagtttcaggaattaaactaaaattaacctttttaaggaggttttatatttaataaaatttcaccgaaaaataatttttttttaaagacatccaattttctagttatgaaccgtgaaggggatttaaattttttctccttttgaatattattgcattacgtttcactaaatttttatcaatttctgaaagtttattgtcacaataacagaccgatgaataacattttattatgttaataatgtataaataaaaattaattgcaaaactaaatatctttaaagcacaacaattttgtaaaatgaataaagaaa

SEQ ID NO: 19027 - DNA, 1059 bp, Heterodera glycines
  unsure (1)..(1059): unsure at all n locations
aatcaacatctaaacaaaaaaaaaatcaactttgaccccttgaaatcagcaaaatgctgataaaatcaacattttatatatttaaataaacgaaaaagcataaccttcaaaaagggaggtggaaatgcaaaaactgttcaaatgtaaaatttaattaataatggcaagaaaaaggctagcatcattaaaaaaaattatgattttatgccttcaaattgaagacacaaaaagttaaaccaggtacatgccaaactggaaaatatattaatgaaatgtcaaaaacgaaaccattaaaatataaatatagaaaatacaaaatgttgtaactaattaagaaattgaaaatgaaatacaaaaggagaaacaccagcagaaaatccaaaaaaaagaaatgaactttgaaaattttaaatgaatttaaaagttgcgcaaaatctaaaattcaatttaaaagcaacttaagatttcacttaaaaattaagaaacaaaataaattaactaaaatttgccggaaaccccggaggaaaaagatggaaaagggaaaaaaagaaatgttatcataagcagaatatataatataataaataataatcctaattaacaaaaattaataaaagactataattaaactaatcaaatattcttcctaattcctcgaatccacccgtaccgtaatgcgaacggacgtgtagccgagaattgaaaaaagaatagaaaagttaataggaaaaataaatgaattgagcaaataaataataaaataagtaaaggcgttattttaaaatatcttaagttaaagcaagtgcgaaatttcgatttaaataaaattttattaacaaatttgaaaaatataatcattttttatatttaatggtcaatcaaattcagttagtaatcataatcttttaagaaaaactaaaaaacatcattttttgatttaaaaacatcattattctgattcatccattccagaatanaaatggacgtatcgacgagaaattgaaaaaggnaaagataatgagaattaagaatttatttgacaaaacaatataataatta

SEQ ID NO: 19028 - DNA, 2810 bp, Heterodera glycines
ccgttcgaccgaaataactaaaaaaccgaaacaatcgactgacttttttgacaaatcagttggccgtttttcaaaattcattaaaaattcttaaaattttcctccggcgacgcctatcggcaccgccgaccccccaaaaagctattttttcttaaaaaattagccaaaatctcaaaatttggtatttttagacaaaatctgctaacaaatagcattaaaattacaaactcttatcagcaccgccggccctaaagttatggcttgagctcacaattaaggcaccaaaaagcgcaaaatgccactgaaaaaaggcacaaaaatcccgaaaaaggcatgaaaaaaagcatttaaatttttttattaatgatttttagggagcaaaacacgtaaaaactaaccaaaaactaaattttgctgatttatggataattcaatattttataatgtttttcaataaggaaatttttaaacctaaaattttttatcaagaaataaaatgaattttggcgcacaatttttgtgaaaatttttcaattcataaaggtatattctctgaatttttttagatcatttcttagcggtttatttttctcaattttaaattattttcaaattaaaaaacagctatttaaaaaattacaccccctaaatttggaactttttcgccactatttttgccactattttggcattttttgtcactatttagttaattatttggggattttttatcactaaaaatccgggccctagtaatcaccaatataaaatgcattctccaatttgtcttttcacttcttaccattttcttaattcagcaagtaattgcaattattttccgttaatgggcaaaaacaaaactcgtcacttttcagggccattaataaatgaaaaatttacaacaatattttttattttctttttttatttttgccttcggttttctcttattgattctgcgcaacagtttcaaattcatcacaattaaacagtccaatttattattattattattattgttctgttcaaattgcagcagaagtgatacaatcctttagaaaatgaatggttttattgtctaaaaaatgcagaaatattttaaatttattaattttttgatgaataatttaaataaaaataaaaaagattaaaaaccttttgggtttaggactaaaaaatgcacggtaaaggatattttttaacaaattttaaatttatcttaaatattttttaacaaaaaaatatcttaacagtttttttttatattacgacaaaataaattattatttttattaactttaacaattttttcccatttatttttctccctttagaaatgccgtcattttttgccattttttcattttcgttgctgttcattttgtgccatcattgttcatttgccgcttttttgatcaccaattatccaaatccgttaaacaacgcttcgctgtggaaatgcggcatttcctcgccgggccctttgtgcgacccggactcgctgctcaacgaaacggcacggcacgaggcattggagcttttgaagcagttccaggaccaaacggacattgatgtgggagaaacaatgaaaaaaaacaaaaaaaaaacatttaaaataatgatatttaaatttaatagagcggatttctcggttttattgtattttaaaaatccaaacacattatttaaggaaatcagaaaaattaaattaaaattccgattattatcatttgtcacaccaaagaaatttaaatgttgaaaaaacataaattattataattttattgaaggacaatggcgatggcagctgcaaaggcaaaggagtgattgttgggttggcgctaacgaaacagccaatcattgcgagggtattaatttttaatttaatgaccaaattaccatggaagtcgatactcattcagtcttcggacttatttggcccattccgttttatcactcctttacactgccgaacaaaatcaaaaagcatattttaaaaaattgagggatcacggctaaaaatgccaaaaccgaccattactgcctaaagatccttcacgccattttaccaccacagaatgcgcggatcaatgtgacggacgatctgatgaagaacatttggcagttggacaatcggtgcaacaaggcgctgatgctgacgctgtccgtacagccaacccccgtggtgcgcttcactcggtacatgaccacgccggtgtttgacgacgagttgcaccacctgatctggactgaggtgtcgaccgaccgggaattaggcactcaccaattttcaatcaatttattttccaattagatactttaattttgtttgaaaatgatcgtagtcgtgtgagcttttctccgccattggatgttttacagcaataagttaccgtatgccaaattcgtttggattttcagctgactcttaataatcttttgattttaatgaaaaataaaaaattatatatattttcaagtcatactacttttattttctattcagatctctttttttgtatttcttaactttccatgtgtcttttcgtacaaaggcaaattaaatcattttaaaataaaatggcactattaattgactaattaaagtgattatttaccatttttggcaattacccccccccccatttgtcagatgcattggcttcgtgatcgcaattacatcatgtgggtccgcttggtgctggacggacttagggcactgatcgtggaccggcacaacactttgggcattggcccggcccagcagctggcggcagccaacaaaaagtgtgccagccatggcttcgtca

SEQ ID NO: 19029 - DNA, 2050 bp, Heterodera glycines
  unsure (1)..(2050): unsure at all n locations
tttcttggccttcttggttgcaatctcatcaacatcatttttttcggnnggcacancacngncancanncccggggcactttttgaaaaggnngacaanccaancaaanccagggnacgncnganngngcgccnagggcgnggnnngncaaanacataanaaanancaacaaaaaaccnnaaggnnaacnnnngcgancagcnncacagcaancaaancgnccaagggnnncgcaaggcnnnccggcnccnncnccnnggcgagcaanncagcagcnnncanncccaaaaacccnncggcaacacncgaaaacanggngacacgnngagcaaggncngcnngnncaacanccngcagcagaagacggacaaacaccgngnggangggggcaatcgctttttggccgcaagcctcacacatgttatcatcggacaattttcggcggcaaatgagccccttggaacgaaatgggcatgcctaaactagaaaaaaattaataatttaattaattaatttaatttggactttgtaaacacggtactgcatatttgtcacttttcccaaaacataaaaaacgccggccgaattgaagttgaccacatcgctgatgtgtttcggttcaactgaatccaactcctcttgctgtcgtgtcccttgctccgggagttgaaagcgtttaagagaattcattgcaggaagatcggaaaaaacgaaggaggatggaattttttaaaaaatggaacacgaatgatttttatttagaaaaactgtggttaaatagcaaaaaaaattgaggcggaaaaaagaaactaaaaagccaaaaggcggagtcgtattcttagcaaagcaaaacaaaaaccaatgggcgtgaccaacaagaaaaggggcggagtattttttactttccatgatgacgtcatttttttacaatttaatgaattggagttttttgctaatttacttaaagcttcggatatgatatatgcaataggcttgggtttattgattatttgtgtacagtccttacaataggttttgccttttttttttttgggggggggattattttttaacctcctcatagactggggataattggagactggggggtaattagagcaaatactgtattttctctctctcgaccccatccaataggtttgggtttgtggaaggggatgtcagagaaaaaaagtagacacactcaaattatcgatcgaaaatcaatcgataatttgattgggaatattatctactaatttctttttttaaagctaaatgcaacttaattttaccatatacatttttaaaaaaattgaattttaatgatatttatttgtgttaaagattttgtaataaaaataaaacataaaataatttcattttatacaaatctgagatctaacacatgaagataaaaaattacacgtgatatcaacataaaaatgtgcttaaaaaaataattttatagaattttaaaatattgctttttgatcctcaacaagcggagcacgagttggatgaagaatttatagcatttaccttcaaaataaataacaattcaattaatctgtcataaatcggtttgggtttcattggaatgccgaaggattgttgagtttgagtctaagtaattggaacgccggagaattgagtcccggcgattgggatgcagaagtggttagatagaattacaatgattgtatgccagagaattgggtctcagtgattgtaatgataaaaatgataaaataaagaatatgtgttaattaaaaacaaatgaaataattttaaataagaaaataaaaaaagaagctaagtatttaaaaaaattctaaaattatgaagataaaaaataaaatgttatcttaaattacaaattataaaataataattaataacagcaattattttcagataaatcaaataaaatccgttatttaaacaatttattttaaatttaaaaaaaggattacagtaacatactcaaaaaaactacacattaacgcatgagaaaaaataatataattgatataaataaattataaaa

SEQ ID NO: 19030 - DNA, 928 bp, Heterodera glycines
attgggatggatgtggctcttggataataatttttttatgtttgttattaaaaaaaattataatttttttattttattgtattttatcttttattcattcaaacgatttaaatctaaattaggcgtaaacattttttcataaagtttattgatttttaaaatatcaaagttgcctggtctgagtcgttaaaaagataaaaattattttattttctttatatatcttgtcttaataaattttaaaaacaatgtaaattaaaaacctatttaatttatgatcgatgtccaaattttatttttaacattcgatatttttattataaattgctatactcttaatatgtttttttagtaattcaaatttgagctcgttcttttcacatttaccgtgattcggtcataattattaagtttagtttttttttgtattcataaatttatgttttatcatattaatgaaaattttataccttaagtaacgtagtttttatatcatatcttttttgtatttaaagacgcgcttttttttaatcttagaaacttccatatggtggagatgtttgaaaaagatatatcaataaacattcattctacatatatttattaattataatatttgttgttttaatatttgcttgcttatttttacttatttatttcttttccattatctcgcatcatagcaaatttaattcttttaataattattagtttgttttgtaagatcactcaatttttttattttattttaaattcggagtgccttaaattttttaattatagatttttttacaatctaaaaactagagcccggcgggatcgggactcccgcgggattttacgggattcccgctcccgactcccgcttttttcggtgaacgggattttttacgggatcgggatttttacgggattcccgttcgggact

SEQ ID NO: 19031 - DNA, 1193 bp, Heterodera glycines
gtaaattaaattaaaaaattttctcaggcataaattttatcgggtgttttttgccaaatgcaaatcaaaagtttctcaaagtttttcggcagtgaagcagctcactgttgatcagggcgcggaacaaaaagttttcaaaatcagaatatcgggcccaaaaaatcagattttggggtcaaaaatcatgacattctgcaaaattgctttaaatcaagtcatttttaaaatttattcgatcaaaaatgtattaagtattatatttttcgcctccattatcgaatttaacaattttttttcggcgcatttttccaaaaaattctggtgaacgggcgaggggaggggctccggaagtgccgattgccacaaatcttatattttcttgataaaatagtgaaattctgccacaaaatttaaacattgcgaatatgtttaagaaatcaggaccaaatttggtcgatacaaccaaatcaggacgaatctgataaaccatgacagatccgcgccttgctgttgatccactcgcgcatccattcaaatttggatttaattttagggcataatcaaaattttttcctaagagatattcaaattgtaaaatatttcacaagaaatggcaaaatatgcaaaaaatctgaaaatatgtacaaaaaatggcaaaatacgcatgaaatatgcagaaaaacccaaaatatgcatgaaatatgcataaaaacccgaaatatgcaaaaatatgcaaataaaagtcccggtttttgtaagcaaataccaaaaagaaggtgtttttcgtactatttggactacgtagaatccaggaaaaaatgcatttgcataaaattttgtctttatttgtgcgtcatcatcatcttagtcgaattcgttattttcttatataaataagatttgatattaatatgatacttaaatgatatacatacttgatgttagatcatcatcataaaaaagaataatatatatatatatattatttatttaagcatttgaactacaaatattttttgttcctcttattgcttttttattatttcgcatttattttcttaaacattttagcttttgaattattaaactgtgaattgggttttagctttttttattaaatttagtgtaaaacatgtaaattttaattagcagtaaattttattttgtgcaaaaatgtactttttaacaaatta

SEQ ID NO: 19032 - DNA, 2593 bp, Heterodera glycines
aatttgtggtatgcaaatgtgagtgtgtaggggggaagatacggtattttaatatgttttgcaaattataccaagatagtctaacttttcttatatttagctaatttgacccaacccggacaattccgctaaatcaaggtagaaaattccccactccttcaccctatacatatttaaaacttttagttcgcccacatttctatgggagtacgtaacatttttcaatgataaatcaaattattatccattacagttccagacggcatgaggcaattgttcaacccggctcccaccccgccagtgctttatgtgttcagaggaccggcccgaaatggagttgcgatttttaacccaacaattccaccgccacctccggtccttcgcgccccgggaacttagtgccgatcaaacaattggacgattttaggaatgatttttggataattgttaaccgatccctaaactgttgatctctcataaaagctgtcttccttttaggggcatatctttcattttaagggaaaagctaaagaaaatagtgtggtgtgacgggtgaagatgctatgaaagtggtgaaaataagtgataggcaattggaaataaaagaaatgttgcggtaaaggtggtgaaaagcaaacagtgagacattcgtgaaagtgatgaaaaccaaaaaataattaagttttagtacatactgcttagaatgcattttcgtcgcctgtaaatacaatgtgatatagagtgcgcggtataaacaattcgctgaattttggctgggtaggctgtttttggctaggttccaattacactcattctcattgatttgtgcgccaaccattttcgtcataaccaaatggaacaatttctcgtccgccattttttgcaatacgttgtctgtcagtacaatgcgatatacaacacagagagaaatagagtgcacagttaatcaatttctgagttttggctagatggactgcgtttttggctaggtgccaattcactcccgtatttatttattcgcgcgccaaccatttccgtcatcaccaaatgcaaaatttttcacgaccgccaatttatgtgccatacggcgcctgtcagtacaatgcgatatacccgcccaaagagaaagagagtgcgtggtataggcatttggttgagttttggctaggtaggcagagtttttggctaggtgccaatttactttcgttcttattgattcgtgcgccaaccattttcatcctcaccaaaggctacaattttctcgtccgccaattatcgtgccttatgatgtctgtccgtaccttacacacaccaaacaatagtgaaaggggcgtgactcagtcaaccatgcgcatactttgttcgctaatctcggtaccagccggtaccgtttatcacggacagtggccggcgtctctttttgtgtatttaagcagcggatttataccattttagtcactttattaaagcagcaaaaattaaaattgattatttttaattaaatatgtccgaaaaaaaattccttaaaactggaaaggaagtaagagcaaaaagaaatgtaattaatttttttaaaacgatccctaaaaaaaatgaggaaactaattatttcgaggaaattgagagttatataacggaaaacaaaaaattcggcattacgggacatgttacaaaattctattttaaaaatgcctataccgagtcagctgaagaaaactttaaaaaaacaattaacaaactgattgagaaagcttgtgataaagaggaaaatcaatgtaaaatttgcaaaatgtcagtgaatttatattgtaaaggaattacagaccctgtagtaatacctatcagaccgaaggagcaaatatctgcggatacgattcttaatgagtttattaaattacaacaatcgtattcggaaatcaatttactcgatcaagaaatatcagtaattttcaccacttattcaacacctgcaggaagcggtaaaaaatataattaattcatatgctcatcatttttaggcagaaaatcaaataaattaatggaaaaaaatgatcttagtcgtattcgtatttctaacgctgacaatttctgtaaggggttaatcaaaaaagagaatttaaattgtttttcaggtttattttatgccttagagctcacccgtcattaccagctcattaacaatgggataacatataaaaaatatttatgtgttataaataatcaaaaaaaacaaaaaacgattgtgcgagatttgatgaatgaggcggacattaatcaaaaagaaaaatcctacgggctcgatcatatcaaaataattcaaaatttttgggatcaaaaatattcgaaattatatagaattgtagcctttgattatgtaagaacattctcgaaaaaactttctttatttgtgttttagaaatgtggtttgaagcctatatttaaagcagaaggtgggaggcggtttgaagttgctgttttattgcaaaatggacattggtgtggactgaaaagaatcagacgttttttcaatgtacgaaatttttgtgtactaggaggatctgtttatcaccatcccgaagatcacgcaattaca

SEQ ID NO: 19033 - DNA, 851 bp, Heterodera glycines
  unsure (1)..(851): unsure at all n locations
ataacaaattttgatttggagcggataaaatgatgtttaagactttntggaagtaaattgatcaattttacgaatgcatttattggtttgagattttttaggggaggaggaagattgagggtttgaagctctcttcattataatattgttatgaattatgagatttgtataaaatattttaattatagcgaacaaatttatatttaaatagtgttattagggttattaggataaggtcagaaaaggaagcaaatgttgatgaaagaggaactgggggctggagaaaatttttgagagcagagcgctgcggaggctttttggttagaagagaggagctgggcgctgcagaatttgaaaatgaatggaagaaaggggcttttcgctgggaatggtcgggtatttatacccacacaggtgggcggagcttgagctttgctcaagcattggcacattgccaactaaaatttaatgctacggctgcctcaatagcctttgagttgcgctctgaccaacagctagtgctttctattgtcaccagcgggcgctcaaatggcccctgcgtgcgctcaaatggcaggcgcgagcgctcagatgtcctggcgtcccttcccttccccaaagggtatgacagctgacccctccctttgcctccctttcccttctctaataggatttggctttgggttttatccttcagatgttttttcaatttttacctcttctgggattggatatatttattataggtgttttttaaggtttaaatctggtactgaaatgtccctttcaactgggactgaaatggcggggttgaaatacaaccccgaaaatctgcatgggtaactactttt

SEQ ID NO: 19034 - DNA, 886 bp, Heterodera glycines
tgaattttccctaaaaaaatttgacaattatttttcgggattttgacgggggatttccgacatcaattagcaatattagcaccagcaaaattaaacagtgtcgatttgctgctgtttctctctcttttctcctcatttttgcgccgaattttccttttcctctctttctcttccgtctctcctccttccccaatgctattttcctcctcttcccttgtttctccatttttgctgttgtctatcttcatctctattcccatcaaaatttgctgctgttgttgtactgcttgaacttcttgtttttgttgctgttgtttttgatgatattcgtaattgagttcgaaaattagcatatgcacttataacggaaaattgaattcagaaaaggcggggaaaagtgtcaaagcaaaggaattgggcagttggataatgaagcgatgcaaaattggggaggccatggcagcagcagcagcagaagatagatgaaaattgggacaacaattgtaacttgtgttcttttggcttttagtagcactaattgcattgggtgagcaattaaaaaaaaggcatttaattttgtttaaataattcaaattgcggctaattaaggcaattgtctccgccaccggaagaagtggaagaagaagccggacaaagaatgaaattttatgattaaaaacctcttaaatatattttcagggcggtgaatacgattctgacttccatttcagaaattgtctccattcgaattctaggttctgaattcgaaaatagttagtttttaagttataaaaaaaccgcaaaatggggcaaatttaattgcattgcaaatatttatttagtgggcgccgccgggggggggggggaggaacagcgccactcagca

SEQ ID NO: 19035 - DNA, 2828 bp, Heterodera glycines
atgggtcaagcccaggggaccagtagcgttttgggcccccgtttttatacccccgcgtttgggcccccagtgtcagacaaaattactcataacgccaaatagcgcatttggcgtaaatttttgcgcgctaattcaaaatttacactggtaaatgccttttttatattttttattttgatcagccataactcgcttcattcccgactaaactgaacaaatttggtatctaaaaaaagattttgtaatggagaatctttttttaagcgaatgttaagcaatttgacatctcagaaaaaagttgtgatagtttcaaatttttattacgttagaactcaagtcctaaactgctgttttcaccaaaaatcctaaaatttattctttttttatttattctatatgtccaaagtgatcttgtagcctataaaccaaaattgttagaatttgagagtttcaatgttttgtgactcgttttttacgtgttactcccatcggcacttttaccggcatttctttttttattctctgtcctttaggacatcaatttgctatgagtaactttgtcaagggtctgttgccatggcttgcccttatggcgaccgccccaattttcgtccaatattttcttcgcgttaaatttgatcatagaaaaactcgtcgtggcgatctgcagtttcttggttctgattctgacgcaagtacacgcaattacattctttttaatcacaaataatgtgtatgtacagacatcgggcacttttttacttgggacccccgaaaacatattaaaaattttaaaaaaatatgaattttcttgttcaatttgggtccggaattctgaattaattgaaatagatgacggatttgtggtcagcaacttcgaaaatgtccgttttcactttcttcccgtcagatccctcactcgaaaaattgtaccaacaattggtggtggaccaagacttggacggttggcagaatgtccgtggaccgagggacgaagaggacaatgccgagtttgaggtggtcaaagcgcgccgaaaggcggaaatggacgctaaacgggaacaggtgggcaaattaattacgattgaaaagccattgatgccattcgttcagtaaatttttattccttttaattcatggaattttcggcggcaaagtggcgctctttaataataattataaacccgactggctattgacccttatttgttaagtttgtaaaaatatttttcagaatatttctagtcgtgaatgggagttcccgggtttaggaaaaatggaaatttgactaatttcttaactaatttcattcaaaaaaaaacaaaaaattcctttagtgttatcgccttatatgagtaaaatcgcggtgcaccccaaaactccgccgcccaaacttcgccgagacataagtccgccgaggcaaaaaattttcaaatttagaaatttttcaagaaaaaaattctagaaaaatcaaaaaattttcctaagatttttttcttgaaaaatttcttaattttgaaaatttttttaaatttcttcttggcggaatcgtatggcctttggcctgagaatcacttgcgctttccgttttcattttggttttgcaatggtttcaccccccccccctccctccaactaggacaaaatagtcaaaaactaggtttttttcctttttttaaatgtttgccaatttttagtttcgtggcaaacgcgaacagctcataaagaggctggagaagcagcaatgaaaagatctcaccattttatttttgttttgtttagaataaatgtttttgaataaaaaaaaactaaaaataaatttcttttgtcgcaattcacaacggttttctttcctcattttgttaaattgccttttttcttttgtatatttgactcgaaaataccaatggatttcaaaaacaattgttgtttttaatcttttccatttcaattttatgaatttcagtgactcattgtcagaaacaacagtgctaatgtcttctcgcatttctgtcagtgggactgcctattgtaaaatggtgctccatgccatcaaatacccccattgccctgtcaggtgaaaatgggcacggccaaatgcctccgctttttggcatttcatttgcatttgtcagaggcgttctcctgggcaaacgcagcagcacgcggaacacaaaggcagccgaagagtcaaacggcgcgggggacgaaaacggcgacggatcgttggccgaagcgaccgtcgaggtgaaaaaccaacccattggaaaaagcccgaaaataaattcaaagcaaattggaagttttcaacgaaattccaatcccgggagcagaacaaaacgtcgtcgtaaaatttttttttatgaattttggaaaaataacaacttttagttacctagtctaaaccgaaaaattgttattaagcaaatttaaagaaatttaaaaaatatggatttttggaaattcagcagatttatttttcctaaaccctagaaaaaaagctcattttcccaggtggtcgatgtcgtgccggccacccattcgcccgtccttgcgccgaccattgaggcgatgttcgtccatttggacgtgttctgtcggggcgagcagggcacagacattgtggggctgtatttctgcaatcagttgctgaccaacaacgggtgggtgttttttggaattatttgccaatttcgtaaaacggaaaattcttctccgaatttaaataacctttggaatttccaaaatttggcttaaaaatgtacagacttttgaagaggaaacaaataaaattgaggaataccttcgcttttgaattagtttattaa

SEQ ID NO: 19036 - DNA, 2676 bp, Heterodera glycines
  unsure (1)..(2676): unsure at all n locations
tttcagctcgtacaaagcctaaaatatatnntgttcctanntagagtggaatttttttattagaatcttatatttttntagttctaaaaccttgacacaaaaaagagaaatgaatgatactttaggtgcaaaaacagcttcaattttgtccattgggatttgtttcatttcaatgcttttttattgttacttgttcaattaataaaaattctatttattagactcgtatacatagaaaataaattttttcttcgctgtttttcaaaagtaaaaaaatttggggacgaaacgacacattttctattccttcctgccattttcttcccaaatatatctcgggataatcatccggatcagtgtgaaaagcagcagcggagagtaacggtaggcaaatacccccgacaatctcggacaagggcgattgacataaggcgagtccccggcttctcattcaacataagtcggtggtgccgctacaacaaaacaatatcggcacgtcgttgtttgactccaaacccctatcttcttcttgaagtgtgagtttttatgcattcatcagctaattcttttaaaaaattaaaaagaaaagcaaatttttaaattaaaaaatattaaaaatttaaattaaaaataatataaaatattattcatagtaactttatttttgaaaaatttttattaaaaatttgagtgaaaaattgattgcattgctcaaaattacgtgaatttttattgttggaaaagatttattaaagagaaaatgaataataaaataaatattcatattaaaaagccaataaaacactaaacaaatttatttactgcagtttaaattttataatattctgaatactttacatgaatttgtggcatttaatattttttctattttgctttgttattaaaattgaatcgacaagatcagcaccaatcattgatggcatattcggcgtagaatggtttgatgatgcagtgaagaagtagtgatcccaattgagcatacatcaatgaaatgagaattttcacagtgaagttgtcagagagcgacaaatcagcgtgagatgatcgataactaatcgataggtgagatctcatatgcaatgattggcttaagcatgtcgttttgtgactcactctatctttagggtcattatccgcttcgattttattctcttagtccgtgatttacgagataacgtcacctttttcgcagtgtaccgttggcacaggcattttcgaatcggtaggctcttcctctcagacgctcattgaacatttacttcggcgtacccctccgcgttgtattgtccattgccgtgtaagaggatcggtgtcgattgggaaacgaagctgaacaagccgaggagggcgaatttaatgaaggaattcccgcgggggactcaccgagtcgcccgttcgctcgtttttgggcaagtgcaaaaagacgccgacgaaagtgttttgaagacaaacaaaacaaaatgaaattggacactttgccaaggataaccaatgtactgtaataggtatgccaatttgtggtggtaatttattagctaattaccccccccccctctcccattttcaccttgcgattaatgtccaattgtaccattgtttgctgtccatcggcggcttaatgccaaagccttcgatcaaattaataacggcggaagggccattagtgaaagtgaacatcgaaacgattctttggacaaaggcaaaatgagaagcgaaacgcctttcatctgaattgaaatggaactcacaaagtgacggtccacgtcactcgctgttcagttttggagtgaaccatttgctgggagagaccctcggaagaagtggactttgagggcctaaaacggacggaacggtggggagaaagagcaaaagaaagcccaaggggtcaaagagggaaaaattattgtcaaaaagtgggttgatcattcgccaataaatacttgatctgtttggtggtgccaatgatggccagttccctctggcgacgccggagggcgcaaagcaacaaaacgttgaggacggtcagcaaaatgatggggaaaatgacactgaaagtggggagagggggggggagtgaatgtgtggacgagggaaaactttcgttggcatttgccattcacctgatcaccgtgtttatcaacgtgctgattgactaaaggcatatttatttgccaagttctctccctcgggggacttacgataaatctgcgaaaagcgacggagtacggattggcctttttgggccattctctgcaaacggaaattgtcgcaagcatttaaaagtgccacaaactcctgagtgaccggcagacagatggaatggatttgcgtgccgttgcaaaaggcgcggatcagacatttgtgggagaagtgctggtgtgcggtgagcaacgcaggcaccgccaaaatgaagcccattagcagtgccatctttcgccgggggacgtgcccccgggcaaacaacgggttgcgaattccgattagccgatcagtacacacggcgatcacacacctcaaaatgtgcatttaataggaaattggaggaggagggaccaaccaaatggccacagcggatgcccaattggcgatggaccgcaaatggactttggcattaaaataaaagagacggaaaagggagagggaagagaacagcga

SEQ ID NO: 19037 - DNA, 1003 bp, Heterodera glycines
  unsure (1)..(1003): unsure at all n locations
ttttctcaaaaaaatgattcatgggtccttttattctcacagtaaactcaaattaagaaattaaaaatcaattaattaagaatttatttaaaaaagtagtgggtcttttatccgtgggtcttctgtcggcgtgggtcttttgtctgtgggtattttgcgagtgggtcttttgtctgtgggtcttctgcgttgacaccattggaagcactgggttcaaggtggaaaaacttaaaaatttttaggattttttaataattcttgaaaggcttattttatgagtggtctcgaaaattcaaaaccaaatataaatttaaaaaaagtacataattaattgattttattgtgtttcttaatcttatactaaattagaaatacattcatttcttattgttttttcatttttattcttttcttaaattaaaaaatatttttacttttcaattttaattatttttttaaatagcattgtaaataaaaaattatttagctgaatgattacatggaacggatggtcacattcccgagcacatgcgtagcaacttatcggcttgaagaaaggccaatgcgtttggtgcgcaattgcaatttggtggaccagaaaatacgattataccgcgatcaggtcgaaaaagaaattaattttatttggtatatatttaatagtattatcttgaaattatgaaaattaataagtttccagcttttcggcaaatagtgaaaaatggtaatctctttaaatactattaaaaatatagaaaaaattcaatttctcgttttctgttattgaatggttcgtacaaaaatttttgtaacccaagaaaaccgaggatggcttcctctaaaataataggagtatttatatttcattanaataataacataataaaacaattatttaattanagattgtcttcgttncaccaaattctttggaaaagcatggacgtatgataatcagaaatgangcacacaaaatcatacactgtcccatacaatttttgac

SEQ ID NO: 19038 - DNA, 888 bp, Heterodera glycines
  unsure (1)..(888): unsure at all n locations
aaggtgagcaaacgttctgtgcgctcattacnnttaaaatttaaaaaatntgaaatctcttaaattagaaaaatatgagtgcgacagaatttatcaatttttaatttattaaatggaatgataaaaattgataaattgtttaattttttgttaaacttttattaaaataaattcattgctaggtttggcacttccgggttttgctacccacccataaaaatgttatgattccgacaaaggaaagcacttttttcttgaatagtttttggcgcttattcatgaatcttaggtcaaaactgcaaaaatctatgcttatatcaatgtttttatcatttgtttttgttaatgtttttcgaaaaaagccaaaagtctttttttttgaaaataaaacccgaaacatgcctaggatttccctggaacaagaccattcgatccctctcggctataggaatcgatgatatatgtgataattagtaattaagattcacggaatttaaaaatgctgattttcctgttcatttagtaagtaagtcagaatgacttgaaaatttgtaggaaaatagcttagtataagggctttctgcctgtaaaatttcagaatttttcgataaggtgcaaatttttttacaaaaatcagcatgtttttaaaacttgaaaattcacggaaaaatatttccgtgaaattttcaagtttattaaatacgggaatgtttagaaaaaagttttggatgtatgaaatctgtttaaagtaggcaagcagaatgacctatactaagctattttctgcaaattttcagggcattctgacaattattaaatgaacagaaaaatcagcatttttaaaatcagtgagtcttatttacctaaattttccatccctagtgataa

SEQ ID NO: 19039 - DNA, 1005 bp, Heterodera glycines
gtctctccataaatctgggcgcatcggttcggggggactgccccgaaaacaaaaaaatagatttttcaagtgtccgttgtggtgctcactcaatcatggggagcgataatccatcgcagaattaaagtacagactatagggaagctattccggaaggattcggtctctccataaatctgggcgcatcggttcggggggactgccccgaaagcaaaaaaatcgattttttcaagtgtccgtttggggtactcaaacaattatggggagcaaaaatccaacgcagaattaaagtacaggctatagggaagctattccggaaggattcggtctccccataaatctgggcgcatcggttcggggagactgccccgaaaacaaaaaaatcgattttttcaagtgtccgtttggggtactcaaacaattatggggagcaaaaatccaacgcagaattaaagtacaggctatagggaagctattcccgaaggattcggtctccccataaatctgggcgcatcggttcggggggactgccccgaaaacaaaaaaatcgattttttcaagtgtccgtttggggtactcaaacaattatggggagcaaaaatccaacgcagaattaaagtacaggctatagggaagctattcccgaaggattcggtctccccataaatctgggcgcatcggttcggggggactgccccgaaaacaaaaaaatcgattttttcaagtgtccgtttggggtactcaaacaattatggggagcaaaaatccaacgcagaattaaagtacaggctatagggaagctattcccgaaggattcggtctccccataaatctgggcgcatcggttcagggggactgccccgaaaacccaaaaaaaaattttttggataaaaattatttaaatgaactgactagataatatttaaaataggttatttctcttcctttcagtatccctgcaaagtttggtgcgcttctgatcagtttctgaaaaaaaagttaagc

SEQ ID NO: 19040 - DNA, 2624 bp, Heterodera glycines
  unsure (1)..(2624): unsure at all n locations
ctatcgttatataatattttcaaaatgttcttagagagcggaaagccaaagactcgagaaaccgagaaaaaaagtcaattctttctcgagactgaagaattgtcacaacaatttcctctgaaaaatttgaacatgttggaattcaaacaggtcaatgatctaaatgagatatgcaaaattcctaaaaataataatttttaattagacatgtaaatgtaagccaaatgctccatttcattttataaaatccctcaatttttaggtgttcaacttcaacccatttcccatttccatgctccgattatcttaaaattaaaacttacgactcaaaaacttctataattttttttttctaaaataacttcaatatttattttgaacattttcacactcaatttttctgatttcgaggcataactttaaatgaaaatattgtaattttttgattatgactaaatgttttccttatttacattgacttaattgatttttagttatccatttaattataacgcaataatattcattagtggaaagccaacaaatgcttcattttgacaaaattattatttatacaaattaaatgcttttgcttatattaattttgtttaattttttttctgaaaatcaaagtcagccccaaaacggagccaaaccgaaggattccatcgatggtggtaagcaaaacggacggaatattttgttaaaattttgtgaattaaaaatttgtaaaagattaccagaaaagggacgacagcggaataatggtggaccaatttttggaggaaatttaccaggaaatttgtcaggaaaatgagcagaaaaagtgccaagaaagtgagcagaatggtaaaccataaacaaaatgaataaaaataaacctgaaaaaataacttgggttctgttttatttttttaattgcaataatttgagttagggggcgattggttgggtcttagattcttgaattgtttgtttcggatgtcttaaaatatatttgatttgacaagatgtctaatcataataaaagtttaaccattcataattaattgtgcatttttaaagttaacggaaccgacaattggccaactcaagaggacaatccgccgacagaggacagtgtgccgcatgtgccaaagcttatccacggtagtgccataccaaaaccgatggattgaaccaataaattgagaaaaaagcgtgatcggcgaaatcactaggagaagggcataaatggcatccagggaagcttgttaagtggtttcgtgaaaatgcaccttgggtacttacaaattagcgacaaaatcgtcataggttttcaaaaaaaattgtaatcaaaaaaactcataaaagatttttaatatatgtaattttttatttactaattgttcggtccgagggatttgtttaagtccaattaaatatttatttattggagaaggaaaagaaagtcacaataatttggggaacaaatataaatgcaaaatgaatgaagggaagacaatctaaaggggaatgggagcatatttatgggcgagggaaggaacatgaaatggaacagaaatcgattggcattatgtcatgtcattcaaacttcggcggcagtgccccgaacacctccccccttaagcgcggttcccaggttacggtgagaagcgctgcggcggacggcgatttcgctgagggtaccgtcgttgctgtccctggtcaatttgacctcccaaattttcctgttcgccaagcgggtcctccaatggcatttccactgggattgccctttgctcctcaacagcaaccggtcttgggatgtcgaagacttcgagcatcaccgagagctgttcgtcggagtcagatgtgttgcgaggacgaagctggttggcgtggtatcgccctgacttaccatcggcgaatgtcacgtcgtaaatcacaccagttcgctttgaaatcttgccctgttgccaattttgggaaattctgtggcgggcaaagactttgtttccgatcgaaaactcccttaatttggttccaaatcgcttattgaagcgtctcgccatttctacgtctctttcgatcggttgtgctggtggcggccgcaacaaatccaaagttgtgcggggttttcttcccagaaacatttcagcaggtgttttgctgttcggcaacgaatcatttggcgtagtccggtaacttaccaggaaagtttcgatgatttccttgcttggggctccctcccctttcaattttcgaaacgttctcttaaacgtgtccacgaaccgttcggcttggccgttggacattggattatacggcgctgaaaacaggtggttgacaccgttgatggccataaatttagcaaattcgttgctcgtaaattgggtgccattgtcagacaccaaaatttccggaatgccgtgtcggctgaacaaatatcgaagtttttcgattgttgccgctgtcgatttggtggccatttcgaatacctccgggtatttcgaaaaagcatcgacaatgattanatattccttgccgaaaaatggtccggcattagtcgatgtggactctttgcacggtgcaggatggttttgggcatggnntgaagattacttttnanctggtgcctttgc

SEQ ID NO: 19041 - DNA, 2073 bp, Heterodera glycines
gtttcaggttttttaaatagtagtcattcgtttaatgtcagttcattagggggtgtgcgtaccatgggtgcaaaaattgttttttgccctgggctgttggaccgaacgggctgtgcatggaagagaattacagaaggacagagatgcggatggaagcattgagagatatgtgtaaaaatttcagagtggaggaagtttgggtttggcaatttccaaatttattgataactgaacaaattaaggaatgcgaggtgaaagcggaattgaagagaaaccgagagatgaagaggttctttgaaagtgtgccggataagggaccaattaatccgagggatgcttacgcaggggacgaacaatgcctttttgcttgtatgcaaaggctacggaagcagttgagagttcgatgtttgatatcatcagtttgtacccctttgtgaattatggtaaaaatccgcttgcatttttaatattgccattcacttaagacactccttatcctgttggtgtcccaaaaattgtggtgagcaggaattttaatgtgaattggacggtgcccgacgatgtgccctatgatggactgctaaaggtgaaggtcatccccccgaaggagctgctgtaccccctcctccctgtgcacattgatgaaatgctcctcttcccaaattgtggtatttgtgcgagaaaggccaagaacgagtttgttacgacgaaggatgtgaagagatgtagccatcggccagagcagagggcatttttggggcgttcacttcgattgaactgcggaaggctatggaactgggatatagggtcgttggcttctatcgggcttatcactttgaacaatttgacaatcaattattcaaaggatatgtgcggatgttcttgaaaataaaggtggaggcgtcagggtggcccggggaagtgaagagtgaggaggaaaaaagtgcattcatccagatgtacaaggcgaagtacgacatctgccttgattacaacaaaattgtctttaacccaggccttcgtatgatagcaaaattggtacgaaatacgcaaatattaatttatcagcgatgaaaattaaggggttgaacagcttgtgggggaagttttcgatgcgcaacacgctttcgacgagtgagatttttaacagcatggaacggtgggtcgcattgtcacaagacaatacgcttgatgtttcgacgccaatacaaatatgtgaaggagtagagcgtgttgtatgccagaatgcaggtatatttgctcatcttattttattctgggggcttttacgtttaaaaagtcaaaaataaattcaagaaatttttccccggactacacgatcttttatcaccataatgacaaaatggcgccagaatgcaggtatatttgctcatcttaatttattctgggggctttacgtttaaaaaagtcaaaaataaattcaagaaatttttccccggactacacgatcttttatcaccataatgacaaaatggcgccagaatgcaggtatatttgctcatcttaatttattcagggggcttttacgtttaaaaaagtcaaaaattaattcctgaaatttttccccggactacacgatcttttattaccataagacaaaatggcgccagaatgcaggtatatttgctcatcttaatttattctgggggcttttacgtttaaaaaaatcaaaaattaattcctgaaatttttccccggactacacgatcttttatcaccataatgacaaaatggcgccagaatgcaggtatatttgctcatcttcttaatttattctgggggcttttacgtttaaaaaagtcaaaaataaattcctgaaatttttccccggactacacgatcttttatcaccataatgacaaaatggcgccagaatgcaggtatatttgctcatcttaatttattctgggggcttttacgtttaaaaaagtcaaaaattaattcctgaaatttctccccggactacacgatcttttatcaccataatgacaaaatggcgccagaatgcaggtatatttgctcatcttaatttattctgggggcttttacgtt

SEQ ID NO: 19042 - DNA, 2856 bp, Heterodera glycines
gatttttttagaagacataaatttcttaagaaaaggttaaattttttttgaaaatataccccttaaatttaattttttaaaaaagaagatttttaaaatgctttaaacattatctaggcctaacagtattttacggaattttttcttattcacctttttctaaggttttttttttgtttaaaaaactcataaaattttttaaatattttgtagataattcttaaatcatcatattttgcgatttttcttacatataaaattcccagtcctaattaatcataaatagaattcattattatatgctggtttttatacaaaaattaaaatttttctattgggaattctttttttaaaatttcactggcatttatttgtcaatgttcacaatcaccttttttttgccaaaaagcgccatcattgatttatgggcgtccaaagtgcgtgtaaaaatgctaatattactcgcttagaaaattttatgctacatataaaaaattgtaatttagaaaataagcagggctgggagatttaattgtgctaaaaaatttaatttaattatttattttttttgcaactcgatttagagcgatcagaatgactttaagtttacgcaaaaatactttgtagtagggactacctttatgcaaaatttcagaaatttttgcttcttgaaaatttttaaaaaacccgcaagtttttaaaagttgtccaccaaataaaaaaaaaaataaaaattgatattatcaaaaaaataaaaaaaataaaaatccaatctaaggttagtcactaattccggggaaagaaaaaccgggaacggggaataaattccctgtcggggatatctggagaacttaaaaaatcggaaaaaaataactgcatttttttataaactcatttaaaagacactctcatgcgatttggagtgcgacaaagacacaattcgtaatccccgctttcgggtttttgcccaaaagagtgccatcattgattttgataatgtgcgtggcaaaaatgtcaaatgtaaaaaaagtgcaaaagattttgccaaaaaattggatgccctttgctgggaaggatcgggaagggggatggggggggggggggagggacggcaaaaaatcccgaacccaaatttgttaggcattcctaaaatcttgtaaaaatcagacccctggacctggtaaaataccattatccctactgtttttcggcaacctggattttcctggtccaggaaattcaggtccaagtcatacaaggaatcccaggtccaacagacaggcttttttcaaaacgtcgagctctggttgagacaagtaaaaaactttgctattttcttaatagcggaatcgcatacaaacagagtgctctatagcagggatgggccaaatcgtgaaaataaaatgcgaaacgcaaaattccaaaaaacgcgaaattgcgaaacgcgaaagcgaaattttctacaacttttttaatagtcaaaatcatgcaaaaatcatcatttgtaaaattctatttcaaatttaaaaaaataaataaaaggcttttttgcagcgcgttttttccaaagaaattttgggaagtgggggcaggcggcgccggtaggcgtcgccgggaaaattttttaatacaatttgttaatagatttttactaaaaaatgatcaaattttgcaactttttgaccatttttctatgaaaaataggagtttttgtggtcccgcggtgcaaataggcgccgctgggaacagatttgaaaatttgagtgtatttttgtttacagattttctccaaaaaattactaagttttgcgattttgggccatttttctagaaaaaataggagttttgggggcgcggcggtgccgataggcaccccggggaaaaattggaaattttgaccattttaaacaggttttcactgaaaattagccaatttataggttatacttttgaaaatttttgaggaatttcatccctcattcttaggggtgtaatattcgcatttcgcgccaaaatgcgaaacgcgaaagcgaaagtgccaaataaagcgaaatatgcgaaagcgaaacgcgaaaacgaaagcgaaagcccatcccagctctatagttatcggaatgcacttttttttgttcaaaagtgccttcattgatttcttgacgtccaatgtgcgtggcaaaatgccaaaatgtaaaaaagtgaaaaatattttgccaaaattagcccaaaatcggatgccctttgctgtgaagagcatccataagacagaggtgagtatcataagccaaccatttgctatattttttagactatttctgacaacattcgcttgccaaaatccctccccattttaatgtttttgtctataaaatttgtgattttttaaagtgcatcatatcaacgccacggcacgtcttttatgccaataaaagtgcagcagaattcattcaatcattccaattttaattaaatcgtcgcatttccaatacactcaaaattcttaaatatttattattcatttcttagattcaactcagatttccaataaaattgcattttagtgatgattagggatgggaatttaagtcacaaaaaatctcaaaaaagtcgacttaaaaagtcatgaaaaatcgccaaaaggtcacgaaaaagacataaaaacgccaaaaagtcacaaaaaaaatgcaaaaaaacaaagcactaaaatatcaaaaaaagtctagaaaaataagccaaatgtaattaaaatcaaaatcccttttaaacattcttcgaagaaagtaatttaaaaacgtctaattttaacggaaaaaattatttcaaacggttacacggccagatttttatttttatttttta

SEQ ID NO: 19043 - DNA, 3021 bp, Heterodera glycines
tttttaaataaaagcacataatcaatggaaatctttgacgaatttattgttgttgacgaaaaagcgttcaatgaaatctctgccccaaagtgtggcggctcctgcaactgttcatttactgatgtgacccaatttgctgcactgtaattcattttttgaaattaaattataagaaaatatttaaaacgcaaccaaattttaattgcataattagtcaacatgattttttcaatgtaaatcacatatgtacttatttttagtgaatttatgtcaagctggtatcccatattgaaaatcaaggacattggcaatgcttcttccaagccgaatgtgccggtgattccattggcacaaattgtccgttgggattgggacacaaatggggcacaacagatcagtgaagtattaaagaaatgatcaagcttataatttaattacctaacaaatattattttagacccttacactcaacaagggcagtgaagttaatttcaacatccgagccaatgtttctccttcatttattattcgaattcttaaaaaacggtagaaaaagtaaatattataaattacccacattttacacttttttttttaattttggcccaaaaatggcatttttttatgctctccgcgctcaaatttttaaaataacactggcgaaaatggtcttcggattccccccccccccataagtccttttaaagaaccagaaaaataagtactgatcccgattggagttgcgagagttgagagtgatcctcctccgatcatttaacatttattgtttcccgccgattaagtgcgttcccggcgccttccatcaactcaactgatcacgacgatttgacggtgaaaattggtgacaaacaggtgaaaatcagaaagaaagagagtaatggaatttatcttagcccaaatttatttgaattctaataagtttagcagaccattgataattttaaaaagagattatcatcgattccctaattcttttttgatcagatcagtgaaattttgatcaggtcttgcttaagctttataagatatatcactgacaaacgattttgatcagatctatcttgaaaatagataaaatcattgataaatttgatagatcactgatagtcttgatactgataaatcttgatcaaatcgttaattaattttgttgatcagatcgctgtgtccgcccattggctgtcgtccgtttccccggtgatcagtcgcatgctcagcgtggagatgaaggagaagcagcagcgaatgatcactttggacgaattgggcgtggacatggaccaattcatggagtttttggaggccatcaattatctgttaatgagcggaacttttctgccaaaccgtaattcattgatactgtatctattaaacttaatctccttgaaaatcacccgttttatggattgaaaatatgattttttaatttaaaaaaatggattctctatttttcagccaaaaatgtgctgatgctgctcaaattggccgactatttccaggtgggtgccattaacgatatttctctaaaattaccataaattcaattgattttcaaaaaatgatacttaaatttgaatatcctttatcaaagagagtttacccataattttcaataaaaaattactttttactcatttttaaattcattaatagctaattattagtgacactaattgctctgttttgaggtgtccgcgttgaagtcgcgctgtgaaacgcatctgatcaattgtgttgaaattccactgatcgaccgtttccttctgattgaacgcttcggactcgacaatttgaaagtgatttaattttaaaatatttaaatttaacatttaatttccactttttagaattactttttgcatttgaatatcgacaacttccgtgcctttttcaatgccaaccatgaacagtttttgcctattatcagcaaagaatttttgtacgctttgtctgtccgaggaatggctgcgatttgatcaaattgattttggcattttcataaaatgattttttgttacgaaatttcttcatttttaatgagagaattgttattttttctgatttggattaaaagtttttgttatgatgagtttatcaagtaggttttatcaaacatttgagaatatttttgttttaaatagaaaaacaaaaattacaattaaattaaaaagagtgattaggcgcattaattccgatttacgaaaattttgggcctcgaaatgccatccctggtatgggaccttcggcccactcattcgcttcccccgcccttactcctctccccctccctcttcccgggacccacgcgtttcggcgctggcgtttcggcgccagctcttttttccatttaagcttttttctttggcatccaaaccaataatcttggtatcattcgaaagctcttaacatgctctattagcctaacaaaaaaccaaaagattttttggaaaaattttatgaagaaaaaacttcaaaaatttcgacttttcgcaattttcatgtataacttttttggtaattgtctaatcgcgaagcaatagcttagaaaaagcttctaaatagattaagctttcaatgacaccaacaatgttggatttggtttacaaagaaaaaagttatagccaaaaacatgctggcgccgaaacaccagcgccgaaacgcagtggaccctcctctcccccatttaccaattttcccgtgcttaatgtactcactcggccgcttcgcgacctcgtatgaggggcattcggcccccaatcccaagccaataatgccaatccttctcattttccactattttcgtgacattctcttccattcccctctctgtctctgttgcatttgccatccatttttgtcttgccgtcattaccccccccccatcccatccaaagtccatccccaattgtgccattatataagtccatccaatttccccctcgggggctacgagatgcctgcggtggtgggtcatctgctcacaatcagtgctgttctttt

SEQ ID NO: 19044 - DNA, 3088 bp, Heterodera glycines
tgtgctgaacaatgccttttcagggcttccaaaagatttacaagcagttattccctcagggcgaccccattgatttttccaatgtcgtcttcaaaacttacgacgacgatcaggtgaattaccaattcaacacctatggacgtaatgtaacgcgttacggtaacacagtcaccgccctcccccaccccgtccattagaaaaacacgaaaatgttttggtgatttgaactcattcaaacgaaagtggaaatggcattttctgatgtttttaggacggagcaattgaatttgatcagtttgtgcacggtttgttaatcaccggacgtggcactttagagcaaaagttggcatgggtctttcggttgtacgaccaggacaaggacggagcaatcacccgacaggagacgggtggagatgataaaatgggaggggggggggcaataaaagacgaaacatttgaaagggagacggtaaatgaactgaagagagacggtagccaaaaaaagtaccgaaaattatggaaatttttaaagacaacgagcaacagctgatcagatgatcagaaataaatacttcaaaatttatgcataaccaactaatttttcaagttttttgcagtaactttttgtgtctattgaaatcctttgaccttttgtgggcaaaaaaaacatttaaaattctcaaaataagcataaatggcgaaaaatgtcatttaatgcaaaaacaaaaaaggggaaatattaaatattttctgaaaacaaagccaaaaaaaaccctcgcctacttttttcgcttattttcgtgcttttccacagaatgcctaattaggcacatttacaaattgtccggcgatgattcagagacagcggacacaaaaatggtgccgaacagagtggcgatgatttggacgaaactgaacaaggcaaggccatttcggctccgccacagaacagaggccaacggacaaagccatcctttttaggaaagcgatgccaaaataaactcggcggaatttgtggaaaatgtgaagacggacaaagcgatagtcaacgttcttagcctatacgaaggattgggcaaatgaaagaaaagcgaataaaaataaaatgaaaaaagaaaattattttataggaaaatttaatattaaatgccaatcgaacaaaggctaattgaaagataattaatttggattttatttaattactttacttaaatatcgcaaaacatattttagctgattggattcgcttatctgctggaatatcattagattttaaatacaatatttgcttgagatgagtttttaggcatagaattaacatttgcgttgctctttctgtctgggactacataaattactccgtttacttcgaaatttaaaaattgtaaaaatatactaaccataatcatgactaggacatataattatatggaaatccattttttttttctggatggtgggaataaaacgactaaaacatttttttagcttatcttgaaacttctaggatggatttctatatccaggttacaagttcgtttttggtcatttttcataataattaaaaaattttatttgacaaaacctataggaatttgaacagttatataaatgcgtccgtttttttagatgtcatgaagaaattagactactttttgtagtaaaaaagagattacagtatatatacctggagtaaatcttttttttagattctaaatataaaaattcatcagttttctctagtaaatgattttaaataggcaaaaaaattgaccatagggcccatcagagccaaaaccaatgcctttgtacaatttattttaaattaatcattgtgttgtctgtccatttgcgttggcattttctcgcaatgacttaatgatgattggcttctcctccctcaattaatgtgcaaattcggcttctgattgtaagtgaatccggcgaattccgtttctctgttgacgaatgtttgcaaaggcaccaaagaagctgagatttgtcattacaaatgatgcggtgactcaaatcaccagggttcggctcaatgtcagtgaattcgcgcgcgatgttcaaagtgtccgtttcggcacgcactttcggcacaaacggcgccttcacttctttgtttagcagtttttcccaatcgattggtgcgaaaaagggatggcttcgtatttcctgcgcattagcaaatgaccgttcggttcatccaaaatcactaatcattaattagttaatttgcctcaaaatcggattttgcgcccaatcgttccgaacggtctttgtgcagtatttcgacgagtaatttgcgcactaaagtcgaagcggacgagggaacgcacaacggttgggtgagcgtcttgtggtacatttcattctgattcttactgtagaaaggtggctgaaagtgttcgggaggtacggtagggtgggaaaggcaaaaaaggaccaatccgaagagcatttcgaacagaacgcagcccaaacaccaccaatcgaccgtccgatcgtacggctttttctgaatcacttcgggcgcttaaagcaaacggcggaagggctgagaaaggcacggggggaaaggcccacccaaatattcgggggtgccgcagaaagtgctggtggtctgccgcattttgacgtgctctttgcacaggccgaagtccgtcagaacgacgtgcccatttctgtccagcagcaaattctcaggcttcaaatccctaaacaattagccgaaaatgagcgcttttcgaagagcgaacgaacgaaaaggaaaagagtgcctgtaaatgatatccttcgcgttcaaatatgcgagagctcttgtgacttcggtggtgtaaaatcgggcgcgggcttcggcaaaggatcgctcttttagaaggtgaaaaagcagttaaaagagagagagagagagaaaggggagagaaagggagggagagagagaaagagagggacagaaacgaaaaggatgagagggaaaagaagcaaagccagaaagaaaggaaaagagaggagagacaggaaaaagtacaaacggaaaactggaacaataaaagttgattgaattcgcaatttttatttt

SEQ ID NO: 19045 - DNA, 2999 bp, Heterodera glycines
taaagtaactgttttttggtaggtctaaatccagcacaccagggatgtgtcggaatgctattttcggaacgttttcagccgtcggaatgtcgaatccgctgttttttgaggggcacccattcctttcttcagcaattcctcctctcccctcccatatgcaaatgtgcaaaaacggaatacaatggaatccgagtacaaaaaaagtcgtgtaattcgatccacagaatctgtcagcagccaatttccatccggggaccttaaataatgaaatcgaattatcctttaagtaaatcggaccatctgcaagaccggacgtaattgttttctccaataaatctgtgaatgtgtaagccgaagtcgggagtcgttccctcgttaaaacaattggaaatgacttgtgcaggcttcagattagcaaaaaacgaagaatcatttggtaattctttattttcacgtttctcgacaacagccgaatgaattaaatttttgttcgggagagagacgatttgttccttcgaagtaatttcctcagaggcggtgttctgacagggttagagtaaaattttaattgaaaattaaaaccaaattacttttttggtaattgaactttccctttgactcgttgacacatcggagggtgcgttgtctgctctaatctttattactaattgatttcattttgcaaaattaataaacctgttgcaacaaaaaacccattccctgtcgaattaacttctgttgtttattgactgattttccagatgtagttgttatccgattttcgtccatttaaaataatgagaaaaatgcaaattaggggcacgctcaacttttaacagggactcagttatccataaacaaaaatgaagcaaaaaaaaactaaatcggcgggaacgaaaacccaggtgttcccgaccgtggtgagccgaagcgaaaaaagtatggaatttataattgaataataagctaataattagggacgatacttttagtgacgaaaaaatcccgaaatagttaactaaaataccgtatttcctcgattataagccccggggcttctattgttcaacccccctccaaagggggcttatattcaagggggagcttccaatcgaggggggggcttttattgttcaacccctttccctatataaattcttaaaattttttgctttctgcataatggtacaatttaaatcttaatctgaaatttttgaattgaaaagatttttcattttttggcccttggaaatttaggcgaatgtttgaaaattcataattcacttctaaatgaatcaattaaagtgcaaaaaagcattaaaaatagagaaaaatctggagcattttatacttttttagaattttctatcttcaaaacgaagaagttattacataaattttggaaaaattcgttttttgagaaaaaaaaaattaatagcgctgttctaaaaaggttttttgaaaaacacgaaattcttcctctataaacttctgtttattctatatttttataagacttttgaaaaaaagtacaaaaataaactgattttggaattcgggatcatagatggaagcaaatggtttttttgtgccatgggttcagatccacttgcctgtaaaaatgttttttagggtttttgggaccactaatcaagaacttggcatccattttgcccaattccaaagccttgatccgaactcgaaaccccaaaaataattttttaaaaatgttgcaggcatgtggatttgaacccatggcccaaaaacccatttttaacaaaacaaaaaatatattggatataatatttctatatttgcttgaaaattttttagtgattttcatcaaaatcttttccagtgaatttattaacagaaattttttctagctattgcttcgctattagacaatttccaaaaaagttatacatgaaaattgcgaaaagtcgaaaattttgaagttttttcgtaataaaattttttccaggcttgaaaatcttttcgcttttggtaaggctaatagagcatgttaagagcttacgagtgataccaacaatgttgtatttggatgtcaaagaaaaaagctatcgtggaaaaagagctggcgccgaaacgcgagcgccgaaacgcgtgggtcccgtttgtacatttagtctttctaaaatattttatgaattttaaaaaaatactatttttttcagaaaatttttgtgttttaaaagtatttaaaataacaaataaatattataaaattatccataaaaagcgacgaagaaattgatgcagaagtttcctaatatttttttgttaatgttttattaaaacaaattgttcaatagtttttgcacgtttctgacttcaaaagttttgaaaaaaaattttttttgaggggggcttatattcgaagggggcttctactcgagggggggcttctatttttcaacccccctacaaggggggcttatattcgagggggggcttccattcgagggggggcgtataatcgaggaaatacggtaaatatttaaattattcgttacgcagaaaaagaaccttaattttacctttggtttgcttttttctactgaaaaattaataaaaaatcttatttacctatttcgagatttttgtgcctatttaataacaattttgagctttttttgtacctattttgtggtttttttgtacctaatttttaccgacctaataattattaataaaattgaattgttttattcctttatttatttttcagttttatcctcttcggattcgccgtcaaacaacagacacaattaaatggcacatttcaatatgaaaatggcacttttgcatatgaaggcgatggcgaactttggaccgacggaaaacaaaaaggagcaaatgcccaacattcctacggtaatggcgataccgtaggaattggcgttaattcggccactcgacagatcattttcacaaagaatggacttcgtttgggtgtggcaaataaacaaataatt

SEQ ID NO: 19046 - DNA, 2282 bp, Heterodera glycines
aataattatggcttgggtattgatgactaaatccttttaccaagaaattttgttcctttggaaaatgctcctttacatgtgctgaaataatattttccgttcttggttcgattatctctgtttttcccattattactttagttgatttaggcatttcaacttcaattactgatataatgtttgtccaaatctcatcaagacgcacttttttttctccaaaggcaattattccctttaactctgtcaaaattggtaaccctaacagcaaaggacccggacaatgtttgtctggagagacaagtaaagtcactgaccattctccaaattttccagttgaattgtcgtaaatgcgaatttttccctgtgcctttcccaaaatttgaataaaagaatcgtttgccgcagtcaaatttggatttcccccgtccaattcttggatttgtaaccctgctttttttgctgttgtttcccgacagtatgaaacactggcacaggaatccaccaatgcggaagtatgaagcccattaatatgaacacgaattgatggtaatcgcctgggatcatttgtaattattgccacccgtctaggcggtaaatattccaataaatatgcttcttggtcaattgactcccgttccggtgctgttggcaccgcagcgaccctggtacccctttttttcattccaattattctcctgacgactcgagcggccagtgtccctgctcgaaatccgcccgaaataattgtccaatattttgtcaagataaaaattattatggctattaataagattagtggaataattattaataaaattgatagcccttttaagtaattcactgcttcttgtgccttttttggaatatttttcattatgtcaatccaattccctgtttttcccaaaattgcgctcaatgtctcatttgcttcttctttaattagtctaatgacttctgagacatttgtcttatgtacgatacgtaaagttgaagaaggcaaattatttattttttttcggtattctaacatagcatcttcaattctaacattatctgattcgaaaagtgtgcctgcttttaaaatgagaggattctgcatatttctatatttaggacgcaaattttctaagttttttgtgagcttatctataatttctttttgtgttgcgttaaaaatgttttcgttttgcaaactttcacactcaatggttttacccagaatactcaattctcttgtgccgggttttatgaaaaatgtggtattttcggcaaaaatcggtgtccattcataacattcttctcctatccttttatcccaaatcactttttctggaataattggtacgcaaaaaccaacttccatttcttctccattccaacgagccaccaaatcgtccctgttaaaaattttccgtaccccctcatttgggttaatttgcaaaatcgcttttgctaattggagttgaaaatttgagtttagacatgcctgagtgaaaatgtggtcatactgccttttcctttcctcatttaatttgtataaggcatagttgacccttgtattcaaatttttattctcttgtccccctttccttgatttgcttttcccgattttcttaagccaccgtgcatcgggagtcgttacagtagttcgtttttttctatctgcctcaaaaaaatctgccgaattctcactttcttcaaaatcctctgtactctcttcattttcttcattttcattaatctcttcactttctgtaagtagttggttaattatttcggtatcattttccggattttgttcctgcattttttccaaatgtttgttctgtttgttttctgtcaaggtgtcattttctgtgtttttaggctctttttttgattgattcgactttccctttggcgtttttctgtcccttcatttcattgtttgtggccaattttggtgaaacttgatttaattccaacgtcgtactctgattgtgcgttgtcttttcgacggtacccttatttattgtaaatacaactctcgggcttgttgttgttaaaatctttttgtggagagggatttgcgtggtttgggtttttggtatcatattttgctgagttggggtaggtgtttcttgttttgtttttgttttatttacatattttttttggtttttattaatttctactggtttagttttgacttttggggtttcagattttaatttattcccttggttaccattgtcaagcacttgaagggtttctccgcgtttttaatcactttttcattctca

SEQ ID NO: 19047 - DNA, 941 bp, Heterodera glycines
  unsure (1)..(941): unsure at all n locations
taaaaaatttttntggagaattcccataattttccaatactttctattatttttaaagaatttccaaaaatttttctatattccattatttttgcagattttcttaattatttttaaatattttaataaaatttttaattctcgataatttgaagcaataaaaatcaagtttttttttttcattttccagacctgacgcaccaccaagccgagtgaaagtgaccgcagagactgcgcaatttcctcggcccatttcaccgccggcccaaattggtccgtccacaatgtcccactaccatcaacagacaacaacagaaacaatatccgcaactgaccatgctgttgcgggcgggtcgggaatgccgagcagtacagtgggattgccgtcgtcgactacggtggtcaccagtccaccgttgccctcatttgtcaagtgagcaagcaatatacggatatgggggtttttttggcataaaaattatttttcgagactcgagaaaatagcctgaatccgggactaagacacccaaatgccaatagttcgggatcagaatcctaaaacgatatgtacacagaaaaatagaacggccctaaacaaaaaatttttttttgtgtttgatcagaaaatttttttttgtagtagggcttgatcgaaaaaactgcccattcccgagacttttagtttctcccttcccaaattaaggcgagccgaacacgacaacgagaatccgttccggcctgaagagcatctttaccatgaggtggtggtccatttttttggggaggggaaagcgagactggacagtgtcggtcgggattggcatttaaattcccttccgtgaaagaaaaatccgcttttttaaaaattttttattagaattttgtcaaagtttaatcctttttaaaaatgtttgttcgaaatttataaaattttttaactc

SEQ ID NO: 19048 - DNA, 1592 bp, Heterodera glycines
tcgcatcagcaccagcagcacaatcagcagaccacgtccaccaccacgtggagtacgcccacaaaacggaacagtacaacacagcaacaacaccagttacagtaccagcagcagctacagtacgcaaacggtggcagtggaaggttagagaatggaattgcacagtgatcagtcagatgatcagagaagaagcaggcagcatcagagaagagaatggagaaggaatgatcaacagagtattttaattgtgtgtctgtctgtatattcagcagatagagagagagagaaagagagagagagagagagcgtgatcaatcagattgattagaattaatagtgtctaaccaatcgatgtatgtgtgctgcatcataaagaggacatctaattatatgcacatttaaaacggcctttttggtctctaaggacccaaaaaaattttcaaacaacttaatttttgattatttttctcaaagatatcattaatccaagatgtaatatatttttattatattcatttttcttcaaaaataataaattttgctttattttatatatttcttctaaaatggtttttcatatcaatttagctattttgaaattttagtataaatttaatgtttaacgaaattttatgtgcatataattgggtgtcccctaatcattagcaattataggaattaatttcgactttctttcttataaaattaattaatatattatcgtatataccgacttcgagagtcttgagcccactaaaaaaaatagtaaatttgtttgagaaaaagttggcattttgttaattcaacttaaattcatacaaaatgtcaatggccggccaaccattcagtttcggcggccccacaaagtgtacaagccacgaaatgtccaaaagagtaaaaacccacgaaatgtccaaaatttttcaaaatttataaaaacaaaatgagtctaatttggggtttttaggcttttcggggtcgctgaatacgaatataccctttatattaccccttgcctaaccctaggcccatccgaataataaaaaactcaaattcgagacatggacattttgtgggtcagcgtcagtttctgatgtgtaaatcggttgtcccgaaattttggattttttgtgattttcgaaaattaggccagcatgttgggggttcattgatcagttttttaatttcttggattttgtttgatttcattttcgttaacaaattttccctcatcactcgcttaagcttcttaaaatgtttacccaattcactaaataatttttccttttttttcttcacttccccccccctgaccttttaacattttttttttactttcaacccctagtttttcaaaaaagaattacacggattaattaaaaaatgcctcgttaaattaatcttaattaattggttgttttgttttttgcgatgagaaaatttttttgtcaggatgggactaaacaaaaaaaacaaataacaaatctctaacaataaaattttattcctcaaattcttacaaacaattttttctccaattttgtcattatgctttcatatattttgtttaggaggcgctggaaaatctgaaa

SEQ ID NO: 19049 - DNA, 2029 bp, Heterodera glycines
ttattattactttttttgagtcttgcagcagcgccagcgatatgtgaaaaatggtgttaattcccttaaaaacatccatgtaattaaagaattaattaaatttcttaaaaatttaataatatttttaattaaaatatttatttttaaatttattttttacttcagttagaaaaaggtccacaatgaaaaacaccatttgaagtggaaatttggcagtgaacaacgttaaaaaccattgagaagcatacctaaataaattgaaaatttaaattaaatttaatattcgtttaataaaaaattaatgtaaaattattaattataattgagaataaagtaaattagtaaatgaattaattttaaatatttaagattaagttttaaatcaattaaacaaatgaaatttaaaaaataaaaatttataattaaaaataatttaaataattttcagcacttacatatgcgtttcaatacccatttgataaaaatgtgaaaacaaatcgtgaacataatcctgaaataaaaataaataattagaaataattctataaaaataattaaaaatataaaatggattaattattgttaatttaaaattcatttcaattcattttgccgacttccacaagccgttgcaactgatggaagcgcaaatggagtgcatcgaagccggtcttgaacagctcgcgcagcccataatcaaacatgatacggaccagcacacaaaaggctctctcctctggcatctttaggggaaaaatggaaaaataaaataaataaaaattttaaaaaataataattttagggtcaagatccagcccgaccattctcaatccataataaaaaaggaaatttttttttaattgccattaattttttgactattttgaaaatccaaattatacatgagtttgtcaccaaaaataaagaagacagataaacacaatgaaaaataaattaattaattaattaaattataaaagcacatgcaacagaagtgaagcggcaagaaatgaaaggccctggcaatagcccacttcttcgtcgtacaaggaatacttaaatggaaaaaatatataatatatatatatatatatatatatatatatataattattattattattaaatttcaataattaattattagggcactgggtcgaggtgtcatgagtttttttttctggacttaagccgcccaggtctaggcacttttaatgaaaaaatgggaaaattattgtgcaaaaaataccgtttttcttgacaaattaatttcgtgaaaatgctcaaaatttactggctgccgcgaacctatcggcacgagcagtgaatttttaaaaattttaatctgttaaaaagcatcgagcaaaaattccaattcccgactacacctctcgacaaaggccgaaccctatcccttaattttttgaaaagcgctcgaaaaaattaagaggccgaagagcaaaaaagggtcgtcggaaggaagtgggcgttagttagacccccaccgcgatgccaaaaatttagctatgtctttgcgctaattactgtattacaattattatattacagtatcctaccgctttactgatccggtacaacgacttttggccaacttcgttggactccttgtagtactcatgggcggggaatgtgcggtgaatgtcacggagaatgaccgcatcttgaggacattcctgacaaaaaaaaagaaaagaaaaatgataaaatgaaataaaagatttttaatttttaataaattatttgttttgaaaaatcaaaagtaaaacagtaacaatgaaaaaatgaaaaaaaaaagtccaattatatatggtagtttattatattgtattaatttaattttttgttgtataaaatttttattgaatttcatttccaaaaaaaaataaaaacgtttatttttggaatatttaacttttcgaattcgaaatattttacaaaacatataaatggaataaaaattttaaaaaagtgaatattaaaaaattgaaaataagtgatagcttttaat

SEQ ID NO: 19050 - DNA, 2057 bp, Heterodera glycines
ccctaaaaaaagtttttttaaatttttattcatttttttttgggggggccaataatcaaggattgcccatcaaattccccattgttttttaaggaggggctgaacataaagctgaccgattacgtcaagcatttgtagccacatagtaaaagggaaacccataagcatttctagggtatggactaaaaaatttttgtttttagccatcgaactcgccaaaaactcgtataaagagggaggcacagtgaaaaggaactgccacgacgccggcatttcctcggtataaaatgggcaaatctctgctgtggatgcccatttgtttatgaaaatagactcaatgcaaagctgcctctcatcaatatcctttgcatgatatttagggatccgatcacttacaaaaccatgaaaacgccggccggacagaacatcagagtgcgttcgtgcatctccccaaaagttgaaacgtgagctgtttaacgactgtattcctcaaaattaggtcgagatgggctcgaatcgccggttttttaaaaattcaattacatgaaattttcatagtaaaccgtgtttttttaatgttctgggtgactgatcacgaataatatagctgttttgcgacaattacgccctcccattttttaatttgaatttttgtcttcgtttcaactttcaagtttagcggtacagctcgggcgtgcaaatttggtgaagtgctcttctcaatgcacggcactccggtggcaccagtggcggggagcagcaacggaacggagggggcggtgaacgaagtgggccaagtcattataaaacaccacttgagcattgtttacatccaacatttggattggcccaataaaaacgaaatttcaaattacaaatttataaacttcctaatttaggcatcctaacttttttcagttgcattgtttttttgttgtccattttcagtggttgcagcaagaagagaatttgacgccgcaaagtcgggacattgtggcccaactgaagaaactgatgcatctgaaggaggcgaagaaagaagacgggggagaagcgacgggaaagcaatgaaagaaaaatggggacacgaatgtgcatttgtttattgaattttgtgtacaatatcgaccaaaagataaaaaagagttcatcacgctgaattggcttttcgtgttggttgaggcgagcccgaggagacaagctcattaaaaaaagtttacaaagtcactgatgactcaaaattgtccgtttttgaatttgcggagacaaatgatgacataattagccatgcgttttttagtcatttctattctatttttagtgggaaggacatgccaatttttgaagaacatccaaacatttattacaaattcttcaactttctgtggtccattcattgtttcaccatcaaaaaaagcgttgtttatgccgattcggcagaagccttcttcttcgactcctcaattttcttcttttgcaccgcttcggtgagaagcggcacgagtttgccttcacgggccaggcatttcaacagctcgacgaggaagggcatgtaattgtgtcggcgccgattgttctgatgaaatggggagatggaaatgatcaaaatcaaaaattggcattaacgggggggggggagaggagaaccagaagatcgcttcttttttaattaggcgcagcgggggaaaaatttacttttttgcctgtttttattgaacattttggcccaatcgtgagagttttgggtaaaattttttgaaaaaaaagaaaattttgtgctatggtggcgccatcaatataatggcagcggaggagtctgatttttaattcataatgaaaaatgggcataaaaactgtataagttctcgaaaaacttgcccaactttccgcttttttcaccctttttgtcccccgttcttttttaatgtcaacctcaattttgtagttcctgaacttttcctcctcgccactgatcaacatgtgcagttcattcagttcctttgtcacttcgtccgagtccatcccaacctaaaaaaagaaattagtaattatcaagg

SEQ ID NO: 19051 - DNA, 1170 bp, Heterodera glycines
tttttgagatattattgcagttattttttattaaatgcaattttttgtgtttttgttccaaaaaataaacgtttttgaatatttttgtgtcatattttgaagaaaaacactttaggaaactaatggaccagaagtgccgctgccgccgggcaggcccgtatctacgcgaaatgaaaaattaaaaaatttttcatgaaaaaatgagtatatttttggaaaaatttgtccgttttcttatcatatggcattaaaatttacaaaaaaatttacggcgacgcctatccggaccccacaaaatggcaaacattgtcattttaagcacaaaatgcgctacaaattcctgccttttcgctaaaacttttgaaaaaaacactggaggaaaaaaatttcgacccaaagagcaaaaaaaaggctcttcgggtgccctccccgaaatttttttttggataggggcaaaaaggacacaacataccgcgctcagctcggcaacccgctgctcgtatttggtcttcaaattcggcaccagcgccatcaaattgaagtgaatttcgccctctgtgtaccttaaaaccaacaaaaaaaattgtttttttttttgccaattttggcattttgaattagccaacttttgaatgcgccgttggatgaatgggcgcagcgtgtccacccaactttcttttcccggctcaatgtccgccaggcaaatgggcgcctcgcgcattccgtccaattcgtaaatctttccgtccaccggcacgtaagtgataaagtggaaattgtcctccgccttggcttttggctgaattttatgcataattatcataatttgctttgtcaggaattgcaatggcattttttcttgggatttttgacatttttaattttcaaaatttgaatgaaaacagaaaatttttcaagagatttacggcaaaagctaaagaatgacggtaacgaaattagatttttcaaaatgtttaaaaaatccgttttaaaaactgggaatttctagtgtaataatcagtattctatctaaaaactatgattttttcaaaggaatgaagggcaaaaaaattataaaaaatggagaaaaaaaactgacgacgtccaactccacaaagtgttcccgggtgaacgagttgtgcaacttccgaaatcttcgctgttgctcag

SEQ ID NO: 19052 - DNA, 2971 bp, Heterodera glycines
tttttgcttcgccttcggcttcggcttcgagtgctaagccgattttcgcccagccctgatccggatccgacggaaaagcgattggagttccactagggggcgcacattggctaattcataaggcagatgggatggggagaagggaccgccccaggccaaatcccgtgtagcactaaacgaacaattaattaatgtgataaatgatcattggtcattattaatttcacttagggctatcgaatgattgaaataaaacgaaaaatctcaataattataattaaaaattttcattaaatataaaataattttgatcatcaaaaattctgaccataaactttcttataactaacaaaattaagaaatattgaatcattcgatagcccaaagtgtttcctattaagatgcaaaatttcaaaatatttcgctaagttacaaaaaagttatgacaaaaaatttgaaaacctggttccttgagtacttttggccataactttgttcaaacttggcgattttttttttgagattttgaagactaatagagagtgttagggctatcgatgtttttgagcaaatttatgagcaattttttgctaaaaattttaataataaaataaacaagcttgtaatttgtgtggggctgagtgctaaacagaattaaattttggcgcaaaagtggcatttccattaatagccatatttatgacaaaatgaggcaatgaatggcattattaaaagcgcactttgctcaaattccctgttgaacttttcgctgttgcacaaaaagcctttgattgtggcgaaatggcgttgcttaagccattcctcaattgcgctgctctgcttttcgtcctcttttccctcctccgactttcgccgaatttcgtgccattctctgtccaccgttccgttcggcggcggcgatgccgtgccgtactgtcggcccttcttcagccgttccagctttttgttgcgcagctcgaccctcagcttttcgtccggcattttcagcttctgttccaccaaatgtttggacatttgcaacagaatgccaatttggcgctttttcttcggcacttccacttttccattcgcctcctcaatgtcgaacatttggtcataaaccatttcgtagtaccaccggttctgcttccatgccatggtaaatcttggcatcactttacccttttcctttttcttgtcatcccataatttcaaaacatcgttttccagccaaagcacccaacagaaaatgtcagtagccaattttagtgcctgacgaggttctggggaaattgttgtgaaagcatccaggtaatgcttttgtagcaaatcggcacttcgaaaaacttaaaatggaaatttgcaaattgatttttggtcattttggtatggttaatttgtttccaggcttaattggactgtattttaaaaatctaaagaaattttaatgcgttggagccgaaagcttttagtaagaaaaataacatagaattttcatatttgttttaggcttttttaattggtgctatgatgaaatacgaaaagtgcaagtgatcaaattaaaagaaaaatattatttaaattaaacttgatataatatacgtatatatatattatatatatatatatatattgtttaaaatattcgctacatttaaaatttatattaatcataatacgtgttgagccgaaatttaaagaagcattcattaactttggctacaaaagcggatctcgatcagtagtttttctctttctttttcgaaattaattttgctctcctttaatgctacatcgagatttatggaaatcatcgtttttcaatttttggaattaaaattaacgcaatgtgaaaaaatatttgctttatgtcgcgaatattttaaataatatatgtatattgttaataaacataataatttgcttttaatttttaaaattaaataatttccttttaatttgatcttttgcacttttcgtacttcgtctcagaacgttttaattagttgaccaaacatgtcagatagcgaggtatgaaagttttctaattttcttaataatctctctgtcaaaatacatttttatttttgattttattccattttttaagtttttcagtgaaaatgtccaaatatgtatttgactatggaaagcatgcatagaagcattgaaccaagctgaaaaaattgctttttaattgagttaaagcccaaacaaatttgcatttgtaaaaaattgggaaaatccaaaaatcgggccttatttttttacctccagggtccgtgtaccgttcattgttggcaatttcaaattctatttcggcttcattcatacacaaaaatttgtgcaaccgcgtcggaccaccgcggagagtggccaattgaccccaaactatcataaaatcggaatacaattctcgattgccttttgtcatatatatccgctgagtctcgaccactgattgggcctcctcgcgctgctcacattcgctgggccaccatttgtcgatgcttttcagaatggaaacccctgaaaaaaggaagcgaaaggaaatgagccattaaaactcattaatgctttaattaatttgctcattttgcattgcttgcctttcttcgggctcaccactttgttcggctctctcagaaatgtggccaatttgctcaccatacaaatgcctccggccgttccgatccgatcactttccaacgcttccattttcaccactttcgctttgtttataatgtgctgcccaatttctgatccgttctgtgcactttgccctatgtcttgctcatcctccgctaactttgggtcggccaacaattttctgaaaattatccgcctcagttcggcaatggcattctccgagttggtccgaaattggaattgcgttttgtgggtgtccattcgcaatgcctttggcattatcactgaaaaaatgaaaaatgcaataaaaaaatgcaattta

SEQ ID NO: 19053 - DNA, 2251 bp, Heterodera glycines
agtaaaaaactgatttccatattatgtatgcaatacgtcgtgaatcacatttaatttttaaaatatttttggaaaagaaaaataattgcgtaataacatttaatgcgaataaaacattaaataaattcatttaatgcaataaattcaatttccaaaagtaaaaatgaatttgtggcatttattatttattatatttttctttatttttttaattaaatccggcaaaatccaaccaaattttgaagaaatatttggccaaagatgggacaaaaatgaaagtgaagaaattgtgataataaaaattgaacaaaacgaccaaaacgagcaaaatgaaactacgggcattgatcaaattggtggagaaaatggaacggacccaaatgatcaacaaaaaagacaaataattttgaaatttgaagcaattaaagaaaagttaaaggaaaaaataatatacaaaaggaaagattatggcaaaattgagagaaaaattgcaaaattattaggagcaaatcggcaattaatacaaaaatggaaaaatgaattaaatttaaataaaaacaaaattaaaaaggaatttatgaggagaaaaagcgcaaattcattgaacgatttgatgaatttaaagaattatatggccaaggcaaacagaaagaatttgcgaaggaattgggcatttgtgaaagaaacatttcgaaaatggaaaaaagaattgttgccaaaatacaataaaagtaagcgaatttctaactttttaaaattatttattattttcagcgctaattaaaccttcaaattatgacaaattaaaaaaagatgaagcaatattttgaaataaaagaaaatttgaattttatttgtttaattaattaaaaaagcaatttacaaaatttgttggatatgaagccaattatggtcaattaattattttttttgaattatgtgcccaaaaaaaaaaaatcattttgagtaaattgctacactttccttttaatttattttttccataaaataaattattttataaattattattttttgcaataattatttcttaaaaaatccgagtaaaaaaattgttttccatattatgtatgaattacgtcgtgaatcacatattaatttttaaaatattgttgaaaagaaaaataattgcgtaataacatttaatgcgaataaaacattaaataaattcatttaatgcaataaattcaatttccaaaagtaaaaatgaatttgtggcatttattatttattatatttttctttatttttgtaattaaatccggcaaaatccaaccaaattttgaagaaatatttggccaaagatgggacaaaaatgaaagtgaagaaattgtgataataaaaattgaacaaaatgaacgaaggaattggtcgtcataaaatatacaaatggaaaaaagaattaaatataattaaaaagatgggaaagagtttttatgaggagaaaaagcgctaaattcattgaacaatttgatgaatttaaagaattatatggccaaggcaaacagaaagaatttgcgaaggaattgggcatttctgaaaggacattttggaaatggaaaaaagaattggtgccaaaataccataaaagtcaaagtaagaatatatttttagtgaaattaaatctaatttttatttaagagcaatatacaaatgaagctaaattaagaaaaatgagaaaatattacgaaataaaagaaaaaaatcagaaattgagcgatgtattaattgccaggaaattggaaattggatcgtcaactctgaaaaatctgaaaaccaatttactacaacactaattgatcagttatgattgaacatgatggatgataatatgatcacatcgggcctctccccccgggcagtatctgttcccgagacctatcgggtagagaaagcctaagaattgtgtgattttctttcccggaataaaggcgttactgttgcatactgtattgaaatggggaagaatgggatacaatggagctacagtaatccaggagattcatgatcatggtttatcaaagcataatttgaaactctaaaaaatattttggagggaatcaaaaactgacattttttaattatttgaaaataaaaggaaaatttttcgattaatcattcttttttttttgtgcctatttcgcaatttttggggccctttttcttttcggaaaaatttaccaaaaaagtttaaaatgaaaaattacctgagatgaccgagaaaatttca

SEQ ID NO: 19054 - DNA, 1165 bp, Heterodera glycines
  unsure (1)..(1165): unsure at all n locations
aatgaatggccgtgtctatttttgcgagcttttctctgttgagtcggagtcgtcgagtttcgccttcttggccacgccttcgtcttcggttgtctccgcctttttctgcgcctcctcctcccctccctgctccatcttctcttctgccttggctgcctccttcgcaatttgctgctcgtcgtcgttgtcagcagtcgcttcgctctccatcgaatcgccttcctttttgggctgtccttccgtcctattcgcctcgtccccttcgcgcatttcggcatcggcgttttcctctccgcgaggaatgtcctcttctctgagtgctttgtgtccttcggatgagcccaactttgtctcttcgtcgccatcgtgttcgtcgttcagtttggtgccataagtgcgcttacgagctacaaaataaatatgcaattcgtgcaaactggacataaacaatctgactggagatacacagagaacgtactaaaacaaagaaacctcgcgagctgtcagtcggaaaaaaaacatatacattggtattggataaagcagtcgatttacattgtgaatttttaattttacggacctatgcgaaagataaaatattttggggcctcaaaaattagaattcgtttttagggaactccgattatttggtttttgaaatgctcttaccgactggctttgcgcccgtctcgtcctcccctttcgtctgctcgtctctttccttttccgccgttgcctcgtccgtctcttcatccgttgtctgtttcgacttctcttccttcatttttgcatccgtcgaagttcgcgactttcttggcgactttttttcatccgctacaaaaataaaataaatttgctattgtttcaataaatggcgaaccttttccctcataatacttctccaaataatgcttcgcctcctcaaaagtgtcaaactttttgtgcattgcgctcggatagcccttggtctaaaaaaatattatttctttaaaataaaaaatagtctacatttttcttgacagtttctatgtccttgaatatgccaacaacacgaccacgagcgacagcaaaaaattttgtgaaggaatcgtccacagacactgaaaatgaagtttcggaggtgagaaatatggctctattgcagttttcacatcataanataatt

SEQ ID NO: 19055 - DNA, 1608 bp, Heterodera glycines
catagtcggactcggaaagcctttcgtcgctgcttgggcctcttggtaactgccgaacactccacgctgatgaccccaagcaaccgcataaaaaacggacggagtggaaggcgctttcggttgatgatcagacattttcagtgataaaataaatgggtacttttaattcactaaagcatatataaagcaaaagtaaaaaatgaactcgttaatttgattcacaaacaattgagaaaaatgaatttgtcgtttcatatgtattttataaaaatgagtgtaaaatagcctttctgataggatattctgaatcattgttaaaaaaaagtatcaaaaaccaaccaaagaaaatttgttggtcgataatatacacataaaatgttggaattgaatggaaacaattcataatttgctaaaaatcaatgcgtcactgagttggagcccatttgttcagcaatgaatgcattcgccgtggcaatcgctgcttctttttgccttttcttttctccgagttcgtcccgcaccgccgctggcgctttgcccaattcgccggcagtgacttcccaaagaattttgtccacttcctccttaaaaaaccgcaatatgataaattaggtaattactataggttgttttctggcaattgttaatagtaaatttactagtcccataaaaaaggacaaaaagattgggaaatattgggggttaccgagttcgcctaagtaaaatcttcccttgataaaaacagtttacctgtgctaattcttccatattgtcaggttcggtggactccattgtctcctcgatgatttcctcgatgattcccatctaaagaaaatgtcaaaatcgaattaaaaattccgtcgctgttaccttagtcatttccttcgacatgtctcgcatcacttgcataacttcgggcaccttgggcaaaatgcgaaaagtgcaattccaaatgggctaccttcaacaattgttgcatgaccttcatcacttccgtcgactgttttagtgtgccggccatacgaatagtggccaattgatgctgcatgttcatgtttatggaattgatttgtgcgattgttccgtggagtttgctcactgacttgaaaattaaacgttctactagcaaaaacagtttgattaaaatatgatgattgaaattcacctttctcgagttgactattgacttcgccaacagaatgcacacttctctgtccccctttttcgctgctgttttgatttcccgtttcaccttaaatttatgaaactctacagtttacgcatccaatcaatgccatcctcagtttcttaaaataagacaataaatctttcttatttggtcaatacataattagtctcgggaccttataaatacaagaaaaatacaagaaacgagcaaatactggcagtaaaggaaaaatacactgaaacttaaaattcaaggtttttcgagtaaattcaagaataaaggtagagccctgcttcatattttactttttcttcctcgcgttggatggcccccaatttgtcggttgagtcttgaattttcaagccttagcttacgtagaagctctcggaccttgaaaaattattttgtaatgctttaat

SEQ ID NO: 19056 - DNA, 1306 bp, Heterodera glycines
ctccctcccctcccctctattttcctccatctctctctcactgtctggcaccctctcaattctcctctctcttcctcccctttttcttgcctcttcactctctctgttttcatatttgttgagcatcgtttggatgcgcagttcgaacttccgttcctcctccttctccctgggagggtattgtcctctcgtcggctgtggcactgccaatggtttctgtcgctgcccaaaatattccgactgagggacctgatcagtttcagtcaggtgaaagcctttgctttcgtactgttcgccctttttctgtacttcgattggccgcaactttctttttgccctcaaagcgttcagaatttgaagccaacgcgcgaagaatggccatttgtgacgatggacaaattgaatttggaagagagtgttcaggaaatcgggcgaaggactgagctggcaaaagtgccgaattggcggtgcctaatccgtccaaagttcgcttccgttgcgttcgcttctccgtcactttaccctttggacgagtgccctcaaactttgcagcgccccgtggcaaacgctcggcaaaaagtaaccgccctcgagcagaaggcaaagagggacgccctgctgtgccaaaaggcccgtcatatagccgaagccggcgggggacacttccatttgcccttgggggtcgccgattcctgcgtcgaagccgcaggacacgaggacaagtccgggacgccactggtggatgattggaaggacaatgcagtggaagaaagcggcgtattcggcgtccccacaaccgacggaattcaatggcacatttatggtgttaggatctttcggaagaacatcgctgttggtctgacatgaacacgttttgcttacattggtgaactatggcactttcggggagctcgggccaaaaagtgccgcgttcaaagcggtgaatggacagcaaaagaatgccctccgggtccccctccacacaatattgcgtcccctggtgccgcgtgcacatcccaatcgacgatcagaaccctttcaacgcccaatgagcgagctttgcgagcacagatcgcaacattattcagcagacagaagccgcaagggtcgttctgcgaggcctttaaaaatgagaaaatccgaccaatggcatttgatttccttttgtcgttgaattgggcatttcccccccccccccgcgcatttgcccttttacgtgatggcccggcggtcgaatggccacaaaggcatttggggcttcactgaagagaatggatgggaaaggatagctgcactttgctccttt

SEQ ID NO: 19057 - DNA, 2555 bp, Heterodera glycines
ataatcatcaaatttgacccatttgggccaactgacatattccgaactgtgcaccaaaagaatgtctgagaggggacactccgccggggggaggcgaacgcattgggcgagcagcggacgatcgctctgcgaagaaaaaggggccaatgaacggagcgaattccgaatggcaaatgcctcgattgtgtccagaagggcacccaatcggtcgggcttctcaatgtgatcggcgtcccactcgcatttgtgttgcaacatgcgccgatcggagacgaaaaaagttggcggaacggacatttttgggaattcaaagcgaaaacggagggacaaaaaaacaaatgaataaggaaaaagaacggaaacggagaaactcaacccttatcaattggtgacagaacggaaaaaggacgaacaaactcttttttattacattttcaaaccaaaaattatttgcctaacgaaaatgataaggaaaagagtcgttttttggagaccaattttaataaaaattaaacaaacaaacaaaaacattttgcaaagaaaagaaaacaattttaatttgctttttctccaccgttttatgctgactgtgagaagagtcctttcaactgagaaaaaagtcggacatgttcgggattggcacacactttgaggaaacgctgaaaaggagaaaatagccttactcgacatttaaacaatttccgctcaattctccccagcccacccccaagagggtttaatggttcgggtatgggacgtaatgcacccattttatcaccttcaatttgatggtaattggggcgacgattggtgcggcggcggcgccttctcgagagttcagcaagttaagacaatcggtgatcagtgcgaacagtcgctgggccaaatgagcacggactccggcgtcgtccaactgttcgcccgacaatcggagcattcgttcggcgttcggttcgcgtgttcgacctttgcccgccgttggccttttggcgtcgatctgtgccaactcatccaaaagctgacaaagaaatgggaaaatggaagccaaaggaagacaaaggcacctcaacagcaaaggccaaactcgggacgaacacttcggactctctttggatgtccaaaagcatttgaatcgaatgaattcgcaatgggaagaatttagtggaagggaaaagccttaaaattggacagaaaatgggaaattaatgcagagcaataaaagcacctccaaagggaattgatcacttccacgagcggatggaccaactcatagaaccaactggcacttttgtcggacgacggccgaaagcgtttagagccttcgcaaatgaccaaaacccaaagttgaaggcccttgacgaactgccaattgtacacggtttggatcaaatcctgaagagccaaccaaaacgataaatataaatgtgaatgtctttttgcacctttcgtttggcaatcattgcatttcgaaggtgaatggcgaactggcggatgtaaacgaatgcgtattggtaagcttgggaaggatggacaaaagtcagttcggcgagagaacactgacaaagggaaaggaagcgaaaaagtcggcaaagtttcggcggaattaaggcggcacctgcataaagtgaatgaaaggcaatgtttcatcgtcaatggttttgcaattggcgacatacgccgtgtaacaattctgaacattaaaagcattaagaaaaataagtgagtgccaaggaaattcggactttgtaaacggcggggaaacactcggagtcgagcctggcaattttgcacaacgccacgaaggcaatgcaacggatttcttccgttttgcgactccaaaaatgggtcaaaaccttgaaaaatcaaatctctatcaaatggtcaaaatcggaaaggacctttatgagggatttgcaaagcttggggaaatgaaggaacaagtcgacgagatcagtgaccacgcgaagggtcgacagcaaaacttggacagaatcgacttccatgagaaactgaaaatggggggaaagggggagagattcaaagaagaaacccgggaaagttcgaagatgggtcttacaatttgcactgccgacagaaaagactttgtcaatgcgccgtatttgtgccaatgtttaaagtgagttgattccctcttcttcgggcctctctgcaaagctttcagataaactcaactcgaaacactgagagggcttattaaggaaagtgttaaaaatgaagatgttagtacataattcttcataaaatttcaaaaaaaatggtgaaatttttttttagacttcttattgggttagtaaactactcactctgttcgatggtcgtccctttttcccgtcgattggatgcaacaatttgaacaaacatttgcctacacttttgaagcaaagtcgaataatgccgtcgaacaccaaaattggagggattaaatccatacgaattttgtccatttttacctttttctttctccacggcaaattccgtctcctccaatttcaattggccttttccttcgcccactcgcgcaacgcatccaaaaa

SEQ ID NO: 19058 - DNA, 1551 bp, Heterodera glycines
ggaaatttaatgggatgtatgaaataatgaaaagttttttttacgaaaaaataaaaacattgaaaaatatcgacccaccaaaaaccaaaataaatcatatacgtatttacagaattagaacccccagggggttctattttttacctcaagagggaggctctatttcagggggttctaattcagaaaaaaagtataaataaatttttttttaaataaattaaaaataaatttttttaaaattcattaattacaaacgccaaccgccaacccatttaaaagtctataaagatgccgtgcccataagatttttgcgaggcgggaggcggtatttaaaagattttttttataagaaatttgtctaaaattttccataaaatttatttatgcaaaaaaaaaaataggcaaaatgtacattagctaggaaatggaaataatgcttcttcatctatcaaataattttgattggcatgcaaggaatgtggtggagagacacagtggtgaaagaatttgtgttgtgaaggcggccgcggttttattagggatttatggatggcactcatctcattaattttattaatgcaaaaaaaaagtgttggcgttgtgtggttttttggcttccggtttattgtaaatatcatcaataatttatttgatgccctgatcactgatgttctattttgagatgccttcctgctggtccaaatggcacgctctctcaagtgccaagtgatcagcagatgggatcaacccataaactgacacaaaagtgatgggaaaaaaaacttggaatccatcaaaaatccactcaaaaaaatggtaaaaccatcaaaaatccaaagtgatcagggcgactcattcatatattgtggtcaacgatgatccaaaaagtgaatatcttcgaaaacccattgatcaaaaaagtgtccattaatattgtacatggaacaagaaatttaatcaaaaaattccccaaaaaattgcatattctaattgacattaaccccatatgcttttaggcaattaaaattttgccaaatccctctccccacaccgccgaaggcttaatgatgttttcccaattaggctaatggttttttgtgggcatcaaattaggtggccggccatgtgcggatcaaatggcacaaatgccaaaaaagttggtgcggttttgtgtgtgtatagctcatagtgccgcccttttccgactatggcacttttttttgttgttgtatgccgtgccggtgtgtccgtccgtctgtggtccatgcgctccatgcctcgcgctttatggcaataatcccgcacagagtgccggtgccacctccaaaaagcttacactaatctcgctagggcagggggcgaacttccttccacttggcttcatctctctctacaaatttataaaaaatattttgccttccgggaaaaaacctatttgccccacccctctggggctataaaaaataatattaattgtttttagtgggcgttaattagggcaaagccaaaacaacaaaaattttatttatttatttttattttgactctaga

SEQ ID NO: 19059 - DNA, 1091 bp, Heterodera glycines
ttaaattcaattgaaataaattaaataatttaagtttatatttcagtgaatcactaaataaatatacaatgaatttttccaatttttatttttttaacacctgaaattttaattaataaaacataataataataatatcaatgagataaaagaaaaacaaacaaaccgtacatatgataaaataagctagaacacataacgaatgaaaaaatcaaagatcatcaatatatgcttaaggtatttaataattatggtacaaaaactgatcaaaattgttttgttggatagagagagatcagatcaacagtgatcagaattgattagtgactgattgactgattaattaattatctgcttttattgcttttttgtgccgtttccattaactgttggcaaagcggtggacgacgcttcttggacccatggcgcgtcttcttttgctccatcgttcacaattggggcaaccgcgttcacaaattcctcataatcaatctttcaaaattcaaattaaacataatgatttttcccactgtttaaaaaattaaatattttagacttattattttttagcaagtttaaggaattattccattcttaaaatgaccaaaaatgcactttaagtttgcagggctactaaaaagacaaggattttatagctattcctaaaataggttcccattttaattttttttttttctaaattaccgtatttcctaaaacagagccaacggggggctctgttttacatgccccctcaaaaggtgagcttttagttcctatttttcataatttttaatttttttttctccgatttttttaaataaactcattttaaagaagcttgcttatttaaaaaatatatcatcaacagcagtcttaaaaccgatcaaaactgcactaattttaaaaaagataaatctttaataaaaaatccatgaaaaattctacctgttcatctccgtccttgtcaaactctttgatgatttcgtccacttcctcctcgctgaacttctcgcccatggtggtcatgaagtgcctgaactcttgcgcagtgatgtacccgttcccgtcctttcaaaaactctgaaaat

SEQ ID NO: 19060 - DNA, 1530 bp, Heterodera glycines
tacgtacccccgcgtacccccccccctgggaccgtccctgccccccccgcgccctctaaaatggcaactatgttttaccacagtcaatttggatgagtgttggcgtcctgtttattcgcccaaaaatgtagaggaatctgtcgaacaattgcgcttgtattgcggaaaaatttggcgaaaacgaccgacggcggaacgtacgaatcttaaaagttgagaccaaaaattaaattaaccagaaaaggaattttgttttttagaaaactttcttaatagtagggccaatcattgcccccgtgaagatttatccatttttagcgaagaacttttcttaaaaatttcaaaaatatttttttttcagttacgtcagtgtctttacatgcctcacaagggaaccacccgaactgtaagtcggaaaatccatatgtattatatctcattggatagagtagggtcgacttctattgtgaaattttaatattacgcccatatagcaagaaaacacaaagatatgaggcctcaaaaaacgaaattttgtctgtgttttcaccaaaaattggtggctcagttggttaatttgcatttttgaagttcgtgttcaaatccaacatgaaaataaatattttttaattaatgtaaatattacaaaacaatttaaaaaagtattttttaaacttaaaaattgtaagatagtttttctttaacaaaaatatgcaaaaaataacaataaatgtaaagtttggaattaataaaagtgataaaaactggaaatggtcccttaggcgttgattttgttttttgaggcttcataactttttggtttcttgctatgggaacgtaatattaaagtttcagttatagcctttttgaaaattatacaaaatttgtccatttttgtgaaatttttaatttcggggggatggaaaggcacctgccctccacttccccttggatacggacgggcctatccccgaaaccattccatttaattgtcattcacctttcccatttgctgcagacgacagtcccccacaatgccttttatgcgaaaaccacggcccgacttcgccgaagtgccttaacagtaataaccagtaaatcaaaagcgaaaaatagttcaatttagattatgctttaaacaacagaaattttgcgggggagggggaggctaaggaaaaaatttgcttgtaaaaaccaagggtctggggctacgcccttgcataagctggggatttcagaaaaaaggcaaaaaaaaaaaaaaacatttgttacaagggaaccaatcaaaatgcatttgaaaatttgtaaacgtaaatttcaatttttcagatctgtgcgtattttctttgtcttaagaatttcaaaaaatttacagttattccttaaataatttttttagtataaattttttttttaaattccggggtttggaaagtcatattctttggttatccgacatggggaggtgataaagcaaaaaagaaattttctattgtttttgtttgtccttaccgccgccgtttgcttgcc

SEQ ID NO: 19061 - DNA, 1293 bp, Heterodera glycines
gggggggggggtccgaatccgaaagtcaattcttaggggtgtatttttgaaaatattcgcccgattcttaggggcgtatttttgaaaaactttcgcccgaacgaccttttttttttgctcataccagcgacgctgggaaaataggggtgtatttgaaacgataaattagcattttttccatcgtttacacaatggattttgaaatttagctattttgacggcttttgctccgcccctggccgccagcaaaatgtttctttgtaatttggcgttggaatttaaaattaatatattgctttcgttatgataatttggcgttaatttaaaggtactcattcggtttgtatcccccttttgggtcaaatttttttttttaatgacccaaaattagtcaataacaactgcgttttttaaacgcggtgcgtaccttggaatggcaatcgatgacgaacggcgatgcccgccgtctttgtctctgcgtcctccagacagtggcgaacaatggtaacgcgccgagcgaaaaggcgagcgattgggcaaacgacaacgacggcaactgtccacgtcgtcgtcgtcgtagtgtcgacgcgcaggcgaccgcccgcggcgatattcggcactgtaaattcgtttttttttgcgtcacatttcattttaaaattttaatgaattggcgccggcggaaagttgattttaaaggaaaattgttcgtttcttgaacatatttgggactatttgtgagcaatgggtggggaaatcggaacactggtaatagctatttaaaaaaattgttttttttttgttcacccgggggttttggtgcttctgatcagaaatatgaaatcagattggcagatatcagtttttatttggaaaagttaataattttgattgttctactagcatctaattggttaataatgatttccaaaatgaatgatttttgcaaatctgccatcatattcgttgtcatgagccccgaaaacccccggggagttagccttttcataacattaaaacaaattttttgtgaatcccagattctcaattattacgtaccttggaatggcaattgaaggcgaacggcgacggttgtcattgtctccccatttgttgtgacaacgcgacgaaatttgggaccggtgacaaaaagaggcgtgacgaattggcattgataaataaaatgaatggcactgagcaaaataaatctttggaaaaaacatcattacaaaaatgggcgcaacgaagaaaaaaaaaaatgaatcccagcgaaaagcaatgtttaaaatactt

SEQ ID NO: 19062 - DNA, 2521 bp, Heterodera glycines
gagaaaaaaacattctctgtaaaaaataaattaaagaaaataactataatgttgggaaatatagccctgtccttatttgtaaaaaccgtttttgtaattagttattttaaccgtacttgtattcaaggaccattccagccacattttgacttgcttgtgatgggacaaaaatttttggattcggtgacgcaaattatggtcaatggaatacaaagaggaaattttgacgaagaattaacaactaaatttgataatgaaagctttttgggcattttgtgctttaacgccaattttgaatgtgaaatgaacgacaattttggaaaatttctgagcaatttttgccatgaatttaaaactggaaaaaatctggaagaagcaattgaaactgtgaagaattctttgataatactagcaagaagcatcacaattgagcaaattatcactaaggaaagtatatttcaaaaaattgccaaaaacgaattttttggtgccaaaaatgcggaaaatattgcaaaattttttgaacatgccaattctgcgtttcgcctaaatttatcggcacagttggtaagaataaaaatttaaacgcaagtttttaatttattaaaaaaaattctatctttttttagtttgtaatattttaaaaatgttttagcatcattttaacaatttaatgagtgcatccgaaaatgtgccatcgacaaagaaacgaattcgtcgtatgatacgccgaggttttagcagagcaatggaccaatttcaaaatagcctggacaactcacgatatcgccttcgaaatgatcggaaaaaatgtgctttctttttggcacttagtgtcgttttgctggttggcattgttttcacgatggccaatttggccaaaatcagtgccaatgccagccatggtcaatgggcatttttcatcctgtttttcaccatcattgtcacttatttcattatgcatactgtctcatttgtacttttgtgtgttcaaaatccacatcatcaacaagaagaacaaccggaacagcagggccaagaattaggcgaaataggcaattagagaacggagaagcgagtacgagaagtgcaagactgaaatggatggcactaattggaaaatgatgatatttttaaataaaaaatattttattaaaaaatattaattatgtcaaagatattcattttttcatttggttaaggtttttagtctatataaatccatattttgggggtttccgggaataaatccatatttcgtcattgttagttaaaaaatgacaaaattttgcgcaaaacttatttttgttgaaaaatagtatttctgccataaaattttcaaaaccgcacatgcttagcctggggcgactatcatccacgtattttgtttggcatttttcaatttggaatggcaaggcttaggggatgcatttacccatccagaccttcaaatgggcaggggggggggggcttctgattccacatttggcatgatacccttgcccaatttggtatggcatccttaaagaagggaggcatttggcatgccacaggacgacttctaacaaaaaaggcgtaaatttaaaattttcaaagtttatttttgggtcaaaacttttttttaaataatgaattttgtggaggaataagcaaatggtaaatttcagtgcattcgtgatcaaaaaatcagatttttaacaatttttttttgcggcgcattcgtgacatttctgacaaatgataacagtggacatggattaattgagtttaatcctctagctgactcaatcaatgtttgacttttgggaatttaattcattggcttttcagatgaacccgccgaccacttttttgctgttcgcaatttgctttttggcttattattgccacggaatgaaaaagggaggaaacagtttgtcggacaagttgaaaaagtgattatcaaaaaaaggaaaaggcgagaaaaatgccgaaaattcaaattttattgaaaatactcaaaatgccgaaagttcgaatgccgtggaaaaggcaaaaaccaaagaagtgaaattgtatttcgaagaaggtgctccattcacacttaaagcattccatgatgataaacttttatattcgcgtaaaacagaggccgtacaaagtaaagggtggccaaggccaagaactatggcacaatatgtggtgatgcctgttgatggaaaacaatggaacggtttggctgaccatggaacgataattttcaaagatggcgaaggaaaggtaaaaaatatcaaaattccgttgataaatcaaaaaccaagaatttttaaatattttttaaatttttaacatttaaatccaacaaactttaaaattttataataataaaaattacatgttgtgcccataattcatttttgtatacaaactttttgtcaacaaattaacaaatgttaaatatcataaaataaattttagtagaattattacatacaatacaatattttttcttaattaatattattgcttttgctttattatt

SEQ ID NO: 19063 - DNA, 1149 bp, Heterodera glycines
  unsure (1)..(1149): unsure at all n locations
aaatggaaatttttggacaaattttttttttaatttgctcaaaaaggatcacaaatttttgtttttgatatcattcaaattagtttgttaaaaaatcgaaaaatttcgttattccaaaaagttagatggccaaaaaaacgttcgatttttttttttttttttgagttttcctggtcatatatatttttttgaaatttaataaaaatcaaaaaatttaaatcgaattttgtcgaaatggacattgtccatccatatcaggcatgtaagcagaaaaaattgagaatccaaagaaaatttttttgctgttcggtcaaaaaaaaattttcggtaaattttgtctatggcggtttaaatagcgccgcaggggaaatttttttgcaaatttatctttttcatgaaaaaaaaaaaatttttcatttctagggggtgagagaggcacctctctcctctggttacgggctggggctgctggtcctcaaacatacagaacccacaaaactgatcatccgttccgatcgatcaaatttcaaccgtacaccaaccgaccaactgatcagtctaccgtatgccaataccatcattccaacacttcctatcacaaatcttccttctccgtctgccaataacgctgtaggttgttcatgaagcccgttttctgctgcaggcgttgcagctcgggcgaacgcttgtttttctccatctcagctcgaacttcggcttcaacttctttgggcggattctaaagaaaatttaaaaaaaaattaaattttatttaaattcccaaaatttaaaaaaaagaagaagttttggataattttttaaatattttggggctttttcgtgaaataattaatgtattttttctgtcattttttgttaaacacaataagcaattaaatttataattaattcccttttttgatcattttgcgcacatttataatttagttagcttaaaaattattcaaaaatttttaaaaaattaaattctttgaaccatgaattttttttgaggggcaattaattgttaagcttttatgggaaactgtacctcgttgagagtacggtattcttcttgcattcgnctcaagaagtctggtccctttggcaacaattccaagtcggccacaatcttggtactgtacttgt

SEQ ID NO: 19064 - DNA, 1364 bp, Heterodera glycines
gatcgcccacactgagcttttttgtggaatgactcaccacgacataaattgccaaccctattaattagctaattacccaattaaatttgaaaattgattactgtacccataattatttttacctcctcctcagcaatcaactcattgtaactgacaataaattgatgcacaaaaaccttcacatgcttctccaattcaatggactcgctaagaaaaaattgggaaaatttttttaaaataaataaataaaaatattaaatttttaaaaattaaaaaaaggacaataaatccttacgaaataaaattttaaacattattaaaaaacatgtggcaaactttcaaaaaataagggaattgaaatattttaaatttaaaataatgaaatttctaaaatatatatataatttttaggaaagacagtaaaagcctacgaaattaaaatataaattttttttttaaattcatgtgccaatcattttggttttgaacttacgactcgccgataattgccttcaacttgtttcctgcctcgttacgatgaacaacttcacattgatctgcttcgattttgccagcgcaaatgaacgctgcagcaaacaggaccaatgcatccgcaacgcgctcacgcttctctgcagacattttcggcccgccagccgtctgcttcatcgcgtgcaccaactgctcacgtttgtcgcgcaacttggtgttatcaagcacgcggcgataaaagtacgcaaagcttcgttgcagcctcaccgcgctgcttatacccgccacgtccatcattgcatgcaacacgaagtgcacaacatccgggtaatagtagagcaacacatggttcacgcggtagcccacgtgttccacgcgggaagcgtctttgtaaggcacgtatttgaacagttcattgccagcgattggtttagcaactggtttaaatgacgtcacttccgtgtgcagcgagtaaacgggcacattcaactaaagcattttttgaaattttagtaaaataattaatttaatatttaatttttatgaaaaatatattttaatcaaatttaaaataaatcaaactttttcatagttatcatagatttgatcaatcaacttctccatgagtttttcatatttgtcaatcatttgcctagaaaaaaaaaatgctttttgtctaataatttggcatggatgcaaacacgtacgctgccctctcttttttcagttggttcaatgcatgctgtttgtgcgcttcacataatcctactgaaacgctctgtcgtgtgcccgaagcatccccctgtgaagggtttgacgaaagcggaagttttgtttggccatttccaggttcagcaaaacgctgcaaaagg

SEQ ID NO: 19065 - DNA, 917 bp, Heterodera glycines
tttttaaaaaatgccaaaaaacatattcatattatacgccatgttcatttaaatttttgtacctttctctcgaattcatccttctcagcattctcaatttttccaattttctttttcaattcttgcatgattacaaatggaaaattgttgataaaactactcaattcattaatttcctttttttaaacaacaaacaattcaatgaattattaaattaattaaattttcacacctttccaaatttggcattttctgcgtacggcatccccaaaaagccaaccaattttcgacaaaggcacacatagaaaaacaacaacgcttttccattttcattttgcattgtccactgacttgcagtttgtttaacggaaaaactgaaattaattttaaaagggttttttaaaattcaaatttgagttcatcgctccgctctttaccgtattctttgtaaaaatacggtattaaattacttaccgtatacctgcaaatattagcatggcaaattcatttaaatttgctacctcaatgttcgcatgtaaaacaaaaaaaaattaaattaacatttagctcattgctcaactctgtaccgtattctttgttaaaactaaatacggttattaaattcctaaccatatatagaaactattattatagtaaatgatttaaatttgctacctcaatattgttatgataaacaaaaatatttaaatgaattaatttaaaatttaaattcgaattcaccaatccgctcgataccgtattctttgttaaaagaaaatactttattaaattccttaccgtataaaaaatattaattactttcataccgtataccatctattagtatgattaattaaattaaatgtgttacctaaatattcgcgtgttaaacaaaatttcgatcagatgctcaatcc

SEQ ID NO: 19066 - DNA, 1095 bp, Heterodera glycines
gaaatgtttgacatttggtcggaaattttgtcctcttttgctgctgatgatgttaaaaactcattggattcaactgccgatgtttcgttctctttttcatcgtcatctttaagccaaccaatctttaaaaattggggagaattttaaaatacaatacaaaaatttcatttagatttttgaaatatttaaagatacgtaattttgttgtgccaaatatacaatgatgggagaaaatgccggttttcgacatttctgagctcggaattccgccgatttccgattgccaaaatttttggcccattggaattccgattggcaattccaaaaaatttttcagccgtctgagtgccataacggctgccaatttcctgtttccgaattttttttttttgtacgtttcccatccctgatatataccagcaccatgggcgtttcataaattcgttaggagtaagaaaacagaaaataattgttatttcataatacgagctaaaaattttttattaattgcgggacgggatcccgtgggattacgcccgcaatcccacaatttcggaaacgaattcctgccccccgcccgtccccgattttttctttcccagtagaaggtcaagggacattcgcctttcgctttttcgccttttgggacatttcgcctttcgcattttaattgttttgccacaattggcacttttcattaccttttcaaagcaaatgctgcttccacactcacaatgaaagccctccgtctgtttgtcctcccaataatccttgccataatttatcgttatttcatcaccctgattaatccgtctccttttaaatttaaaaaaaaaattatttttattattcgggcgtttgagaaaaattttttttcaaaaaaacttttaaatatattctaaaaattgttcattgtacataaacaaataagattacgacttcctataagtagggatcgaaaaaatatggatataaaatcgctaaatatggacataaaattacaaaaatatggaaataattaacaaattgagggagttaattttccgaaaatcttaaagcagcctctccccgtcagagggaatgaaaaaccttctc

SEQ ID NO: 19067 - DNA, 1416 bp, Heterodera glycines
  unsure (1)..(1416): unsure at all n locations
gtcatcgttcatccacacagagccagcgaaattgatcatcaattttccagcaaattggttgacaantttgggcaccggtcgctttctgttgaccagcacatacggcttgagtttttgtccgttgtttcgagctgtaaggcacaccgtcacccgcattttgtcatgtcctgtggtcaccactgtcacctaatttgaggaaataactctaaatagttttttaaaaacttattacatctttggcgcctttcttatctatacatcggccgtccgggcaatcgaaccaaacggccgtctcgtccattgcgaagatgccgccgggaaagttgttcatcgccttgcgcctttggcaacaaaactgatgaacttggccaccgcttcagcatagttggacgggggtttctgacaaacggatgtctttttgcgcagcacgaaattgtgcctcctcagaaatttttgcagccatccaagtgatgcctgaacaaaaaattttatttttgtagcatactagcagttttctcactttggtgtcagtgtccgtgaacagcgcagccgccctctgtcgaatgatattccttgacacaggctgtttattttttcgttttttggtgacccattcggccagttcagtgtcgatgtccggacggtgaactgggcgacctgctccgtcgagtctcattcgtttccccccatttggtgacatgctaaaatttttgatcacaaaaaaaaattgttaagtacatttgttttctcagcttatcttcatgcgcgatacagtctctgatcgttttcctgtacattttgaacttctttgctgctgcatttatggagttctttcgcgcccactcgacagcctccagttttttcgccgcatcgttgttcctgtggcgcctcttctcttttgccggcgtgccttcattctctttgttttgcggttcgtagtcatcattttctgagccttctgctatcggtgcattgccttcctcgtttgcgaagttgcacacgacctttccgccgaagcgttcgttttcaactccgccagaatcgccacagaatgtgtggcacggcaatttgcagacataacagctgtgacttcctccataaattgctttacaaacgcagcaaaacgattccatattttctgaacttttcattaaaaattcccatttttatgcataccggaagcaaaaaattaacatttttgccatttttggcgtcaattttcagaagttctttaacaaaaatgcaataaatatgattttttggcgacatgttcaaaaaaatttcaaaaattttctactaaataaatcagccgaaaaataatctcttagtctccattagtctaccagtctccaattatctaccccattctgaggaggttgataaataatataccatggcatataaaaagagtaaata

SEQ ID NO: 19068 - DNA, 1155 bp, Heterodera glycines
tgtccttcattttagaaaggcactgaaccgtatacaaaaactctcacattctaaaataactcagttaaaacagcttttaattttaattgttctgaaaccaataattttgtctgtaaaaaatagtcccatatgaaccaagacataaaaagtgcctttgcgcaacaatctccccattgacttaaatagtccatgattgcgcgccaatctccctctggtgtccttcattttagaaaggcactgaaccgtatacaaaaactctcacattctaaaataactcagttaaaacagcttttaattttaattgttctgaagccaataattttgtctgtaaaaaatagtcccatatgaaccaacacataaaaagtgcctttgcgcaacaatctcccctctggtgtccttcattttagaaaggcactgaaccgtatacaaaaactctcacattctaaaataactcagttaaaacagcttttaattttaattgttctgaaaccaataattttgtctgtaaaaaatagtcccatatgaaccaagacataaaaagtgcctttgcgcaacaatctcccctctggtgtccttcattttagaaaggcactgaaccgtatacaaaaactctcacattctaaaataactcagttaaaacagcttttaattttaattgttctgaagccaataattttatctgtaaaaaatagtcccatatgaaccaagacataaaaagtgcctttgcgcaacaatctcccctctggtgtccttcattttagaaaggccctgaaccgtatacaaaaactctcacattctaaaataactcagttaaaacagcttttaattttaattgttctgaaaccaataattttatctgtagaaaatagtcccatatgaaccaagacataaaaagtgcctttgcgcaacaatctcccctctggtgtccttcattttagaaaggcactgaaccgtatacaaaaactctcacattctaaaataactcagttaaaacagcttttaattttaattgttctgaaaccaataattttatctgtataaaatagtcccatatgaaccaagacataaaaagtgcctttgcgcaacaatctcccctctggtgtccttcattttagaaaggcactgaaccgtatacaaaaactctcacattctaaa

SEQ ID NO: 19069 - DNA, 3689 bp, Heterodera glycines
attggctgtataataagcagtcctctgcttaccggaggcgacattccaatccctctgcgacaaattacggacaacacaatcaacaccattcttaatcagttcatcaaagttgcgcagagcaaaaagcagcagaatttgacactttggggagaaccgttcacaatttcaataacatctgtggaccggagcagccttcccttaaaacgacaacttaaagggggagcgcggcgatgcatcgcacctgttcatcatcgaattcacgacaattttttgattaaggttccgaatcaaagacacagtcgaatttaaaattcagtttaagatacggaacccagacgacagaaattattgtttattttacgctctccaggcaacaatggttgctaagacgcgtggttggccaagatggaaattttatgactatttgcatgaccgatacggacagaggcaactacaaaacgacactttgcagcttatggcccaaactggagtaccgttaaatctggaagcctatgatgcagacacttacgttcctcgactgctaaatcattggaacaacgctcaacggcaacatcgtttctcagtttttatttttggtgcaactggccactacaggccattatacaaatacggcactgacgactataacactcctttgatcctgtacttcagcaacaaccattttgatggagtgcaaaaaatttcggggctctttgggaagccgtactgccttgaatgtgaaagaccctatgcccgcgcgtcaaaacatgcacaatcatgcaaagctcgttgtttgctttgctctcgcgctggtccagaatttccttgcccttcggaggacaatttccatagacagtgcactgcatgcagcaaaaattttcaaaacaacgactgctatcaacatcacctgcgctcgaacttttgcactcaatcaaaaaagtgcagggagtgtggagttgtgtggaacgttcgggacaatcaaagaaatggacggaaggtgataaacacttacattttggtctgaacttttaaattaagggcatgtctgcggtgaaaaattttgccaactttgcaataacttccacaattctgagcgcggctgcttcattcagcaaattgagcccaatgagcagctaatgtcctaccgattcgttgcattcgacttggaaacaatgcaacatcaatctgttgatccgatgcatcctgatcgacggaatcatgagccaaactttatttcggcaaaagtgagctgtcccaagtgcattgagaatggaaagtggaggacggaaactgcaggctgcattgtgtgtgggccacatcgaaccgtggctttttgccaacgccccttcaacaacacggtcattgataagattgtcgtctccgacaacccacttcaagccttcgttggctggctgatcaatgacctacctatcaaattcgacacctatgcgtatagtcattttggtggccgatttgatatggtcatcactttccgcgagctcttccggcgcggatataaccctgaaatgctcaaacgcgtatgttaatttttacacaaataaatatataatattttttaatttaaggggaataaaatgtatgaaatgaagatccgagcgcaaaagaagagaaacccgaacatcatttttcgagactcattcaatctgatgccctgcgctcttggtcaacttgtccctgcctatggattggatgttgaggagaagcctttcttcccgcacatggcaaatcgtccagacaactatggacgagagatcttcccgacccccgacgactatctcgcccaaggaatgatgcctgaaaagcgacgccaatttgacgactggtaccaacaacaccgagaagagccttttgtgttggatgaggcattggctagctattgttccaatgacgtggagatcttaatggctgcgttggttgcttttcgtcgagaattcatcgagatttcaaggcggcaagagtacgtcgatggggtcgacgaccgggagaaccacgacggaattgatgtcttacgggagtgcatgaccatcgcaagtgcgtgcatgaaacacttccgcaccaatcacctcccggctgagcacctcgccattgtacctgagcgaggatatgacaacgctcaaaatcagtccctccttgcgattcgcttcttcaaaaggtatgaagaacgccatggcgtccaactccaagctgcgcattctgccggtggagagaggaaagttggcaattactctctcgatgcttgggttgaagctgaacaaagggccattgaagtgaacggtaattttacttttaaacattttaaaatattgtttttaaaaataggttgtgtgtggcacgggtgccaaaagtgctttccggatgataatatgctgttgccaaatggaaagtcggccggagaagtgagggagcgggacgcaaagagattggaatttctgcgcaatcaaattggccgtgtggacgtttattgggagtgcgagattgagcgaatgcttgctggtgaccgagaaatgcggcaaatgttcaaaaaatatgttgattatggtccactcgaaatccgagccgcctttatgggaggacgcacgggaccattgaagctcttccggaaagctcgggatggagaaaagatttcatactacgacttcacttctctctacccattcataaagtgaaaataatttttataattttttaattataaaaatttagctttacgacgcgctatcccatcgggcacccaagagtccatgtgctgaacgaagaggtggaatggacaacatcggccgacaacccctacgatctctcacttctgaaagtttgggtcattcccccgcgaaactgtgatgtgccggttctcccagtgagagtgggtgaacggctttgctttccgctttgcatgaagtgcgccagcgatcacccgacaggcggagttaatgaaaattaccactgcacacataacgattcacaacgtggttgggtcagcacttgcacatctttggaactgaatgctgccctggacgagggttatcgggtcaccaaacttttccgcgtattggaataccaaagcagcgatgatcaattgttcaaatcgtacattgcggaatttatggcgctcaaaatccaagcatccggctttgacaccagtatcaaaggcaatcctgagcttgaggaagcgtttgtgagggagtgttatgagaagtttggcattacaattgatccaacaaagatggagccgaacaaagggaaacgatcgatagcaaagctctgcttgaataacttatgtatgttgtctttaaatatattatttttaaataaatttctagggggccgattctctcttcgcaactttgggctgtcgcaaacactcatcacagatgaccctgtggttctcgctgaatatttggacaaccggtcgctcgaggtcacagcgatcgacgaatttgacgctgaacacatactgatcagttatgagaaaaagaaagagtgggtcgaggaacatgcatggtccaatattggtataataatttatgaacacaaatacaagaataatttagtaatatctctttggacaacttcgggggctcggctggattactaaaggcaatgcagaaggtgaaaaaggcaccaggctggggactactttataccggaaaaaaaaaaaaaaaatttaaaaa

SEQ ID NO: 19070 - DNA, 1812 bp, Heterodera glycines
  unsure (1)..(1812): unsure at all n locations
atcagtaacncgtttcaaccaaaacagcacccaccaaacactctctgtctctgatcacactttttataattttgtaaattcaatttttggcttttgttccattagtcgatcccttcaaagtgattgatcgatttctgaggacgtttttgaacagcttcatttagaaaaccaatatttatgaaaattgtataattattttatgaccaaaaaatatttggcgctatatggaaagtgggcctttttgaaaattttttcaaaaggggggacccttttgttttgcaaaattttttttgtgatagtcataaaaatttattctctggggtttttggggtccccgatcacgaatccttcaattattttaatcaattccgatttcctaatctaaatttgaacaaaaaatcataatttgaaaaattcaaaattccgatttttataaaatttaaattattttggtgaatttttatgtgtattctttatttctttgcataattttttaaattctttagcgttaatacagcacagaaataaattttagcgacctttaaaaccccggataaaaaattatcatggttttttatcttaaaaaaattttgcaaaactcgcgatgaatttcagcatcaaaaaaccattttctaaatttgcttttgcaatgtttcgtctcattttgctgcttcttttggttgcgctgttctgcgcttgcgctttggtcgaccacgcatccgcgcagtggggcccgtggggcggcggtcgctggggcggaaaccgctggggcggcggatggggcggcccatggggcggtcgatggggaggcggctggggacgaggtgatcattttttatccgcttttattaattggcactcatcaacaggcaattaaaaagactaaaaggtgtccggacaatgagatctaattaggcaaaaggggcggggcgtaaatgcctggaaaattaattgtaagtgattaagccaatttatattgttaattgggcagatataaaacaacaaattagcatttgaataatttcttttttcaaaggttggggatggggacgccgataaaccaacgggaaaatggcgaagatttggaggccgcggcaacggattttcaatgggattggcgacgaaagatgaacatgatcaatcagaaaaaccttctcaaaacattttttgtaattatacaccgctggacacattacaaatcgtattgtaatcagaagcaaaaatatttccaataaaatgtgaaattccaatgcttttcattactttgaagtggtaaaaaggcgttattttcaaagaagaatttttattattgttgacctacggcaaaagacatcattagcactccaaattttggcccaaaaactaagtatgaaaaaataatttaaaaaattgtgttatggttagtattaagcttcgactttgattattttctgattaaaagattatttaaaaacgcggtatattgtttttaataataaaataataaaaaattctaccttattttcaaggttcattaaaaaaaattaaagttgtattatgggtgctgctacatttgtcgtgatcacacacatttttatttaattttttgttttagaaatcaaatttaaaatattattttttttaatgattttcaattgagtaattaatttttgagtaattaattgtgtgatgctctgttgagtgatcggcgcgattaaatacctatacacaaaacacctcctgtcccaaagcccacccacataatgggccattgtcaaattttcaacacattgttttcggccgatcggctcgatcattctcattcattcatgc

SEQ ID NO: 19071 - DNA, 1184 bp, Heterodera glycines
  unsure (1)..(1184): unsure at all n locations
gaaaaagccgccccccccctaagcagcatttaattgtgcaagttaaatttggcttttcccctttaattgccctgcccctcctctgcgggcggctttttcttttaatgtggtcagctggttgctgctaatgggcgggtggtgataggcgcgctgcgcgaacgccggcggcagcgaggggcctgcaccaacgcgatcagtgtctgatcacagctgatgagaccatcgtccaatcagtgtctgatcagagctgctgatttaagagccccgtcgtccctcctccgtttctctgatcgtcgccgcccactgtgccccccccgcgcccccggggagggatgatgcgtaatttatacattcgagcgcgaattgatcattttcgcctctctaattgcgattgtgacgcctatgaattggcggcgaatttgtttatttttcccccgcggagcagtgttttaagctttaacatttgcccattcgccgcgtgatgggtgatcggcggatcgatgacatattttggaaccaaaagtcaagtcgatgggtggacgggcctcaaatggaaataaatgctaatttgtaactaaaagcaatggcagttgtctctctctctttctcacccccctcgctctctcccattttctttatctctcataaacacactcactctctcatcatggtttcttcccagttttctccaccattttctctctctctctttttcgctctccttctctctctctctttctttcgctctctctctctctctctcctctctatctctctctttttctcttttccctattccattaaggcattaatttagccacaatgcttgtcattgctgatcaattttttttggcttacaaaaatgccctatgattttgttctttggctttggctgggaaacccaaccacctgctgctgccctcacacatcagctgcactggatgaagcgcaaaagtttttctccaacggattatcggattatgcgtaatttgcatgcacaaatgcaccacagatttgggacggccaaacaaaacgcttaaaatagcaaaacccaatggaatataggcgtaaaaacaaacattggccaaaattggggggaaaaattgcaaaaaaatggatttgatggaagaaatttgtgccgtgggctaattaattgttttgaaatttgaaaccanaaacaaaac

SEQ ID NO: 19072 - DNA, 2235 bp, Heterodera glycines
ccccgcgccccccggggagggatgatgcgtcatttatacattcgagcgcgaattgatcattttcgcctctctaattgcgattgtgacgcctatgaattggcggcgaatttgtttgttttccccccgcggagcagtgttttaagctttaacatttgcccattcgccgcgtgatgggtgatcggcggatcgatgacatattttggaaccaaaagtcaagtcgatgggtggacgggcctcaaatggaaataaatgctaatttgtaactaaaagcaatggcagttgtctctctctctttctcacccccctcgctctctcccattttctttatctctcataaacacactcactctctcatcatggtttcttcccagttttctccaccattttctctctctctctctctctttttcgctctctctctctctctctctctttatctctctcttttccctattccattaaggcattaatttagccacatgcttgtcattgctgatcaatttttttttggcttacaaaaatgccctatgattttgttctttggctttggctgggaaacccaaccacctgctgctgccctcacacatcagctgcactggatgaagcgcaaaagtttttctccaacggattatcggattatgcgtaatttgcatgcacaaatgcaccacagatttgggacggccaaacaaaacgcttaaaatagcaaaacccaatggaatataggcgtaaaaacaaacattggccaaaattggggaaaaaaattgcaaaaaatggatttgatggaagaaatttgtgccgtgggctaattaattgttttgaaatttgaaaccaaaacaaaacagggagggggtcgcgcgagacgagtgccaatgccattcatgtgaaacaacacttagggagcccatatttttaagggttgttgttggaccatttggggaaattggattggatggcatccattgagacggattttactagccatgacattttcgagaaaaatagcgcgcaaataatcctcgtggagtgccggatgagctcaatgagcaaacaaattggggataaaatggagtttaaagtaggtgtaagagagctggacgagagtattggtcattaagtctcgaatacttttgcatgaggtaatggatacaaaactttatccaatttagctcccaacaggatctctgtttttcaacccccgcggaggggggctttaatggaggggggcagctatcaaatctcgacataaaagccgaactgattccggcaggctgcttttgttcttaattacaatccgaggcctgctgtccttgattccctgcgcttgccaaaactgatcatcaaactgattcctgccaattctcggcccttgcttaaaaaggcaaaagccacgcacaatgtgaagcaaaattggaaggggggggaagtgatcaaaaagggaagacggacacgaattggatgatgagtgaaaatgagttgagtgagtgagtgagtgagggcaaggacgaggatggggaatgggatgggaagggatttgggagattgaattgatcgtccgcgagggaggcgagtgaatgagtgactcctccgcgaccccgcgcgactttgtgctgctgctgctgctgttgttgctgctgctgaacaacacaacacaacagcggcggcaaggacgccgtcaaatgcaacgggcggcgacggaagagaccaaagattgccgccgtccgctgcttttgagggtcggtggctctcagcagattgtaaatcggaacagtagtggaggatcttgtattgaggaggattttaggagaataggcttggcaaagcttatccatgaactgcttgaactccatttatgtcccaggccccggttttttcggtgccctttttcatggaattctgggaaaaagttcaaatccaattttttgagacgaagagaaatctttcatcagagtccgatccaaaatcatattagctttcgagaacataatagcctttctcaaaatgtgcccgaatcaaatgagtgtgccgtcccaaaattcatttaaaacgttttcgcgcaagcaaaatggcatgatccaaactgatcaggcttctggaccatttttgattatccaaaatggccttatttgccaccagtgagtctcggcattgcctttcgtggccattctcgtctttaattttcgacatacaaatggccattatcaaagcattaaccaggtttgtttcctacgcccgtgg

SEQ ID NO: 19073 - DNA, 1620 bp, Heterodera glycines
cctctctctccctcgtccctctcttttctgacccattaaaacactctctcgatcgattctccactcactttctgctaatttcgtctcctgcgcaattttacccccgcagccattataatcaccgcatcatatgtaatcatccgacactttcacttgcaaaaacacacttgttggtcgccctttctcttccactcatcaacatttcccccccccccccccctccctaattttcctttaccttcggcccttcccttccctccatttcctcctccaatttgtccttcaaaacattttttggctttcaaataaaaatctctaattgccttgaataataatgacattgaaaggccaatcaaagcggttcattttgaagggatgaaaaatgggcggggggacggaagagggcaaaaagggaggaaagggagagagagggcggggggagagggaggggaagaggaatgagggggcaaaagaggaaggaagggagagagggggagaaagggggaggagaaagttagggggggggaggtgagattgcacggttggcggaaggttttaaaaatgctacaacagaatggcgtttttccaaggtcgggtcggagaaaataaacgcgacagtttttgcaaccgtccgaaggggaggcaaatgaccgaaaattggcgagggggcaattaaggagggatgattgaataatcaaataaattaaacacttttcgctctctcccaaacattttttgtcattttaaaatgcgtgctgctcactcaacaaaaagtgaacttccaaacaacggacgattcattcatttcaataatcttgcacaactcattgcttaaatgccggaatctgataaaattaataattttccttttcatttttttagctaattgtcctttaaataattcgttaatttttcttccaactttaaaaaaagagttaaaaattccattcatttttctttccaatttcattaacaattccttcccttcattcttttggccctttccgccgttgtcgccgttagcggcgaaagaattcacaaaccataaaatttcaaacagcgaaaactgtggactttagtctttttaatgcccaacattataaaaataatgttaaatatttaaaaattaaatagccattcaacttaatgaccttttcatttcacctaaattagtcattggtaatgatgttttgctcgtttttcagtttagcttttccaaatggtccgtgtcagcggcagcggcggcgaaagatttccctcgcgggagaacggcggttcgccgagcacttttcaaatggaaaagcaggaaaagcgaaaaaagtcaatccattgccaaaactgtgtaaattgttctgtgctttgctcagtttgttcaaatgggccgcctttttcgccgcccttttgtgtgtgctttttctggtggcaacgattgtattggcactcaaattgggactaattctaagcgaaaaaaatgggcacaaaacgaacaacggcaaaaacagcggtgaacaacagcaatcggtgaatggaactgtgaagggatcaaagcatatggaagaggcaaatttcgaaattcgaaaatgaaattggcatttgaaattgaatggcattttgaattga

SEQ ID NO: 19074 - DNA, 1865 bp, Heterodera glycines
  unsure (1)..(1865): unsure at all n locations
ctttttttntacagttcccttccatttttttacttccttgtgtcctaaattgcacccctcgttcccatccctcccaanaaaattgtcaactttttaaatatttttaatggcttatgcctaatgcgtccctgccgaccgcgagatgcattgccagcagcgctcggcccggccggttcgggacgcgtccatcatttattcattgggcccctgcccccgttcattgtttgccctttttctcccccttcctcccgcctccccgttgttgtacgggtcaaagggtcttcagcagttgggaaatgaatgagaatgaatgaatgtccccccggggtccgtccgtctcatccgtcgtcgttcatccccaaaagcgtcagtccacgagcaaaaaggcaaacaacaaacagtccgtccgaccgggtaaactctaagctgtgctccttccgtcccccctccccccccccattctgtccgtgctcggctctcactcatctgccttatgcttatgccatggctaccaaccaaacacacaccacaagactcttgaatttctgtcctcctcacagtggcgagaatgaaaccggaaactttttgggcctattattgtcatttatttattcatttaaatctttgttattgttgttccattaaggtcacaaatctaaaaatgcatttaagtaatttgtcattggcttcaaaagttttcttagaaattggccctccatgaaagttttaaataaatttttctgatttttcaagagcgtccttaattaaagaccaaatcttcatgtttgatgcctaaaacaagcctatggagttatgtccttaatttctgaaccatggagttataataataataataatacagttaccgtccttggctccaaaactgtattacaaaactgctcttttatttacggtaatagggattattattttttattattattctaaaccgattattaactttattanaattaaatgatttttcaattttttttaattgatgttctttccaagaccctccttatatttaaggactaatttattagtgtttttccttttgacgcccgacaatttttccagtacttaatttttaaagtttcactaattttacaagcgctatagatgttttttaacccattttttttgtatttgtttcgctttaaatcaattcttttttgctccaaccattgaatgtagaattaccatccgccgacggcacaaatattgcttatggcatcacaaccccacaaatccaaggcattttttgcctatgggagaagaagactcattcgcctctctcagcgtggtcttcctccctcccctaattacccccctccccccttatttgagtaacccaatcaaaaaacttttttacttttgtgacggcgcaataaatttggttggtatctccaccacatgaaaaggatggtggtggggatggacacacggaaaatgaatggacttatctcagtccctagaagatgaggtcattcccagcatggactttgccccctccccaaccatccaccgcttttttgaattggcgccaaattggcaaatacaaaaaaataatccctccgggcaaggacattcgcttatgtgtggctctccccagcagcagaaaaacagtgaaaatgttgcttctatgtacagcagaaagcataaaaaagcaaatttccataggattatgtgagaaccaacatttttaggcatttttttcgttttgtgcctaatttttttgattttgttttatcatcaaaaagcgcatttttgggaataaatgccacaattcgaatcataatgattaatagataaacatatatttcgtgatttttgttgattttaaatcnaaaattaccctcacg

SEQ ID NO: 19075 - DNA, 1748 bp, Heterodera glycines
gaatccatacaatacatataatgcaatcccgtcttccccagtcacgtcatcctccacggtgcgtgtggtgccatcacgtcatgtcatttttacgctaagagaagggggggggaaatttacttattggctaatgaaccatttttggagtggcggggtggggggggggggatttgtcatccaattgaggggccgggggcaatgtttgtgtatcatgggaaaaatgccaattttgttgggtgatgatggtcagttttggcacagccaattgtttggtgaatgtctaatggttgggatgaataatgtgaatgagttggtgaacaatggagcaatggtcgattaacctttttatggaagcatgggttcaacaattgtgggttaccttttttaaattaccaaaatgccgaagaattccttgaatgccaaaacattttggcgtttttttataatttcttttttatctttttaaatattttatattataaatagtattttttattaactacaaaatattgcactttatttgctgctattttttttacactaattgatttgccccgtcaatcatcaatgttcgtggttcgatgttcattttcttatcatttttatattcattacccaacaaaaaatatatatttgcataaaataattcgttggatatataatcgggttggactgatataagtgctattttttgaagaacataattttttcgttatttccttttgaagatttaattaatccaaattttaattaaataaaaataattgaagtgataatcatttctcacaaccaaataaataaattaaatactattactttctgttttgtaatttaaaagctcgtttacttaaaactttatttattttttttattcatttttccaaggttaacaaaaaacttgcaagaagaatttcctatgaaaattttccgatcaatcagtttttgctccccccccccctcccctctctaaacggagatgagatttgacggcagcgataaacgcaacttttcctcatcatcatcatcatcatcatcatcatcatccaatccccctctctcatcatctcccatcatcacacagttttcttccgttcttccgtccggcccacggcgacggtgttttttgctcgcccccaatcttccgccgcttctgttgctccccgacacggcgttccgtccgttttcccctcttccgcctcggacgggtgggggccgtgggatgcggggattacccccaatcgccggtgctgagataaatgagattatctttgacataaattggaaaaatgattttttttttccttttaaaagttattatttttaattgggtgccaatagaaggtgaattggttttctggaatcatatatttactttaaagcaaatttttattaaagaattttttaaaaatttatatgattttcagtaatcgcagaaccgattgaaaaacaaattatgaagtggattttaaatatgaaatgggaatttaaattagtgtttccccattagaaagatttattaggcattgatcagaaccaaggctgccttagcattgttttgcaacaaatctcattctgtcaggttccaaagctaacaaaatttaaatcaagtaaatttgttttgaaaaattttcatttaaatacccaaattttctgtttttcctacggcggatttacacccaaaataggggagggagtgggggcgagcagtcaggggtcacacctattttgcattcaaaaaaaaatattta

SEQ ID NO: 19076 - DNA, 1510 bp, Heterodera glycines
atttatgattaaaattgtgcataaaggtcaataaataattttcttctgggagaccgaaattttttgattgtacaccgtaacccttttaagtccaatgtccaaaataggacgataatccttggcaaaattagcctatcagtatttacgaaccttttctgctgctaatcgctacctttaattagatagcattcgcaattagattatgagttcgttattcaaattgccctctaacgtcttggagtaaaaactcgcaatattttaaccactaaagaatcaaatagatttgtttttctagccttacgcaaacatttcgaaatatttcgccggcatttgtggcaattcgacactagaaaagtgattttgttggttttagaaccttagcgtcctagtaatgaggtacaattaaatcctaatttatgattaaaattgtgcataaaggtcaataaataattttcctctgggagaccgaaattttttgattgtacaccgtaacccttttaagtccaatggccaaaataggacgataatccttggcaaaattagcctatcagtatttacgaaccttttctgctgctaatcgctacctttaattagatagcattcgcaattagattatgagttcgttattcaaattgccctctaacgtcttggagtaaaaactcgcaatattttaaccactaaagaatcaaatagatttgtttttctagccttacgcaaacatttcgaaatatttcgccggcatttgtggcaattcgacactagaaaagtgattttgttggttttagaaccttagcgtcctagtaatgaggtacaattaaatcctaatttatgattaaaattgtgcataaaggtcaataaataattttcctctgggagaccgaaattttttgattgtacaccgtaacccttttaagtccaatgtccaaaataggacgataatccttggcaaaattagcctatcagtatttacgaaccttttctgctgctaatcgctacctttaattagatagcattcgcaattagattatgagttcgttattcaaattgccctctaacgtcttggagtaaaaactcgcaatattttaaccactaaagaatcaaatagatttgtttttctagccttacgcaaacatttcgaaatatttcgccggcatttgtggcaattcgacactagaaaagtgattttgttggttttagaaccttagcgtcctagtaatgaggtacaattaaatcctaatttatgattaaaattgtgcataaaggtcaataaataattttcctctgggagaccgaaattttttgattgtacaccgtaacccttttaagtccaatggccaaaataggacgataatccttggcaaaattagcctatcagtatttacgaaccttttctgctgctaatcgctacctttaattagatagcattcgcaattagattatgagttcgttattcaatttgccctctacgtcttggagtaaaaactcgcaatattttaaccactaaagaatc

SEQ ID NO: 19077 - DNA, 1452 bp, Heterodera glycines
  unsure (1)..(1452): unsure at all n locations
attttttaatcctnaatttttagtcatttgtttttattacctctgcgtacccgggaagancncgctacngctcatcaatgattgaaaatttatgatttaaagtacaaaactcgaagaaacatcaaagctgattggagagactcatgtttattgatgccggtgaagcttgagtcgctgaaagcgacatttaatttggactgtgaggacaagccctttttcccctattattacaacaagaaagaaaattatggaatacgattggaacatctgccaccgatggaggactattcgccgggatctatgaacaaggataaatttataaaattcgaaaaatggtaagaaaagaaggacaaaattaacaataaaaaattttttttcaggtacaacgaaaacaagggggcgcccttttatttggatgatgaattgaaaaattattgccgaaacgacacggagattttattgctgtcaattattgagtttaggaggatattgattaacgatattacgaaaggatttgacccactaccgaggagttgtacgaatgcgggggttgcgatgaatatttttaaggcaatgtttttgttgacggagcagttatcgattgtgccggagaagggatatgagcggtgtgatcgcgccagtgtgatggcaataaagtatttggagtggcggagccagcgggatggaattgagatacggcacgcggggaacggacgagaggtcaaagttggaaaatataaattggatggatttattgcgaataacggagctagggacaaatgcatcgaggttatgggatgttacatacatggatgtttgaattgttatgacccggcggcggaactgattggaggaaggacggcccaggaattgaacgatgagactcaggagagattggcggagctacagaagactttggatgtcgaagaagtttgggtatgtttatttgacatttgaatttataaattctactttttaggggtgtcaaattgagaaggaattgaaaaaggatgaggaaatgaggggcttcttcgacgacagaggaaatgagaaggggccgattgatccgaggatggcatatgcgggagggaggaccggaccgatgaaattgtttgcgaaatcggatgagaagaaaaagattagtgtttacgatattgtgagtctgtatccgtcagtgaattacggtacagcttacccgattggtttgccggagattattataccgaagagtgatgagattaatgtaaattggacaagaccggaggatttgaagtttaatggattgtataaagtgagggtcaccccgccgcgagggttgcggattccggttcttcagttgaagtgcgatgagagattattgttccctttatgttggagatgtgcgtcaaaatttaagaaggaaactacgagatgtgattacaattgccccccatgatgaggcacagcggagat

SEQ ID NO: 19078 - DNA, 1635 bp, Heterodera glycines
atccgcagccaagcggattcgaaccccagaccctcgtctcatgacccctaacaaaggaagggtacccaatagtgatgctcgagactctcggtctcgagtctcgactcgagaaaagtctcgttttttttggtctcgggttttcagtctcggtcttcgagactcgagacttttttacacccctaatgattggattttggtaaacttaaatttttataaattttaggccattttttgttcatttcgttaacatatgcgtggtctagtgggttgtgttctttgttatgttcttcgttttttcgttggatcagttcccctgaagtggttcattttcttctaatttttcaaaattattcctttttccgatgagaatttaatcacaactttaacaattaaaagcattcgagattcattggacccaaaaaattcttgcgatgcaattgcttcggttgaccattttttgtcggagtgtgaagcagggctggacttaattacggattacgtattacagattacggaaattacggcctttttggagttacggattatgggttacggatttttgggatttttccgtaattttgatccgtaactggcttttttagaatagttttcaagacgatttcttgtaagattattttttataaaatgaattttttttctatttttattaaaaggctacccaaatttcgatttaatctgacttattcttggtaatttgtagtattattaacattcataaagggggtgggggtgggaggctagcaagggcaaaagaggaaatgtcgaaaaatttgactattttttaacaaaactcgttaaaattctgaaaaattttactcggcgacgcttatcggcactgcccacccccaaaactcctaattatttttaaatattagctccaaatcttagtcatttttagacaaaatcttatagcaaattgcataaaattttcaaaaatttttccgacggcgcctttcggcgccgccctggaaccaccccctatcttccccagttttttggaaaaagcacaccgcgaaataagctgttttaaaaatcaaaaaaatgatcgtcaattaacaatagctgggacgggaccccttcacaaatcattcccaaaatcaatcctcaaaattcaaaaagaatgaatttttacgtcacaaattataatttatttgcctttcggcaccgccaaaccaggacaatctttttaattttgttttagaatggcttctaaaagggtgagatattgataattaatgcaaaaattttgaaatttgcgaccacagctctgaatctgccatttttacccctatttttgctatttttctcccggtttaggcccatattttgggatttccacctcaaaaaacatgcagatcttttattctgatcattaattaatcttaaaaatttatatatagattgggttttttaaaaaaaattttaaattaaaaaaaaaatttttttttttgaaaattacggattacgtattacggattacgccaaattacggcctttttggacctccgtaatgacgaattacggatggccgtaactaaaaaaattgccgtaattacggattacggacttccgtaattgaaaatcagttacgtccagccctggtccccccccccc

SEQ ID NO: 19079 - DNA, 234 bp, Heterodera glycines
caagagccgtcataacatcatgaatttcggcatcgttgttgtatgttgcatccgccaaaattctcatgatgactgcgtcctgcagcacgtagcgtttgtgtcgtttgtgtatgaagttccttgctgacctcgctgcgtcaacttgtctgtcgatgcttccgacgggcttaaaattttttaaatctaacaattatgggaatttctctatgcctggctgcaatgtcgtcgttgatg

SEQ ID NO: 19080 - DNA, 3419 bp, Heterodera glycines
  unsure (1)..(3419): unsure at all n locations
taaaaaaaacttcttcatgatacaatactattcaagaaaaatttcatggaagctcagtttttcctcaaacagaaaaattattatttaataaatgagctaccatacacatccaaccctgattaattattgaaatagtaattgaaaccttttgatattttaatacaacaaaatgtatgaataaaataattcatcagaaaatttttcttgtttaattactagaaactcaagaccggtaatattttcaataacgaagaaattgactaataatttaagaatggcattctgttaattttatcatggtcattgaattcgaaaattggctggatttcccgtctttaacgtgggcaaatggcgcgaattaatgcagaggggttaagttttaacaaacaacgtaaattaggttattgtcaactcgaaatgtggagataaaagagagaaaaaaatgttatgacatatgcaaagtattcatatagaactcaaacccaaaagcgtaaaactaaagtacctatattttcgaaatttttctggcattcaggcattcgatcacaatgatgatgttgggataaatgataattcagccttatgtcattgtttggcaaaacttgttgatagaccaaagaaaacttgactgtttccccaaaggggagaaagtgatgaaattaggccgttgttacaaaaaaaggttttgttgatcacttctgcgcagtgattaggcaaggtacaactttacggcattcacttaattataattggtcaactgcaccggtagaggtcaactccgtctggccaactccatctcagcaatgttcaaaaagctataacttttttctttgttggccaaacttcacaatcatggtatcactcgaaagccctagatgtttagaagatatttataagctatttctcagtgattaatcagctctcaaaaaagttgtcagttgaaaaccgcaaaaaaggcagaattttcgaagttttttatttctatcttttttttatagttcgaaattttctgtaatttttagtaggctaatagagcctgtgaagagctttcgaataatgctttttaatcattctcaaaaaaaaatgatgcgtctggatactgacttctttttgatgtaaaaaacttatacttgtaggcactttcttaaaaaaactaatgtcttgacagctttcccctaagagaatagaataaaaaatagtttaagtaatgacaaaaaaatttcggaccaaaattctggtatgtagaagggaagaatttaaatctcgagctaatatgaaataatcagaaagggcacctaaaataatagtttatggaattgtgccaaaaattgaaatccatgtactatcaaacataattttggtatctagtttatttataaatttatataaatttttatccaatccacatgaccaatgataggttaaataatgatagttggcacctcttggctctcaaccttagctttgcttgacgacaaggttcgttttaaagattaaaggttctcactgttcacttgagtataatcgaactgatagaaatctggctggttgttaaatcaattttttgaggtattggatcattactgacaagattatacatttacttttttttaacactttcgactgcaattaaataattttttttaatagctcctgtcccttcattcttgacagagttgcccgagggctttgatcataaaaactcagattggaaatggctcggatgagcggtcaataattcaaatattaaatccttcagcttcccctgtgaggtctccttgttaataagctgttgtgagtcatttgtactgaaagtttcatttcgttttttgctaataaacctatctctatccatgatgatttcttccattaaaaaatcagtgatttatcgggtacctaaggagccaaattcgcatggtaaacccagtgttttctgaacctttagattattctcacttgtcttttttggtttgccaatacagttacagtaccccttaaaaattcggaaatggtccatcattggaagctaagagatctccaagcttctcagtctgaaaatagacttggtataaaattgatcaggtttaagaaagccaaaaggattaaaaaaacaaatccatgttaggagcctatcaaaaatttcaaaattctcctttcatgtgagcttaatgaggaattcgcaaaatccttccgctttttgaatttgtaaagagccctttgtgattagtgaattaaggcttgatttctgttttttgtttgtcatatcattaaggatttgtatcattcaaaatttgagattagggtaaactgaccaaaagaataataattatttcaaattttatttctcttccataacttgacagattgccctagagccaaaattctgaaaaataaatattcaataatttgtgatgactaaactgtctcacaaaaaaaagtcaatgccataattataactccggtacagtcggtgagagtaataaaaaaattttatgcatacacgggcaaacttcatcatggcgaaatgggtatccaatgacccaaaaaataaaatgttttcacccaccatattttgacaaaaggcacaaaagccgtgaatattttttttattcagagagccgagagagcagaatcagaatttttggccttttttcaactanattttgccttatgcaaaaaatggatcatcacaaaaaaaaaattgtacttctgctgatcataacaatgttagggcggtctgaaagttcctcaatgtaaaaaattgaaaaaaaaaaaattggccgtgagcggttttaattttctgtttaaatttggaagcatataaaataatatttttttttaataatttgagtggcctaataacttccggagcagtctgttttagtgcgtgcacgcagggtaaagctcagcaaaatgtctccaatattatgtccaaacaaaaaacatcaaaagcggattttttttctcttataaggcttttttttggcgattaaatttcaaaattttaaatcgcccgtttaacaattctgccttagtttggattcttaaggctctttggcacataaattttcaatttcgccattcaacatgacagaactcccgaaggagcgacgttccttaaatgtctaggcttttgctgatatgaattaaattgcctcacaaaaaagaactaaaaaataataattattgcctgtaaaaaaataacattcaattgcattgaagcctcattcactcaaagccattgaactaccaaattaaacgcttgaaatggtccatctttgggtagctaaaagagattcaagtttctcagcttgaanttttgtttgtccttaatatatttggtagcctttcagcaaaaaaaagtctggtctttaattcaaatcttcacaattgtatcgattaatgaattgagctgcttg

SEQ ID NO: 19081 - DNA, 2164 bp, Heterodera glycines
  unsure (1)..(2164): unsure at all n locations
tgtgacaattacaaactcaacttttgtttttttatgatatttttgttctactcgggggtttatgtttaaagatctttttatgcatctaaaattgcataaaacaaacgactttgactaaaaaggatgacgaattcgataaacattaatctttaacgcattcattggtccaccgacgtcagttcctaacattgcaatgtttgatctcaatccaaattttttttaaatcctagtttctatggatattttcggattttgtgaacaattcccaaataatgaggaaacaattggttacatgcgtacactttatttagcttgggaggggttggacatgtcgtacaaatagacgaaagtcttgttgcacgtcgaaaaaaccaccaaggacgggtcgtccgccaacaatgggtctttgggctttacgatgtccatgctcatattggagtcattcaatgggttgctgatcgtatccgagcaaccctcctgcggcgccaatttcatggcaaaaagacacttgcagcatttgaaaacatatttgatcaaattgctcagttttaagttgtcaatgcctgatctgtgcaactttagatgcataaaaagatctttaaacataattccgtttttggatcaaaaaaaaaattgaaaaaaattacttgatgaaaaatcaaagatttgaaaaaaatcatatattagatgatgtcatatgacaaatctgatgtcatattcgtgatcagcgtccccgatagcccccgagtagaacaaaatatcataaaaaaacgccttttttttctttttttagggacaagtaaaagtaaccattaccgaaattttttttaataacccgatactgaaaaaaaaagaaaaaagccgctttaataaatcataaatcaatattgtaaaacccaaaagataaacaataagaaagaagctaaaaacagcaggtccataggatgataattcaatgatgagatttttgccagatcatattgggtatttatgaaatcctcaatattcgcttctttcacactgacatcaatggccaatgtcactttgtcctcgctttggtcgtaaaagcctttgcttgggttcatcagttccttaattatgttaaaatttaattgggcactatttatttgaattggcactcacagcaaatgaaatgtaattgtatcccctgttgttctctttgttgtcaaaaacatggtcatcgagttttcttctgaaatccgcaacgccgctctttagagagacaattcgaaagtttgccgaacatttgcaactccaagtttctgctcaatatcaattaattaattgttgttaatatatatattaattattagtaattttgcaccttcttttggagcatcacacaaaaggaaaatggcgaaccatttctcatttttgtcagtgctttcatctttcttttcaatttgtgcccatattttccatggcaatcctttgatgtgcacagtttcacttttacgttcactcttaaagatttctcgcgcaaattccgacactttttcaatttccataaagagtgtgcctttcgaattgctttgatccaaattgaatttgtccacttttggttcatcaacagttgtgagatcgatggtcaatttcactttgtcttcttccctgtcgtaaaaaccattgttaaggtccatcaattccttaatttaaatcatctaatttaatttttgtttatgcgtggtcaattggttatgttttagaaattaatttattttgttatgatttctttacaccaggcaaataaataaatgaacttcaatattggctggtccacgaatgtcaaattaaaatatttgtttgaattggcacttaccgcaaacgaaacgaaattagtgaatcccaaattatttgattttttgtcaaaaacatgatcacaaaatgtcccaatggaattcttagacacgttgttttgcgagacaattcgaaaagtggcagaatgaacgaagcagcgccaattcgaatcttaatgattattactcatcgtagttaattagcatttaataacagttaatttgcacctttttcagtagaatatatttttaaaatagtaattaaaattggaccttcttttgcatcgtaccataagtaaaatcccanaatatttcttctcatcanngtgtctttcgtaatttctgct

SEQ ID NO: 19082 - DNA, 1340 bp, Heterodera glycines
aaaaataattgatgcgctaccctaagtctccccagtattctgcgcatgctttctccacgcgaggggcaaagccgcgaatttgtttcattttcctccttttgtcttttttcatgccgctctcgaccctaacttcagcacggggtgggcgtacagcagcggcaactgcagcattcaatgcagctcttcaaaagctgtccgaacatatttttctttcttttctaacgcatctccaagcggagttacacccatttttggacccgtatcttttgtaccccgatcacattctgaaaaaaataattgatgcgctaaccctaagtctccccagttattctgcgcattgctttctccaacgcgagggcaaagccgcgaatttgtttcattttcctcctttttgtcttttttcatgccgctctcgaccctaactcagcaacgggtgggcgtacagcagcggcaactgcagcattcaatgcagctcttcaaaagctgtccgaacatatttttctttcttttctaacgcatctccaagcggagttacacccatttttggacccgtattttttgtaccccgatcacattctgaaaaaaataattgatgcgctaaccctaagtctccccagttattctgcgcattgctttctccaacgcgagggcaaagccgcgaatttgtttcattttcctcctttttgtcttttttcatgccgctctcgaccctaactcagcaacgggtgggcgtacagcagcggcaactgcagcattcaatgcagctcttcaaaagctgtccgaacatatttttctttcttttctaacgcatctccaagcggagttacacccatttttggacccgtattttttgtaccccgatcacattctgaaaaaaataattgatgcgctaaccctaagtctccccagttattctgcgcattgctttctccaacgcgagggcaaagccgcgaatttgtttcattttcctcctttttgtcttttttcatgccgctctcgaccctaactcagcaacgggtgggcgtacagcagcggcaactgcagcattcaatgcagctcttcaaaagctgtccgaacatatttttctttcttttctaacgcatctccaagcggagttacacccatttttggacccgtattttttgtaccccgatcacattctgaaaaaaataattgatgcgctaaccctaagtctccccaggtattctgcgcattgctttctccaacgcgagggcaaagccgcgaatttgtttcattttccctcttttttgtcttttttcatgccgctctcgaccctaactcagcaacgggtgggcgtacagcagcggcaactgcagcat

SEQ ID NO: 19083 - DNA, 2531 bp, Heterodera glycines
acaacagcaaattgatgtcccgatggatcgggacagccccaaacgaaattttcggatgcagcgaaattgaaatgcacaacatccgttttcgagcctcatcacggtgctacactttcatacccgtcatggcaaccatcgatgcgcgagactacgaagtctttctcgacccagaattgagaattctgtcgacaacggcgcagacagcaaactgcgaaggattccgataccactactttgcgatgaatgaggaggcgaaagagtgggtgaaaatcgacagccgaacgggaacaatcggacgaatggaacggacatccatccatgaatggaaagacggaaccctaggaaaagaggggccagcggaaatgccaattggattccacaattggatcctacggaacgattcgaggagcagttcgtccatttcgccgagagagagagatattcgagagttggcagcagcgagacgccgaatacgcgatgaaaagagcgacggcgcttggagcactacccggaggactcgagggagtggccaaaacatggctcaaagggctgtgggaacaagtcgtggaggcctggatgaaagcagcctgcctttatgcgacattcctgctaatccgtgatgtgctgatcccattggcactggcctatctctcagcccgatccgctcgagtcttcgcgtattgatcggaacacggcgcagacgaccacaagcaagagacaatctcgaggatacccggacggcggaagaaacgccgatggtcgatctgacccgaggatcgatacgggggagcacgaagagaaggcccatcacgttgggcctgaagcaacaaatcgtcgctttccgcacggaaaacccaacttgttctcccgcccggaatgttgcgactgcccccggaagggcagaagaaattgcgaaatgagggaagggggcgcaacgggggaaaacgaaagtgattgaacgaatgaatgatcggctgggcgtcaatgatcaacatgatcaacaagaaagaagaaaaaggggaaaacaaggggaggaagaatttgccctgaggggaaaacgagatgtgcatgtgaaagggggggataaaattgacaataataaattttgttagtgtacaatcccccctaaaagttgttattggccaaaatgccattcgaccccgcccctccctcacatattgtattacccctatgatcacccccaattcatttgtgatttacccgccaaaccgccaaccccccttttttttgtccctcctcccctcccattttattttcatattttaattgtatttttatccaaaatgctgacaatttaacagccgaagtgagtgattaaaaataaaaatttttagggcaccctttgaaaatttgatgatattttattagttttattcattccaacagtcctaatgcgcaaacttttacagggaatgatgcaaagaatgcgcaaatttgcaagagagccgcacagaaagtacgaaaggtgagaaaaatcaaaggggaaggttgggagcaattggaaaattgaagaaaatttgtaactcacaattccgacaaatgatataacattcaaactttcttggtctgtcaaatgaatttttaggctgagaaagcactttggccgagttatggactcgggactgaagtggccaaatgccttagggactgaaccgtccactgacttaaaagcaaataataacagcaaaatccatatcaatttattccgctcgttttctaatgcgtgtacacttccttttctcgaaatttaagtcagtggacgaacggttcagtccataatagagcccggcgagaacgggaatctcgagggaaaagcagggaatgtgttatagggttttcggggttgcagatcacgaatatgacatccaattcgacttatttcgaatacaggacccgaattcgaacaaaaagttgaaaatttaaaattttcaaaattctcacttttgttcctaaattgatcaaaacaaactaaattagtcaaaaaccattataacatctaaaattggtcattttgtacaggtacgaacttaaaagtgaattttgaaaattttaaaattttcaactttttgttcgaattcgggcctgagattcgaaattggtcaaaatgaatgtcagtttcaataataaaaaattttgtggaaatttgttaattgcaataaaacattttttgtaaaatagaaaaatttttacttggggcccaaacgtgctggggcccaaacgtgtggggcccaactgacgtagaccgtccataaggcatttagtcacttcgttcccgggtccataactcgggcacaaatgcttccagtcaaagaattcttttggattggtgtctttcagattaaggggccagggttcagattcgtccttgaatggcaaggacgtgctggaaatcggttcagtcacttgaaagttgaaaatatccttgaattcaagatgtccttgaaataagtattcaaaagaaaacattcaaaagtttaattttttgaacctttgtgccaaatttttattaa

SEQ ID NO: 19084 - DNA, 861 bp, Heterodera glycines
caccaattgtgaatgaataccaatggtccgtagccaatgatgaatggaatttgtttaattatttcactgactatttaagcaagagaatatgtctaaatatgccaatttaaattagttaaaatattaaaaataacaatgtaataattaaattccagacaccatgaaaatatcaatcatcgacctagtattctttggaatgctttttgcatttcttggaaatggtgcatctacttttcccctgaattcggctgtgatggaggtcgagaaggacgaagcggacaattcgactacggtggaggccgaagacaattcgactacggtggacgctgagacggaagaagcggacaattcgacaacagtggaggatgtgacagaagacgctgacaattcgactacagtggaggatgtaacaaatgatgcggactcgactacggttgaggctgaaacggaagaagcggacaattcgactacggtggaggctgtgacagaggatgcggacaattcgactacggtggaggctgtgacagaagatgcggacaattcgactacggcggatgatgtgacagaagaagcggacagttcgactactttggaggatgtgacagaagacgcggacaattcgactacggtggaggttgtgacagaagatgcggacaattcgactacggcggaggatgtgacagaggactcggacaattcgactacggtggaggctgtgacagaagatgcggacaattcgactacggcggatgatgtgacagaagaagcggacagttcgactactttggaggatgtgacagaggatgcggacaattcgactacggtggaggctgtgacagaagatgcggacaattcgactac

SEQ ID NO: 19085 - DNA, 1064 bp, Heterodera glycines
ataggcaccaaaaaattgaaaaaaggcatgaaaaggcacgaaaatcccgaaaaaggcatgaaaaaaggcatttaaaaattttttattaaggatttttaggtagcaaaacacgtaaaacttaaccaaaaaacttaattttggtcatttaaatgattattaaatattttataatgttttcgaaaaaggaaaatttttaaaacttaaattttttaccaagaaaaaaaattaaattattttttgagaaaatttttaaattcttaggggtgtattttctgaaatcatatgcctcaaaatgcgagctctatttattagtgaagcacaagagaattcaatggccaactcgaaaaaatggaaaagccaagaaaaaaaggccaaatgagtcccaaaggtgggagtccccggggggttgttatggaaactgaaaaggcaaaataaaaacaaaaataaaatattaaaaaatgttaaagcaaaatgcctataaagattcaattctaaatcggaatttttttcggtcgttttcgagttaatagcaactattttctagttttttatttttagcacgtaaaaaatttatgaaaaaactattttttaactaaaaaagcccgaaatatgaacaaaaagctcaaaaatggaccaaaatatggactaaaaactgtcaaaatatatgtaagaaacaaagactctcgaccatctctaatgatcaaggcccagatttataaatgctgaatatagatagataaaaattgaattcaaaaattttattcaaattaaattatttaatttacattttggttaaaattaaacaataaaaattctcaaaattaggtacaaactaaattatttctttaataaaatttgattcaaattaaattaggtaattaaattaacaaataaaattaattaattaaaacacaaatttggttaaaattaaattcattaatttgaattattgaacagattacaattcagtcaaatgaacaaggaaaagcttcggaccgcaaaaaaggatgagcaaaatcagtagatcccttttttgtgtgcaaattcgacaaaaaatgcctttc

SEQ ID NO: 19086 - DNA, 1086 bp, Heterodera glycines
ccttgtcgccttgcctgaattttcggaggttttcatggggtcacagtcggtaatcccgtattttctggaaattgcgggataatcccatgggatcccgtccggataaattttgagttccagtccagcagcgtgatccaaaaatttgattttttgtgcgggatcccgcggaatgcgcattgtttttttttgaaatttaaagacagaatgccacatatttttaaattatttacaacttaaaacaaaattcatccaaaattagtgaaaattttccggggtttttagcccgtacaaaatacgagccctaaatcatggcccaacaattgcccaatttgtctgtcatttctcaaccgcagaacataagtttgtttcctccacctcccatatttgccgagcaatacacagcggaaaacatcaaaaaaggatttgctcttcctccaccgaatcttccaacaaagtttgaggtgttcgccgagctttgtgatttagatggggtgactaagaataatagaaattgtaaaacaccaatgcatttgttcagcctcttttgccaacactcagtgaattgggctgtcagcaactttattcgggcagtggcaattggcgtgccgaattgaagaaattgaaccggagtttagtcgcagctttcctcgatctaatagaaattcttatcaggtacaaacagtgccaggcatgaacggtcgtatccctatcctttttcggcaaaaaatttctcttaaaaagtagtctaggtcatgtttccgtcaactaatcacgaatatgggtaatactatagatggtacccccccccttttttgaagaagtctttttttgttctgaaaagtcttggaaacatgtctttgcgggttttcagggtcgctgatcacgaatctgacattcattttgaccaatttcgaatcccgggcccgaactcgaacaaaaattagaaaattcaaaattttggcgctagtttaaaagagggccttttgaaaattttttgcactttttggtctaaatttttccaaattttcggtttaaaaagtcctgaaaccaagtacccgtgggttttcgaggtcgctgatcacgaat

SEQ ID NO: 19087 - DNA, 2021 bp, Heterodera glycines
gaattgtgtcctctgggaaaaagttttttttttacaacgaacctggttaaaaatgcattgataaataatttggttaattttcagagtgttacggagcaattgaacagattgacgaaaatgggctcagatgcttgtgagacgcttagagacgcacttcatcggtttacaattgaaggaattccaaaagaatctgttgacaacgaattggacttgaccgaaggtaaacattttagagtaattgataacacattttttttgcagatggagaaatgatttgttctgcacggacgggaagcgatgatttattgtcagcactcgaggaaaacattcagcaattgaagccaattgaaatgcccgtaagggtgacgagaaaagacattccgggcgtcagaatgcaattgcagagagaatttaaccgaatgaatttcacgattggcaattgttaatattttgagaaagtaacaatacactgactaaatttcctaatgctaattacccaagaaaacattcgaaaatgcttcagggaggagcgaagtgtttcattgtcaagcggacaaacttcagactgtggtttagattatcataatacaaaactcaaaaagtataacttgaatttttggcaaaagtaaatcttaaaaatatcctatattaaaaattttgttagtaagaatttcgttttgatttttcaaacagcaaaaaatgggaaactaaagataaaacaaacccaaaaatttattcaacataaatgagtcccttttcatcaatgcgtgtgctttcaacatacttcggtgaaattggctgccaaatcgaagaagaaaggtttgattggctttggctctttcatcatcctggcttttttcttctgctgtttggtgctttcagtgattgccttccctatctaaaatttatatttaacaaatattcataaaaataactatacaacaattttcaaaaattttgttgagaacttttcgcgccctgggaaatttgcggagaatttaaagtaaaataacacagattggaactttaaattctaagagattgactagttaaattaattgaactcgaaattcttctttatatttgaaattacgaagagctacactgaagaggttccatagaaaaatttttctcaaacgttctaaagaaatatttattttatttccgaaaattccgcaaatgtctgtcccagtctgtaagccattttttgaataacgacctataataattcgtaatcctaacaactaaataactaccaattgctcgggcgaaggcttccggtcatcttcagaagcattgagatttactgaactgacagttgaaagcagaacattcgcatctcctgtctgagcccggcacaaaatgagcagattttcgacctcgcgacaccttttaattgctctttaattattacaacatatttggcgaactttgtagcataagtttcgctgagatcgctgtttcggacttgttcaagcagttcggagtaaccgattctgaaagcaactcaaatcaactaacaaacaaaagcagacaaaccttgctctgtcaaaagtttcgatggctcgtttccaatttttcagttcgagttccaaactgccgaagatgaaagacacgtaagaaacagtttcaacacgagtgacctcatggacctgaaaaacgaagaagataagcatcaataacaatccaacagtgaataccagcggattgtcatcaataagcgaatgtaaaaaatgagcacttttcactgcccgacgcaatttttgtctcatgtgaaattttttgcgagaaagtggcaaatcgatcatctcaaatttcatttgcattgcgtaagcccaattacgttcgacttcgaacacggcaatttggagaaatctgacaaataaaaaaagtcaacaaaagtgattcgaggtttggaatgtcgaattcctgttcagctaattccatgataaaagcgactaatcagtcaattaattacctaaaatctccgattaactcagcagaaacatttcgcgcaatga

SEQ ID NO: 19088 - DNA, 931 bp, Heterodera glycines
  unsure (1)..(931): unsure at all n locations
tgtttaatttgagccgccatgggatggatgaataatgcaatgcttcccccccccccccccaccccctccccttctattcaatcccattcacatttcaattcattagtaccttttaattaccctccttaatgttgctaattgattgttgttcattttctcgaccgtttccccttaaggacctccgttcgctgcagttgcagcaacaattcaccgcccttatgcagtcacaaccccaacaaccgcccgctgcccacgcgcacgcggcacaccaaacagcgcagcaaaatgtccaccaacaccaccagcagcagcaggcatcgcagttgtcttccgcttttctgccccatcagcagcatttgctggaagggaccgcgcaaagttccaacgcctccggcgtgcccagcggtgcccccgcgggcgctttgccatccgcctcgacgcaattgtctgccgcaacggtcggcttttaccagcagctgctcgcacttcaacaagcccagcagcagcaccagcacggcggaggtgcaggcggtgccagcggaagcgcaagtgcagccgcaacaccggcagtggccacgctgccgcaacaattcaacacagcacttcacttggcaagttgccaacggcagagagtcaaaatttcaaatttgtactaatacattggaacataccggaatcacaaaaaccatgatgaaacacattcacccctttccttttgcggcttgtttaaaatttaaaatcatatccccgacttcccctctttcccccctttttcccttctttttgccccccccccccccccccccgccatttcacaacataaacgatcatttggtcttttctctgccggcgaccagtcggccgggaatttgttcgtattctttcagcacaaaaaagcaattgtgatgagtgaatgtgggngggggggggg

SEQ ID NO: 19089 - DNA, 1450 bp, Heterodera glycines
  unsure (1)..(1450): unsure at all n locations
cgcagcaattggcgcccgcgccctccggcgccccgcatgttgggttgaacgtgttgctcggcgggcctggacggctccaacccgtccctgctccactcgctttcgctgctcgctggaggggtgggtgcaacggcaccgacccccgggggctcgatcggccgtttggccaatttctaatgcgttttccctttgtgctgcgcttcagcgccaacaggcggcaccggcaatgcgcttctgaccgcgttggccacccaacttttgctgcctcagcagcagcagcaacagcaaattgtgcagccatcagccaatcatttgaccgccgctttgctgcaaatgctgaacccggcaaccgccactttgtacgcctaccaaagctatttgcagcaacaccagcagcaaccgcaaacacccgcaccagcggcagcgtcggttggacaggcaaagaaagggggaaaagctaaaggggcggagggttggcaaaatgtacaattgaactcgatcagttgactaatgccctaacattgtacagctccaacttctcgcccaattgctcgccggcggaggcgtttccaccggcaccgccggaaactgcggtgtttctgcagttggcagcggtctccaatcggtgctgagcgctttccccggcggaggacagcaacagaatttgttggccgccttggcagtgcaacaggcggcgcaaccgcaacaacagcagcaacagccaacgcaacaagaagaaacacgcattttattggagcagcttatcagacaacagcaacagggcagagaccaacaacaacagcagcaggtagagaagcagaggggggaaaagagtgtgggagaggggaagaaacaaagaaggaaagacttacatgataaagagagagaaagggatagaaaaagtgtgtggactatgggggaaataatgaggaaagaaaaagagatgtgagaaatagagggagaacggtgatttcggctttttagagagaacgtgagcagcagctgaagcagcaacaaatgctgcagcagcagttgggcaggttcaacgccgctgcggtcggtgccatctcttcggagccgcaagcgccgcagctcgaacagtcgccgacgatgacggcaacagcggtggcggcatttgcatcggcgcaggaacaaatgcaacaacagcagcaacaaacggcgacggcaattgccgtggagcaacagcagcagcagcaacaaaatgagcaattccatcaacaacaacagcaatcacaacagacgaacggcaacgccctcagggagcaacaacagacgacgggaaacgccgcgggggcacagccgcaacagcaacaacggcaggcgacgcccaacgaacggctgctcacatccgaggcgttgcaggacagaatatcgcggtaagagaggaagcgttggcccggtctcnntggtgaanggctttccaccattt

SEQ ID NO: 19090 - DNA, 913 bp, Heterodera glycines
tattaagatttgtaataaaaaattattttgtgatttaatggcaaaattaaagcgaaatataaaaagagaggcggtgaaacagcggtggaaaaagcaagaggagcgaaggaccaaaatggcaaaggcgacgaaagcccgatgggccaagaaaagtgagttttttcactaattttaattcaagatcattttttttaaatttcagccgctccacagctgaatcccaatgccaaaattccaccgcaggacgaagcagggccgaggatcggggcccgaagggaacaatttcgaaaaagggatttgaccggcaactcaataagaaaaattttggttcgcgctacagaaatggacgaacttttcacaatggaatggcccaaagctatttgtaggacactcgaacacctcggcaaaattcaaattttttcaaaagtgttttgtccgattttattaagataaaatcataaattttaggcacaaattttgtccccaaatgacctggacggacttgagcgatcaattgacgatttcaaagtgtttttggcagagcaggaccggatgagtgcctttctctcaaagaaacccaaggcccatcttctactcttccacttagtattgaaatgacatatattgaaacgacatgtagccgtagaatcgatgtggaagaaattgaagagaaattttaagcaacagtttgacaacaaaactgaagcctacgacacattttcctgaatttatttggagtcagcgctttggtgatcttgaaaacgtgttttataatttttggtcgcaagtctgagttttatccatgtgaataggctcattccgctgttccttcgtgcaaatgaatcgattttgtcggataaatgtgaattttgaaaaatttgaattttcgaatttttgttcgaattcgggtccg

SEQ ID NO: 19091 - DNA, 1003 bp, Heterodera glycines
  unsure (1)..(1003): unsure at all n locations
tttttctattattgttggatggtcctattaggtcttctttcaggattcccatctccattcttcgtccgttcggctggccaattcgccgaccaccggccgaacgctctatcgaacggttgtcaaagtgccgtcgcccgcctggcgattggtcatcggaggcggtgggaagacaatcaaagggttgaaggtgggtgtcatcaacccaaatggctttgctaatacaacgaatgaatacttttaggagcgttttggcgtgtccatgcgctttttgggcgacaatttcgttgcctacccgcacttcagatcacttagcatctttggacacgatcaaatgaatgttcattcggctcgcgagcacattgagcgcgaatttgtggcgaaaaatgacgaatatttgggagtgcgtaaaaacttttccaattattaaattatttatttttaaaattggaaacaattattataaatgggaattagcattttaagcaaaacacttcccaagcgaaagcaaaaggacgtcggaaattcctttccacgacggatgacccgaacaataacatcgatttgatcgatacgaatgcatacggacacaaaacggagattggcggatgggaatcggacgaagtgaggcacaaagacagaacttgaattattttctcagcattctcccgatgattaataatgcataatgactagggctgtgaattttaggttttaactaaattttttgctcgattgatttgaagaaaggggttcaaaaaacacatttctgcgttgaaatttttcgattatgttgtcactagggatgggatttttaagggtgaaaaagtccaaaataaggccgtaaataagggcgaaaaagtcaaatttagggtataatttttannattgctgttttttacatgaaataatttcagactaaggcaaacaattttattcacctgattgcaggtacaaataagctataattttagaaaatttttttcatttcttagggtatattttt

SEQ ID NO: 19092 - DNA, 738 bp, Heterodera glycines
ccgcagtttgtgcacttttcagcaacaaaaacggctcttcatgttctaggccaatggcacagtggcaaaaaagtctaagaaaactgctccgggactcatgtaaaatttcataaaaatcaaggctttacaactagaggaggtgattaaagacatttttcaaggcctgtctcccattgtgtgggtttctggaaattgcctaggcctggggggcattaatgaagcacgagaccgacaattttccgagactcggttctcgagaccgagtcaagacgcgaacttcactccgagactctcgagcctgagacacacaaacaatccgaaaatttttatcgattcggcgaactctaacaatttattctttgagtacacatcgccatactcagcaaacaataaaatttgctggccctgtgaagaaatgtcgcggttaattacagccaaaaatgtttttcaaaaaaaaaaaaattgttttttgtcggcacaattaatcaaaaatttgtctgtcgtccgtcggttgccatgtgatttattgatgatgtttcaatgttcatcaccaccaccaactgatgaacaatcacatatgttgtacatacacttcttgaacacaacaaaatcttttttcccatggtccattgtttgtccgtccgtccgtcgattgttctttcagcgcccgccccccgtcgtcccctggaggcaaaatttttcgatttttcgcgcgcccatttcccctggggggggggg

SEQ ID NO: 19093 - DNA, 432 bp, Heterodera glycines
aaatatggttttttgaattgcttctgcccataacttttgtgatccttaaggaaattttttgaaattaagcaggctaatagaggatacatagggctatcgaatgacaccaacaatgttggatttggttggcaaagaaaaaagttatagccaaaaacttgtgctcgtacgaaaacggcccgtacgaaaacgaccccgaccctccaacaacagtcagaagagcagaaaatggtcatttttcaaaaaaaaaaaatggaaaattctcccgcaaggcgcgcctctctgatcacagatcctccatgtgcccgtatgaactaaaagccgaggatgagaccacaaaatgccgcaaaaaaacacctgagaatctgcttgtacaacgtggaagcgatgaaccgtgaggaactgtcccgctgcatcagtgtgtaaatctgaaaa

SEQ ID NO: 19094 - DNA, 1870 bp, Heterodera glycines
atttgaatgcaattttttttttttgcatatccactcgtacgaaaacggcggtacgaaaacgtccccggtacgaaaatggcggtacgaaaacggcggtacgaaaatggcggtacgaaaacggcggtaccgaaacgtcctggcccgcctctgaacacttcctttttgtattattattttgcgggccaggcaatttttcatccgcgtcgtttttttacgaaaacaagtttttggttataatattttttgttgccaaccaaatccaacaatcaatcttggtatcattcgatagcattaggtgtcctctattagcctacaaaatttccgaaaaatttcgttaatgttaaaaacgatcccgacccattattttgatcatccataaattgcttcatgtccaactaaattcaacaatcttgacatcattctaaggcttttaaaaatttgaaattttttttataatttttttatatattctaaaagccaaggagatttgtacccttaaaattaaaatttaattattgaaatttgttgtgtaccaacaatttattaataatcaaataaaaataaatgcacaaaaatggtgaggtcggaggagtgcagcggcggaggagaacaaaataataaataaatgtccaatgcgaatgaatggagcggagagccatgagtgagggaatgggcacccttataaagacgcggggtcagagaaatgtggaggagataggcagagagggagacaatggaaataatgtaagacagagaaagggggaggggaaaagtcaataacagtgatgaggtgtaagtgatctttgatcctatccaacacctccctccttatgtcgattgtccctcgatttgggaattaagatcggattaagccatattttggctttgtcggatccaggaccagtcgttgaggtgcttgtttggctcttcctgatcggcgcaaaagaactggttgagcaggcgattgctgacgatttgtctgcggtttgtgcgcgatcggcgattgttgcggattttgtgcctgggtttgatcattttctacaacttgatcattgtcctccaattcaattgggaaacgtcgcctgatttggtttgcatgacgatgaatggctcggccaagcgtcggttccaagatgcgatacgtcggagatgtgccgaatttctctataatttttcccgggagccaaatggctttattgtttttcaaattccaaaaataaattggttcctcattttggaaaatggttgatttggctccatgttttgtgttgaattgattttccatctttttgatgtattgcccttggaattgttgaaaattttccaaatttgttggctggagtttttgtttttcgggatggacaagtgtcattcttgtgcgcatgcgtcggccaaggaaaagttcgtctggcgaatgaccgttgagtgccgtgtttggtgtcgtgcgatacgccaaaagcactttttgaagccaatctttgccttcttgacggcactttttcattgaccttttaaaaatgccgacaaaccgttcagcggtcccattcgacattgggtggaacggcggcgtgaaggtgtgttttatgtcgaattctttgcagaattgtgcaaattcggcggatcgaattggcttccattgtcggagacaatttttttgggaattccaagccgatgcacgaatgatttcagcattgaaatgatgagttggctagatgtcctttccatttgccatacttctggccattttgagtaagcgtcgaccaaaaccaggtatgtttggccgtcagcacacgggccggcgaaatcaatgtgaattcgctcaaaaactccgtttgctgctttccatggctgaagattcgcttttgtagga

SEQ ID NO: 19095 - DNA, 1906 bp, Heterodera glycines
tgtgctcaatgcgcgtaatttgcattttcccccctaaggtccctcttttaatttaaatttatttatttttttatttctttttgattttaatatctttttcaattaattattattattatttaatcatttatttatgattatctgattatcgcttttcaaattaattgatcccctcagggttaatggaattccgattaaaattaagcagtttttgatttttttttttttgaaagagcaaaatacattttattagaccccgtggggttcattaaaattcccctcctttttaagggcacctctaaaagatggctaattcatccgtaaattattattttttgtcttttcttttgacctccttgagttaattaaattccattttttttttgttacccaccggtttaaatgactaatttgtgcgcgaattttgattattttcagttttctggggcctgttccttttcgattttttttttgggtcccacttttttttttttgctgaattgatttttgaaccacgaatgggattttttttttgaactacaaaatttccgaaaccatgcatgggtatttttttttttttaattgaagttaatttttttttttgaaaccatgcgcatggacaattttcatttttttttattgcagagaattgtcgaaaaccatgcatggacaattttttttgtttttttttaaatatttatcgaaccacgcgtgggataatttttgatttgataaaattttctttgattcccagggggttgctggggcctggccaggactctaaaatgattggcgctttgcgcaacacaaaaacatcccctgaaaagtcggtctaccactcgaatccccctcttcccatggcccaagccctgtaagcatagggttggaaccatccggtgctaccagtaaagccgtgaagtcccatacccagtgcttaatgagggatttagtccagaggagccctcttacgcgtccgtaattaggccccgcagggcttggaagggaagggatgatgatggagctctgggggatcctcccaggcggggatcgattggccattccactgagatgactctcgactgatccgactgacccctttgactggctctccattgccttttaagcgcccctcgggatgggaggagtttatcggagtagtaaatgtgcgtgggaaaataaaatgccatttccggtccaggccttacattgttataataccatcaatatttttaacaaaattttttaatttcagacgctaaaataaaaaaagaccaagaataaaactaaataggaatttatatgcaaaacaaaaataattttaaaaaattaaaataaaaaatttcatgccagcctctagaacaatcgcactataacaaatcaaataaattaaattaaaatacactttaaaatcactccaaacgaatggacaaatgagcaataaaaaattggttcaataatgaatataaaatattaaaaaacacttaaaaataaacatattcataaattcttaatgtgtgcctgttaaagaatacaggctttatgtaaagtttgaaattactccaaatattttaccaaaaacctttatatataaatttatacgaaaatttgcaattaaaaggttcaaaagatttgctaaatacatcgacaataagtcatgaggttttatggaatctttatttaaattaagtaatggataatagcatttaaaatacgaggtaaaaattttttttaattttaaaaaatcaatttaattaattaaatcacatgtaattttccctcattatcattcacgtaagtattgttggaaacataacataatttgtcatgaaaatttaacttaaaaaataacctataatttaaataggggagatcttgacttaattaaactcttagtgaaaaataaaaa

SEQ ID NO: 19096 - DNA, 1317 bp, Heterodera glycines
  unsure (1)..(1317): unsure at all n locations
gacaggtgggaagggaaatggcacgcagagaatggacgtattttgagttttttggtgaaattgccgactataaaggaaaaggaagcgcacggagtcccgaaagatgaagattgnattgacagcggagaaggaaaacggtacgtagagtcaaatgtgaatttggtcgacgacgaaatgcaaaaggaagcgtcattctgtgtatttttttggctggcacaaaatttttttagctggcacgaatttttttgactgggactgagtttatgatatgcttatatttttaaatttaattcgaagaaataattaatcatctcacgaaatccatatacaatatttattctaaaccgtatatttatttcttagcaaatatcttttcctttacgctaggcatacgcccaatgactgtcaatcccgctgggtttacactaaatgattgtcctttccaataggctcacacccaacgacttcccttcccattgggcatacgcccaatggctgtcctttccaacgggcttacgcccaacgacttccgaattgacttactttgctttaacgatttattgaaataaatgtatcatttacaaaacagtgtcctcattaggacaaagaattgaattacaatttcttttaatttttgctgttatttttctaaaatttgtcccgtgatcaattttgttaggccatttaccatctttttgagcgcgaaaatggtgcgacgcttcgtgcgcaattgtattgaataaccgtcttgtcccatatttgaaatggtctcggtgaacacgaatccatcctggcaccgcatatccccaaagatttccacggcaatgccaaaactttatgttatcatccagtgtcccttaattaagacataattagaaatgtttcttcgctttgtagtaccgttaaaaaataagatgttgattgttataaagatcattttgcagaatttaaaaaaatttcatttccattcggtatattttttcgaattatttttctaataataatttctcgttgtctccttttggcaaacaaaatttttcgcgcctttttgaggttgttctttcgggcaaagttcgcatttgttggtctggacatttctaaaacaaaaaaaggcaactcaaattgtaaaaaaattaatttggtcgcgttggtgacctcctttttaatggggcgagaacgattgcgtcggcttttcgatcagacacttgtcttgactaattcttgatcgtaaatatacctttaatctgatcaccctcatgtctacatccgataagatggcggatttgatgatagtacgtttgaaatgcaaaaagtctt

SEQ ID NO: 19097 - DNA, 903 bp, Heterodera glycines
tgaaactctaagccgcggtcgctatatattttcatagggattattttcgacttttcgaacacccgatcaaaagcctcaatcatgtcctcactcttctttgactttaccggtgcactgaagatcatccgactcagcacatcaatgcagacaagcaaatatttgtatccgtcgttatcctttttcaactgatcgaaaatgcacaaatcacattgccaatctgtatgaagcccgctgggtatcgtcttgagtcttggaaatattttcttgattggtttatgaatcgtataggttctttgtttttcaagaaacgtattaacgtcctctaatgttatatttttgtctacttttcttgcttcttctaaaaccttcaaaattcccgcatagctagctggggattttagattgaaataaacttttgataatatttgatccattattttggttgtaagaaattgtttattggtatttataatcaactttcagactcttcacctttcatatgttttcttcgcaaaccatcattgttcgaccatatgatgtcacaaaattttcacggtttcctcatttttcttattttttcacttttttactttattatgacattttttcacctgtttaacacctgctatgacaatgtttttcacctgttctgcccctttttttcacctgctatgacaatatttttcacctgttctgcccttttttcacctgctatgacaatgtttttcacctgttctgcccctttttttcacctgctatgacaatatttttcacctgttctgccctttttttcacctgctatgacaatatttttcacctgttctgcccttttttctcccgctatcacaatatttttcacctgttctgcccctttttttcacctgctatcacaatatttttcac

SEQ ID NO: 19098 - DNA, 3001 bp, Heterodera glycines
  unsure (1)..(3001): unsure at all n locations
ttttccgatttttgaatttttaatgggatttttcgggaaaaacgccaaaaaagggcaccaaatcgctaaaactaatctttgtggttttttagatcaaaggagcaaacacatgttttttggctgccttttctatcattttccaaccctntagtacaccatcaaatagagtttcaatagctctacaattttactcagaggtgatctttcgctttttctattgataaaaatggtttattgtttttttgggaaaagataaaaaaattcaaaaaaaccgaaaccgaaacggtataccgaaaatttttcttcggttttttcgatttcggttttttaaccaaaaccgttcgaccgagaattttttgagtttttcggtttttttcagtttcggttttttttcggtttttaaccgaaaccgttcgaccgaccctcttgtccggtctctaataaaaactatgattttcttgattaggaattagaaaatactttgaattgtttaagtattcatttgaattgagaaaaaattcataaaatcgcgctgtcgataaaaattgatgcatttttgtattgcgttaaattcacgagttaattcttttatcatttttgataatttccgtgtcaaatctaattactattctcataaatgacagctttgctcatatgtacatattgcttctcactggtgaaattattattgaaattgttccattaatttgtttagcctttctattgtaaaaaagtcaactgaatttgagatttaattatctaaattaataataaaagttgccttcataaggcacaatttgacaatgaaaagaatgatcttaaaagaaaagaaaaaaacagaaaagagaataaaaggcaatcgagaatagagaaaataaagagaaaaaccgcaagggaaaatttaaatctctcaatgaaaatatttctgatcaaatttttaaaaacaattaaattatctagaagttaaatttttgtttagctttattttgttttgctggagataataaatggaaattaggtgatatttaaatattttgttttaatggtttttgaagcggcataaatagaacatttagagaatgaatttacatattttctgaaccagaatattttttagaattttatttaattatttcaaaactacctttccgataatttttgaaattcaaataattttatattttatttaaatctgtttttggtcaaactcataaattaaagttagttcgaaaaatctgtatttactgctgttcaaacaaaaattttaatgaattcaatttaatttcaataaaatgacgcaaatcccaattattttcttgatgagtttatggtttaattaactttagtcaattaattagtaaattcattttttaaagcttaaatatttaatatttaagatgggctgtccttatgctttttcctgtaaatttctgctcatcattttcacattatgccaattcgttgcgccaaactttagcttttttggcacttttggcgattgttttgatttgtttaacattttccacaacaattggtgcaaggagaaggttgcagtggagagcagaagcttggaccaaatgtacacttccgcgttgactgaaggcgggaaattggtggtgtacgctgggggcacaatgaggggccaacaagtaatgaaacgccgaaattgcctaattaaaaaattaaacggtacagaaaatttacaaaaaatcgatattaaaattataaataaaataagattcttttgatttttatgcaatattaaagggacccacgcgtttcggcgctggcgtttcgacgccgatgtttcggcgctggcgtttcggcgccagctcgtttttccacttaagcttttttctttggcatccaaatccaacaatcttggtatcattcgaaagctcttatcatgctctattagccttacaaaaagcggatagattttcaagcctgtaaaaaattttattaagaaaaaacttcaaaaatttcgacttttcgaaattttcatgtataacttttttggtaattgtctaatcgcgaagcaatcgcttagaaaaagcttctaaacatgttaagctttcgaattatatcaacaatgttggatttggattagatagaaaaaagttatagccaaaaacatgctggcgccgaaacgccagcgccgaaacgccggcgccgaaacgcagtggacccattgttactgcataaatcgttaattaaaaagaatattaaaaattgaaaggttgctgaatgaaaaaaaggaaaaacccatggatagaagaagcattgggaagcgtctcaaaatattttccctcttttgcatcattcagccgatcactttaacggcgacaaccgacaaccgttgttcgcccccccccccttcccccatttctctccctatcagtcgacccgggggcggaggagtcaaagcaccgaatttatccaaatgcaccgaatcccatcactcactcactaaccaccaactgttgatcatagcaaactattagaggagggcagcagagagacaggggaagaaggagagagtaggggggtagtgagagggaaatagagaaagagagagagtgagaaagacgaagagaaagagagatagaaagacgaagagagagagaatagaaagacgaagagagagagagagagaaagacgaagagagagggagagagagagagaaagacgaagagagagagagagaaatagaaagacgaagacagagagaaagatgaagagagagagaggagttagaagcacaacagagaaaccagaaaaacatgaagcagcagctgaacagaacaaaacagaacaacaacagttgccttcttcccaaagcattcctttggccaccgcattcccggaaagaagaaaagaggcgaggaaaggaaaagcgagcggaagttgcctcattgcaagcagagagagaaagaaaaagctttgatcatcgatcgatcacaggacggtgacgggaggggggggggggggggggggggg

SEQ ID NO: 19099 - DNA, 955 bp, Heterodera glycines
taaaaaatgaatttttaaagcaattagatatattttacagtaattaaaattatttatttttattgatggattagaacccgagctcctaaaatgcgaatttaaccaactgagccaccagttttatgtgaaatacagccaaaatttcgatttgtgaggcctcataactttttaatttcttcctatgggggcgtaatattaaaaattcacaatagaagccgaccctgctctatcgaatggtatataacacatatgcattttccgagttacagttcgggtggttcccttgttagtaggcgaaatgtcatcgtcccttttttatctgctataaattcgtgaatttcacttgattagaatgtttttgcttagtagacgaaatgaatgtttttgggttagtaggcgaaaggtcagtaggcgaaatgtcggtaggcgagatgtcgagtaggcgagatgtcgagtaggcgaaatttccgtacaccgtaatctttgcaactagcgccaaaaatcttattgtttgggtccgtatcttagtttttgagccattgtctcttatttaaaaaaaaacttacgaacataattggagggtttttatgaataaaaagtgggttagctaaaaagttatgccgattttagtggtaaaacttttgtttttatattttagatggcaaaaagtggtgctccaacaattgacgcatttgttcttcgtcaggcattgttttccacagctgttccaagtgcctccacaccgaatgcaatgcttcatcgcctaaaaaaattcgggctaaaatttcaaaatgctttttgaccctgctcgtccaaaagtgccaaaaattgttgtcgggcgaagggcacaaaatggttcaacagcaagtggaccttaggttttaaggcgagcaatgtgcgcatccgtggctgatcgttgagaaatgtccgaaaatttgcagagttttgcagcgat

SEQ ID NO: 19100 - DNA, 1699 bp, Heterodera glycines
gtgtgactatgtatgtcacactttgaatggattatttttcgaagcgaaagcatttgcaaaaacaaacagagaatgaaagagagaaaagagaattattattgtaacaacaaaagtcaataacatttacgaaatcaacacccgtaaattcgatttctcttttcttattattgaattattattccaatattccgaatgttaaaaataaagaagtcaaatcaaacgtttcattccgttccttgaacaaaatcattttaatagcaatttttaatggtcttgaatgtgtacaataaattttttaaaaattatttgtgtacactaaaatgattttttgaaatatgtataatcccctatgtatttaaaaaaccttttttcattaattgattttatattaggctgcggttgcgtttctcctggtgttttattttcaatcaacttttacatgaccaatcataattttcgcgatcaatcaaaggcttttgtcgatttagtatcattttaacaaaaaatcagacttaaatgttaaaatctctgaagtaattcatttattgattagttcgttgggtttgctgccgatttttttattatcggtttgttttttcaattattgtaatgatttccaattgatcgaaaatattataaaagtaattttaatgattttttaatagttttaaatttttttaaaatttttactcccattttaaaaaaccttttttcatttgttaggatttatttgcagttctgctacaattttagtctccaatcaattttatgacacccaaccacaatttgcgcgattaattaaaaacgtttaccgtattatctctaattatcaagagagagagaaaaaagtgagaaagaagaaagcagtgagagagaagtaagaaaggagagagggagagagagagagagaaattaaaagatgagggaaaatgaacgatagagagcgtgataaaaagaaggggaggaaagagagagagagagaaaggaaaagagagagagaagagatgagaaagaacaagagagtgaaagaaaaatagaaagagagaagacagaaaatttgagagaaaaagaaagagatagagagagagagataaagagagggataggagtgaaagtagttagagagtgtgaaaagagagagattaagagaagaagagggagagaaagtaaatgagagagcgagactgaaagagagaacgagagaagagattgagagagcaaaggagagtgaaagaaaaatagagggagagagacagagaaatttgagcgagaaataaagagagagagatagagttaaagagagggagagggagagaagggaaatgagagagcgggattgaaagagagagaaaaaaatagagtgaaaaacagagagagagagagagaaagagagagacagagacagagaaatttgagcgtgagagagagagaagaaagacaaagagagagaaagagaaagagaaagtgattgaggaggttaaaagagagagataagagattacgaaaaagggagaaaggatgtgagagagggaagaaagagagaaagaaagagagagtgagagaaagaaaaagagagagagtggtgagtgagagagaaagacagagagagaaggaaaaagggagagaagagagagagaggggaggagaaagatagtaagagagagagaaagaaagatagagggagggagagagagaggga

SEQ ID NO: 19101 - DNA, 1581 bp, Heterodera glycines
  unsure (1)..(1581): unsure at all n locations
agaaagtgtctgttaaatgcaaaaactgtgtgaaaaaattgttataactccattcagagaagagatagaaaaaaaanataaaanataggtttagagagcccgtgaacagctgcatcggatgcaagtgccgccgttgctgtacgcctaacagttgggagcaatgacggaaaattgttaaaaaagaaccaaacaaactcatcaatgttagctccgttgacaaccgaaggggtaattgaggcaatgaatgttgggttaccgtaccagttattaaaattgatgtttttcaaaaaggatactaaaactgggataaccccattcagagacaagtcaaaaaaaataataataggcttggactaccatactaattagaaattttagaatgtgtcggttaaatgcaaaactgttgtggaaaattgttataactccattcagagaagagatagaaaaaaaataaaaataggtttagagagcccgtgaacagctgcatcggatgcaagtgccgccgttgctgtacgcctaacagttggtgagcaatgacggaaaattgcttaaaaaagaaaccaaacaaactcatcaattgttagctcccgttggcaaaccgaagggtacattggggcaatggatgttgggctaccgtatcagttattaaaattgttgtttttcaaaaaggatactaaaactgggataaccccattcagagactagtcaaaaaaaataataataggcttggactaccatactaattagaaattttagaatgtgtctgttaaatgcaaaactgttgtgaaaaattgttataactccattcagagaagagatagaaaaaaaataaaaataggtttagagagcccgtgaacagctgcatcggatgcaagtgccgccgttgctgtacgcctaacagttggtgagcaatgacggaaaattgcttaaaaaagaaaccaaacaaactcatcaattgttagctcccgttgacaaaccgaagggtacattggggcaatggatgttgggctaccgtatcagttattaaaattgttgtttttcaaaaaggatactaaaactgggataaccccattcagagactagtcaaaaaaaataataataggcttggactaccatactaattagaaattttagaatgtgtctgttaaatgcaaaactgttgtgaaaaattgttataactccattcagagaagagatagaaaaaaaataaaaataggtttagagagcccgtgaacagctgcatcggatgcaagtgccgccgttgctgtacgcctaacagttggtgagcaatgacggaaaattgcttaaaaaagaaaccaaacaaactcatcaattgttagctcccgttgacaaaccgaagggtacattggggcaatggatgttgggctaccgtatcagttattaaaatttttgtttttcaaaaaggatactaaaactgggataaccccattcagagacaagtcaaaaaaaaaaataataggcttggactaccatactaattagaaattttagaatgtgtctgttaaatgcaaaactgttgtgaaaaattgttataactccattcagagaagagatagaaaa

SEQ ID NO: 19102 - DNA, 2491 bp, Heterodera glycines
atttttgtgcgcccatttcctttgttcgcacttcgcttctagaattttctgtccattttttgtctctctcacaatttgtccacgtgcatggccttttgcccgcccccttcgaaaattgtctatttaagcgcccccggtcaaggggtcgctctcttctcttccttccactccccttcgcttcatattcggtctgcctgtgaccaattcctccaattcccccgtcccatcgcccaattcgtcgcttttattcattattcgttttgctttaataaattcgtgctgaaacggcttggaggattcggaaaggagggaaaagcaccctccacactccatcacattcggcaaattctcgtgcgaggccaaacggaggcgcccattcacgtcttgacccccttcctttcctggcagccctcgtcgttctcccccaatcctcccgatcccagttcctttccctttggcattggagaatccgggagttggcccggagcgtcagcgaatttcaagcagttcagactcccgcagccggagtctcgcggatcggtgtcagtctcaagccagccggagcagccgtagggacggggcgaattcccgtcgtcgacgaaaccaagcagggcagagaaggaaggaagagccgagcggtgccaaaccgtccaccgaagggcaggcccgttcgtcgccgctaatcccaccagccggagaagcgcgcatcgccggagtcagtctcccgccagccggagcatccacgggaggagacgggagtcgaaacccgtgctcatcaagtcgagagcgaacgtcacgaagttcgagcagttcagattcccgcagccggagtctcgcggttcggtctcagtctcccgccagccggagcatccgccgcaggaaacgggagtcaaaacccgtttcatcgagtcaagagcgaagagcaactcccgcccgttcggagcagctcaaagggtcggacaagcccccttcacaaccaatcttgtcgagcaactcccgcccgttcggagctgctcaaaggggtccgacaagcccttcaccaaaatcttgtcggtggtgccgttaagcaagcagcaaatcgctgtataacatccaacagtacctgttcaattttgtcacccctcccccctcccattctcgtccccctttggcgctgatcggatcggtcagcagcatcagacccatcaggacgaacggcgaaagagggggacattccctttacggcacagcgagcggagtgagcagaggaaaaagggacgagagcggtgaagaggagcgggaaccaatcccgcctcagctgggatttacaagccacacacttggcccgcccgagtaaaagattggcgacaatgtacatattttgatcactttttgtacatatttttggcagccctacttattaattaaagtcatgcctactacggccagcagttcgaaggccttagtgcctgcgatcatttgttcatcttgacaaattggaagagcaaacatttttatttgtgaaatgttggcttccgcgccattgcttcggtctaataattttatttccttataaaaagagcataaaagaaaatcgatttataaatttatttttatttagaataaattttcgaatggaaattcttttttcaacctagattttttactgtattatttttgagaatttttaaaaaagaatattcataaaattccaattcttacatatttaattcattttagtaaatatgcatattgagaaaattttccccgaaattcttatgattttaattttattcataagtttttcggactcggcaccacccaaaaataaatctgctgaaattgtcgacgcgtcaagttcagatgattattgaataaaaaattaatttaattaaattctttaattataattttcaaaacaatttcacaatttgttactgaaaactccgcgcacaatataaattatgttgtgtaatttgcttacgaatacacactgccaaaaaaacattttttgttaaatttcatttatttattatttttatcataaaaaatagattaacttaaggaaaatatacggtaactgattatacggtcgacatcggaaaacaattaagcagatttcaaacggagaagttaattaaacaagcaaaacaatggataaaaaatgtgcaaaatgggcttaaagaagacatttgtttggctcacttttttacttaattatgaatcacatgaaaataatgatgaattcaagttgtataataatgccagggtctaccgtatcacttttagtattttcatttctgtaagcataatacggtgatcgtccctttattttctcatagttgttttgtctttccggtcatgattaacgaagatttaaggcatctatgtattctgtactgaaagcatggtttttcaatgcctgcgataattagccgcctaattaatctgctttattttatttttgagtttcaaagccaacaccttattaatagaggggctgccaattaca

SEQ ID NO: 19103 - DNA, 958 bp, Heterodera glycines
  unsure (1)..(958): unsure at all n locations
cgcacaaatgtcgccaaaatgaccaattcgatggctccccagcagtgttttgtgtccccattccttccatttcaacaccgtcgccagttcttttagccatttcgaccaacaaatccctgacaactccgacaacaacctcctcgtgaacatcaaagccaaaaattggctgaaaatgtggaattgtagagaaaatgatgtcactggcggtgaacctaaattttgccgttttttgggtgaatcgcagtcaaaaaccgacattaaaagagcagccaaagcgcctttgacagaatggagaaaggaattttcgagcttttccaatgttttgctcagcaattcaatacgatcggacagaaaaatgtccgacgattgaaatttacggcccgtgtcactttgagaagaagaggaaggaggcggaaaattgagcaatttggaaaaaagctaaaggaaattaacaaaatataaagattgaaaaagaaaaacaaacatcagagattgatttcagaattgtattcagcacattgtgacgacaaacggttatttgatgaagagctaaagagaaattcggcggattggattatacccaaacaaaaaacggaccactcctctgcactaattcagcattaaagcgagaaaaattgtagccttaatcattgaaattaaaataacaatgaaaacaaaatgaataccggaagacagtcgtgtcaaaacagatattttgcgaaaaattcggtccaacgccttcacaaaaagggcgcagtcgcttacagattcttcagattcaaaacgaccacagacaatgggttcaaaacgattcataacacgttcaagaagatggaccaattccgccttggaagcctaaattcaaaattcctgaataatttaagtcgattttccctttaactttttagatttttgaaattaatatgnnngatttcgatcacctgttttacaaaaattt

SEQ ID NO: 19104 - DNA, 1855 bp, Heterodera glycines
ccccctcggttcccctaaagtttttgaaaaaatttgcagcaaaaaaaaatcttaaaaatctgattttttgattccgtttctcaaattattaaaaatgatcatcttaggcgaaaatactaaaattatattaattgattaaattgtaaaaaaattatttaaggctatgttgttaaatgttctcatttttgaaaatctgatgtccggtctctaatttctacacataccatatcttgttcaactgccacaagctcttccagccctttttttctaagcaaatcctggacataagcttctgcgttgaaattgggtgaattcaaatccatgtgtaaaaaagaggcagtaaatttaaaaaaagtctgagaggcttttggaaaataaacaaaatgccaaacaaaaattaaatgatcgcgaatagagacaagtgcgggaacggatccccgtcgtgccggcaaaggtttttaatcccaatctcgcaaccggtgattctgcagattttgttttgtacgggattcggcaggatgcttgtatttattaaattgcaaaagatatatttttttacatttcatccgtttataactttgttatcaattatcaggcttaactgtaacaccatcaatggaacaaagcaatatcgaaactatgcggtcaaaaacaaaattacaccacgagggggtgctgtatgtatacgataaaatgagcgcttcttgcgatgtaaaattttggcgttgtgagttttccaacgcgcgtgacgtgagatgcaaaggtatttgttgagaaggaaatgcttaattgagccagtgctttcaaagggaggcttcggcatatgaaaatgcttaaattgtgcgcttttcctctgaaggtcgcttgcacaccgatttgaacggcaatgttctgagagtggtcggcgaacacgtgtgcccttccagcgctgctcgcgtggagtcacagcggataatcacagcgatcaaacgacgtgcggtggacacgatgggatccacggacgaaatcctcgcgcatgcgttacagaacgtatcaccgtctgtgcttgccgctgtccccagtaaaaatgcggcgaacaaagttagaaaaaattgaggaacggacggggaatatcgcgaaaatcaaaaatattatttatcaaacggatttattgctttttaatattgaggtattttcagctcatcaaacgcgcgcgaaatgataacaaaggaacattggagaatttcaaacactcggagaggtcaggcgaaggccaattagttttaacccgggctctgtcccaggtgtcttctggtccttattaatttgggattggatttggccggggtccgtttgagacttaactcggccaatttttaaatcataaacctcgctttcgttttttggcactgactgcacttttttggaatttcttcacttcagcatcgattctgcccattctgttggactcactttgaccattgacgctgacgggcgaaattatggcgagccgtgccatcagcagcaaacgatgcgacagaacggtgagcaaaagggaaacgataggaacattctttgtcataaaattcattgcgttaccattgacagcccaattccccgcggttgtccttcaaacgaaccaacagcaaaatgcctcaacttccgccgtcgcacctcagcaacacgtcggtccctttgaacaggcaattaacttttttaatttaatttttttttaaaattcctttaggtttttttatttttctgattttttataaatttttcttagcgtgtctaattccttttttcaccagcagcgggtgccgaagtccaactttcctgccagttcagccatatcaaactttgacatttcaccgtc

SEQ ID NO: 19105 - DNA, 551 bp, Heterodera glycines
gtcagtgccatgctaataaatttggaggcattgctctccccgggaaattagcattcgtttctccacgagggcgacccctttggcaaattggcgttgctgaacagctgcgaaatgaacggaaacagccaaaagcagcagcaaaacaacggcaacagaacacaacggcagtcgacggttatcacagcggaggacggctgccaacttttgagagtcgacgcaacgaaattcagcaggtgaacccccgcggggggggggggggggacagagtccgacggggaacaaaaagggacaaaaaaacagtgccaaatggaagggagtaaatggcataatactgatcagattgctgagtgagatggagacgaacaccgtccggctgaaggagtatatggaatgcgacaatggcaccactgaaaggccattggatgtgttggtgttgcagagggatgccggtggaggacggtgggaggagttgacaattgaaagcgttctaccgaatgccgacttaagccattcgctcatcgccggattgcctaatcatattttggagtaca

SEQ ID NO: 19106 - DNA, 1570 bp, Heterodera glycines
ttggtcacaatggtggatgagtcgttcgtcgttctgtcccggctcggcacccgttcttcctccaccaatgccctccaacccgcggccgattcgcttctcctcgacgttctcttctctcttcccttttggatgccctccaacgaattgtgcaacatgctcaagctgtactacagctttggcttttcaaactccatcgaacaaaacgtgcaaacaattggtggtgatccaagtgaatggagccgaacggcgaacacagcgacgaaacgacggactgtcgcttttgtcagtgcgtggcaaatggcaattggtcatcgctttttcctcgactccgtggccaatgcttttgtggtatttaaaaacaaaatgtttaaaattgaattcatttttaatttaattcaggaagaacttttcagcagtttgttggaagacgtgagaacagccgaagagacaacagaagcgatggaatttgaggaaatgatgcgccaaatggaaacactgatggaattccgagagggattcatgcgaaagtgctaactaaaatttgacaaagtatgctacgaaattttgtgcagattaagccgacacccacgcgttgtcctggacaaaggaaaatacggcgacggggcatcggcacccgacccaattttgccaagagatctctgtaagccgcaataggcttattgttagctcagcaattcgctttttttgccaaggcattcaacccattcatttgatgaatgcgtccgatcactccaaacggtcgatcactttacaattgcgaatggacaaaagtgcggcagaaattgcacaaatggcggcgaacgccttccaaacgcggcattttgttcacttatcaccgcacattaacggcgatgctcatttgcaaaaaggggaacaattggtggcaggaaatgagcaagaaaagggggaggaaggggtcgctggggaggacgacgaatttgtgttggtggaaatgcgcccggggggaggggaagcggcgacccgccaattcgagccaagggaatgttcggtgccgacaatgctcagcccaacggaagcggaccaactgttcgtggcacgcagaaaagaactgcataaactggcaagtgaagcatgcgactgacaataaatgccgatcaatccgttccccccccccctttcagtctctcccaattgagtcccctattcccctcgggtcggttccttcgctgtgccttcagctcagtcccatgcgaattgccaaagcgatggccctccatcacttcaaattgttagccgctacttctgcctctgaactgcttgttcaagtttccttaccactctttcccaccgtttgtcctcctcctcaggtggtcggccgtgaacatttcccccccgcgttggctccgtccaatttggacgttttgctccgccgcttccttctcgtacaaagttgggcaagtactgaagtgctgctggcaaaccctgccgaccgcttgaccattctccaagcactgatcgaattggcggaactgtaagtcatttcgcaggagagtccgttccatcgtattggcccactacagtgtttgct

SEQ ID NO: 19107 - DNA, 1036 bp, Heterodera glycines
acttttcggcatcccattttgaactataagcgtattcccccccttgtttataattttaatatttctgtttaaattttgtcataaaaattttttaaattaattaaatctgtgctaattaaggactctttcattaaaataagaaattgcttctacgccttttcaattattttgatttattaaattatgatttattttaaataatttactttttaattagttttttgctttaaccactcgtccgatcgcatcgtaaagaagtctttgggttttctaggatgtttagcgtttatttgccttataaaattgtgatttcgtattttctgctcttgatttattttattttttcttcaagtcgtcgaaatttgagtatatattttttgataatatatttactaatttattaaacatggctattatttttcaaaaaagggggaggggtaccatcgacagcattagcaaattaaaatttgatttttttatacaattttttttttacaaaaaatggggcggctgcttaactgaccatatttataggcaattaacaacgatacgtgcaaacaaatacctaaccctactaaacttcataaatgtatcaaaagaaaaaataaacatttttaaaaattcaaaagataaataaatagggctgggaattttatgtaagaaaaatcgcgaaatatgtaaataaaatatgtataaaaattggctaaatatgtatgaaatatgtacaaaaatccccaaatatgtactaaaatatgtaaataaaattttttaaatgcttattttttgggaaaaaattcttcgtaaatagtaaaaaggctcaaaatgccataaaaattaccaaaatggcttagaatcacatttagtactttaaaaattaatttttttgatatctttttaaaaaaattgattttttaaaagtttatttttcaaaaaaattttttctaaatttcaaagaatttctcaaaaatgaaatgtttacgaaaaaaattgcaaaattttgaatttttttggtgcatctaaaaattttcattaaaaa

SEQ ID NO: 19108 - DNA, 844 bp, Heterodera glycines
  unsure (1)..(844): unsure at all n locations
cttttcgttttcaagttttaaaatttttaattttcgtntcgttttcatcagacggattttggacgaaaaagacgaaaatatttcacccttaagaatgatttttttggaaaaaaacaaatcatctcgtagaacgagtgtggtttcgtgctacatactatcacctttttctttacaaaattcattgtaaatccaaaattcttcccggcggcgcctgtcggcaccgccggctcccgaaattcccctaaaattttcaaaatctgccattaaaattgtcaattttcaatgaaaatatgttaaatttaaaaaattcttattttccttatttttcttaaaacattggcccaaaaacacaaaaataaaaacttttttttaatttccaaaaatgtcataaaatgcatttattcacgaaaaccccagaaatactcactttaagtaaaataaatataataattctaaatttacaaactgaactgacccatcctgctgccgggaaaatcatttttacactgtatttttaattccttttatttcttttaatgtttttgaaatttaacctaataaaacctttgattttttatcatttttcaaagtttttagaatactcccgattttgctcttttctctcgtgatttacattcaaaaaataaaattgtgatctcatttttcgtatttttatttgcgtgtttaattaatttatctgattcaaaattaatatgaggctaaattggttgatttatataaaattgtttctctgtttagaaaaccttttaattttaatttaaaatgctttaattcaatggcaatgttgtgtagttattttgtttttattttttaatcttctcgt

SEQ ID NO: 19109 - DNA, 2495 bp, Heterodera glycines
  unsure (1)..(2495): unsure at all n locations
taaaagtgaaatcgttttagacacccaaatggattgtcctccagggttttggtgtacaaatgnacgtaaaagtgaaatccttttagacacccaaatggattgtaatttcacgtttttggtgtacaaatgcacgtaaaagtgaaatcgttttagacacccaaatggattgtaatttcacgtttttggtgtacaaatgcacgtaaaagtgaaatcgttttagacacccaaatggattgtaatttcacgtttttggtgtacaaatgcacgtaaaagtgaaatcgttttagacacccaaatggattgtaatttcacgtttttggtgtacaaatgcacgtaaaagtgaaatcgttttagacacccaaatggattgtaatttcacgtttttggtgtacaaatgcacgtaaaagtgaaatcgttttagacacccaaatggattgtaatttcacgtttttggtgtacaaatgcacgtaaaagtgaaatcgttttagacacccaaatgaattgtaatttcacgtttttggtgtacaaatgcacgtaaaagtgaaatcgttttagacacccaaatggattgtaatttcacgtttttggtgtacaaatgcacgtaaaagtgaaatcgttttagacacccaaatgaattgtaatttcacgtttttggtatacaaatgcatgcaaaaggaaaatcggcctttcgcgattttcgtgcctttttttcaatttttggtgcctattatagtgcctttttagtcgagctctaatgatgatcgagcgagtttttagcacataaaaaactgtgtacagggagagagtgccaatgcgaaaacacagacctggcaaaagcccgtctttatttcatttatttttaattttccatttttataaaattttataattgaggggagggagggttacttggatggaatttatgtaaaattcaatttttagtaaatagacgcacttttttgttcattttttcgttctcatgaaattccataggagcataatttatgcgtatttatttgcccagttttatatttttttaaagcaaatattcacctggtttttgtcacacacacgggaattcatgtttacttgagatgcaaatgcacgccaaaaaggaaatcgtttagacacacaaaatgaattgtaatttcacgtttacaaaggaaatcgttttagacacacaaaaagaattgcaatttcacgtttacaaaggaaatcgttttagacacacaaaaagaattgcaatttcacgtttacgtggagtgcaaatgcatgcaaaagggaaatcgcttagacaaacaaaaagaattgtactttcacgtttacttggtaaagaaaaaaaatttaaaatgaattttcaaataatttttcgtaatcaccaaattgaaataatgactgaaggtgataatttaatagtgcttcttgctctaacaaataagctatgtcaatttcgacatacttttttttctttaatcggaaaatttacccacaactaaacgaatttattacatatagtttattaggcaaattgattaaaaaaatgctttatacaaaaatcatatcacaaatatatagcacgcaaaatttttggtgtttcacccactagccttcttagtctaaagagcttagattttgatcaggtatacctaacaattaatatcaagaacaaataaaagatataaaaatatattttatatctttaaaaagcaaaattaaaatgaattgctcacattatcaatgacaacataattcttgtaaatcaggaatttataagctaatgcattgcacaagttgatcagatcactacttaaggatgatatgaagtgatcaaaatttttagcaccaagaggaattgaaaaaagaactttttggaaaaactttataaatttttgatgttttcattcgcattaactttcttaactccgaaaaatcacatataaaattcaatattgagatgatcatccaatttaagaatttttttttgaaaattaaatccagaaaatatgacccgcaaaagacggtccgcaaatgtcgcactacggtacaagtgcacgtaagagtcaaatcattttagacgcataattgaagtaaattataatttcacttttcttggtgcataaaaacatcaaagacatagtaatttcacgttttattggtgtacacataaataattaaatcgcaatttcacgttttattggtggacacataaataattaaatcgcagtttcaccgtttattggtgtacacataaataattaaatcacaatttcacgttttgttggtgtacacttaaataattaaatcgcagtacgtcttattggtatacacataaataactacatccctacaaaacaaattctcaggtgaaacattagtatttgctgtaagaattggcatggaaagggacatttggtgattctttggaattcatcttttggtttaaaaaataaatttatgtttttcgttttgtaattctgtcatcaagatcaaaaaaa

SEQ ID NO: 19110 - DNA, 1819 bp, Heterodera glycines
  unsure (1)..(1819): unsure at all n locations
atttttcaaaaaaccccggggcgctgccactgaatcttcaccccgccaattcaaacaataaaaaggtttttcaagaagaccttccgaacgtcggcccatccgtccatccgttcatttgcttaagtgccgtgccatttccaatttgctttttgcttttttaattttttgaatttccgcctgttttttctttggcacttcctcaaaaaaacaacaaaagtgatggcactttgccatccggaaaattggcccaaaatcgcaattccaaaaatgccactcgaaggcaccaaaaatttgccaaacaattcggaaaaaattgtattttatttcgaaatctaaagaataacaaaagtttaactttaaagaaagttattttcccaaattattttttttttgaaaattttcatttcaaaattaaattattattaacttttataaatttctacataatgcgaatagtaataaattttatttttccaaatatttttcaacttttaaaaattcaaaaaatgaaagcattgcttttgcacatgcaaaatgtttgttcctaaacattttcccgccgctgctgctcactgaaatgcgattctgcatcagttaccatttttaaaaaggcgtcaaaagagccgtgccaaaaatggaaaaaatgtttttttttggcatttcgttgcgtgccatttttcaaattttgttgttttatttatgtgtgcttttttggaacagcagcagaagcagcaccgcatttgacggcttattgttgttagcatcactcactgacgacgacgagaaaatgttgcgaaatccacaagcccaaggccgatctcaggtacggtaggagcaatcccatcttttctccgcttaatattaggattacagtagcggataaaatctaccgtaatgccgtctcatgttttacctgttatcttttttacggggctttaaaatagcagggacaggctctactgtatgaggataccatactctttatccactcggttaaagcagcttttaaataacgggacagtttctactgtatgagagtaccgtactctttttcctagtcactattggttctatacatacaagcatttatttacttgtattcctgacttgactgatcacagctgatctgatcgatgatagggtttatagtcccgtttacagtaggatattatcgtacccttccctccacacttctacagtccttccggcaccgacccgtgtccgcgcatggccggcgcgccggccccagcgtcggcaaccgcacgcacaacgccagccacgacggcggacgcgtcgcaggagcggcgccgttccacacccaccataacgcgtcgttgcagtctacaaaagtgaaaaacgaaatacaaaatttaaatacatacttatatgccgtacgtcccaccaaccaaatcttgtgccgttacggtaacagaaaaccctttcagtcgctcgcgcgtcgaaccgcgcatcgacgcgtggcccgagccgaagcagcgcagcgaggcggaggagcgcttcctggcactgccggacgcgtgcgactacacgcgcgtgcgacagtttaacattgacgcgaaggtgtgccgccacaggggggagggcattatgtgccattgaatctggtctgatctgaaatgccgatctctttactgttcgggtgccgtcgtcctccgatgagcgtacctggagggggctaacacactagagctcggcattttgaaagaaaagcctggacctgagtccatgtttgagctggatttcctggacaaaaatcctngagaaggccgaggcctnaggaaaaacccaggcccataaaaac

SEQ ID NO: 19111 - DNA, 1484 bp, Heterodera glycines
  unsure (1)..(1484): unsure at all n locations
ggaaaaatccaggnctggatgcaggtccagcaggtccaggcctagctctaactaactctattctgatntaaatttctttatgcccattaaaaaaggtcattatcatttccctcctttccgcttcagggagcggtgatcgctcgcggcgactcctttagacgcaagcgacaacagcaggtggtgcacgctcagcgcagcaacccaatcgccacggccggcacatacggcggtgctgacgacggcgcaacggtcaccgacccgcaccaattgcccatggcgactgaactcgctgagcgtgcggcgtacgctggcgcaccggcgacgcgtagtgcggcgagcagtgtgagcagcagcggcgacagtggcgttggcggcagcagcacagtcgccaaacaaacggcactcgtgagcaacaacgccagcggcaccgtcggcattggcgcgcctgaaattgtcggcgccggcaacgatgaaatcaccaccaggcttcatcagtcgccgcacccaccgccgccgccgccggtggtgttggaggcggcgagcgacgccactggcgacagtggcgcggaagcggcgagcacttcgtccacgtttagggtcagtcgctagtgctttgtcgagagtctcgagcattaatggatttttctgaatttttcagatttgtgttcttggccagagcggttccgggaagagttcgctgatcaggcgattcagcagctccgactatcgcaacgttttttcggacgagttgcgtacgtttttaaattataataaaaactaattaagactaattgtttaaacacacactcattttaattacctaattcaaaattttctttatttattttttatgttcttctaatttttggctataatctgaatctttgaaatcccaagttatgttttaaattttcatatgaacatttctctttttgcctatttattttttttaattaaaaataattatttttcttatttttaattaaaatttttcatttttttaattcctttcagtcgatgattcaaattgtgaagcacaacaaaactactccgtttccgtcaacattggtggccatgagtgcgacttgagcttcaccgagtgcgacgacctccaaatggtcggtccattagaagcaaaaaattttaaatttggcgcgtgccgtttttcgagtccccagcccttggcgaaatgatattttttaaaatttgctaactaacattaaggaggctcacaacagacaacggaacactttccacgcctatttgcttgtttacagtaagtgttttaaaaaaataatggagaattaccgtagtaatgtaccgtaatgggaactaattggctaacaaataacattaccgtaatggaaaggctgtaaaccgttggccaatgtccgtgatgaaagggccgtaaactgttggccaacgaatcgtttatcactgtgaggagtcgcccttggaaataaaggggtttctgtaatctgtag

SEQ ID NO: 19112 - DNA, 926 bp, Heterodera glycines
agcctaatttagaaaattctttaagaatgcaaatcattttgttggctctctctatggtcgccagcctcaacagctgaaccattctcaacgcgctggcatcatcgactttagcatgtttcctcctccgccagtgccgaacagaagcgtcagaaaaacgagtttatttggagcggagcgacttatccaagtggttcataatggtggctaattggttgacttttcctttttgcttcagccgcccccgactacttttgggccgttgcagccaatgagtgccgctgcaggaacaatgctcggagctcatcagcaccaaaacgctaccattccttttggcgtttttcagccctctgccccaccgccgcctcaccatcaccacccatcccaatttgctgtcgctccaccacaaattggcatatatgggtatggcgctccccctccgcaatagacgactgaccgaccttcctccatacataaataattctcttcccttgtgtgtatcgtatttgtctcgtaattaactgggttgtcatgatccatccgtctctgattttttaaatcgatcacttgttttgtaatttctgaatcatgggacttaaaatcatcatttttgacgtcgatgaacaaaatattgctcctgtttgctatttggttctaattatcgcatctgatttattttattttgtgtggtgtacttttacatgatataaaacacaatgtgtcaatttgttcattctcgcatctctcttcacttcccaagcattttcacgagttgttttgcttctttcaaccattccgattcttcctcctcgttttcgtccccggctgaattctccgccaccgctttttccagataagacagcgcgatcttcttgtccccctttgccaagtacacctttcacaagaacatcagattctccgtccactct

SEQ ID NO: 19113 - DNA, 1079 bp, Heterodera glycines
  unsure (1)..(1079): unsure at all n locations
aggtcccggtcccggtagggcaaccgggaaaaacaagcactggtaagaatgggggtctgagtgcaaaaattactgagaaaattggagtaaaaggaaaaaatttagaaataataattaaatatattcgataaagtagcaaaaccaattgtgtaaatgacctagtggctagtcccccttcttctttccccttgttcaatccctctacagaaattaaaatattttgaattttctttttgtatacttatggctttcctatcgacaaaatatgattttattttttttaattgtattttatcattttttaaagaaaatccgtacaaattgagcctagtaatctcaaaaaccagcctttttttgttgaaatttgttaacaaatcacactcaaattttcaaaatttcccccggcggcgcctatcggcaccgccggacccctttcttctccaaaagttttttggaaaaagcgcgccgaaatttttattaatttaaatagctttaacttttggattttataaaataaaaaccaaaataaaaatttaattatttaatattttcacttgaaataaattaaaatttgatttttttttaattttttgaatttttaaaaattcccggttggtcccggttcccgaacaaaaatcgaggtcccggtcccgacttctcaggtcccggcaagtcccggtcccggttttgcccaaaattcccggtcccgctctactctagaaaaagggaggaattgagaaattgcgaaaattaaaaaactttagataaaaggggtataggtaaatgaaaaaaatgatgattgaaagtagggaggggaaaggagagaagattcgtaataaaaacatgaaaaaatatggcgggggggggaagtgccaaattcgtaatcaaaaataatctcacaaattttgagtccgcaaccgcagaacacactttagtcccattcgttttgctgctcattctgtgataaaataaaagtgctgaaaagggttttgagagatagggtatgaaaatttgaaaattnatcgaatcggaggcttgtgagaggaagcggaattggggaaaaccgaagatcgattgat

SEQ ID NO: 19114 - DNA, 3498 bp, Heterodera glycines
  unsure (1)..(3498): unsure at all n locations
aaaaaaaaatgtaaaaatgaaggaaaaatggctcaaaaaataaattaattaccagttttgagcacatccgcggcaatttccaccggctttggcataagggtcgtcggtcaaatgttgagcttaacggggggaatgaaattttattaaaaaattaatcaaatgaagtgatattagagcaaaaaaaaaatccaaaaaattttatgatacccagaggccccatttattaaaaaatttaaaataatttgccaattgctgccatggctcactcaccagtccaatttgtgccgcttcgtccccccgaactttgcgtccggtcaaaatcagctccttggcttttgcaacgccgaccacccggggcaaccgctgggtgccgccacagccggggatgatggccagccgagtctcgggcaggcccaactcggaacggggtgctgcaagcagaaaaaacaattgttttttaaagtttaaaatctgagagaaaaattcgtttacggaaaattgagtaccaaactctctgtaacttcaaatggtgtttagggtcaatcaaactattttttaaaatccaaataggggttcaatattacagttttggaatttatgaaagtgtcgttgaaaaaatgctaaaattggcacgattttgtggatcagcggtcgcaaatgtagggacaattcttaggaggacgaagaaaaaaaaaattaaaatccccgaattttcggaagaatgctgccgaatattttctgtttttgttcaacctggtcactttagcggaacagatttaaactttgtactatagtacaatcaaataaaatcgccaaactattgagaaaagggccaggaaaattccaagaaaggctcactcgcaatgcgcatgtcgcaggccaacgccaattccaaaccgccgcccaatgcgcagccgtcaatgcatgcaatgaccggaaaaggcaactcggacaggtcgttaatggttcgacgaaggcctaaaattttctgaaatttttatgaccgataaaatttgaacgaataaaatggcaaaaaaaaatatatataaaactttaaaagaaataaaaacgaaccatccacaaaagtggtcacttcgttggacgtcattttgcgtctttccttcaaatcgacgcctaaaaatttataatttttttatttttttgggggttgtaaaatgacaatggcttaccggaacagaatgcttgtggcacagaactggtcaaaatcaacgcacgcgtttcgaggccgtagcgcaattggtcgaccatgtcacggaactgaaaattgaaagaaaaaattattatttttttcgaaggggggggnggggggtgggtataaaaaaaatgccattttcgtgagttttaaaccaatttaaattcattttttggtctagtagctttatactcttcgaaaattccttatagggtaggctctttaaagaatatggcaaggtcgtggatccagtgaaaattacctaggttcaaagaatggcacagaattttacaaaaagggcattgttaaactcccatctcggcggcaaaaggttgtagacagtcagggcaattactttgttaagtagctttttgatcggctttgttatgattgttatttttcattttttgttcataaatttttttccttcaaaaagcgcccttttttatgcaacgacctagtaaaagactcgcaaaaaaaaatttttttgttttgttttttgcaatttaatcccaaaaatggcaccaaccgcttgtgcaagtgcgcgggagaacgcgttgcgcgtggacggcacactaatccgtgccaccaggatgcccgtgtcagggccggccaacggctccagcgtcaacggtgccgcgggcgcaaccgccggaccgccgttggtgtgcagcagtgcgcacttgtgctgctccacactgctcagctgcgtgattgaacccattttgttgttgctggttgctgttttgtgctgacgaaaattgccgctgccgttgaagagagtgatcggagcagcagaatgatagccgctgattgtggtgatctggcggtggcggatcgatgtgatcagccgattttgggacggctcggcggtgaaaatgtgacgacggagattattaaagtgatcgcgacgatggatgaagaacagcggcgggaggagacgactcgacaatgatgatgacgaagaagacgacaacgacaaagactggtgatgaagcagcaaaagcggcgatttgcccctcttcatcatcataaatattggtgtcaacgacatgctccgcctcttttctgctgctgcaatttgctgggcgtatttttggactgtaaagtgagtgaatggtgaaatgcacgtgaacagcgaatttgacggctgtaataacacggggacgagagcaatgaaatgggatgggaaatggggaaaatcggtgcaaaatttgaaataaaatggatgagaatcaatgaggaagaaaaaaaggaaaagcgatcaactcgctgatgagtcgtgttccaatttctgatgttatttgggaatggagaaacaacggtcgaaatctaaacctatgtgtcaaaaactgcgtcattaagaattttacagataaaaattttgaaaaaattttaaatggcgttccgttttatctttttctctgcatttctctccattttgcttactgtctcatgctaaggaaagaaggaagagatttaaatttcaaatgttctaattaatttttcttcaattgtcaaaaaacaaatatttgccgattgcataaaaaatccaaaaaaagtaaaaaaaaatgcaaaaattaatttatttttgaattttacaaaattaggaaattaatcgaattccgacactaaaaataggtagccaaaaacagagaattccattcattcttcccacgcctgacaatttgtacaacaaattcccattttacattctcacatttcttgacaatttaatcttacgatttgatcacgttgtgtgaacaccccaccaacaaacagcaaacattttaaaatgtgaaaatgggggaggagaaatgatcaaatcggcgaaaatggcgactgtttaaactttgggaaaaagatgggaaaacgaaacgattgatggtccgtcgatggcgatggtaggggcaaaaacgacgattgacaacgacgacaaaaccgataagacgagttcctttccccgcctgaaaatggggtcaccaaattgaaaacaaaaacaacaacattagaaatgagttttcaaaaacggcgctagaaaatttctcggcttttttggggggtcccgtctctcggcattgttattgggctttttaagccataggggttaattatcggactcggctcttgagcctcggaagtgaattgctggtctcgaatttcagtgaatttgactcttgggtgctacccgaataacaacatgacccgtggtgtattttttgttgatcactttgccgtcacgttgatcgcaaaagataaatgaaaaatatattgaaatttgattt

SEQ ID NO: 19115 - DNA, 3202 bp, Heterodera glycines
tgcttgagtattgttccgtgcgcgtgccgatgttcttcgcgtggtgattgccagaattgatgagccgtaattatcaattaataattataattaacaaaattaaaggaatttaacgttagtaaaatacagtagctcgatcttttttctgagattttcgttttgagaaattttttcgaaagtgtttataaagtcacccaaggaaacaaatatgttagcttctttaaaattattaattttgaataaaaatattttaatctgtccctttttaagacaaattttggctttattatgtgtcaatttagccctcccccgcgtgtgccatgccattctgtctcccacctgttcgccttggcgctgcagttcgtcaatgcgctgctggtgcatctgcaggtccacctcgaacgtgtcgtgcttcttcaacagtccctgcactgcagccatgttctcaccgacgttgggcgagctgagtatctgttgcttctcgttcagccaggcttcctcctcctcaacacggccaatgaaattttggaactcctcactgatgggggaaggggaggaaaaaatagggaatagaaatttaaaaaaataaatttttaattattattgggtaattcaatcaatgttcatttcgcaaaataattgactgaattttaggtatttataaaattaagcaataaataaaaagcaaaatccaaaaatttgagatttattacagaaatttaaataaatttatttggaccgagaatttcaaataaaatttgaaaatatcgctttgtgtagattttgaagagctatttcaataactttttcaaaaaatattagaaaaattggggaaaataaattcactcatatagttttgaaattttcaatgctttttctcccttttcccacctctcctgcagctttttttgccggtcgtctgccaattcgaccatttgtgtccaactttggtccaatgctttgatacggcgctcaatctccggcccgccaatttcgctggacttggccaattccttgcccttggagcgcaccacttccacttggggctgatgggtgtccaactcactgtttttgaaaaaaaaagtgtaagaaaatgacgcaatttttgggggtacattttttgtacccggtcttgagtcaacgccaagaaaaaattcggtttttcctgttctcagtcctaacattggacacctttttaaattcttacttttttgcatttttctaaattttcgtgaattctaacataaaaaaaataattggacaataattggaaaagttaggcggcctaaattggcttaaatgtgggttggcgcacggaatttttgcttctcatcagtaaaagacaaaatattgcatttatttctggcaaataaatatttttggaattttattaatgagctcacctgccaaaacgacggtgtttacggcgcaaattttgaacgccggccaaatcacggccatagtcgtcgctgctcaccaacagctaaaaaacaaaaattaattaaaaataatttaaaacttatgtatttgtaaaatgaaggtccaggctgtgtcggcaggcgtcgccatgagaaattttaaaatttcagcgccatttaaaaaaaatttacactagaaagttagtttattattttgtggtaaatttgaaaaaaaaaacaacgaatttaaataattttttaagaaaaaaaattacgtttttaaactggggttttcatgaaaatttcaaataataagttgaaatatatttaaaaaataaatccatccgattaaaacaaattcactcactttcttctcctttatccacgactcctcctcgtcaatgtcgcgcagaaattggtgaacagtgatggctttgttcagtttttcgcgacgcacatcagtcgagtcctgaaagaagcaacaactaaagagggttaagaagcacaaaaataatttttcgaaattgcaaaatatttttgaaatattaaatttgcaaaaaaagtgaattggcgagatgtttttttaatcaacaatatgataaaataataaatattttataaaaaatccattttttatttgaattaaaacaaaaattaaattaaattatagaaatgcaattcatttaaaattggtttttttccattaattaataaaatatgcttacaaaataaattaaaagataaatccacttataatttaaacagaaaggattgcgtcggtttttccaaaattaatttttaaatttcggatttccttttcacgaatgttaaatagataaatttaacattaaaatacaattgattcttttcacccactttcacttgctcatatctctcgttgatgttgcgccggcgtccgtcaatttgcgcctggtcgaactgctccgactcgagcagggcatccgcctgacggttcatttcctccactcggtcggcatgtgcgacgatgtcggccttaaaaaataaataattttaaaaatataacattttttgagattttagaaatgcattttacctccaatagttgatgctttttcaacaaattctcaatgctggccaagtcccgaccgtagtcttcagaggcgagcagtgtttcgacctgaaaaaatgaaaattgtataaaaaatgtttaatacattggtaatatcaaaaaacaatttaagagataaaaaaattagtaataaaaaagtaaaaaaaattaactaattaaaaaataaaataaaaaagtttttatcatttttatcaaagatgattttaaaaaaatcgcatcattcaaattaatgtttttaaatagtcaataaaatatcactaaatctcggaattcagtttaaaaaaatattcaaaatccttaaattcttaaatttaattgatttatttgcggcaaaaactaatttgatattgctgtcagtaaaaatcatttatttaaaaatattttaattgttttaacatttttttgatgaaattcacctctcccagccaaaactcgaggtccttcaccgctgccatgaacgtcttctgcttgtttgcctccttcaaccgatggcttttctccgtcgtcgtctttaccagctgttcccattggtcattgagggcgcgcagacgagcggacaccttaaaaatgaacaatttaaatttttaaatccaaaaactaggctcgaaaaatttcaaatttgagagaaaacaaaatagtactaattgctttattaaaaataaatttcaaaatc

SEQ ID NO: 19116 - DNA, 835 bp, Heterodera glycines
taatattttcattataattattttttgcttgatcacttttttaatgcctcttcatcatcatcatcatcatcatcagtcctgtccccaaattgccatctccgttttggtccgctcctcgcgcactctcttcggcaattgccatccgtcgcgtggtgtgtgatcggtgatcgtcctcccccctccccctcctcttccgatcacacccctccccccctggggggatgttgacattttgttgcttccccccccttatttcccacttcttcccccacttttttttgtttgcttgccacctcaaatgattcaccgtccctctcccccccccatccgtccgtttattcattcgccgattttcctccccccccccaattcatttcattgttcactgatttcatcgtcggcggaggtattaacgttttattatttttatttatcactcatttcttgtgattgatgatgaggcatccatcgtttattcccccaacaaattgggggcccaacaattcgatgaatgcgatgagtgatcggccgaatcactcactcttttgcccacaaattctttcgcaaacttttgattatttccacataaattttaatatttattctcagagacagaaccctaaatttatttcattcattttgaagattcaatggcaatgatacctttcaatttgtttctgctcagcgccgtaatttttgcattcatttggattttcaattattttcttccattttttagcttttcttcacagcgaatgcatatgacttaatattcaagaatatttccgtggtaaaatacatttttttttaattaattaattaattaaatatttct

SEQ ID NO: 19117 - DNA, 1922 bp, Heterodera glycines
  unsure (1)..(1922): unsure at all n locations
ggaaagattttccatggggaaatttaccccttatgggggatccaattcagctcaatcctccactgaactactttttcgaagagagaacggtggaaatgcgcggatggacttttggcaacgaaacggacattggccaattccccgttttagcgacactttcttgtgcggtcgaaatctgtgcggatccgtgtgaacagagctgtttggacaaaattgtgagcacattttgttgtgctttgggtttgacaaatcttggaaaaacaaaaattttaaaatcgaaaaattcaaacaatgggtttacctgtcaaaaaatactcaaattttgcatccttttgggatgcggcaaaaaagggtattaggtaattttaaaaaaatcatttagttctaagaatcaccaattttgattaaatggatttttttttgttaatttatgttgtttttgttactatttgtccccttccgaatgccctccaattaaacaataaatggcactaatttatatataatttcctcattttttctttacagtctcttgacaagtgcagcctcaatgattttatcggtgacaaaaatgccacggatatttgccacgaaggaaatgccgccgctgttcagggcacaatcagtttttgtttgatgacgcttctgatgttcctctgttcttccactgttttgatgtttcagtgataccaaaaaataattttattttgttttttaataattctaattcgttaaagaatcaaataaatttttatttgtctccaacggattattatggtaaaactttaagaaattgttaggcattttgataataaattggttggatttgtgggttgggaggcgttctttatgaatttcttatccttacgaatataatgaatgcattttgcaagaaatagatgataattgtgacatttttcaaagtttttatcagtttattttatttgtttcttttatttctttaggagattcagttaaatttcggaatttaaattcattaatttttggtgttaaattgaaaatagtaaaaaaagaataaaatatttaattgattaaaagatatgacttataaaaatgcccaaagttttctcttttgaatggtaatgcaattaacacacaaatattgagccttttaaaaaaaattaacagacaaaaaaatttctctggtcaataggtttttttaggaaatgaataaataattgcatctttttcttaacaatgtttattcgttgttgaatttgaccatttcaatggaattgagctcactgtgtcgctttgtccagtcacgcaataaataaaacaaatgacacaattaactcattttgaggggttcacttgccttttttgaataaatttatttttttcaccggtttttatttttagaaccattattaaaaaaaattcaactttaatttaattaaaaatgccaaatttgtataaatttcaaaattaaaaacaccaaaacagtggctaaaaatataggtgtttttaagaatcccaaatatttttggtttttgacaaaaaatccttccagaaaactcaaacttttttgaacattgttgtatagttttttgaaattttaaaaagtcatctttagtgggtgaaaaaaatggccgaaggaaaaaaggacgaaatatggatttaccaacgcagaaattggtgagtgaaaattaaaaagaaagtgacatgtaatgaagtgttgttgtttttttgtctatttgctgaaatatccactgaataaaaaatattataaaaacaaaaacaaaattgattatgcgcttccggcaattagctaataaaaaggacaattcacgggggaatcatcacattttatttccgcctaaagaaatgaaaacatcctttttgttcaaaatcataataatgcttcacaaaatggccatttttgactgccgcganggtta

SEQ ID NO: 19118 - DNA, 3098 bp, Heterodera glycines
  unsure (1)..(3098): unsure at all n locations
tctgaatgggtgcacaatgccttgactttctccttgctccaccaattgcagcgcgttcaaaattccgttgctgctgctgcttgcaaagtgcgaaaagtccgttccgtgggagttgcaccaataaactgaagttcccgcagccattgctcagttcggactgtcagttgaacgctccaaggcagcaaaaattcggaaccacttcgaaaattgggcgattctcgaatcccagtggagtgattgtacagagagctgtgcccaatacaaatgacagaaaacgaagggaacagcgggagcaattcaggcgatgatttcgaatgcggcacatgttccaagtagagacctgcgcagaaaggaaacgaatccatgtacatataacagtggaagaagtatgtagtcagtccattagggtttcccaggtgttccaaaatttaggcttttgattcataaagttcactgcttcctattggggatttagaaatgccattggcctctttttatgtaaaaaagcaactcaatttgacctttgcatttttcgagcaatctcatgtcatcaattcgctttcttccaaaactgaggattcccatttcgcttgagtctctctctcccctcccctgctcatataaatcataatgttccaaataatcggcattttcggtgggtgtcattggacgggaagacccttcgtcgccactttgtttcgttagctaaaatttggtcgcgttaatggtctcgttcccgcttttcttccttccacacctcttccgcttcctcatccaattcctcgtcttcttccgtcgattcgattcgctctttcctccgctgttcttcgacctcctcgtcttcctcaatgtcatcgccactaaatgctttgctcattggcacatcatcttgcgtcatcggttcaatgggagcttcattgcctttcggttggtccgacatttctaatccttcgccttcgtctgaaggaatttgggccgcgccgtcatcatcatcatcgaaaaaccgaatattgtactcatggggatcgatgacaacgttttcttcatcgtccacttcaaaatgggcttcgttttctctcttcgtcccacttggacttggcccttttgggttctgatcatcaaagaccattgtcgtgtcaaggtcctcgtcacttttagaggccctatttgttgctgcgtcgtgaacattgaacaaatgaaagtcgtaacgatccaaatcagcacaacaactggcaaatgtgaggtccgatttttggtaaaaagtgaagtttgcttcctgaaatttgctgtttacaatgaatcattctcttgttaataaaagaaactcaccttcagagaaaaagggtcgcttcgaatttgacgcgacagaccgcaattacacctaaagaaatgaacagagggaaggacagatgatgggaaatgagcagacaattaattacattgagtaggtttttacacccgaacagtgctccttccgagggcgcttttcatctcgagaacgactccccccgaccgaagtttcatttggcaagtcatggagctaacaataaaacaaaaggaaagggaataggcaaaacaaaagggaaactcactgtaaaatggcacaattgtcctgaattatcaccacaacaattaagtgattgcttcgattacaaatagcaaaagtgcacccgtgagagaaagtgtttcacatctttggtgcccatccatccaaagtgccgtgcagtccgttcggattcgctcgaccatcgtattttgctttgctttgcccaaagccctcggcgaacgacgcaccaattggtcacttaccatgttcaactaaagcaccaaattttaagagtaaagaaatgtaattccataattatgtattttttaaccgtaaaatcatgctcgagttgagagaaggcgatgtcaccacctcccgtcacattcggctgctggttgagctgactcttataaagattcatgccgaatccgacggaagaatcgattatgctaaaacagtttggcatttaaagacttgataacaattatctaattaagcacctgttaagcgtgtcgacttcctgcagggaatggcgcgaaaatgccattgaatatccgtccgccgccccgtccacaaacattcgcttgaggaattttgccgcttgcacaaagtcattcagactaagtgttgtgccaatatcttccacaattttattccgaatatttaaaattgctgtgtgtaggaaatagtcgaaattgtaatcggaacgacttaacactaattttttaatgagaattaaaatttagcaaaagacgtacgtacactttttgttttttggatgcaattccaacacagtttcaattaatttctgaatgcgttcagcagagaaatcttcgcatgactcttcagggtaaagggaaagcacaaattcattgtttgcatctttgggaagttcgtcgtggttaaaaatgtaaacgaaaggcgccccggaagaaattgtaatttggccaagagcattttcgggactaaaaattgtgggagtttatttacacggaaccaatcaaacaaaaagcgaattggaagacaaacccacaagcgattgtcgatgattccgtgttgcctcataaaatgtgaaacttgcgactcaatacatttctccattttttccaagagttccttctacaataaatgtatttgatgatgagaatgggatttagcagaaaggcatttgttacctttttagaattgcttagatcgattctcaacggattccgataaaagcaaaaaagcattttagggacagcaattcgaccattttcacgcagaaagggaaggttttgtgctgtgtgtccgtcgaggagatcgaaaagagcagttttaatcatactgacagacctcagcctaaatgtgaattgattggtatggtaaaataatcaaatataattgtttacagttttccttaaatcttttaaaattacattttattgaagtattgacaaaaccaaaaatgcagaatccaaaaaattgaattttcgactttgtccaaattggacccggggaacaaggttggtcgaaattgatgcccgattcgnntgtgtcacccaattcttct

SEQ ID NO: 19119 - DNA, 961 bp, Heterodera glycines
tttttttttggaggaatttgccctcctccaattttgaaaaaatttggcaaaaaagggagttaattttaatttttcataaaaaatttcattttttgggtgaggtgatttttcctcgatttatatttttttttttgtgaaatttcattgctataattcgtgaaaaaggtgcttgatttttttcagagaattggcaactcctcgcgttttaaaagataatgggcaaaaaaagcgtaaattttaatttttcccaaaaaattcatttcttcggccgattttttccttggtttaatttttgtgaaatttcgttgaaacttattataatgcctgaaaaatgcactttaaacgcggttgtgtgcgagctgattttttttttttgaaggaattggccctcctcaaatttcggaaaaattgggcaaaaaaaaaagcgtaaattttaattttctacaaaaaatttcatttgttgggtgatttttcctcgatttatatttttttttttgtgaaatttcagatataatgcgtaaacatgctcttttaatacggttgtgtgctgattttttcggtgaattggcgcttgtcgcgcattttgaaagattgacaaaaaaaaagcgtaaattttaatttttctaaaaaattttcatttcttctacggatttttccctgtccttctctccccacctatcgcagttttgtacctgcaattcagaattttggaaataacacttatactcgctgaatatcaccttacaaattaacatattttcttgggaatttctttgcgtctgtctacaccggaggatgcgttaattatttggaattaacgttggattagtggtaattaccctaaattgaaaaaatacatgtgacagttggattggattgatatatgtaaaacaaatagaaatctatttatgcacatttaaaatattgcggctctgctgaaaaatggagaattgtgaggaga

SEQ ID NO: 19120 - DNA, 1267 bp, Heterodera glycines
ttttttaatgagagtgaaatcgtagtgtagcgcccgcccaaaatcggaaatgaaaattttggggaaaaaaaaattgttttggtcaaaaaatgcacaaattggacaatgttttggcgaaaaatgctagtgtccacccgtccaatcactgtgaggtcagttccgtcccgtcaactccatcccagcccagttaaaaagccataagttttttctttaaaaagtttgctaaaaaaagttggctttctcaaaccatcaaaaaaaaaaaatccgttttattttcaaatggaggcattttggcgtaatggtggtgatggtggacacagagcaattggtggaaagcacgaagcgggcggagatgaatgtgtgaaacaaaaggaggggacggtcgattcgatgaagcggtggtgaaaagcatacaaaatgcgccgcaaattgggattgatcaaaatggggacgggacgtgcgggggaagaggtcgcgcgtcgccggcgatcggatttgtattgattgatgatcggtttaagaaattgtgggataagaagacagtagagataagctgattagaaaatttaaataacatttaataaaatcaatgttttacaattgaatggaaaatttatcagcgatttttgagaaaaaatcacgtcctttgcgattggattttgctagatcgtttaaagctgatgacaatttagaggcgagatcagtaggattgaacaaaatttaagcactatcaaaaaaataaaaagcaaagtttaatataaaaacaaaacaaaattaaatatatgagaaattttcgtattataattttaatttaaaaataaatcttataatattaattatatccaatatttgaacaaaaattttcaaaaaaatattaatttttatgtttttcaattaaatttgaacaaattttccacaatgttttcgatcaacagatggatgttgaagggggaggtggaaatgtaaaattaaaatattaaaaattaggtaaataataaaaaaattgcctaaattatagcataaattttctaaaattttctgatcatgctcagcagatacacattaccaagcagtagcaaagcaaaaataaaaacaatgcatacgaacgaaacgaacacacacacacacaaaatgatacacattcactcaccactcaccatcatcactcatcagcaccaaacattggcggagagtgggccgaaagtttccccccccccctgccaatgagctctatttgatccgatccgatcgcaagataaaagcaccc

SEQ ID NO: 19121 - DNA, 1590 bp, Heterodera glycines
  unsure (1)..(1590): unsure at all n locations
gatgaggttgaaaaataatataccatggcatataaaaagagcaaatatggtatttggtccattggacagatttttgccataattttcatattttttgnaaaaaaaggatgatcgaacataataactatgaattaatacaagtaaagtaaaataaacaaattcaattaaattcgttaaaagatttttaacgtttttcaaaaaatcaccgcaaattaatgtaactgttggcaattgaaattctttatgtgcttttggcatttcaaattttgttctgtttggcaatgctgtcgctttcttaacaattattttctctgatcttcgaaaggtattttaaaaaagatatgacgactcttttgcaattcaaaaaaggaaaataaaattaaataaatttatctttatataactcttaaaatgggctctgactgtctcgcatttgcccggggcgcgaaacattgcgtgggaagtggagtagtcgaaccgccggggtccctcataaaattacccgcttacagtaattagtattaaattttaatttcaacattaatctgttaaatgctgctctgctccgactccgtgcttctgctcaacatttcgaccagcctctgtccatttcaacttgttcagtttttggacatgcacaatcacctaatatttgttcaatgcatccgcttatgtgagtagttttcaatcatttcactcaccggtgaacactttttctccatcatttttcctctccgacattttaaggtccatttttatttattcctttatattaaattatttttaaatttttcggtttttctttaacaacatttcattaacgccattttaaaatatcaattgaagagtttaattttcacgaatatattttgctcgatttcactagggcctctatttgcctgaaaatttgaaaacttgtataaaatctaaaaaaattgtaaccaaaatttaaactttaacgttattgaagttatgcaaaataaaaaaaaatcttgaatctctatgcaaacttttcgttacttttggtaattttatttttcttattttgcaatttaccagaaaagtttggtgcccaaatttattcgccgggattttaactcaaaaaataacaaattgtaccaaaatccggaacgcgaaatttcaactcctctttggaaattgttatttagagccccaattcatggttataattagggcgcggatttttaggggcgaaaaagtccaaaatagggacctaaataggggcaaaaaattcgcgaaataggggtgaaaaagtttcaaatgtaggggtgaaattattaaaatgattgtttttgtatataataattaaagcctaaagcaaaacaatttgtttattgattataattgcaaataattatttatattcgaaatttttgaatattttttcaaaataaaaatttttgaaaaagtagccaaaaaatgtgatcgcgttaaaaaaatatttgttttaattacatttttgttaaaaaaattgtgaattttatattaaaaaaaataaaaatcgcgaaatgaaggcgaaaataggggcgaaacgccaaaatagggataaaagcttattttaggggcgaa

SEQ ID NO: 19122 - DNA, 943 bp, Heterodera glycines
tgatttttggaaatcgttgtgtcggcccatttcactctcctcgctgtcaatttgtcattctgtaatttagagttctttttcaaaacaatgctttacaagcgaacatttagcccaaatgaagacataaaaaaacattcagaagggtttagagccaagtaggaaaagttttgggcatctctttcgaaattcaggcattaaatcattaaaattcggcatcccgaccctcaaaaaattatgaggaaactgaatcatcattccagaaatttgcgcgtacatatgaaaattaatatcaattatcatcattattttagcttttattattcatgatgtcacttccaggaaagccatttaactgttggaattcttctgcttgtcacagtgacctcgaaatcactgatgataagtgtttggcagtgcattataaggaaaacgaatacggtatagtttataatttacaataaaatttcgaatatattttttcaaaattttttattaaacaaataatttattccaaggggggcatatattcgagagtggggttttattcaagggtggggttcgattgttcaacccccctttttttttacaaattcctatgattttacgcatgaaatttttattaatttttgaaatatctaggtcaacttttttggctttttacacaatgatacaattaaatcttaacctgaaattttgaattgaaaatttttcaattttgacccttgaaaatataagcgaatatttgaaatagaattttaataaagcccccaccctttttttattgaattttatataattaggagtctaaaaatttttttgaaaaatttttgtggtggggttataatcaagggtgtcttaggggggagggtggggttatattgttcaaccgccctccccctgtggagtatattcgagggtgatattctaatcgagcaagtacagt

SEQ ID NO: 19123 - DNA, 2215 bp, Heterodera glycines
ctgataagagccgctgggaaattttttttgtaattttaatgctatttgttagcagattttgtctaaaaatgccaaaatttgagatttaggctaattttttaaataataatttgtacgatgccgacgacgacaaatggaaaatgaaaagagtcataaaatgaagtcgaactttacttatcaaattttctcaatttaatttaaacagtaaaaatgacggactgggacactatagtctggccgttatagtctgagccaagtttagagcatcataacttttttctttactgaccaaatccaacaaagttgatatcattcgaaagctcttaacaagctctcgaagtcaaattacattttcaaaaaattccccggcggctccttaataatgattctttctaaaaaatattcaaaaattcaaaatgtttcctttaaatttaattttacttaacaattgaaatcactgaataaattatttgcttcggttaaatttttttaaagaatggaaatagcagaatgagacaaataaacacactttgtgcacattcacaaaagactacggtggggcaaagagtttggcctttggccgaccgtcccccgccccagggccataatgtaaatgatcgattataatcatccgatccaatgcaatttctgacaaaaaaggtcattcattctcgcgaaatgatggagaaaaagagcaaaggccaattttatactgaatcagtcgcctatggaacggcccgtcccaggggcagtactcaaaatgcgactgccgggtcgtttcgtaaaactgtcaattgccaagagcatttcctaaaaactgccttggtcgggagggagcagatatattcgggtagagtgtaatttgtgagccagggcgtgacagccggctgagttaaattaggtgggggattgagttgatataaacctaaagttggttaaaatgattaaacaaaactttttagaatgatatcacaaaaataaaaagtaaaagtgaaaatgtgtgtaaatgttgaagaaaatggccactttgattagaagaggtgtcgatttgggacgcgaacgtacagctgagttggaagaaacgcacgcaatgctgaatgttggccaagcagcaactgcaaatcaacagagaaaggaaagagtgcttggcagagagaaataaaaagaaaagagtgtaagcagagagaaaacgaaggaaaagaatgtaagcagagagaaaacgaaaagaaagagtgtgtggtagagaaaatgaaaagaaaagaatgtatggcatagagaaaatgaaaggaaagagtgtctttggcagagaggaataaaaagaaaagaaagagtgtgtggtagagagaaaatgcaagggaaagaatgtatggcatagaaaatatgaaattcgcctatttttttttttgatattcctaatgtgtctaaatcagggctcccaagttttttttcttcaaaaaaggacaattaggcgcaataacaattggaaattgcattataaaaatattctcaaatattttgattatttaatggggaaaagaaaacaatcaaatccgtattgttaaaaaagtaaaaattttaattttatttatataacatcagaaaagctaaatttaaaaaatcgacaaaaattgttaaattttttagaatgtaccaaattaaaagtaaaaatgaaataaatatatgtgctaaatgtttatgaaaatggccgctttgattaggagagcaatcgaattgggacgcgtacgtacagctgagttggaagaaacgcacgcaacgaatttaaagaatgtaagcagagagaaaacgaaaagaaaagagtgtgtgttcgaagagagaaaaattaaaggaagttacgataaattttctattttttacatttcaaaacaataaagttggtggccgatcatttcgtcactgagaaataattttaaaaaattttagttaaatattgaaaattttttgctttaaaacttttttataattgacatttgctttctcgcaaattgcggacttaagtttttgtttattttttaaaaggactaatttgagtcatcatcaacagagctttatggatcacatcaaaaaatctgttaaaagggatacttaaagaatttcagcgattgtaatattttgttgctgagtatgaaaaagcgcctgcgaatggcattagagggaaaggtcttaagcgtaaatctctctatggtgatcaagacaa

SEQ ID NO: 19124 - DNA, 1221 bp, Heterodera glycines
tttactttttccccaaaaagttcgaatcccacgattttaatttaattttttttgttcccaattaaatattctttatcagatcattatcaaaatacattgttttgatctaattattttttttaatttttgctaaagaaattaattcattttttggacgaaaaatgtatgcaaacaaaaatgacctagttcgcttatcagcatggggaaagtgctttcgggtggaccttttatatcataatttagaacaaatacctcgagacttccccccccccaaaaatgccaataaatccgacaaatgtaatccatttaatggtttagttatacctgcattaattggtgctttcggtaattttttagttccttttttatttttgcttccgatgattcaaaaaaaaataaaaaattcaaaaaaatagaaaaaaaaagattaataaaaaaaaataattaaaaggaaaaaattataaggaaaaaaaattatttttttttaagagtattatcatggtaatgctccaaatccatcgccaataactgtcgaggagaagcaattaaaaacttcaaatcatccaggaggattgtttctcgaaaggtttttgaaataagccatcactgctcacattgcttttcctttctttgcaaattataaagggaagggaaaaaggaaaagccgcataactcggcgcacatgtccattcagcaaaaacggtaaaaaattcacataacaaacagggtcaatctacccacccaccaagtttcatcccgaaactccacattcacttgggggcccctcctttgtaagggaatcatttcggttgcacaattgcaaatcaaccttcaggcgtattttgctttttgaaaagtcgattcttttagggagtatattttgtagaaatcttttacctaggtcgatctcagtgcatttttatttttttactgcattttttaaagaaaattttttgttcacaaattaaataattgaaaaaataggttttttttaaaatttaacaagccaaaatagtattgacgaaaacaccttaatagttttaaatatttgctaaaaaatcgttctaattcgaaaaccgttgcggacgaaatgtggttttcgtgcgtctttcgttaagcactattcacgaaaaagaggttaaacccgtaaaaaatctcgagccctaggtagatgtgtgagaaaaagatgggaccaatttgggaccctgccaggccatgcca

SEQ ID NO: 19125 - DNA, 1457 bp, Heterodera glycines
  unsure (1)..(1457): unsure at all n locations
atttccttcttatatacgcgttgagaggaatttctttattttttgttagggtgttttttggtcaaaaatgggtatataaaagccaattttttgcctcctctcaacataatttgaactttcatccaaaaataatgcctttcttctccgcttccttcgccgtcctttttcccatccaacccatccaaattatttgtgttgcatttgccgtatgcgtcgtcctgctgagtcagtgctgcatcggtggtcgatcgaaggaaaatgaggcaagttctgagcccacccccccccccccccccataatcaaaactcaatttttaatattcacttttttcagccggagcaaagcatcacttacgtcgacttgaacagcgcgattctcggaggaacggcaccaccggtgaagccgatcgtgggcactggaacgaaagacgacactggaaagaagggcgagcgaacgcaatttttgaattggttaataatttttctttgtttttcaggttcggcgcattccgaagccaagaagcaaccgacaaagccaaaagcagcggacaaagggaaaaaagtgccatgtaggtgttcattttttaatttgaatttatactgattgtcctcccattttagcaaacgagcctgcctgtgcagagaaagggaaggaagtgccggcacaaaagggtgaaaaggagcaccaggcgaaaggtgggcaaaccattttatttaatggcatttaatccatccctccccattttcagatgccaacaaaccgcaattggacacgagcattgctgtgaagaaatagtgccgtcaacagatgagcctaatgaattcgtgcgattatgaggaaattgatgatctccaaatgttacaatgctctaattgtcatgttatttggcctgttttgtcatatacatattcactgttgtacataatttgtatgtgtatatcgtattgcttgttatgtctccaccggaaaaaaagcacataaatcaccttttatgttatttaaagcaattctgacaataaaaaagaaaaaaaaaatttgacccaaaaggcggacccaaaccgaaagagtaccttgaaagctcctttacatactctattagccttacaaaaagcaaaaaaaattcaaccctggaaaaaatttatgatgaaaaaacttcgaaatattgttttttagactcaaattgctcttagaaacaatgatttgtacaaaaattanggggggttggataaaagcgtcactaaatcggcaaaatgttcaacaatacgtctctaatttttgatcagcaccgagccaaaacgaaatcatcctttatcgtttaccaaatacacaatatcaacacacaaagacaataataataaacgctcancattacactgataaatggtgtacaatagcatcgacataaacatatanncatacatataggcatatacacacatgtacaataatattatcc

SEQ ID NO: 19126 - DNA, 3037 bp, Heterodera glycines
  unsure (1)..(3037): unsure at all n locations
tggttataatttttctttgtttttcaggttcggcgcattccgaagccaagaagcaaccgacaaagccaaaagcagcggacaaagggaaaaaagtgccatgtaggtgttcattttttaatttgaatttatactgattgtcctcccattttagcaaacgagcctgcctgtgcagagaaagggaaggaagtgccggcacaaaagggtgaaaaggagcaccaggcgaaaggtgggcaaaccattttatttagtggcatttaatccatccctccccattttcagatgccaacaaaccgcaattggacacgagcattgctatgttatttggcctgttttgtcatatacatatatacatattcactgttgtacataatttgtatgtgtatatcgtattgcttgttatgtctccaccggaaaaaaagcacataaatcaccttttatgttatttaaagcaattctgacaataaaaaagaaaaaaaaaatttgacccaaaaggcggacccaaaccgaaagagtaccttaaaagctcctttacatactctattagccttacaaaaagcaaaaaaaaattcaaccctggaaaaaatttatgatgaaaaaacttcgaaatattgttttttttagactcaaattgctcttagaaacaatgatttgtacaaaaattaggagggggttggataaaagcgtcactaaatcggcaaaatgttcaacaattcgtatctaattttcgatccgcaccgcgccaaaaagtcatatcagcctttatcgtaccaaatacacaatatcaacacacaaagacaataataataacggctcacaattacactgataaatggtgtacaatagcatcgacataacaatatacaatacaatatatgcatatacacacatgtacaataatattatccatgaagatatcatatggtgccggttccaaatatatccatcctcctcctccttgcgcttattgttcgaagccgtacatcaaattgccctggcgcttcagtgcgtgtaccacatcccggctcttcatggtcttgcgcctctcgtgctgacagtagatggcctgaaagcattgggtgatgtgatatatcgggattaatcattttttgaaaacttaccgcgtctcgaatgatggtttccaagtacgagcgcagcgcggcacggacctcgtcgtagactcttgcgttgattcgggcgacaccggcgcgtcgggccagacgaagaatggacgctttggtgattttcttggcactgtcgcgcagctgctgaaaattgactaaaattaatgtcaaaatcagtttgtggtcccataaaagaggaaaaaaggaatgagcggctttgtgatgttttaggggcttttcggaggcgctgtatgaaatccatttcgaaccccgaactcggattcaaacaaactcgaaattcaattttcggcaaaattcaagttatgcatcaaaacagttcaattgtaaccgaaatactacgttctccgttatagctcgtgcattttgttgcataatttgaattttgtcggaaattgaattttcgagttttggttcgaatccgggtcaggggctcgaaatggatgtcagaatcgtgttctccatccaactgtcttaccactcgtgtgcgtctctcgcctcggccgcgtcgctgtcgatttgcagcagtgtccgtcgtcatgttcgttcacgaagtgtcgtcgtcacagatgagcaaaggggaggcgaacaacagtcacagaaggcagaatttgtaagtgaagaaaataatgatggattactgcaaatttttgcatatttatacacttagacagcgtttcaaaaaacgagagatgaaccaataaatagagagtgccagagaaaaaaatacctctcattttgatgtactctttctttgtctctctgttaatagagaaaaactaaattattgtggcacattttgacgttacaaaaaatattcgaaattcgtcggttggatcttgaatttcgcgttttggcccaaaaatttggctactaataaaacgaattggccataaacaaatcgtccttcgtccatttatataaagcgaacgattcgaacaaaatgctctcattcattgcgtccgtcaatattttcttcattgtttttacgctcattggaaaggactcaaaaactggcgaatttggcgctgttttcgaccaggacaaatggcacaaccaaatgtttatgatcagcaccaatggacgaccaaccgaagaacagaaaaaccaattcatggacgaattggccgcgaaattgccatccgctggacgccatgtattccaattacggtccgtcagaaaaaccataatagcgatgaataanatttcatttgtttttcagatttggccatttaactgggttcgcctgtacaaaaatcacctcaacaatggcactttgttttatttttccctcctattttgttacgcattgatgtcgcttgtccttcttggcatcggcttcaatataatgcgacgctctgtggaaaaatataaagtgagcgagcgcagaacacgtggccacagcaaattcaatccgacaaaaccgcgtacaaaattgcttttcaatcgaaatccgatggatttttttttttgataaaatgatatgtattgagcttttgtcgtcgcgttgagtttcttctgtgttcgctaagtatcaaaaatcattgaccattgcgtcgcttaatttgtattgttttttaagttcaccttctatgtcggtgccttatgttctgtcttctgctggtatncatgtgctgngccttcntccnccttggtgctcnnttggncggncttttggncttgcgtcnncttccnagcggntcncncngatgtgccgttcgtcnctttggtgagtttgtgccgcttttgccctttgnttttgcgcctttttcnncttttnggtgcttngccttgtcntgncgtgtttgtccttctaaggggttttcttcnnnnnttcnctgttcnnnnnattctttagagggcgatggaatgatgttatggatggatggatatatgat

SEQ ID NO: 19127 - DNA, 1193 bp, Heterodera glycines
cgctcaactctagttggaaatatagccacggggatttatttttttgggcatcaagttacattatgtcccgtctcaaaagcacaaccaatgaatgactaatactcaatttggatcactatttaccaagtttaaataatttttccttattgtttggtgtactttttcagcttttcttcccttatccccccccccccccaaaaaatctctccccaatttctttcctttcattttttctcattttttcctccgacaaaagtgtattaagcttctcattaagcacttattgtatttgtgtgaagccgacaaaaagtgccaaaaatataaatcaaatgatggaaaaacaaaaagcggatgattgcacttttacttttgcgctgtcgtcgcgaggcaaagcgaagttaattagaggttgggttggctgtgtttggtcggttttgcagcagcagcagttcaaatttaatgaggttgccttggcgatggactgaccgccgctcattttccgtttttcgtcggcggttggcgttgtgtcgctggggggatgacaaattcgccgccggtgcccgccaattttgtccgcggcaaaaagccttttgtgcgcgactttcgtcgggcggacagacggacgaagaatgggtgaaatttttgttaaagcttatgttagtcgagcagatgcctttgatgtgttttcttatgccatcttcggcatagttttagcgattggctgacattggcatttggcggaacattggcattaatttcacatgtgttttttctgtgatttccgctttagccctcaaagtcttccgctggcgtttactccatgaaatttagttcaattagcaaataaattgggtttttggctttgtttttctccctcccccttcccaaaacagttaagtgtgtaataattagggatgggtcctatttctcctatccttatcccccaaaatcactcagttccatgcccacataagcagttgaagactcatccgtccaattcgaccatcccttccattcccatccgtccgtccttcggtcgcttctctcagttttcatcccctcggggaggctgcgctgggggcgacatgtcatcgtccgtttccttccctctcctcttttcgttcgcccttcatggcttccccccccccccaattttccctctctttccttcccctttcttctgctgctgtgct

SEQ ID NO: 19128 - DNA, 1158 bp, Heterodera glycines
  unsure (1)..(1158): unsure at all n locations
atttttaaaatttaaaaattnttttacggaggtataaccgccccgggtgctccgtggggcctcatttgccttcgctacgaaattcgtacgattaaaaaaaaaaaatttatttttcattttaacggtacgtcttttaaatatttccaggcacaatgaatatcgcctccggaaattcagcgcgccacgaaggtatttaaatgagttttatttacaccgttccaagttcaccgagggaatcggtgtcgccgtcgggcaaaatttaaaaatagaaatttttttttaaatttgaaactttcatgacatttgtccaacacatcgaaaatagaaatgttattaaaaatgaaaatagttaaatctttttattatatatatatatattatgatttaaataaaactatgcaaaaatttttatttcaagaaaatttgtaaataaatttatgatttaatttctaccctcctgcttggctgaccattgattttccaggacattcaaattagcttgtcaaaatttttcgatgcaattcaaaattgactcgaatcgaaaattgtttttgcatcattaaattttcatatccaaaattggtctataatttatatttccatgcattttaaagatgcaagtggaagcggaacggaaaaagcgtgccgcaattttggagtcggagggcatttgcgaggcggaaaagaaccgagcggagggcgagaagcaggcgcgaattctgcgctccgaagcacaaatgcaagagcaggtgtttcaataaaagatttaattccaaaacttgaagagcagaaatgaaaaaaaaccggaatttaaaggatttaaatgatttttgaattaaatttgaggagaataaattagcgaatttttttttgtaaaacacatgaattaattaacaaaattatttaacttatttattattataattgttgtagatgaacaaatcgatgggtttggcaaaagcggccgaagcagagaaaatccaacgcattttgcaatctgaggcggaaatgcaaatgaaagtcagtgaactaccacaaattaatttttgaaaatattttttttctaaattactttaactgagtcaacactccaaggaccctttgataattttataacatttaaaataagtaaatttattaattcatttggtggtatta

SEQ ID NO: 19129 - DNA, 1396 bp, Heterodera glycines
aaaattttgaaataatttcccaattttcgatttttttatatcaaactttttttcccgccaaggttaacatggccattggacttgccaagtcggccgaaagtgaaaaagagtcgcgcgtcatattagcggaagcggaggagcaggagcaagtgattgtcagccgtgggttggcgtgtgccatcgaaacggaggccgaagctcgcgcaaaagcgttggaacgaatggcgcaaggaattgagaaaatgggcggcactaatgcggctgcctttgtgacagccgacaattacgtgaaggtgagtggggacgcgaaatttaaaaagaaaaatttaatttgaattaaaattgattatgaatcgaaaagactaccgtattcctacagttcctccaacccttacagtggtaggagaacatcggtcctaatttgtaagtacagaaaagtgtttgaaatacttacttaaaaatagtataaaaatggcaaatcgtgtgttaagagatcagtgaaccaaaccaagtaaaaaaaaagttgttgggttgggaaaaaaaccaatttatccggcatcccaaaacattccgggttagttaatcggagtcgggtaaggcacaaaaatttttgctagcgatggcaaagtacaatttttaaaattatttcatataattattttaatttaccgccttaggcctttgccaacttggccaagtcgtctaacacggtaatcatcccgtcaaacagcatggacatcagcggaatggtcacacaagcgatgggcatctacggcacaattgccaatgcaaacacagccaacaaacactgaccatttttattgaataaaaatcatacaaatcacaaaaatgatgttaaggcgtccgcaatttttggacgcaattgtttccattattaatgtaatttaaatgtgaaattgcatttttatgataatttcgtctctgaacgaaacatatccactggaatgataaatgcattttttaattcatttttaaatttcattttaatgtttattattatttttattagttgagcctgcctttttgaaaaaatcaggatcaggattcgaaaatgcaatgaaatcctatcccaaaatcaacaggtccttattaccaaatttggtttatgcttacaacttttgggtgtatcgaataacaatgtactagattaaaatgcagataatttacaagaaattgaatttattttggagagttcgaataaattagcgtagcgaaaaacgttgaagctttttttcgaaatcacggattgttgtgtgtatggtttgagtttaagacgttccgttttatccgtcgcggattaatggtcaccaaacggccagcggatgcacgaatgtcagatctgtgaaaattggaatttgaaatgggggaatttacc

SEQ ID NO: 19130 - DNA, 3156 bp, Heterodera glycines
  unsure (1)..(3156): unsure at all n locations
caaaaagttttgaaaaaatcgcgctgtaaaaaacgtgtaaatagtcacctccttttcccaaaaatgttctaaaataatgaaaaatgacaaaaaaagattttgataanataatgcataatttttcaagcgaatataaagtactaaaaacatttgtgaaataccttttacttggttaagaattaaaaaatntagcctattaaaatatttagaaatttttttattatattgtatattttttgaaaaatttccgatttctcagccccttttaatgcatcccgccagcccctaaaaatttatttttcagcattttttgatttttggaaattttttgaatttaattgaaattttttcgaattttccaaaatcccgcaatcccgcacgggatcccgcaaattttaaatgcgggatttgcgggattaatcccgcgggatcccgtcccgcaaagaattttgagttccagtcccgcagcgggatccgcaaatttgaaatttccggtctctagtttatatggttgccaagtgaggaaaataattgtgtaaattagtagtaatctgtgaattttgttaaaaattgcattttcgatttattgttcgggtccgtggtcagaatgattgtgtcataattggattatccaatcgcgaacagcccaaaagtcaacttcaactcgaaaataattttaattttttttctaaaaacagggaccgaccaccaccttaactattacccagatttttaattatatttttagaaacaggaggccaatgatttgtctggcacttcattctccaaacaacaaaatgagtgcgacactcaaaatcagcaaatcaaaatggaaaacaagagcaattctaacatttcaaaaaagttacaaacgaaaataatcagcaattaattaattaatcaaatttttttggtaattgcctgaacgctgcgattttatatattttagcttcgttagactgtgtgctttcgaatgatatcaaaaagataggatttgttcgaacatggaaaaagttattgtatgaaaacccgggattgtcaattgattggactcataaagtgcattagaaccaaaattattatgaacataccttcaatgtttgcaaaaagaagtgccagtgtggatgacaaaaaattgctgctggcaaatacatcttcaaaaaaatcgtctgggaccatcttcatttggaagtgaaacactgcaaacaattcgttgaagaattgcggatgcgattgaagagcggaagtacaactgcagaacaaatggacaagccgtttccactggtcgaagccttcgtaaacctaatagggcaaaaaaacgagtaaatatagacagtaagtcattttctgtcccacctgccccacgagaaaaacgacaaaagcaaattggaattctgcaaggacttcgcgataatcaccgcccattgcttcgaaacattggaaaagtctgtcggaactgtcaatgcccgccctccttaaatttgtgtcagccaactaaaaacaaactatttgttatttttaattccgcatatttttttctcccattttgttctcctcctcactgtgatctgcgatatccgagtgaagttcagcttcgcttcctccccttcgctcatcagcggaagtccgccttcgtccgtgaagcgaatgcgcccgcggtgttctctgtccacaatcgaaagaccaaagggatcaccctgaaaaaggcgggaaaatggaaaaatgcgttgcctttgtttgcattctcaccaatttcttctccaatttcgcctcctgcgtgaccatttcattttgggacgaaatgcgtccgagtgaatttgagggggaaagacgacggacggagtttggcgtaatgtacgacgaaagggaaagccaattgcgatagtcttagagaaatgttaataaagcatgccaaaattttcttaagttttccccagtgaccttaaaagatcatcattttttaatgtacctgcgaatggataaactcccaaaaagcgatcaatgtttctgagattctcgcgaagtcgatccaactaaacaaaatgaagaaaagacagacaatttgcctaattcgaaaaacgcacttcaacttcgtccgacttttcgtcagtcaccaagtcttcctttttcgtgtcccacctcctcaaaatcacttccttttgccgaaaattgtgaaagaaagcaatgcgaggcgcacccggtacactaaaaaaagaatgaataaaaaggaaataaagaaggaaaagacggggtaacttttcacttttcgccacataattttttttatttatttgtatttttcttgggtcttcgggggcgctgatcacgaatatgacaatcatttccattcatttaaaatgccggacccgaattggaaaaaaagacgtaaattaatttttcaccaaaattcacatttattgtccaaaaccgattcaaatagacgggaatataataaaaaaaatagagattcatagccattttattcgtgagcccccgaaaacttcagaaaaaagaaatttatgtggcgtaaagtgaaaaagtaccaaagacggcacctaaagtaaatgaaatgaatgccaggaggtatcatctgcaaaaaggaaattaaaagggataaaaatgaaaagcgctgtttgttggccaactttcatcccgaggaaatttgggccgacaatccacgagcgataatccatgccgaactcacaacccttagggaagtccttgaagatcttaaatacaatatttttgatatttactgtctagtaattgagaaatgaaaatggactgaccaacacaccgccgttttcgaacaattccaacgccaattcttgcgacatttccccggtaagagaaacattttgtagctgcgactcgttcatggaaaagatgggaacaaaaaaaaacaaataagtaagtataaattaaagtaaattcaatgttaatggatttaaaccaaatacaaaatattcctccaattgcgaaagcttttcattatcaaaaatgttttttgggagcaaacgacgacgtacaaacaccagtgaatacaaaatgtaatttaaaaaccggtttctaaattatgggaaaataacaaaaatggaatggaaagaaaaaatgaactgacgcttattcaacttttgacttttttagatatttaaa

SEQ ID NO: 19131 - DNA, 1114 bp, Heterodera glycines
tagggctatcgaatgctactaaattaattcaatttggacaactatgaaaagagttatgctccaaaaatcgggctggcgcccagttggttggcgcccaatcgtaccggtccgttcccggaagcgatttgaagcagacccatttaacaagacactgtcagatacaaacaaaccctgaacacggtgtctccgtagtgcgtcacccattctccgtccacattccgagtcggacatccctcccctgttgtggtattcaattgctttttctgcttcaaccaatccttcaccttcaatgtgaagttttggcgtgataaatgtcgtttcaaatggttcttcagtgccgtcctcgttggcctccaattttgccgacttttgctgcccatgaattcgcatctttcgctttctttcgtccgcttttcgcgcctcctttccgtcgtcgtccatcttcaaattgggcccgttcagctgcttctcctcgcttttcgtccacggctccaacttgtcctcgtcattcactagcatttgcgtctcgtttttccgcttacgcggctctcttccggcttcgtcccttccgcgtccgtccaccgcggtttccgcctcccctcccgcgttgtcattgtccaacttccgtgccctttcctcctcctccttcccttctccattagcatcattcatcaacttccactggtatttctcctttttatgttcattcccctctaaaagtccactacaattttttgccttcgccaaggttaccgtacccttcgacatgtatacagaatcccgctgtgctactgtcgtccccgatggatttttgtgatggcgcccaatttttcgccgcatcgcaaatgggtcgccaccgttttcctccctcctctccgcagatgtcagtacagtcacttcctcgcccatttccatggcgcccttctcgcctaatttcccaagatatacaagcacattgttgcgtcgatcatttgcgacagcattagccgcaaatgagttgtttcgccttgggtaagttggcatttcaagactgagttggccgctgcgcaactgttcattgatatgacgacggactacccctgaacgcaccgaattctgattaatgatcagactt

SEQ ID NO: 19132 - DNA, 1707 bp, Heterodera glycines
cccccccccccctcccgtttcaccggcagtcgttgtccatgcggcacaatttcatcgattgtgtgcatgtccattgcggttgactgatcgcttctctttgtattggcgattcgatggtccaattttgtcgctctgagcaatcattgagaaatggaaactaagaaaagaattttcaacggaaattgaattgctgaattttaaataatttatttttctacagtatcaaatttaccgtaccattgccgtgtgacagtccgcgtcatcactcgcacattcgcagaacacctaaaatgtacaaaagacttactgtactgcatgtacagtatatttttggtaatttttcctttttgaattttaaaactctttttaataaatatattctttttaaaatgccatgccatcgcttgcgaaagcggagcgtgcacaaaatgcacgaaacggtgcaacgcttgcgcacaatgcgcgggccgtctgcgaccgcaggcgccgcggtggtgaccgcatttgatgcgcaattcgctcaaatgccaacggcacggctcgtccatgtcgcacagggaaagcaccgccgggcacgacgacgcccaaccgatgccattggttgtcattgcatcggaaactgaaagtaattacaaagcaatttgtcatcatttttttatttttaactcgtttttaaacaataattaattgctatgtttaaaaaataatttatttaaattaattttcaaattttatggctgtttttccccaaaaatgactttcaatttctgctaatagtaaagagaagaacagccgccagcgcagttttgtccacattttcctttatttgtcggctttttcggttgtccgattctttcgccaattcttttttcgtaatttccggtggctttatcccccggtccaacttcatttagcaagtgagaagcattgggaaggggaggggaggacaacaaaaagcattggtttgaagctgtggtgttcagaagtggcccatcttcaccgcttttgcctatgtttttgtctctgaatggccaaggtgttcgctgatgatggcccattaacgatggtgacgcgctcaaatgggtttttgtggagggccaaatgagaggaaaagtgcctttggagaggggtgagggggggggaagacgaagggtataaaaggggaggagaagggacgtatttagcagttgggggacaaatgtggctaaagtgaagaggggccaaaacaaaatgcaaacagagattgccaaccgaaatcgaatggatttgtttcggcatttgtttaaaaaaatgttttgttcatttgcaatttgtgctgttcgttaaacaaacaaaggaatttgcacggcacacattccaagcaatttattcaaaagttggcccaccgcaggagtcaatttcgcttattcacagaatgctgcttatttgcaaaaataatttcaaattgaaagaaagggggggggggggtggaagaattcaagcaaaacaaactgatgaaaagccaccgagcataaacactttaaagctgattgactgatttgaatgatcagcatttttttaaataattaattaatttaattaattagcccttattcgaatgcccttttcattttgcgttgaatttcaccctttgatgcatttgtttttgactgcttttccccaaatggcgtcgttgtactgctcgctgttgtcgtcgctgtccccccg

SEQ ID NO: 19133 - DNA, 2238 bp, Heterodera glycines
  unsure (1)..(2238): unsure at all n locations
gagaaggaagtcttgagggcaattgttgacgtattccaaagccactttcggcagaaatgatgggtgaagctgatgctcgtgctggtcgtagaacattccaaagttgaaatcgtacagtccacgatgtcctcgaaaaacttcctaaaacgttttcgttagctcctgcctcggcagtgtattgtagagggaaatggatggactatttgtgagacacatttatgatactaaacattaaaggagacaaactattcattcccaactactaaaaaacagacacataaacctaaatgtaaaagttattagacacataaatgttattcatctaattttaaacactatccatattaaccccagccgattctgactaattagcatcaaattaccgcaccacaagcatggtcttgcaacgcattggcaggttcttcatgaagcagtcatgaacactgccagcaagtcgacggaaaattcgaaagttcatgctaagatgagtttgccattcaagaagtgcctttggctgcattaaattcttcggcaaaatgaatggtttcgagtcgagttggaaaaaatcgccaacagaaacgatgtgcaagattgtcgatgtgtagtgttgcttattcttaggaacgtagtcgtcatcctggtcaacttccccaaggacaattttttcgtcgtcatcaatcaagtacagccatcatcatcattttccctttgatgttgatgttttgagccgagcggcagaccatcgtttgcttaaagggttttgctaaggtcaacatcattaaaggataaatacctttgcgtcgctgatgcgctgactcgaccatgttttcccttgcttcttggttaattggtcggcacaagacaccaaacatctcaaagaagtttgtcatggaggcttcctgaaaatgttaaaaactgacaacaggcataacatgtgacaaagattttcaaaaattcatgcacaaattatgagacacattttcattatattnccnaatcaggaaagacacgtgttactcaggattgtgagacacatttatgatactaacattatatgggacacactatcctattttcctaatactgccccgatatgcaggaaatggatagtgtgtctctgcaggaaatggatagtgtgtctcctcaacatcgaattacatttagaatacctcgaacactacaagttgaggcgcgtaaagtgccaagaatttaaagccctttgcatgtcaatagtcattattgtgacgttgatgtccttaaaataaaaataaatcaaatcaaattagcagctagcaccttaggatggtagggtattccgtttttgttggaacaataccacaaccgatgtggaacttggtctgccgaatatgaagccgcatatttgcgcatgattctgatttgcccgagtgtcatgcatttgccggaagtcggcagacttttttgaagtccttcagaaatttggaagaggtcatcgtccgaaatcagttggtctttgagtcgggaaatttgttcggctacgtggtctgctgcactgtttgtggcacaaacgatgagaatttgcggcttcatattttgcatgcggttccggcactcctcatcctcctctttgctgtaattgcacacatatgagagtgcagcgagaatggaaatgtgagctataagctcggtttttccattccctggtggtccctgaattagaaaattttattgactgaggtgcataatattaaaacttgaatagcagacaagccctctttgttgaaagaagccataacggcagacttttgtgttgtggtcaaatactcgatagaatcaagataacactgaatcgttggcctgtggaaggattcgacgacaaagcccgtatgtttgaactttcgaagtttaagtgcggaggctggtgctgtcgcatcatcggccatagcagattccacctcactaatgcgcttgccgagcatatagacaaaattgtccggcagtttccaaggaagtcccgacgctcggtagatttgtctacatgttaatagatttaaagtaattaaaaaaaagtcaagaatgtccaaacctgtgttctttggaaataatttcgaaggtcagtttctgcctcatcttctgcccatgtgattgttgtgatggtaatgccgatgcggcagatccggngtggttttggttcagccgattgttcatgtttgtcgtcggaaaaagtcagacacattgcgcacatgaaggcttccattc

SEQ ID NO: 19134 - DNA, 2356 bp, Heterodera glycines
aggtcttcaaaaaaatttttaagatttttccttgggaatttacgttttcgagttaaatttcctcagtattaaaatcggaaaacttccgtcatttccctcgttttggttttttctttttataaatttacaataacaacgacaaatattttttttgactttaaaaattttcccgcgtcggaaaaaataaaaaataattgcaatttgcaacgtttcctaagaaataaaaacaataaaaaatgggaagcggaaggcggaagtgtggcgggggcggggaattcacggctcgtcctgggcgcttccccaaaattataaaatataaaatgttgccaattttgagcaaatacatatgaattttgaatgataatttttattttttcataatataacttataattatttttctctccgttttcgcattttccagcagagtttttgaattttatttgtctttttccattaaaatccccaaaatgtctgctgaattttcgatttgtctgcttttgctgctgtttttatccttttctttgtcggcatttgccactttcgacggccaacaaaatttgacgacagatggccaatttttgggttgccaaattaagaatttaaagctgctgcaaacaaaatttatggacagaaaattaatggaaaagtttcactttgagctgagcaaaaagcagcgaattttggaggcactttttgtgggggagaaaaaagtaaaaaaaaaggaaataaaattaacaattaattattgtctaaaatttttaaagcatttgctcctctctgatgcttttcctcctcctttaattgctgccgatgaattcgaatgtctgaaaacaaaactgaattcgatccatgctaatgaccccgctttgagtcaattgctaaacggcttatttgctgctgaaatgcgcgcaaaacgaaaattggagtcattggcaggcaaataattaaatgccaattaattagcattaattaatcatatttttttaggtttcggtgatttttctttgttgaaagaattaaagcaaagcgtcgcttttgctttgcttttcgtggcaaaacgtcgccgaattcagctgaataaatacggagagaagaaacaatttgatttaagcaaagaaagcgtaaaatatttaatggaagaattaattggattttcggacaaagtaattaattcaaatttaggaaatttattaaaatattttctaatttattataattacctaggtaaaaagttgtgacagtttcaataataatggaagaaaaggaaggcaaaatgatgatgaaaaattacttagatttgcttttagagctaatcaaatcgatttggacgaagccgcactttttaatgggcgaaagggtaattaggaataattaacggaatatttaataagttgtgtgtaaaatttgtataaattatttagacgaaaaacgacgacggagaagaaagcgaatgattaacgcatatgtagtttattttatgattttggcaatgttttttctgataattatttgtttgtgtttcatcggttgtcatgacacgcaaaatgattggcgaaacattcacagaaacaatggacaaacagaagcaaacggagcaatgaccagggtagccaactctgctgaattatcagctgatttttgggaaaaaatactcaaaatggccatttttagcctatcggaaccgccgacccccaaattcgctaaaattttcacaaatttgatctaaaaattgccaaaatctaaaaaaaatgtacaaaatttgcaatctcatttttaaatttttcagttggcaaccctggcaatgaccaacaagcgatgtaataaaacgccattataatgatataattaaattaattaacaattaattagttaattaagtatcaaataacaatttttcaattaaattaaactcttaaatggggtttgctaaaaatatgccattatttcattctgctgcacagatttggacactttcaatggcattccttcggttgtcgtcggcgccagaaaactgagcgaggaagaacggacggaatgcgcaatttgcctatgccaaatcgatgccggcacaaaagtcaaaccgttgcccatctgtaaggtgtggtgccatttgaattgaacacattaaattaatcattttgtgccgatttagcacatgttccacaacgaatgcattgaaatgtggtaagcaaaagttattaggggaaatatagttaattaattaataaatatgctttaggatcggaggcggtcataatggttgtccaatttgtcgacaagaaatattggacacggacatgttgtcaacaacaacagcaaatgcacgtaagagcataataattaattacttaaa

SEQ ID NO: 19135 - DNA, 1815 bp, Heterodera glycines
agaataaatgttcgtttccgtttgtgcagttttcctccgatctacgccccaagcaaaaagtcattttcttatcaaaatatcgcacgcaccaaatgatgaaaatttgtgtggtgactaattaggtaattccttttaaaatcaaataatgatagcaaatgataaggctaaaataaacctttattaggcacaattgtttgaatttgataattctcgagaggtttcttcataaatttgctattgcttttgaaatttgagtgttttctgtgctaaaattggcccacagcaccgtttaaagcaaacaaaagaatcacgagaatggatcatcagaatgtgtaagatgaatttcaaagaaatgttgcataataaaaaatgatgattctgcaatttttcaaaagtcggtaaaaatttcaaatacatttattataaatggaaaaatccagaagacaacgatgaattatttgaattgaatgggggaaagccacacaatgctcggttaatttagttaggcattttatttttgaaaatgtgccacttttaatctcacaatcagccctcaacaccattcacaactcttatgcatcaaaacacccttctcgttgttgtcatcccaaaaaagcgtccttcagaaggagccgaggcctcgtccacggccaccgtggtgagattggcgcgcaagttcttaaaagaattgattgttttacgggagcagcgtttcctccgctgaaaaaattaggaaatttggtacttgtgcagtttacctgatacttttaacatacatttttaaatgcctataaatgtattcatttacattgtttttttagcatggaattattaaaagaatttaatattcgtgaccaaggcagaacacaaaaaaagatatggaacacacagaagcttattgaattcgcatgtggaagaatttttatggcgaaagcgattccaaggcccgatgttttttatcacttttggtctcaagttgcatctatttataaaatttcgagaacaaatattataattctgtttttaattatgttgaaatgcttaaaaaagctatgtaaatgaatacatttataggcatttaaaaaatgtatgctaaaagtatcaggtaaactacacaagtaccggaatttttttttaatattttttctgacttattttaaccactgaaaagaaatacggcattttttgatccgacatcatttacaagaaatacgtgaaattcaaagaatcaattatgccgcaatttaattttttccgtgtggttttcaaaaaaaaaatattttaaattttttcatttcgctatggtggctacggggcctgacttcgttcgttccccgttgaacacactcaccaaactgttggttgaggccgcgctgcagttccatctgacgcatccgttcacggctcaactcggcactgttcagcgtcgacgtggccgcctcagccggtccctggacagctgccgctgcaatggggaaggggagaaataatggcacaaaatgccgactaaatttatgtgaccagtcccatttttgggcaaaaatagacgccgggaaaaaatcgaaacagcaaaaaacatttcaacataaatttgcatatttttacggatatttataatccgccggccaaaaaaaaacggaaagtgccacaaaatgagaaagtgagtgccggtgttacccgattccgcttcgtcttgttgttgctgttgttgtgagtgggctggagggtcggcggccgccactgcgccctttttcatgcccatcactaaacaaaaaattttagtatttcgtttcttatagggctggccgagagtcg

SEQ ID NO: 19136 - DNA, 1658 bp, Heterodera glycines
  unsure (1)..(1658): unsure at all n locations
agtcgaaatttacgagactaacaataagaccccccaaaaaaacctgacaactttctcanccgagaatctcgagccccagtttatttggttagacatttcttgtattttaattgcaatggatgaatttcataaattttttgagtgtatcggagaagggcgtttcctccccccatgaaaatttaaaaaatatcagatggaatttttttccaaaaaatcgccggaaatttgttcaaattatgttggggacaaagtgctgattgtccctccttcctcccattcttacatcgctggaatttgtccatttgttgtgtgtcctgcgctgtggcagcaatcattgactgccatttgtgctccaattgtttctcctttcgctctgtcgccaattcggtgccaaaaacgggctgtttagaaagacatttcgtgttttcgcggaaaaattttaaatccaaataataaaatgatagggtgaaattattttatttttttaaaatggatatcgcaatcccaaagaaccaagacacttattttgtggattaggatttgtgtttcgcataattattttttaatgggtctccaattcgaaaattcgggcctggccctggcaccgaggagttcaaattattgaagcgacagccaaatgcagcatgatcacctatataaaactccattgttctactatttatgaatccaccgaccgacaaactgccctatttcccacaaaattcccattttcgtgggttttacagcggattttgcccttcaaaccaggcagtttttaatgaataaaaaccttgctgtcatcgcctgtcggttcagtggtcgttgtcgcttcgcccgcctcgcgctgttcctcgccgcttgcgccacctttgcccttccaaagcagctttcgctccttcaacatttcggcatgcttgcgcactttggtgttttgccatgacggccggttcggatcaacccttaaaaatgtgccgttttaactgtaaaaacttgatttttcaattattgtagaaaaaaattgatggaagaaatacgagggaccaaaaatttagctaccttatttgtcaaaattagatggatgacgcgtgaggtaaaaattagcgataagattaaaaaaataataatcgccaaagactgcagtgacccaagggttaagtttcataaaacatttgtttccagagggtaaccaacccgcccaagccatgaaaatcctaaaccgtaggaccgcagaatacttccttgttgcgggcctattgtcgacaaagatttcaaaaacaaaagcattggtatcgttttaacaagacaaaaagtgtgcccgtacggctcctggtccgcctcctcttcggtaaacgccggtcggtcccggcgctttggtcgctgctgcagctcgtcccgctcgcggcccgcccagcggttgtcagctcgccggtccgcacgtcgcaactgctcgtcgttgcccattgaacgccgtcgatggtatgaattggtgtcatggtggttgtggtaacgctctatgaaaaagcaaaacaaaaatggcacacacaatttaactcggaaaagagcaataatagtttggtatgtgtgcttgtggtacattttcgtttagtgagtccattagagtgccctaaaggaaagttgaaattttgttgggaaattaa

SEQ ID NO: 19137 - DNA, 2127 bp, Heterodera glycines
  unsure (1)..(2127): unsure at all n locations
acagcaaaaaagaatcgataaatgaacaaggggatgaatacatcacatccctccctccttatcaaggatcagctgcttgggtcgaagatctgcggtttcttcttggtccgctgtgatcgtcgaagttcgggaggagctgggccatcattctgttcatcttcagcctcctgttgttgatcatcggcgtccgagtcgctgttcacggattcgttgtccggctgatcttcgaccgtcagatccggcttaagctgatcagcgtgccgcttccaaacgcctttcaaagtccgaacgagataaattaccccgtttttcgtaatgatcagaccacggaaccatttaggcccgtctcggtaattccttacaaaaaccttttgaccaatttcaaaagttcgatctcgagttccccgatcaaaatttcttttgattcggtctctgtatgtcgtactgagtttttgcttcttctgatcggcgttctcctcggttggacgtgccaaatcaagcatggtacgcaattttcgaccgaatagcttttcagctggcgatgcatttgtcgctggatgaggtgtcactctgtaaagtcccaaaacctggtgcaaagcctcatcacatggcactcctccgtccttttgacgctgcatcatgtgtttgaaagtttggacaaacctttcggcttctccattactcatcggatggtacggaggggtaaaggtatgctcaatgcctcgcgaattgcattattcgtgccattcacccgacgtgaactgtgggccattgtcagagacaatttgctcagggagtccatgtgtggcaaaaatccgacgcatttcagaaattgtcgtacttgtgttcgtggttttcattttaatgacctcaggccattttgttttggcgtcgaccattacaaaccacataaatccccaaaaaggaccacaaaaatcgacgtgtagtcgctgccaaggccgttcgggttcttcccatggatgcaatggaactttacattcctcagaagcattaatttggcatggccggcaagactttcgaatttcttcaatcgctttgtccaatcctggccaccaaactttttgtcgtgccaaggatttcattcggacaatccctggatgtgccgaatgtatcagttggagaatttcgggccggaatgttgctggaatcacggttcttattccgagcattatacatcctgactgaatttccaacgaattccgagcaatgtaaaatggtcgaaattccttgtccactttatttggccaaccctccttgacaaattttttgactaatttgagcaaggggtctttttcggtctcttttgcgatcatttccaccgtgaccggtagcgattcaatggcctggacttggatcaaatttacttcttgaccattatcatcatcgtcttcatcggtctcaacacaaggcagtcgggacaaaccatcagcatttccaaacttctttgttgaccggtattcgatttcgtaatcgaaattcatcagaattaggccccatcggtgtagtcttcttgctgccaccactggcatttcgccttttgggccgtaaattttcttcagaggctcatgatccgtttgtaaaacgaattttcgtccatataggtactgcttgaatttttctattccgaaaataattgatcgcgcttctttctcaatttgtgcgtacctgcgttcagctgaacttaaagttttcgaagcataggccactactccttcttttccacttttattgtccctctgaaaaaggactgctccaattccgtaatcagaagcatccgtggccaaaaacaaattgttttttgggtcataatgcacgagcactttgtctgaggtcagcttttccttgaccaaattgaaggcttttgtctgctcatcacgccattcccattcgacatccttccggcgaagtctgtttaatggttcaacacactctgccaagtctttgacgaatttactgtaataattgaccatttccaggaatgattccaactctttgatggtctttggttccggcatttcttttattgccttaaccttttccggtgatggacttattcctgttttgacagtcacatgccccaaantagatcaattttccttcaaaaat

SEQ ID NO: 19138 - DNA, 1086 bp, Heterodera glycines
ccaatccaatggcaccaacttttaaatgttctccctctaagcagccctaattgggctaaatgactagtaattttctaatgaatctcaccaccccccttcatttaaaaaatcggaagaccgtaaaagcaagaaatttcatatctctgaattcatttttaaaataaagaagcaatttaaacatttatttcagtgtaatcctttctttccgctttatcataaaatggcaattcgtcccaacgaacggcgccattttcttaagaattttagctgcttctcatcattcccatcccaactgccgttctccacaaacagtggtggtggtggtgcgtataataagatggacgatcggcggatgaaaaagtgcactttcccatggccccttcccccccccccccgggggagtgcatcccattaataaataaatatcagcacacgctaaataaccctaccataacggtggtgagttaatttaatggaccgtaactgaattggtgagtcacacatttaacataagcaaacaaattttaaaaaggcaaaaaagttaaggggaaaattccttttttttaaaaaaatccgaaaaaaagaaaaaagcggtaaataaaaacaaataaattattaaagggcagaagaaactctcgaaaaaaacataatggccgataaatagccattcccacgatgataagagagacaaattgccaaacaaaaaaaacaaaataaaagcgatgagaggacggaaccctaaaagtgtttgtaaggcgtgggaaaggcaccacacagaaagaggagagagaattttgtgtggcacaaagcgagcacagcgattacgacccaccggcacagaaaacaatcggccgtgggtgccgttgggtaagtgccgacatttttgacacacacacacaaaaaaaaattgccgccacatttttttgccatagggtaatataaatggattagtggtcgaaatcccccccccccccctcaaggcaaagcggaaaaaaaataaggggggggggggggggggggaaaaaacccctcggggggggatttttgggggggggggggggggttttttgggggggggaacccccc

SEQ ID NO: 19139 - DNA, 1109 bp, Heterodera glycines
  unsure (1)..(1109): unsure at all n locations
tttcccccagcaattggagacaaaagaatatttccctatttttcgactcaaatgcaatgaatggtttcattttattcgtacatttggcaaatcgttgatttaaaacccaaaaaaaaaatcggggataactccgaattntactcaatggggattcattttaggggatggcaaaaaagtttataaaactaaagtaaaattgcttaaagtttcatatgtttgctcttccttatcattaagttggaattatgaaatgggcaattaattaagttggatcaattagaaataaatgaataattaaacggaagattagataagagaatgggaaaaataatggaagacagaaaaaaaatcatttctatgaaaataaaatttacgcgaattaggaaaaaaaatgaaaggaaaattgaatgaaacttaaaaaaacaaaaattaaaagctgaaaaacccactcgcaatgtgagccgtccctggagcaaattccgtcatgaaagcattccatgccggacagtcgacaatcgaaacggtgcggcaccacaacatttgtggaaagggcagtgctggcggaggcggacaaagacgacaaattagcgactgaattattttagaaatatttaaaaaataataattttttcaatttttgctccccgcatatgtattatttcaaattgttcctatttttcattttcatccttttcaagagcaacaacaattaacttttcgaacccactttcttcgccattccctccggcaattgttcctccgtcgctcatcaacagaagaatgaggagcagcgcaacaattgttgatgccgttgttgtcctcgttgcttccggcacaattcccatttcgcaggtgtttctctgcctcggggcaattggcgtgaattcgttggcaaaaggcggttaattgcaaaaggaaaaatttgctaaaaatcgaaggggtaaaaaattgacaaagggacaattgttgggggggcgtaaatcaatcaacaataaactaattaatatattaataaaatataaaaagaaagattgaaattgaattccaagcttttttttatttgtgcatataaagggacggacggggaaaggttggagggatggacgaaa

SEQ ID NO: 19140 - DNA, 2544 bp, Heterodera glycines
ctctgtctgtgcttaataatgatccctccctccctccgttcgcaacaattcgttcgtcgacccccccgggcacaacaatcgctcggccgtcgcgtcgatttgcttccccccgcccccctcaatttccattgtgtatgtttttgagcgaaataattgcgccagcagaaaattggtggcggtggcggagcggaacgtgttccctcccctctttttttgttgctgtttggtcgcatggaccaacgactgacgcgcccgggggaggccggggggagcatcgatcgcacgcacatttttaactgtccccgcgcaccgccgcggggggctgagggaggggcaccctcaggcaacaaacgaacgcaacatcgcccccggcgatgtttgttgttgttgttattgttgttgttcctattttttgtttgtttgtcatgggaattcgtttttttttgccccagcggcgatgaaactgatccgattgtgatcagacaagcagtgaataattgttgcttttttgatggtgattttcaccggtatccagtaatttgaggttttgttgccggtggcaataattggccgagattttttgacggtgattcatcctttttaagggtactaattgtaaatagaggagataatatcaattccgttcccctcccccccccccttcttgatcggacattcggatcaaaccccatgaaatgccaaaaaatgccccaaggccaaattgtccatttggcactacgtccttccctttttaacaccccccccccactttagctgcttcttccgcttcctcttctattccctcctccgcttcgtcctccgttttcatccgtcccccaccgtcgccggacgtggacattctctccttcacgcccgccccctccggcgccgtagccgccgcctccgtcggcacaattggtgcccatcagccgcaccaccagcagcactcgccgccctcgttgtcctccgcttcgtacgcgtcgtccaccgcttcgtcctgctcggagcacccggagaagaaatacttttgccagcgatgcctaaaccacggcgaagtgagagacagagggagaaaggagcagggggagagaggggaaagagagagagaggaaaattttaaaaaatgcgaaaattaacatgaaaaactaagggggaagtaatgaagaggaaattgaaaaaagccgcgtttcctctccaggaacatcctcggaaaggccacaaaccgttttgccgctacagagagtgccaatgcattgagtgccaaatggttgaacaggtgggagaagaggaggggcgaggggaagtcggaaagaacattttacacacattttgttgccattttcagcgtcgggtactgaataacgcgctgaacccgaggaagacgaacggcgaaagtgccaaaaagggtgccaatcagcaggggccaaagccgcgcgacccgaagtgcgcacgatgttcagcccacggggaacaggcaataaaaattatggaaataaattgaaaataatttatttgttgggagcatcgcttttgagaggagagaaagagagagagagagagagagagagggagggagggagagaaacaagagggagaaaaggacagaaggggaagaaaagggagttatttcgagaattaaatgtctgacgccgaaaattggcagtcaacttgctgctgatcactgaccactttcttactgatcattctgttcagagtgcgttgcgtggacacaaaaaggcgctgtgtccgtttttggagtgcgcttgtgccaaggtgggcacaagccgacatttaaatttttataacaaccgcaattagccaaaaaaatcccggccataaaattaattagggcacaataaaattgctaaatttttccgttagtgcgctttggtggagcagcgacggcgtctgatggccgaccaaatcaaactgagaagacagcagaagaaggcgcgagtgcacaccacacaccatcatcatcagaatggccaatcgcagaacggcggcgccgggggggacgaagagggacaaaggacgccgcaggggacaaacgccgggggcaaaagtccgtcgccgaaccatcagcagcaacagcaggtgggcaaaagtgtggaaaatagtggacagaaggaagagacacagagaaagagagagagagacagagaatgtagagactgggaaagagagagagagagagagagagcgacaaagagacacagacaaggaccattgacaaatgtgaacaataattgaacccgagaggcgagtccaagacccctagaaaccagagaaacttctggatgatctcatagttttctcggttaccttccgaaaatcggttgctgatcagccaatatctgatcaattaaactgttaccttttttgaataatggtcgaatatgatgcttattgatcagtgattgaacaacgccctcccaccccctcaaaagttaatgaattcgaattcagcttcggattccgatggcaatgctgctgaagaaggcgtacgagaagaagccgacctatccgtccacaatttcctcg

SEQ ID NO: 19141 - DNA, 1191 bp, Heterodera glycines
cctctccttctctctctgttctctttcctctatcctttcctctgtctgctctcttctctccctcctcccctctctttcctctctcctatccctctgttctcgttatctccctttctctccatcttatttcctagtccttatcatctctctccccctcgtccctctccttctctctgttctctttcctctatcctttcctctgtctgctctcttctctccctcctccccctctctttcctctctcctatccctctgtctgctctcttctctccctcccccctctctttccgctctcctatccctctgttctcgttatctccctttctctccatcttatttcctagtccttatcatctctctccccctcgtccccctcgtccctctccttctctctctgtctctctttcctctatcctatccctctgtctgctctcttctctccctccccctctctttccgctctcctatccctctgctctctatccctttatctctatctttatttcctagtccctctcattctctctctccctcctcttgcccctctttctctcttttctctaccttctccccctccccctctcttttctctcttctcctctctctttttctttttttctttatttctctgttcccccgacctgttctgaaaccatattttcacttgtcgctctgtcagaatcagtgaatgggcaatttcaatgcgccgtttccgtgacaaatacttgttgaaatggaactccttctccaactccagcacttggttccgcgtgtatgcagtcctttggcgcttttcgcctcgcgcagtcccttcaaacggaattttcattgaattttcttagatttcttttttcttctttatccccagggttcgcagatgtgaggatttagaaggattttgtggtctttgaagggaccaaagattaattcttttgaaaatgaggacttctttttgtgattttttggagaaaatccctaaaaactttcccatttggtcaagataacaaatcgaattaaaattccaaaatttttccgtcggcgccgatcggcaccgccaaatcctttaaattttcaacccctccccaccccctcattctccgcgtcccttcggctgttttcccaaatcccttcctttccgctctcttctcggccgaagaaagatttatggccgacagattctcaatttatttg

SEQ ID NO: 19142 - DNA, 1847 bp, Heterodera glycines
acacaccgtccgaaaaaacgagatgtgtaccaataaatagagagtgccaaagaaaaacattatctttttttctctaattttttgtctccttttggcgtactatctaatatttttattattaggaaaaacaacattcacttcgtgatgtttaactttttttctgcatgttaaatccacaccaaattttgcaaatcgatagagaaaaaaaatctgcatcgatttctatgtttattatcatcgcttaaatgttgttttaaaaagttataagataaaaaagttaaattattattctttttaaagatttaatggctaaagaactttattacggaagcgacagaccaaaaatgcacgccatacgcgtgagaacaagcgggaggagagaaaagcgcagacggccaaggcgatacaagctcgcctggccaagaaaagtgagttttttcaccatttttactcaaaattttttttttaatttcagccgctccacagctgaatcccaatgccgaaatgccaccgcaggacgaagcagggccgtcaacatctgctgcatcggccgaagaagcgatggagccaccaccaccaactccagcaccagtgccaacgccggagatggacgaggaaattttggaatttggcttttcgctgccatcgacatctgtcacaccaatcggcgatttggtgccgttttcgacaacaccaactgcgtcaatggacaccggagagacgaccccgccaccgctggccattgacgagcgatcagagcgcatcgaacaactggagaagcagctcaatgacctggacgacaccatcaaatttctgcgcaagcaggtgcgcaatcgagaagcgctgatcagtgatctgcgtcggcagctggacgagcacatggtaccaccgatggcaccaccaacgactagcaaaagtgagtgaaatttttccttttttaatttcataaaatctgatcattttttcaattttagcaccaccaaacagaggaagaccgaagaaaagactggatgaactgcagcgcagcgccaggcgcgacatcgtcgaccaaattgtgggcgtcatcgatcatcgtcgaccaaattgtgggcgtcatcgatcgtgatcgctcgcgttccgcgagccgcgcatctctgcaccggatccaccgagatatccggcacaaattcgcgcactacacgccaaagaagggcaaggagcggaaggaggggatggacgctgaggatgggcttttgctgctcgcccaacttggaacacagaaggcgtacaagcggatgaaggcgattttacggctaattggccgtaatttcaacgttttgccgccgttggaaaaagtgcaattttcagtgaatttttcgtttgatcaatgttttttgggtcatcgcaataaaaacgaagaatttgcgcagagttggaatatgatgaaattccaatgccaagcgggccccggatcgaattgaagctggtgagttgattgaaggggctttaaaatcttatccaactaattaagagggaggaggaacaacgggagcaagcggaggaagacaaaacgaatgaagaaagtgatcaagaagctgacgtcgatgtcgttgactgatcgaggattaatggtttttattttcattacaagcggtagataaattttttaaaaatttgtaaacaatttttaaatcattttggtcacttttccttttatttattcattaaaatcatcgaaatacatcaatagcatgcactgggaatcgaacctgggacccccccccccttggtgaccttctcacagaccacttcgccacacatacaaatcttttttggtacagcagctcagtttccggacgccgtgtaca

SEQ ID NO: 19143 - DNA, 2954 bp, Heterodera glycines
atattttactcggtttaaaaaaatgaaaaaatcaccttaaaattaggttaagaattaagcatattaatgaattacgttcattaacggcacggcacattcttttaccgcttgcccgccaccatcttcaaaattcacaattaattaggacatttcgaaattaattattaattcatttttgcgcaattaattatgatattaatcaacatttttcaccttaatcaatttaagcatcagtttctttataaatttatttggttgccaaataagtgcttaaaaatcgcaaaatactgtcaaataaaatgacttaattgatgctaaaaaataaagctaaaattttcaattttcactttgaaatggggccgttctaatagagaatttttcaaaaaattcccatattttcagaccgttttcaatcttaaaaaatttacatttatttaggataattttatgagcaaatctatggatttcgccgctcagggtggccaatgagatgattggctgacgcgtgcctttcctctgtcccattttgaactttttttaaatttttgaaatcaaaatcactggccagagatggctcgccgtcgttgctgggctgatcattcttcagcttctgatcattcttcagcttctgatcattcttcagcttctgatcattcttcagcttctgatcattcttcagcttctgatcatttttcggcttctgatcattcttcagcttctgatcattcttcagcttctgatcatttttcggcttctgatcactttttggctgctgctgctgttgtttctccatttctctacgaattaagcaaatttgttgggaatttagaaaggcttaattaatatttgaaaattaaaataatatttaaaaattgtttaaatggggcttttgtgtgatgagaaaaaacaaacacttttttttttaacagtttaaataatttattttttaacaatttcaaaataattttaaattggattttttcaacaaaaaaacaaaaaatatttgtttttaaattctatgttaaatttattatttgattgatcggttttgaacaatttttgcttaaaattaaaatgagtgaagcgttataaaagacaaaattggcattatgtaaggatacggtatggaagggagaaaaatacggtaaatgcttcattaaatatacatttaatttttccaaaatgaatttaagtttaattttgtcttctttaaatagaggatttctgattagcttcaagcaaaacacagattagagatggataaactcaaaagagcgagcgtgaattaatatttatttgtgggtaaaggtattaattaggctagattattttaaattttcccattttatgaccaattaaatattttcggcatcaattgatggaagcaattttaatgctaaatgatgtgaaaattatccggcagttaaatggcgttgaatttgaattggggaaattgactcttaaacccgcgaaacatgggcttgaaaagtatagtcgaatatcgaacgatggcaaaaattggtcggttattgattgacttgaaagacaatcgattattgattgccttaaattagattgattgttgatcttttggaaaagcaatcgagtattgatttttcggaaatcgatcattatcgattgattggaaaggaacagttattgattgttttgaaaaggtgcgcttttattgatctaaatcgaccgattgttcttgcaagtggctgatcaatacccatacacagcaaagtgaccacaacggattgccaaatgttgatgggctgaataaaaaaaaacactcaattttcacttctaaaaatatattgttaaattgggttgctccccagagctccactagtctcgtgacggcggcgggcctcccacacatttttgggtgttatttatcaaaacaggaagccagaacattcccccccccccccccccccccccctccctcttttatggccatatttcgggattttatatccatataatttaaacctaacccatcaccatggcggtagaatttggccaaattttgcgcgaaaggctgccaaggaaaatgggaagacaaagacccctttttctcctccgcgatcatttaggcccaatatttgcacagcagcactctttcctccccatcgacagcagcagagatttaaaaaaaatgttttttcctttaaaattgagctaacgattggtgggctaatactaaatacagaaaacgcaaaaaaatttacaaaaatatgtttgaatgaaggtgggcggcacgtacaacacattgtgccgctggtgcttcggcactttgtcggtaaagttcatgcacttatcaaagataaatcctcgaactgatcggaattaaaatattatttacaattaaattttcatagggttactacatttttcaaccccataaaaatcgtattaaaacccagaaaattatttattcttcatttccgtctcgatctcatccgtcatgaacaaatgaagattctcatcaaaaaactaccatagctttactcaatcccaactaaaatttgaattctttaccattcgatagctccaggtgtttctagtaggattcgagccccacccccgccccggtccccggggacgggactgcttgtttagcctcacactcgcccccgtgactcagaccccccgcaatccccgcctccggggaggcgcgggggtaaaaacgcacccctaagtatggcatattcgtggggtaaactttattagtcacaaataaatgtgtgaataaatggaaaagggacgattaaatataaatattaaatagaagtgagaagaagccccaaatgggcgaatagtgcggcttttatagccctagagacgtgtgcgcatgcgtacgcgcatagagagagagagaaagaaagagggagagaaccagtaacacacaaaataaaaaatagagaaaaatactaaattaatgaaag

SEQ ID NO: 19144 - DNA, 961 bp, Heterodera glycines
gagtcattgggtatatgcccaacgggggagtcattgggtatatgcccaatggggggagtcattgggtatatgcccactgggaaggagtcattgtgtatatgcacaatggggggagtcattgtgtatatgcacaatggggggagtcattgggtatatgcccaatggggggagtcattgggtatatgcccactgggaaggagtcattgggtatatgcccaatggggggagttaaatttccgcccattaaccctcccgtaactattcatgaaaatttgtaatatttattttaaatattattggcggaaatttttttttgatattcgcggagatgtggtttgttgagacgatggatgaacgtgctgtatgacacctccaaattgttgttattatttaaaaaatatttttttttaatattggtttttatttataatgtattttttattatttttaatttagataatccccaaagaaaaataatttccaaataaattcggcaatcgatttatttaatggaaattgaaaaatatattgagcaggggttaggctatctcaaaatctgatcgcaagttgggtaatcgggatggcatttctgctgattgttttcattaatttcgtggtttataattatttttatttatttgtaagtatttgttactgaatgggtggagatctcttgaaattcattaagtttagttaacacatttattttttaattaaataaaatcaagggctaaacaattcaatagtcttgccttgaaactttgtcttacagctcgtttttactaaaaaactatacactctctatacaaattgaattacattaaaatgtttgaaaaacaatattgattagaaatttaaagtttaacagatttttgtatttttaattaatgtatagcagacaatcagcaaacttaatattagttattgcatttgttgttattgatagaccataaataaaata

SEQ ID NO: 19145 - DNA, 2823 bp, Heterodera glycines
taagacttttggaaaaaaattttatgtatgtaaaaatgtaattttttttagcatataataaaaacttataaatttaggaaatttaatatttttgcaactgtctaaaaaatgctccttagcccttttttagtgttttaaaaatcaattcttaaatttatacacaatttttggcatttttgaggctaaaagccatttttggcagttttttgaagcatattttagtgcatatttgggtctttttcgggattttagggcatatttgggggatttttagtgcatattttatgcgcatatttggcattttttagtgcaaacaacttataaccctattaattagtaataatttaataaaaagtttcttctgcctatataaagaaaacctgcacaatataaataaaatcaataattaaattaaatatttttctaattaatatttgaatattgaatcaaaaaataaaaaaatacaaatttatggagcaacaaagatttctaaaaaaaattttaatgattcaacttattattaaatttcttaatttaaataattttaatattattaaaaatgtgactataacttcataagtggacatttttaaaaaaagaaataaattatatcaagaatttttaattaaatgcgtgttatttataagaaatttatttaaatataatatcagaaattttttatagcatttaaaaaatgaattagatgcagttaaataaattattgcaaactaaaaaaacacacatatagagttataaatagggattcaatttttaagcacaaaaaatcgtgaaataggcacaaaaataggcaaataggcattaagcacaaaaagtccaaaattggcaaagttaggcattataaaaaccatcatagaaaccccaaatattcccttaaaaaaattcttaaaaattaaaattattacatataactaatcaaatcataaaaaattaaatatttatattgttaaatattttaaagctaaaaattataaccaattaaaaaataattagaaactcactaaaacatcaattaaatatttgataacgatagaataaattcatcatagaaaaattttttgacgcagtgactatttaaatggaatgcgttgatcaatagaaagccatgttttaatgcgttttggtatttaaggaatttaaaaaaaaccaaaaatcaattttaataattaatataaaaatgaaatatatacaaattcgttgcattaaaaaatataatgaaaatattcggctcagtggtttaaggtatgaaagcgtgaactttaaataatatacgcgaattgaaaaactttgacttacacaaaaaggtcgtatactatttataaaaatataaacttggagaaataacgcttttattaattcttcaacgctaaacctacattatttaatttaatgttaaagaatcactgaccccttgactattagaatacaaaataaaaataaaattttaaaatttgatgaaaggaagaaaaactaattaatgacttaaaatcgtcatggaatcttccatgatccatttggccttttgggaaccgagagcgcatgagctcatggtaccgagtcaagtcaatgacaagcagggctagagcgcgcacagaaaaaaaccgcgcgcaccgcgcattggggggggggggtgttattaagtctaacaaattagatcttttctcttttatttgcaagttttattaaacaagttaaattaaagctatttattgattatctatttaaaatttatattaattttttttcaaaaaattactgataaaataattttcgaaaaatatttaacattcaaacattatattattaaaatagttatccaatttatattttaaagacaatataattttaccattaaagagatggatttgatcaaaaagtaattccatttttgattgtattgaagtgttaaatcaaaacctttcgattagaagtattaacaaagaattaatcaaaatgttaaagagctatttaaattacaatttttttaagttaggtccgcttttatttttgcaaaaattcatcaaaatttgagagcaatgtatgcctaaaatttttttatcattggcggatgttgttcatttcattttttattataaaacatataaataaattggattttgaatctttatcatttagaaccaaattattattattatttgataattatttaaaactaatttatttatatatttttttaacaaaatttattctcacgcaaaacgagatgcataccattgaacaaatttcaacgcattctggtaactttttattaacttcttatagttctgtgttctccgcatttgagcgacggcacaggcacacaatgtatcaatttataaatattttcattattttaaacagtaatttcaagcttaatcagaattttttcaaaacaagtgttataatgttattatatttttctatttttgttattaaagaaagttgtaaaaaaattatatgtttaaacatttgaatgaaataattttatttttttgtgagtaatatatgcaaaaacattaataaaatccttggacaatttaaaattaaaatctttgcataaaacatttcttgtttaaaattaacaatttgatttactaaaagtgtgcctatttctgcgaccaatatcagctcctctttttaaattcttggaatttggccctgttgtttcggatgatttgtgggagggatttcattaataagcaaattttttttagtttgaagaaaaggtgaaaagtattttcttcattgattttaaaccgtatattaaataaaaagagtgaaaattccaagtatcgtataagagcc

SEQ ID NO: 19146 - DNA, 2682 bp, Heterodera glycines
  unsure (1)..(2682): unsure at all n locations
atcaaaaataaatacataaaatagggttgcgattntatgaaaaaatcggtaatggagcgggattgtggtgcaaaattcaattttttttcctccgttgaattacgaacaaaattgttgaaatttgtaaagtcgtttcggtttgatatgtacaatatttcaaatttctaaaagaaattttcaaacgtcgagctgaaatttcaccaataatctattcgataaaacaaattttctctaagttttaccattgaattgggcaaaaatttttccgtgtcaaaggatgaaaaatgggaaaaaatacggcgcgaggtatgaagaagtggacaacaaaccattctttttaattacaaaattaccatatttggggaggttgccctcaaaattctcaaactaaaagttttgaaagttaaccgaaacccgaatttttatttataaaaatgaaccaagatattcacaaaattgaaatttgacacaaatctgttacgaaatccgccaaaaattcataatatttcctcgccatcgaccaaaaattcctttagaattttgtgttttgaaagtttaacaataatagaccgcacaaaaaatcaccgataaaatttttggaaaattcggaaattgcgctaatgtaaatgttattattttagattaaaattttcattatgaatgctaatgttgtgcaatatttttgcaagtaaaaataatttttcaacaaaaacgctaaaatcctttaattaagcagtccgctgtgcacttcccactcaattcgttacggaatttgacccgacacatccgcagccagcatgtggatgacacgccattcaacatcaaaccgtgccacgctggtgaggcaatgggcatccagctcttcgaagacggaggtaattgaaaaaaacgtcaattgtaaattattggtaacgaaaaattttactaaaatcttttctgaaaatttttataacttttttctcgggatgatttaaggcgctgagtacgaatccgacctccttttttagcgaattccgaaccgcgaacccgaattcgaacattttcgaaaaccccagttttaaaattggaaatgtattgtcattaaaatcgcgttaagagagtttcgaggcaaaaaaataacaattcaaaaaaaaacaaatttagacttttttgatgctctgagcacgaatcaatgtttttaatgtgaaattctgaattttccggatgttcaaattcggcttctgggttcaaaatacaccaaaaaggaggccggttgcttactcagcgttttaaaacacccctaaaacacattttattagaatttttagaaaagatttaaaaaatcaataaaaaaagtttttgttttaacgccataattttaaggagagcgatggcgtttccggcagtggaacagtattttcattaatttttttttactggccaatggaaggctttgtcagtcagactctgccgtcaccgcctgggttgaaggaatgcaaatcatccgcggagtagatgatttggcactgaaagcgtattgatcaagttttcaagcctattcccccaataatttattctaaaattttgttgaaatgagttttttgttggaataaattttttgttcaataaaatttggcttacatatactgcttgctttccaacccgcttatgatacttttatgtattctgacacttatttcgggcgcactaccagattcccttaaaaaagggcaaaaaaatggtgatggtcgtcgcccggtgctgcgcaagccattcaagtcaaaaattccgacttgttttttcattatccataaaaagagacaatttcggtcattttgtccctttttttccttctacaatgatatcaatggtcaaagtgttactttgttctcttctccgctataaaagcatttgatctggcccatcaattctcccgttttggtcgattattgtaccaaaaactcggtcacaaaattcccagtgaattctcctcccaattttttttttttgcgagacaattcgaaaaagttgccgaacgaatgtagcagcgccattccaaatgattaaaaaataacttatgacatgaacaagcttaacggttcatgacaatacgtaatttttgggtttaaactagagttcggatacggacgggatacgtatacggatttttacggatccgtagtccgtaatcagtatttttttgggccgatacggatttttacggactacggattttacggatttttaatccgtaatccgtatggatgcctagtccgtaatcccgatccagatccgtacaattcttgatacggattacggattttttttttggcgtttttaaggtgaaacggattatatttttaaattttatgcagtcaattcgccaatactttggaattggcgggtctatttcgtaaaatttttgtgcaaaaatcgaaaaaatttgaaaaaagaaaaatttttgtgcaaaaaactcaaaatccttacgttattgaattatcttaatttgaaattttacgaaattctatttcatttttttccattttgtaaatctttttaagaaatgaatttcggttttccattttttaaaatttttaccaacttggtctttgaaatttttcaaaaaaaagaaatttcttatgaaatttggcaccgaaatcctgaaatggtgaaaaatccccagtttgcttttttttggggaaa

SEQ ID NO: 19147 - DNA, 1953 bp, Heterodera glycines
tttgaagaaaaattggaccccccccccctcgctgcccccctttgcgagcgagggggagggggtcgacctccctaaaaaatgtatcatacattaaaaaaggagggggggggggtcggtaaaaatttttgcgaaggggggtcggccgccgatgacctttttttttgcttttcaaaaaccggtttttttttggcttgaaaattcgaaaaaatggtaaatttcgcagattctcaggtattttttagggttgcttagaattttttttgtttcaaaaatttaaagagatatatccgctccgatttcagatatgcataaaatctttttaaatgcgaacttaaggcaattcgaacacaaactgccaaaaagagcagttccaaaatgcgggccatttcgtttgaagatttcattcaaattcctacgcattgtcaaatggtcgacgcgaatttcatagagcggaagcgcatcagtgagaaggttccgtgtcgcggtggatgccttccgttccttcgtccactaattaattttttttcagatggtcgaccattgcgtggcattacctcggcgaaggatttgtcgtccctcgcccattcattgcgatggcaatgccaattgttcttcagcgtgtctgaatggtgtcgaatttgtgccgctatcgccaaaatgtggcaaaattttctcgccttttttggctccaatgcttttcggatggaatcgaatggtcgttttttagtgttcatttttaaatttctttcaattttgaagttgattaaaatacgtacggaaaacggcagcaaaaagatgggaattcgaagcaaaagagtacagtacggcactccctgtggcattcgattgaatgcaattgaacaagtggccgaatatttgcgcagaactaaatttcagcaggccaaactcagcattgacatggtaaggatcagaaagacttaaaatttcaaaaatcttttcacaaattaagttctcttttgacccccaaatccgacccgaaatcgttgcaaaaccattcgatgaaaaaagcattcaaacggaagatttcaccaaagtttttctcatttgttttatttttttaatgtttttactgacagggcgaagaatctgtgccaatttcacttgtcaatgccatcgatgtctcgaaaatcgaccccaatgttcgttagttctgggggggggcaattgccttttgcccgatctctgaaagaaaaaaatgaaattattcatgacaattttcacaataattttacttataaaatttaacccatcaaaattttctggtactgtctttgtttttgtttatctgctcatttatgtaaaaaaattgaaatgttgcaaattcctcagtttgtgtatcggccacggagaacagggataaagcgaatgcaaaacgacgagggcgccgaacaaagcatcgacccgtgcttctgttcgggctgttcctgcaccgacgactgtgcggacagcaaaacatgcgaatgccgtcgtttgaccgcagtggcacacgaacgactgagcaaatcactgcaaattcacaaagcatgcgtgaagggatacaatttcaggcggttggacgacaaaattatcagtggaatttacgaggtgggcaatttgctagggaattggggggacggcggcaaatgggcaatcatttgcattattaaaggggcaaatgggcaatcatttgcattattaaaggggcaaatgggcaatcatttgcattattaaaggggcaaatgggcaatcatttgcattattaccgttcgtttcttccctttagtgcaattcgctggtgagccgcccttctctttccccttttgtgattttcgttttcaattagtgcaaatgttccaaatcgacctgttacaatcgcgtcgtgcagcaggacatcaaaatccctctgcaggtggcgccgtttgtccaaatggacgtcccttttgtttagctttt

SEQ ID NO: 19148 - DNA, 1000 bp, Heterodera glycines
cagaaaaaagtgtcaaaaacggaaaggcaagtgaaaatggaaagggggcattatgtagatgaaaaaatataaatgctaacccaattttgaaaaacataaaaaaatattttggctttttagtgccaccaatgaaattggacgaattctgtgaatatttcggggaggatttcacatatttaattgacgcaggtgttttaatttgtgttgcattgcccaattaatcatttctcatttagcaaaaatgggaaacatcggacgctttctcaaccgtatgctttttccttttatcatcactaaccttaaaatttgcaaagttcagactcttgcgatccgaattgtcatgtccaacattgtctcgtcgacactcatgaccttcggatgccgtggtgtgcgtttttcaccaaaaagttagtcaaggccggggaggagctctgctgggattacgcgtacgaaattggttccgtggagaggcaagtgaactgcaaatgcggcacgacggtgtgccggggccgacttctctgaggaaaagtgatggcaattgatagatattaattacactttgtcagcaattacctcactttgtttgtttgttatttgatggaatgggaatgaacagtcatttcgcttgctttgttttcacctttttggctaacttttcgtctgtccgtgggaaattgtcttcctttggcttgtccccgccattccccgcacaaattaataaattacctttcctttagcggagtgagtgtcccttcgggtggacatttgcccggggaacggcactgacaaattgccattggaccaatgcgtcgggtgtttggacttggaatagattaattgcagcttacaatgccgcagagggcaaaaggtgggggagggggcaccgccaatgttttgtgcttgggattccccgagaaatgtcccccccccccctccgtttgttcttccgtctcacattctatgctcccgggaccagcctcattaactgtaaaagcacatc

SEQ ID NO: 19149 - DNA, 1137 bp, Heterodera glycines
  unsure (1)..(1137): unsure at all n locations
aaaactaagaatttcgaaattttttaaaatataagcgttgaaatattttcagtttaagttagtcctgtaccggggaatatgcctgtaaaatctggtgcaattttattaattatagaaaaagctaattttataaaattttttaaaatataagcctaaaaatgggcatatttaaaaaatttttattacgtaatttgatcatttttttccaataccccgaggcaaattttatttaaagaactttaaaataagattcatttaaatttaaaaaaaattaaaaatttctgaaaaaattcaatcatcaagccgtttcttcagtgatcactaatcagttttagggcaatgttccttgatgtatttgttgattgcctgcatctccaattgctcgtcacagaacgggtgcaccttggccacattccattgattgatcagtgcttccaattgtgtcacactttgatcaataaagttcttgatcacttcccacacttgtgggccatttgtcatgctttttatgactgctttgttgcttggatcaacatggagataaatggccgcaaatttgtaaattttcaaataaattttggcattttgtattgccattggccatttttgtccttgccgctcgtcgtggtctgcttgaattacagcaatgaatatgttaagcaaattgtttgttgcgccaattctaaatttattttttgtcgaaaaatttaaaaaatttatttacttcatttctagagttagacctggaaccagtcctggatttttcaggatccaggtccaggtccatgcttttttccgcaatcagggcttcctaggtttttgtccacagaaaatccaggcccaggctttttcaaaatgtcgagctcaattaatttgtaatagtttatttatgcaaattgaattttttagaggattaattaattaaattccgtcactttctgtgcactttttaaatcataaatttgttttacttaaggctagccaatcatattctctattaatccataatatttcaatgaactcattgtgatgaaaagagaataattaattggttaactatgaaatatatgaacgagcggngaagcctttgagggaaaactatggggcgggccggctttgaaccggcgtctctggctt

SEQ ID NO: 19150 - DNA, 1306 bp, Heterodera glycines
  unsure (1)..(1306): unsure at all n locations
tccatttacgaactgccattgaaaactgaacaagtgccctcaaatcaatcagactgccaccggnaccaatttcctttcctttttttatttcttcccaattaattggaattaaaacattttataaaaaagtccaaattattgttttttagtgtacctttgtgttatctgtttgttgagcactgctgaaatgggagtataatgttcttttaaattgatcgccagtgatgcttagccaacacaacaatgtttgattttcacattttttatttctgtcgttcttaaaaaaagaggaaattaattttaggacaaaattaaaaaaattattatttaaaaatcagtgaggattaaaaatggacttttctcggaatcccaactttatttttttttaaaacatcccaaatccaaatgaaatacgctttatttatatgatataaattataaggttgctccacgccgaccttcggcggggtgagaaaagtcggggttcggggagaaattacccagaaaactcggaatgtgacctaagacattcgaaattccgcgaatcgggtcgggaacaaccctaatacattatacctatgtattttcgttcaagtttcattgaaaaaaattgaaatttcagcgtacttggaaaaaggtgccataattttcgttcttaaaaaaaaatgttttccgtgttcttaagaaaaagaaaggaccaaaaaattaacaagtgaaaggaatttttaaattaattcatccgttcattaattaaaatgccaatttcctaattacattttcatttattccgttgaacggcgcttccaacattccaaccaattttcgatacaatcgaaaatagaaaaataaaacaattgcccgtttttcatcagaattctcaatttgtttgtatttcaattttttgttgtgctcggattcatcatcactaaacaatgatttttttaattttttgatcgagaaaataaaaaagaaaattatttaactttaattttaagattttaatttaattaaaaaatttttctgctaattttcaaaattctaatttcaatttcttttttcattgtttttcttttaaaaaaaataattttgtgtatataaaaactttaaagattactggaccttaaatccgaatttttaaatggcacttttagaaaatttaaaaaatgcaattaaatgtttttcgaaagcaaagtatatattttttaatttactggtcggaaattaacatggtttacttaatttaatttttaattcttcaaaattaattaaatattgaatttgaaaaaaaacatttatttttgcttat

SEQ ID NO: 19151 - DNA, 2416 bp, Heterodera glycines
agaacgataaaaatataatttatatattttacattttaaaatattaattttaattaatattatatttaagactgacgtattataataaaagaatatgaaaatatttgccaacattaaattatacatttaaaacgattgataaatgaaaattttatctaaaacatatatcctatctttaataaaaaatattttaccaatttctttataaatggatacaaaagcttaagtcgacaccaatatcacccagtttttctagtaaatctcctcttgtctttattgcgtttcttagatattgatcaaccaagttttttgcggtttcatttgatatgaattcttcgaagtcgatgcaatttaaaaatttgaagcatgaacataataatatagttaataaaatatttgtatccatttataaagaaattgctaaaatattttttattaaagataggatatatgttttagataaaattttcatttatcaatcgttttaaatgtataatttaatgttggcaaatattttcgtattcttttattataatacgtcagtcttaaatataatattaattaaaattaatattttaaaatgtaaaatatataaattatatttttatcgttctggcagttttagcaaacgcgctggcaccgaaatgaagcataaaatgaaataatgacgcattgctaattcaccctaagaattgaactgagaattttcaaaaatatacacctaagaagaaattttgtgcctatttcatgtttttttttttgcacaaaaatagtttctagtaaattgaaataattaacactgacaaataaaagaagcttgtataaaagatttttatgaaatcaaactcaatatcgagtttaatttaattgtttcgaactttcgatttgttcatttctcgcctcaattacttaaaactgaaaaaagcgattaattattttaattgaattttaacaatttttgaatggctttcaaaaaatcgccatatttttgtcatattttatggtacgtgccatttttctcaccattagaaaaagatcggcacactgcacaaaaaacttttaaatattaaaaaaagggtagaaaaaaccagaaaaatctaaaaacactttataatttttctttaatggtaaaagatagcccattacatggacacttcagagttcaggtcggaaagtcatccccagaagctccaataatgtggaattttttatttatttaaatgccacccttaataattaactaattagaattaattacacacatttgatagggattttttatgaaaagaaaagaaataaaatcaatcaacaaaattaaacaatgatcataaaatatttcttcctctagagaatagtcaaatcaaaatttgaagtttggctcaaagtttgcccattcacaatttaaattacataggaattaaatttcatccttttaataaaaaagcaaaaaaaagtatttcttacagaaaattcgatttgggacttattttttcatttatgacaatatttaaataaaaaaattttcactctccccgtctcctttccttctctccctctcctctcattttgaattttttgaaaaatgcttaattcgaaatttctaagttcccttagcgatccggtgacgtgataccctaatacaaacaaagcatcgggaaatatttttggctttttataattattttataaatattgggaactttatttatttaaattgcaaaaatgaacctgtaaagtttatttagaaataaaagcattctgtgaataaataaaatgggaaaaacagaaaattaatttattagagatcgactaaattaaatttatcaaaattaaaaattatttatttcgtgaaaaatttaaaaataaaatgatctctaataattgcacaaatttatatcttaaagaaagaaatgctcaattaagtgggatgtcatcaataagacactgatgaaagatctgcatgggaaatcaattggtcattaagtttaattgttattaattagctaattcggttagtaatgggaatcgcttcagggcaaattctttaaattgctttagtcattaagcttgtacaatataagtaaagatagaaaaatgtatcaatttctacaaacatcataaggtatagtcatttcatttgagagatttcgtgggagccatcggagaaaaatttaaaaatttcaataaagagcaaaatgggcagaggcaaatgcatgggattggcactcattgtacggcacggtattttaagtgtaggccaaactcagcgtgaaccatcgctccaactcgcggatgcctttgcgatttgttgccgctgccagcaaaaggttgccaagcggaacgatggtggacgcgatttggaagttgtccttcagcacccgcgtttccacaatgccaaacccgcaacgtccagccg

SEQ ID NO: 19152 - DNA, 1443 bp, Heterodera glycines
ttgaataaaattttgtcattttacacccccctaaatttcaatgtttttagattttcaatttacaaaactattttaactgacaatcgctgacgtcttctatctcccgaacaactcgaaatgccacttatttgcagcatgaatctcaatattgatttggctaattttgttgctttttgaataaaatttttgtcatttcagttttacgccccctaagaaattaattctgcgtttttatatgtttacaaaaattttgaaaattttcgtggcttgggcatttttatgtgtcagcggatattatgatagataaatgattttttcttgcctttgaatatatttcttcactttgtcataaatcgattcaaaggcatggcatttttattttgcttcatcttttttcacattcgtcaaaaaagaaaattgaaatattgcttatttcttaatgtagtcagccgattttttaatttatgcgaaaaaatcaatttgaatcgttattcctacaaaaaattcttataatcatgccttaaatggttttgtaattctgaatatttttttttgatttagaatttacgtaattcggtatttaatttaattcttttttgaattttaaaaattaaattggctttttttagtttgaagaatcggctgaccattaaatccaaattcactcattccatctgtaaaatcgctcctattttaataatattgtttatttcataacgtagccaattttttaatttaattttttcaatttctgcgaaaaagtcaatttcaattcgttattccaaccaaaaatcctctatccatttgccttagataatgagtaggggttgagctttagcgattgaattaaattggcgaatttttttaacttctgttcgtgtggcgccattatttacatcaggctttttgtcaatgtttagtcgcattattttaattattttgaaattttcgaaataaaccagatagaagatgatcatttattattatttatttcttttatttgctttcttttatgaaataaaagcaccacaaaatgctgagaaatttgggaaaaattggcacaaaggcaaaaaagaaaagtgccgaaaccaatttgggacaatcactgaacaaaacacccgcaacaacactcaaaatggcaaaaattatgatgaaattggacaaactgtagtaaaatcggagccccattttgatgagagtgatgttaaatttggcgcaattaatcaaatattaaaaatgaaaaccgaacccattgaaaattatgatgagaaaacaattggacacggagcagctaaagctgagaattttgtgctaaaacaggagccatatgaagtgaaaattggagaaataatagaggagcggtgccaaattaatggtgccgaatttgatggtcaacaaagtgccgagtggcctatcaaaaggggccaatcaaatgttgggaaa

SEQ ID NO: 19153 - DNA, 969 bp, Heterodera glycines
aattaaattaaatatcgaaatttaaaaaaaatttagaaatgaaaaaacaagacagattgaagaaatgggaagtcattgttaacgaatttatggaggaaaagggaaaatatttgcgtaaaaaagaacctaaaggcaaaaagaatatccatcatcgagaaattgatgagcaaatcgccaaaaaatggggcactaatagcagaacaatttacagatggaaaaaaaaattgggacaaactcgtgagttttattttatttataaatttataaaaacaaccaaaaaatgccaattaaatgacagtcaaaaaatgatcattaccgataattagggttacaatttttcagctgaaaattttggactaaatgtgtaagtaaattttctaaaaatggttgttgctaaaaagtcctcattaaaagaaataattatttatttgatgatatgagggccttgatttttctgttttattttttttcattaccaacaggggtctatgaaaatttgtaaaaaatggtggcgtcataatccgacccattaaaatacagaagaaagcacaatttgatgaatgataccgataattatagataagatttccatcttatcctatttttaatttgatttatttataaaattatataaaaggcgtgaattaataaaattttctttgatttttagaaagttataattcattttccgaacaagaaaaacgtaaattgatcaaaaaatatgacacggcaaaagcaaacaatgaaattttaaaggcaaaatttgactataacattctccgttacattcgtaaatggaaaaaaggtaacgctttggaaataaatatgttaaattttttttacatataaatgaataattgaagtgaaaattgaagcaaagtcaaaacaaaaaaaaacgaacaaagctaaagccttgttgatttaaacgctaaaatagaaaaaatccaggattttttttgtcattcaaaa

SEQ ID NO: 19154 - DNA, 2618 bp, Heterodera glycines
tcattatctaatattgaaaatatattgtcactttttttgtattaaaaattcccgtcacctttacttttttcgttcacttaagatgcgtgaaattgatccgctcgttgtctgtgttgcttttgcgatttctgccaatgagctgtttgggtttgcttgtttgaacttctgcaccattttgcgtcgctcctctgaaatcgatcgtggacgtccacgtggcctccccaaagctgaaggaaacatttaaatttttcaagaagcatccaaaattaaacattcttagtattcgatagccctaagaatcttttattatcctgcaaaatttcaaaaaaatttattgtgtccaaaaaatttatggccagaaaatttcaaaaagttggttttctaaacatttttggccataaattttttgaaacccaacaaaattttttgaaattttgcagactaatagaggattcttaggacttcgagtgttaactaagatatttaaattggatgcttcttgaaaaagttatggtgcactaaagctgcaaaaaaaaattatggtcgtattttttttatggtcgtgtgaactgcaatagagccggggggaattcccccaatattttaaacaccggaaaagggaaaaaaatttttgaccgaagagcaaaaaaaaatggtccaccccccgaaaattttctcttgctacgggattgtataatttattttattttcagattatttatttggatttaccgatttccatctcatcttcctcagaatgcaaagattgcaatgtttcgttgacatttcccgatctggaagattgaaaaaaatttaaatattcaaaaattgtcttacggaagaaatttcaagaaagcatttttttctcgtttttttcgtcaacatagctagtagtgtatgaaaatcattataaaaaccaaatgtgcccaaagtcataccccttgcaattttcacattttcaaatcattaaataaatatttaatttactcattttccagtctgtttgcttccagtggttcatcatctcttaagagttccatgaactaaaacaattttaaatatatttatatatttttttaatcaatattttgcctgatttcttttaaggtctaaagcattgaaggcaagttcaagtagtcttggtctgaaaatgacaacacttcaattagcgatttatctaattatataacaggtatggcatccagatgccccaaaaattttcggaatcgaaatacccaggaccaataattttataaaatcgggattccgccgaccccaaaaatgtcgtaatttcgaaaattgagtggctatattaattattttacactaaattaatcattatgacttggcaaaaaaaaaattccaaaaatttcagaaatcggtattctgtcacccaagatttttcgaaaatcggaatttccccaaagatgttgaagtgaaattccataacttacttgttgtcaggaccaaattgacatgaatccaaaagaactttaagagattcgtagctggatgctccagcggccaaacgaaaacagtcatatccttcattgtttgtcatatatgggtctgctcccacttccaaaagaaatctgaatcgattcaaattttgatccagtggtgaaaacgccaatagtggtcaaaaaatcggaaaattatgagagaaatgaccagggcctgaaaatcccaaacatgtacataatacatattcgcccgatgccagttcagtcggagtgagagttttggtcgggcccctatcagttggaatcagggcttccaccgaaattttttcaaaaacagaacatagggtccaaaaaatcagattttggggtcgaaaatcagaacatttcgcgaaattgcttcaaaaaagttaattttacaatttatttgatcaaaaatgtatcaaatatcatatttttcttcaaaaaatcggattttaagcattttttgcggcgcttttttccgaaaacttttggggaatgggacatgcagagggtcaggcggtgccgataggcgccgccggggaaaattgttttaattttagggcaaatggacaaatttttaaaaacaaaacattatgccataaaatttaaaaattatgagtgtgtttgagaaatcagaacaaaatttgttcactaacccaaaatcagaacatttctgacaaatcagaatatttttttatcagatttggaccgtccaaatcagaacatttctgttaaatcagaacaaatggaagccctggttggaataaaggcacgaaaaatttgaaaaaaaggcatgaaaaggcatgaaaacccggaaaaaggcatgaaaaaaggcattttaaattttttattaaggatttttagggagcaaaacaaataaaacttaaccaaataacttaatttggttatttaaagattaataaatattttataatgttttttaaaacctaattttttaacaaaaaaaataataaaattttggcgatcaatttttgggaaaaatttttaattcttgggatttttctaaaatttttcaattctggggtgtattttctgaaaataacgattttgcaaaatctgagcctcagttcattcacatttaattattttttacactagaaaaacggataaaat

SEQ ID NO: 19155 - DNA, 2462 bp, Heterodera glycines
  unsure (1)..(2462): unsure at all n locations
cctttgtgcctttctcattccncccccccctcctttttgtcacccccccccttttttttgcccttcctcctcttcaacccctccnccttatctcctcccaatggtccccctttcgttttttcctcctaacttttcccaatatttctcctcccccccccccgtttcttccagcactttcctccaaaagcccatctgttcccgtctgatgctcccttccgtcccctaccgttcttcccaacaatctctccacgtgcttttctccgccgatggcaactttccggacgtaattcgcactcggtccgttttccgtttcactttgcttccgtcttttgacttctctcattcggctgttcagtttgttctgtctgaatcgcaagtgcggctttcggattcgtttgtggtcctccaaattcgcctgcggtggcgtcgtggacgatgactcgggccaactttcccttccgggctttcccgataagttggtgcccaatctgttttgccgttgggactttcgtgccgggattggcagccgctacattctcgaattggagtttcccaccgggggcataaaggttaggcctggcgtggcagggggaagaaggggagggtgattggccacggggggagcgggagggtgattggctgtccgtcattgtccgtcccttggtttagccgtccctttcgccgctttccgacattctctggcgctcctcctgctacagtaatctcgaggtgccactttccactcccatcccctcacttctgatttctcttttccattttccgattgccaacggcgttttgcccgcgggtatcggttctttggccgattcgagaatattactccgcaaaaacgaactgtttgtcccaattcaactgtctttgtgtccagcacagatttgttctcacttttttatgatgggaaaatggtcagagaaatggccatggcaagtggcatttccatttcggacagaatgggatggctatttgatgtgccttttttgatcaaatacacaaaggtcttggtgaattgaaggggtcgacatcgccattttttaattggcatttcaggtgccaaaggacttcgacaactcatcttggtaacgggtgtttagttttgttggcacttttttaccattcacccaaagtatggtcgaacttaccgaatcgggcactgtttacgttgaaaaggcatcggctttttcccaaaaggcattttcgcattcgttttgccacttgcaaattcggaagcctacttcggaagtcactgcgcagttggaactgcatgacttccgcttccaaaattacattggcattctgcgcaactcaaagcgctgtgaagaaatcgacagtcgcttggtgatcaccggtactgaaaaatcccccccccccgcctcaaattgcgccgtttctccgtcagacgaaaactccgacccgactccgctgagcacagtgatctgtcgcaacaatctccgaggtgccaaccgaacctcactgacttttctgaacaaccagttggagctgtacgtttacaaccgctctttctacccgctcagcttcaatttgtcgctcactttccatggtttttcattttgccattttcatttgtcaaactctcttttttcacagaatgcggcggactgatcgacgcgaccgatcgcggaatgtctggcgaagtgagcagtcccaacttcggagtgtccaattattctgacaacagcgaatgtttgtggctgttgcgggcgcccgagggacgcgttgtttcggtgagagagggggagaaagaatgatcggtgggaatgagcaaacgcacagatcgaaatcaccttcatggacttggagagcaacttggagtgcaaccacgatgttctggaggtttcttccggttggtctttaattccctccccttttgccccgctaattcagtcgccttttctgtccctttttcttcttccaattcctccccctttttctgcttttccctcctccaattttgtcccctccgtctctttctccgcaggtgaaagccgttccgcggtgatccatcgttactgtgtccaggaggacgaaaagctcgcggaccgtttccgtcgcatccgcagcgtcggccgttcgctgactctttacttctccaccgattcgtccgtcacccgcaagggtttctccctccaattcgccttcgtctcgcccgaattatccaccgaatgcggatttaatgccaattcactcaacggcaccattcaatcgcccgcctttcccgccgattatccgccaaattcacaatgcgtttgggacgtccaagtgccgatgggctttcatttgctgctcactttcgaatactttgacattgcccaatccgtggactgttctcgcgattttctaagggtactttttccccatttttcttgggttttccctttttttcctcccccccccccccccccctccaaaaaaaaggttttctg

SEQ ID NO: 19156 - DNA, 1025 bp, Heterodera glycines
aaggaaggaaaagcatgaagaggaggaagcgaaagtgcttagagcgaggaacgagaaaaagcttagaaagaagcaaaacaagaactaaacattttattcgacattataaataacccaataaaaaaaaattcgatgaatataaacaaaattaaaaatacgataaattaaaaaattaaaacttacaaattataagtccaaaacgacacttaagagaaagtgaggagatagaagaggcgattagagaaaaaaacacaatctttgcaaaatgacataaaataaaattagaaaaattataataaaattccctccagcaaatttccaatttaaaggtcattttcacttggcaattattccacataaatcctcggtcccccacaacgtcttctcagtttaagctcttcagcaaatggatttgggggcagctgagggtaaatgcgtgccgttgccgccgtttgtgccggcactgagccgacggaatggcgatttattgccgaagagcgctagatttgggaagtcaatgtacggtagagaaaggcaaattaccgtaacactgtccaaaagttcgagtggcggagcagagggactgtaggggggaggaggggtgccaaaggaatgagtgatcggcgcattggccgtgcgattggacacaaaacggtcgatgagccgagcgccggcagctgaggacggatcacttcggcggtgtctttggcgccgctcgaccgaagagggcgcgttatatgccaattgcaactgaatctaccgcgttttccaggcactttccaatttcacactcttttgtgttcttctcctctcccttcctcccatctctcactctctctctatcgctgtttctcttttttctctccttccctttttctctgtctccctctctctcccatctctccctccccaattatttttaatattttatcaatgtttttctctttctctgatcactcgcctcgcccgtctccaatgatcgccttagctcgatcactttttgtttcgtctgtgatactcccccg

SEQ ID NO: 19157 - DNA, 922 bp, Heterodera glycines
aaacactttcattgtgaaatgatatatcaaatgttgttgttttttcgtacttattttaaattttattttattatattttccatttttcccttcattttatacactttcatttgacatagttttcataatacttcctcatattcatgctggttaattttctaatattttcatctgtttgcttatttccttggcacttccgccggaaaaaaaatacgtgggcccaatgtaatggcaaaaaattaaatattcaaatggaaatatgccaaaaaaaattattatggcggaagccactataaaaaatcattattaatttacagggatgatgaagaaaagggtcaaaatgacgcaatcattcaaaaaacaattcttctattggaggtggatttggttattttctttttatttgtaattaaaattattattttttaatatttttgaaaagtttttctcttggaggtttttattaaaacagatgtccctcaccgtccccccccccccccgccttttctcttctgctgctgcttgtggtcctcccattcggttggactttgtttggtcattgctaattttggcttctcaaatgcaaatggtccgtcgccctttcgtttcgttcgtccgtttctttcgctgctgcggtcactcattcatttcccgaaaatcgatgcgttgaaaaagggtcatttggagggtgaaaatcgaatgaatggctttgcagcaaagaaaggacgaaaatggaagggaaaaggcaaatgtttaattggtgggggggggtattaaaaggggtgggaaagagccaaagggaacgaaaattgggagggataaatttaattttgttgaaatttaaataaaaataaatcataatttgttcaacaataaaacagaaaaggtaaagtaagctaaatgaaaaggaaatgataaattg

SEQ ID NO: 19158 - DNA, 1905 bp, Heterodera glycines
tttattgttttaggaataaatgaaattgaaaaaattacattttcttattgaaatttgaaattaaatgaataatttaagtgttttttaattgttgaaattataatcatgattgattgaagcagaaataatattgttttaaacactgcagttttaagaatgttttataaaaaattaaatttatttgactcctattttcctttttctcgaagagtgagctatcattcagatcaaacatcttttattttagcaaaaaaaaatcaacccgaaacattttttctatttatccttttcgttcttaaaaccatgaaataaatggtagataggaaggtggagattaagtatttgagaaaatatctaaatcgtaactaaataaataaataaattttatttggaaattaaagggatcttttttattacctacacaatttttcgcgtgctgggacgtttcgtacaatccgccatttttgcaatttttcgacaaaacatggtataactttgtttaaaatcaaccaggtggcggattttacgaaacgacctaacaccaatttttcttttttcaaaaatttttaaatttgctgtatctctgggaattaaggttattcctatttaaataaacgccaaaaaatattttatttataaatatttttttttattattaagaattagtgttcatattttatgcattaaatttgttttttcaatttttagttaaaaaataattcatttctgctttgcattaattacattttctaatcactatttcatctttttttattatcaaatagaattttaaaaagtattattatttttctttgaattgataaaatggatgtgaaactccttttatgcaagacttttaactataccattttattaaaggattttaattaatctttatttgaaagattatttttattgagttgaaatatttctcttaaatttttcagacattttattaaatttcattatatatttttatgaaattaaaaaattaatatctttaaactcagcagcaaaaagctggtttggattttaaatttggtaattttgggataacttataaataattttctgtcaacaattttcatttaatagtttattttgtaataaattttttgttatttatttaaaatattcttggcgacgacacattgtaatgattttactattgactataaacttttcgatccgccagcaggttgactcttcgtaagctttactaatttgtttgatgttcctagataaaaatttgaaatgagtgcttcatattttaattcctgatcatattatgaatttacgatcgaattattgctaacttctttactttttttatttatatttttaaacatgagtttcaacttatgccacaaccaaatgatcatcatccacaacaacaacaagcacaacaaaatttagaacaacaacattttcaacaaccaataacctactgcaacaacaacaaattttgtaccagccgcagggcgaaatacaacagatttacaatgaaattgaggcggtaaattacacaaaaaatcaaaataattatgaatggtgattaattgatatcataggatgtaatgctagtccaatcaacgtctgctggtgctacggctgccaccaatcatgccactcgaggaggaccaaatgtaaaataaaatgaattaagaaaaaatataaaaatataataaaaaaaaaatattgcggcggcgccgtgcgactcctgcggggcgaggccgtgggggcggacggcaaaatttagtgaattgatgagaaaattaaaataaataagtgcgatttttagtgatttaactttttttgtacaattgtttgaagaaaggagctcaaaaaaaatctgttgaaataggaagattctgattccactaaaatcaagaatttgtcatccct

SEQ ID NO: 19159 - DNA, 1370 bp, Heterodera glycines
attgtccaactgtcgcattgtccaactgtcgcattgtccaactgtcggattgtccaactgtcggattgtccaactgtcggattgtccaactgtcggattgtccaactgtcggattgtccaactgtcgcattgtccaactgtcggattgtccaactgtcgcattgtccaactgtcgcattgtccaactgtcgcattgtccaactgtcgcattgtccaactgtcgcattgtccaactgtcgcattgtccaactgtcgcattgtccaactgtcgcattgtccaactgtcgcattgtccaacttaaacttaaattaaaacattctatttcaatttgttaatttatatcctcctgttttgaatctttttttatagctttataaaaattcaattaaataattattacggtagtttttctgaatattttggaataaaaaaattaattaattgagttgaattatcaaaaaagagaaaaaattagtttttcaaaatataaaatttacaaaaatacaaccaaaaaattatgacgctttgttttgagcatttatgatagatgaaatgtaatttgtacaaattaatttttattgcttttttcaataaaaaataatcgtctctatcattaagtttgtctcatttttttctttccgtgtgttcgcttttgtacccaaatggcccctcattaacaaattgataccatcattccttccctatttcctgtttaaattcgatgtttttgagggcattaaaatttatttccaattctttggctaacttttttatgacgtaaaacattggcgtcaaatgtacaaattaatggttttttcttctaacaaaatctgcttcttctctctcccattattaaagtgtctgtcacacttttttttccgtgtgttctcttttgtacccaaatggcccctcattaataataaattaatgccatttccaatttcgtgacttttgagcgcattaaacaatgctttccacaataatattttctaatttctgtcactttttggaatatttagccttaaaaaaggctgaaaaaatattcttatgcttgtaataattagatatgtttgtgtgtaaatttatgattctttttttattcatcaaagcaaattttggctaaattatattttataacttaccaaaaactcagacgcctctcggaattgtcgggacacccattaagtcaataaatgttgaaatatcattaagtcaattcccaatctgagaaattgagaggattcaaatttcaaagcgattaatcatgcttagacgacatattttacacagaaagcactgaaattttataattttgaacgtttaaaattatttttttatatgctacatgctgccccaatatgattttttt

SEQ ID NO: 19160 - DNA, 951 bp, Heterodera glycines
agttttgtcctacaattatgatgtgttttgtgcgaatgttgttcagcccgatcgtgctgtatggctttaatgtgcccgttgtggccaggcctttgattacggtagtggcacaattccaatcctacagtttggtcagtatgcgtttgcatatggtagcaatggctgcaaaccgtgcccatgctgtgctattcccatttcattatgcacaaaaagtcacaaaaaagtgggtgataattattaattattaattttttaaattgataaataatagttgattattatggcttataattatatggaaatcgatatcttttttcccggactgttgaaggcctgaaacgcaggaaaaacatcacatgtttttagcttagtttgaagcctctaggacggatttctatatccatatttttccatatttcgcgtagcgcagggtcgacttatattgtttttaatattatgcccccatagtaagaaatcaaaaagttatgaggcctcaaaaacgaaattttggctgtagtttcacttaaagttgatggctcagttggttaaattcgcatttttatagctcgggttcaaatccaacataaaataatttatgtataaaaaatcatttttttaaattaaaaaatgtatgatagtttttctttaataaatttaatcaaaaccaataataaatgtaaaggttgtgaattattagaaggtgaacaaagctgtaaattggtcgctaggcccacaatttcgtttttgaggcctcataacttttttttttggaaaatctttcataatctgtcacgtaaaattgcgtgacaaagacataaataaaatttgagtttttatgatttattttaaattaaggactgtatttattcaatgtatgctcattcatttgttggccattatttcagttccattttataatggtaaattcattttcaaattttaaacaatttt

SEQ ID NO: 19161 - DNA, 1027 bp, Heterodera glycines
aacggacactgaaaaaatcgattttttgttttggggcagtccccccgaaccgatgcgcccagattatggggagaccgatcctcggggaatagcttccctatagcctgtactttaattctgcgttggatttttgctccccataattgtttgagtaccccaaacggacacttgaaaaaatcgatttttttgttttcggggcagtccccctgaaccgatgcgcccagatttatggggagaccgaatccttcgggaatagcttccctatagcctgtactttaattctgcgttggatttttgctccccataattgtttgagtaccccaaacggacacttgaaaaaatcgatttttttgttttcggggcagtccccccgaaccgatgcgcccagatttatggggagaccgaatccttcgggaatagcttccctatagcctgtactttaattctgcgttggatttttgctccccataattgtttgagtaccccaaacggacacttgaaaaaatcgatttttttgttttcggggcagtccccccgaaccgatgcgcccagatttatggggagaccgaatccttcgggaatagcttccctatagcctgtactttaattctgcgttggatttttgctccccataattgtttgagtaccccaaacggacacttgaaaaaatcgatttttttgttttcggggcagtccccccgaaccgatgcgcccagatttatggggagaccgaatccttcgggaatagcttccctatagcctgtactttaattctgcgttggatttttgctccccataattgtttgagtaccccaaacggacacttgaaaaaatcgatttttttgtttcataaatatttttttcagaaagtgctctaaagtgcaccaaaattttatttacaacttaattttagcactctgatgctttagtatcaaaaaagaagatggagaaaaaatttttccttataattggttatatcgttttgcttttggtggggtgcttggaacaaatcgatttttttggtttt

SEQ ID NO: 19162 - DNA, 1069 bp, Heterodera glycines
ttatgaaaattatttatatttattaacaggatttcctctatattgacaatagtgaaaagggtgaaaaaaatgctaaaactgtaggagtgccaaggaggatgaaagtgaaataggaaaagaaaacctagcaaaagagagccaacggtgaagataaagaaaaagagacctaagagacaggaaaatatggtttataatccccagactcaaaactgaaaaattataatatcaatcgcctcctctcggtctccaaagcaagaatcagaaaaatttgacggcaagcaatcacaaagagttacattgagtcgggctggaaatagacacttcagtcccgagcagggctgggcgcaaccggattttcaattacggaaatccgcaaccgcaattacggcgattttctcagttactgaaatccgcaatccgcaattacgggggtccaaaaacccgtaatttcccgtaattcgaaatccgtaattttcaaaaatcaatttttgtagaatttttgaaaaaaaattttttaattgaattattaaaaatcaaaaaacagatttttgggatgcattttttaaatttaccaaagaatgtccgaaaaattcatttttttgaatttttagggtccattttggaaaaattttgaaagtctgagcattataattagatttatgtatatagttaattaaaccttgataaaatagccagaaaaaaaatttcggggggggggggaacccgaagactttttggccaaaatctttttagtgttattttaaaaatttcagcgccggagagcaaaaacaggaattgtagccgtttttagccaaaaaaggactaatttttgccatttaggagtcaaaatttaaacaaaaaaatagggtaaaacgagtgaatcaggatccgggggtgccgataggtgcctccgggaaaatttatctgaaattttaattattttattaagaaaaatagattaaaaaattttaaactgccaatttttcctggaaaaatttttaatttttcatttcgggtggagggaatccctccccctcccctgagtaagtttttatgaattttcataaaa

SEQ ID NO: 19163 - DNA, 1627 bp, Heterodera glycines
  unsure (1)..(1627): unsure at all n locations
gccctggtcccgagtgggtactcgtagggcaatgttttccgctaattttcagattctcgctttagagacgagagggagtcgattgatagtcccattttaattgttggtattataaaccatattacncaagagacataatgacaaacatatatcacatcatatcatataattctgtaggtatccaaaataattattagtttggttactctccctcagaacaaattcagcgagtcgtaaacgcctccgaagctaattccgccctccgctgacgacgccggtttagtgcggacgaggtagccgtgctgtttgttgcgcacaatgcttctgtcacgtttgtcacccagcaggtagccgaacatacccaactcgacgattgtgtcatccaacacggcctcctccatgggacggaccatgaaattctgcaaagtgtgcgcacattttaatgaaattgcgcagattttcaatagtttgaatccctaatttgtaagtcccaaaataattgatagaaatattgatgctatgatgttaggcaaaaaactattaaaactttttgtttattactttgctaaaaagcaacaaaatttttaattcaagaaattctcaggttgtccttaatgttatttaccatcctacacaatttcaacaaatttcgttaagtttccaaaaaggtttagccctttttatgggttttgagtaaacgttcaaggatcgaatttgttcattaattgattactgctgggtttccccattttattaccttcgctgtcaccggccaaattcgttgcatcagtgtgtgtgctgctcgctcttcgcgcgtgaattgtagcagcttttgtttgagttcatcatcaaaataattgtgtcctccgccttcattttgcggtttcagcacataaagactgggattggcgatagcatgctgaacataatgtaaaaaataagataaaaatttttgaaaaaattgatgttgtttttgtcaattctattttgaaattttttaaaatgttaaaaaattaattaaatatttgtaggtaaaattttcctaatgtagaacataaaaggtaacaagcccggtgggactcgaacccacgacaccagcaatccgtgccgtgctctaaccaactgagctacgggcgcctcttttagaggttctctcaggtcctttatcccactttctcccacactccgttccttctggcatcacactaattttaaatgaaaaatgaacattaatgaaaaaactttctcgaaaattttagattttttttactctgttggttcgtttcttaaaaactagggttagacaggtccgagtattaggcaaaaactgggtccggtattgccgggtctacaaaagccgggtccgggtccaggttttgcaaagtcccggtatcgggtccaaccgggtcctgaattaatatttttcaaaaactaaatgaatttcacgaaagaatttgtaatttttcatttaaaaaaataaaaatattttctttagattcggtagcaaatcaaataagttatttttaaaaaaattcaataaatggcaaaaacactattttttgataaatggttcttcaagtgtcttaatgaaactgctgattggcttaataacaaaagttaaccgtta

SEQ ID NO: 19164 - DNA, 2129 bp, Heterodera glycines
aaaagcgctgaaaaaaaatcaatttcgatttttcatactcagattttcacaacaatgcttactatttcaaataaaaaattgctcaaattgatcatggacagtcaaaaatactgaggctttttgacccaaaatgaggcattattgcttgccgaatgaggcttttgaaaattttcatctgcgagccctggttataacgtaatgaaaataacaaaagttactcatttttttgaaaaattttccgagtcagtgtattttagggtatccgataaattgttccggatttttgtgcgctaaaatttaagaaatcctatcattagtcacaattcagttctttctaaaaaatcgaaactaagttaatattgatgtaaaatgtttatcagcacatatacacttcacacaaacatacatacggaaatatgaaaatgataatgacaattgacaatagattttgaggagcttgtgatatgtagtgggtttacacacaaaatgataaggggaattgtctgatctccagtcgtgttcccagggcgcttctccatccttctgttctgttagtgttcggtgctcatcgtcctcaggccggcgggaagcgggtgatgctgtggctcaggttcggcgcgattgtcagcgttgctcccgtgttgttgcggccagtgtagcgcggcgccgagaaaagggtgatgagccggcggccggcgaaatattccactccgtccatcacgacctggaaaggggaagtgggaatttagtccagaagcaaatgaaaaaaaagaaaaaaactcacttgatgcgcccgaatgatgtagtcgaggcagagcatgtcgcacacccgctccaccacgtcctcgccgaatgcgatgcccgctcctctggtgttcgggatgacgccacgaactccgcgcgcagggtccgcccacaaaagatcgatctccagcgtccgaagcggcgggtcgatttgcggacgattcaggtggctgagctgctccaggctgttgatctggtcggagaggccgccgtgcatacctgaaaaataatgaattagtatgaatggacaacaacaacaaaaaatgtgactcacacaggattttgtcgccgatcaggccgacgtagggcatccaggcgaacgtctgattgaagaggtcgtagaggcggcggggacccggacgctggtagcggcggttgacctcatcgaagaagccataactgaaaatggggggggggaatgattaatcacaaaaaaacacacaaaaaactttttcacttacactctgttgatgttggcgcactcgtggttcccgcgcagcagcatgaagttcgctgggtatttgacctgcaatggttttggggtgtaatttggtctgttaaagattcacaaaaccacaccttgtagcagaagagaagaacaattgtttccagtgactgggggcctcggtcgacgtagtcgcccaggaagacgtactgctgctctggagggttgccgtgcgtgtggaagatcctctgcaggtccgtgaattgtccatggatgtcgcccacgacgacgaccgcggctgaatcctgacgagtggcggttgcattctgaagatgttcgtggccgccatgcagagttggttgagctccaagtcggtgatctgtggaaaaaatgaaattttttaattgttgaaatgtcatgtcaaaaaaatcccacctcatccgtgaagcgttggacaggcgactgcctgaccttcctgatgatcgcgtccacgaagctgcttgacaggccatctccctcccagcgagccgtcgttccagtcggcgcgtgtacaagtgttgaagatgtcgtcgaaggccgagactgctccgccgctgccgttgcatcgaagcagtagtcctctcttgccattgttgcgccgggcacgtcgcttcgtgggattaaagttgcagacgatgagcaatatataataacaataatatgtgggcaatgaattatgtgagcaaacactgcaaatgcgctccttttatatacattatttccgttttcactatgggtcaagtccagtgttagacaaaattattcatttcgccaaatagcgtaattggcataattttttgcgcactaattcaaaatttacactggtaaatgccttttttgt

SEQ ID NO: 19165 - DNA, 2816 bp, Heterodera glycines
tttttggcgcagatagaaaacatcccgttaataaaaatctatttcgcctcccaccaaaaaaaaagtctttagtcctggtaaattgtaaaagtaagaaatatatcagcaatgactttttttccgtatccatactcaccttgtccaaaaaaactaaatttactttttgctattatgatcgaatttctctagaaattctcgcaaaaaattttaaaatatgttgtgacagaatgtattttcagctacatgtgctatgtgtacatgtcctccaaatgctcgtacgatgcacatgctgaccataatgtttattggagtaccatctgaatgtggtcaatatgataaaattttatttagatttggtagatgatcctggaattttgggccggaataatcgttttagaaaaaatttgaaacaattactagaaataattctgcgggaaagaattaaaatcattctcactaatcacagtctggatcgcgggtcattcatatgtggtctatggaccgtagaagaacgggctgacatcggtgatatttgaaggggtgaccagctatccagacacatccggaatgtgccgaccggtccgatctctagtattaccccaccctctacccataaaagccccaagttgaataatagtaccccagggattttattagaaatacagtcattgtaattcgtgcaatttctctgaaaaatcggcggagctgaaattgtcaaaaaaatgtgggccaacaaaattaaacaagctgagggagtcgatcggaaaaactaaatcattgagaactatgcgaattttccgaaatttcagaccatacatacaaaacaacacaaataaaatttatataccaacaatgaatgtgttaaatgaaacatcgctttgaataccgtaaatataatacaataatacgcacatacaatacataaacatatgcatggctaaacacagaatactggatacaatatataatataggtatatacagaatacaacaccatcattcaagcatcttcaatcttcatcatcacgaatcgtttccggcacttccacgccatgttccgccgcgctcggtcgcttctcggtggtgccggtggaccaaaagaaattggacagtttgcgctttgtgcctccttctgacttcggctttttgggaacaggcttcgtcttcggcacctcttccgcttccacgtccaaatctgttgcgcccagccgtttgttcgagttgtagtcgcttggcacggcggaaatcgtcgacactttcagttcgctttgtatcggcgatttgttgtcctcctttccgtgctgctcctcctccttattgtgctggtcaatgtggtggtggtcctcctccttcttgtcgtcagcagaagtgtggtggcgacgtttgcgctttttgttgtcctccttgtcgtcgtcggcagaagtgtggcggcggcggcgtttgcgttttttgcagcagcagcagcacaccacaaccacgagcaggacaatgattgcaatcagtgcgctgaaaaaacaaatggggaaaaatgtgaaattactactgctttttatctgctgtgatgatgatgaaatcccagggtccaaaaatgccagaatttcgtgccattgccgacatcccaaaaacactcattcgtcagggtcgatcccccaacaacccaaaatgccggaatttcgtcccagtgccggcactccaaacactcattcgtcagggtcgatcccccaacgatccaaaaatgccggaatttcgtgccattgtcgacattcaaaaaaacacgccttcgtcatggtcggtccccaatgaatgatggtaaacaaggacaaacgcacccaacgatgatcagcacaagtgtggtctttccgccaacagcatccgctaatgattcgctccaatttttcgtcgccgtcccatttggcgtcgttggcgtcctgctggtggtgatggtcgtcacagtattgctgaaaataaaaattttataaaaatttggcattttgccatcaaaaattgtttacttttccattgattgcgcgtcaaccgagcaaaagcactcactgagcagcagcagaaacgcgacaaaggcaaattcccatttgaatttgatgaaaaatgaacgcgacggcatcatttgttgttgtagttgaagttgaaacaaaaaccaaaatgacgaaagtgaacacagaaacccccttataaggggagagaattttgcgcataaatttttgacgccttttttaagcggccccttttttcgctgagacacgaaatatccaattttttaaatcttaatccggtagatgaatcatataggatttctcggtttcgcagaatacagatcatcctttcccttgaattaagtgttgattgattcgcatgttggtgaatgtgccaagagatgttttaaatgcgttgttcatcagcagcgtcatgcatcagcgtcgctataaaaacgcctatcgcgcgtcatttcccattcatgtgcattgcacttctcacgacgccttgcactgtcacgcaaattgtgatgagtatgtagctgtctgcggtcctcatgcgtggtatttcgactgttgccatgggcaagctttcggatgtgaaagcaggttgccgcgattttttgcttcattgtcggtcaagtatgatcgcattgatcagcagagctcattttaagttcagcacagttccatcgtcttagaagtgcagcacagtttcatcgggtgtgtcgaagtatcctgcaaatgcgaaaaaaggaagtattctcgcctaactatcagttcggtgcaccattgtcatctccgttataattgggtgagtttgtct

SEQ ID NO: 19166 - DNA, 1893 bp, Heterodera glycines
gaagaaggtcattggggaagaggctacaatattatccattaggcgaagaaaaaccacaccaaaacggacggaagagaccgacgacgaattcagcggagggaggggggacactccctcggatggtgccgtggggaaggggcgagagaatgccgacagccattctttattcctttgtttgtttccgctgggattggcacaaattggacagataaacgcaccgtaaggtaataaaggggcgtaagtcgtccttgtgggatgttccataaaagaagggattaatgaaataatgaaagtaggtggggaagtgaaaatggaggaaaagcgcgaaaaaacaacgggggaggaagaaaatgagggaaacgagagaaacggggaggggcggaggggggggggaagagggtaaggaaatcactttggccgtcttttgatgatgctaatcggcccgcgattaaatgaaataaacttttgtttggagaaaatcacatctctgctgctgatgtggatggaataactgctcgggctttcttccgattcgtctctctctcctcgtttctcccttcctctcttctctctctctctcctctctctctctactcctctctctctcctcctctctctctctctcctctctctctctcctcctctctctctctctctctctcctctctctctctcctctctctctcctctctctctctctctctcctctctctctctcctctctctctctctcctcctctctctcctctctctctctctctctcctctctctctctctcctcctctctctcctctctctctctctcctctctctctctctcctctctctctctcctctctctctgtctctctgttcatctttctatcactgttcaccacacacctcctgctcaatgatttccttggccaattcgatcacttccgcttgcaatccgccgatccatcgtcctttcggctgcagcattatgatgtgatcgttcaaatagcacttccaagcgtaagtcatgcacaaatcggtgaagccgacctcacgagtcgaagaattgggcagcaaaacgggcacagtcaaattgtggagaatgaactcaaatttagtagttgaggtggaatatcaaattgtttagttaaacgtggggagggaatgtgatcaagaattgtgatcagaaaagactgactaatggccgtgccgttttgccattccattgattaattgggcaatttgccattttattacattgcccccattagcctttctctctctctctctcactttgttaattctctccaattcgttcaaatagtccctcgacagaatgttcggcctctctcccccttcgtcggaatttcttcgtcccactgcgatcacatcgacgtagccgaagtaatcgtaccttttaagtttggacaattctcgcagtttaaggccgaatttctccgtttgttacgatttgccgggccaaaagtgctgctcgtccaacggccaatgctccgacagcgcggcacgttcgaatttccaacgcgcattctctggagaaaagacgaacaaagggtccctggtttcctcaagaaccgagccaaatcaaagattaaaggaaggaaggcaattggcaatttgaatttggcaaaaaacgccaaaaatgagagagagaagagaccactcacttggtcattaatccaaaggaagccaaaggcgaggaaagcggtggtcagaaaaggtgccaagaaaaggggccatcgaaagcgatggacgagaaaaccccaaagccaaaagagacggacaaagcgacggtcgagcgcaaacgaagcggcggaaggccaaggaaatttggaccaatttgagagtaacgaacggaacgatgccatttggggagtaaaagaggggaaaggaaatga

SEQ ID NO: 19167 - DNA, 1790 bp, Heterodera glycines
gggaggcgtactgtgaattttgacgtagtgttctcctgccccggtgtgttcgaaggtagtacaatgtaaaaatcatccatctgttttcactaattcctggttataaaatatgccttttattaaatttccttccaaatcttcgatcctgtatgaatcgggtgtagttgaattaacaataacgattttaaataattcttcggtaaagtttgggagatacccctttgcaaattttcctttttccttggtaattcgaacgatatcgccaattttaaatttgttctttttcgaaattttaaattccttcgccttatataatttttcccagagcgcccgggcattttcaaaagtaacggatactggcttggcccccaatgtcctattcacactgttgttaatgtttattattattttgtctattacatcgacccatcgtagagtgtctttctttgtaaaatatctgtacaagcgctcctttattgtccgatttgccctttcaacgactccggcgtgaaggtcaggactatacatcacatttttgataataaatttttcctcaaaatattttttcatttttccagcctgaaactcgagtccgctgtcgctatatattttcatcgggataattttcgacttttcgaacacccgatcaaaaacctcaatcatgtcctcactcttctttgacttggccggtgcactgaagatcattcgactcagcacgtcgatgcataccaacagatatttgtaaccgtcgttatgctttttcaactggtcaaatatgcacaaatcgcactgccaatcggtatggaagccgctcggtaccgtctttagtctcgggaattttttcctgatgggcttgtgaatcgtgtatgttctctgcttttctaggaatttattaacgtcatcggtcgtaatttccgggtcaatctttttggcctcatttaaaattttttgaatcccagcaaaacttgccggagattttaaattaaaataaatttttgataaaattttctctacagtcttgcccatattagtggattgaatggtttcttctctcgtgctatgccgtgtgtttttatagattttattgcctttttacttccacgtccccacatgaccttcgatttatcaaccatgtcttttactgttggatccttcagtaaaaaagaccgtttaaaagggtcgggtgtataatagttttggtcggaacgggtgttttgagtgtggatggtgtttggggttccggagttaacgcctcaagggtatcattatctgattcaggatcaggagttcgctctttaagtcttttcctaggaataattattttccgtggttcttcggtctcctgtggtttggattggttattgaggcccagatatggtgcaacatttggaccgggtacatgattctcaatcacgaccttctgtggcctattttcaagtatcccctttaccgtacgtctttctttatagagccaatcatgtctcttcgccttgaggtcctcgcttatgccggggtcttgtaaattctgagaaatttttgcgtctaaactcgctttttcattttggagataatcaccactattcatcgcactcagtagagccaaatattccgcctcgggaatcattaacattttctttgcaaatttcatgatgttattttttctaataaatgttgagctaaaacactcagtaccgggaccaagacagctcccagggctataccactcccctgttgtatcctttttcttgccgttttatctgaacgagatttggcaatttccctataaaaat

SEQ ID NO: 19168 - DNA, 2487 bp, Heterodera glycines
tctagagtcatttgttcgagtcgtttcggacaaatcactgattaaacatttcaatatttattgtgcttattttgattttattgtcagttggatcactttctttgccccccgccccccgcggcgccgcatatttttgctgggggcggcggggaattcatttcgcacgcgttttgctgccgcgacttttgacgcactttcacagccattgatcggctatatcatcgcctgttttctgctgccgttggcaatgccatctcttttcctttttccttttcttctccgtttgattctccgactgattttggctaattgaatttgcccggcgttctttgctcttccaatgtccatttctccaaattgtccctttttgcttctatttttggcttttttgccttttgaaatgagtgattattcatctgaaagagcgatgactgagtgaataaaaatgggcgaataaattgagggagaaaaagttgcgcttatttgttaagtggggcaaaggaagggacaaagggacgacggagggacacttttgaggggagacaccgccgcaagggacaaccagcggaccggcgacggagggtcaatccctccgaccaaatgatccatccctttccttccctagccaatgcttttcctcttccgtccaccaaatgcttaaccccccccccccaaataatgattggatttactttcaatttttggctaaaacccaattttgaatttaatttcacagagagacggaggagcgattcgttcggcggatggaaaaagagaacagcggccgttgttgcaacattaattaattgtacaactgttgatgactgtgccaatcccttctttttggccatttggcaattctttgcttcaaagggattcgtccctttggcatcccttcggggcattttcgtgccaaatggcgaagtgtcaaaaggaaggcgaccaacgaaagtcactccatgggattcattggcgtcgctttggcatttcgtctttcctctcaaactgctcacaattcttccacactttgctgctttttctgttcttttcatcgaattttgtcgctttgatcggtgccaacaaattggacacgttcagcatcagcaacaggtggtgatgtgatgtccattctccctcagctttgtccaattgtccgcctccgttcagtgattccgtctctccaaaacggtttttctctgtcctccgacttcgcatcgaaaacgagtcgcaacttcgctttctgatggaccaatttctgcggaacagcacacgactcgacttttggaaggagccgtcgtccgtcggagaagacgcgtgggcttttaaatgtctttttcaaagcttttttaccgctttaagtcacgtgatggtcgcccgaggcccaatgcttaacgacttcagtgaacgcctgcgagaacaaaacatttcgtcgcgagtgatgatcgaagacgtaagcgaactgattagaagacgtgcgagagagacgacggaaagggaagccaaacagaggaaaacggaaagcagcggcaactatcaaagggtgggaagaggaggacaacaattaggtggacaattaatggggggggggacaaaatgggttgccaattaatgatcaataaaattcaaatagaatttaaatatggtctgatttggtctgatccgatcaggatgagtccatttggcctctgtctgacgatgactcggccattcgaagcactcgccgacgaaaagcgagctcttcgggtggttttgcgcgcttctccatgtccaagtaccactccttctccgatgtgattcatcatttgtgcgtctttcatttcccaaaagaattccgccaaaataaattaatttttaaggaatgctttggctgtgaactttccttcacgtgtccaagtgcaaccgatcggaacgacgcacgagggaagacagatccctctgatcaaaattggcaccagtccggcgggcacaaagccggccgtttggatggacggtggcattcacgcgagggaatggatatcccccgcggcagtgctttacatgatcgatcaggcaattttggggttgatcgatcggtcgatcaatgtttgtcttagttagtgacgggttatgactctcagccggcgattcgtcagttcgttgatcacttggattggttcattgtgccaatgctgaacccggacggtaagctttgggatggttttttgaatttgttttccgctttcgctaggctacgaatattcgcggagcagcgccgaccccgaggttcgcttgtggcgcaaaaaccgttcgcccgttcagtgcacccaaatcagcacgggtaagcgaaggaatgattagaggtattgagggtcagagaacaattcactgattggcgaatgaattttactaagcgacattttcgtccgatcatcgcctgctaattacttcccttgccatgtccgaccatcgggtgctaattgcccctccccctctttggcttttgttgat

SEQ ID NO: 19169 - DNA, 3063 bp, Heterodera glycines
attttcaacatttttccatttctttgtcactcattttcggcttttctccttttatttgccaatacattttcattttctccattttttctttctccgctattatttttcggctaattccaaattgcttcatccattttctaagtatgaaaaggccaactccaattttcttacaaatttgttcataatttttgttccattctttttttgaatattttcttcctttttctttgtattcatttatcatttcaatgaatttctgtacagtgtcaagtttttcttcttcagtcattgttttgtagcaattcttttgatttaatcccaattctttgatccattcataaatatatttgcgatttgtgcccaatttttttgctatttttccttcaattttattccattctttttttgaatattttcttcctttttgcttaattttctcttttattttataaaattttccaattatttctctttttttctgttcttcgtttcttttttcttcccatttttctccaaatatttcatcaaatgatttttgttccaattttttattttctgatccgatctgatcagttcggatgatcagaaataatattgaacagaataataggcacaatttcaaatgcattcttttaaaatattactaattttcaaataaaatgctcaatttgacagaatttgtttaatgttttgaatatattattaaaaataatccataaatttgatgacgttaattagaaaaattttcgcctgtttattggctttttcaaaatttggctgtttttgtacaaatttttgtacggtttcaaattctattttcaccagcagatttcaaaaaatttaaattcggaaaaaacccaaaaatccaaaaattttcttttcatttttggcagaagtgtcgggccatggaatacataaactgctcgtgcttttgctaggcgccgcggtccaatcaccacaacgtgaacatttcattgaacgcaatggattttttccaacatttttttttgttttcactgatcatttgagcatgaaaaatcgaagttgattttttttttgcggtgctttttccaaaaaacttggggaacaagagggggccggcgtgccgataggcgccgccgggaaaaatttttgtaatttaatgaggtttgttaatagattttgtccaaaaaatggccaaattttgcaattttgagttctgaggaggttgaacaataatcccccatggggataattagaaaatatacggtaaaaggcatatacataaatttccataaaaattttcttttcccaacttttcccactaaaaaaattgtgttaaaacaagcacatttttaaatgcaattataaagccgaaatttactgattttttaagttatgccacaattaaaaaatggaagaagcaatttggcattagccgaaaataataacggaaaaagaaaaaatggagaaaatgaaaatttattggcaaataaaaaaagaaaagccgaaaatgaatgacagagaaattggaaaaattcaaaaattgaaattaggtaattagcatttgaaatttttcaaaaaagagaaaaaaattcaatgaatttttattctaaaaaattatttataaaaaatttggcaataaaattcatttattttcaataaattgttttcttttgcagaaacatttaatcgctaagaattaaaaaaataattctcttgacacttttcccgcacaattaagccctccccctccctttgatgtccccgcccaggggaaaaagcttcttttttttaaaatgtgcttatgttttacataagtaatctaaaagaaaaaaaaattgtcatgaattacataaatccctaattttaattagccaatcatagaaattaattatttgtaaaattgcgtcatcaaatttttaattagcatttttagatggaagaaacaatttggagacgaaataatggaggaatgaaaaacggatgattctaagaaaataaattgacaaattttgcctaaaaatgactgatgaaagtgtgatttaatggaactaaaagaatttctttaatttgtaacaattaatgttgagtagtgaacagggcttggcgtaattatggattacggaaattacggcattttttgaaatatttatctcaatacttggcatttattttgttgctttttggataaaattttacaaaacaggcgaaaatttttctaattaaattaacgtcatcaaaattatggattattaacaattttaataatattttttattaaacattatagaaattctgccaaattatgcattttattatcaatttaaagcaataaattttcatttgcctcatttgtgatgccaaataattcataaagcttaaaatttcctaatttccttcatcaaaattattaaactgccaatttataagtttagcaaaataataatataattaagaagaaaatggaattaacacgtatattattctgtttaattttatttttgatcaccctaactgatcagatcggatcagaaaagaaaaaaatgaaacaaaaaacatttgatgaaatatttggagaaaaatgggaagaaaaaagaaacgaagaacagaaaagaagagaaataattggaaaatattataaaataaaagagaaaattaagcaaaaaggaaaaaaatattcaaaaaaagaatgggggaaaattaatggaaaaatagcgaaaaaattgggaacaaatcgcaaatatattcaaaaatggatcaaagaattgggattaaatcaaaaaataaatcattcaaaattaaaaactgatgaagaaaaactcgaaattgtactgaaattcattgaaatgacagataaatacaaagaaaaaagaaaatattccagaaaagaatggaacaaaaattgtgccgaaatttgtaagggaatcggagtaagttatggcacaattacaaaatggaaaaagcaatttggaattagccgaaaaataacggagaaagaaaaaatggagaaaatgaaaatttattggcaaataaaaagagaaaagccgaaaatgagtaacaaagaaatggaaaaatgatgaa

SEQ ID NO: 19170 - DNA, 1720 bp, Heterodera glycines
gaatatgttgaacatgtcgccaaacaacggtcatctcgtcaaaaaaaaattttttctattgaattttttgttaaagaacttctgaaaatgaccccaaaatggcaaaaatatgtaattttcttgcttccggtatgcataaaaaattggaatttttaatgaaaagttaagaaaactcaaagttaagtaggtcatttgtccgaaaaactggtcaaaaagggaatttttccgaatttttttagagttgcatcttttttttgcgcccgtagcggcttttaagttgccgtgggtaatgggcgaggtggtttttggttagagcattttgaggcggttcttttaaaaaatttgagtccctagcccaaagttgagttggtcatttgtctaaaaatttggtcaaaaaaatcggcttttcgcagtgagtgggggattttgggggtaattgagtgcgtagagcttgatatttggttttaaatgggttaaacaatgttttgacaggtctaacaatgtttgggagtagtgggacaaagtgtcgacaagtcggtcaaaatgtcgaaatttttaacatgatcaaaatgaagttttttttgtaattttttatgttttgaggcatagaaacagccttctgggcttttttgcgcgagtttagggcaactgaaacggttaaagatggacgaaacgatcacgaagaagccggccaaataaattattaaaaaattctatttatccccccccccggcacataaatggagactgggagattatttttcaacctagttcaaagggggtatataattggagaccggcagattaatggagactgccccctaaaaagcccccggccgcttcttcttcaggcaacaaagcttttagccaaaattgaacaaatggagcatatatgtatttggcgccccgggcagaagacacggtaaatcccggcggactttccctcccccgggggctgtccaatcttcgcaattgcttttgcctttgtgtccaaaagggagaagcgccagcacaacggagggggacggacaattcaatcaccgaaaacaaaaaacgttttttgcttttgattggtccaaatgatggcttttttaagatgaacattgctctttctggggtctcgtgctcgtctccgggttttaaacgagcacccaaatttaatttaaacccgggttaatggcgacaaacccgggttaaaaagttggtaaacccgggttaagggttaacccgggttgacaaccaaaaaacgagcacagaaacgctataaacccgggtttagcgtaagggacggaaacccaaagacgagcacaccaatagtgattaataaaaatcaaaaaactgattttcttgatggagtttcttcattttttatttaaattttacaaataatttataattttgtgtctgatcaaatcattctttttgaatttatgggttgatttttgaaaattttttgaaagtctgatcattataatcggatttatgtatatgtatataattatttcaacattttaatagccagaaggggggggggggggaattcctcccctcacctggctaaggttttttgaattttcataaaatgcgtgaaaaataggtgtgacaaaaaagtgatgcctctattttataggcgaactacccaaatagccttaacaacaacaaataaaaaataataaatctagctattttaattcttaaataaatcgaaatacgggtagcc

SEQ ID NO: 19171 - DNA, 1215 bp, Heterodera glycines
cgacatttgcggaccactatttctgggttgaactgtcaaaaaaaaacaaaaaaaaataataattttttcaaaaattgagtgactaagtagttttatttggtttgccaatttaccacgccctcagagaaatatttaatgtcgacacttttgcgctttcgtatacaaaaacgaaaaacaaaaaaaaagttgccaaaaggagaaaaggaaaatgccaaaattgcgaggaaaaaagtgtacaagtggttatgtgataatgccaatttgattgtttcaatttttatgccgaaactgattttgggttttactactgccaatgatttttgttaattaattaattaattattttcccaatttccgtctttcttcgtccatttgcgcatcgtctcgcactttttccgccaaagtccgaatgccgggaaggatctgcaaaattggcaaagaaagacgagacacaaactcgttatgttttaaattcaaatttaagtcaaaaatctctttttggcattttgcccctttcggtctcttccctttccctttctctttccctttttctcaccttcgccgcttcgtcattaatttgctcctcggggaataaaaacccgcggaattgtcctccaaaatagcccgaactcagctccatagtgtacacatattttatgcccaaactctgcgcataatcgtcgcttccgccggcggccgaatctttcagaattttggagaaaatttgtcagtgtttccatgccaaaattggcatttttcttttttgaatgggctttggccaatgccttgtgccttggccattgttttgcgccttttccgttccttacagagaatgtccggtgccgtgcctacttcgaattgcgttccgcccgcttttacaatcgcttcggccattgcatttgccagcgttcgcttgaacattttcgattttccattgacttttaattcatttcttttccttcgcccaccaattccttcacattgtccgggtacgtcttcggcttgtaattccacggatggatcagcaaatttccgtaagagtgcagcgtcaaatacgccttcagcgagtcgcggttgttctgcatgaatttggccaaatgggtgcactcaatttcggagagcggcccatcgccactgaacacttggctaaaggggaggaggaggaaaggggacggggtactcctaatggacggaggggagagaggggcaattggt

SEQ ID NO: 19172 - DNA, 1010 bp, Heterodera glycines
tcatttaaaaatggcatttttattgcttcacatacgatctttgtccacgaatggacgtatccgtccgcgttcagaatcggaatgacgtggacatcgatgtgacggagcaaagaatggaactgagggtcgttgaccagcttgaagttgacgggcatacgaaaataaaaagcaaaaccaaatgccgaactgaccgcgtccacaaaatgaagtgccacggctggcgctacccattccctggcgtggattccggcatcgacgagaagagcgggctttttggagttgttattggagggatatccgagctgaaagttgggaggattgggaagggaaccaacagcagaagggaggaacggatcaaaaaatgccattggattagatcagccaaaacaaaactttggcctatcactcaaaaaatgccgaaaatgaccgtcagaatgggcaattggcgcccctcaaaagattgtccgatggtgccaaagcgagcgaatgccgaattatgttgggcaataagttgcaagtagtggacaacctgaacacgacggaggcaaacattagaaaggcggcaacaaaagcaattggccaaccgagtcgaatcggtggaaactgcccaagtcgaattggtccggccgttggcactgctccgtcggctcgtccatgcttcgccatgtctctgctgccccccgcattatttgtctgttgccatttttccaaattgaccctcgttcccgtatgattttccttactttccaaagtctttgaccgccgtataatggggaatgcggttgtgttgcagatactgcttcaacttctcctggtgctttggactcgcaaatatttccgtgggtacgcctaattgagggcgaagcttccaaaactgaactccttcatgaccagaagcatcgtaatggatggaaaggttgcgaagaacggccaaatgggaggcggaggaggggagggcgaagatgagacggtaactgacaatgggaaaaaaggggggggggggggggggg

SEQ ID NO: 19173 - DNA, 1295 bp, Heterodera glycines
gccgagtatggcaatggcaaacacagcaatggacgagcatagcaatagcaacaatttgttgggccaagtgaatgacggcggtggtgtcgatgccaattattgttgttgttgtgtgacttggccatggacagaggacagattgcaaaaaaatttaaaaaataagagcaattaaaaaatggacattcaaaaaacagtgggaaggaattggataaaacaaattgatgaaaatacgcatatgcattgaataaaaaaggcaataatagcagatattcacaagtgataaaatcaggggcgtatctagaaacatttttcgggggggggggggggacccgaccttttttttttttgctatttaaccaataactttttttccactgctgggtaacaactgcactttttcactaaaaatgaccaaattttggccgttttaaggcaaaaaacttgtaaaaatagtggaagtaggtccggcggtgccgataggcgccgccgggaaaaatttttggaaatttgagtgctacttgttacgaaatttgcctattaaactttttaattttcgtttggggggggggaattcgaaaaaaatttccattatttgctggaaaataggcaaaggcactaggctcagatgaaagctaatatacactctcattatctgctaattgaaccgattgacgacaggcagaaaaaatggacacgtttaggacccaaaaatatttttggcacacattgacgtgcccgttttgcaggagcttaggtagcagcgcaaatgtttcaaatggtagacaaagtggtggcgacgacgtttttgatcggtgaaaaaataaaagtgatgacggggaaagagaagaagcattttgctcggccgaggaattgcggacaacgcaatgggaaattaaggcttatgatcaattggaaatgatggacggggcgaggagtggtcagatcatccgtggccaacacacacactgtgttcgcgcctctcccaatcacttccatcacacaaatcctccgccgccgaaggcggacggagccgcagcggtttaccccatttgccgtttgggattggcctgcttgctgcacacagccgtggccaaggcagcaaacaccgcttgtgcgctcaccactcagccgtcgccgccgtcggcgggcggggacggttgactgaatgatcagcagatgatcagcggagctgatccgcggccgctgatcgtgcgctggcggtcactcgagtggggtgggccaaagtgtgtgtgtgcaggcagggacggactcactctgctgatgactgcacattt

SEQ ID NO: 19174 - DNA, 968 bp, Heterodera glycines
acagcgtcatcgttgtagtcgttgtcgtcgtcggaagactgactctcactctcgactcactctcgaccaccgcacattggcccataacacacacagaaacagtcagcggtcgatggatgtgtgtgctgcttggcccccgctgtgtttgcgcacgacatcgacggattgggcggcggtggcggcggcgactccccgccgacggggatttcttcagagtccacccccaacttcatcgatctgctgctgctgtccgattgtctgtttgttgttcgcgacattcgacctcatctgcaacaggagttattctcaatagccttctcaatctgctgctgaatgttgcttcctcattggttcaacaaatttcttggaaaattccaatggggggcaattagtgacaaatttgttgctcaataaatatttgtcatcaaaatggccaaaactgtgtcaaattctggcaaattcaaaagaagaaaagagattgtgcaattaaattaaatttggcaaatagatttggcattacaaaggttgagaagcattgtgaaaaaacaaacgtatctttttaaattaaaaataatccaatgtacattaaactccgattttcctgggcctatttcaattcagaccatatctcagatacgacgtgtcatatatcatatgcacgtttcaattatgaactgacgtgccataagatcatatcgtatgcggaacttacatatgacggccacatatgacatgaaatcatatgtgagtgtcatatcagttttgggctgtttcaattaaaattgctacatatgatgtatttctatatatgatgcctacatatgataccaaacactgggataaatataagctcattaatgagatctaggccgtttaaatgcaaataaattaacaaaaatgaataaaatgttaacttttttttatattacgtacaaatatttttagtgtgtaaaatatgtttagagtga

SEQ ID NO: 19175 - DNA, 1391 bp, Heterodera glycines
ttattttttcacaagatatttttctaaatttttaaaaattctcaaaatatgtaaaaagaatgaaaatatgtacgaaaagtccaaaatatgtaaataaaagtcccaacttttgttcgcaaacacaaaaaattaagtgtttttcctactatttagagcatggagaagccaggaaaacaaacatgtatttacataaaaaaaagtagccctggtgatcagatgtctgtagcttttccgagacaattttatcgttgagatgaagtgttcatgactggaaacatgcgtgtaatctggacattttgctgtggtgccatacgattttgatttaaaattcgtttgaacacaaatggaaactccgtttgaaatgcccgacgatactccgtactaaaatatgtatataaaaatatctatttaaatattttagaatttaaaaaatacaccttgtcaaatataaaattggcccattcgatgccccgccaaagttcaatggaattgcggtgattatatgccaaaaccaagcagtgatcggtgacgaaattgaaggcttgatcaaaccgccataaagcattgtgatcaaatagccgccaacattcactgtgagaatgcaacaaagtgatcggaaaactcgatggttgatcgtctcagatgagggcaaaccttaattagggcaattaaaatttgtgtgtcaatttttcattttattaccagctgatttaaatttgatcacaattccaacaaacaaatatataatacaagtcgctacgaagatgtagaaaaatgtcatgttaaagaatgaattggtatgctaaaatttaataaaattgtaaatgtggccataaaaaagtgacgactaaaaatccaaaattaaacatatttttcccaaaatgtgagttaaatttcgcagtttttgtaaaattaaactcgaatgaaaaaacctattgtttatttataaaatattgagctaattttattatcaagattttgttgaattttcatatttttcctggctgcatttgtcggcatagtcgaacactacattgactgaattttttttaaaatttgatcaaaaaagctgaaaatttgtcattttggcgaaaaaaatgctaaaaattccctttttttaatttgtaccaaataaaagtcagcaaggcaaccagtgatcaactgatcaccatctaattttgcgaaataaaacacattgatacagttacagcaaccatataatacagaaaaaattgtcattgagcctaaatacaggcgaattttgaatttggagtgcctgaaaaacaataaatttttgagggatttctttgtgaatttacatttcattgaaaatatcacaatcaatcgatcaatgccagtgaaaacattgccggcgtataccacctaaatta

SEQ ID NO: 19176 - DNA, 1966 bp, Heterodera glycines
ctgcaaatgcaccacttggggtttgaagaggtgaatttcctttgaaaaccagcgaaaattcctttcgaaattcctgccgatatgctgtactaaaagaatttttttaaaattattttcatatttatttagcattttctaaatttgcaaatacacacctagtgaagtataaaattggtgcatttgatgccgcgccaatattcaccacaattccggtgataaaatggacgaaccaagcagtgatcggagaagcgattgacggtttgatcagattcaaataaaacgcattgatcaaatagccgcccacattaatgacaatgatgcaaaaaagtgcacggaaaacgcgctgattgacctcatcagcggatggaaaacctaatgaatgagaaattgatctggatacattatcaaattacagtatcattcaccggaagatttcacttttaccacaaatccaactaacaaataaacagtgattgtcaatgggacgagggaagttcggaaaattgatgggttggggccctaaaatatttgaaaaaactatgtatttgattttggatatacaaaaaaaccttgaaaaaatcgataagacatccagtgatcagctgatctccatacaaatcgatactttggtataaagttacacaaaaatcaacgcagaaggcaatacaaataagcgttatcatggtcaaatacaatcgcattttgtgtttgttgtgactgaaaaatatcagctttatcattagagctcagaactatatggacataaataaaatcgcaaaatatacgcataataaatttaattattatttttgtgaaaatatccacaaaaatatgcatatggaaatacgtcaaagctagaaatatattttcgtgcgtttcaggccttctacagtttagcaaaaaaatatgcatgtgcatataatttcgagccctatttacattatcaaattagttttttttaatacatacatttcttcaaaaaatattccgatcagtctgtcaatgccaatgaaaagcatcgccgggtaaattccaccttaatatatatattttttttaaattgaggattggttgtgtttaaaataccgagcccaaacattgaaataaaaacgatctgaacggctaaacgatacgcaatgaaattttgtccagaaaatgcggtatacacaaaaagaaaattgccaagttgatgaagcaattcaaaaaaggagcaaagagccaaaaggtaattaacggtgccacggaatgaccttaatatgaaaaacaaattaattaattttcaatccaattaatttaattgcccactttgtctgaactgttacccaaataacagacaaattgaaaatgattccaaatacggcgatgcttccattgacaaacgaacagctgatcagcggccagttgggatttacatctttgaatgacaaataaaactgaaaacccaaattaagaaaattattttccctataatttaccgaaatgttgttggaatcagccattaattttgaaaccaaagcttttatggaaattaaaatttattcaggtgcttggtcactccgtaattttgttgaaaagcaagtgtcgcgtcaaaaaaagtattattttttatttacacattctttaatcttattttggcacctttgaaatagtttaatgcttttcggtctcaatgatgtgatggagttggacgagacgtgttgagtcaagcaaagacccaatcgtggaaaaccaaaaaaagactacaaaaattggcattttgggacaattgaacggaaaaaaggttaaaaaaaagcaaaaaattaagaattaaaaaagatatttaaactattttagaaggccatgcattttgtgcagcaataaaaaatcggaaaaagaaaaaatgtaataaaaaaatatatttttatatggcactttttaagtagcttctatagtctctctctctctctcacaagcatgccaactaatt

SEQ ID NO: 19177 - DNA, 1813 bp, Heterodera glycines
ccggggatctctagagtctttaataaatatgttgttttcagcaaaagaaaaaatttataaaaaagtgaaattcattgaaaaaggaaaaacaacggattcaaaaattgatagtaaagcgacagtcggaggtttttaaattcaacagcttggatatttttgacaaaaatccgtttcaatgttgcctaaaagctgtcaatttttcattgttggtatgtatctgggtagccttaattcagcaaaaaaaaaaaaagttaaatcgataaaaatcacatccctactcatacataactagggctgggaattttatgtaagaaaaatcgcgaaatgtgtaaataaaatatgtatcaaaaatgctaaaatatgtatgaaatatgtatgtataaaaacctccaaatatgtaaataaaattttaaattagttattttttggacaattttttcttaaaagttgaaataggaataaatgcaataaaaatgaccgaaataagctaaaatcacattttagtattttaaaattaagcataaaaatgtgaagtttagagaccggttttaattcccaacccgaactcgaacaaaaatcgattattcgagcaattagaatccaaaattgacacataaatgaggttttatgcaaaagaaaacataaaatataattcatggaaaagaaaaaaaaatggatgataaattgatagaatgataaatgacagtaaaagcgaaccattagaagaaaagacagaagatagccaaaaacgggggacagggacatcccagcctcattcgttcatcccgttctacctggctctactgcattttacgcgtccaatcaaaattttcctaaatcgaacatccttttgacataaggtgccaagtagggttgcatccccgacgtcggggttggaaaattcggggttcggggttgtcggggttggaagtgtcggggttcggggtcggggttgccaaatcgttcggggttcggggtcggggtttttcaatttttgccttatgccaaatagtcaaaaattttttaatattttttcggaaataatatttattaatttccataataatatttgtattgtttttatatttttttatttcttttttatcagaaattttgtatagaattaatttttttttcttgaaatttaaaaattttttattacctttttgttttccaaaacatcttttttcacgtcgctcttttctaaagacttaaggagaaagggtacggcgtccggcggtgccgataggcgccgccgggaaaattttgaaaatttggttagatctgttaacagattttgtccaaaatatgctaaatttttgcgattttgagccaatttttttaataaggtttatgactttttgggccctgtgatgccgataggcagcgctaaattttggaattaagctctattttctaagatttttcaccaaaaaaatttatgaatttcggtaaatttttgtttttcttcgatatgtattttgtcaaaatatgccaagattggtcgatttctatgagtatttaatttaaaaaaaacaatttgtaacaaagaaaaaatgattaaagaagaaaacgtcaaacggtatcgaactcacgacagaaagtaatgtaaatgtgatgcactaacctctacaccacattacaaatgtccaaaatcgagcaaattttctttatttaataaaaatttggcaaatggttaaaaaaatttaaatttcgtctaacttttttgcattttctcccacgaaaatgccattcttaggggtgtatatttaaccccgaccccgatcggggttaagggtcggggttgtcgggg

SEQ ID NO: 19178 - DNA, 1327 bp, Heterodera glycines
gcgctaacccccgctagttttattaaaaaggttactgtcgaaaacacctggtttaaaactagcctaaaaaataaaacgccaatacattcaaatttaaaaaaacttttggtgggctttcatttttttctgctacaaattttttgtttatcttggaatgtacaaatgcacgaaaatgcatttattagtttgtttcatttggctccctcttaatttagcaaattccaaattttactaaaatgagcgaccattcgtcggacgattcaagcggggctgagggtggtgatacttaccaagtttgcgaaaaaaacagcgtcccatcactttttggaatttcaatggattttttctaggttgaacgggtgttgaagaagcgcattatcaaaggggggaaggtggaatattacatcaaatggaaggtttgaatttagaaaaactttttttacattttaaatccgtcccctttccttttcagggctacgaaaacatagaggacaacacatggtaaagatgctctgtttttttttctgaatatttgcatttttctttacgggtttccgaccccggcgcattacttttcgattttatgtgccttgcgctttttttttgttccacgcgctaccgccaaatttgtgagatcaaaattgtcagagtatgggtcctgaaatagtgtccccccccccccgcaagtacggaatctgggacatacgcccttttgttaaatttaaaaaaaattcggatgaacgcacaaaaccgaaaagtttaccggtgtgggtttgtaaatagagcccgacttggtttttccggaacccttgcctttaccggtctttaaatgaactcagttcatcattttaaacagtttttgtctcgaaactcggtccttgtgcaattcccaaattccggccctgaatttacaaattactttcctagtagtgagtggtcaactcagttccggtcatggtcaaatgacttactgagttcttcttggccaagaaatcatctccctgcaggcggcgcttatatgtgttgccgcaccaaacgattttccgttattttaccccgaaaatctatgtttctatgttctgaacttgaaaaaaaatcctgtcaaccatcggggcatgaatttttttttatgttaaattaattttattcgccaaatttcagggagccagaagagaactgcgactgtccagacttgatccgcgactttgaggaaaaggagaagcaacgggaggcgtccaagaagaaggcgagaagctcgaccagttcggcggccggagggccggccaaaaagcgcaaaacgtccaagtcaatggtttgttttccctta

SEQ ID NO: 19179 - DNA, 1465 bp, Heterodera glycines
  unsure (1)..(1465): unsure at all n locations
caagatccccaattggggtgaggcatatttgtattccttcttgtctgggtgattttctttaacgttaagaatctgtagggctgggatttttatgtccctttttatgctcaaaaaggcaaaaatttgtatctcgctctgattgaaaagaaaactggtaaaaatgctattttgatcttttcatgcgatagcatattcgcaaaaatacgtcaaaacataaaaaccctatccctggttatctgtgtgtaagtatactttcactatggtttacaatgggcattgataagagtggttgctgctgatattgaagtttttgctgattttgtagttgccgacttggactgttaaagtttgttggtccaatgtttcccatttgtcccatttctggccctatttgtgacatttggctttctgtctgcatatgtggtgtcagatgaacagattgaccagattgcacattcggtccatgataattcgttaagcttgtcgatccaatttgttctgtcatttttcctttttgttgtgcgttaaatcgagttggtccaatgtgcgtcaaatttcccgtcgtgttcatggtaaaactttttgacccgccgctttgataaatattttcggcggctggcagcatagtaaagctggcagagccggttgaggacggcatgacaaagcttgaagagccagtagaggatggcatgataaagtttgaagagccagtagaggatggcatgataaagtttgaagagctagtcgaggatggcatgataaggtttgaagagccagaagaggatggcatgataaagtttgaagagccagtagaggatggcatgataaagtttgaagagctagttgagtgcatattgcccgtgtgtccttcttttgtttgttgccattgaattttttgatttcctgttgacggcatttgtgatggattctgcactgattgcggttgcagattctgtccatgataatttattgggaattgcctgtaattataaatgcctcgactcaattgctttactacagaaacaactttttacacttaagaactcgaatctacggcactaccgaacaatagaatgttctaaccaattacagaactttattttaaaagtatcactgacgcattttccggtcacgctttatcccatttcatcaattcccatattcttttgacattagatacccattcagttttactataatatttccagttagaaaaatattactgattctttatgccagctagattctgttgacccataaattgattctgctggtgaattctttgggtttgctgttgcactgactgagcncattgttgttgaactaaggcattttggctggcaattgatcctgcacaatttgnggttgatggactgttgtatactgtagattggtcagtggctgctgtactgattggaaatgttgagcttcangacctactttcttttgtttccgatcacttttc

SEQ ID NO: 19180 - DNA, 1974 bp, Heterodera glycines
gttatatgtataagtacaaatgataatatactgtaataccttggtttgctcgaatgacaaattggccatcggatctgctaatgttggttgcattagtggcggttgttgcccttggtattgaaccatctgctgcaaggactgttgaaattgaacattttggttctggtcaaacatatactgctgactgctcagtggttggatttgctgttgcattgactgagcaaatgcttgctgaactaaggaattttggccgacaaattgattattttgcgcatggtggtgttgaactgtttggttttgcgcttcctgatctgttgctttctttggtttccgatcacttttctttttactctaaaatttattaaacttgctaaattttggcaaaaattggtctttttgataattctttttattgattttatagaaatttgatttactttttcatttgtttaacgtgagaatttcttcttagtttttcacaggcaaaaatgatctatttctagggtttgagaaaatatgaaagatcagaagggttaagtgtcagatggtgccgattggttcgccgtatttgaaatattaaataaatccctggcgtctaattggggtaacacataattgaacttgttaaatgtttttaattgtataaaaacaatttttatttgccatattagggttagaaaaaaccgacccaaaaatatattcccggcgcagtttttcaataaaatttctgaaattgcgaaaattggtaaaaaatatataagtgcgaaaggtcagaaaaatagggctgtttaaggtttatattgtactaccgtcgcttgctctaatgacaaattggccattggaactgctaatgtttgttgcattggcggtggttgttgtccaaaattttgatattgaaccaccgaaaattgcggtggaaattgaatgtgatcaacgctttgttgccgcgcttgcattggcggttggccaagcggtacaaatgatgacggacccacgccgccggcattggcatacccttgcggaagctgaaaaacggtttatatttaggataagatttccattaattagcttaagttaaatatccagtggaaataaaaataagtacaagagttgttatgatgagagtcttgtaagagagatgtctcaaaccccgtttgcctgccgaagccctaggatttcactcatttctcaattttcattttcctttgtttattgtaccgccccttcctgatgaaccgattgatcgatcacttcgctttcacctgtatttaatgtttatttctatggaaaaacaacttatatcagttcagtctccccgagaataaagccacttggtttagcctaggccttatcacctcatttgggcccttctttgggcgcgtgcgaatgcccacccaatgttccccaaccgtgtcggaaatagtcgctgaaaatgcgcccgtaggaaatgtgtcagtgaatcagaatttcttgaaaaacgtgatactgtagtatttattattagctgaaacagtaagcgtggacgttttacataacttgacctcttgtaacataatacttcatgctacagtactttattttaaaaatactgtattactgacgaattttccgagagcctccccaactgccctctcaattggaaaccctaagtcccaatgccaacacgtcctccgtgcagagcaatgccactgtatcaatgaagagtttaaagtcgagcaagtcttaggctttggattacagtcagcattgtgtcttctttttatattattttcggactcttgtggcaagcacattgaattaatgttaaagaccccgaagcattcctaactcgatgccgatgccaaattcgaaacgagattctgaccaggagagaccaaaaatcgaaggacttctcgaccaattttagcgagaaaattgcatgtgatcagtaattttaagaaaagccttttttgcgtaagcataccatgtacgggt

SEQ ID NO: 19181 - DNA, 2212 bp, Heterodera glycines
cataatgggatgtatgaaggcgattgtagaaggaattggaatcgccaaaattttgtgagaagctttttgagcgtaattacgatttttacttagaccttatttttctaggcgtagatcacacgcgatttttgtccctaagataaatatagcgctgcataatggctcgtatgaagaagattgtagaaagacttgagacgcgctataatagtataagtagctttaagatgcttagcaatctgtattatgcatacccattcatttttgtatatcgacaataagcaaaatgagtaataaaattgaggattgttctctcttatcctttattaaagtagaaaaagaaaacactgagcggacgaagcgactgatcggggcgaacacgcaagtgtgaccgatcaatcgataactgatcgatggccattgattatttttgatcgccgattcagccactgccaattcgttctttcattttgccattttcacttcaaacacaaaaacctctcccttcgttttcttcattttttgactgtttatctgccaatatttcactattatttggcattttctaattatttaaaacaaaactcagggttttgctgtttttgtttgaatccgttttttacaacgattaccgtactctctccacagcacgctctactgtttttattttttgatgtacagcacaagattcattccagatcttataaacataaaaaataaactcgacaattgtttttaatttcctgtaaaatataaaacaaaacaataaatgggagatgctaaaatggagtccaatggtttaaatgactggttatcattcacttcttcactttggccgtcttcgctctcgatctgtccctctccgttcgtttggtttcgtccgcttcagtgtaaaggacggacggttgtgaaaactgaaattaaaataactccaaacgaaacactcccagcaaagtctgacctggtgcgccgtggaatcgtacatgtccttggagaccatcgtgaacaaattgtcctgtcccgacaacatttgcatctcttcttcgtcctcctccgtcgggtaaaaggtcggaaacggtggctcttccacccgttttttctttgcaaaacaatccttcagcagaatccactcgttaatatcgcccggcacattgccacgcacataaataacctgaaaaagcggatgaaaacaaaaatgaaaggccaataaactcaacaaccaaagagtgactgacctgctttatcggattgatccgaagcactttaattccaaccattttccgccattcgtaacccatgtgaccgggcagacaccgacccggccaaacctttgcctcgcctttcgtccctatggcccccactcgacgatgcgcttttgtcggtcccttactgttaggggaaaatgacacgacaattaagcgactaaatcccttacgaagggtggacacttactggagtctcatttggcccttcatgccccatcggtgcattacgccttgaaagccccaatcgatggttcggcccgaggcagtaatccattgtccaggctgacaatgatgcataaagacaagttcaatccgggttgtaaagtagcgcaaacgaccttgaaatgtcggacgtccatccttgtgcccggtttgacgacggcatcgctggacaccataaacccggccaagaactttttgcacgggacaccggctcgttcaaacagcgcccggtattcgttggtcagaaaaggcgagtcgtaatcttcaacgccaaccatttgctgaaataatggaagtttggcatttatttccgaaacaatgacattatggaagaacacaatttgatttgattaaacttacgctccacattggtggggcgcattgatcgatcgtcagaatgcctcggaaagccttttgtttcccggttaaactgtgccgataccacgtttctgggtcattggcggaaaggacatgattgacgggcacgtggatgagagtacaaagacagcgagtgccatctttgagcctgaaatgttgaaaatggatccaaaaatatcaaagtggaaggatggaccactgaagagtcatgccaattttgcgaccaatcagaccaattcgcttggaagcttcaaacgaatattgattttgggtacaatccggcggattcgaaacgccgggaatcaaatggaacgtttcgtagggggagagagacaatttgcgtgaattta

SEQ ID NO: 19182 - DNA, 1383 bp, Heterodera glycines
cctcttctctatttatctcacaaagaattaaaattttcatcggttcgataaaaatatataaaatttataacgatcaaatgtttgggtatgtgaaattgtcaagttaaacaaatttataaaattggttttggaaaaaaataaaaaaacatcaagcaagttctaagaagaagatgatggaaacaaacttattaataattcaaaaaataatttgcgataatagtctcaattatcatttaaatttaatattgcttatttatgtgtttatttttatttgcaagttgtgtacggtcaatttttttatcaaaaaattacattgataatattcctgctctgaaaaaaattaacaaaatagatagattttatgaaggtggtgatgactctgcctttgctggaattgatggatataaccagttaaattttattttaaaaataagtttttaaaaacaagcaaataatattttattaaattattaattaatccgctttttagtgaatattttttatagataattcgaaatgcatttaaaacaacaataacaatctaaatggctatcaggaacaataaattaaaaaatgcaaaaagtcttaaattaattacttacattgagcatttattaacatttaaaacaaatcacacgatgtgttcaacaggaattaaagtcgatgttactggaaacgaaaattgtgagaaagaaatgaagatattgttaggaccacaagtccaaacaacaaataaatttattacacaaaataataaattacaaataaatgcaagaagggggagcggagcagataaattggggaaacaaccgaatgaattatgccctgaatggggaggaataattgggaagggcaaaggtcaatcgatatgcatgtgtgtctgtctctaacacggagagagcagacactgcaaaacagtgaggtaaatgaagagtgaaataaataaatcgtgggcaaaatgtgcctgcccgaacacctccccttttaggctgatcagttcagggcccgggtgtaaatcggtccggctgacggcgttgaggataccgtcgtttaattggggcgtcttcgatcggagcaactaaattttcctgaatgggattcgccgcctcattttccaactgattgggcactaaattggcattttctgcggcgggtggttgattgggcagggccggaggcaatggcaaatcaaatgcctcatttaatatggccaatgtctgatcaaaattatcgacagttttccggtggcgaagctgattggcatgaaaatggccgaataatccgtctggaaatttgacgtcaaaaatcactccaaatgtgccactgatcactccaattttccaattttgagaggagcgatggcgcgcaaaaactttgtcattc

SEQ ID NO: 19183 - DNA, 1167 bp, Heterodera glycines
  unsure (1)..(1167): unsure at all n locations
gccgaaggagatcaatcgttgtcctggccttcgaccgagcagcagttcagcgggacacttcaaatngggaagtgtatcgtttggggtcgtccgataggtgatcagaaaaatgtcgatgatctccttgtttggcttcncctcaccttntaatnttctgaatgctctcttaaatgtgtcgacaaatctctccacttgtccagttgaattggattatatggggcgtgtgtgatgccgttggctgcaacaaatttggcaaattctgagcttgaaaattgcgtgccattgtcagaaacaattgtttcttgaattccatggcgtgtgaataaatagcgcaatttttcgattgtgacagttgctgatgaatttgtcatctcaaatacctcagggtatttggaaaatgcgtcaacgacaattaaaaatattttgccgaagttttggagcgacactgtaggtgtagtgtttgtactcctgttcgccaagctttccaatcaataattgaactttggatttgtcttgcaaatcctttccatcctggataataatttggccatagcgttttagccatgcctcaaaagtatgccctgtttcggggtcatagatgaatttgtccagtcgggcgtcgatggaagaggctaaagttgctgaattggacgaatttgcttggacgtcttgctgttgttgcgacacttctctctccttttataattttccatctgcatgtatgacctaatatttcatcttatatttttaataaattttttaatgcatagtttttgattgattgccaacaaataatattctttatatatattatttttactttaaatttttaaagggtaagaaatattattaaaaatttggattaaagaaatcttgatgattttaaaatatgaatttataattaacggacattttaatgaaatatttaagggtaaaaataacaatttattttttaaagataatttatcatattgtttttttacttatttgctcgttctcttcagacatttgcaagaattattcacgtcctcaattaaataatattttttaaatttttattcttaaagaatactgtattttattatcttttgagttcctaataattaattgctcatgatcgcttcatcaattatgacatgagccagtgttcattctcagtattggtag

SEQ ID NO: 19184 - DNA, 1364 bp, Heterodera glycines
agcattgtaactgttgtcccttaaaggatttgctgtcctcactcatggatgggtccgtttttcctaccgcaaatgcgtcgtccgcagccgctgcagcagcagcagcagcagcggcggcggcggcttccgccgctgtgtccaacacttcgccacagtcgtcatgctcaaacggtggcaacaacaacaacatgaatagtaacgggggcacaaatggaaatagcgccgcgggcgacggcggcgacgcggagggcgtttggagcccggacattgaccaggcattccacgaggcattgcaggtggcggcgctgggggcggggcgggcggggaaatgctggccggtcgtcggccgttcggcctccctctgctgctgttggtggctgacaaatgcgaaaaattctttggatttttaagtgtgctcaaggacaggggtgtagaaaggggaggatggataaattcactgggttattttaagcgaaattctgctgcctggaaattcttcaaatttttaaatagcaattggcgagtgagagagagagaaagggagagagagagagagaacgccaaagaaagagagagcgacagagagagagagaatgagagagaaagggagaattcgtggaccgggctgcactgaaattgtaaaattcctaaaataaaatgcgaaaaattctttggattttttaagtgtgctattcttaaaataattttactgacattaaaggacacaaatcagcaagaggcaacaaaccgacgaataaattttccgggccgtttttctgatttgtgatcatccaatttttgttgtttttaatagaaagccaaagttcataaaaaaatattcataaacagatttatccgccgtgtggacggcgcaaaatcattctcagcgacgagggcaaaatgtacgggcgcaatgaactgatcgccaggtacatcaagattcgctgtggcaagaccagaagtgagtatcacttatcatcataaatattaaaggaactggcaaattatataaataaatttttttaaatttaattactctagaaaaatgtgaaggaattttgatcaaaaattcattaattatagcattttgtctcttccgggttatgctccccccccccccccctaatgaattttttaaattttgggagggcataaccataaatgcacaagttctatccgtaagtctctcaactttgtgcgtcttgcttggccccggagattccgtgctttttttttttataaatatttgaaaaactgttagtttttttcgaagtctttgagggggcgccgaatggcgatggaattcttgaagccaatcaaaattgaattttcgattcatcaggggtgaggtggggggggggggg

SEQ ID NO: 19185 - DNA, 1148 bp, Heterodera glycines
gatgccatgtggtggtatattaaaggaagagagaaaatattttaaatttttccaactttgatagattgaaataaaaataaaaaatgtgatgggacaaatactatatgtatactagagcctggtgccaagattttggtattgagtcgggattttcgcactaattcaaaaacttctctatgaaaaatttgaaaaaaaaatttcgaaaaaatctttttccaaccttacaatttattttgaaggaaaatgccggcgggcaacaacggtttttcaactgactccaaacgggatttttggggttttcaaaacccggattttttttataactttgtttaaagttattggatttgagttcatattggcaagttctaatgataataagggagataatgttgagaaaattttcaagttttttcattgagaattttttgaatcagagcgaaaatcccgactcagaacctaaatcccggttctgggctctagtatattatacccacaaaaaaattttcttgttcattcagcacgaaagcaagtgtcatcgcacatccaagttttagcaaggaaaaaacaacgggaacaccactccaggatgaaggtggaaaaggagaatgaaatattttaataaaggctttgcgtaattaatcctgtttgatcccgcaccacaatataagccaaaagtcaagaaattaaaaattattctttaacgaggattctagaaaatttcatgaaatttttttttgtaaaattaagctttttttgttgaaaaatttgttcaaaaaaattaaaattttttattctcgaaattagtttggattttttaaagaattaactaaaaaatattatttttttaaatttttctgcggacacggtaagcgggagggcgggaaacgagctgcttccggtttaatcaatcacacacaacatttatttaatgctagtcaaaaaaaaataaataaaaatctataccgtaatttctcacatttaattttgattggataattttataaaataaataaattgtccgtcccctttcaaggctccccatcagcgagcaagatgttcagccgacagactttggcatggctcagcatcatcaccaacaacatcagcagcaacagttggcactccctccgttgacttctggctgcatt

SEQ ID NO: 19186 - DNA, 2260 bp, Heterodera glycines
  unsure (1)..(2260): unsure at all n locations
taatttcaaaatttaatttaaaactaaatgttcaagtttttatagcaataaatctctctcttataaatatgcaaaatcatttcatcgtaagttccattggcactatgaaaacagacttttattagcaaataaaagtgccaaaatattattatttttttctacaaattaaaaactcaaacctcattcatcccccccccctcctcaattaaatagtaaacaaattatttaattttcctttgctaataaatttattgtgctttcccatatcgattgacttaactacacataaaagcacattaacattaaattaactcattgagatgcacacagtctgccactggtttattattccctaattatatttaatccaattccataacaaacaaaaaaacattgggatatagaaaatcggtgactttttttactcttatacttccaaaaaacttcaatgtttctttaaaaacaattagggggcgtcggagacaaaaagccttttttagcccatctattagcagattgtgagccaaaaatgacttttgaagctttttgaatagggtcgagccgggctgaccggggataataaaaccattggtgattttaagaattagcaagatgattttttttaattaaagtcttttcgttagttttttattaaggaaaacctaaacacattttcttcgccaaattttcgaaatatttgattgaatcataaaatatttttataaagaatttaaaaaaaaaaaaaaattgttttttggtttataagcaaaaaaagttcaatttgcagttttttaccatattaataaaccctttcatttatttttttctagcgggcaattatataattcctttattactaacttttatctcataacatgattaatgtagcttctctaaaatttaatctaaaaaatttttgtgaattatataattgcccgctagaaaaaaaatgaaagggatcaaaacttttgtacataagcatttttgggtattttgcactaatttgaggattttagtataatttatcagatgggctgcgctccgcaattaaattcgaataggacccgacatttagggacagacacaatttcaaaaaaaaaacattaagtgaaaacttttttccatcaaaatatgaaaacaaagaaaaaagccttgttgatcacttgcggacattcataaaattccaatggcggagcatataaagcaataaaatcccgagatcattcttttatttctgacgtgtcttgttactttgcttggtgctctaacattgagcattttctccattttagcttaaattattgcacaatacctgattgaaaataaatatggcccactaggcaaccaaattccaaattaatttgcccaaaatcgaagccggatctgaatcgatcaatgtctacgtttaattcttttcactaaacaatgaacataggcttgttttactgctaaaattttaatttattgtatcttagataatcaggtaagtcttgaccctttcgaaacccaacttagaaagtaatgtacagtaattgaagctataatggagaaaatgctccattttagcaccacgcataaaatatgcactaaaaacccgaaaaatgcccaaatatgcactaaaatctgccttaaaaatgccaaaagtggatttttaccctcaaaaaaggttaaaaattgtataaaattcacgattgactttaaaaacgccaaaacaatggctaagtagcgtttttagataattgcaaaaaattttgacttccatatttatatcgaattccgattttttaaaaatttttttaatatgctaaaataaaattacatttttttacataaacaaattttttcgaaaatttttacagaaggctgcaaaattttccggttttaagggtgtatttttaattcccaaaaagtcgatccttacgcgatgtattcttcgcatgccaaaatatggacaaaaatgcaaaaatgtcgaaatatggatttatttccgaaaacccccaaaatatgcatttatatcagggcttccatttgttcttatttctaagaaatgttctgattttggggtagcgaccaaaaaatgttctgatttcttaaatatattcataatttttgaaattttatggcataatgtcaccattttatcaagaaaataagatttttggcaaaatttaaacaattttttggacaaaatgtgttagcaactcgcattaaaatcacaaaatttttcccggcnggcgccgacaggcgccgccgtaccccc

SEQ ID NO: 19187 - DNA, 1938 bp, Heterodera glycines
ttgcattgtagtaagaataggtatctcagaaaatgttatcccttattctacatcattagacatgtgggtatcagccaaatcgcattactatctacggttgagccctacaaatggtcggttcgaaattagcatagtaggtaagaataggtattatcagaaaatggctatcccttttttctacatcatgggtttacagccaaatcgcattactatctacggtttagccctacaaatggtcggtttgaaatttgcattgtaggtaagaataggtattctcagaaaatggttatcccttttttctacatcattagacatgtgggtttcagccaaatcgcattactatctacggttgagccctacaaatggtcggtttgaaatttgcattgtaggtaagaataggtattctcagaaaatggctatcccttttttctacatcatgggtttacagccaaatcgcattactatctacggtttagccctacaaatggtcggtttgaaatttgcattgtaggtaagaataggtattctcagaaaatggttatcccttttttctacatcatttgacatttgggtttcagccaaatcgcattactatctacggttgagccctacaaatggtcggtttgaaatttgcattgtaggtaagaataggtattctcagaaaatggctatcccttttttctacatcatttgacatttgggtttcagccaaatcgcattactatctacggttgcctacaaatggtcggtttgaaatttgcattgtaggtaagaataggtattctcagaaaatggttatcccttttttctacatcattagacatgtgggtttcagccaaatcgcattactatctacggttgagccctacaaatggtcggtttgaaatttgcattgtaggtaagaataggtattcggagctcgctgacacggcagtttaaaattttggcgattttttccgtaagaagcaccattttgagaatttggaagctacaattttggaaaaattaacgaaaggaagagtgcaatttatagaggaaaaatgcaatattaatgagatgaagacaacaaaatgtaaaaattaagcaagtatacatgctatttatattgatttcgaatgagccaaatttattttatgggttaaataaacattgaaaggtataaaatgcaaaatttttagttctttgtattattattcttccattttcctaaaaatgtccacatcctctaataaaaattatttaccaaaaaaccaatgcccaaattgtgatggtaattgcaattttttcaatactgtacaataattttttttttaattttagatgatgaagttgacactgaccctccacccgaagaagttgagaaatggacgccgaaacaagtgattgagtgggaccagcgttgctacgggaaaatgccagctgaagaagagctttggcaagaattcctcgacaaaggagaggcaaatgtcagtaaataaaatttttgatccattttttaaattatttctttaggttcggcgtgagttctttggcggaaaaggggcgcttgaagttgagaagagccttcgagaatacgcgaagaaaaaggaacgccgcgacgcaattctgattgagaaaagaaacgaatacaaaaaaaatgatggaaaaaaggatgaaaattgaatgttcgaatttctccatccgctatatcaatggcttttattttatgcaattattttgatttttaatactcgaaataaataggtttaacaaacaaaaattgggtataaaattcgaaaaaactggggatgtttttttcatttaaataaaataactcttaaaataatccattcaccctgaaatatggctgaaaatcagaattagcaaaagatgaatgggagcacagatgaaataattccagctaaaaacccaagaagcatcaaatcctggaaacttttc

SEQ ID NO: 19188 - DNA, 1775 bp, Heterodera glycines
  unsure (1)..(1775): unsure at all n locations
cggcacagtgctcncacttttggcattccatgcgcaaacacttttcacttgccgccctcctcacgctgtgccttcgtctgatcagtctgttcatgctgtcactgatcaccccggtggtgatccggcgtctgttcgcctccaactttgtggagttgctgcaaccgcttgaattcatcttcaagacttgctcagatgagttggccggtgtctgctcatttccggaggcccaattttcattggccgaggcaattttttcaaaaaaatgttgaaaataaattcatattttcaaatcctcgaaattttgaatttttaaattgcttttttactgacaatgagagtatccattgtttctttttcgaaacaaattatggaatttattgaaaaattgttattaaaactcaaaattttttctttgggaggggtagggataaagcgtcattttttttttgttttttttattattattccattttcaaacccaaaattcacaggaagacatccatctgcagcccggctattactacagttttgtgctcgacgttattctcttcgacacaccgcagaacagacagctgagcattgtgttggccagcgtaatgctcaaagtaaacccccggggggggggcaaattggcaccaattcgaccacaattcagaaaaaattttgattggatttttagggttttggtttaggtactgactggtgtataagtaagtaatggtgggtgttgtcttcgtaatttcgacataaaattttggggtgttaaaaacttttttgccataattttttaaggatgaacggatgaaactgttgttccaattccacaaaactgtgcccattttcaatgctttctccgcccgttcggtgctctcccgtctctacacattggtcagaaaatatttatgcaccgtttaggaattagactacattttttcaaataaaatcaaaagaaatcttaatttttttttaaatttttccggttttctttaatttttctatttgtaactttagttttttcttttcaaccaatccgttattatatttagttttatttagagcaaaaaatatgactttaaaatcattgaataaattcgataatatatttttttgcatggtcccaaaagttgaaatttacttattgttttgcagcaaaaattattgaagctaaaaaatttttggtttttatttttattttataaaaactttagaaactcctttatcaaaaaaaaaatagagtggaattattagttaccccgattttcaacaacaaaaaaacattattttttcagactcgcaacattgtgttctggcccctgtacttggtcggcttcttctccaccgctggtcatgaggtgtccgagctgttctccatccattttcccaattattatttggaacgtgaagggcggcccacccgattcattgtggttcagctgcagaacaaattcatccaggtcgtccaccaaacgggacaattttcggtcaggggaatgctttttcttttatttttttggcatttttacctgtttcggtggtgggctaattgggtcccgaccaaatgagtcctcgggcattttttaggatttaacgaataaatttgatttattcgacagccccaagcctctaagtgtttctatattagttgcaaacttaaaataaattgttatggttaaagaaagttagggtaaaaaaatgtttagaatatcaatttttgaggtttttataagacaaaaggaaagaaaaaaaatttaaaaatctttagcaatttttgtaaa

SEQ ID NO: 19189 - DNA, 847 bp, Heterodera glycines
tgaattatatagaaattttgtattctgtagtccatacctccctatagtgaaggactttattagcgtcttgacatttatcttaaatttttcttttaattgactgattttaatatgataaatttaaataaaatgtaagttttattaatttaaaatgaataattttaaattacaaatagatttaatctaatcatatttgaagtaaattccaatatttatcaagttatttagatttttaaattgttttttgataaagtaatttatttattaagtagcgaaatattagttatccctcgtttaggttcgtttttttctccttttttgcacgaaatgtttattagctagtttcgtattttgtacaattttatttatgaatacatacgtccaattttgctgaattttgcgaatgtcattttaatttattttttaataaatacattgattttatattattccatcaattatttatatgtttattgtttattttttctttaaaaaattaacaggttatttgattaaaatgacaatcattttttaaaaaaattcttcttctttttttttgcaatatttgtaaaacaagaattatttaaaataaatataatatcaaattaattggattataaccaattttatcctattttattttattatgttaattcttgttccaatttgaaaaaaaaataatttttttttcattttaggtgaaattatatttaaatttaagggcattatttgaattgataaataacataattttaagtaccagaaagaattttaaaaaaactttgaaggtaaaaagtagaaaataatcattaaagaaattaaccattatgattcacgaccttaatta

SEQ ID NO: 19190 - DNA, 1051 bp, Heterodera glycines
  unsure (1)..(1051): unsure at all n locations
acttattcattgtatttattattttacttgatattagacaccctcaggttctcacttatatatacataatattttatttcattttaataaaatatgcttttcttattttatacataattctatatccttaggtatttttatcttttaattaaattttaattttttatgtgacaatccatgatactttaagttttagttttttatttaaatattaagctataaaaatagtcaatatggaatcatttgacttaaaaattcattaaatcaaaattatttaaattaaaattttcaatttatgtcagaaaatatttacaaaaaacaaggggctaataatttgaagaaaaagaaaactaatgaaagacttgccaaataaaattttaaattaaataaattaaaattaattataatttcaaacattcataagttaaaaaaatgaaatatgtcagcgaatcaaacattgtatggtgattaattaataataagaacaaaaattaataacacacaatgttatttattaaaatatacttaaataatgttataaaaaaattgttatcaatgtcctaaattcaaaaaatattggtgttttgcaataagagcaaatatgatagtgcaaaatagctatttatattgcgagttttgattatttaataattttattttttaaaaaacaccaaaacattttttagataaaattatttaattaataaattttccttcatcaaatacatgctataataatataatttttttgttcaaaatataagaaattttattttacatctgaaactgtcatttcccaactatattttaaagtttacgtatataattatttttaattttctaacaattaattttaaatgtttatgatccttttgattaactttttactattttagtctaaggccataaatattatttttaagtaggaaatatgtaactaaaagcgcgagttattaaaatttaatttctcanttttcgtaatatatgtaaatatgaaatcatttttgtttaaaaaatttaataacttttaaaaaaataaaaaaattttttt

SEQ ID NO: 19191 - DNA, 3005 bp, Heterodera glycines
taaattccaaaaaattgtctaaaatttacattttcatccaatttttttaatggctaaaattaataattcataaaataaaaaattaaatgattatttaggctttattctgtcttataaataggtggccataaaatttttttttcagcttgagtcaaatttataactatttcaagaaaatttgattctctaacaaattactacaaatttatatttgattagaatatttatgctgatccttctcttgaattgtttcggtgttactaggccattattaaaagaaattatgccaatctgattataatatcaaatagcatatctaaatggtcgacacattctgaaaaagtaatgcaattcatgtttaatttgtacctacaaatttaaaatcaatatcaaaatgtaaattccaaaaaattgtctaaaatttacattttcatccaatttttttaatggctaaaattaataattcataaaataaaaaattaatcgattatttaggctttattctgtcttataaataggtggccataaaatttttttttcagcttgagtcaaatttataactatttcaacaaaatttgattctctaacaatttattataattttatatattttttttgataattttataaaataaaaaaattaaacaattattatttctcttcaattgaatgaacaattaattcaataattttttcgttaactttaaatcgtctaggcttttaaaacaaacagttatatgtaataaatttattcatatattccattcaacggtcgactttgatttggcaaattaattccaaatcgtctcttaaattaaatttctaagcatttaaagatggttaatttttagcaagaattatttcgttcaactgacgactttgattgggcaaattaattccaaattgtctcttaaattaaatttataagcatttaaagatggttaacttttagcagagtaattataaataattcttttcatcaaaatatgaaccttacagaaaaattgtttttaattattttgtccaaaaattaaaagatatttaggtggtgcatattacatatattttattcctcaatggattttttcattgttactctgctctaccatttgactcttaacctagatgtaaatgcagcacctacgaagccgacaaatctgcgcaacttaaatctttccgaatggcaaaatgtgtgtactttaatcgaaatatttcagtttttattaacgttattacgcattaatttaaatttataattggttccctttatttttgaatatttataactttcacttaaataattaatgagtattcgaaaggttttttaataaattatatgacatttgacattactcataaatcaaccatagaaaaataataataattaaaaatatataccaaattttaaaacttttatttaaaaatagtcaattactagaaatcaatgttaggttaattcttaatacagtgagaattcagaattattttcgaatattcctctgccgaaaaaatttagcattaaagaaaaaattctctatcaaaagtccttcggcaatgaaaagtacgctatcaaaactcctggagccatcatactgaaaaaaataaatttataaataaagatcaaaaattaattaattcataatttcaggtggtgcaagtatttggaattgatactgatgcgtcagccttaatgggatcaagaaaagagagttttttaaattttttatgtatgataaaattaattcattattaaataggattggcaaaattaacgttttggaaaatttataaagttaaataataaaatttgtaatattataatattgccttttatggtaaattaaaaaatactactagaaaaagaaattttaattctcaagataattgaaacaaacataaatattttttaaaatatagaacagcatgtctgaatacgccaggttgttggaggctcgctgtccagcacttcatgaagctggacatgcggctgctgctcgcttcaatcggcatggtccgcgagttcaattcgtgagttaataagaaaaaatatttatctgtttccactctgatcaatgaaagaaaataatttaaatatgaagaattggattataatttaaaatatctaaggaatccaaggattaattattacaagagcccagacgggccccggtactagtgctgctcggatcaaaaatttccagagactcgagaatctagaccgatttcaagactataattttaccaaaaatcaaatttttttttaataaattttttccaggcttaaaattttttgtttttagcaaggctaataaaacatgttaagagctttcgaatgataccaagattgaatgactgagcagtcaaagaaagaaattctttctaattttcttcaattaattaattaataaaaagttgaatacgataacaatgaattgtttcgaagctccaaagtcggaatcgcaaatctccgattttggctatcccgcaaatttccctaaattttgggttgcaaatgtccgacgcaaacttttgaatgagtggaaaatgtcagattttgactggggccataaatgtctctgggcaccgaaagcactgctgatgaccttctttggttgcttttccttctttatctcctgagtatctgcttcaccgaggagggacactctccaaacggtggaaaatcgtttaattaattaaaattgggaattgcgagtggtcgtttttttggggggggtggggaattaagcgattgtgcccccaaacagacggcccttttcgcggtgccccaaagccatcttattttatctcatcgcgcaatagaatttaatagaaaatgcgaaaacggtggataattgagaagggacggggatataaaagaagtaaaggaattaagtgaatgagtcggggcgggggagggggcgggaagggaatggcattttgggaaggggtggagatggtgttttgggaggggatggcattttgggaaggggtggagatggtgtttt

SEQ ID NO: 19192 - DNA, 3369 bp, Heterodera glycines
ttttgattttttatgagtttaattgtctcatttatggtaaatcatatattcaacataaaaaacgaaaaccctgtcaaacatttgaaagaagtttttttttttttgttgatttgaacctaggatgttgaaacaataatccaaaatgtgttgaaaaacaaaacataaatcatctttgccttttaagaaatttattttcggtcaaatctaatgttaagactatttccactattttgaaaatcaaaaaaaaaaaacaacaaaattttacaaaaataccttatctcataaaaatgaatttgctctattttattgtcacttaatagaaaatattaaataaaaattatctttaacaacataaaaatatctctatttaaaaaaaaaagtcattaaaaattttttattttttctaaaggtttaacgagacaaatatttatgttccaattcacaatattttttttttgtcagagtttagggtaacatagaaaaaaaaaacgaaaaatatatagtgtgaacggtcaagcgttttaaataatttggaatttaagcgtttctttttttgatagaacgaaggagttgagaatgtccaaaatatgtttaaaaaaaataatgtaaaacctatcatttttgccttttcggtctttttttttacaatatcttcatataaaatattatctttaacgtcaaaaatctttctaaaaaaaattttttttttttcatatttattagactattaacccttgagatagtattataatatccaaacatttttacaatgtctaaacgattttgtttttccttacacatacttgtccttcgtctttggtcagcttttgaaattcggcaacacgatggcggagtgttcttatttgtcacagctaatttcccggcacaaacgattgtcctctcgtgttggtcaaaatgtttcaattttcttggcaatatgtagatagacagagtgagtgcctttgatgccactgactaattcttgttgttttactctatgattcgtattttatatattattcggaatgacttaatggatatccttattcttatgtcggataacttttgatgtataataaatgtctagacagaacaacgcggattttacacataatctgattcaacacgataaacaattttttttttttgcgcacgattaaaaatactacgattcgtggtacattaaggagataattaattgtttagccgctccgtttttttctcaaaaatgcggccgccgacttaaattcatggttattaattgccttaactgtcaaaatgcaataggagacaatctccgctttgatcttcgcaacaattttacattcgttccgtgtttggctctcgaaaacttgctctcacattttgactgccatcgaaaggttgtctgcatttttagggtgaaacagtgaacagatttctgtatatattttggcggctataattacaccgttcacatatccaataaaaataatgcgtaggactaaatctgaaccatccgtccaaaaatttttggctgcaatgtcacaaaattccaaatcagaaggaggtggtgaaaacggtagacaacatcatccagtggatgttttctaccgttttttccaacgtttgcacgatgcccgcgggggtcgtcgtcttgttacgacccctgcgacatcgattttccatgacaacagggtcccgattttgtgtaggttttcctaagatatttaaaatttcaacattaaaaaaaaaattatgtagaaatgagttactgtaacctttttatattaatttataagttaagtgccaaaaatatttcttgcgggttcaaaaatgaacaacaacggaaaaaattccaacaattgtgactctgcggatgaagcaaggcggagtaggaaacgcgatcgggctgatctcctgcacgaagtcgagatggacaaaatccgtgaagagcagcgccgccgtaggcagagacgaaagaatgaagaggtacaacgtcaacgtgctctccttcgccttcggacggactaccgtaatgcacggtgtgcggtatcaacaggacaataccgtatgtcgtgcactggtacgacaacttttgtggcaattcctcaaattgtaagtttattttttcattaaatgattagttaggagggtttaacgaaacaaaaaaatcaaaaataaggattattaaacggaaaactaaaatatggtacaactcaaaattttgaataattgacagggtttgagaaaaaaattttttaggtgattatcaatactcattattgcatttttttgttcataagctaaatatgagtcgtttttaaaatttttcacaacccaaaatagttgactgttggaaagatattatagttttgctgatgctatcggtctaattcaaaattttggtaaaaccattttttgtgtctctctttctttcatcaaatatctgcaagatagatagacagaaaaatcctaaccctgataatatataattaaacgattttttaaacggaaattttcaccaatttttcaaacacactaattcaaatttttataaatgatcatcattgtataattaatcgagaacaaacaaattttcaactaaaatgataataagcatttaagtaagcatcaaaaatgctaaattaagaatgagataaacatgaaaatggtaaataagcataaaaaccaaaaaattttttttgttttaggcatatttttaagttgacaataaattcacatctttcttatcgtttgacattcgaaatttttcttagcaaatgacaagtttaaaccaaaaatttttagggatgaatttaaaaaattttcaatttatgatggatttattgtttaatttttaggttgcttcttaggagtgtgtttttgtttttattagtgggagacgttattttattcaaaattgtacaaaaatatcaattaaacacaaaaataagcccgaaaatattaaatttaaaaaaaaattttaaacaaaacaacatgaaaaagtaggacctagaccctcaaacaatgttaaaaaaagaagttttttttcatgttattagcatcagattcggcaattctatgaaatccggtctcatgtaattagtagggttattataggcgcaaaaatctcgaaatagactcctaaaatagaaagaattggaaaataggaatttaacagatattatataggtaaataattttttttattaatttcttataattattttagggtcaatctcgcgggcagccggcaatgccatttacgttggctttttcgtacgaacctgcactgccgattggggcacgcagttgaccttttcggacaatcttttgttggtactgctcaaggctcctgcacctacagttggtgaaatgtcgagtaac

SEQ ID NO: 19193 - DNA, 1193 bp, Heterodera glycines
  unsure (1)..(1193): unsure at all n locations
aatccttaaaaaagtaagtctttatatagcaatctcagaatacttgtccccatgtgatgggtttgcattgtcatgaagcagcacatagtatttgaaaagtgtgtgttcgaaaaaccatttgggaagggcacaaaatgcgggtgaaagccgagtgcctgaggcaatttcttgcttatcaaaaagagcaggaaaataataaagaatgttaaattaaatttaaaatttacttgttcattcctctgggcgaggtcgagttcttcgaatgccttgagtgggtcagtttcggttgtgctggccacgaaaatgcagccgatgtacgcccgaaggaactgaattaaaaaaaacgaaactcatggaaattacacattaatggtcggtcggttacttcgtgctccgcgggttccaaccaatgaataaaagtcgaataaaatgttttggaaagaatgctttgaccgtcgtatttgtagttggactcggcagaatgttcaagaacactctgacaatggcaaggaatatttgagtaagtattttcagaatattacttcttgaaggatgaaacgaaaaacggtattctccaaaagaaagcctaaaattggaaattcgttaagtttaaaatgttagattcgtaaaaagaaattatgaaaaaccggcggatgataaattgcaccttttcgccgtatgtcgcgaaagtcgagacgtaatcggtgagaaacattttgactcaacggatcctaaagcgaatcattgatggggaacacaacttgcgaattcacgaactctgattgaaatctcggtgcaggaaaagggcaacagcaaatcgccaaaattaagtccgtttttgccaacagaattattcgctccatcggtggcgaggacagcgaccaaaggacagaaaacgccaggcccttccaaatggtcagcacagctcatgtctcaaaaatggatcgcaatcacaacaaaaaagaaagtaatttatcagccaaaactcaataaatgtgagaacaatgggaaaatgtaaatgataatatttatttatcaaaantattggggcgctagttgcaaagaggtccattttgaaaattttttcaacttttttttggtcaaaatttttttttgtttttttacacataatgatgaatattaagtattaacagcacaattatggtgaataaaatgtatattcacgattttta

SEQ ID NO: 19194 - DNA, 1795 bp, Heterodera glycines
  unsure (1)..(1795): unsure at all n locations
caaaaattttacgaatgagagagataactatgtgataagatttttgctgcaaattcgaagtttaataattgcaagcataaaaaaaagcagagatctgtccgtcggtcgctactcgtcgtcctcctcctccctctcctcctcgtagtcgtcgtcttcataatcacccgcaaagtcgagatcttcttcgtccgagttgtgaatggcgttgttgtaaaagccgctgccctggatttgctggtaacgagatcgcttcgccggaattggcctcgagcgattgtccgtgtcattgggcagtgcgtagtcgcgatttgtctgcggcggccgtctccggcgtcggtttcgcaatgtgtcgctgaaccatgccgagtcgatactgtccaaattcacaacgtcgacagaagcgcgttgggaagaaaactctttgagaaacggataaattttgcggatagaagcgacaacattcgcctcggaagttgctgcaatgtttcactgactgtaattaacaaaattcatttttgacggttcacctccagtgactgtgacagtgccagtggtgtgaattcgcaaatttgcctttggctctttcaaattccattgaagaccgaccatcaattccggctcataaagggcttccctgtgctttcgacccaattcttgaatacgaatatcaaaaggcattcgacaagtagccaatatgttagaaacctaaattttttaattaatttctttgaactcgctttttaaataatttttggtaaaagcattttggcctcaaaaagactactgagtgctaaggatggatgttcatcttcgctttaccctgtagttacggatgcaaatccgctggtccaaccgtcccgtgctccgttggatcattcggccaattgcgcgtgcgactctcttgcaatcttcttcgcttaaatgtgcagtttgaatgttttgtttccttttgccaccttttgcagccgtgaatcaccactttgccactgtttgcaattcgaattgaacaggacggcttgcgcaactgtttgtgcaaaatctgaacaaagcatgaacaaaacaagtcgaaattgaaatgccactgaccccttttgctctgttatagtccacatttatgctgccatatgcgacctgtcgtaagtcaatgtgcatgggcaattcatagcagcacaaaacattgtggatctgaacaatttgcatgatggaacaacattttaccatcagcagaatggtcaccttaacaacaacttcagtcccatccacgagcacaacattgagttggttaggctctccagaagctctttggggatgggaacatgaactcatcgccccattctgttcggtcgttccattccgttcaggtcgattcacaagctgaagagaaaagaaaaaataacatgccaagcacatagttgatcattttatttgataaaagcagcagcaaaaccgggttgttcggatgtgcttgccagtagttgtgatccatgatttaaaaaaccactgatgaatgaagtcagaccaaacgaacaaaaaacgccttacaaacgattaaaaaaacgagtaagaaaataacatcagcttgtttttaatacaaaaaatttaaaaaaataaaaataataaggcaaacagtaaattagggtttccgaaaaatagtttaagtatttttcatcatccaaaaaaagctcattatagtaacagcgaaaatttatggcatattgttaagatgaaaaattaaaataancccaaatgatctancggtttaaaggattgtgccacatttcttctttccgttgcg

SEQ ID NO: 19195 - DNA, 1070 bp, Heterodera glycines
tggttttatcataaatatttaagcaaattctaatttgagagaaactttagttaagttccgttgtctgtttaaaatagttctaatttggcagattttctccggtgctcctatcgatcgccgtttatctcttgtttaaaatgttaatttattttcctatacatattctttaaaacatttcctttatacattaaaataaaaaattttttgattgataaataatttctgcttgaatattaaaatcattaattttatttttgtgatattcggtaagaatttcgttaaatattaaatttcttgcaatctctgttaaacacattgtattcaatcaatgggttatataaatttaaacaatttgagtaaaaatatataatgcataataggaaaaataataataaaaaaaagactgggaaaaagtaaataatatcagaatttaattgtaaaaggcgattaaaatatctcagcatgaacgaagatgcataatcggtttaatctattactataatttaaaaccaaagtacccatagcttaaaaataaaaattacatgtataatctttaaattctatgtacacactttcagtcaggagatattttttataagggcaaaaaaaataataaaaattaaaaaaaaaataaatttttttttacttttttttcttattattaaaaaaaaattaaagctcaattgataataataaagattaaaaacattgcaatctttgataaagtcataggaacaaaaaaagatgcagaaaccaaagaaacattattttataataattatacatttatgcttatattaaatacatgaaaataataattaaagtatgcaatgtaatgccaccgaatttaattaggtttcaaactatatcaagctaatagaaaaaccacttagtttttatgagaaattgttaaaaatttaaagaaataaattggctaagacaatgcttttatgaaaagcaaaagttaaatagacaatttaggatggaaaataatttcgttaaagataaatttataaataattttttttggtagcacaagaaggatttttacttaatttcttatcaaatga

SEQ ID NO: 19196 - DNA, 2019 bp, Heterodera glycines
cagtgttggaatagataacttaatcgatcgatttggactgggaccgcgcaaggacttgggctaccgccattattaaagtaaattcagaaaattttatttgaaaatagctctaacttttgaaaaaaaaattatattaaaataaaataaaaagaaaattaattttaataatttatcttaattatttttaatgaaatattaaatttataattcaaatatataacaagcaatataaattataaatactaacaataagcaatattatagatgaataaaaatcacaactagcataagtgaattataaaataaataaataattatataaataaaataaaaaaatcagtaagatatccacaataaaaaacacacttatataaaaagaaatatacttttatatgatatataaagtaaaaattgtagcacttaaaaattgaaattcgtttaatacattttttttactgtgaactttctattttggatttttttcttatattttttcattttttttacatattttgtagaattttgaaaatttatagtgaaaaattttttggaaatgtaccattgaaaaataccaaaaagtaattttaaaaatactaaaagatgattctaagcttatttaagtcatttttatggcattttgtacctaatttcattttttacgaggaatatttttttccaaaaaataattatggttatttttttgtaatattcttattttattacaatttttatttaaattacatcatattttggccactttttggatttctatatccgtttttccatatttcgtgatttatatccatatttccatatttgtccatattttggcatttaagtccatattttatgtccatattttggcatttttccaaaacctctattagaacggctcccagcagcatttcgcatttcgggttaattttcgccaaaaattagtaaattttagctttatcatgtttttttcttctaaaatgatttttattagcctttttaaatgtattttactagaatttaatgaatttgaagaaattttgaaaaatttacacttcaatttgaaacatttatgtccatatttttgcaattttatgtccatattttgcgatttattgtccatattttatggccatatttggtgattttatatccatataattttacgccctaatgataagtagggatgggatttttatgtgctaaaaatttctgaaatatgtaataaaatatgtgataaaaaatcccaaaatatgtgctaaatccataaaatgccgaaatatgtgcgaaaatatgtgttctaataaccgattgagcatattaaatgcaatatttgcggggccttgctcaaattttcatgcccagacccggatgaacacaaatttcattgaaacttactccattaaaaaatgaaaattaacaatttaacatcccaactctgctgatttatcagcattttgctgcttatgcttatcaagaggtcattgctgatttttttataaaatttactggtttaaaatctgcctagtccacccccaaaattctgtttaattttaaaaatttgacaaaaaaattgccaatattcagtgaaaatccgatgaaatggcaaaaaattctaattttcccccagcgtcacctaacgacgccgcctgcccccctaaaatttttttttctgataactggctcaaaatcgtaaaaattggactttttggtgaaatctgttgataagacaatttttattattgcaaaaaccacgactgtcatgtttatacttgaaaaaacggaaattttgttaaattttttgataaataaaattttattataatttaataatcgaaaagaatttaaatttacaatatgtgtttatagtagttaacccaccctacttatcgcagtgcgcgaaatgtttttcgcgcacaaacgccagggtgtcgggcggttgtgtgtttgatgttgccgcttttggcaggtgttcgggagtggtgggagcgggattctctttgaaggggccgacatcccgagggt

SEQ ID NO: 19197 - DNA, 1411 bp, Heterodera glycines
cactgccacactcgaagagcaagaacgccaacgcaccctggtcttcattggcctcccggaaagcaatgccatccgcccatcggagcgtgttcaggaagacagggaagccatcacaaaaatactggaccatcttgaagttgaggcccaaccaacggccgtctttcgactcggacgatacgacccgcagcgaacaacaccacgcccgctcaaggtggtcatgccaacgcccacacaccaacatgtggcacttggaggatggaagcgcgagcgtgttcggctccgttcccaacagaacctgaaccgtctgttcgtccgtccggcgctgtccaaagaacaactcaaagaggaatacgaagcgcgtctccgaaaacgtcaacaaaacccagctccaccggcacctccaacccagctcccaaaaacgacgaatgaccagactcccattgttgcaccaaaccagaaggaggccagcgaagacatgtccaaaccgccggaagtttttgaccaaacaatcatcgtttgttatgaagcattaaaatcattgccaccaaccgacaaaatttctcaccaaattcaatcactcaaagaacaataccctcatcttttcaataaatagttctttcagacctccaaacatttcctcaattaaaaaaaatacatttgttccagtacttctaatttctctcaaaatttttcctcaaaaaaaaaaaaaaaaatttttttttttctctctttttttaaactcttaaaaaaaaatttcttttcgttggaggtctgactatatttttctccaaattcaattgtcttatttcactgctatctgactttatactttccaatcaaatttcacaatgttttcttcagtttgttttcttttatcaatacttcacatttgacctcatttccaccaaaagtgtaagtggcatatgcccttcttttggtatttttatttttgaataaataaatattttaaataataaaccggtttctatagttccagatatagatgatgattcgttattgtttattaattctggagtttcaacaatgaagcgttttttttctaatccagattttttgacatcgaaaaacatagttaattttcaaccagttgttagaactttagatattgatgagattaatgtaaattcttttcatcagaccacttttgagatgttgggaagtttttctgttggaggaaattttaaaaaagatgttattcctattgtatgaaattgatttgtatcaaaaaaatgattaaatatagagattagtaagctttttattactgtatgggagaatgatatagagagttataatatttgaagaaaagtatctatacctgaaaaaaatattgttttaggagacaggtgggggtaatttttgagacatgggcgacggaccttgtggacct

SEQ ID NO: 19198 - DNA, 2633 bp, Heterodera glycines
  unsure (1)..(2633): unsure at all n locations
acaggaaatttgtcttttgcgattacaaatgcgaagtcttctagtgaacacagtgaaataaatgacaagcagaacaaaactttaataatatgagaaagncgtggaaaggnaggttgcggtagacgacagggacggagatggaaaaggttttggttcgacctcatccgctattgtaggggcatctgtaagaaacaaagacctttaaaaaagacatttgctgtggattctgacaatattctgttagaaacgcacagtttgcccactttctcctctttttccccattggtcttcgccctttcataaacttacacataagtggcgggaaaaacgcccgtccgattgttcagtgtcccttcccaccaattttcgtcttcgcgttttgtcactaaaaacacaaaacaagacactaagaaaaaatggacggtgtgaaaggacccgtgataatgtcgccacgttgaaagccgagttcgcccgcttcttgaggggtgaaatcgaagagggcctgaaaggataaagcgaatgaaatgttattcagactacgaattagcattagcgagctacaaagggcttaaattattagtttcaattaaattgaaaattttcgttttttatttcgggaggtggggggggggcaattgcacgccctcccctggacaggtccttataataaataaaaaaacacctgaacaaggccatgtttattggaaaaggcggagtccatggaccggaggaggatgttgtgggttttcgatatgctattggccctaaagaaacatttatttccaatcagaaagcttttagtgcaacttaaatttttataaattgtggctttacctgtgatagttaatgagttcattcagactgttaaaccgttttgcccacaggtaatattggccaactttggtgtcccttagcactttaaaatgttgcacagcattttcaaatctgaaaaataatttttaaattataatttgtcttcgattttctttcaaatttgttagtcgtctatctaagtaacaagctctttaggaaatagtacaggtggttctacctttctttttgttttatttattacaattaaaaaggtaaaaaaacttgtttatacatgctcgtggggtcgctaagaacaaatatgaaatacattttgaccaattctgggctcagggccaaaaaaaaagtctaaaattcagaataaaattcgcatcattttcatttattttttcaaaataaaattccggggttcttttaacgcagccaattattaaaataaaaatgcaaaaacattggaaataaaacctacagcttacaattaacaaattttattattcgagcattgaaattatttgatgcaaaaaacaaaaggaaattttgtctttttgtttgagttcattcatatcagcactattgccgctctttctttaccttacggaaattgtgaatctacccccccccccccccttagcgagcaacggcctttttcggcacgctttcttcgaattttttattaaattttaaaaaaaactcgttcttttggtttattaggaacttacaaaaatttgctgacgatcaaattatcgcatataatcacttttaatcgcttatttaaagctgattagtctatctgtgattgaaaaaacttaagtttgatccctatttggacataggcgcaaatgttcgaagcgcaaatgtggggtaaccgtccgacgggcgccaccggtgaaaattttgagaatttaaaaacgtttcttaccctcacaaatcaattgagggttaacccatatgaatattaccaagttttcgctgggtttacccgctgctgctggtgaggctccccccccccccgcttactatgttctttagtgagggcattaaacaaaatttttttttattaaacagaattattttaataaaattattttaaattttttgtatttattgaccgaataaaaataacaaattcaaacaacaaaaatcaatttgaccactataattattcgtagctaataaatttataccattggatagagcaatctttgaatataaatttacaaaaggctataaatttgtaaaacatttactggttaaattacccgagttaattttgtccgctttttggggttggggaaaggtgaaggaacacgaagaaagctttgtgatgccacagttttctcttaagtcacctgtccctcggcactgtttctatttggcacttttccaatttggggggaacgatttttccgaaaaagcaaatgtccctttttaaagtgccaaggcatttcttccctttcagttttgcctttcacttaaacaatgattggctacgttattgaaaatctttccaaccgaaaactattcttcattctctccctccttttgcttctccaatcacttttctttctcctcggcgcacttttcggtttctttcatttaatttttatttttaattagttttagctaatttatttatttatttatttagctcccggcccttcttcttccatggaatttgtacttagcgcatgtgtggacaaaagttcgggtaaaagtggtgaatggttcactctccgacccgacaaaacggtgaagaagaagccgctaatgaggataattaggggaggggagggggggggggg

SEQ ID NO: 19199 - DNA, 1050 bp, Heterodera glycines
ttttatttttgtattcgttgtctttcatttattgttcacttatggttcgttaaactgctgaagtaccgtaggttggccaatccattggcattttgcctttgttctttcgcttttccttttttgtcagatgcttcttccgttcactcggctgctcttttcccacccgtttctcgccatttcattttctcttcttttttcttttgttcttccaataataattttgcttctgttcccgcttcaattgggcagcagcccggaaaaggttttgccactttttgtgctttaccctcgtttttctaagggcttcgaaacggacgggacgccctacgccgggccccgcttgggctggacattgctgcaagtaatcagccgagactaccaattggccgataaattgataattaaagcaactttgatctcctctctctcctccctcatctaatgggtccaaaacgatgtttaatttggcatttttagccctcattattccgaggaagtcgagtttcggtcatttctgcagagcagaaagagcggtggaaaaggaagtcgtggacggacgaactgttctcctcggttggctcagtggtctgctacgatgggcccgttccgtccagtaattcgccgtgccgtccccgccgttttccccgcgtccctttttcagtgtcttttctctctcagtttattctcactgtcccttcgctggaacacctcttctccggggacattcttcacaacatttgccaatttcaagatgatttgagcaatgaattggctgccttccaacagttcaccccgtaattcgcaatttcctttttgaattgaatgtttccttctcagtcatcgtaacatttggagctttcccaattacgtggcgtgccttactccgtcaaatcgcgtgaattgttcctttattaatgcccaggatgtttttgaattccgtcaggtacgccccccccccctcctttctccttcatttttcattgctttttgttttcgcttttcaatcgctgcctttttcacccggcgcgcaattgtttcgtgccgtcgcca

SEQ ID NO: 19200 - DNA, 1669 bp, Heterodera glycines
gtgagtgtgccatcgtccttcatcatcccccttgtggtttttctgggtggtgggcttgtcatatttttccgaccctccttgggagttgttctgatcagtgatctgccatcgcctccgttaatttcccttcctcccccagtcagtgcctatctgtgcgtcaatggtctgtcgttgccccgttacaaccctttgcaacttttccgttcctcaagtgttcatgaatactttgatcaggcattacttcctttttccgatgttcgttacttctttttccatccaacagaatgctgagcgtttgtttccgtttgtctccgataaaatcgcctccattcctttggccgatcgtctcgtttgggtgttttttatatttggaatcatttaatcattgcagcaattcatttcagggaattcgggcaatctctgccaaattttacttcgatgccaattctctgccgactcaattggaatccgacaatcatttccatctgcggacagttggccaacttcgagctttggcccaacagttagaacagatgcgtgcacttccattcgttgaacatagtgcccgattttggcctgaaaggtaatttgtttgtcttcaggaacccaaagggcatggattggattgcctttcatttgtctgttaattgggacggttaattatctaattagcccatgttttccaaggtttttggattggagtgttcgtctgagctgcgcgtctcgtccttctgctgaatcggtctgctgtaatgtgcagagtccgcactttgtggacgcacagttggacagttgcatccgccattccacatccgtgctcttcaccaattacaacgacaccctcatttgggacaattccacccatcgactcatcggatacaccgtgggcgatgccggccaccaattcgacaaagcattcgctttttccaggcacttttgcccacccatttgcgctactcccaccgttttgccaatctttccgccgcgttcgctctgttcgaccaatggctttctgttggcactcagcagttgtccttccttcccggatggtaatttgtgcattttaatgattcacaaattatgaaaataaggtacaccaccgaatggacaggtctgagcttggcactttgtagttttattctgtgttgcggtgatgtttagcgatgtcccaatggttcgacttgcaaagggcgattatttccgactgtaaaaaggcatggcaaaaaagagaacggaatggacggacaatggcaccagtgattttgtttttaagaagccaaatttaggtgaaagcaaggagaattaggcattcaattttaaattgatggaaattctgggatttttatcagcctattttccatgtttttggtttttaataaaaataattattttaaattttaaagaacacttgtgcctttgttttccgttgtccgtccgtctctttccttcgcttttccccatttcccttccccccccccttcagtcaatttgcgtttcattcgccgtcgtcttcatcttttcctctttgatccttcggttggttttacaatgcctccctctctctcccttcgcttttcccttcgcttttcctttttctctcatttcccccctttctcagatggaaagctttctgtgccacttttactattttttgtattgtcctcacaac

SEQ ID NO: 19201 - DNA, 2093 bp, Heterodera glycines
cacaatcaaacaaaaattggatttctgatttccttttcatttaccgaacaaccccaagtcagttataaatggtctttcctttgccgagttgttccttggtcgtcaacctcgcacgccactttcaatcttggcaccgtcatcccgttcagcgcctgtgcaccaaaatgcctatcaacgcaaaatgaaaggcaatacgatcatcaccatggagttgctgatcggaagttcaaaatcggtgacacggtgctcacgctcaattatggactgtttaacaagcctttgtggcttgagggtaaaattatcggtggaaaaggtttgatttggcaagtccaaataccatcattgggtattacggtaaatcgtcactcgaaccaaatgcgtaatttcttcccaaaattcccgttttacaagaatacgaagacacggaacacgtgcaggaagacgatcaaaccgaaatcacacacgttccgagcccaccgcgacaacaagtactgccagccgaaccgcgtccttagcgaaatcgaaaaccaccaaaaacattggtgatggacccaaaagctggtggacgatatgaacttcaagaataggaggacaacaaaacttgaaggggaaatgttgggaatggacattcattcacattttaaatttcccgccctttttaatgatgacatcactattattgatttcagccattcccttttgacccgtccttaaatatcagtccttcctctcagttgtcgcctcctctacacatcatttttttgcttctttactccgccatttcttctgactttcattttcatatttatttcttgtttgtcttttatttatttcttcattaaatttgcattttaaaagtaaaagacacaacagaatataaaaatgtaaaattaaaataagttagataaataaaaaaaacatcatactcagagttaaatacgataatattaaaaaatgatataataaagttaataaatataaaaaatctcgcaagcaataaaggaatatatgtgatgtaataattcaaaattcaaaagaaatatttaaaaaattgtataaacaaataaatttattttattttatttattacaaatatgtttggcacaaagcaaaaagttccctttaactgatgattatgatgccaatgtttatgcctggacatcagccgaaaattaaaaaaacaattatatgttggaaaacaaaaatttctgactttgataaaattgaacagatttcattcttcagaatgttaatatagtcatatatcttaatgaaaattaattaatatattcatatatcttttttaataaataaaaaattatattttaaaaaatttagtaaaataaaataaaaaattaatttatatttaatcaaaaaatacacaaagtaatatttgttaattgcttttttaatagaaacaagttgattatgaactaatgttataaattctatatttgatgcatttgaagaataaaaaaatgaataaaaaatagtgaaaaaataatgaagaaattaaaaaaataaataaaaatgattttttgaaaataattaaaaatctgaaaagctatgatacttaaaagaatataaatttataaattatgaaaacatatccaacttaaaggaaacctaaaaataaattttaaatagccaaaaatatattaattaatagaaattatgtgaaattagaaacaatcattaatttgtaacaaaaacatttattctctctacggtgcatgcagcaacgcatgggcatacgttgtattgagcgagaaggatggcttaaactattgcttttcttgccacagtcctttaaaaatttgaaagtgcaaaattaaatggtaaaataaaattagataaatattaaaaaattttaatttataaaactattcaatttgtagacaattttatttgaaacagaaaataaaataaataactaaaatataaatgcaataatttttatttaggtagaatagaaattgagcaataaaatatttgtttttaaatttaaaacataattatagagtatttagaaatgagaccacactgaagagttaacgtgggatgggagccttttgaacacttgaaaaagccaa

SEQ ID NO: 19202 - DNA, 788 bp, Heterodera glycines
  unsure (1)..(788): unsure at all n locations
attgtaaaagaacaaaccggtttttaaaaaattaatgctcccaccaaggtttntggggncaaagtttaaatttttttttaatcaacagcgggcgcatagaatttttaaagctacgcgccaaaattatttcggaggcataaatgcccgttgggaaaagatgaattttgcaccatttactaactgaatttaacacaaatgacttttattaagggggttttccaagttttcaaaataacaaaaactctgtaaaatagtgaatgcagaaaaattgttgccaaaaatgaatttccatccaaaaaaaaaatagttctgccttacagcaataaccatttatttgtttgtctctaaaaatgattttttccttttagctttcatattgttttaacaaattgcccgtaaattttcaccggatttaatttttcatcgaattttcaatgcccaaacaatccctggatttgattgactattttggcccgttggccgcatggattgtgttcttctccgtcatttttgtcatctccgtcacatgcattttgtggtgttgtgtcagcgaaacggatgacaccaccgtgttcgcaaaggtcgttaaaaaacattaataaattttanaaaactaaaatagtggaaatgttttttaagcgcttttaaccgggccaggcgtcctgaaattcttttttttttaattttttaaatgatggaaatatttttagtagtaatctttggttgtgcatcttcttgagaaatttggtcctaaataaattgtgtcaattaaaaaagttttgaaaaaa

SEQ ID NO: 19203 - DNA, 1623 bp, Heterodera glycines
gcagctgcagcagaaggcgcaatgaatgtgagaggaaggggacggacgacgacaacagcacaaacaccggcggactgatcaacaacaacatcactaattggctttaaaatgcgtgcggcccatccaattgacccaaaaaaaaaattccatggaaaattttgatcattttttttatcattcattagtggaggaaattgtggcaacagaacatcaccatcttggcaaaaatctttggaagcattaggaaggggtgagggggtaaaggttttaataaatgtaatccaacaaaaatttaaaattcgatgatctgctgcaattcttttttttaaatagtcccagaaaagatcgcatacatatgtagacactttgtatttcattttattatatttaatgcatgttttacataagttacataaaaaattgaaattaattttcctaaaatgtgactaatagaaaaaatagtcaaattgaatttaaattgggaaaaatgaaggggaaaaacattttaatgccagagaaaatgcgtctaaattttttgttttcaaggacagtcctttaaaattgaaaagcaatgtgcctgaaattagttacgcattgttttgcattgatgcaaaacgatcgcggaacaaaattggcacaacaatgaacacagtgacagtcaaaaaggtcaacagggagaaggcgaacagcagaaagcggtcaatgatcgatgccaatgtgcgccattgccacacaatgcgacgccgttcgtcagccacctttttttgtttcaaaaaatttcgtcaatttttcatttcgagggaggggggggggagcagcaatcaatgttgtttattgttgaatgagatttccgtgccgagaaatgtgtgtttttttttgtttcttgtaatcgggaatagctcgttacccccgtgtcccgaggccgcaaatgtccgaggcgcaaaatgccggccgcaaatgccgtttttggctggggaacgcaaatgtcgcggccgcaaatgtcagggcaccgttcccccactccccgaggtaagaaaacggattgcattccgctgattcagtctcgattctcgagtaggcctattatcggaattttcctaattttttctttcattccattttattatccccgtctaccgtacacccacctcttcacggatttcaaattgttgcagggtacggtagacgcggttcagtattttgcggaatttctcctcaaattcggtggacattgcgggacgtacggcgctcagccgaggcatgaccttgggaaattggaaatttttcaaattttttttttaaatttttctgaacacctgctccgttaacattcggttcaatatgatgctttcgcggccgccgttattttctgcacgcggcgaaggcgtgcgcagaaattgttccgatgacttaaccgagaagcaaaaaacatttagatagatatgaattattaaaagttgcaatattttatggattagagctcccctagactttgtattttttttttagattataattaaaatttattctatcgaagccaaaaatccaagtttttaaatacgaagaaattattaaaacccaaagaaattcctgaaatctacgaaattgaccattttcggggtt

SEQ ID NO: 19204 - DNA, 1810 bp, Heterodera glycines
  unsure (1)..(1810): unsure at all n locations
tgcaggtcttatanaggctcatgggcttggagatnnaaaggaatcggaaaaaaaaattatctcaacaatcagtcgtgaaacagttcaataattcggaagcagtgccatattgggaaaagatgcacaagtagagtaggctcgaaataaaggcaactgccgaagattaacaaaaattcaaatttattggccccgttctgctttgacaggccatatctcgccagggagtggcggtagaccctttgttgatacatttgaaaatgtagagcgcgtctagctcattcgaatagcatcaaactggtttgtttttgtcacgaaacaacccgctgatggccacgtcgaagaaaagtcccaaaatttgacatccataaaactccattttttcataggccagcgtgtttaaagcaaacccgaaactgataggaaatttaaattgatcataatagaagtttaatttttatttgtcccatgcattttctgggaaatcttttcgcgaaaagttgaaaaatttcaaaacggcagacaacagatgcatttcaaacaattcaacaatataatataaaatttaggcaaaaatttttgttccttcctctttggaaatggtcttaaattttgcttgtaaatattcagataacaagttttttttactgaaaattttttacacactacaggatgaaacgcaataaataatgtttgtagacaaaagaaattggcgaaaaaaattgcctcaacaatcagtggtgaaactgaaagaaaaaaacttccccaaaaaatcggagcttttccgacggcatcagctgcatttccaacagttcaacagtataaataaatattaggcaaatgaaaaatttttttccttcctctttagaaagtgtctaaaaatttttgttgttaatattcagaaaacgtgtttttttagtgacaattttttttcaagagaaggggatatgaacaatcacttataaggctcatgcttggagataaaggaatcggaaaaaaaaattatctcaacaatcagtcgtgaaacagttcaataattcggaagcagtgccatattgggaaaagatgcacaagtagagtaggctcgaaataaaggcaactgccgaagattaacaaaaattcaaatttattggccccgttctgctttgacaggccatatctcgccagggagtggcggtagaccctttgttgatacatttgaaaatgtagagcgcgtctagctcattcgaatagcatcaaactggtttgtttttgtcacgaaacaacccgctgatggccacgtcgaagaaaagtcccaaaatttgacatccataaaactccattttttcataggccagcgtgtttaaagcaaacccgaaactgataggaaatttaaattgatcataatagaagtttaatttttatttgtcccatgcattttctgggaaatcttttcgcgaaaagttgaaaaatttcaaaacggcagacaacagatgcatttcaaacaattcaacaatataatataaaatttaggcaaaaatttttgttccttcctctttggaaatggtcttaaattttgcttgtaaatattcagataacaagttttttttactgaaaattttttacacactacaggatgaaacgcaataaataatgtttgtaaacaaaagaaattggcgaaaaaaattgcctcaacaatcagtggtgaaactgaaagaaaaaaacttccccaaaaaatcggagcttttccgacggcatcagctgcatttccaacggttcaacagtataaataaatattaggcaaatgaaaaatttttttccttcctctttagaa

SEQ ID NO: 19205 - DNA, 1274 bp, Heterodera glycines
catttccatgcgctcagtaatttgcttcgagaccccatttaattgctccgttttcaaacgatggatgtgcgaagattagacgacgatacgctcgactttcaatactctttggtggacgggaccatcgatttgtcttacgcgactttcactgccctcaaaatgggcattccccgagacattgtcgaccgctcagaagaggcaccccttttccttctttttttcgctttatctattacaattacatttgtttctttaggtttacattcttttgcgtgccagcggagcactcagcgaattggcgccgattgacgtgcacacagcagtcaaaacgcagggaacagatgtttttgtggggggagcgtacgatggcataaacaacagcaaacgaatatcggatgaacagaatggaattgagaaagaagaagaggaagagtacaacgatgaagaaggagaagaagcggaaggggagaaggaggacagaaaatttgcaacaatttagccagctcatgtgattgtgaatatttgttttgtgtttgtaatttagcacttctttaatcatttaattaattaatttaataaattgttaattggtttttccttctcttttttctccgtccgttttccattctctgccgaccatcgaaatgaacgcgatcataacgcaagtgacggagcaatgaacgaattggagagcgatcaccagcgaatgcatttcgccaacgcgttgggcacacagcgaaagaattgtcgtgaaaagggcgacacaaatgccgacgggcaatgcgtcggcgacgaacatttggaaaaagggcggcgacggcttttgcccccgggggatgccgtcgttgccctttcctttcgcatttagcctaattgttggacagaaaattaaattgagtgccactgccaacccacagcgtttgaattgtccaatggacgaacagtgcgtacgccaaatagggaaagggatgttcgggagggttccacaacgaatgcctgaatgggtacggtaatgccattgctaccgtaggcggtgtgcactttgtgcattcgaatctcctcacattttctgcaatttctgttcagtgtcacccaacagaagaagcacgctttggaccggccaaatgccaaggatcttttgaaatggcattaattagtcactaattagtggcaattaaattggacactttgtaaaaccaacggagcgttctccgcgtgaacatcgcctgggcaaggccataacaaaaaagggcggagaaaaggacagagccaag

SEQ ID NO: 19206 - DNA, 1902 bp, Heterodera glycines
  unsure (1)..(1902): unsure at all n locations
accctccgctgaaccncctgcagccgctgcnnncgcgcatgtnngaaaagtgatgcgtccctccctctgattgacccgtgccgtcgcgcttatgcgccgttgccgtcgatttctcgcctcgctcgtctttaccctcttcagtcggttgggaaatacttgtgcaacccggtttttcttagtttaaaattttccaagtgccaatcaaattcggcattgttttaaaaattgccagttttttttggcatttcctacttttgtctgtctttgttcagccgaccttctctccgtgcttctcatccctctctcctccactgatcattcccccgcatttcttctccaacacatcgctctcttcgagggggcactgactctcgcgctgatttgtgcctttcgtccgtttggcactgtccatttcaaccccggtcggcctatttccctcatctaattagcattcattaattaattattgccccattagccgtcactttggcttctcttctcactctcaatttgcctcttttgctcggcttcgctttactttttgcccaattcttcggctctttcttcggtgcccttctttttcattcgtccatttcttcttccgcgtttattgatgcttctcttcaactcggcacacttcgcacaatgaccgaaaatttggaacaatttgagcaacaaaatgttccgcgttcgcccgtcgacgacttttcggagacggacaccaatggacggatcagtcccttctccaaccgattgcaggcaaaaagaccaaacgatgttttggcacttcgtctttcactttcttctctgttcagatgttcatttctgagtgtctctgctcccttctgatcgttttggcccatttgttttgtgatttaagcaattcggctgtcctttgtcggcatttttctgttctgcctcaggcactttccgttgcatcgactcgagtaattaattaatgactaatcaattaatggcacattctttgcccgtttcaattaattgttatttgacactttgtctttatgttgtggccaccgctgtcggcgcccgttcgcccctcggccaaagtgccaatttgggccgggccacggccaataccattctgacgacgatattcacgcgccccgatgagtttgtcatttggcgcttcttatacatccatttctttggtgccttttgttcggcaattatcggcgccgccattttttggtgggggcgggagggatatgcttagagcattaattattatattatttataaatattttaggattgtcaaatgcgctttggtggataatcaatcgccataaaatgaactcttatttctcgaaatgattcttgctacgaaaatatctatttacgtgcctaatgagaccactaaagaaggcctaattaacttgagaaacaattaattgggctttgtccaatcgaaggaatgtttgaagcaaagaaagggattgatttgctgataaccattgctttgataattgattgatttgctttggacgtcagcattttgttaagttattattaaaacaagcaaaatgaattttaaatgttgcaaatcggcgccgcttttcaattttttccgccttcgcaattttcacaatttcgtccattccatgcgcccaaattgaatcgatcgatgtttttgaaggtgctacccctccctccgccgttttgcccccccccccccctcattcactcaacaattacctttgctctctcttatcatttccccaattcaatcatttctaatatttcgcatatttttcatttgaaaattcctagatttttattttccttaatttatttattttggactctctttttaataatttattcaaataaaaatcaaagcgatggtgaccaatgctcagaataggcccaagagtgttca

SEQ ID NO: 19207 - DNA, 1585 bp, Heterodera glycines
tgcaaaattttttaatgtatattcatgaaattttgttcaacggggtttttggggttcccgatcacactaatctgtcaaatattttgatcaattcccttttcctaacctaaatttgaacaaaaaaatcataaatcgaaaaattcaaatttcgatttttgttcgggttcgggttagggattagaaattggtcaaaataaatgtcaaattcgtgatcagcgacccttaaaaccccggagaacaaattttaacggttttttatcacaaaaaaattttgaaaatcaaaagggtccctcccccctttttgataaaaaaaaaattcaaagccgcccttctttaaagtagcgtcaattgtatcaattcatacacaatcacagaagttcaaactttattaccaaattttataacattcacgaaaatgtcgtctgaaaacctcgcgaaactctacaaaaacaccggaaagtcggaagtattgaagtgtttctctgcttcattaaaaatattctcattttaggactcgcgtcgacgtcgaacagaagtaagtcaaaatgatgttcagggattagtcattgattatgagatttaacggatattatccatgaattccttctattgcagaccagcgttgagttgcgcaagaagaagtgcaatgaggagatgatgaaacggcggaacatcaacttggagtgtgcggacgactctgccacatccgccgaagaagtcgtaaccgatggggaaattggcgaaccgacgggccgtttgtcgcccgaaatgctatcgttggaagacgcagttgaagttttgcaaaaagaacaaaatgcggagagattccgattggcttttgagtcggtcaggcgcggtcagtggataaaaaattgatacaatttctgtgctcctaccgaggtttccgtttttagttttgagtcgcagcaaatgccctccaattgacaaagtgatcactcttggctttccttgtgctctcgtccaggcgctccattatgacgtttgtgttttttatttgctttctccacacttggctcattttcaggatgacaaagtgaagtttgaggcagcttggtgcatcaccaacatcggtattttgaatttgatgacggcataaggtttaaaatattaattttccagtttctgggacttcggaacagaccatgaccatggtcaacgcgggtgcggttggtccgctgcttaaactgtgctcctctccttcgctcaaattgagtgaacaggtccagttgtcttcgtggatatgttttgtttcgtcggcagtgtccaaaatatttttttgttcccttaggctgtttggtgcattgccaatatggccggagatggcgttcaacttcgcgacctgctgatttccgagggtattctgccgttgcttgtcgggttggctgaccgcgcggatactttgggcatttcgttcgtgcgcattctcacctgggccttctccaacttgtgccgccacaagaagccgcaagtgccattgcaaatgttagccgtaatggcaccgtcaatttccaaactgatcaaatatgaggttgacatatctgatgtgagtaaaactgagttctct

SEQ ID NO: 19208 - DNA, 814 bp, Heterodera glycines
gtgaatttcttcgtttaatcccttgggggaaattggcacaaaaaaatgaatgatgtgatggagggagggatgggttgaacaagactgtcatagtagagcctggcgtatccattcccttcgcataaatggcgcaccaatgagagccctccttgtggtgggcgtccctgttcacgacgagcgctgcggggtactgtagtgtgaagggaggcggcaattggtcactggcgaagcagccccgaaacactggctcggtctgccgattttcgctcaatatctttataatttggaggcgtccattctttagccaaaaaattgaacaaagttgatgaagaatcagactgaggatgagcattaaataaagggcgaacaatgccccgcaaatggctttctgcgcaaagttgctttccgctggtagatccttactcagttggataagcggtggaagaacctcagaaaaggtgttctttgcgactctttaaaaatagtaatattttttaaaaaatcacagaaatgtcctgatttggcgggccaggccgttttcgtacgaacacatgtttttggggcacccccacaaagtgtccaagccacgaaatgtccaaaagagtaaaaacccacgaaatgtccaaaatttttcaaaatttataaatacaaaatgagtctaatttaggatttttagggttttcggggtcgctgaatacgaatataccctttatattaccccttgcctaaccttaggcccatctgaataataaaaaactcaaattcgagacttggacatttcgtgggctggacattttgtgggtcagcgacagaa

SEQ ID NO: 19209 - DNA, 1927 bp, Heterodera glycines
tcatttcaataaattttgtacaatttcaaatttttgttcatcagtttttgatttgtaagaattcttttgattaagtcctaattccttaatccatttataaattttcattcgatttgtccccaatttttgcatcaattttattccattctttttttgagtattttcttcctttttgcctaattttctcttttattttatttaaattaatagtcttttcaattctttaatgcctctttttgtgtcgctgttttttcaaaaataataatttttaagttgaaatattttttattaattaaatttcaattgaaataatgtaaagaaaatataaaatattttctgttcttttgggtaattaaaccatagcgaaaattaattaaggtcagaaggtttagtcactacaccacataagaatattaaacaaatccttaaaagaaataaaaaatttaatttttttctcaaaaatttctcaatctccaccaattgccttctcttttctcacaagaccccccattcttaccagtgcttatttagtcccgccggaaccgggactggcaaaaccgggaccgggatttcaatttttccaaaaaccgggaccgggacttgaaaaaactgggatttcccgccccggtcccggtcccgctcagctatagttcgaacttcaatctatctggtcgatttgtccccaattttttggctatttatttgaattttttccattgtttttgttttgtatattcttaagctttgcgtataaattaataaattaaagaaaataaatggtaatttttatcaacggaaaaaattcaacaatttctttctaaaaaatccaaggttttttacaatattttcatcattcttttttggcttttcatttttattttccaataaattttaattttttccagttttttctttttccgttattttacagctaatgccaaattgattcttccatctgcaaatagttccatagccaactccaattttcttacaaattccagcataattttggcgccattcttttaatgaatattttctattttgttgttttatttcatttttcattttaatgaatttttgaacaatttcaagtttttgttcatcactttttgatttgtaagacttgagtttttgaagaccaaattctttattccaatgttggatatatgtgcgatttgtccccatttttttcgctatttttccatcaattttattccattcttttgctgaatattattttcctttttgctttattttctcttttattttataaaattttccaattatttctctttttttgagttcatttcgtttttcttcttctttttcttgccatttttctccaaatatttcgccaaatgacttttgttgcaattttttcttttctgatccaattttgacaattaaaaataatataattaataaaagtagcggaaataatttcatttttgtcgtctcgaaatgattttattttatttttcttcaattaaatggcaattcattttttgaggcatttaaatgattttttctgattaaaaaactgaataaatcattattttacttaataaaataaggaaatcctgtttaattgcaaagaaataataataataattttatcttaatgacaaaataattgccaattggtaaattaatgattaaataaaattttattactttctactggagctcattcgaaaataataaaaataaaataaattcacaatgtaaagagattttagaaaaattaaagagattttatgaaatttcattatatcagaaaattggtgtaaaatggccaaaaatgaaattttagcgccgaaaaatgttgctgttcacgaaaataatagaaacttgaatatttgaatgctttgaacacctgtgggtggccaccaacctgtgttaggacgggtcatatttaaattgtatt

SEQ ID NO: 19210 - DNA, 1969 bp, Heterodera glycines
atggttcaattaccattttactgaagcagtgatgacttttagttcatttccgtgttcttaaacaaaatttgagcaaaagagtgcaattcgaaaaatttgaattttcgatgtttggttcgaattcgggtccggggttcggaattgggcgaaacggatactggattcgtgatcagcgacctcgaaaaccccagcaccagctttactattaccgttttttctcttagggctatcgagtgataccaataatttttaataagaaaaagctatggtgcattaaagttgcaaaaaacagcttatggtcgtgtgaaccgcaataggtcctcaaatccgtttttgattgctttggccaatgtcagcttttcctttgtccattcgtttaccaattcaaacggcaccatttgcattgacgacacatgaacataaaaatgaatttggtaactgaccgaagaaatggtggcacggagaaaatgctgaacaatttgaaaacaaaaatcagtgatttgtcgaaaatgtggccactcacctccttgaaattgttgacccaatcagtgttcgcttgttcgttaataccaccgcaacgcaattgtttgggttggccatcttttctcggagagtgcaaccatttggacaatgattggccagcagaaattgttgcatttggcccatcaaaatcatcaccaatcgcagcgggcaacagaacaaatgaatcgattgaattcaattggttgaggtcggtgagaattgtcggcgaagtgcgaagacgcaaattgtccaaatgatcaccatgggaaaagcccaagtgatgaatattttccgaaaaaattggccaaatttcgcgaacaaaaatatcccaaatccgctggccatccgtggtgtgtggtgatggaatccacaagtctaaattggtgcctcttttgtcgaaaatttggtgatttgaacgaagaaaagcgatgacggagtgatcgatgtaactgcaaaaagggaatgaatgcttttattgccatagctcagatttttaattactcaatatgaaggcatttaaagcgaattttgctgcgcaacagacggtcgtctggcaatggaaatggcacaaatttgtcatccatctttacataaagtttcggttctggtcctttgtccttgcgaatttcgattgttttccaaattgtcaattcgcttttgccatcgaaatgtttgtccaccaacgcattgaaacgtggcgaaagaagtgccaatttgaggccgagttgggcatggtcaaacgatgggaaaatgtccatccaaacgtcgttgcaaatccaactgaaatgggaaacaattaggctaaataagtgaggaatttgtggcttttaaaaaaatgccttaccgcctgttcattttttggcaaaaataagcacaatttggccaaattccgaatgatgtcacacaaataaatagcagaataattaaatgcgttggataaagcccggatttttaggattttcctatttttttacggatagtacttgatgagaaaaacacgaatcgcattttctatgaaaacaatttttaaatctgttcgccttaaattgttgccaatgggctcgagggtagagaaaggcaaaatcaacattatttttaaaatttcgataatttttgaaattttaaagcaatttttttcaaatgacttttggcgcaaaaataaaatggggagagagataacagaactcatttttgcgttatcgctctacataaaattataagccacttaaataaattttaaaaatttacgttggtatttgctttgatggcataatgtttgttgattttattaaatatcaacatttagccgcagaaaaatctaaggtaatagtttagatggtaccccccccttttttaaaaatttttttcaactcaaaaaatcataaaaacatgtttctagaggttttcggggatcgctgatcacgaatccaacatccatttcgaccga

SEQ ID NO: 19211 - DNA, 825 bp, Heterodera glycines
  unsure (1)..(825): unsure at all n locations
gtcataatcccgacgcgtcaaaatcccgatgcgtcgaaatcccgacgcgtcaaaatcccgacgcgtcaaaatcccgatgcgtcgaaatcccgatgcgtcgaaatcccgactaagccaaaatgagtcataatcccgacaaattaaaaatataaatttatttatttttgtacatctatttacatgtatattatatattatatatataaatatatcataatagccttataaacaaaatgaatcgaaaaaaaattgaaattcttcaaaaatgtcgtaaaggcaagtttctgaacaacaacgacggcaaaaacgcgacaacttctgaacaatgtgagcataacgacaacaacaatgaccgcgatgaagactttggagaagaacatgccatcatcaaattcgaactcggaaaaactcaaaagggaggcaattgtctttggtccgaaggtgggaagtttattgaaaaaataaataataattatattaaggcttccggtatgtacaaaagaaattggtggaactgctctgtgaggaactgtcctgcgcgcgtgacaatcaccgacaatagcgacaaaaaaatgtgcggttatcttggccaaagagaccataatcatctccctgagccacaaaaacaacaggtttgggatgctcattgttaattcaagtctgctaacaaaatttaggcagaaagtcggcgacaaaaaatactccagtgtgtgaaggccgaaccactctcatgcggcttctgccctcgcgaggaccaacaatggtctcgaagcaacccacctccatttctcagtatttgatgtgctaataaaacccanaaaaact

SEQ ID NO: 19212 - DNA, 2463 bp, Heterodera glycines
atccagttcaagactcaggcatcactggcaaagtgccctgccatcaacctttgtctgcgagaactgatcaggactttttcatttttactgccgaagcacatgaaaaacaattcccaaattttgcctatgaagcatgaaattttgacatttttaattacctaagtaaattagcgaaattattttaatttaaaacctagacccccaaaaccaaaatacactcatttcccttgccaaagccccctttcacaatctctctcattcctatcaattaacgccggtcatctcgccgtctttcttggcacacgcgcgtcacgtgtcccgctcgtccaaagctttagcacttcgttgcacttcctcctcgtccaccgcgtgtgaatgtcgtcccagtgaattgtctccaacttgtgcttcaccaattttcatcgcgtcgcggtgccggtccaatgtcctccgtcgccagtcgcttgccttccaatggtctatcggcagtcatgaaaatgggaagaggggtgttagacctgttttctgtaatagaaccactcgagtcccaccaattccgttcattcgctcagtgtcgcccgcaatctgaaatgaaatagggaggttagggttaaaaaaacaacacaattaccaaaacctttaaatgaaccctcaaaattttaaaagaatttattttactgatgatttcctaagaaaaattcctattacctttcatttcgcgtacttcaagtgctaagtcttcaatcatctctctcaatgttgtgtttcactagcacaatcatttttggatgattctcagctgaatgttcccaattttgtctattttctgaattagagggaccaggaaaatctcgaggacaataccaacattcattttgaatgtgccctggtcgattgcaaaatttgcagaagagccgagtctccctactcgtataattttgtctgaccgaagtcgagtgttttgccttctagttcctttcatcctcttttctgttgcactttgatctatttaatgaatgaatgccgaagcgcttttcactttctaccgaaatctctaactcctgaatgtaagacgtcagctttttgaaatcatttttccctattaatggagccactaattgaagcgaacgctgatactcaggcctcactttctctattagacacctacagagcatctcctccctcgctcctgatggaaattggtcagtcgttgtattcactaggggaactaaccgttttatgaactcgcccactgactcaccatctttctgatagcaagtagccaatttcctataagctaattccctgaaatgtggactatccaactttgatttgatgcttttcagagcattgcttaatgtatccttctcggttggcaaaagtttttcaaaaattgttcgcgtatgagcacctaagtgtaatttaagtcgatttattttgtctgcttccgaccaatttgatccaaagacatccacataatccagaaatttaatttgccactcataaaatgctgaagcagtttcaccatcaaatatttgagataaaggatttgaagaacctatagcagtaagcgtattcagataaaatattttaccaagctccgcattattttgcattatcttgtgcctttgtatcgccgaagcgttttaaaatgtcaaccaaaggagtcacactgaaacttcagtaaattctttgcctttgtgctgccgaagcaattcctaatttttgattttgatccctttttttcaattccccctttttattttatttggttttgttttgttgtttaattttgtttaatttaattaatagaggaaaaggaattcactttgtccaccaacagaagtcaaatgtccgtccaatcaatcagctttgtccgttcacttggaatccgccgaagcgtttggtcaccactgatgtcgctcttcacctgtaattctccaaaatgattgattgaaatccaaaacaaaacaatgctcttaaacgccttcaattgtaccaagagggtataacttgaccggaatttacacaccaaatcaattaaataccaattattttttaaattttaagggccataaaagcgcatcagtgtataacgaataattaaaagcgtaacgaagtttatttggttaatcaaatgaaagcatgttgtttgttaagcaaaacaaaaatgtttggccttcgtaatacaattccaactaagactcacagtgtccacacaatgcgaaatgtgtcgcacttttgggccgccgaagcgttgaatgcagttgacagtccgaaccacactcaaagttctcttactcagattcgccaagcgcaagtcgttcgtagtccaatgtcacacgtagtcgaacaccacagatccgtagaaatcgccgaagcggggaagaacgcaccgtcgacgtgccgaatatcacctactcaaattgtccgccttcagtcggacgcacaattcgccttgag

SEQ ID NO: 19213 - DNA, 1898 bp, Heterodera glycines
  unsure (1)..(1898): unsure at all n locations
ttttaattaccccaaaaatttaaaagcaaaaattcatctttccaaaaatttaattgaaatattttattttttactttttcagtactcatactgatcaagtggcttcatacaatccaattgaatgaagaaaattttaacgaattggattatgattcaaatttattttttttagcccgtaaattgtagaaatgtttagaaaaattgaatttttagaattaaaattgtcggtgatttttatttgttaaaaatattgaaaaaataaaacgcaattctttgaacaataaaaaaaattgctttatatttatcatgggattaattatcaataaatattaaattttaaacaaacttcatttttacacgaaaatatatattaaacacaccgtttcagttttggcctcccagttccaaaaagatttgcatgtgtggctcagtggtttttgtaagatagtaaagggacaaagggtggtggttcgagtccgttgtgcaacatgaatatttttatttatttttgtccaaaatattaaaaaatgacgaattttgggaattatttttgaagggttttcccaaccaaattggacaatcatggtatcattcgaaagctcttgatgaggagaagctttttctaagcaaatgttaagcgatttaacgatttagaaaaaagataagagcgttcgaaaatttgttttttggataactttttagtaagccttatttttgcaaaaatctcctatattattcgatgcagaaaatttttctctatcggtatgcaaaatttaaagaacatctgtaagggagaaaaaaaagttctatagagcgaagtaaattcggttttctctattaacagagataaagaaatagtacgccaaaaaaaagagatgtttttttctctgcactctctatttattggttcatgtctcgttttttgaaacggtgtgtaaagtaatcaaaaaaaaatcatgatttttgatgattttaagccgaatattgcagccttgtgaaattaagatttttaacaaaagtttcaaaaaatttgtaagaaatacagtaattggggctgtacagtaatttaacggaatttcttatcctgtattaccattattggaagattaatataatcagaattttccgagaccaaaagcatttttatccctcccccctgtttaggccaattcttcctgacccaatggaagagttgcaactgaacatgccctaccgtgttcagcctcactttggcgacacacaagaattgttgggacgaggtaggcaggcacttttaaaaattgaattataatttaaatttatggaattggcacttttaaaaatcaatttatattaaaataaatttaaggcatgcatcccgtgccaaagagtgtggacacggcggaaccgttgcgtgccgaaatgatgtacgtgaggccaacctttgacaacataccatcatactaacaacacatcaatttgttgtgtgttaaaaatgatatttttaggaagttttatttaagtatatatgcatcataaaattgactttttaataaatttaaataattaaattaaatttctattagaataggtatgtgctgaattatttaaattatttcggaattcaaattcatgaaaaaatcgaaatccgtaacccttaattattctaaaaatggaataatttccgtatccgtaactacgtccggcctaggaccggttcttcggcgattgaaccgtcggggtcaaaatcgataaaaactcgaaaaactggagtttcgataagttttcggttcaatgagaaagtgccaaaaagtcaataattgtatcgttncaataataatttaattgaaaatttaataaatttatttgcattaaaaattttcacaatttttgacaaaaaataatatcgttatgtaaat

SEQ ID NO: 19214 - DNA, 927 bp, Heterodera glycines
  unsure (1)..(927): unsure at all n locations
ccccaagaatttttgacattttttaattaatgaaatctttttctattttttaatccaactaatttaggccccagaataacttactgccaccattgtccattttttgtccattcaatgtcagtgtaatcgaaattgtaatgaatttcaataacacaagcgacacctgccaacaatgaacaaaaaactgcattaggcatttcctaaataaaaaaaattaattaattaccaaaaatattacttaaaataattgcttaaaatccaaaaatggcaataataggtcgcttgaaatggcaagcaatgaattaaaatgggagtaatttgagcaaaattgtttttaattttagaaaaaatggcattgtttgtttattcttgttatagaattggcgaatttaaattattaaaattgaatttaatatttggcaaaaaaaagaaataaaacagggcttttattaattattattatttttttattcaccaaaaaattgtaattcttgagacatgtattttcaactttgtgacaatttgcatacagccaaatcagtgatgagataatgatcatacaggcgaacaaaattgcgacaatcttaaataaatgataagtgcataattcaattataatatttaaaaataaaataatattaattaaattttcaaaattaaattcacctgggtgaattggttttgcttttctaataaagtacatcgaaacatggattgacaatgaaaagccgccaaatagattagaaatgatgaaagcaactaaaattaaaaaattaaaataatattttattacgattaaatatttatttttggtttattgatagatccataaaatattccaaggatttggacaaaattttattcataaaaagggtgattttttataaccgaataaacagangtaaattattctacggttttctaatt

SEQ ID NO: 19215 - DNA, 1603 bp, Heterodera glycines
  unsure (1)..(1603): unsure at all n locations
tttccaattaataaaatttgcaatttttagggttttttggaattttttttgccaaattttctggcactgaattgtcaatttttcaacgtacactgaatcgtcggcactgaatcgtcgtcactgaatcgtcttaacactgaatcgtcgtcactgaatcatcggcactgaatcgtcggcactgaatcgatatgcaccctgatgtcacaaagggcagaataattttgttagaaatgtttttttataatgagaggaaaaccgaaaaacataaatttttatagtcagggaaatggatttgttgaatatttatttgtacattcgttgaaaaaaattcaccaaggattcaaaaagtatgataaaaaaatgtaaaaaagcgaaattattatttattattttttcaaaattttttgacaataaacaatcacttttaatcgcttttttaaagctgtttagtccatctaggattgaaaaatgtaagtttgaacccgattttggaaataggcgcaaatgtccgaggcgcaattgtggggtgggtaaccattgtgcgggcgaattggtaaaaaaaattagtcacttttgaaatttttgtgcataaagactggatttttccaatttttaacacctattttcgcaatttgatgaagcaaaagcatttgcatgcgaatgatttaggcttatttttttggcacaagtggtgcgcacggaacaaatgcttaaaccgtttgaaaaattcttttttttgacaaaatctaataaattgtgcttgttttcatttttcaaatttctttatattgctactttaaaatttttaagttatagcgccgcatacattcccattaaaacaccaataatacgcaaaattaattttacatcgtccgattactcaaatatcgtacatcaatttcacaattcaaatattcagcagaaatttgccaaatgcttatatgatgtaatgttggtgtctttcgtatcaattgttaccatatcgtgttttcaaaaatattattattgccgcgttttcctgcagtgccacctttgtcctgtcatggtccaatccatccaactttcgttcgccagcagcccaaacactgacagtttggcggctaatgaaatgaatattttactgatgagttagcggaagatcatttaagaaattaaaataaaatatagtaatatgccgtatttactgaaattgagtcacccgcttttcccaatttgctctacataatttggctggtgtttatttcattggagactctattattaaatactgtaagttatcttttttttttaacctacgttccaaaaatatggctcaatcggctcgtgttctaaaagtgagaaatcttttattaacatatgtgcacaataacaccctttttcttgaacaccaagactcggtagaagtcggtattaagaactcgaaacttttctcggagcgagacagaaaatttccctagacttgcgcggcactagtgtcagtccggtgaggaaagggatggtgcngagaagtgatttttaccaagaatcgagaccgagaaattaccccaagaaacgatcgagaaatttctcgactcgtgaattntttcctccttcgccggcgacc

SEQ ID NO: 19216 - DNA, 1747 bp, Heterodera glycines
caaatacgcttagactcaaatgctggcacacaaacaatgcccacgccctaaatgtctaccggctgttttggcagttagcccttgcccgatgccgtacaaatgcagctccacaacactgttggccaccattggccacagctcgctcatcaccaactcccagctccagtgctttgtctcttcaatgttgcatcgaaagcgaatttcgtggcgacaaaaaacgggttgaaaatggcgcagaaatgcgatgacgccatggttgacatatctatggcattttatatggttgttagactataataattcaagaaaatgagtggaagtttttttaaattgtgcctaatttatagaaccttttaaaattgttgctcggttttttacagagttgtttgaaacactctattttttctggtcacagtcatatttggttctcatatgagtgtactaaaatatcccactttatttggatgcttttgaaatctgttatgccaagcggaagtggtgacacggcgacgggaaatgtgacggctttctgcgcgtcttggtaatccttgacaatgtccaacatccaatcaatgccgtccttggcacggcgaatttgaatgtggccaactgtccacagttttcgtctcaacaaatggtcggccaccgcgttgaattggccgctgaccagcgcaattccgaacccgagcattacaggcccaaagaaggcgagcacgtcgtagcaaacatcggcacataatttactgtagtggattttgaaaaaaaatttgccatcgtattcgagtctatgtctagctttatggtgattgggtttttcagattattcagaaaatcccatcgaaaaatttcggaatcccgaaaccaaaactttgttattttttcatgcaaatggaggattagagctcgttttgaaaaatgggccttgtattttctgtacaaaaatcaggcccagaaaaaactcaggttgccaaaaatagcctggaactatatttactcacattctcttcatttggcgctgtccttcgcgcggatgctcacacatattcaaaaaaaaaagatttatatttttgagaaaatggaaaaacaaaaaagatagagccaagaaaatctttaagaaaattattttggaatggtcctttatttcttagaactgaagcatgttttccttttttttattgaagggaatcccgatagaaagaaagttgtcattggcaacggtggccgggaaaatgggccaaaggtcagtgcaatgtagggtggggcttctagtgcatttcgaaaaaaccgccacccatgcgcgtttcgtaaatccgccagcgcgtttcgtaaatccatccgccaatgggttcgaaacaaaaaatatgtaacaaataaaattcataacttggcccaagttcaaccaaattaatatttcatggtattttttaatagctatgggtgcattctttcagaatataatattacaaaatttttatcttataaaaaatttataaatcattgaacattctaggttttttgcaatggtcaagcatatataattataaacacaatgtttttaatctataaaatgcatttgtgccaatttatttatatattcgatagctctaaaaattctctatttacctttaaaatttcaggaaatttaatttgatttttcaaaaagttctgaacaaaaaattcttgactaacactttgaaattttatgaccaaaacttttttttactttagaaaaaaattttggaatatt

SEQ ID NO: 19217 - DNA, 1049 bp, Heterodera glycines
gtgccattccccatgggttgtcccccatttaccctccctttctccccgtcccatccccaatgggtggcccccattttacccctcctcttctcccgtgcccattccccttgtcccccatttaagcctcttctgctcccgtgccattccccttgtcccccatttaaccctcctctgttcccgtgccattccccattggttgtcccccatttaaccctcctctgttcccgtgccattccccattggttgtcccccatttaaccctcctctgctcccgtgccattccccttgtcccccatttaaccctcctctgttcccgtgccattccccattggttgtcccccatttaaccctcctctgctcccgtgccattccccattggttgtcccccatttaaccctcctctgttcccgtgccattccccattggttgtcccccatttaaccctcctctgttcccgtgccattccccattggttgtcccccatttaaccctcctctgctcccgtgccattccccattggttgtcccccatttaaccctcctctgttcccgtgccattccccattggttgtcccccatttaaccctcctctgttcccgtgccattccccattggttgtcccccatttaaccctcctctgctcccgtgccattccccattgttgtcccccatttaaccctcctctgttcccgtgccattccccattggtcccccatttaaccctcctctgctcccgtgccattccccttgtcccccatttaaccctcctctgttcccgtgccattccccattgtcccccatttaaccctcctctgttcccgtgccattccccattggttgtcccccatttaaccctcctctgttcccgtgccattccccattggttgtcccccatttaaccctcctctgttcccgcgtcattccccattgaatgtcccccatttaaccctcctctgttcccgcgccattccccattgcttgtcccccatttaaccctcctctgttcccgtgtcattcaccattagatgtctcccatttaacccttctctg

SEQ ID NO: 19218 - DNA, 2209 bp, Heterodera glycines
caggtagacgttctctcgcggcttgtggcaaaaccacgtgagacagtggaggcggaagaacaagtgatcgccaacgtcgacaaaatttcacttccaatttcagatgactcagcgatcgatgaatctgaaatggccgctttcgactacatattcatgaccaacattgatcagctgcccgtcaccgcagatgaagtcgccgagcacactcaattggacactacgcttaggaaagttttcgatttttgccgtaatggctggcccaagaagtcgcctactgattcatctgcctttttcactcataggcacaaactttccgaagtgaatggttgcctccttttcggtgaacgcgtcgtcattccggcagccttgcgtcaacgaattttgtcagcccttcatttcacacatcctggaatcgtgcgcatgagggcattggcacaacaacatgtctactggcccctcatggaccttgacattgaacgttgggttcgccactgcgttgattgtgcgatggcagcaaaagcaccaacaaaaacgacactctctccatggcctcgaacaaacaaagtctatgagcgcattcgcatggactttgcaggcccatgttctgatggcaatctctatctcatcatcgtggatgcattcagtaaatgacccgagattttttaagtgaaaagcacttctgcggacaatgtcatcgttcaactcgagtggctcttttcgcgatacggatttccacgtgaaatcgttaccgacaatgggccaccctttcattcaaaagatttttctcatttttgcaggattaaaggtatcaaacaaagatttagtccgccgaatcacccacagagcaatgggtaagccgagcgttttgttgacatttttaaaaggcaaatgaaaaagtgttcacacggagacaaaaagtggatcaccaattccctgttcgcctaccgcaacacaccaaatgccgcactgaaaggtcaaacaccagctgaactttttcttggccgctcacctcgaactcaactgtcactgctcaagcctgacatttcttgctcaaatcgcaatcaaaatgactacacaaacaacatgtcgaagcaattcgatcgcaaacatggtgctcgccaccgaacatttgcaattggtgacgatatgcttatcatcactaccgtaacaacaaaaagtctttgctacagggtaaagttgtctcaggttctggtgttatttgggaaattaaaatccccgtccttggtaacgtcattgtgcgtaggcacactaaccaaatgcgtaattttttcccaattccccaaaaaagtcaaaacggaaatggacccggcacacagcatggttctcctggtcttgttcaaaagcgtcacgtacgtttcgctgatgaagtggatcaaaacggagccattgctcgagaccaaaaactaatcgccgatgtcgccgacaaacaagtcgaagtccgacgttcagaccgtcaacggcgtccaacaaagaaattggatttagacccatcaaaaccacgttatgattacatttcatgatcgttttactttcgcctacccattttttttaaaccaattcaaatttaaacggggaggtgtagagtacattgttaaatattcaaatttacgccattttcggattactgtaattccactctatttcctttctttcgctttcataaatacccatctcttttcactcatcaatcaacttcgtgtttcattattcaattcctttctcttcactcgtctttactccgacttttttattattttacttctgacaaataatttattaaattttaagttgtgtccacttttggacataacaaaaatatattaaattttcatgatttatttattgctagtcatgtaaaattgaatgaattttaaatttcaactaaaggaatttttttttttgaaaatttgggtttaatttgttaacaaattatgtctagaattgtcgattagctttaataaaatttggcaaaatggtagaaaaaaaattcaaatttcgtttaatatttttgcattttctcccacgaaaatgccattcttaggggtgtttatttaaccccgacaccgagtcggggttaagggtcggcgttcggggggttgtcggggttggaagcgtcggggttcgggtcggggttaacccgaaaaatggccaaaaatgtcggggttcggggtcggggcggggtcgggcg

SEQ ID NO: 19219 - DNA, 2906 bp, Heterodera glycines
caaactctgtgcgcttttgtggtcttgcagaagatgatcacctcacagccggcacccatgcaaatgcgcaaattcggatgggacgacacaaagtcgcgaaagagctaaaagggaaagaaaacatataccatgaaaatttaggaccagttgtcaaaaaagaccaattttgaatccattttaggggggttgaagccgccaagaatcgtgaattagtcgaaaaattctagtgccccaaatgaccgaattttcgtatttggcactcagtgccgccgctttctttgcacccgtggagccaaaagtgatgagtttgagcacaaattctttgtgacaaataacgggacaaccactgctcatgcaagtgatccgtgtggaaacgcctgggaatttgcaataacaaaaaataaaaatgtttgaaattggtgaattccaaccattttggagttgcgtctccacgtgggacagccaacagtggcgacagaagccgtggccacagtccaatttcagaagatcgccggctgagttcggttcaaaacacaccgaacattcaggggaggaagaggtcgactggtggaggggtaaggcctgtaaattggggacaatttttacgggaattaaaaaagtatccgcaaaattgttagaaattctgggtaagttcgattaaaaaagcgtccaaaattgggaaaaagaacagaaccaatgacgatgatgatgctgaggagagggaggaagaagttgcaattgctgccgacttgctccgtgtgatgattgtgctgagaggagggggaggaggaggcacattttggcgatggtcggcaaggagatggttctgaaagacagagaggagtcaggcagcattccaaagagaatgggacatttgaaattgcaattttttgaggcaaaactttgtgagaaaaggatgcttgccttgggtgcattattttccccacacgccactttccccctcaatttttttaagaaaaagtatatagataaaaaattttaaaaaaatctaaaaaatatagagaaaatgaatcaaaaaaaaacaacgaaattttgtctttgaacaattttttcgggggggggggggagaacaaaatgcattcaccctgttgcatttatgtaataaaatactcaaacaatgaactgtccccacctcaataagcagttggcgcagtccgccgcattcggacagtccgttgcacactttttcaacgttccattcgttcaggtggagcagcagacggaccaaggacggactgagcaactgctgattgttgtggttgtgatgcgtgagaccatgtttttgagggcgactgtcattatgcacaatattattattgttgttgttgttgagggagggcgactgcagctgaatggcggccatcagttcggccactgtcttgtccagcacgagagtctcgacctgagaaatttcaaacaaacaatatatctccggaatggttcggttcgctgctctctgtgctttacttgtgctctgtccatacagctgtactcaacgtattccgggtcacagagaattgagcccggcgtcggtccctggtcatatgtgtcatccgtagcgtaataatctgtcaaaaaacggtttattatcagctaatcgaaccgaaaacggcaggctaaccggtgccgttttgagcaaaaaatctagcaccaaagttgacccgaaaatgatttccgaaccaaaacgcgattactcatatttgaataaatttttgtattaaaataataaaaaaaagtgcaccgtattcttcacagcccaattccgatggacacgaatcagaagcggcgtccaaagatgaggacataattaaactgcaacttgaaaaaacaaaatacaaattttacaattataggaaggaatttttgactgtttaaaaacggataaattgtaattaaagtaatgccttttttgtttgaaaaaaatatttatttgaaattgaaaaaattagcaaattaacggcggcgatcatcgacagagaaagcaccggcggaagaacaacaaataagaaaatatgtgaaaaggcatttccttttttattcgttgtgttcgccgttccgtttcgcctccaacagacgacgactgcgccgcaaataactgatcctacgcaattaaaaatggagtaagttaaaaatgtcaaaaattgagaaaaaagccaccttcgcaatgtttgccgtgcttcggaaaggtcacgagtcaccatctgatagaaagattaaattacaatatgatttagggtgcttttccgtttgagggcgccgccacacatttaattttaaaaatgtcaacaacgaaatgatttgccgtgagaactgcaaaaatcgtcaaacagatccaattcgatgatattttagccaaaattgttgctttatgcctccaaaccgcacagattcaagaaattgaacagtgaaaaacaaaataattgcaaattgcctgctcattggctcgtcgaagcagccgatagatttccaagtccaagtcgacaagtcgttgcccaatctgagcactgttctgctccattcgttcaatgtcttccatcagttccatcatttcggctgccagtgaattgtcttccaccgtcccttcgaattcgtcggcaaaagcgcggctcgtcgaagcagtgccaggggacgtaccttttaaagtgaggataaaaataaacgacaaaattaggatgcacaatgttcacagccccccgtggattcaattagaaaatgcacacaaatttcaaaaaaaaaaaattcaatgactgctaatacccaaatttataaattaaaaaaccatttttagattaaatcaaataaaattttggggtatatattttgctctgattatgcgtggaaacaacgcaccatcgtcatttttaagcgtctcccagcaagtcagc

SEQ ID NO: 19220 - DNA, 1540 bp, Heterodera glycines
  unsure (1)..(1540): unsure at all n locations
tagcatttttaattagactcccaggacttcaaaaagaaaaagagttagacatagtcaaagcccaagctgaagagcttgaattgcttcttaaaactcataaaggacaaattcccgacccaattctccaaacagttcatgccgtccagcaaaatccatggacgccaagctgtgagcgggaccaacgacagaacaacaattcaaatgatacgggaccatcaaattcttaccgcaacttttcaaacagcccacatcgtggaagatatggacaaggacgtggtggcggcattttcaaccaaagacaaagaggccgaggaaattggagaggaccaaacaacatggctgaccgcagctggaatcaacgaccgtactgtactttttgtaagagaacaggtcacatggcatataattgctttcagagaaaaaaccaattttccccaaattcaggacccaatctaaatgccattcatgactcttccgaatttcaccaagatgccaatcgtcagacatcaaatgtcacattggacatcaatgaattgctcagagcattcagtgttatgaacacccaaggcccgtcttcaagaggtggaaatgaatctgcgtcaatgaatgtcattagcacgatgcctgctgatcatccaagaattgccgaagacgcttaccaaggaacaggtggaactcagggtaatccatcggaatcgaatgaccaacataaaatctcacaatgggaagggatcggaccaaaattatccaaatattttatgattctaacagcattcatgttacttattaccggtcttattaacaccactaccgctaatgctccaaagcaccccatggtatgtcaaatggtaaaagacggaatactttggaaaattcctaatttgtcaagctgcccaaagttctcattggattacatagaaaatccgaaaattaaatcacttcgattgtacactccaaatgttttcgaacatcaaaccccggcttggtcatgcagaaaaataagaaaatcaatcaggaaatatacaagtcttacaaatgttcccatttcagaaatgcttgaaccaattccgcttgaaattagttcagatgaatgctggcaaatgattcgccatcgtaagtgtaaattggggggtactgattgaagactcgagcttatggcacactgatttaaaaattgacaattcaccccgccattggttaattggcccatggaattgggaaactttttttattgatatttggttgctaaaaaattggccccgggaataattaaaatttggccatgcgtgcctttggagccgaatcagtactcgttttatcctctcgaggaatcaaatcctgtgataaatgaatgttttgaatttcttccaatcaaaatcgagatgagaggaatccaccaaatggcatttgtcgacccagcaacaatgatcataaatccatcatcaaaaaaggcaccgtgctcaagcaatcagaaacaaatgattgtaattngatatgagctttnggaaatttgatcaaggtcagcttcagtttccagaat

SEQ ID NO: 19221 - DNA, 1109 bp, Heterodera glycines
gagtcacaagttacctttagaattcattctcagaacaaaggaacttcaattgttcacgatgaacaatggactaaaacaggcaaggaaatcaaatatttccttattggtgactgggacgggattttctggaaaattttaataattttcgtttttatcaacacagctgtacttcttcgtttaatttcattttaagaaatcagtacataaatttgggacgtataacacagagaagcggaacaataacacacacattgatgataggcctgggtcatcccaatcattcgaacgatccggttttgtaaatgagagaccagaatacaccccgatcaggccattatcagaaattgagaaagcacccctaaggaacaaaacccgaagagtttcatttaaattaagaagaaaaaccgaaacggcaacaaatcgaacaatcattggtaatgtaaatgctttaactcagataggagctaattctgaattgctgtcaatatgtcattaactaacacagctgtaatttcaaccataattaattcacaaattgtcagatgtcttgtggacaccggttcaagtgtcacggtggcgtcaagggcactgattgacatcttgggctgcaaaacggtaccatcacatgaggacgcaatcagcgcaagtggtcacataatttcatttcgtgaaaaagcaaaggtaatgctaaaagtggcagacatttgtgtcccgattactatttattttgtaaatgaacaaaaatccgtctgcaaccgagattatcaattaattctcggatgtgactcactccgacattttggcccttttaccgtaaatatagacaaaaacaaaattcaaattggaacacaatggataagcttaggctccaaaaattatgaattaatgaacaatattcgagcttttgctgccgaaaattacacaattccaccttcaagccaagtaatgatcagagcaaacattaaaactgcctcacagccaaaacacagcttagttgtggataaacctgattaataaacaatgaccttgggattgtaccaagtgtgtcggctccatttgtggaggatatcccgttgacaataattaatccatcaaatatcccaagattt

SEQ ID NO: 19222 - DNA, 2173 bp, Heterodera glycines
  unsure (1)..(2173): unsure at all n locations
ttttcgtcaaaatcattnaatttattgnaatgtatcatntaatgtaagtagcacagttaatccgaggctagacaatgagtgtttttaataaagaagttctaggaaatcacacattttgatacctattgaattcaacaaactaatgacattttttcatctatttgttaaagaaagtaatatttaattatgttttaaatntaataaaattctagccaccatgatatatgaacatattgaaaaaagtcaatttattacgtacaccgcctaacaatttttttttattaattagttttatggccgcacaaatttaatttcttcgaaaagacaccaatttattaatgttaaatgtttgaaagaaatattgtttatttaattgatctttaaataaatacggtaaatcattttctttgttattatgataaacatgaatttgattaaataaaatatcataaaaccaaattataagagtaagaaagttcatattgttaaaaaattaatcttgtttgaccaaccaacataaaaataaaatttaattagttgagattttgggtataaaaaagatgggaaattcatttaaaatttaatttgactgctctatcctaaagcattaatttttaaaaacttttttaagaaaataacgaatgaaatttgatgcgattttatcccatattaaaacaaaaatcgcaaaaaattaattgatcccaagtgattttttctcacaaatgattataagcaattaggaattttcttttttaattttcgcttaatttatatttttttcaatttcaaaaattttcaagcatggaagtgttcttctttgaaccggtcgaatatgagcgcttgtacaactgcagctcctacaacattgaccaaatcccattggaaaaacgccaaaatttggtgatcggcgcaatatttatgcctatttcaataattttggaggtaatatacacaaaaaaaaatatgcaaaataattaaattatttttaaaagatactgtatgtaccgtgtatgatcgccatacggaagcacatggacaacacatgttacatggtgattagtcgggatatatttaaagaaaaaatacgaaaaaatagatatgaaaaattggttaaaaatgaaattataaaatcttttaaatttttggcaaattcaaaaattaaattttagaggagaaattttaattatttaaattttaataaaaaaaattgttgtttattttaattcaaaatgttcagctgatgttttacatttccataacggacatgatgtgtttgttgatgtgcggcattgtgacaggatatttggccattgttggcgccgtgttttgctcggcaccaagcttcatctacattttcggggcttatgggtttggtgagcacacaactaaatgcaataattatcaaatttttgagttatgctttttcaaaattagattttttcataaaattgcaaattttttaatttgtagctttatgggccaccgaaacaactgctgaaatgtttttggcgatcaatcgctgcgttgaattatgctcaacttggcttgcggagctgttgttctatgggaaaagaatttacctgtggatggtgagtaaattattgaattggaaaaaataaaaaattttctttaaaaattaatatttttttttattacatttttaattactaaatagtaaattaaacaaatgagaccaaattcatacaaaattgcttaggatgaactggaaaaattctttatttaaaataccaaaagagtttttactaaaataggctgcatgaaattatttcaaaatattgagaaaggccaaaatcgtttaatcaaattgttaataataaaaattaaattaaaaaatgtaaccaaattcttagaaaattacttaaggtgttcccaactgtgtacgggttgtacgccttcatcttcactgaaccaattctgttcagcggtttgcacatcacctggtttttgaacccgcacattggttatctcaatgatggaacaattgtaaaaaaaattttattatttttaatttaaaataaaaaatgttttcttaattttatttagattaactaactatatttatgaataattttcggataattttgtttacagaaatggaaatttgaactcagaaagtacagtagaacaaaagaaatattttttagtaccgtaa

SEQ ID NO: 19223 - DNA, 1018 bp, Heterodera glycines
  unsure (1)..(1018): unsure at all n locations
atgaaacttttttctttatttttctttatttatatgaaaaagccattggccacattctgtaaggaccaattggggttgatgccactgaaactatgtcggcacttttaaaggcttattgaagcattcaacaatttctataggaaaaagtttttctattctattagaaaaatgccctcctaaagtcgaaaaagttgaatatttggcttttggaccaattatatgtaaaatggacgaatattttttaaaacattttgatcaaaattgaggccaaattttctgtttttgttaacccataacactgctagattcaaagtctcaatcgcaaaaacaatgaacaatgaaggcctaagcttctccctgttaaaaaatggggacaaatttttagcatttaccattaaaataaaaatgatcggaaatgaaacttttttctttatttatatgaaaaagccattggccacattctgtaaggaccaattggggttgatgccactgaaactatgtcggcacttttaaaggcttattgaaacattcaacaatttctataggaaaaagtttttctattctattagaaaaatgccatcctaaagtcgaaaaaagttgaatatttggcttttggaccaattatatgtaaaatggccgaatatttttaaaaacattttgaacaaaattgaggccaaattttctgtttttgttaacccataacactgctagattcaaagtctcaatcgcaaaaacaatgaacaatgaaggcctaagcttctccctgttaaaaaatggggacaaatttttagcatttaccattaaaataaaaataatcggaaatgaaacttttttctttatttatatgaaaaagccattggccacattctgtaaggaccaatgggggttgatgccactgaaactatgtcggcacttttaaaggcttattgaaacattncacaatttctataagaaagagtttttctattctattagaaaatgccctcctaaagtcgaaaaaaagtgaatatttggcttt

SEQ ID NO: 19224 - DNA, 1018 bp, Heterodera glycines
cccgaaaatttttaatatgttaggcccctttctaaaacttcatttttaaggaaatttggttttttggcaattggaccatcttttcatgcattgaattgtgaattgcatgtctcatttcccccgcttttcagttgttccattgcgcttgtgccactttgtttgcgttgttggcactgccacgcgttcgggcgagtgcgcgtgagcgtggcgaagcggagcgcgtgctgaacgaatgtgtgaggcggaccaacgcggccggaagcactaacaacgcgatgcaactgacggagcaacaacgacagcaattgacagcactgttacacatgctcaaaacaggtcggttaagaacgtaagaattgaaaatttaacataattaagattaatattttgagaatatgtgcattagctaacttacagtgcgattaaataagtacggtaggtagcttacttatattgctctcctcgcattctcaccttttttgaacattaaactttttccctggtggcacttatcgtcaattgtgactaaaatttgttaaaatatccagataaatttcaaaattttttttttcatttttaagtccctgaaatcccgattctaacaaaaaaaattctcgtcctctttattgtatttttttgtctcaatataacttgagtagctggggaagggaccaaccggataaataagcattgataagaatagtgatttgatttcaggtggagagcatgctgaagtgacggctggcaacaaaaaaagaatccatccgacagaagatttttgtgaaaagtcggaagaggaggaacagtcagtcagttttttgatcaattagctcagattgatttctgatcacattctgcttctttgaagttccccgactatttggaagcggaaattgacagcaccgatccgttggtgccatcgctaaacgaactgtttggagatgagcttctcgtccgtcgctttctgctacaaaataatggtgatgcttctcatcctcggaagccgccccaatgttat

SEQ ID NO: 19225 - DNA, 1415 bp, Heterodera glycines
agatccccggtgttgtgccagtgccacgtgctcatcacaaaacggctgttgttgccgccgaaaagttggccactgagacgcggcaacggaaggcgaggacaacacaaacacaaatttgtccgctcgaagaacatgaaaaattgacaatggcaaagacaaacggggacaaggaaattgcggcggaatgccatccatcgttggcacggatttcaatgcatcatgaacgctcaaattcggtaaaatgacgagaatggcatcatttttgcatggaaaataattaacggtctaaaaagaatgttattttcgaaatgaaaattattttgaaaattatttttaacaatttcagttactaaatttaaattaacgtcatatacaaatatgttcattctcctttccccagcagatgagttcccattccacttttgttgtggaaaataacgcacgtcgtccgttgctcgctgccagtgggttttcatcgtgtaagtatgaaaagcatggatttgaattatgtcgaatgagaacgaaggagagtgagggggtcgaccccattcctcactttcacgtatggtcaagaattaaagttcgatttcttttaaacaaacatataaataattttttgtttacaaattttaattttatgatttttgagcaacgatccattaccaaattaattcttgaatttgtctaaatatgtaattgggtgtgcttcattcatttagtagttgcactgatgagaaatgttggcggtggccgatggcaacgggcgcaacacaaacaaaagaaaatggcggacatggacaaggaggattttgtcaacttggaaattgagccaactgcagaaacgtaagcaaaagtgacgcaattatatatagagattatggaggaaaaccaaataataaatcattcatttcatgggcacgactctctcttttccattgagataactgacgatgaatttaaagaattttcaaattaatttagtccctcgggccgcgaattcacatataaaacttttttaaaaaatccattaacgaattctccgctaaaatattgttcacaatcagcaacaactattaattatccatacacatttgtaaggatgctgtttggagatgaatgttgcaccagcagtaccgatcagtgtaagcaaccggaagccaccgaagaaatatttgtgagcatggcgaaaacgacagcaacacaaccacaagcagggcgaggaggacagccgagaacgactgattcgacgacaaacgctccgaagatgttcagctctaaattgacaaaaaaggcggatcattacaaatggcctcggggacagacggacaatggttgcgatcagaggaagaagctgatcggaaaaagtagcataaagaatgggtggaagaatgtgaaagcagcaccagtgaggacag

SEQ ID NO: 19226 - DNA, 2939 bp, Heterodera glycines
aaatgaatgtttttggcttgtaggcgaaatgaatgtttttggctttagtagggcgaaatgaatgttttttggttagtaggcgaaatgtcagtaggtgaaatgtcggtaggcgagatgtcgagtaggcgaaatgtccgtacaccctccaattatgtccccctttctgaggatgttgaaaaataatcccccgtctctttttatccccccgggggataaatggaattattttttttttaatcttatttttaataaaaattaattttaattaattctaaattgaaattcatttaaatgtttaataaacatgaaaaaataatacagaaaaatcacttactttactcaaatccgaacctaacccaccccggtgctatgtcgttattagagctcggtattttgaaaaaagcctggacctggattccatgttcgacctggacctggatttcctggacaaaaatccaggaaaatccgattctgacatccattttgaagtgtatgatatttatttgccctaatttatttttctgcagtgttttataatgtttggttggatttttctcaattctatccgtgccagtaaccactgccataaaattcgattttttgttccaatcaagatttaggggtcgaattgcgtagaaatagttatcagaatctgattttccgaccctaaaaacccctaaatgagtctccgagaaaaaaaattttgaattttttttttcaaaaaagggagggggcatacaaaagaacccgacgacgacgattgctgctgattttcaacggcggacaaaagtttttgctttttctcggcaggcggtgccattaaaattgattacaactcaaaaaataaaaccaattaaaacaaattagtgagaaatataagagagttcgcggtaacggtaatactgccgatggccccccccgccctttgtaagaaatttttctgttttaaaaagtcgtaaaacaggtttatgggggttttcaggatcgctgatcatgaacctggcattcattttgttgatccattttgaatcctggacctgaattggtacaaaaagtcgaaaattccaattttcaatagtgacaaaccattgcaaaacaaaaatggccatttagtatagatatgaaaataagaattttgaaaatttggtatttccgggtttcaaaattgctgtccaccatcccagaaatgagctccaataccaaaaaagatttaaatacctgtctcagtggtctgtgagaaagtcaccaaaatgggggtcccaggttcgattcccggtgcatgctatagctgtattttgatgattttaatgaataaataaaaggaaaaatgaccaaaatgattttaaaattgtttcaaatttttaaaaattttatctaccgcttgtaatgaaaataaaaaccataaatcctcgatcagtcaacgacatcgacgtcagcttcttgatcactttcttcattcgttgtcttcctccgcttgctcccgtcgttcctcctcccgcttaattagttggataaatgttaaattcccttccgttaactcaccagcttcaattcgtcaaatctcccggtgtccagcagccaattcgggacgaaatgatgctccagctgttggcgcatttgtacaccgtccggcatcgtcttccaaagttgctcaagtcgccaccacacggaatgcagtgcctcatctcctgaaaaatcacaacatttaaaattgagccctcaaaaatgatatggccccatcctgctcatccaaaagccccaaaaatcggtgttggcgcgcaaatggaacaaagtggtgaagcagcaaatgggcctttgtcttttttgaaagaagtgtttgcaccattggttgttgatcgagaaatgccttgaactggtcgactgccgtctccaatccgtccaaatcacctggagacaatcgccgattggtgtgacagatgtcgatggcagcgaaaagccaaattccaaaatttcctcgtccatttctggcgttggcactggtcctggagttggtggcggaggctccatcgcttcttcggcggatgcagcagaatttgacggccctgcttcgtcctgttgtggcatttgttcgtcgaaggtggagcgtctgaaattaaaaaaagatgtttgagttaaaaatcacttaactcacttttcttggccaggcgagcttgtatcgccttggccgtctgcgcttttctctcctcttgcttttgccaccgctgtttcaccgcctctctttttatatttcgctttaatttggccattgaatcacaaaataattttttattacaaatcttaacatatctcatgaaaaagtgtataaaatataaaatggctgtattacactatgtagattttttttctctatcgatattcaaaatttggggtggatttaacatgcagaaaaaaagttaaacatcactaagtgaatgttgtttttcgtaataattagggctgggatttttatgttttaacatattttttttgcggcttaattatggcgagagaagcccaaaaatagcattttctccgaacaattttcgatttagagcgacttataaaaacataaaaacacatattttggcgttttcgcacataaaaacatatcgcacatatttcggggtttggcacatattttgcacatattttggcatttttgaaaaaaatatctaagaaaaacacaaaaaattcaaaaatgcacccctaaaaatcaactttcgtgccatttttataggctctcaaaattttctttatttatttcgtgtatcgaaaatcgaattcttcattaattcgttactggatatcgaagcttcttgatggcacttactcaactgatggaaaaattatctttaaaaagaatttaccaaaaaggactaattttacccccaacctggtggggaatgttttttatttgcaattgtgcgggcaaaaatgat

SEQ ID NO: 19227 - DNA, 1007 bp, Heterodera glycines
  unsure (1)..(1007): unsure at all n locations
atgaatttcaaatttgaattaataatttttattaaaattttaaagaaattattttttcaaaaagttccatttatccctccggtgggataaatgaagacggggggattaatggagacggagcgataattagagataatacggtaaccaacttttcaagaagacttcgactagagatttattaataaacaaatttatattatttgaaaatttataaaatgaaattttaattgaataattaaaatataattcaaaaaatatttcctaattatttttgtattatgatagaaataaaaatataattagcaatttttcctaatatactcttacaaaaaattaaactacctttttcgaatcacttagcaatccaaattatcaaaatatattattttgctagccgaaatattattattaaaataagtcattaaaaaacaaatttaaaaaattaaaaattatttttattaagaaaaatgaattcagaataaaattaaagtaaataattaatttaaattcttttatttaaattctttattattttttcaaaaagtactttcagaatattttaaatttaattgccaaaaagacaagataataaatataatctaaataaaaaattgacaaaattagaaattctaataaaagatgaaaaaataaataaaaattatcatagaaaataaattaaaattaattaaaaatgataagtattaatattttatgtaatttttatttgcaaattaaattcaaaaaatttttattttttctaaaaaattgccagaaatcgcattttacaaattctgttaacaattattatgtaaatttttattcgttcagtcgacaaaaaaatcttaaaaaccaataaatttttatagtttataaatggaggattanaaatcttttgtgtcacacacataaaataaataaataattaaatcacaccaatataaatgtccgtttcgctccccgctggtccgtagctgactcccgcttcgacgagagcacatgggcaacga

SEQ ID NO: 19228 - DNA, 1820 bp, Heterodera glycines
  unsure (1)..(1820): unsure at all n locations
gttgaaaaatagaaggcccctctctggtagaaggcccccctctaattaaaggcccctttttggaggggttgaacaatagaaggcccgggccttcaaatagcggatttacggtaatatgaattcttcaaaaatttttcctatatttctaattgagttattcatgcacaaatgttttggggcattacttttgtccacctatgaaatgagtgagtgcattgctttcataatttttatttcttgaacgagtgcttagttcccttgcctttttgcagtttcgtttagcttacacactaggctacaaacgtcaaaatcccaattgatattgttttcatgaattttttttcatttttcttaaatattaatttttgagattttgagccagaattttattaaaaaaataagttcttatgcttctttataaggagaggatttcacgggcaaacccaaaattatatttcaacaaaaaggacaattttgtgaatttttatgttaaaataataaaataaggttatatttaaaaagtattcactccaaacatctaaaactgatattttaaaagctataattatttttaaagacattttacacgtaaaaaattactatttttaaaataaataaatacagtataagatcacttaattttcaattttatattgaggaagagctttttaaaaaaaaataaaaatagataaaagaataataattttcaaattattgaaaaaatataacttctttatacattaaaaataaaataattaataatcttaagcttaattgctgcattcaaaaaacttataaaggtctttattgaaaatttgacttaattaatttgatattgaataaagatgaatattatcagttaggagagattaattgaaattaaaataaataataaaaaccatgtctaaataagtcacttaaaaagtttaaaataaaactggaaatttttctaattaaaccgctgaacatataaaaacaaacgaaaaaattaaacaggtttttaagaaaaaataattaatcaattatttttataacatgcataaaaatataatagagatcgggcccggtaccggtttttaccgggcccggaaaccggtcgttttgaaaatgcaaaaccggtccggaaaccggcatttttgaccggtttatgatatagtcagaaattcttcattttgtacatttatctttgnnnntntcnctttggcnttntgtttttttttttgnnttttcggttgnnttttttgnttccnnngtttgctnctttntcgnnnttnttngttntgtcttttttnntttnggctttntgnngtnnttcttnttttgcnnnttgggctntttnnnnnncgtncnngnnngnctntntncngtnngtnnttctgtnttcngncnnnnnnttgngtgtgggtgnntcnnctcnnnntttnnttnttttttttttgtggncntnncgncggttccggttttgnnnnnngtcntcggtttttnnnttnnncntcgcttccgttntcnctngggttgtnnnttntntggnttnncntnttttttctgcgcntntgctntgnngnnnggggcttnnnnntngcctttctgcgttnnnnttttttgntttggtgnnggtttttngtccntntnnntccntnttttgggggttttggggnntnngtcggtntttcgccntttttgggtttttngtccntnttttggcccttttttggnnnttttcncnngnnncntgttaaaagggggnnnntncncccctnnnnntcnnttttttgccttaaggggaaattacaccccacaaaacacgaaaaattgagttt

SEQ ID NO: 19229 - DNA, 2464 bp, Heterodera glycines
tggtttaattgggagagagtcgttgagcccggtggagaaatcagcgcacagacgagcagttccgttcgctttcttgaccaccaaaattggggctgaccagtcagtgtgctcgactggtgtgatgacgttcattttctccaaccgatccaattctgcattgattattggcagcgttgaatatggcactggacgggcgcgcttgaacgttggatttgcgccttctttgagcatcagattggctttcattttggaacagaagccaaggccatctgagaatatttgctcatatttttgcggcaatatttcgacgaattgttggattttggccgcatcatttgacgatatttgattgatttgggcgggactgatcattcgccgtatttcttccagaaatccaaacgcttccattgccggtgtgcccaaaagattcaatgatcccgatttggcaacataaaacggctgaattgtctgaattccgtgaattgggaaggtggcagtcccgcgtccgatgaatttgcaccgctttccgtcgaaaaagcgtgcttcctctgaacatatgtgaattggcggtcggcccattgcgttgtaatcatcttcattgatgatgatgatttccgcacagctgtccagggtgaaaccaattgctgtgccgttcacattgatcggtgctttaagcagattcgatgaatggacggaattgatgtaggccgctgggagtatcaccgtatttgttttgaaatttgtgcccttattttggtgaaatgctcggattttgtcgcattgccgatcgatgtggcctctgcgattacatttgcgacaaaaattttccttctttgagcagtcctgggcccaatgcaattctccgcaacgatagcagttgctcggcggtattttggcctttgatttgcccgtgaatttttgatttgggcgaccgtttccgcgattttggtgcttatttggcgatgatttgccatgctgaattgcgttgattttgggctttggctgctccaaaatttttgcttccgcctccgtttttagctgtgtatttaagtcctcgacgactttgtcgaataatttggacgtttttgtcgtctttgtgccctctgctgtgagacgcgcgaggatatgttggcgtaattttgcgtcgcttggtgacttaagcgacgtaagaagaaccaggcatttgaattcctcttcgtttaattccgaaaaacggaatttgcggagggctgccttaagtcggttcacaaaaatttcgaattgttcgccgtcctctctgcacactcgcaggcattcgtagcgatcgattgctaacgaaggaggatgagaaaataatttgatgagacgaagtttggtgtccgcaaagtcaaatttggtgatttcctccggcaggcagtagcgcttgtattcgccgaaggcggacgggttgagcttagtcatcagcaatttgactttggcttcgtccgccatatttgccaccgcgcaatccaatgcaaattggaagcgctccaaccactcttcaaattcttcggcattttctgttgaaaatgggtgaatgtccggcaaagtgatgttttgtgccggctgagttgcggtggatgtcggtgcgctctgctgcttgatcgcttgcgtcaatttttccaaaatatcggcgagcgttttgtccattgatgatttggaggaaggaatttgacgaagaaactgcacatagcagaaccgcacacaagattagtgattgcttttttgaagatttctgcgaaatccaaaaatttcacgagatttttgaatttccacaattcgaacaatttcaacacgaaaatgttcgaagtgaagtcctgaagaacgggcgtcgccaatgttgagccggttaattgctcaaacaattatttgtggaagtcgaacaccaaataaatttattaacacaaatggaaaataaataaacaaataaatatttgtcggagggacggagcaaattgggggagcacaaaataggaagaaaaacaacccaatgaatgaggatggacgaagggaagggcatgaataaatggggaaaatcaatatggggtcaaagagcccaagagagggaatcgcaaatatttgaattatttgcctctctaacagttatgaacagattggccgttgcccgttggtatctcctccggcttttgttgtgtgtgccaacaacaataacaaccaacgtccgcaacaacaacaacggcacaaagaagcaccaccaaaatacaaagctattgccaatgagcaaactggcagcagaagttcatcaggtaggcacaaaaaaaatgccaaaaaagagaattttttcggaattttggcaattttgtaggactggtggaagaaaaccaaaaatttaatttaatttgtttcagaagaagacatttctcctccaagctatgatgaacgaatccaagacaatgggtcttaaaatgaaaaacaaataccaaac

SEQ ID NO: 19230 - DNA, 2725 bp, Heterodera glycines
  unsure (1)..(2725): unsure at all n locations
acttactggaaaagtctgtatgtcggaattatgactttttttgtggcggaaggcatacaaaaaaggacgagagagtgcacgtgtaaaatggaaaagaagcgagagcattagagaaatagtgtgagaaaaaggaggtggaaatttttctgttctgtccccaaatgctccccattcctttgtcctcttaaaattttgttcgatttataaatacttttttcactgccttgtcaatgcgatggctctccggcgctgtttcccggtgattttgaagtttggttttaaaccattaagatgaacgcagcgtatcggccagggccgacactgtcgttctcgccgtacccggttgaattcggctggagtcggattgagctttaactatcgcttactttttttgttttttttttcaaacggcacggaacagacgataaaaaattgtttgtaaaaataatttagaaatttttttttaattaattttattttaactaacgatatacaaggaaatctgcattgcttcacttgattataattagttgaactgatccaacaatttaattttaatccctttatttattgtgctgatttttggggcaatgtgccaaagaaaacccatttttcagtcgccttttttggcaattccctatattaaaaattttttctcattgtgaagagctccactcaaaaatggcaatacaattaaatatatatatccgaaaaactcttatttttcgttatttcattacaattgtaaaatgtaagcggaaaatgtgtttttctgacggtttacctcagttgggcgctggcacgtttgggcgccagcatgtttttggactataacttttttctttgtcaaccaaatctaacaatctttttatcaatcaaaagcccttcacatgctctattagcctgcaaaattctaaaaatttcgtcaagtttaaaaaaaagtacaagccaaaaaagttggaaaatctgatttctgaattcttctggccataacttttttgaaccttgatgaaattttttcacaattttgcaggctaatagtgtatacttagggttttcgaatgataccaagattgttggatttcgttgacaaagaaaaaagttataaccagaaatgtgttggcgcccaaatgtgccggcgaccaactgagcgagtccgttttctgataattaagttacaattgtaatcatggttgaaaattgaatctttctaatgctttaatgagatttaaattcatatgatgccaatgctgatgttgggttgtattcagtgattcgaacaccgaataactgagtcccaatgattgaaatgccgagtaattgctgagattgacaacggtgattggagtgccaatgaattgagtcagaataattgaaatgcgaagaatagctgagattgagttgagattatgaaaatgttacagaactgagtccttcaaattcggtaaaaggcttcattatctttctttagttttttgttggctttataaattctgtatttaaaaataatttattaaattattattttctcatntattcaaaatattctatgaaaaaaatgatgcaatttaaaacgaattaacaaataaacataaaacaacattccgctgagtcattttgtttttgctattagaaaagaacaaatttatttattcacattgactcacactgcttccaaatgggtgaagcaaattcgtatttttatattagcttaattctatgcaatggaaattcatttaatttgctttacaattacaattctatgtacaaattaatatttaacaaatctaaaaatatattaagtgggcacccaaaaaggataaaaaaaaacgcataatagcaattaaataggcacaaaaataggaaaatttttttattaattcttttgcggtagcaaaagaattaataaaaaaaacattatttgttatatttcaattgtaaatgaaattattaaatattttaaaatttttttaaaataaggacaatttttagaccaaaaattttatcatgaaaaataaattatatttagggaattgatttttgcaaatttttttaatcctaggggtatatatttttaaattttttcgggttatttctgtcactttttaggagtgcatttttcgtttttattaaggatttttcaaaaatcctggaaaattggcgccaaaaataaataggcgcataggcataaagcatcataaaaaccccgaaataggcaaaaatatgcatcataaattgatcatagaatcttgaaaccaagctaaaaaccgcatttgtgcatccctaattaagacaatatttttggatgatgagtggatatgaaagtgaaaaatcagagttatctgaatattttatggtaaggattttgtgaaaaggtgtttatttacaattagccacagattaccaaatggaacaacggactgctggagtcttgagcattgttctttactgtttcttgtttattgggatggaccaatgcttgggtaaattttttaaaaattattttaaataaaatttaaacaaatttttaagcatataaagaattgaaatgcaaagctggccgtgttcaggcacagacaaaccgtaaaacagcggaggaaattacgaccaaaaattgcatgtttgagcagtatttttgcctgatgatcacctgtgttgttggtaaattaatttgaagggtgaaagaaggtatatcccttggacattttcggcgatataaattaat

SEQ ID NO: 19231 - DNA, 1930 bp, Heterodera glycines
tatgtgagcatggcaataaacatttatatgtttatgtgaattcctctgaataatattttaaaattaaaatttaaaaaaatttcactgagtttaaaaaaagttaggacaaaaaaaatgttgactcaaaattttctttagctcaattttcaggacaaatatccttggaaaattttataaaatgcatgaggccgacctcaaaaatatttttaaattcataaacatttccatttttcatttcagaaaattttgatcttttgcattcattgtccgaaaattcgcccacagtttacgaagtgataaaaatggccaaaattcttggcaacattgaaaatgatggacaaattttggtcctccgttcggactcgcaaattttccattttattttgaagtatttggcaaattcaacggcagaagagagtgccaaccaaacaaaatttgtcattaaatacagcttttgttttttggcacaatttgttgaagaattattgaaaaaagcaatgaaagtgaatgaactgaaagaattgctaaacattgaattaattggggaggcaattgaaagttttgccgacaaaaaggagcaaaaatgtgccaacaaaaagtgagtgcaatttgacaaattggacaattaattaacctacgattttgcattaattattttcttaagcacgcaaaatgggattaacaaatatcttaatgaaagtatgatggattttgcccatttagcgcatgcaataaaaattgatttcactcataatggtaattgtttcttttattaagcattaaaatttcttaatatgccctatattaagcaaaaagtatcagcctaaaaatgctttcattcatttatgaaaatgtttaaattttgtcattagcgcggtgatttatatggaaatcattgtttttcccctgctggtctttgggatgccttaaatgcatgaaaagcatgcttataagcttcgtttgaagcttctaggatgtacttctatatccaaaaaattgggctttttgtcctcctaaaagtcatggaaattttccaaaaaaaacaaatcctttttataaaagtttcccgaaattatttgaatttattcttaaaattgataaaattatgtcataactaataaaaaaaggtggaaaatttcggttttaggtcattttttcgctaaaattggggaatgaattactcatgtattaataaaaatataatttaaaaattggtaaatgttataaattaaacaaaaatacctagttatttttggttttaatttatttaaaattttttattctaaatcacaccatattagccattttttgaaagtcttggtttgaaattttgccctcaatttggaaaagttatgtgcatatttttcagtttttggtgtttattttcgacatccctaattttgaattccgtttctgattattaatcagctatctcatttaaaatgtttttctaatttgaaaatttaccgaaaatgggggagggacaattcggacacataaaaaattctttattccatcagatttacaaaaaatcgttcccgatttattatttgaaatgggaaaaatgaaagaagagaaaaattggaattatgcagattaaatcaaaaggaaatgttggaatggaaactgatcgaaattgaactgatcaatgaagaaaaaatgggaaaatgggaagcaattgaaagtgcgagaaaggaatggaaagagaattttgatcgaacagtttttaatgaaaatggaagagaaaatggaaaaatagaagagaaaatggaacagctaatggaagagttgaagcatttacaaattgagaaaggaattggacaaaacaaaaataaaaacaagcaaaaggaggaggaaaaggagggaaaagagggcaaaaaagaaaaaggaaaaggcaaagttgaaaattgaaaggagcaaaacgactgaa

SEQ ID NO: 19232 - DNA, 2515 bp, Heterodera glycines
  unsure (1)..(2515): unsure at all n locations
ttccttttcncctcccttttctggtcccncattatcccatcaatttccgttctgtgcatgcgatcagcgccaaacgggccaactgggcaatgtgaagccgctgctccttcgcattcacaagtgggtgaattgacgaatttggcccattttaatgcaaggtagagagtgtcggtgcacctaaaacgttgccgttgaaataaagtttttaagagaaagttctaaagttttctacaaaattcaacaaattaacctctatttgacaaaaatctatntaagcaaaatttttttaacaaaagaagaagtatagtatttccggtactagttgcgtttgtatccacatttttggtcaaatttttttttcaatttttttttcttttttattatcagaaatgatttaaataacaaataaaaggtgatttatgtgcttattgggtacaattccgcgatttgggtccacaaattataaaaaatttccggtcctccaaattgcttacgccacaaaaaatcagaaatgtatgtggaaaaaagtgatctgtgtgtgccaaatctcgtcttatgagcatgtttgaacttctgcaacgtcgattcaattgtatttgtatgttgaccagagacggggtccttgaaattctccgagtggttcaccacgtaatgtgtgtacagctccggcaatttgtcaatacccccgtacgaggcccaaccgtcgctcacaattgttgcacctgcgtgaatgtgttgctgaatcagtggtaacaaagtgtcgtcgtctcgtcgttccactgtcacaataaagcattttccactgccgcgttcaactccaccaaagtaccactattgttcgcccggcaattttccacggtgatatttgttaaaacggtctcgtcaaattaaagcaattctgataataaaaaacaaaaaaaataaaaaataatttgaccaaaaatgtggatacaaacgcaactagtaccgtatttccttaacaaattctttaaattctcgaacaaattcatgacggtgcctatcgacaacgggattcctcgcactccccctccgttgcataattgtaacccgatgaacctttttatataaatttattaatttaaagggaggtgaagccgttgaagctggcacagttcgaagacgattgtgaggattggagcgccggcggaagcagggggcgaaagaagaagaaggtcctgtgctgattgatttgtttccataatttcgtttttcggctcgatttcttttatcatactttatttatattaaaattttcacattttatttttgaaattcaaaattttttatttagatttctcggctaaaaagttgatcattaaattcgtcaaaaaagcaatataaatcccgttttaaatgaaaattattaacaagcacatattaaaataaattatgagattttcaacacataactgagttttataactagggctgcaaaaaatatggaaatccatatttttttcctggactgtgggaggcctgaaacgcacgaaaaaaacacatagtttgtagcttcatgatggatttatatatccatatttttcaatattttgcgatttctgtccatatttccatattttccatattttggcatttttccaaaaaatctatattagaacggcccccgtcacataaattgaggtattgaggttttcatctctcaaaatcgcaaaattttcgaaaagacaatttttatcaaaattttgtcgaaaatattgattaatttaaaattggttaaattatctcaaacataagcaaaaaactgaaaatttcgctttaagtttgatttttcgctaaattgagtaaattttaagttgtaatgtttttttcatctaaaatgatttttaatagcgagcatatttagcaattttttaaagttttacttttgtttagcggatttgatgaaattttgagaaattatacccccaaatttgaaaaatttatgtccatatttttgccattttatgtccatattttgcaatttttaattcatattttatggccatatttcgcgattttatatccatattttttgcagccctatttatcaccgccctttttttatgtgaagtcgataatacgccgtattcacaagtggttgaatacgaatttggcacattttatatacccctgtaccgcaaaacatagccaccgaaaaacagtcgagacataacacagccgggaataaattactaaaaaattttcaaaaaatcgattaaaattcagtagattttaagaaatttttctaagtttttttcttgaaaactttgtttgaaaatttttaaaaaaatttagtcccagctttgttatgtcttggctgtgttttggggtgtaccgacccctgtataggggagaggagggccggtgcactttaaaacgggtgcaccccaaaatttcgccgacgaaattacgccggacggaatttcgtcggccganatttcgccgggacatgggtaacaacaaaatagataatagaattttattannaatcaaatcc

SEQ ID NO: 19233 - DNA, 2213 bp, Heterodera glycines
  unsure (1)..(2213): unsure at all n locations
tttgtataatgtattttttaattttatcntgaaaatattctcccatggatgtcttaaaatttccaaaattgacgactttacatttctctcgaaaaccaatgggcattaataatagcccataatgatgacatgtatacgtaattcgtccatatctctcttaattaggtccaatctttgctgcttttacccccctttttttctctatttatttttgaattgattaattaattgtgtatggatatcccaaaatgaatcgaccacctgctgctaagtgagctttctttatcatttctgttttttttaaattgcatatcaaaatgtgcataagtaaaattgtcaggttttaatgagtgtgactaattaattaattggttgtgtgcaaaatcgtagaattaattgtgatgttgtgacgcacattcattttgtttcatcaaatgcctgtgataataactttacatcaaaaatttaaaaaaataaaattgaccagaaaagcataattgtgttaattactcggcaaatgcgttttccattctgatggtaaaattcaataattaccgttacaccgatttaatggtaatatgtcagtgacaggactataaaatttcgtggatccaaattcctggcttaaaacaaaaatagggaatcccgactcctaaatgtcggttaaccgctgacattcctgctgctgatgctggtcctcgtccgatcacgcagccgctgatcggtgtcacccaacaatttggtgatctgctgatcacatttacccactccaaaaaactgaaaattcctttcggcaagaggtgggtacacccaccaaatgaattttttgggctttacatagcttctcattatgcttttgttcttgcctgcccacgaaaattggtgttgtttttccttgatttttttcggactaaatatttgtttcgtcatcaatcgcccaaacaaacattccccgcccccgataaatgatgatgatcaacaaaaattccattccattcattgacggcggtggacggactgacaatgatgagtgagatgacgtgtggtttgtgtgataagtgagtgtactttgctgctgcgagaggaaaggactctcgggactgtggggctttgcgagaagtttctcgagccgagaagcgagagcggcaattggcccatagaagcgaggccaagaattacatacccccagcaggggtcgagttcgagaattcacattgagagtcaagatcgagactctaacaaaaaaattttcgagatcgagaattgacttcgagagccgaagccgggacccccaaaaaacccaaacaaaacttcttgagtgagttaagaatgaaaccgagaaatgaacttggagaaacgagaccgtgaaatgcaccgaggtcgagaccgtgaaacaaaaaaaaagagaaaattctcgagtcagaaattcggaaatttgagaccagcaaggcaccgagagagtcgagaccgagaattgacttttagaaacgagaccgagaattgagtccaggggagtcgagactaagacctctccacctaaaaaaataaatcacactcagttgagggggtggggaaacgctgatcaaagtcacttccccacccacacctccgctcgccccgcctcagcatttatgtgtcatcaccatctccgaccacaatgggacaaagatcactttcaccccacccaaaaaattttgcggaggctcacatcagcagcagcagtttgccaaacaagcggctgatgcttgaaaatgcaatttgatgggccgcataaatttatttttaaaaaattcaagtgccagagattacagatattttggtcaaatataaagttttttcgaaaatttagaaaaatttatagtgctgactcaaaattgtggaaaaaataatcattttaaggggtgtgatttaattactaaggaggccccgataaagcacgagaaattgaaaaaatattatatatttatttatgaacgatgcgtggcgactccacatgattgacgtaaggaaaattttgcaaacaaaattatatagaaactaagattttttagtttttttcactcccttaaagcccaagaggacaagcgaaaatttccattttttgagcattttcggaggacaatttgaaaagccacaataatgttagaaaaattcccgataagtatttatataaaatattcattctatttttcacgngcggggtcttgattatg

SEQ ID NO: 19234 - DNA, 1617 bp, Heterodera glycines
  unsure (1)..(1617): unsure at all n locations
ttttaaaatttttgctagttccctattcctaatgggaccccaacaaaaancngaaccngnccaccttttctttttcggggcgcaaaggccaaagggncgccacgggacgaaggccgctcggcggccgcagagcgcaagcggcagttcggccaatgacaggagaagaatcaaacaatgaatcaatcaatcagcctttgtttggtggaacaaattagagtttgccaatcacttttaatttccggtgggccaaccccttgacagattttgttttcaaaagtccccggaggaccaattcccgtttcccggtgaaacgatttttagtaccaaattttcccctaccgtaaccttcaaacaatgtcccggtgacaaatatttattacggtgcgaaaattcgaaattaataaataatttttaatcggagagagaagatgttcaacggattaaaaagttaagcgaatgagaacagatttttaatttttccatctttcccccttttttccgctcacggacattttccgctttttgttaaactgtgaaattccctatcgcttcttttcttcttgtctccaacgacttataaagtgatcgcaaaagcaaaggatgaaagatatggatgaataataaaatagagaaatgaaatgaaatttaaattaataaataattaaatgcaaatttgttcaaaaattattttctccgtctcttccgtttttggcatttaattctttcggcattctctggcatctcggcttcgtcggtcgtgggcgccgacaacgtttctaaacccgatcgaattttttaaacctttatatgaaaacatttattgcaggaaatgacaaattccaacctgggtgagcacacatttcagataagcttcctatcattatttcttagaaacaactaataatctgttgaacagttatttcaaataaattcgaatatattagcttattatgcatcttcagtgtgcattctaaaataaaatcattttttgttctaattttatgatttatttgttttctgttgactaaatagtcagttcttatagcaaatattaattttagcttcaaatgagcattctgccttcaatttcgaagggaagtgaatttttttataataaattgatagagagcaaaaagcacaatgtataatattcaaaaaatttatctatgcatttgttgaatgttcctaaacccgatcaaattttttaaacctttatatgaaaacatttattgcaggaaatgacaaattaacctgggtgagcacacatttcagataagcttcctatcattatttcttagaaacaactaataatctgttgaacagttatttcaaaataaattcaaatatattagcttattatgtatcttcagtgtgcattctaaaataaaatcattttttgttctaattttatgatttatttgttttctgttgactaaatagtcgattcttatagcaaatattaatttatatttgcgtagcttcaaatgagcattctgccttcaatttcgaagagaagtgaatttttttataataaattgatagagagcaaaaagcacgattgtataatattcaaaaatatatctatgcatttgttgaatgttcctaaacccgatcaaa

SEQ ID NO: 19235 - DNA, 2618 bp, Heterodera glycines
  unsure (1)..(2618): unsure at all n locations
aggaagatacatacatatgtggtccaacggtgccgacgggcgccgctggggaaattttttaaaaactatgctaaatttgcttgcgaaggggtcccccattttggggcccattacgagcgagggatgggtgaaccggaaaaatcccgtcggtcccgatccagtgcaggcttatttttgtttaaactcccgtgatttattgctaacttggtagtctctcttttaaacaagcatcaataagtaaaatttatgcataacgggatacaaaagcaataactgaaatcaacaaagtgaaaaatcaagtcctcgaaattgttttcgccaatgaataccggggacccggaatgagacgttgcaaggacaaatactgctggtaggtgccgtaactcatgttgttgtcggcatgcacgttgttctggccgttgttctcccgtcttgaccttttccccgtctgagggtgaagcatgtggataatccccgcgtttgttcgcattttcaacgggtattttccggatgtgttgttgttggagatgttggtgctgtttgtgttgttgttgttctccaagtctcccccagcaaatttggtccctttgtgtcgcgtgccgtcccatggccggttaattcgtgcgcaagtttgcgaagcgtcctctttttcgtccaccttacgccaccgccgaactttcgaattttgcggagaaaactgctgattttgaccgtccatcaatgttggataagagatgcgcagaaacagatcagggttgagatcctagaaagatattttaaatgattttaaataatgatttttaaaaccggtgttttagatttcttgctgaaaaatgccaaggaagatgtaaaactaaaaaatacaagtttttagaaaaattttggagaactgattcggaggggggagcgctgcccctgggatacaacaaagaaaaccctccacacagcgcaaaattcgaaaaaagcattttcggcgctatacgtaaagtagtcacttttaaattttatcaaaaagtaaacacaaaagggggacccttcggaaaattcaaaatttttgcgccgcattttctattgagtttttggtattgtattggtaattccttcaactacccaataagcttaatttcatgaaaattaaaaattcgatttcggcaaatttcccaatttgtggaaaccataaactcacatcatcaatggaaacgggtacaacagttttagcttcgactgagttgttgtcgacgagtgctttcgatgtcgatggtttcggcatggaaaaggtgccacaatttgacagatagccatgcggatcagtcaaattgttgttctgctgaacgatggcccgagaagtactttttctgagtgggcctgcttcgtcggaatgctttcgcaactgctccaaaatgtccacaacggatttcggcaaaggcgggcaaaatgcgtccgaactcatgaaattatttcttcgtgcagtgtgcatttcttcgatgtttaaattgcgcgaagagtttgcgcactcgtcgaccaaattgaccatttcagcaacggccatttcaacgtctctttgctcatcgtccggcggggaagccaattgttccatccactgcaatagtatagtatattattattattcgtaccatacaaaatcgattgtgtcaaaaacaaatcggtttacgtagcattatgttaatctcgtttatgtactcttccgtgcttttatgcaataaaatttcatacggctaaatctgccaacctttttgtgccggaaagacgcagcagccattgcagtctgatccgccaattttctctccaaaatgcgatcccaattatgccgtttcaaaaggtattgtcgcatagccaaaatccgttttatcttctgagaatccctgttcgggttcaatttcgtaagatgcgctgaacaaaaaatggatttgtttttgtttttgagcgaagaatcacacattttcccctgagctccatgatttgatgcaatgtcctgcgatgtttttcctgataaatgatgcgcatttgttggatcgatgcgtcttgacgcctcaatgcactgacgtattgcttagcaatttcacgcttggtaaaaacattagcacggctgaaaaatctcattattgtattttaagcattaattcgggatttagggaatccgaaagaaaacataggaatacaatgaatctacttctgtggcaacaaataaaataagtattataattcacaaattccgtattaatttgtatcaaactgacccaaaagaaaaggaaaagccagtaaaatacctcaaagggttgtcattgtcatcgatgcgattgtcgcaatataaggactcgtaaacgaaagggaagtcggccgggtgtttcggcaaaagcgtctcatcgatgtcactgcgaattgcaattaaataccaattgggtaagtctcaaaaaatactctgtcaggtgaagattttgacaagagttgaaagaagagtcgaaacaatgtttggctcgcagtccctcttttctgatgcngtcgataaaacccccggtgctgaaaacatnaaataatggngagggaaatggngcacaaatggatttcaaatttttaaatataatattatcttatactga

SEQ ID NO: 19236 - DNA, 1874 bp, Heterodera glycines
taaataaaaaatttaataataaaatttgatattttttatcacccactgaagtaaaatccatttgtattagagcctaccttcatcgtaaaattaatatttttacaaaaattttaaacgtaatttactaagtttcaggaaaagatcgacttttgtaaaaaaaaaaaaaattattatcatgaaattttgcagtttaattatttttatccaacttttaattcattctaaagaaaatgatcgttttccttgtccgtcttttttcataaaattgggaagcatattaaatattgctgtgaggaatttttttttttaattttttgatgactcatttttttgcttaagagtggccagtctgatcggacagccccaaattgagaacgttttggcatttacgtcgagggtaattttgtttaaaaacaattttttttccaatatttgtgtttttcctcgacgtttttaggcacggagcggcgcctgtacgcaaccgacgccgaacccgctcagtgtgctcgagttcatccacaacggagtgcacgcctgggttggaggggacatggtgaatggactttttcaagaaaattatgggctattttgtgaaattcttactattattttaacaaattcaaataaattttcaaaaataaaattccggcaccgtcgaaaatccccgtttagtaatctttttaaaaaaatccaaaatgacaaaaaattcgtctttttcactgaaaaacggccggctaaatgatttttttactttttccgccggtgccgaaattttcgaacaaaacactggagaaaaagaaaagttttagcagcaaaaaaaatgtcttcggattccccatttcgaaattttttggcggggcatgcgacataacggaacaggacaaaacgtcgccggacaaaacgaaaaaaccaagaaaaaattgtcaaaaaatttagttacctagcctaatatgaaaaaaattctagaaaaattcaaaaaaaaatttttattaagaaaattcaaggaaataaaaaaattttcaagctttttgggtttatttccggaaattcagctaaatttagtttttattaacacttagattttcaaaaagctaaaatacttttcaattttcttaaaattttgaaaattcttttttgcggcgacgttatgtcccggcgacgttacggcggcgacattttgtcctgctcccggttgacgctcaccattttcggcctgctgttcgtcctgccgctgctgcacggagcagccgatgatgctggcactgtccatgaacatcagactgaacgccaagtggggactgaacgcgctgaacgaagtgccaagcaaagagacgaagcgtcgccggaactccacaaagaaggcggacagccaagtgccgtccgagttcagctgggtattcaaatatgaggctgcgtaatttaccaacacacatagatgagaaacatatgacaatgtgaaaaccactcgaaatttttaggaaatgcgcattctccattattataataaaattgatatgattttttattattattattagttagaaattaaatgaaaggctacttaagaattaagtgctttcattaaaagcaattaataaaacacccacataaattgggtagtaagtgcaggtacgagtccgctccatgccagcataacttatttatgtgcagtaaataattctagagaacataataaaatattatagaaccacatacaaggaatcatgcaaaaattcaaaaattgctagaaagaatgaaactttaaacacataagtaccaaatatgcaaaataaggaaattattacaaaaaatacctacatattatacataaatgcaaatataacacacgggcactgtctcaatactcagtaccc

SEQ ID NO: 19237 - DNA, 1649 bp, Heterodera glycines
aaaaacttttaggggatacctgagaaaatgccaaaaaatgtcgtgagggtgtggggtttcacttcttggcttttcattcgtttttatgggcttaaatttattatattattatttttgcgacagatttgggaacagtggcgactgctccaccaaaatcggcagcagcgcgagacgcaatttccgcccgactcgcaaattgtgccggtcagtcattgccaacaaaatgattaattaattgcattaattttgatcattttgtgtttgcagtgcgctggctcccagaattacctgctcagtgcgacaatgttcccttttcaagaccccgtcgtgctcaaccgaggcatgtccaataattgtattcaatttatcacaattttgtgtttaattctttttatgcctcagctcgcccccccaccgccgtttcaaattttttcatagaaaattcgaagaaaaaaaaatttcaaaatttttccagcgattttttcaaaggggtgcaccgttttctaaatgttgttacaaacaagattattattttttttgcaaatatttctcattttgcccatttcgtcagtctgtcaatcacttaatttgctttttgtcccctgttccagctgggttgagcaactcctacacggacagtctgtacacttacgcgccgaggcccacctgccgtgccgcaggcgactgtcgttcgcggtaggaaacattcattccggttgaactttacatttgcagcgccccctcccctccaatattcaaaaaatgtaattttttaacaagccaaacacgaaatccgccattttcaatcaaatggcatttacatgagacatgcgtgaactttttaaatgatcatccgaaaaagtgaattaatgaatgccattgatcggaaaataataatgaattgaatttgtattaaaatttaccagaaaactttttttttgaaaaaaccacgacaccctcttcaatttcactctcttcctcagttacttgttctgtgacacgaccagcggccgtccgttgtgcacttcccggattaaacccggcggcaattgtgcctcatttgtgcaaaacggtaataataataattaattgtggctattaattttagtaaatttcgcacttgcaatgcaaatccctccccacaatatctcttccaaactccgatttttgaacgtttttactattttgtttttaccttttcagggataaattcaaattaaaaatcctcaattttttccaaattctatgataaatgtgctttacattacacctgctttttctgcagctgaccagccctgtttcgcctccacttgtgtgaatgggttttgccaagcggcgggcggtgccgccgttgcagcgcaaccgcagcagcagcagcaaagggtgggcgattgattggataatggcattatttaattccttttaataataattattattattgtttttcttaatttctcagattgtccgctcgactgtttctgttccgaatgggacggcgccagcagcagcggcagtccctcggccttcccatgtaaggggaaacagcagctcgtttccccactatctcctccctcgaaattttataatattttaaacatataaaatatagaaaagaaattcaaacaaaaaaaaagatttttcagcga

SEQ ID NO: 19238 - DNA, 2274 bp, Heterodera glycines
ctctcaaagggtgggccaagaaaagcatcaaatttactttcttaaagtgaaaactgaacagtttgtccccgtcattagaaagagagtggcgagagagtaatccgcgacggttctgccgctgctccgttctcctcccagtgtgtggtccgactgagtaccgacgcacatcgactcgcctatgtgatgttctacggtaccaacccgtgggtgctgttcatccgtctgcatgcgatcatgtgcgatcgactagcaaagatcaaaaggcgcactgaagagcttgccgaggagtaccacgtggagttggcgattcgggagaggcaaaagaaattgtttgaggaaaagggcgactcggtagaggcgcagctgatgaacgccgttgacgtgcacttgggactgcgggacctgaagaaaccgttgcaaaatccggagaatttctaccagatcatgttgcaggaaatgaagaatctgctggatggacaagtcgacgcctccaaattcgaggacacattgaggtgaggtcttttcttctgtagatgaacatcagcggaaacacatttgccaattcattgtcagaagcatgttcgacaccagagcatacgttttgttcacaatggacaaacttgtcaacacgttggttcgtcagctgcaaaactttgtcggcgactcggccagcggacaatgtgtcgaacagttcgagaaatatttcgaccagcgagtcaatgggtgcgaaagtgggcaacccgctgctcgtgtggacaaagactacagcgaagcgatggaaaaggtccgatagaccagggacctttggaactcgtccgcagtttcaggtgttgctcaatcagcactgcttcaaaatgttctttttcaatcgcgaccatccggtggtgaccatcgaactgattgacacggacgagacggaaagtgaggaggaggaagaggaagaagagagtgccaatgtggtggcactgcacaattggaagcattttctcaaggacgaggcaaaccatttgaatcggggctcaaaacactcgcatttgaagggttgcgacttggacgacgactcattgcctagaaaaagggaatggaagagcgaacagccaaaattcttggccagaaatgtgcgctatcgtcgtgccttggccaaattcctccagtgtaatttcgctagttcgtccgtggcaggccaaagtcccgccaaaaacaacagtgaagagccgaccaccaacaaaatgttgcatttctatgtcagcaatggcttcattctgattcctcaactgcgcaacgtgtctgatactgaaatgctttctgatacattaatccgaaagtgcagaaatagaaaggtggacttattggaaatatgaaatttaatgttatttcgttttttctttgtttagtcatttcggaagaaatccattgcaaatacaaagaaattcaacatttggctagacaaatttcacaaggatgacactgagcttagcgtatgttaaagtctcagatctggcgttctatcccactttaggccagatggatgaccaccggttgtacttctcttccttgtcaacaccatgaattcaaatttctccgtttcaatatttattcttcaaaaagtgtagacgaataagaagaatgtaaatcggatgctactgatcaaaaactttttaataacaataaaagactcatatacataaatggtaattcctaattaaaagtaaaatatgttttatccttttgctgtcagacaatgagtttcacaacaatatttattgcttaaaaaatatttctagtttgaatcctctcgatgagaagttcaaatacgataggattcgaatataaaaaatacatgtaaaatcaaagttggctgtttgctaatattcttcaattttacaaaaatgcaaaaaaaaaaattacacttacaattagatttgttgattaaatggtctcgtcttcagctatattttttccaccacccttaaaggtgtgacatttggtcattttttggtcaaaatcagttaattaattgataaaattttcaaaaaaaaattttcagacggcgcctatctgcatagacggacggacccctttgttcctagtttttgaaaaaattgcgccgaaaaaaagcatttttgaaaagcaaaaaatatgaccattaacagatttgatttccgatctctttttaccgtctgacccattcgaaaaatcttagtcgcccttttaatgcatcccgccagcccctaaaatttcttgtcaggtttttccgagaaaattccattaaaa

SEQ ID NO: 19239 - DNA, 2610 bp, Heterodera glycines
  unsure (1)..(2610): unsure at all n locations
acccaaatgtaagtgtcgaatttttcactccatgctgtcattattcattcaacaaaaccagcaacaggctcatctccctcggtctcgctcctttttaagcgtcattgcgttaaagggtggcccgccccacaaaaacataccagtatttgattcgctccactgctccgtcctcattcttgcatatttcacaatccccattttcaatttggtggggcaaatcggcgcaatcggtgcagctcacgcgcgcagacaagaagtttactttatgaacttgttggtgtccgccccccattgggtcaagccgcgtttctgtgtcccaacagacgatacggtaacgctgtttttccaatggaatccgctgttttttaataaaacaaccggtgtctttgccgtgatagacctaaaaataataacaacaacactgtttggttcccgcaacaaaaaaaagaaataaacagtgcagttaccttgcaacgggtgcaatatttggtgaaacatttatgtggccgttttgggtctcgctgataaacgcgccaacaacaattgcaccgcttcagcagtgaacatgtctgcccctgatggtcgtgatagcaacgttgcgagaagaagaatcgattgcatgccggacaaaggatttttacaccaggttcctttgcacatgggtgctccggcccaactgaagcaacaatgataagcgaaaaaaaaaactgtgcgtgtactttttgcacattgcggacaacggcgaatgcattccagcgtgtgcttcaatgggcgcccgtacgagcattcgcaatcaacgcaataaaaattgccaagcttgaagaagcagttaatttttctgattccatcatagtgagcgttggacaaaaagagcactacatcgaaacgacgccctgatggacctttccaaattggtttaggcaactcctctggatggtcctcaaatagtacaatgcgatacagtgcgggaaaccgctggtcctgttttggaaaagagaaattcacgtgttagaagttgttgtttgtcactgaacccaatagtgttgaacggtttgcaaatggtccatgccatatgcgtgttggccttcgggtacgccagctgcatgcattaggcggtgcactgaggaacacatcaactctcgattgatgataagacggcggaaagcttctttggtttcacaaaaatcctgcatcagcatcagtcgtgccaaattctgctgttgtggctgttgatcagctaacatccactcgttgaacagcacagggtcgtggtacgctcgagcaccaataagcgcgtggaacatacaataattgtcttcccaatctctgatccttatgcgatgcgcctcattgtagccccaatgctgatacgggtagaagcgcggtcggcccgccccggtaggtggagttaaacaggtcacagtgatctgcaccggttcgctgagtagcaatgatcgtttgtcgagcgcttcaccactattctctccaacaccaactcctccgtcttcaccatcactttggccaagcttgtccagctcagccatcagcgtgtcacagctgttttgttctggcggtcgaagcggcaatacgattgggtcatgtaagcctatttaataggtaaggaataaaagggctaccagccgaccaatcaaacctcttccctgtagcgtaacaccaattttgagaactttccggccactttgctgctctgcattttggattgcccgttccataaggatttggaatgcaccgcgcaagacttcgtccggttcctcaacgttggcattcagcacaaactctgtgatgtgtcgtgacaccgaaaagcgctccagtctgtgcactgagtgtgagacctgttgaaaaaggtcgtttccggtcgattggctgccgccttccgctctagtcccgcgtccctcgccctgctggtgttcatcatcattatcgtcatctgttagttgctgttgtggtgttgacaaagccgacgactgttcaggtgggctgggctgctcaaaaaagctcattgaacgaaagtcccagcgccttttcattgtgctgttatttaaggtgaaaaacaaattttttttttcagagtgtttcaaataatttggcaatttctctatgccttttttttgtcaggctgttacaagtgcaaacatttctttaacaattgttttttctatgctaaatgcaacatcaatatcatttaagataggttcatcattactcagcactcttgtcaattcttttttgcctttttcacggcctcggtgctggtcgatttcgtctccccaaccagctgaatttcatctccatcgtcatcctccgactcttccttcagttctccatcctctttctctacctttttcttggccttctcttcctcctctttttcgacatctttgttgtccgcgcacatggacatgattatccaatcgaaatcctggccttcgaaatggcctttggactcctgattaaacacaaagtttaaaaacaaatttagcggcacacactcaaccgaccttgatttgcactttgacgaccacctccttgtccaattttgcctccaaagatttctgcgagcttttcgggctctttttcgctcanattcgt

SEQ ID NO: 19240 - DNA, 1916 bp, Heterodera glycines
ctgactagagaaaggcaaatcaacatttttctcttagcgaaaattgttttaataaatatcaacattgacgttgatatttatttaatatcaacatagcattatgccatcaacgtaatatcaacgctatttttaaaattgggataattttttaaaatttaaagcaatttttcaaaaatgacttttggcggaaaataagatggggagagagataacgcaaaagtgagagggtgttatattcagccccagtcatacaaaagcatttttggtaaagaagaataaagaaaaattaattaaaaagagagtgttatgggaagagatttaagacagagagagaatagagaacatagcgaggaatctgcgtctcttatcaaaagaatcagcgaagaagagacatgaactcccttcccattgcgctctttattgaaattgttttctctacctccttcatcaaaaatgttttgtatgactgggactgagatccagcactctctcatttttgcgttatctctcgcactaaaattataaaccgctcatataaattttaaaaaattttcgcaaattttaaaaattacgttgatatttgcgttgatggcataatgttagttgatttaattaaatatcaacatttaaattgataccccgcaaaaactaataaaaaggttgatttgccattctctatatggaacccgttaattacttctttggaaacgatgtttttccacgaccctgaaccgtattgtttttattaaatgcacccgactccgtgggtccggaataacaagattttaacccggaaatcctgtccgggtgcagccctaatcagacaaaaaccgtcttcaaaatgccgggctctatagttcgagtttgaagcaccttatacaatactacatccccattttcattttaggaagctagcctaaataggaataaggggatatggatgccaaactaattgtaagcatcggcttctcacccatttataaaacaaggaaatttgcaaaaaaaaaaagatgattcatgcagggtttactgatgaaccacgttttaaaaaaacgaataaagcaaaacacatacataaatccataattaaggaaataaacaaaatgaaatttaaaaaaaacgcatggacaaatttttatgtgtgacaaaataaaatgtgtgcgtttggtgtaacttttgaagatcaattaggcaattatttataaatgatcagattcagtttgtttgaaccgctggtactgctcgggaccgcggctgctgctgccgtggtcgtcggcggctcccccgggggcagttcggcatgcctcgcaacaccgacggtgccctcgatgagctggtcgcgcagtgtccacaacgcttgtaccaactcatcctcccgatgcttcgaaccgttggatgacaactgaataaaaaaagttcagttgatgtgtaggtatgtcccaagccaaataaaattttcaagcgctttttctcattgttatatatatttttttgaatttaaaaatttgtcgctgatttgccacgccgcgccgccgccattccctcgtccttacccgtatccattgttgtgccaactgcttcctgttgttgttgttgatggtatcgaagaacaccgaagctgttgttgttgctgtcgttgctgatgaagatgccgccgatgatgaggcggaggaggatgatggcattgccgtggtgttccgttgagtcgcctgcaaattcttgtcccatttgctgaccgtccgctgcactttgttgctgtacatggactcaatgtaccttgaaaattgagtttttaaaatgccaatgccatcattgatccattgcccgcctctccaccgctggctgaccttacataagcctcggaatgaagcacccgttggaccttcaccgaagtggacggctcaacaaacacgggc

SEQ ID NO: 19241 - DNA, 937 bp, Heterodera glycines
tgaacgaaattcaaagggattaccgacagacaccgccgttcccccacaaaagaaatgaaattttggtaattttattaaaatgtttttctaatttattagttgaaaattgttctttctttaacatttcacataaacatattaaaatattagcgagtgaatttaaactttcaccgttattccatgaaaatgttcattttgctaattcctcctattcttccttttcctcctcctctccttcttcttcctcctctttctcttattcctcctcctctgctccttctccgcttcttccgctgatcatcttcagaatggcatccatccgttctttcgtcgtcaaatttttggtggcaaattcctccgccaattttgccgcttccgttggctcatcgtttgccatttcattttcactttcactcgtcgaaaggcattcaaaaggcggcgccggaaacggaagcaacgaacgattggacagtggtaaaacgctgaaaatgggaaaaaatattcaagaaaatggactcgtgtgagggatttgccggacttgcaaatttttgaaggaagcgtcgggaccaaatcccgatcaaatgaaaacgaatgataagacaaaaaaggagtgagaaacccaattgatcagactgttgaaaaaatacatgtgaccttttgtcgcaccctgtatttaatcgacgaacagttaagaattgggaaatttccgattcctagcgcctctcggcaccgcaagaacttaaaaaactaccaaattaaagatttttatgtatttttaaacaacaaaagttaagacgctgttattttatttaaaaaaatccgggtctagcctttgaggagccttgggtttttcctggattaggatggaaaattcccgaaggaattctcaattgaatgtaaaattaaaataaatatcatttaaattaaaattgctttg

SEQ ID NO: 19242 - DNA, 1173 bp, Heterodera glycines
  unsure (1)..(1173): unsure at all n locations
gatcaatgtgccacaaaatgcaccagaaatgagtaataaaactattttctttatgaatgatatgatgtttttcttctcctgaagttacaaaaataatancaaattcatttccatattatttacgcttataaacaacatatggcagattaagataaagatcttttaggccaaaccaaaaatttttgtttagtaatttattttgtttattttcatttttatttacaacagtgtccaattttgtggtgtccaatttaccgggagccaataattattgcggggaattatatggataaataaattttatggagttttaaaaaactgaatttcttattcacttcgtaatttcagaatgacttgaaattttgcaggaaatgcccttggtatttatattggtattttcgtgcatattaacgccccctttttttgcattttcaaaaaatcctctgttagaatggccctttctcttttgttccctaaagaatagaaaattaaaaaaatattatataaattttagggccttttctcaagaatatacataaaaatttgacttacagtcaggtgcaaaatattgcagcaaatttttgtaatcctatgcctatataacaatatataaaataaaacctacgcatttttttagggattactaaatttgttgtgaacacatttttgctgcaatactttggcactgactgtattcaaaatgccagaatttttttctatctttgtgtaaaatttgaactaattaaaagcaagaaaaaagatacataaaaaagaaaaccatgccatttaattacaaaaaagttaagtggtttttggaaaatttaaaatttttatacacaataaaaaatatgaaaaaccaaagaaaaaagaaatttaaatgaattcaaaataaataggtaatttgtgtggatgttcgttcttcttcagccaaaatgaaaacactgtgaaaggacgggtgaataatttatcagatcacaacatcatcatcaccagcaaaaaaaggaggagaaaaagagcaaaatatttacatttaccactcacattcttnaacaaatttatttagccttcagccaaaaatgatttggaaaacaaatgtttttttattgtttnaattngaataatgaatgttgggattaggcattaggggggatcattgaagcaatttttgccaaa

SEQ ID NO: 19243 - DNA, 1521 bp, Heterodera glycines
cgaggaggcagtgatttcttttcatttgacccattaatttgattgctttctcgctcagtattaaaaattgaaaagcatccacttttcaggtacattgaccactccgtcatcacttttctacgttccaatcaacaaatttgggacagtggcaccaaattggatttgaatgtgtgttgttcatacaatgacgaggctgtccagccgatttggaatgttttggcccgtcaaattttgccaatttttgcgccaagcattcgccgtttgcaaatcctcattgctgatcatctcgtcaatttgcgtcgtctcatctccccaacaattctcaccgatctcaccaacctgaattcaatacattctggtaatctgttccccgacgcaattgctgaggatgggccaaatgcaactgcgggccaagcattgtccaaatggttgcacactccacgaaaagatggccaacccaagcgattgcattgcagaattgataatgcaccgaaaaattggaccaacaatttcaaggaggtcaacaccatatttcgtgatttattttttgtttgccccaacatcgcgaaatttggtcaatttattttcgttcattttttggtcttttttgaaaatgaaaccaaattctacaaaaattctgcgcagtctaattagtatgaaaaacatcttctttttgctatttgcgtataaaaaccgggacttttgcatatttttggtttttctgcatattttgccattttatgaacaaaatttttttttgttgcatattttgccatttttcattaaatatttttcgatttgaatatcccttaggaaaaaatttgattatgccaaaattacctaaatccaaatctgaaggatgcgcgagtgggtcaacagtgagtttcactgccgaaaatcttgagaaatttttggttttcaattgcaaaaactgataaaaaataaaattttttaattattttgcacccctaattttcaagtttttgtgcatatttggtgaatactttgcgatttttgtgcatatttggtgcatatttcacgattttatttgcatatttatgcgcatattttggccatttttcttgtatatttttgaccagccctgtttgattaatatgctgcttgaatgagtcttaagcatttttttgccttgaaaaacaagctaatgcttggttttttgggcatgccatttactcgttgattgtttaggcatttctccatgccacaacttctaccagttacacttttatcatttttggatcaacgccaatgattgagccattcgatgtggtgaacgaacgaaccagggaaaagctgatattggtggagaaaaaagaacccaatttttatagtttgattatgaaacgatgcccaatttttggggaggcggcgacagtttgccaaaaagatgaaaatttgaacaatttaaacaatgtccacttttatttgagtgtccacagatgttgcattgggtgagcaatggcattttcttttgttattaaattattactaattatgtac

SEQ ID NO: 19244 - DNA, 975 bp, Heterodera glycines
ggattatggtcataaaatggtttataaactgccaaaatcctgctttaaaccatcaaaaaatgtaagaaatttttttaaatttaacatatgaaaaagttagcagatttttgaacatatttttatttaattatttggcaaattcaaaataattttaattgttatttgaatataacaaaatttgccaatttttattattgtcttgtctaagttctaatattttattgttcccaatgtttaaatatatttattatattttaaattgtcaaataattttttaatttactttttcacttctttttgacaatcgatttacaatttctgtgtcaattcgttgaagtcatttgataattgggatgattcattatcattcgctcgtttatttctttagttttaagttttcttcataaaacaatcaactaaatgtgaacataaattcttaataattatttttatcattttttagacatttaaaaataattaatgcctttgacaaaatgaaagaagatttgaaaaatcagcagcaggtaaatacaaaaagattttcagaatctctcctttcttccgaaattttccttgcaaattaatatttaaatttcacaaaccttcattttctctaagacttttatcccccggggtattcgggatacctgttaattgtcatcaaatttattttttccaatctcaatttcccctcgctttgacagatacttcaaatcaatccaaaaaatcggtggaacccggaggattgtcacaatgagctgttccttttcaagcccaattttttgagggttgtttaccgaggaacaaaaaaatgtaaaattaataaaataataatattttaacatttatttaattatatccgataagaaattttgttcagcttatcgcacagtccgtgctgagtttgcgttgcatcgtgatggtggaattagctattttgaagtgaaaattgaattgttccacaaaggatcgggg

SEQ ID NO: 19245 - DNA, 2060 bp, Heterodera glycines
  unsure (1)..(2060): unsure at all n locations
aaatttccaatgaatggaaaaaatgcacttttgctgcattagagggcnannnanacnccaccgagnaggnggggccccttttcagcngggcnaaannnggcacnnagccaaaagaggcagcngncncaagcacagaanancngangnngggccccgcacagncacaacggncacaannaancanngacncacagcnngaccncaannccaagngggaaannanngacacnnccgngggcannanacagncaaaangcgnccaaggggnnannaangaccannccanaggcnnnggcacggncagaaacgcaccaaaagaanacccaaggggaaaannaangacgacnagcnncggnnggacagacangnncacaaaagaanggnnaagggcgcncagnnggcnncnggnacaacagacnncacancnccnaagggganannnangacacnnncgnaggcannggnnagaaangcacncaaaggaaagaanaanaacccnccgnaggcnnaggnnncggcagaaangcacncaaaagaangannaangacccnccgncngcccngcgnnggncaaaangcacnngaaaggggngannaaggactctctgtagactttggctactcaataggctttgggtctcgggactgaagtgtcccgtgggcactgggagtgaaatggctaaacttaaaaaataactctggggcttaaatggtggcactgtaaaaataactctggggctcaaatggctgcgctgtaaaaataactctgggggtcaaatggcatacgcgagcaaaacattataattttaaatcatataaacctaaaactttataattttaaatcatattacaattaaataattaattacaaaaataaaactttgtgctcatccctttaaatttttctacttatcacttacatcttttacttacttacccctttttgcttttgcagtattttttaccctattttttacctcatgcgctcggttttggagttttgtcaatcgtatccctacataaatcattttttttgccctggagtgatttaattttcttattatcattttttttcaaacggtgatgtctgaaaatgcctgagggagattaatttctggtactaatttagtaagtaaaatattgaactgaaggtgtttttccaaagatgccaaatgcgtgcgtatgtaccactttacattaataagatataaactatgtttatggtgtttttcaaaaatatactgtatttcttcagaaatagtggatattagactatgaatggttaacacttatatttatgtgcatatatttcagcggagagaaaatcataagacgacaaaaaaaaaactttggaagagcattggcttctaaataatttacatatattttcttcagtttttttccattcccgaaaaatttttattttttcatagaaaattttataaaaataaatctttcggcttatgaaggtaccgccgccggaccccttcctgattttttaaaagttttcaaatccgaacgcattttatttcttataacaaaaaccatatttgctttaaaataatttgagttgaaaaatgatttctttttttttgagccaaatatttattttttcatgagtgatttatttgtttcgggaaaattttcaatagtcacactgtttttgagacttttagtgaacaggttataaaaaattgtgttaaaataaaagaaagatataataaataatatgtatacagtacatggttagattttcctaatattttcaaaaatgttatattaataataattttttcttaataaaataattctatagtagatttttatccgcttttcatcaattttttcatcaaaaaattttaattaaaaaatcaagttgcggttatttttaacctaaaagactgaaaatttgatgtttttaaatattattatagactttaatcatggtaaattgtgactaattttgatgtctaaaaccataattttcactctttaaaaatgttattaataaaaaagaagtatttctcaagtatacttctaataaataaattagtatatga

SEQ ID NO: 19246 - DNA, 1118 bp, Heterodera glycines
  unsure (1)..(1118): unsure at all n locations
ttttatgccttggaattgatgcgctactactcattacacaaacgtggaataattactgaaaacagatggcgatggattaacaacaaccaaacaacggttttacgacaaaaagtactacttttactcagcgatgccgggattccgacaactgaacctgagtacgaccctaaaatatatatacatcaagtgcaaggcctttggagcgtcaaatatccaggcgaatacaaaatattcattttcaacgactaccagacacggcctattattaaatcagatgtagtagactaccaattcccaattctactctaccacaaaaacaaccacttcgacgggattaaaaccatctccaaatttttcaacaaacggtattactgcctctcctgtgaaagtgtctacgagcgtaaaacaactcattcaatgaaatgcactgcattatgtcacgggtgtcgggaggtgggagtcaattatccgtgtgagcctcaacaagggtaccttaaaaaatgtgaatactgcgtcaatatattctacaactacaattgttatgagcgccatcttcaaaaagacttgtgcaccaaattccaacgctgtgaagattgtggggtcatttacaacattaacgttcatggtagagaaggaagaaatgcgcaccaatgcggagagaaattttgtaaactttgcaaacaatttcacgtaaaggacgacgacgagatgaacccctgcagtagctgcttcatacaaccgctgaaacaacataaaatcaaaccgtaccgaatcatagcatacgactttgaggccacgcaggacaagaaggtggagaataaattcgaacacgaggtcaacttcgcagcggctaccatcatctgcaccgattgtatcaacaatagcagttggaactactctctgaaagggaaaaactgtgcgatttgcggcccccaccgcacaataacattttcgccttttgactacacgaaaacaacaatcgacaaaaaaatcgtcacacaaaaaccgctgcgtgaattcgttcactggttattctttgaacacaacaaaaagtttccacacagtcgcctttgcacactttggtggccgttatgatataacattgtacatcanaggaa

SEQ ID NO: 19247 - DNA, 1134 bp, Heterodera glycines
aagctaattagcgattcaggcgcacattggggcctgaattaagccatttttccctttgatcggtacaaaattggccgaaaaagagatagccattttctgagccccgaaggaaaatttgagagggctaatttatatgtaatattcgaaagtgccaagctaattagcgattcaggcgcacattggggcctgaattaagccattttccctttgatcggtacaaaattggccgaaaaagagatagccattttctgaggcccgaaggaaaatttgagagggctaatttatatgtaatattcgaaagtgccaagctaattagcgattcaggcgcacattggggcctgaattaagccattttccctttgatcggtacaaaattggccgaaaaagagatagccattttctgaggcccgaaggaaaatttgagagggctaatttatatgtaatattcgaaagtgccaagctaattagcgattcaggcgcacattggggcctgaattaagccattttccctttgatcggtacaaaattggccgaaaaagagatagccattttctgaggcccgaaggaaaatttgagagggctaatttatatgtaatattcgaaagtgccaagctaattagcgattcaggcgcacattggggcctgaattaagccattttccctttgatcggtacaaaattggccgaaaaagagatagccattttctgaggcccgaaggaaaatttgagagggctaatttatatgtaatattcgaaagtgccaagctaattagcgattcaggcgcacattggggcctgaattaagccattttccctttgatcggtacaaaattggccgaaaaagagatagccattttctgaggcccgaaggaaaatttgagagggctaatttatatgtaatattcgaaagtgccaagctaattagcgattcaggcgcacattggggcctgaattaagccattttccctttgatcggtacaaaattggccgaaaaagagatagccattttctgaggcccgaaggaaaatttgagagggctaatttatatgtaatattcgaaagtgccaagctaattagcgattcaggcgcacattggggcctgaattaagccattttccctttgatcggtacaaaa

SEQ ID NO: 19248 - DNA, 2387 bp, Heterodera glycines
  unsure (1)..(2387): unsure at all n locations
caagggcgtaatcagtcccctactctcccncaaaatttttaaaggaaatcgggatttttaaatatttttctttttaaaaaaagtgataaaaaatattagtaagtgaagcaaaaaaaaaaaatcgtgtcactgggaggtagcctgctccatctacgcaaaaaggtctggctacgccattgattcaaacccgtattacgaaaaactgttgagggaaagtggggggagaaaatgcaaataaacgtctctcgtggagggcccacggggatgtatccagccaggatgctttcttacatttagcaataaatcataaaaatgaattgaaatttttttcttagcgaccacttgccaagcccaaaaagcctcaatcctgctggatatacgtcaatgagccctcccctccccaacacgggtggacaacaatctaacaatcattgaacagcctacggcgttttccttgagcggatcgaggcacccttctattgtgatggttaactgacagagctataataaagcaatgaattgccagtattttttgaattctctctttttttgtatcaacatacccttgacgctaaattccatggtcgcattgataacgcgatatcgagcatttgtgggctgaacaatgcatttgtaagagccggaatccctaagttgtgcgttgtttaggccaagcacccaacaagtcggcacctttgaaaaaaaagaaaacgtttaaactaaaaggaaaacacatatttcttaccgaaaagtaagtgtcgatgtcatgtgagaaactttcgtatggtgtgctggtcggttggtgttggattgtatcattttggacaaaaacgaccccatctttgggaataaatgtacgagggtccaagttgacacaacagaacagataagcggcaccacccaagtttacgaaattggacggagtggcagcaaaaactacttggagttctcctgaaaggaagaatggaaagcaactaataaatcgttaagttaattatgttaatatttttcgcccagtaaaaaacgagtcaaaaattttactcatcagaattacgtttgtcacatttcattggcagccgagtgttgaaaccgggagcgggcggaagcacaaattggggatcgaactgtggcgggcaaatgcaccttttctgaactaaaattggtcaaaaaggggaaaaatgaaaaacggacgtgatagcacaacggattgcgaaagtcgtatttggcagtgtacgagtcgcccattgacacgcaactgtaatggttattctcggaacactgcacaggcacaactgaaaatacaaagcgaccgtttagccacaaaactggaaaaacggtactcaatggacatgaactcgaacagaaacagcgcccctttccatttctatccttcacacaaacgccgctggtcacacagtcgaagttcgatttgcactcggggacacctaattaaaggatggctaataaacaagataacaaaatggaatttgaagaccaaacccaattcgtctgcgttttttctcctttccaactcccttctcctccacgaattaagtaactcgtcgccgaaactcaatgttggaaaggccgacaaaaatagaaaaacggctcgccagcactcgcatttgtgctgcaccttgacgaagccgacatttttaatggactcgtttaacttttgtgccggattaatagaacagtcattggatgttttaactaaaataataattatacataatgagataattagtaatttgggttaaagccttcaatgctgtacagatatatttagctgtgaagaaatgacaaaaaataaattaatataatataattaactaaacttggagtgaattaatagacaaccgaatttttttacgaacttgagaccctttctttccccgccgcacatccatccaatcgctcatccaaaattggagtaatttattttcctcaagtattgcaatcagctgctgctgcgatgactactcgcctttggtggggtcgcgtcgccagtgaacgactcgcccaatcaaccactgccacttccggtaccgacgcgcactggtgaaattttgggcaggtaactttaaaaaagatgcatcgcacagaatagggaaaagatttagaaaggagaaggagacactcactagtcgatacacacacagagaaaaagggtttttgttaatttattgggactcaatggggggaagaaggggagaaacagtgacactggcaaatgagtgaatgcgcaaatgacagcggagaaaagggaacgaaaattaaaaacaattgtgggggggggggtgggcgatgggaattgcgcgtaggaagactaattattagaaatcttcttggcgactaatcatcatcacgtcaattctgatacataa

SEQ ID NO: 19249 - DNA, 753 bp, Heterodera glycines
ttttgcacgcagttatgataaaggggcaagcaattttaaaaagttgtcatgttattgatcaccataacttcacacaaacaacggtaggtactacgatgcataaggaaatgccgtgcattgtaggttctcatcggtaattcgcttatctggacattgcgcaacagcctcaacaacgccggcttctttttgcatgcattatttgagtgtattccgccgtaccagatttacatattgatcgaattgttacatgattgtgattgtacattgcataccaagtttttcgggatcgctgatcaggaatctgggacaagttgaggaatttaggaattaacctctggcaagacaaatactttctaatcagtcggtacctttgaagccccccccccccctcccgaatgtgctttgtctgattttaactaaatgttaactcatcttttgttttttgcctccaaattaaagtattttttatttaatttatcatttttcagtctgtaaattcaatcaatgtcttcacgtttctcaacttcttcagatgaatcttcttcatcctcacgttgttcgccaaattttgattttgattttgttagtggcattttatccaatcaattgaaaaaattcaggagccaaatatttcaaacgcttcaggtaaatgagcctctgacctttctgaaaggaatgattatcagtcaatgcctcattaagtcgcaatggggaggatacgaatcgctttcatcactgattaatgccttcgtg

SEQ ID NO: 19250 - DNA, 1070 bp, Heterodera glycines
ctatagtagggtagggcccccgaacccgtccccgaccccaaaatttaggggacattcgggctataccctgaccatgacgctgcgcaacccgtcaaaccccgccgccgaaatgtcatcctgaattgtgggtcggactaggtaatacattcctaataatgacattttgtgagggaaagagaaaatgttttgttcatttttgatttcattaactataataatcagggatgcaaaaaacatgcaaatgcatttttttcctggcttctccatgctctaaatagcaggatttttttttgtgtttgcgtataaaaatcgggacttttatttgcatatttcgccattttttggaaaatttgttaacaaaaatgcaataaaaacgttgaggaaatttggatgctactgattaagtttggtgttgacgaactcgcatagctaaagaatttttaattattttttcgaaaataaagccttcgacgggatgactgggtctgtgacgcggtcgggtacccggacccagccaggcctaatttatactattttctatttttgcggctttgtttcgacgtaatataacgaaaaatacacctaatttatacggataaattttgacaatgttcagaatttaaaaatgtaaaaaataattatttaaaaaaatattattttttgtgatcagtaggattggaattttaattaatcgatgaaacgggttatttacattattattattattattatattattaaatgcgagcactcagtcgagggagaaattattgaatttgtaattaataaatatagtaatcttgtcaatatttcacattaaaattgtgtagaacttagaaggaaaaatataaaaattcatttttggtaatattatttattactttatgtttctttcaaatctaatttatattttaactaattatttaaaaagattgatagaatgaaactatccctattcctctttctaattgcaatattttaattgctcaaattgaaattggagcagaaaagaaaaaggcacaacaaaaaacatttgatgaaatatttagagaaaaatgggaaggaaatgaa

SEQ ID NO: 19251 - DNA, 1046 bp, Heterodera glycines
  unsure (1)..(1046): unsure at all n locations
aatttcaaattagggttgcaaccccgacgtcggggttggaaaattcggggttcggggttgtcggggttggaagtgtcgggtttcggggtcggggttgccaaatcgttcggggttcggggtcggggtcggggtttttcaattttttgccttatgccaaatagtcaaaattttttaaatattttttcggaaataatatttattaatttccataataatatttgtattgtttttatatttttttatttcttttttatcagaaattttgtatagaattaatttttttcttgaaattttaaaattttttattacttttttgttttccaaaacatcttttttcacgtcgctcttttctaaagacttaaggagaaagggtacggcgtccggcggtgccgataggcgccgccgggaaaattttgaaaatttggttagatctgctaacagattttgtccaaaatatgctaaatttttgcgattttgagccaatttttttaataaggtttatgactttttgggccctgtgatgccgataggcagcgctaaattttggaattaagctctattttctaagatttttcaccaaaaaaatttatgaatttcggtaaatttttgtttttcttcgatatgtattttgtcaaaatatgccaagattggtcgatttctatgagtatttaatttaaaaaaaacaatttgtcacaaagaaaataattaaagaagaaaacgtcaaacggtatcgaactcacgacagaaagtaatgtcaatgtgatgcactaacctttacaccacattccaaatgtccaaaattgagcaaattttctttatttaataaaaatttggcaaatggttaaaaaaattcaaatttcgtctaacttttttgcattttcacccacgaaaatgccattcttaggggtgtatatttaaccccgaccccgatcggggttaagggtcggggttcggggttgtcggggtatgaagcgtcgggggtcgagattttccccgaaaatggccaanaatgtcggggttcggggaagaggacgcaaccctatttt

SEQ ID NO: 19252 - DNA, 1417 bp, Heterodera glycines
agattttccaagcattattgatttctcaaagatttgtttactttttaaaacaatgccaaaaaaaaatccaagtccatgccttgatccatgccatgacagcctggatttttcctgggtttttgtccaggaaatccaggccattcttttttcgaaatgttcaagggcttctttaatgtccaaaaatttcagatttattttataattgctcttatttatgtacatattaaattaaggtttgaaatgtgagcccataaaaagaggggactctttctttttgctcaaaaattttcacaaaattccaatttacgagccaaagtttgagaagaacaagcaacaaatggttgagaatatggccataaatttgttcaattcattgaaattggagcacataaaaagcgaagaggaaaaaaccaatgaaaatattttggaaaatgaaaggaaaattgccgaaatgaaacggtggcgaagtgcggaaaaagcaatgaaagagcggcttaaagtgttggtgaatgatgcgagcaaaaagtgccaaaaaatgcggaaaaggttggaccgatttttaaataaaattggcataaaatttgataaaatgtttgggaaaaacaaaaaaaatgaatttgacggggaagaaaatgacagcagaagagaggactttgtgggatgcatttactattatttgtactcattttcattgaatttgattagaaacattgggacaaaaaaggcaaatgccgccgataattgcgataattatgatacgaaacaatgccaaaatggggaaaaagatacggaaatggaaataaaaaatttgagaaaaatatacgaaaatttgcgtgaaaaaatgtggcaacaaattaaaattgtttatgcaaaggatgatttgaaaaagatgaatgatcagcttaacggtgaccagaatgccgatgatgatgatgaatttaaaaaatgtgcaaatattgttgatgaagacggagaagagccaatatttaatgaaggtgactcaattaaggaataattagcgaataattactttatggttaatgtctgttgtattggcaatagaataaccatatgatttatgtaaaaaataaaataaattatgacgcataacttttttacatgataaattaaatatgaaggcttgcttttgtttttaggttctaaattattaaaaaatctaaaaaattaattttcgtcttattttttcatttgccacaaattcgcaaataaatccacccgttgttcttaagatgtgtacgggaaaagtttcgaccaacatttgatgcaatgcattggccaattccttgaatctgttgccaacgatcagttcaaataccatctttttgtcaatttttacaccaaacaattggactcggagattgaatcccggatcaatggcacagaaatttgtgccatt

SEQ ID NO: 19253 - DNA, 1057 bp, Heterodera glycines
ggctttctctcttcccatttttatggctcttcccttttgggttgttccattctccaacggtaaaggatgccgttgcggggtatgttagtgatgtgattgcgtcattttctttgtaacaatgcatgcgtgtgctctccgaaatgggtttttttgagggttgcggcaattcactccgttggcactttgtggccgaaattttacacctccaactttggcctgggggcagctcatggaatggtatttttggaatacaaaaccgattcgtcaagtgtggggggtaggttataaaaagttttttatgatccccccccaacaacatgcgacgccatcggccgttttgttcgtctcgaggcactcgctgtaattttggcattcgttgagtgaatgttttggttgtgttttttcctccctttgtggccatcggtcggcttgtccccctcgccttttcttctgccctaaactctctctcgttttcgcaatgtcagccgttccaagcgatcggctaagtcgtggaatggtcgttgtcgaatccatctacggccttcgcgtggtccgttgtgttcgttgaaattaaatcgattttcgattgacattttcagtcagcgtgctcaattctgggcccaggagtcccggcaaaatcccggcgggatcccggtcccgtccgggctctaataattatcagatattttccttttatcagatgcttatgattatgctttttttatcttatttaattttattttataatttgcatttttttattcccctcacaaagtgaagtgttggcatcgctgaacaaaagtgtcacacatcgtcttaattttgagaaaattacgaaacggagtgagaaggaaaagtgggtggaattgcatgaacagcttgaggatgttctaatgagacggcaagacaaaagttgggcggacagaaagcgacgaaaagtgcacagaaatgccgaaaaccttcgccaaaccttccaaaaatggagtgccatggccaacccaataaaacacccgatcagagatgaatatcgaaaagtgagggaactgatcagagggaa

SEQ ID NO: 19254 - DNA, 1286 bp, Heterodera glycines
atcgattttagtgcgctaggttcgatgaaactttttataatataagcctaaactttttggcctgtttaaaaaggaattaaaaatttttaaaaattttattcatctcccttttgatagaaaaagcatcagagagccttatttaacttttaattaacatttggtgcgtttcagagcagtttctgaaaaaatatttatgaattgattttgctaaaaaaataaaatagtgaagctttaaaaattaataaaaaattttaaattcagaattactggagttagcatcatagcagtgcttttccttgtctttttgatgctctcgcaaaatctggttcgcttctgaccagtttataaaaaaaaagttaagcctaaaatttttcgcatatttaaaaagcaattaaaaatttttagattttttattcatctccctttttgatagtgaaagcatctgagtgcctaaaataacttgcaaataaaatcggttcggggggaatgccccgaaaacaaaaaatcgattttttcaagtgtccgtttggggtactcaaacaattatggggagcaaaaatccaacgcagaattaaagtacaggctatagggaagctattcccgaaggattcggtctccccataaatctgggcgcatcggttcggggggactgccccgaaaacaaaaaaatcgattttttcaagtgtccgtttggggtactcaaacaattatggggagcaaaaatccaaagcagaattaaagtacaggctatagggaagctattcccgaaggattcggcctccccataaatctgggcgcatcggttcggggggactgccccgaaaacaaaaaaatcgattttttcaagtgtccgtttggggtactcaaacaattatggggagcaaaaatccaacgcagaattaaagtacaggctatagggaagctattcccgaaggattcggtctccccataaatctgggcgcatcggttcggggggactgccccgaaaacaaaaaaatcgattttttcaagtgtccgtttggggtactcaaacaattattaaaaatttttagatttttattcatctccctttttgatagtgaaagcatctgagtgcctaaaataacttgtaaataaaattggtgcgtttcagagcagtttgtgaaaaaatatttatgaattaattttgctaaaaaaataaaatagtgaagcttaaaaattaataaaaaattttaaattcagaattactggagttagcatcatagcgaaggttttccttgtctttttgatgccctcgcaaaatctgg

SEQ ID NO: 19255 - DNA, 2278 bp, Heterodera glycines
  unsure (1)..(2278): unsure at all n locations
ttttgcagtaccggtatcgttttttacaataccgattccctctctattctattcacaattataaaaaatatataaagtgaatatttcatgtgatttatgattgaaaagcatgaaaaacagagttgccaaaatgttcattcagttaatttgccttaattcaaatattatatgctaaaatgtttcgcctataaatgagattgaaccaaaaatgaattagctggttgaaaaacaattttgacaaccctgcataaagctcggaaatatgaattttttagtgctttgcactatttttcatgccgtttgcatggacgcgctgtacgtggagctcatggccgcgctaagaaaattgaaatttggtgcaagaatataagcacattttnggcaatctttcggaattgtggtcccgaaaaattttttttaatttctaaggtactttttctaagcttaaaaatacgctaatcacgaatatgaactcggatttgcccaattccgaaacccagacccgaattcgaacaaaaacttgaatttttttttcaaaaatatatattaaaatcgatcaaattttggcgtaaaccgcggatttttatccaattaacaatttgaagcattattttaatcaaaaaataatagttgttgcatgaattagttttttatcccaaaaaaatgcattcttgaaatttttttttcaatttttgttcgaactcgggtcaggagttcggatttgggccaatccaagttcagattcgtaatcagcacccttgaaaacccttaaaatatgaattttaaataaaaaaaaaattttcgggaccacaattccgaaagattgccctttcaaactatctttaatctaaaaaatacgaaattctagtgcgttaataactgaacagtgaattccgactgaaccagcactacgcttatatagattttcgataattagtcttgccgttccgatttatgcattgcgtcgagtaaccccattttatatcagaaaaataaatgagatgttcagccagtggtttgaaatgaacaacaacaatagacactgatcccttctcccattgtggtccatcatcagcgtcgtcccccgccgccgccgcgtggaggccctccgcggcctcgtccacgtccgcgcggcccaccgcgtcctccacggccaccaaatcggcgttgagtgggcttcttgcgcggctcgtcatcgatgagcaaagtgtccaatggcaaagaatccggaagaacaatatagcgaatgttgtttcctgaaaagggagtatgaaatcactaggaaaaatttttttttttcaatttttgttcgaaagcgggtcaggagttcggaattgggcaaatccgaagtcaaattcgtaatcagcacctttgaaaacccctaaaaacttgttttagcccataaaaattagggacccccattcttcacattcttcaggattgccgaaatagatatcagaatcgaattctacgacccagaaaacccataaaaatgttatctcaagtttgtatagtgtttgggttttgagcgaataaactaacctctgatggagagtgtgtccaaactgatttgctctcgtccacgcactgtcatttttaccgagcgcaaatgaatgttcatggccacgtcgacgccctgaatagcaccgctcacttgtgtgccgttcttcagctcgatggtcacagactcatgggacaatttcatcaaaaagcggacaagcttcatcgcgcttactgaccgttggctcttggaattccaaaaataaaaattgagaaaaatctaaaaattaaaaaacgttaaaattaagattgtcctttcatcaacaaaacaaaacgaatccgcactgaaattcaaaaaatcattatgccattttaaaatttaaattttttgccctttcaaaaataaaaacatatagattctgacacttcctaaactcaaactcaaatatccaatatacttttttaaatttttagctggtgcttcttttaatgtctgaaaacatgggtgctatttttgagaacattgctttgcatgactttgtcgtgaaagaagtgataaacagtttcccggacaaaaaggtggcaaattacgtcaatttttgtaatttatttctctaagagcatttttcttttacttgcgaaatccgatgagaaggctttgctcatctgtaagttttttcgcgtatggatatgaaaaataattggtcgccaatttcagttagcaaaacatgttttatcatgttacttatgcaaacccatttttaaaggcaacaaacaa

SEQ ID NO: 19256 - DNA, 870 bp, Heterodera glycines
  unsure (1)..(870): unsure at all n locations
aatttaaaattttaatgttggattaattacattattattttttcttaatgagttgcccaaatgtcattttttgcattccggcataaagatcgcgcggcgtaagtgccgattttgttcggtggcataagtttcgcagcgcaaaagtcagccaagcccgaccatcagcagccgatcatttttggcaccgccggatccatttccataaaaatattcaaatcaaaaatttgtactcaaaatttcaataaaaatttcaattttctccggcatttttttgtcggcattaatattttcatccatttgtaccaaatagttagttaattaacttgagaaaagagctcaaaaaaaaatccaatgcttgtaagcggccccggcgctttcacagggcccattggggccctggttttagttgtggatgaaattttaaaatatgttatgaaaattgataaaaacaattttttaaatattttgaataagaaaattaattcaattcaaaaaattatgaccaattccattaattagagtcaaaatcgcatccctctcaaattctttgctgagccaatggtctcattcggcggcactgatcactcactggtcagaagtggcgagaaaagctgctcaacagtagtgcagaagcaacggcaccacaaattggcacaaaacatacaatcattcattttttctgttttgccgagggttgagaaaatccgagactttttctcgctcaaagattcggcgccgagactctncaacattgcgaacccgagactttcttggttcaatgacggacattacacagcagcagggaaatttctgtccacaaccagcacccccatccaattttgctccnaactcagtncgcccgtactcaat

SEQ ID NO: 19257 - DNA, 975 bp, Heterodera glycines
aaaaaagttaatggccagaaaaacctaaaaaaaacctgaatattattcttggtatcattcgatagcccttaacgtgctctatctacctgcaaaaagaaagaaaaatttattgcttttcaaaaaagttatggccaaaaatcgtaaaaaaaattttttattccaaaacttttttcaaactcgatcaaattttttgaaacttggtaagtggatagagaattttaagtgctaatgaatgataccaagaattagagtgaagcgggaccgggacctggtagcggacaactgagtaccaaggtcccggttttgaccgggaccgggactagtcccggttttttcccggttttcccagccaaaaattcccggtttttcaacccgaaaaggtcccggtcccggtcttgcccaaaattcccggtcccgcttcaccctaccaagaatgtttaattttgttggttttaacaaaagttatgacaatttttttttctcgaaaaacagtacgagttgggtttcgtccctttttttaatctaatataattttttcaaatttgcaggcttataaaaaacacttaggcttatcgtttgatatcaaaataatttatttggttgcaaaataaaaaaaaattagaaaacttcaaaattggcggcgccaaaatgtcccgcgtcaaagtgacccccgactctctccgcgtttccaacgaaatttggcagtataaaaggaacgaaatttacggccaattcccacacacacaattcatttttcatatttccgccttccgtcggctgatgcccaacacctttgctttccttcgttatattttgtcgccactccgttttttgaattagtaagtatttcaaatttcaacttaatttgattagttccttcgggatttttaagttatgtaggcaaactcttaaaaaaacattttccccaccaattaacaaaaacagcgaaaaaaaaatttttttttttgtttcaaa

SEQ ID NO: 19258 - DNA, 1619 bp, Heterodera glycines
  unsure (1)..(1619): unsure at all n locations
gggggaagaaaatgagaattttgaccgtattnttagcagcttttcattnaaaaaaattcataattttgtggatttcgaaaaaaattgtattttctggctaaatttgggtgagatttccgtttgaaactctataaaaaccaaattcaaattaaataattgccaaacattatgccaatttatcaaaatttaaaagattctgaggattttccccaaaagcctcaaaaatcctcaaaatttctcaaaaagccacaaaaatcctcattgacctatcaaaaagccacaaaatgaggataaatcctcagatctggcaaccctggtttttccatatgtgaccattttgccttaccttattgctgtttttattttgcttactttatttttcagttacatgttttcatattctccactaagtgctcctttcttcagtaaatcgtttagcagcccttctacaaatgaacaacgcaaaatcgacctcaaatttacggatttatgcgaatattttttcatatcgcatccattttctggacgaaaagaaggaagcgaacataggaggcatatatatattatatatatatatatatataattcggcgctactgtaaaagttggcctttttgaaaattttttaaaaaagtcatgaaaatacatttccgggggttttcggggccgctgatcacgaatatgacattcatttcgaccaatttcgaaccccggacccggatttgaacaaaaagttgaaaatcgtaaattttcacttttcaacattgaattcgcgccgccaagacacatttatgtaattcaatattaaggagacacactatccatttccagcatatcggggcagtattaggaaaataggatagtgtgtcctatataatgttattatcataaatgtgtctcataagttctgagtaccacatatgtctagagatttgaaattacaatgaaaatttactgatcataaatccgggtccggggttcgaaattggtcgaaatgaatgtcatattcgtgatcagcggccccgaaaacccccggaaatgtattttcatgacttttttaaaaaattttcaaaaagacccacttttaatatagcgccaaaaaatttttaatcaacgaaaagcctatgaaatgtacatgacgagttcgtttaataaagaagactaaataaagaacggaaagaattagggaactgggcccttatatggtttacgccccataaatttttttttcctttttcgaataaaaaaataccgatttatagtttttcggggtcgatgatcacgaatccggcatccatttcgacccatttcgaatcccgaacccgaattcgaacaaaaactcaaaaatccaattttcgacaagaattcacatttattgcccaaaactttgggaatgataatgatggccgttcattgaacgattgacttcaatgagatgaatggtgatcctattgggatcccatatctattgacactgctcggggatcccttcctgtcccgctcacgatccctaaatcccatacttatagtaaagattgagagagagagagaatgtgcgagagagagagcggacggactgatcaacggatagagtactcgccccaggaccttattcgcttt

SEQ ID NO: 19259 - DNA, 270 bp, Heterodera glycines
acgctgcggacatctacatttttgaattgaaaaaaattggtaattactctttctttttctccatattgaccatcatactcatactccccccaccctttctcctccttcatttttttttcctttccttctccaaccctctcctccctctcttgatagtttaaactgaaggcgggaaacgacaatctgatccccatcaagctagcttctgcaggtcctgctcgagcggccgcccggggatcgatccccgatctagtaacatagatgacaccg

SEQ ID NO: 19260 - DNA, 2787 bp, Heterodera glycines
  unsure (1)..(2787): unsure at all n locations
gaccagcgnccgaaacaatgcatacccgaaaaatggatgtcttttttagggatcatgcataaaaatgctcagcatttgttggaggtgaacctgcagcagggctgaacagcgttcatggatgagctgatcgatcaatatggttttaaccactccaatcacccattatgcggcgttattccattttttgcttttctcgttttcccaaaaagtttgccgtcgtatgtccattttgccacccaaacagacaattactcattttgccactctgtcaccccattttcatttcgacaattttgtaacaacacttactaatatcttgcctaatttttctttttaagcaaccatttaacacataaaattcctttcataattaatacccaaataacttttgtgttttcatgaaaaaattataatttgcatttagccaaaagaaaataatctttaattataatttgcattagataaagtgtgaaaaaattattggaagaatttaataaaattttcataaattttaaataattcttatattttgcaagtccatttaaataatttaactttaaaaatatattttatttatttattttatttgaaagatgtcatttttatttttttaaatatgaatagtcaaattttaagcgacaactaaaattacttagatttaaatatctttgcccttttctataataaaattttgttgaaaatatttttacttaaatggtctaatctagagtagagcgggaccgggaattttgggcttaaccgggaccgggaccttttcgggttgaaaaaccgggaatttttggctgggaaacccgggaaaaaacccgggactgctcccggtcccggtcaaaaccgggacctcggtactcagttgtactcctgtccgtgttttggtcccggtcccgctctactctagtctaatctatttgtccctttttaatataattttactgtcgaaaacaacatcaaaaataaatgcgaccaataccagggctggcaaatctgaggctttagctcattttgtggttttttgataggtcaatgaggttaaattttcaaaatgaggctttgaggctttttgtggttttttgagaaaaaccgcaaaataaagaattttttaatgaaaatatgctaaaaatatggtcaaaattcttaatttttcccccggcggcgcctattggcaccgccggacncgtaaaaattcttaatttacaagcaaaaatttgctcaaaatcgcaaaatttggtcatttttcggacaaaatctgttaacaaatcgcattgaaaattacaaaaatttttcccggcggcgcctatcggcaccgccggccccccttgcgccccaaaacttttttgggaaaagcgccgcaaaaaaatcaacttcgtttttcatgttcagaatcccaaaaaatgcttatttctagcaaaaaaatgctcaaattgatcatggacaatcaaaaatataacatttgaacattttaaacgtgtttagaatacattttgtaaaaatgaggctttttgacccaaaatgaggcttttttgcctgccaaatgaggcttttgaaaattttcatctgccatccctggataatatgattcactcgatttttaccaggttcaggcgttgcaacgcgtccacagacaatgggcacggacgtttagcggatcggcttgcaggcgatggggaggtgggtgatccgggcgcggatgggccctgttcacagatcagtggcggtgccttgaattagggatttttaaaatgcgctttgatcacaattagcggaaggatatgctcatcaacgcatcaagacgtggctggaaaaccccaaatttttcctattacggaaaatgaggaatggaaaattgctgatcattggtcccatctctgacggttttaggaaattcagttctaaatctaagtaaatgctctaagatttgttgccgatacattttggcattccgattagaagaacatttccccatgccggcatccctaaaaggcttcgggattagatcccgaaaactccaattcccgacatttctggacccatttacaactcagtttctcgggtaattttgagcaacatttttcccaactcaagctcccgacaaagttaattcccgaccggatcaccagtccggttttatttaacattgagcctctaattaaaagttgcaagcatgtggaatggaaaataaataaatccccgatcggctggtcctaatcgattcggctgactgatcggaccgctcagcgtcgaacagcaggcaaacacacagagtctgatcgatttgagaaaggcagcaacaaatgttcgttcacctcacccacactcttcaactaaccaacatttttctgctacactcacgtcatttgataacaaaaaactcttgttgatcattcattctttggcctccaccttccccctaatctgttaattttgatcacaaatcatttaaaaaaaacccgttttggtttttgatcggatacgtcattggtctttttgatcaggaaaaagatagtgtccttcggtgatgatacaaaatattatgaatgaggaattaattccaatcacgatcagcaggacataattgatcaatcaattaagcaatcaatcaattattatcaatcaataaacaatcaacaaacaattaatgttaattatcacgttgctcagtttttcttcttatcctctaattagtgtttttctgatcactttcactgtcacttatgaatttcctaagtattgcaattttaggcttcatcatcagataaaggtaattttggg

SEQ ID NO: 19261 - DNA, 2665 bp, Heterodera glycines
attaaaagggcgattaagatttttcgaatgggtcagacggtaaaaagagatcggaatcaaatctgttaatggtcaataaatttgactattttttgcttttcaaaaatgctttttttcggcgcaattttttcaaaaactaggaacaaaggggtccgtctatgccgataggcgccgtccgaattttttttttgaaaattttatcaataattaactgaatttgaccaaaaaatgaccaaatgtcacaccttttgactcaattctacaggattaatgtctatccagtggtgtcgataggcgccgccgggaaatttttttgcaaattctaggtgaaatttgagatgaaaatttgaatttattttgatttattttattataaatttattcaaaaattttggcattccgtcttttaaaattttcaaagaatgtatgcggatcctgccggatcccgcacaaaaatcaaatttgcggatcctgttgcaggattggaattcaaaattttttgacggaccggatccggccggattaatcctgcattttccaaaaaatgcaggattgcggactgggatcctgcaaaatcctgcgcaggatccggtcctgctccgggctctattcagaatgtcggtcctctaaaatcttttcttaaacatttttacagtcaattacgaattcagaaatgtcattaaatttatcctaaaggcatacacatatatacaacacgatttgcgatcacagcaacaaaaacaacaattttataaatgtcaaatgggctcaaattcattatccaactccacaattcaattaacaaatcatccattcacttccgttgctgatcacttgggtcgatcattgcgccaagaagcctaaaaatcgaaacggaaataaatttggatatctgaataagcattattcattcattcactactgacccatctcaaatgtcgatccgattccactggtcaataaaattccattcaatcgcttccttctcccattttgtccatttgctttcatctcggacaattggacaacggatcagcagaaaatggccgatatctgtcatccttaacgttaattgctcccgagtcaattcgttgatcagatcgaagagcaaaacgaactcagtaaaagttggcggaaatcgaatgaaaacgatgaaattgacgggagatgaagcattggtaaaagcctaaaatgagtgaaaaattgattaataaaagacaatttacagttggggagggggcacgaaaatcaagagtgtcgcggggcgggatcactttggagcgggacattttgacgccgccaaattaaaaatgcgccaaaaatttttgccaaaatatcgtccagagtattttttttgtcaacgaaccccaaagaccgtaaaaatgccaaataaacaccgctttgaagttttcaatccttgacgaccaattccgacaattcatgtacaaccagcatttgaacacctttggcacattgtccggacggcaagtgaacagccatttggccacggcttgtccattggaagcattgtcattgtcattggcagggaattcggcgaagaaaccgtcataataggcattgataatgcgaagcgatggacagtcgtcgagaattgacggcacgagaagtcgcaaacggcggaaaacttcgtcggacaattggatagcacaaatgtttctcgcgatcattggccaaatgttgtgcaaaaagaactccaaaatgcggtccttgaatgtatcgatggtcaaattaattggacatttggcaaaaagttggcgaaaattgccgggaaaagcgatggcattgttgttgaagtatctgtgaaaaatgatggaattgttttacaaccagaaaaaaaagaatcataatttcacttcattgaaatggctttgaatccgatgattttctttggcagcggattttgcggaattggcaatgcttttccagcgtaattgacaatatccattcccacggttccatccgatttggatttgaatttaattgccatggatctcagagtccagcgacgagtcttgaagtgttcatccacataaaagtcaaaacggtggctgatcatcgcaattccaaggccaagttgtgaagccgggagcagatcgtacacacaaagccaacaatcggcggaaatgaagctgaaaaaaaggaaaacaaaatttaaaattgaaattttaaaaatggcattttaattttacattgctttcgccatcttttgctccgcttcgtttcggttgtcagacatatgcaggtctttctaattttgattgtttggttcaaacggaagccatcgggggttccaatttcattcaattcaaaaacatcgtaaagaccaaaaatgagaaggaaaagggtaaaatgtcgagaaaaaatatgcaaaaatgtatagaatcatttttggaggaattgtcatgagaaaaattcgaagaaagcgaaaagaaatatctactaaatggcgaaaggaaaataataatgaaaaatggcggaggaggagcaaccacttttatactaatttattttgccgaagattttaataatcagtcgtattcgacgcattgctataaaagccatcactccccttccattttctttcattcgctcactttttccttcctttttgcttccacaaaggatttccttgcttttctcggat

SEQ ID NO: 19262 - DNA, 739 bp, Heterodera glycines
ttttttaaattatttcgaaaaaattcaaaaatgagtattatttaaaaaacggaaccccaaataccattaactaaacatgaacttcgatattattagctattttttcagtaaatatggcataattttgttgaaaagtaacaaaattttatattcttgcgattgttcgatatcccagatttttctctatttgctgcaaaaattcaaataaaattatcaagtttaaatataaattatggcagaaggtggcggattttacaaaatgactcattgtctccaggtgttttcatatgggacctttttcaatgtaaaaatttcaaaagattaatttgtatatttttataaaacaaacattataaagttattttaataaaaatatgtataaaacattcaaaccgaaattttaaaataatattttgtgggaaataactttttgaaagagtcattctaagcaaaaattcaaataaaattatcaaattttatataagatatggcagatggtagcggtttttacgagattaatcatcactaaggttataaattatatggactaaaaacattaaatgtctacgtaaaatatggactaaaaaggccgaaatatggactaaaaagctcaaaaatggccaaatatggactaaaactgccaaaatataaattttaaaccctcaaaaattccaaaaaatgtttataaattcaatatttgcttaaaccgacttaaaaatacgctaaaaactgccaaaaa

SEQ ID NO: 19263 - DNA, 1869 bp, Heterodera glycines
gaacgatgccaagtcccccgtcacaaaatcgtcgttttgtacatgcaattgaactgcttcaatttggagatgcacatcttgggcatgaaatccatgtccaaacggcgctttgctccacaattgtccatggggtgtttgttgtcgaacaacattcggtagagcagcaatccgacgaaccacaccaagtctttgcccgttgttgtgtttctgttatcctgaattcatttatctaaggtattatttaattgggtaattaaatgggtaattaagtggttaacgacaaactttgatttgctctggactcataaacaccacatctttcagccaaatcatctgctcttttggtctctgttctggtggaagtgtcctttcccgtgggtcttgaatatttttcgttccgttaaattcaattttcaaatttcccgccaattcttcggcgccaaattcaaattcattttgacgaatcaccgaaaaatggtcaaatgtcaaaatgccatcaaaaatcggctgatcagagttttgctgatgttttattgaccatttttgtgaggacaaaacggcaaaaatcaaattcattgcaattttttcgattgttttcgccggaacattgaaataaaagccgttataatcaacaacagcagacaaatattcgttgagagggcatttgaaatttggcgaaatgtttgtaattatggtgttttgtccaccaaattcattttccaaatttatttcaatttttggtctaataatattcttttctattgcttttatcggcttttcatttgctagaataattgttttattttgtaaatatatttattttaatttaatttaccaatttccattggtgaatgtgctgagccatgacgacgattcatcacatttttgatcatattggaatggcttttttgtttttccgatttcatttgaaccgaaaactttggcgattttccaaaaaatgttggacctttttaaaaatgatttttttattttagcaaagaaaccataatgccaaaccttggtttaaagccaaagtcattggatttggcgcagcacaaaaaagcgaaatgttggcaaaaagccaaaaaaatccgagaaataaaattgaagaagcgaagaataatgccattttattttcgaaaaatgaataaataatttattattttattaagatacagacgaatatattattaaaatgtacaaatatttgtttacggaaataattgttgtgaaattaatcaattatattagaaatttaattattatttattattattattggcagatttatttttcttattattaagctatgatttttaggtaaaaaacgtaagaaaagggtcaaaacagttagtaaatagataagataaacccaaatgatatttaaattaaaattcttattaacgattttattcttataaacgaataaaaatttaaaaaaaaaacaaaactttattgaagaaaaattaaatgacgagggatacaaattgaaaatttttccatttttttggaggggggggggtatttttaaattgttaggtccactcactgggtgttttttttttgttttttaaactgaaatagccaaattaggtaattataaagttcgagaaagctacaaaccaaatggagaaaattttatactaataaatataaaattaataaacaatttttaaaagtgaatggtaaaaaataaattctccgatttaaataggcgattttattccccgacaattgaatatgaatgatgcaaaaggttatgctaatgcaaatttaattttgccattttcaaatgatttccgtcatttttctacgacaaataaaattcaaaaataatcacaagataatttgctgaataaggatgattct

SEQ ID NO: 19264 - DNA, 2057 bp, Heterodera glycines
gccaactccgtcttagtgtataaagggccaactccgtctcagaaagaaaaattcattttaagcttaagaattttttttaaatctcagttttattaggtcgggataaccccctttttgaagaaagttttttttaatgtcataaaaacacgcttccaagggttttcggggtcgctagtcacaaatctgacatccatttcgaccaaattcgaaccatgaacctgtttcgaacaaaaatattttgaaaattctcactttggttcctaaattgaccaaaataagccaaatttagtcaggaatcattgcaacaacagaataaggccattaagcacagttatgaacataaaagtgaattttcaaagtctttcgaatgatatcaattttcggttcttgaagggtttgcggcactggcggcggcagttcaatttcatggcggactcgcttcaccaacttaaaaccaaaaatgtgaaaaagtaaaaaataaatagatttttcactttttttgtcgcgttctttgtcggaatgttcgccattactggcgttggaatttgctgaagcgcgtgtgccctgattgctgctggcgtttccatcgtttcagcggcacgtcgtttaatgccggtggtgattttttgtgcgatgacatttgccgcgctgcggttgcacgcgtgtataccaactgtcttcagaacgacgtaatttagcgttgtgtggactcgccctcggcatttgaattcgccgtgctgatgttcacagcgccaaaattttacgtcaccatcggcattcaacaaatggaagacatacaggcagccttcatgttcgagttttttattttcgttgagatttaatttcagcattttccattttcgtagtgctaaaatattaatggtactttaaaatgttaggtcagacactattttaatgaataattcttgtcattaaaataaataagtagatttaacggatgagtttttgtgacattttttaatttcttaggggatgtattttaaaattcgttgaaaaatttcttatatattttttttatctgagacggagttggctccttaggcactaagacggagttggccagacggagttggcgagacggagttggctcagacggagttggccccaagacggagttggcgagacggagttggccagacggagttggccccaagacggagttggcgagacggagttggcgagatggagttggccagacggagttgacccgtttcgaatctccctgactttcccttccgcttaccaacgctgaccaagccacgaaatgtccaagccacgaaatgtccaagcctcgaaatgtccaagcctcgaaatgtccataagggtaaaaaacacgaaatgtccaaaagtctaaaaagcacataaaaacccggaaaacggatctaatttagggtttttggagtcgctgagtacgaatatgacatttacctaacccatttcctaacccaggacccaaatataaatataaaaaatgaatgaatttattaaacattcaataaaaaattcatcacggaatacgaacaatcgaatcatcaaaattcacgaaatctttcaattttgctgcatatccttcaatttgtagaccgagcgccgtcatcagatcacgaatttcaccgttgttgttgtatgacgcgtccgccaaaattctcataatgacagcatcctggaggatgtatcgtttgtgtcgcttgtgaatgaaatggcgagcagatcgggcagcgtccacctgtctgtcgatgttttcattgactccacagatgaagtcagagagtgccgggtggtgacagagacctttctaaatatatttttaaaaatttgcccgtagtaaattaaaaaccataaaatgcagatgagttgcctccagtccattgtttgtacgagcgagggcagatgcggcctgcgagtgcatgttccaaattgcaattgggaaatgcggcgcccgacagatttcttcctcccacacgggaactaaattttttattaaatataaccgaaagattcgtgaaaacaacaagttttgtgaaaaatatatgcct

SEQ ID NO: 19265 - DNA, 2472 bp, Heterodera glycines
  unsure (1)..(2472): unsure at all n locations
caaatcagtttatagctttattaggagttaaaactcaaaaagatatgagatatggctccattaaatttttcccataaaaatgtgtcccagtcaaaataagagcttgcgacaaataacagaatcagctgtcctattattatttattacgaacctcattaagagacagaagatatacagctgtgaggagaatcattgaggcaaatgtggaacaggtaagcactttttgaaaaataataatattccaaaaagaaaaaataataaatattaaaatcacgataaaaactgaattaataggaaaatttttacaacgaacaaatattttcgattcacataattaaaaaatgattcacaatgaaatggatgttaataaactaaatcgaaaatgtccattaaattaaaaaatgtaaataagtaatttcgctttttttatctgaatactaatttcataaaaatttaaaaaataagacaaacaaagaatcataggaaaaatcaaaaaataaaaagtcagtgataataaaactaaaaattaaacaacatcttcattaaaaacagcgacaaaattgagatctttctatttttttaattaaaaaatgaaaacttttacacataaaactttaaaatttcttaaattttaaaagaaataaattattttttaaataaaattggtgatgagaatttttgggttcggaaatggtgacaaatatggccggaaaataaaataaaatgttaacaaaatttttcattaaaaagtaattcctttttttaattttgtaccaaaaaatttttaatttctttaaccattatttgaaataattttaaatagcaatcatttcctttttaaattattgaaaataaatttggcctataatatttgaaatgaaaagcatttaacaaaaacaaaagcgtaagccatttggttacaattttttccagataagaaaaaaacttattataacaaaaataattaaaaaataaattaagctttattttgctatataaacctatgaagagatttgttaatttaaagcattataaataatttaattttattaatgaaatatttaaataaataatgaaaagaattaatggattaaattaaaaacgagattataacagaaaaaatgatacacaaacaattttgatattaagtgatttttaaattgtaacttattccgcatcaaaaccaaaaaccaaaacaaccgacaactcttcggagagttgattttaaaaaatacaattttttcgaaatcatgaaaaaataaattgcaatatctaaaataaataatatgtaataaaaataaaaataaaaaaattatttttattctttttaataattggaattcaatcaaggcttaacctgtttaaaaaatgaacgaagcaataataatgaagaaaaaactaaagcaaatttatattttaaaaatattaattagcaagaaatattaaaatgtacggaggcaagaaaaataagtaagagcagttggaagacatgagatgaaaagagaaacataataaccgataaaaaaattaattgttttacttaaaaaaagaaaacttataataaattaattaaaaatagattcaacaaacagaaaaaataaattactatgcgaaatttattaaaagaaattcgtatagaatattaaaaattatatttcaataaaaacaactaattaaaaatatagcactggaaggaagggcaacagaagaaattttagtcgccatggtaaaaaaatattaatagaaacaaagatgtttaatggataataccaatttattcatattaaaaattaagtcgaatctaaaaaatattaaaaattggagatgaatgagtaaatgcttcttaaataaatcatttaattaataatcaaattttaggggaggtgttgagcgccacttaatatttatgtattattttctcttccgtttttcgttcagtaattacgtagaaaaaattcccaacactaagaattttttcgaaattttagccgaatttcagtgtattttagcgtgtatcgatcactaactatgaaggagtgatctgatcaagttggtgtaaaagacttttttattcagcatcaaaagataagcatgcatgaattatttcagatttttataagcattttgaaattattttttaaatttggttcacttggaaagatagatataattaaactttaatttaaacaaatttgtgaatttttaaaaaaattttatttcaagaataaatttttaatttataaatttaaaaaataaacaatgtcaatagctcaaaatcgctatacacggcgacaccttgaatcttatcttgtacaaggaaataataaaaaaaatttttaattanaccatatctattatctgtaataaaaatcttgataccaaataaaaattcaattttagaaatcaaaaagaaatannaataaatttagctaagaataacataatataataannatacataaataattatat

SEQ ID NO: 19266 - DNA, 2175 bp, Heterodera glycines
  unsure (1)..(2175): unsure at all n locations
ggtaggaaaacgaagttntagcgaatgcaaaacggaacaatcgaattccgctgacaaattaatgcccttttcggcgcgatttaacaagctcaaacttaagcgaggaaacattccgcggaagtattcgttattatttttacaaaaaaacttntaagaaattttttagtgcatttttttaccaataaaatttttatggcccatcgttaaatgtacaattaattcaattaattaagaaaataattcaaattgtacacatttatgtttttttttttgcttttgtctaaatgataattcgctgtcgcttatcgttttccaaaaaagaaacaacgaattgaaaaaagagaaaaggggcggacggaggaggaaattcataaattaattacaaaattaaattgtaaaattacccttaaattttgggcaaaactctcataaatcacagagagaggaaaggaaaaggacagtcgttttttaactttcctctcaaatcaattaattcccttctcagttgttttaatttaactttacgaattcggggctattatttttccaaaaaatgtaaaaagagcagaaaattgccaaataatcacttaaatgggataaatggaatagaaaaggggcaaaataaaataaaaaaaaaccgaataaatatatttaatttgattatttttaattatttgattcttcaaaactaaacaaaataataattattatattaattatgacttcggacaatcggacgctcactttgacgctgaccaatgaaagcattgttcacttttggattcaccccgtcacgccgggcgatgtcagtcaaacggaatgaccacagtacctttggaattgactgacaatttgttggatacggtgttaacctaaggctgatcagtggtgatcagcgatcgttaatttttatgatttgacttgggtttaaccaaaatttgagcgtactttctgcgttcttctgactgacagtttaagacattaattttggatttaaaatttgacgaatgaaaaaaatattccaaaaatgtgacatattcaagaaaaactgttgccatttttgtcttatttctcagattgccaaagtgtttttgtgcccttctgcaaacgatggcctccaacagcagcaacaacaggtggccgaatgtgccaaatattcaagcgatcggtggtacgaatttttcgaaattaacggcgcagcggcgggcgaatatttgctgcgatggacggagcacacgaaactgtcgttggtttatgtgtacgaaccgaaaacggtgggtcaatttggagaaattggaataaatgacaaaattgtacatatgaatcattcatgaacagcctttagggctaacagagagtcgaaatttccgaaactcttgagaagccctcttatctattgtctgatgttggcattttcggctttattaatttgttcgtcttcggcttttcaggttttagaggaaggcattcgcattattttcgtcaatgaaaatgccaaattgccctccctcgggggaagttaccatttccgggctccattcggtaatttgctctgagattaatttaaacaaattaatttatttataattttacttttgaggttggaccagcgacccgtcgggctttgtgaggtccaaagatgggcttttccatttgttttatcagcactatccccacgccaagcaatagtaaggaaagagttggttttctatttaattaaatttactccattcacaaatcagttatttgatccattggggccacgccgtcagcaaagatttggtcaattgggtccatttgccaattttcatgatcccaccaaatgtgttgcacttggacttcgaagttggctatttcgtcggttcggttgtcaatttgcccagtgatgattttggcattttttggacccaacgaattcgtaagtgtttttggaataactaattaggttaattatgtgatctgaccaacaacaacaactgttgattttagctcttgttcttcgagggactgaatcagaaaacccatggagagaaaatcaaaattttgtgtcaacaaaagtgagttttattttttaaatttagttgttataatttatatttaggatttaatccatcctgattggcacacgcacaaaatcgtgctcgaccaaagtccatctgaagaattcccttcact

SEQ ID NO: 19267 - DNA, 1414 bp, Heterodera glycines
  unsure (1)..(1414): unsure at all n locations
tttataatgaatgctcancctcttttnntattatcgagtcaaaattcggacttcagcagcacgcncaataatggtctgttttgttcaggttattattacatgagtgttggaggcgagcggaaggacggctccgcgggcgttgtgctgttgtacagaaacgaaagtaaagagcgggaccgactcgacaatgactgggcttatcaggtggcggagggggggaggagtggaaatagaggaaaagcattgaaaatgggggaaaagcgaagcggcaatggcaacattgaaactgcagggcattttgtgggaggacagccgggacagaatgtgcgaattgccaatgctaattgccttgggcgacccgctcgactcaaacacgaaatggctgctgtcgtacatgctggacaaggggtcgtacacaatgtgcgcgagagacgccgaaggaaggtgatggattagttggctcatctgtttaaagggggatctcaagatttgaaaaattcatcaaaccattcccgtaagataattaccgcatgaaattctcgatgttcaattaaaaatgagttggcagttaaaagccccattcccgaaagttcggtccccattaagcccatttcgatttccttgtcccaatttcaacacaacatctgctgatgctttctgccttttagagaacgtttgaatcctttgcttgttggacattttgacgggaaaaactttcaaaaactctttgaacaagaaatggactttgctcgtgcctcttttgcttatcaggtgtttttggcatttggattttccgatttttccactttttcccctttaagggtttctatgacaaacaatcggccagaaatttcctcatcggatggatctttgactacgacatgagaaccataacaaatgatgccttaatttctgttggcagagccggcattttatcgcttacagtgccgaaggcattttaattaacaaaaaatgaaatttaattgttttttaggaattggttttgtctgaaaatgaacaatttttgctggtcaaaccattgcccgaattaaattcccttcgtatggcaaagaaaccgcagaatttaaagtgaaaactaacaaattggcattaaaacaatgaaaactttaaagaaaaggccgaaaagtccatttggagatgggccaagtcgaacttttcttccaattcaaatgggcaaatgatggcaccgaagagaaattcgaattggacttaatgccaacgcatttaaaaggcgaaaaattggaattccgggttgaccacaacggcattgagctgaagaaaacctggtaattgtctttgattaaataaaattcaaatattaatcgcacaaattaattaattaattgccattaattaccctcgagggagaaaacggacaaaaagcggatgttgg

SEQ ID NO: 19268 - DNA, 1696 bp, Heterodera glycines
attttcaatagcgcttattttttgctaatttcacctaattgccattctctttaaattaggttcgagtggagcgacagaaggaaattgtgaacagattgaacaagacgaaggtcgtgaagaaggacatcgattttcaagagcttcgggagcaaagggacgccgaggaaagacgaaaattggcaagtttttcaagcatcaaaatctaatggaatttcatatttatagtacgctgtgtttgactttggtttacaggaaaaaattgaaccaaattttgcaaaattcggccaaaatttgttattcaaacggcacaaaaccaaccctaaaaaacataacttaaaaaaatgacaattaatgcaatataaatatggcgcactatcgccaccttataaatcgcattaaaatcaaacatttttcatccagaaagagcaacaaagggcggaccgaaaacagacggaggccgaaactgaaaggcgagagagggagaaggaggcgctgagctatgaacgcgtgttcaaagaggagaggggcacaacgaacaaagacggggtcgacttggaggatgattttatgtgaaagaaaggggaaaaatcgggaaaatgatgaaacgaaacaacaaacggtcgtcgaattttgttgaaacataattattttgttattaaatgaaaggacgacgggcagccaatcgttttttggccttcttaacagagttctcttttgtttttttgaaaaaaaaagacagatagagagagagagtgagtgaagagagatggagagagagagagagagtgaagagagactgacagagagagagagagtgagtgaagagagagaggagagaaaaagacagagagagagtgagtgaagagagactgacagagagagagagaaagaaaaagacagagagagtgagtgaagagagagaggagagaaaaagaaagagagtgaggcagagagagagagtgagtgagagacaacagagagagagagagacaaaagagagagagagacaaaaataaacttacttatttacactgggagcccaaaatattgaatcgccgtgttgatatgcaaattttggtggatttaatatcggtaaaaaaaaagcttattacccccccccccccccactgcgtgatttctcattgtaattttttcgtattgccatatttgcacttttcgtatgtttatactagagtgcagcgggaccgggacctaaacacggacaactgagtaccgaagtcccggttttgaccgggactagttccggttttcccagccaaaaattcccgggttttcaacccgaaaaggtcccggttaaacccaaaattcccggtcctgctgcactcttagtttatacctaattcccgaggctttgtgctttcgtttcatcccaagaaagtaggcattgaccaagtaagaaaagattggcgctatctctatatgcaaaatgaatatttttgaattttattaaaaaccaaggggggaggaccctttgatttgcaaaaattgaccagtttagcgaatccctaacgccctaactcgaacaaaaatcggaatttaagatttctcatgtttttttttgtccaaattatattaggaagacggaattggttaaaaaagatgtcaaattcggatcaaggacaccaaaacgcctagtgaacaagtttccattactaattactagataatatggtac

SEQ ID NO: 19269 - DNA, 871 bp, Heterodera glycines
ctataacttttttcttttgcatccaaatccaaccttgttggtatcattcgaaagctcttcagatgctctattagcctttcaaaaaacctaaaaattttctagcctggaaaaaatttactaagaaaaaacttcaaaatttcgactttttcgcaattttcatgtataactttttggtaatgtctaatcgcgaagcgatagcttagaaatagcttcgaaacatgttaagctttcgaatgataccaacaatgttggatttggatgaaaaagaaataagttatagacaaaaacataaaatatttttgaaaatctgtacacagataacatataagtaccgataatattttgcaaaaaaaaaaaaaaaaatttcatatacctagtgccaaaaaagtatggcctaagaaactgaggatgaccattgtttggatgtttggatgcgattgaattacctaacttattattatgtacttaattctcaatccatttttagaatatttctgccattttttttcttgacaccacacagcaccaatgcaacaatttcaggactggttcagaggcacaacaacaacattcagccaaaaggccgatgaaaacgactctgagatagaggttattaattttgtatatctaatgggctggcattatgtaagaggttttcgggtcatccagggtcacttaacgaaattgcacataacactcacttagactaatcttgaacttaacggatccgaatcgggacaaaaaatcgaacctgagcaggtcgttcttccccctccctccttttgattctcaaaaataaacacggaaattttggcgctagttaaaaagtcaccacttttgaaaaaattttcaaacgttttttttgtaaatt

SEQ ID NO: 19270 - DNA, 900 bp, Heterodera glycines
atggattgctctcccgatatttctatctgtgcctctatgaaatcgtactgacgaatgttttttttgaaaactttttgcccaacggaaaaaatgcattattcttcccaacctaccattttttaaacttaaaacatgcgtcttttttgactgagtcaggcataataccctttcattaccgggagatgagtgatcatcttaccttacctcccacctgtctaaatattaattttatgccttaccataatatttgtctgaattcaatttatgcataaaaaataattttggtgaaccttttaatccccacgtgctatgtacagctgctactctatcttgcaataaaagcctgaagtctctgaacactattattattaagtttatttgtcatatctctacatctgatataaccagatcatgcgtatatcccatatttgataactctcggagaacaaaatgggaatcatatcttttttttggttttttcacaaattataaaaaaaaatttttaggtcccggtagggcaaccgggaaccgggaaaaacaagcactggtaagaatggggggtctgagtgaaaaattagtgatgaaaattggagttaaagagaaaaaattaagaaataatcatatatatattctttcaaagaaacaataccaatgtgcaaatggcctagtggctaatctccttgactttcccttcatctttcccatggtcaattcctctacagaaattaaaatattttgaattttctttttgtatactcatggctttcctatcgacaaaatatgattctccatttttttaattgtattttatcattttttaaagaaaatcgtacaaattgagcctagtaatcccaaaatccaggcttttttgttgaaaatctggtaacaattctcactcaa

SEQ ID NO: 19271 - DNA, 974 bp, Heterodera glycines
  unsure (1)..(974): unsure at all n locations
gacgtataaaataattttttgaattaatgaaaatatgaacagatttcctgagtagttgccttaagttcaatatttgaaatatttcatattttttttgcattggacttcaaaattaaagtgacctaccaccgttaggggcctattcgtaaaactcttattttaaaaatacttgaaaaaaatcaatgaaattttcaaaaaacgctaaaattcagaaatgagaaattccatttttctgctcatttagctgtttagtatttctcaaacaaattatcttcataatgcaaacgcagtgacagtgtatttcccggaatacatttttgagagaacagcgacgaaagtagagaagggcaaacttaaaggaaaactttatttggaatttgagagtaatttttttaaccaaaacgcggatgatcaaaaaacatatttctcttttaaaaatggctagattaaggtaagcaatcactataaactgaaaatcatttattcattttttttgaaagatctaagttttttttacaaattgaactcagtcatttaaattcctttttcagtgtcaacttcaagtgtcagatttgcgtaaaaatggtcgagatctcgaagactacatgaccaagccataaattgtacgaaaagcatgcatttgatccgtttttgaatatgtactttttgaattattgagaaaatcttttttttatttcatagtttattaaaaaaatgttgctattctagagtatcgctataatgaatgaatccgaaggaatttttcgaggtcgaccatttcttaatgagttacagatccggtactgaagtggccaaatagctttgggactgaaccgtccaaccgataaaaacgcttgaatggtcagcaaataaaacattttttacctcaaaaatgtgccgggcttgtttattgcacgaaaatgcacaataaggtatttacttatatggttcgtacgccacanaattaaaatttt

SEQ ID NO: 19272 - DNA, 1677 bp, Heterodera glycines
atgaaaattatgcaaaaagggtggattaattttccagtaattttctgatgaattggccaataaaaaaagtatttgttttttatctgtgccacaatctttgcaccaaaatgtgtggtcgttcgtccgcttttacttctgctggtggcttttcgcttttcccccatttttttgtccccaattttccatcacttcttttccatcgacggattgcgtccacaacaccaacaaaatcgcacgtcgccacagaaattcagtgattggtccaactatttattccacccatcaatccattccatcatctattcgatcgcacattccattttcatttaatcatttggggtaaaatatttttacatattatctatcattaataaaaataaatggacattttccttaaaaattgaaaaaatttcccgtgaccagtgaatttatcactttttttatcttaatttcagtccaacctctcataagaaattctcggctcggttctcgagttttgtaaaatttatgggacataatcgatggtttaattatgataaattgcctatgacttattcaaatcttttcaactcttagaaaatttaatcaataaattttataattataaaaattacaagctttgtatagataaaattgttaatataaattatgtctgtgcttcatcttctgctgctccttgcgcttcaatttgactttggtgaccaaagtgagcgcattttacgcggaaaattcagcatgaaatttatgtgcggcaaaactttgcccgccacaggccgacttcagatgaaattcattgccaaaactgtggtaattaattaaataaaatggtttaatttttcatattcatttaaatctccttggaaaaggaggctttatttgaaggggaatggaagatagagcgaaaggatttctttttaacccctcgggatggataatggattgctgatttacgttttacttttcaatcccttgggaagggggtaagggattttgcctatatcagtgatgccgcgggttgagaaaaatttcgggttcgggtttcgggtcgggcactcaaaaaatttcgggttcgggtttcgggttgagaaaaacctcgggtttcgggtatcgggtttgggttgacatcactggcctatatggttatatctagagtgccacgggaccgggaattttgggcaaacccgggaccgggaccttttcgggttgaaaaaccgggaatttttggctgggaaaaccgggaaaaaaccgggactagtcccggtcccggtcaaaaccgggaccttggtactcagttgtactcagttgtccgctaccaggtcccggtcccgttgcgctctagttatatcagaggaaattagaaaatcttttttttttaaatttaagttagtgaaacgtgaatcgatcatttttgacactgtgttggactgggaagatggaggagaatttgttcaaaatgtcacttccaaagttgaggttatgcaggccaccggctacgaatttcagctcaaacttcgcacaaattgcttcattttgaacaaaattggcgaggtaaaggcaaaattttaattaattttaaaataataattattataatcagagaagacaaatttcaatttgttttttaatttttctagttttttcctgaaaaaatttgctttaatttttttgtacgtttag

SEQ ID NO: 19273 - DNA, 2901 bp, Heterodera glycines
ctctacaattttgccctaaggcaatttttggctagaaccaacccccgacgagttatgggcccgggactcaaatgtcccgcttaggccaaaaaatttttctatttcctggaaaaaatcgaaaattttctaaaaacatcactaatcgatagagctcgaaaaactatgttttggaagtggtctccgtttctctgggaaaaatcgttaaaaaatcttaaaattcaaaaacccaaaaaccgttttttaggcctaactcgaaaaattttgaaaattatcgaaattttaaaatttggaaaaatcgagctcattgagctctacaataagtccgctggcgaccccctgctccgagcaaacccttacgagctattcgcctggtactgaagtgtccaaaaaaagtgattcttacgttgcctaacctacaggtcaggcctttgatctgatcaaaaattttttgctggcaaagttgtaggccatagttggggcatttcgcttttggggtccgctaagctctgaaagcaaaagcaaaaaatttcgtaacactgagactggcggcaaagtcggtttttgagccgctggtactcagttggcccttggaccggaaaacctatatttttcccggatgcgcctcaaaaagttgtaagacccttccactactttcagggcgctcccggccttcggccgggagattttgtttttgcaaacgaaactccttgtcaatataacgtatatactagcgggtgcgtgaaccgtcggctatttagctgggaaaaagcgcttcgcgctttgggagcttcgctacctagattaactctggttgtggagattttgaatttttaaaaaattatctgggacttttaggccgcttcgcggcatcgaacgggcgcttcacgcccgttttttaaatttttgttgggcttatacgggcgctttgcgcccgtttctaaatttgtttggctattaaggcagcttcgagacctcagacgggcgcttcgcgcccattttttagcttgttaggccgcttcgcggcctcagtcgggcgcttcgcgccggtttttcaatttttgttggccttgaacgggcgcttcgcgcccgttttttaaatccgttgaactcatacgggcgcttcgcgcctgttttttagcttgttaggccgcttcgcgtcctcagtcgggcgcttcgcccggtttttcaatttttgttggccttgaacgggcgcttcgcgcccgttttttaaattcgttgaactcatacgggcgcttcgcgcccgttttttaaattttgaggtacaacagcgattagaagagtgattagaagaggtacagcagtgattagaagaggtacaacagtgattagaagaggtacaacagtgattagaagaggtacaactgtgattaaaagaggtacaacagtgattagaagaagtacaacagtgattagaagaggtacagcagtgattagaagaggtacaacagtgatcagaagaggtacaaaagtgattagaagaggtacaacagtgatagaagaggtacaacagtgattagaagaggtacaactgtgattagaagaggtacaacggtgattagaagaggtacagcagtgattagaagaggtacaacagtgattagaagaggtacaaaaatgatcagaagaggtacaacagtgattaaaaagaggtacaacagtgattagaagaggtacaacagtgatcagaagaggtacaacagtgattaaaaagaggtacaacagtgattaaaagaggtacaacagtgattagaagaggtcaaaagtgattagaagagttacaaaaatgattagaagaggtactaaaatgattataaaaggtacgacggtgattagaagaggtacaaaaattgaatgcaatttattataaattttaaaaaataaaattaattattccttttattaattaaaaagagaattttgaaatgtacaagaatttgatatttaaattaatatgaaattaatttttataaattcaatttaaaaaaaatatgaaattctatattaaaagataattattattagggcagcaacttttagtgacgaaaaatcccgaaatagttaactaaaatagtgacgaaaaagtgccaaaatagtgacaaaatagtgaaaaaagtccaaaatagtgacgaatagtgacataattttcagccaaaaattgagcaaaaataatttttattcactgattgcagttgcaaatgagtaggactgggatttttaagaccaaaaaacccaaaatagttacctaaaaaaatttttaaaattaaaaatttttgccaagaaagtaaatttttgagaaaattttttttcatttcataggagtatattttgaaaaataacaaatctttaaatataaattaaacgcactgaaaaataacccaaaaatgcatagaaaaataatgtacaccgcccggatcgaacctgcgccccccccccccccccagaagatgactcagaatccccaatcacacagggattctgaggtcttaacgatgtcagaagtaaaatctgatcatgtattcgtgatcagcggcccaaataacccctaaagacatatttttggaagatttttgtgagaaaaatttttccactcaaaaatcctgtccaccccctttggtcccgaaccccaaaatcacttttatttttgtatcttattttaaaaaggtgataaaaatgtaaaataaattttatttaatagagcaaaaaattgcggatttttgtagtattttacttttacagaatgaattttcagaaccgagttctgaatttttttctgaaaattcggatttttccagaaattcttgaataactttttttcatttccagatataaatttcaattaaatcccaataaaattctcctgattttttctctatttttaag

SEQ ID NO: 19274 - DNA, 2065 bp, Heterodera glycines
tccattggcaaagtccgtccgataggaaagtaaaaggagcccataattgatttggcagacaagaactgaaattagaagaaattttgaaaaagaataacaaattggaaataaatatgcttaatagtctcaaaatctgttctcttaaagaactcacatctcgccgcgcgttcaatggcatttgggtcttcgtagtcgacacgttcggcaagtactcgttccaattttttgttgaatatttcgagggatgtcatgccgcgcaagtccatcccctcaacaccgaagtcgaaatcgactcgaaatcttatcgcaatcacatcgaatatggtcgacaggttacgatcgaacaatttcccggtcactttcgacagttcgctgttggctgttgtcagcaattgtttctgaaatttatggcattttttaaatctccgagggcattaattatcatccgtactttctgtgcaatttttatttgaagtgcaaattctgtcttcatccaaacacattggatttttaaaacgaaatggtcaaatgccaatgccacgcggtcggtggcccatcgaagccgaaaagggagggaatggcaaatttcaaaaagcaattcggcagggattcgttttttggacatttccaattttcaggcaaaaaatgggcaaagaaatgagtgaccatttgttgagggaacactaaatgtgcctacaaattggacctcaccggagacaaacataatttttatggcacataaaatggaaaattttaacagtgggcgattggaatattaaggcctcgaagggactgtcattttcgtgtttgaggatcaccatgaaggagtgatctgatcaattcgcgtacatttttggactttttaatcagttaacttttgagtgtactgtatgctttgcatacagtaaatcactaacatttcaataataataatatttttttggaatgtttgttattttaatttttatggcttgagtcaacgtagaaggctcaaaccaagtggaatttttatgcttttgcttttgagtcaacggatggataatccacacaaacggcaaaatttaatcagaaattttacggatttaagtttttttcattaaaatactaaaaaaaattgtgaatttttttgaatgtaaaaatcagttttatcacttgtcgatcaaatctctcaatttttatgcaaaatgttaatattgtacaaaataataaaaattagtacaaataaatatttttaaaatttaatgacatataaacaacagaaaattcatcaacaacaacaacaaaaaatcgaaaagcaaatataaaattttttggaatagagcaatatcaaaatcctttaaaatttttgaacaattttttaaaataattaatcatccatcattcattactcgtccatcccttctgctccgatcagttcaccattgaactctcgtcattttcgttttcgttgtcgttggttgcactgctgttgtccttgttgttgctgctggtggtggttgtcctccaactccaagccgaacactctctgcgcatttgccgtcgtcgcattggccaattcgtgcgccggacagtccatgaaggcagcaaccagctcacaaatggcggccaacgagctgggctcgttgcgcttgaagtcggagtgtttgtgcagggcaagggcctgaaaattatgcaaaaaaataggggaaattttttaaaatcattagaactaatgatttctaatttcaagggcagtaaacagctcgttctctccgtcaggcccgtagccaggggaaaagtgtgggagaactcccccctaaaaaatcgagtccaacccggacaccaaattctcgattatttggtagttcaaatagttttcccgcgactgtccattttttaattcgttttttccctattttctgatcccaaaattgtcgctttgttgctgctggtcatcaatcaaactgacttcggtgctgatccgttgccgaatgtcaatgtctttgcgcaattttttgtcctccaaattcgggtacatgtacggcgcgtccgtttccaacaaaaggcgatccattcgaatggtccg

SEQ ID NO: 19275 - DNA, 2404 bp, Heterodera glycines
  unsure (1)..(2404): unsure at all n locations
tttcttaaaaactgccactatgggcgtttcttaaaaactgccactatgggcgtttcttaaaaactgccactatgggcgtttcttaaaaactgccaagtgggcgtttcttaaaaactgccaagtgggcgtttcttaaaaactgccaccatgggcgtttcttaaaaactgccactatgggcgtttcttaaaaactgccactatgggcgtttcttaaaaactgccactatgggcgtttcttaaaaactgccactatgggcgtttcttaaaaactgccaagtgggcgtttcttaaaaactgccaagtgggcgtttcttaaaaactgccaagtgggcgtttcttaaaaactgccactatgggcgtttcttaaaaactgccactatgggcgtttcttaaaaactgccactatgggcgtttcttaaaaactgccactatgggcgtttcttaaaaactgccaagtgggcgtttcttaaaaactgccaagtgggcgtttcttaaaaactgccaccatgggcgtttcttaaaaactgccactatgggcgtttcttaaaaactgccaccatgggcgtttcttaaaaactgccaagtgggcgtttcttaaaaactgccaagtgggcgtttcttaaaaactgcaaaacaaatatatttatttattaaaaaatgtttatgtcagttgtttgccaacgttataaataataaaaatatatatacatataatttttacatcatttgtttgtcaacactatcttcaacaccaagctcagtaaaattaaaatattaataaatttattgcttctgatgattgtagttaataaaatttacaaatgagctcaacgatatatttaatattttttcttttcttgtgctgtttaaaaaatgtcttttaggtgataaaaagtcgctgaaaatcgaaaattgttcggacaaaatgctgttttttggcttatctcgtcatagaagagcgtacaatcgcagaaaaaaacaaatgaataaagacgattcttctgacccattcaacgtgcccgaaaaattacagatgactaaacgtggagcaataaaattaattcttaggaaaaaacttactagtaatgatatgtaagaattcttttttttaataagctattcgaaatttggatacaggtggctcagattccgagaaaatgaaataggtgttatgctttttataacacctacccagaaaaatgctgcaagtcactgtaaagtgttggtttcagacggaaccttcgaattggcacctttgagtttccaacaaatttggacaatacatggattagttagttttgactatggattggttcttctgaatttaatttaagattgaaacggctaatggggctgaatggacgccgctattgatggctctgatgatgagacggttaagaaaaaaaaactggatttataaatattgttcccaagctcagaacacaatcagcatatgaaacaattcttacaaaaactacagaaatatggggagaagaaattttaatgggtttactagaattcatagtgattatgaaactgctgaagttaatgcacttacgaaaatatttggagcaaacaaggtctatggatgtatcgtacacttcattcgagctgtagttcatcacattaaatcaagttttcaaaatttattccgtgaatttaatgaacgaaaggatgtttggaaatgggtaaaatatacaaataatatacatatattctcatattttgttagattcgcagactttttgcccttccatttcttcgtaaagaagaaatgataaaaatgtggccaaatctgataaatttcagaaatgattttgagggggtgcttagagaggaaatggattcgtttgtagcttatatgaataatcaatggattaaaaaaattggacagggcaatctattttcttttaataaactaactagaactcggtcgacaaaccctgtcgaagcgtggcacagcgtaattaaacggtatcttttgatgaaaaattaaaattaaattaaataatagcgaccacgcgagcgtaagacatgcgtctttgccaagtgttctgaattattttcaaaaaatttttgctgaaagtgatgaacgagtagtgaacattatcgctggagcaaatcccagaccaatggacaaaacttatgaggagattgataataaaataataacatccttgaaagaatatgaggtttttaaccaatttctataatgaaccgacaagaactcttaaggaaatgattgataaaggcgaagttactgatgatgatttttcacagacaacccaaacatatttaaatcggttatcttatgtattgttgcaatttgatagtcaaggaatttcaacgcggagggaccataaaattaaagaggtttattgattttctccttgaccnntgcagg

SEQ ID NO: 19276 - DNA, 1418 bp, Heterodera glycines
gatcatcagtctgaagaatcccaaccacattttcggaatgatagcgccgaccctaattttttccgaatttctttctgggcgagtttgatgtcgaaaattttggaaaaacgcctatctctttttctgatcatcagtctgaagaattccaaccacattttcggaatgatagcgccgaccttaattttttccgaatttctttctgggcgagtttgatgtcgaaaattttggaaaaacgcctatctctttttctgatcatcagtctgaagaattccaaccacattttcggaatgatagcgccgaccctaattttttccgaatttctttctgggcgagtttgatgtcgaaaattttggaaaaacgcctatctctttttctgatcatcagtctgaagaattccaaccacattttccgaatgatagcgccgaccctaattttttccgaatttctttctgggcgagtttgatgtcgaaaattttggaaaaacgcctatctctttttctgatcatcagtctgaagaattccaaccacattttcggaatgatagcgccgaccctaattttttccgaatttctttctgggcgagtttgatgtcgaaaattttggaaaaacgcctatctctttttctgatcatcagtctgaagaattccaaccacattttcggaatgatagcgccgaccctaattttttccgaatttctttctgggcgagtttgatgtcgaaaattttggaaaaacgcctatctctttttctgatcatcagtctgaagaattccaaccacattttcggaatgatagcgccgaccctaattttttccgaatttctttctgggcgagtttgatgtcgaaaattttggaaaaacgcctatctctttttctgatcatcagtctgaagaattccaaccacattttcggaatgatagcgccgaccctaattttttccgaatttctttctgggcgagtttgatgtcgaaaattttggaaaaacgcctatctctttttctgatcatcagtctgaagaattccaaccacattttccgaatgatagcgccgaccctaattttttccgaatttctttctgggcgagtttgatgtcgaaaattttggaaaaacgcctatctctttttctgatcatcagtctgaagaattccaaccacattttcggaatgatagcgccgaccctaattttttccgaatttctttctgggtgagtttgatgtcgaaaattttggaaaaacgcctatctctttttctgatcatcagtctgaagaattccaaccacattttcggaatgatagcgccgaccctaattttttccgaatttctttctgggtgagtttgatgtcgaaaattttggaaaaacgcctatctctttttctgaacagcagtctgaagaattccaaccacattttcggaatgata

SEQ ID NO: 19277 - DNA, 2334 bp, Heterodera glycines
atcaccaaatgtcgcgtcgcctaagttccaaatccccaaaagttgcaccacggaaaaatttagcttttttgaaaatcatgtcagaaatttgtctagtatttcgttttcaaaagtggtgtaacttgttctttaggaaaggtccaaaatatgatccctagtgaagaattgacgtttcttcaagtccggttttttcatatccagctggactcgatgccctttacatttttatgtttatttttttttctctttttcatcaaattaataaagatactattaatttagatacgcttaaaaaagttaacaatttagcatctgttttggggcccatttcccattatgtttttcttaataaattaacgaagaatgggcaaaccttagcattttcctcctcattcatccttcctatctgtaatgactcctaaccatcattaaaaatattccttagtgcggaaaatcataaaaccggtttttgaactggttcgaaactcgaaaaatggagagaatttggcacttcaaaactttttaaaacaatcgaactatgacaatttagtatcattcaaaagctcttggcgagctaaatctaaaaaaggggggatgaagccgaactggaaaatccaggaaaatacaggctcctcgaggcctgactccaggcctgggtcggttccagctcgaactctatcatattaatatcatgacgagtacctgtcgagggtattttgctaaaaatttgattaataaaacataatattttaattaaagaaaatcgtaaaaataataatttttcaagcttttcctcatgaaaaaataagtaggttttcacacgattattttttatttttgcttctttataaatttttatttccagcaaaaatttttttgttaataaaaaaatagatctgctgattcatcaacgtcaatatatatgcattaatatattgattatgagatatcaaatatagatctggcttcaccaattttaatatatatccatttgctaagcattattaatgatattgaatacaattttttgctttttctcattattttaaataaaattttattaaaaagcaaagattattcacaaaatttaagaaatatgaatccaatttctgacaaaaagatgcgtcgtcctttctccaaatgctccgtttgctgtaggaaatgcaaatatttttattatggcgccaaatgttgcgaaggtaaaattaataaattatggaaaaaaagattctttagcgaaataggcttatcgtaaagctcttttataccccatgggggtatttttcaactccctcagagactgggggataattagagacagtgaggaaaaatgtcaaaatagtgacaaaaaatccgaaataatgacgaattgtgtcataatttcagccaaaaattgagcaaaactaattttatcactgatttcagatgcaaattaggtactatttttctaatattttattagcaaatattgactttttaaatcaaaaatttttcaagaaaagaaattcgggggatgatatcattcaaaaccttaacagttctcatttagcctgcaaaatttcaaaaatttgtaatcgtccaaagtatcggattatacaagcaaaaataaaataaaatcgccaagaaaaaatataaaatgaggtcaaagtcaaagagatcacaattaccaaatcacttagaaattttaaatattctgtaatatgtagttttttgttgaaaatttccatttgatggttttttagaataacgccctttttgttgtttttttatatgtaacacattcattaaataaaaaatataattttactttagcttataatataaatttaaaaattcgaaattgcataaatataaaattttgaaaatcaaattttttttgcaattgtccaaaaaaggctccttagccattgttttggtatttttaaagtcaattctatatttttactcaatttttggcatttcctgaggttaaaagaacattttttcagtttttatgtcatattttagtgcatatttgggcatttttcggatttttagggaaatttgaaggatttttagtgcatataattttatagcaatactatttattaatttagaattattaatttttattaaaattttataaatatttttttgaaaaataaaattccatttatccctctgggggacaattggagactgggagattaatggatatggggataccaagagcatttacagtaattaattaattaatgctcataaattggctttttgttcatgtttcagcctgcaaacactttttccgccgttcggttttgttgctgaaggatttcaaatgcaaaaatggggaaa

SEQ ID NO: 19278 - DNA, 1841 bp, Heterodera glycines
cggagaaagtctatagaatttattatcttttaagcattttgccgaaagcgaacgtcttttttcagcggcgggattgatcataaatgtcttgagaaaacgcttgacgcccaaaaatgctgaaatgttattgtttttgctagagcccgacgggatcgggactcacgcggggtttttacggggttcccggtcccgcttttttcggtgaacggggaatttttacgggagcggttatttttggacaaaacaaaatctgacaatgtattgtattcaaattttttccaggcggcgcctatcggcaccgcatgcctccctcctcctcctttgtcccaaaaaagttttttcgaaaaatacgccgcaaaagctgttaaaattaataaagggattcgaaaatactaatttaataaactttttgttcgaataaattttaaaaaataatttatttgaagcaatttgaaaaaattttccgattttcgaccccaaaatctaaaatttcgccttttcgctttcgccttctcacttccgctttttatttttatttttacacatccctgccaccagtcactagttgacaaaaatattctttgacgcaaaagccagttttttcgctttggtgatgaaattttaaaaggtattcggattcctccttccaaatttttttctggctacgggtctaaattagggaatagaaggtttagatgacaaaacaaaaatgacggaataaaaaaaaaaaccaaaactttttataatttttattacaataaaatagaatggctgtataattatgttacaataatttaactacagaaagacatgattgatgaattggacaagaaaagcggaacagaatgcaaaaacaaagaagtgtattgtttttgtgtaccgttgcactttgatcaaataatcagaggaatgtgctgcgacagcaacaaaaagtgcgagtgttgtaagacggtaagcattctgttttaaacgaaaatcagcataaataaaataattatttatttgcaccccgagacccaaaagatttgggaccgtaaatttgtcatcaaaaatttaaaaattttctggatcagcagccacagcaatcggtgaaaaacatcccaaaacaaaaatttgtaaagtattttacaaaaattttcgtattcgaacatttttggtcatacctcgcgggtctttgacacttagccgcccgttttattaatattttcattgtatataatgtttttaggatccggaaataaaaaaaaggccacaggtaaaaatcgttgttgtttttctattaatttaaaccaataaaagttgctaactacgaagactgtgtcggatgcatgctataaccagagttttgccctctacttcacagggtccgtgctataagaactcgctgccccacaaaatttccaggccacgaaatgtcctggccacaaatctaagcttttttcttatttgggtgtgtacagagttaggcaagggccaatataaaggttatgttcgtattcagcgaaccgaaaaccctaaattagactcttagaactcattttgtttttaagagttttttcaaactttggacatttcgtggttttttactcttgtggaaagttggtggtcatttaaccatgactatgacacgcatttttacctgtgctataagaaggtagttcatgctcatttgacgggagttggtggttaaaaaagttatcacccatacccataattgcaatatttaccattagcattttgagacggaaatttatgagatttatcgaaatgttattttaaaaccactttttaaatcaaaactagacaaaaaaattttgagagacaacgaatttttacgaaaa

SEQ ID NO: 19279 - DNA, 1376 bp, Heterodera glycines
ttttttgagccaattttaaaccttttttaaaatttttttaaaaaaaaacgaattgaaaaataaattttacccctttaattgggcaaacgaatccccccttttcccataaatagaagaaaaaataaaaattttaatgcaaaatttaacacaaaattgcatgtggtcaaattacccgatagaataggaacattatagttcatggtcgtttgacggaggttggtagtctaaacggcactgaaggtcattttcttatagtacgggtttaccatcaactttgtggtcatttgaccaggtcaaacgcggtcatttaaccattttcttatagtacgggccgaatgcgcagatcagtttgtgttttgtcggaaggatgggaggcatcggcttgttgccccaaaaattaccaacttgtggaccttgacgacagatatgacgaaagattaattcctttgggtctttgggtatgttttaatgtgaaatttgcgaaatcaataagtctattgaatttaatgatattcatcttgaaattttgcttttttaggtattttaacaataaagtattttagtagatcggatttttagattttttatcacattttctccgaacttcttagcatctaaaaacacctaaaacggtggttagcataatttttttttgtcatattcgggctttagcatctatttgggctttttcctgaaatttcaatgcaataaaacaaaaatacaccccctaagaatcggtcccaaaaaatttaataaaatatcccctaagaaataaaaaattttccaaaaaattcgttcgtttctccaaaattgatttatctattttcttgacaatttttgatggtgcaggcaaaattgtattaccttttcagtgtttttagcaacctaaaaattcgattttctattaattattttaaaattattatttagcttgctgcggaaccagaacttacatcagtaagctcctttaaagttttgtattttgatataaggaactaataaaaaatatatacacctttgtagaaaaaattataaagaaccaaattattaagttctatttttcatatgtgctaataattgttttgaaaaattcccaaaaaaggctgtgcaaggaatgaatcaccgacaccctctttgccccaagcagctgccatggattcatccattggtttgcgcttttgagtggtattttgtaagtttttcattgatacatataaatagggcagacaaaaaatatgcacatgcaattttttttttctgaactgccagagagctgaaatgcacgaaaaatatgtttttagcttcgtttgaagcttctaggaaacacttccatatgaatgtttgtgtatattttaggtgcatatttaggcattttt

SEQ ID NO: 19280 - DNA, 985 bp, Heterodera glycines
  unsure (1)..(985): unsure at all n locations
tatccaaaaaaatattaaaaatttgaaacctttacaaatatctcaactgagattttttgaaatttttttgttcaaaaatattttttgaagaaactaataaagtgttaatataaattgacatcttgggccaaatattcgatatttagttggcggtaattcctattaagaaaattccttttcaaaaaaaaaaatccaggaatccagaaaactaaaatgtatacccttaataggtggaatctaataaaatcattaacattaaaattaatttttggccaaattttgcgattttaaagcttttaggggttttatgtggttaatcaatatcgtaatatcgacccgatatttttctatgccttaagcattgagaattttaaaaagtctaggttatggggaagtgttttcaattatctagacattttcaaaagctgcataccagatcatgtcaccaaaaaagcattttctagggaagaaaattaatattataatttaaanantaaaaatgtagaaggtttaaaatggtntgggaattganaaggattgtattttnataatnagagnattatttgtatataaattagntnagngggnaaattaaatgaaaatnnattaanattgagttgggttattntattaaatttgaaatagaaagatgaatggnaaagaagaaagagtaatatttttaatatgntatttttnaaattaatagnaatagaaaattttttaaaggaaantactctcatggtcttgggaaattcataaagcttttaggataggcggcgaaaacaaagcctaaaaccaaaacctataattagtgatcaataacaaaaaacattttttttgatttgctgtaagaagaacggagttgactttttttttttgttgaaataggtttttgaaacttacggggaagctgtaaaaagccggcaacttcaaaatatcataccgctccaaatttatgcatttggactatttacccaaatattga

SEQ ID NO: 19281 - DNA, 1583 bp, Heterodera glycines
  unsure (1)..(1583): unsure at all n locations
aaaatttatgcattgggactattacccaaaattatgaattctttttccattatatgnatggtaaattgcctttaactcttaaagtaagaaaactaattaaactcacgtcggctgaggtatgtggaggggtgaaaggaacaaaaaaaagtttgctacgaatgactttaaacaacatacattcagaattttcaattaaatgggattttaattatctttcggtcattgagctgactgatgctaattaattaactttgcttaaaattttcaaaaaataagaaacccatcaatcaattttgcttagtaggttttcagaaaatgttggtcaaaatttgcggattcgttttcgatgttggaaagaaaaatggtacactcatcatcaattgaaagtttcatttttttgaatttataaatttaattttttcgtctattttattaatttggttttaagattttcatcggcctattatttctttacgtttatggttcatttaaagaacactttcgctcttcttttctcgcaattggctataatatgtcgtttgagtgatgaccgctccggtcggctgaggcggggggaaggtgctggggaagtgaagaaaaaacgcgcggtttacgaacattttttttaaatcgcactcttttaaaatttaggatttggaaatttacacgtattattaaaatttaatgagcggcattcaaagaaaacagcgacaaatatttgggatttagtgtgcaaaaaattgaagtttggtgaaattattttcactgtcacatttgtggcaggaaaatgattgattatctttgctttatagttttttctggtaattattaattttaaaaatttaaatcaaaattaatgaaaatattaaataaattattaaataaaatgcaaatataatgaattaaaaaacacatcgaaagaaattaatcaaatttttaaatatgaaaatggtcgaactaacaatagaatagagggctggcacagagtttggaacgtgggcataatataaatgggatataattaaatcatactaaaacagactaattaaagcgcaaaaaagtcaattaaaaattaattaaaaagcagccaaaaattaaatataaatcagcaaaaaaaagataaaaagataaattaatatgaacgattaaaattaaaatagctagaacaaataaataaaagaaaaacgagaattaatataagtaaaaactttatcattaaaatgtttaatgtaaaaacaaaaatataaatgtaagaatataataacgattaagttgttcaaaagaaccaaaagaaataacttatatttgcccaaaaacaactgaatataaatataaacaaacaaaacttaaaaaacaaataatacagaattaaacgccatttcatactgtataaaatttttagaagataagatagtttaaaaaacaaatttcgactcaacagggattctgcgaaagaaattttattaaaatttggggttcatcgttttagtcgttttttaattatgtttttttttataaccttaaatatacctttaaatgcaaaaaatattgaaaaaacaaatattcattggttcattaaataa

SEQ ID NO: 19282 - DNA, 1713 bp, Heterodera glycines
  unsure (1)..(1713): unsure at all n locations
taaaattcaaaaatgccccatctttatgaattgctctgtccgtttgttgtggcatacaaccaccgcatttaaattaagaacaaacttttccattaaaaaactccgcttgtacggccgaaatttcgtgagtcgaggccaaggcacggcaaaaccggcatttttctccggcggagaccaaacaccgaaaatatcgagctgcacttaccgttcccaataaatttgttttctaattttgaaaaagaaacaaaaagcaaaggttagaggattttttggattttttaaattccctccaattaccgttttttaattttttaattaccccccccccccgtttatttttgtttacattaccaatacatacgtatttgttgtgcctgcccattgcttctttcaccgaaaaaaagggggagagaatggcgaaaggggcgccgccgtcgcaaaaaaaaacaacaaatttttcccccaattttttgccctttcgccgcgcctccgccgcccctttcatcgcccgtcgtttcccccccccccaaattttcattttctccacttttttttgtgtatttatttgtctgttctgtgtgtgtgtacatacgatgggatggacgtaatgtcactatgtgtttatttgtgttctgctgctgatgctgttttgcccgtccgcaaaacaatggcattggccaattcggcgccgccggaggacaattcagtaaacgaacggcgtgccgttttgactgacaagcttttgttggcattttttcacttccttgtgtcccagtttggctggctaaagcccgagagtctcggtctcgagtctcggcatgagaaaagtctcggctcggtttcgaaagcatctcccgcccggaatgtggagaccgattcataatttttcagtcccattttctcatctttggctcctcgtgcttttgtgcgcggccttttcagtcccttattttgtcactttttccaattttttctcatatttacacaagttattcttctgttctatttatcatatcattatcatatcacatgatcgctgttgttgttatgtctaatgagataaaaaaaattttgtgaaattatttattaaataaaccgaaaaaaaggcaacaaaaatatgaaaattatttatttttgccaattttaatttatggggcaacatttttgctgtctgtcttcccatgtccataaaatttgtgccgaaattgttttttcgacatttttgctaatttgctgctcattggtctcttgaaatggcgacgatggcacttcttaaacaaataaattaaacttccgcaattccctgttcccacactgggtttccctcctcacaaagtgccgtcgttcgtaaaaagtttaattaaaatgccattgggctcatttgctccnnncccttgttgtgtttacgtcgtcgcgtgcgtctgctcaatttttgcattttttgaacataaaaagcgcaaaactaagcgttatattataatttgttttttcttggaaagttaattaaaatgccaaaaatggcccggcatttttggattcatccgtcacacacacacacacacgtacattttccaaatttgggtccaccgactcttccatcttaacgcatttttactgttataatggtgcacttaactctcgagactgagaaaatttcaaagactaggccgactgatgacgccgacattggtgagagccaaaactgccccattt

SEQ ID NO: 19283 - DNA, 1723 bp, Heterodera glycines
ttttgtgccaaaaaatgatcatcatattcattgctcaatataaattttcaaaattaaatgatagtccggctttttgcataaaaattcacaaatccctttaacaaaaacggggtaaacatcgccgaaaacccaaacgaccgaatcgatcgatcaatttattatggttaatttgtcattttgttttttaattgcccccccccccccttcgcgctgatcgcaacatcagagtgattaagcaacaaacataacagcaccagaacaaaacaaaaaactccatacacaactcacaatcaaccaatctatctgatcaccgcctattcattagattaattaatttggtaactgtaaaaagattgattagtctaatcaccgcatactgattgatctttagtctgatcacggcacactgattgatatattagtctgatcacaccgcatactgattgattggattatatgagcaccgcacgattgatcgattgagttagcctgatcactgtgtttgattgatttattattctgatcactgctggttgatagatcggtttatctgatcatcacacataattgataaatgtcgtccactggcggattacggccatatctacgaatgccgtaattaatggcaaatcaaaacactgattttaccacaaattttgaccactaattatcacagtgaatgttgtttgatcgaccatttttagtgcttaatttttcggtttttcaaatgctatgaaaaacaaattaagaatttatcattaaaaaaatttttaatatttgtatatatatttttaaataagtgccaataaatttggcacttttccctctccccctttttttccatttgattatttattttgtcggctgactgttgagatgattttgcttgcttgcctttgttttgtgcgcatttcatgtgcagaaaaatgccatcgaatcaatggtgccaaaaatgcctcaacccaaaaaaaaagaaattggcattggcattggcatgctaattattatttttttttctaaaaattaacgcccttaggaattctctgacataaaaatatgccaactctcccccgcttcacttctcacatataaaatttcgcataaaattgcgaaaaaccccaaaatctttttctagactcaaaatgtttaagaaaatgcagatttctcgtcctctgagccccatttccaaggacagatgattaaccaatttctaagcaccaaggacaaaaaattaatatatccaacgatattttgtggtaaatcggggttcgtattcatacttgaatgccaagtacatacttggatttcggcattcatgcttggaaaattttaactgtacttatttccaaagattgtattcggaaattgatattttggcatacaagcttaaaatacatttgtgaaaaaaatttaaatttttggaattctgtcatttaatcacaaatttttgctacactacgtatgctcaaaactgtacctggatttcacgaatttttgccattatgtacttgggaattggtatcatctctgtacatggaaaggaattctggattaaatgctttctcaattaaaatcgcaaaatccatcctaaacccatagaataataataataataataataatcaaaaatccaaatttatttccctaatagccccccccccaccatcaccatcatacatcataagtccacccccacttttccattgtttaggcccataagtct

SEQ ID NO: 19284 - DNA, 2383 bp, Heterodera glycines
ttgttaaccacttttgtcaaaaactgaaaaaattttggggtttttaaagaaaaataaggatttttttgcgccgccggagaaaaattttggaatttttaatgaatttcagtaaggaaatttattcaaatttaaagtttttcatcttttctccttcgctttgaccccccgccattacgacgaacgaggatcggggctgtctttttttttggggggggggggtgagaaattgtaccaaattcaacggcaattcccgctacaaaaacaggcgctgtccgcgctggacaatgccgtgctgactgctgctggccatcgacgcgatgcggccgcaattgttgcccaacaccagcaactgctgcagggacaaggacagctcggtgcaatgggaccgccgccaccaccacgggtcagtggtgtttagaggggacaaattggcatggatttagctggggtggggatttaaccataaatgcacaatctatgcattggccaaaaaatgtgttatttttccgcttgtttactaatgatcggcaccctatgtaagaattttgggcgaaaaattgttattttttgcgcccgtgttgctataattttgaaaaattacactggaaaaactggacggatagaaaaaacaaaatgtaagacttttgttgcccagactctgctgattgtgagtatatgaaattattttactacaaatagtagcatcatgatatataatgttttttgcgttcgtttgtttaggtgttgatcaacgagcggggcgaaatggtggcggaccagcgaactgtggtggtggtcgaaaacacgacgacggaaccgaacaccgacatggacacagtgaacgatgtgagaaaaaaatggcaaaaatgggtttataaaaacttttggtttaattcagacccttcgacactaagaaaaaaagttcaatctttatatttttcgtcttctactagtaattactgttttttgttcgctttttatggcaatttgggatccggcagtgcctactagcgatgcttttatactacaaattttgttttttcaaaagtttctattttgtgtcaccagtaggatagctatttaaataaatttttcttttatcagatttcaatcgcaaaaaaacgattaaattttgagtgatttaatgaacaatgaatgaattgtaatttttaaaattagtataaatgtatatttccaaaaaaatcaccaatttttattagttttggtccatataaaaagttttattatttttactcatttttatcgtcattaaaatgtgcaaaaattttcgctttcagctgaaagagaagcgcaaagtgccgacctccaaggacaagctggtcgatcggaagcggttcaccatgtccgacctggtcaggtggaagccgaagacggagaacacgctgaagcgcaagtgggccgagcggcgccgacagctcaaggaggacaccgtcgatggggaggcgacggggcagccggaacaccaggaccagcagcaggtgagcagccgctcccctcggagcagttcattttacacccgcatccatcgacaaaaattctcgaaaattttaaattttttagttttctcattttttatttttcccaaaaaaaaactaaacacatatttcttcaaaaaaatttttgggaaatttagaagtaaaagaattcagtgtcgggaaggggaggagattttctaatccagaaaaaccaaggggcttcttcacacatttattattaattcttttgtaaattttccaaaaaaattgcaggcgttgccggcggtcaacgacggagggaccagtggaagtggtcagcatgactgtgtagtaccaactgcagcacaaccacaaaaacagggaccgagcagtgcaccgacagcagcggcgggaccacgggtgggttaatatctttaaaattagtcgccgcaatttccagaaaaaataaattttaattaaaaaaatttcgatgtgctaaaagcaccgcagggttccaattttcttatattcgccaaaattttggcgtaaaatggtcaaaattttgagaaattggctaaaatttcccgttttttcccatgccaaaaaaatttaggaaaattacactggcttgggccggtagagcgaacaaaaaaaaactccgcgtaaccctcccgaaattttattctgattatattacagttttgtcctactccgctaattttgttgcccctttctatcaactgttttgttcaggtgatgatcaacgaacgcggcgaaatggtggtcgacgaacagtcgcttgttgtcattgagaacccggagcagaacaccgcgggcatggagacagtgaacgatgtgagttcaaaagttaaaaatgcgtttaacaaggttttgatgtgcgttttttt

SEQ ID NO: 19285 - DNA, 2966 bp, Heterodera glycines
  unsure (1)..(2966): unsure at all n locations
acgagattccctgcccgaattcggatgatgtccccgacaccgagttgttgtgtttcgatgttccgctccattccatcgcggatgacaacgcacgaagaggggagtagtttttgaaagccgcgaacaaccgaaaaaaagcaaaaaaatatttaaaaaaattgttttttttactcactttctttgcccgaagctcttcaaaccacgacagaacgcacattacggtgatcataccgtacagaatcagcgtgatgtagaggttgatcatctcactgtgtaattgcaaccattatcataattcgtttaccatatttcaataatatttcccaattaatttacgaagtatctaaaaagaattggagcagcgaaagggtggcggcgcctatgagaagcgcccacagcaaattccaaaactggcggatgagtagctcgacgctgctcatttccttgggcgccggcagaacgttggggccgttccgcagcaggaaaagctgcgcctttcccgtcgcgatgccgcggctgcgccgaacgtcggccgcgtcgacggaagaatcggggaaattctcctgcagctgcacaatgtcccaagtgtgctcgcaaaaggcactgaaaaagtgagagaaatttgcattaaaataaataaaataatttttgaatttaggttactcggcacttaaaaagaaaacatttttataattgtttattgaatttcatttccatttcccctagtcgttttcgccccttctcttttcccacccgcttagccctttctgccgcatgctccacgtccgcgacagtcgcattgagccgctccgggggaaatttttgccgcgttttggcatcgctctttcgcccaaacagcacaaaagccacgaatcgacaaagccgcgttttggtgccgatttcttggtcctttcattgtcctttttcgctttttcttcgaccgcataattaacggagggaattttattcctttcggcgttcggcacagtgccaacaattttattagtcggcattattcctcaaaagagaaatgcctcatgccaattatgaatttggattattttatgttcagtggatattcatttgctaattgcactatatttaaatcacaaattggcaattagtaatgaatgattgggcaatcaaattggttttatttttgttttcctccgctgatcgttcactctttgccccacttaatcaccgcttcccctcagtctcgactcggttgactctcgacgaatgttcaacacagaaaaggcaaagcaaagagagagagcgaaaggaacggcgagtgaggggcgatcagagaaaaatcagaaaatgagcgctcaaaaattcggcaattaatttcaccgattattttatcgccattttcgtcattcattcggcaatttccaaatgggacgagagttgtgcattaatttattaattttgtgtatgtacctttgaaaaaatgagaaaaaattccgtcggccgatggacaataaattttgccatcgatttaccacgccgaagggcaaaggaaatttattattgcctaattagcaaaaaaagtttaattggatgacccaaaaccaaagcgaaccaattatcagtaattgcgcaaaggttcggtaatgacgaacgatgggaaaatgaaatgaaatcactttcaccttcgaccttttggaaattgagagagaagcgaaatttaaatcacaaataaaattgacaaataaagaagccaaatattgaaggagctcaaattgaataattagcaaaggataagagagaaaattaggcatttatttgaaattaatcttttaacaacaagattttataaccaaattaaaagaggaaaaattcaaatggcaaaagattattttgaaatagaaaaagaaaagctaaaaaaataaattcgcttctgccttgtttaagtgaccggcttcttcaaacaaatcgtttaaacatttcttaaggaaaaattattttttgtaaaaaattatgattaaaaaaggaaaataaagtttaaaattatttatcgttggcatttacctcacattcttcggagtcaatgctaagagaattcgcaattttttcaaaattctttttggtcacaacttaattaacaattaatttgattttaattttatgtttgttattttcaacaaatttcgcattttcttacttttgtttgtgccttcccaattcgccacaatttccatgcccaattttttgaccacaatttgctggtcatttcctctttctttttgcttttggtggccgtgggaaaaaaccgcaccaaatttaccgaaggaaagaaataaaaataaaattgtaatattcaaaaacattatttattaaatatttgtaattggagaagcagtcgcatctttggcgaaaatgttaaaaatacgccaattttattgatttattgaattaaatggcaaaacaaaaaaggcttttggcttttgataaaaaataaattactggataaaaatccaaataaataattatcgacggtgtaaaatcgcttaaattaaataatgtgccgtcatttggcctttatttcgatgattttttgcttattgcaatggacaatcgttcttcttcagccctcaaatgaggaagtgaaacaaaaactaaaagatgatcagcaggcacaaaatgccaacaaagaagcggcgatgcagcgaattgtggccattgcgcggaaattggacgacgacaacggcgacggaatcgcaatgacaccgaaagtggaggtngggggagagacaatggcacaaaactggagtggaggatggagtggggggggaaggacaatgtcacacggggagaaaaagggtaacgggtgggaaagcagtgtccttttaagtagggttaagccccgagccctcaaaaagtncgggggtcggggacctcggggggcgacatgtcgggggtcgggtcgggggggggggggagctcaattgtcggggatc

SEQ ID NO: 19286 - DNA, 1953 bp, Heterodera glycines
tctcttaatatttaatttaggttgataatgagaaaagttattagcaacggcgccgaaagggtcggcgccgaactgggcggttccctacggacaactatttctggaagaaaaaatttaaaaaaatcataaagaaaaaaaaattgtttttctttgattgggtaaagcaatcagcattgaaatttatgaatctctggatttttccgaattttatgatatcatttataaatatggagatattcctttttaataaaccaaattaggtatataaattcttccaactaataattatacccacagtttcaaatacttaaagtttctatcaaattagacactttgttgcacttttaattggcttaatggtatagtggaaaatgtttttttcgggtgcggaactatttgttctgagctcggcttaaaaagataacttaacctgagttaaatgtagcaaataatttggggttgtgtttgtataaatagataaagcttttgcttttcgtttcattcaaaattgttgcaactattatttatattctatttttattaattgctatttctttataagtgccttttcatgacttttttcaattttttggtgcctattagagtgcctttttcgcgatttttggtgcctttttagtcgatctctaattatcattaatctatgcatattgatgaaaatttttggagttttaatttttttttcaaaaaattttctcttgggcaaattccaggtcgaaaaacttggtcccggcctcaggtccggtcccggttttgtcaaaattaaacagaaactttcaaatagcacttcaattgctttgattttttgatttctcattaaagggcagtcaaaatatgcaagtgcatttttttccaggcttttccatgctctaaattagtgttcagaccccgacccatcccccggggacgggacaggttttttggcctgcctcccccctgctcccgtgactcagactcccgcgaccttcgcccccgcgggggtgagtactctttcaagtttctaccgtaaactgaaccctactgattttatttatttttttatactgaggaaagtctcaagcaattagtgaattttcaagaaaatatacccttaagaatggcatttcttgggataaaaggcaaacaattatacttgtattttttttaactttttaaaccacttttgataaaattttatgtgataaatagggatgccaaaaatatgcacataaaatcgtcaaatatgcgcataacataaaatcgtaaaatatgcgcataaaatatgcactaaaaatcgtgaaatatgcacataaaaagtgaaaaatatgcacaaaaaattttccaattgagggtgtaatttctcaaaattactccccttttaagcaaagcaaattgagagaaacaatcaattaatgtgataaaaaaggtaaaacgacgacgaatgggtcgaataatcaaatgaaaggaatgaatgaataaatggcaaatgagctgattgtttgttgttttgtagttggccgatgagatgaatgtatctgttgatgttgccaattgagcactttctgagtttgtgggaaagtgagggacggacggcacaaaatttggggtaattaatgggggggggggtaattgaaaagccaaaattaaaatggataatgggaaaatgtgaaataatgaagaaaaaaagccgacattcgaggacggagtgacaaaagaaattcaatgagaaaatgcaaaaaatgcgaggggaaagaagctgagaaatgagaaaaatgtaaagggaaaagcaaaagcgcgtggtcagtaattgtaaaaggaaaaagtgatcagaaaattacttaagtgatcaatcgatcagagacgtttggtaaaattacgtgatttgtgcacgggatgatgacgaagtgaatgtaattgagggcattggtgaggaaagggtcaaagcaagggcgtagg

SEQ ID NO: 19287 - DNA, 1400 bp, Heterodera glycines
gtctaaacaaaattcaaaatcaaataccatctgcacacttttcgcttgttcaaaaagttggcgcgggaaaggcgacgggaaaagagaaaatgcgacaatttcagccgtgtcacctctgaaaatttaattaatgagaataaaaagaaaatattttaatattttaattttttcttaaattgttatctattttaattaatttttgaaatgagtttcaatttggaacacttaaagcacttcgaaagccttctctcaattctctcaatttttcaatttcattaattttgctataaatacatatatatatatttgttcattttaatcaccttccgacgagtgccttgggcgaaactatcattgaaagattttgtgccatatcaattgcctcttccaccaacatttgtatatcgtcagcatttccacctccatctatttatgatttttaaaaatttattcgggaaatgtttaaaatttattttaaccaaaatcattttgcttttaaattttaccttcatttttggataattcttcagtggttggattggaaatggcaacataaatcagttgccaaagcaaaatgatgagaagatatttgggatatgagcagaatgccatatttcctctcaaaatttttcaattataaataataatttattaaactttgcttttatagcattattttcataattattattgtgtttattttttcgaaatggcagcgtttccgccggaaattatttttcaagcatttccccggaaataattttatgttgttcaaatatttattttaatattaaataacaattttttttaattaaaaaaataaaagataaacatttttattttttaattcaaaaaaataaatagaaaattaactttgttatttttttatcatttttgtttttgaaagttacgaaatagtataataaccagggattccttctttaggcaaatgcctaaaatgtcttttgtctatttctccatttttggcgcctattatttgcctatttaagtgcctgtttcgcgattttgtgcctaaaaaaggaatccctaataataataaacattaattttttataaatgatttgtagggtgtaaattgtggctaaatgatggaattttaaaatacgacagaaattttttaattgtacattttgtggattttttaaaatttaattatctgccaaattcatgtaattttaatgttcatttgcccatcacagaagtgtaagtgagcaattgtcgtggggcggcgcccatattgaaaagaaattcgatcagtcccatcagttccacgtaaggcacattatttgtttgacccgactcgctttaattaccccccactcgtccgactcttttttcttacctcagttcctttctgatcggaaaatacaaaatcccaa

SEQ ID NO: 19288 - DNA, 1152 bp, Heterodera glycines
aacagcaccaaattttcccaatttaagcatgaaaaagcacaaaaaaggcaaaatcagcacaaaaaattggaaaaaagcataaaattatggaattaaaggcacaaaaaattgaaaaaaggcagcaaaaaaaaacgtttgtttgctccctgattataaaaatggcgctacgaaaacggcggtacgaaaacgtcctggcccggcaaaaatggacatttgtgccgctcacttaaaaatatattttaaaatatttttaccaattttcaacgaattttactcaaaatactgtgcaacaacaaaaaagcaattaaaagaaatgcaaaaaaaaaaaaaatcacaatgatagacacgtattttttgtttttgttaatgtgtacatcagcagcaaaggcaaattttgtgccaaggaaaacaaaaataataagccacatttatatatacaaattttagtttaaaaaaaactaacggattacttagaacggtgcaaatggattttgtagggcggcgcaagtgtcgaggcgcaaatgtcgcggcgcaagtgtctgcggcgcaaaagtcggtacacccaaaataggtgctaaaaatggtaatgagatacataattttaaaaataaaaaattcttgtcaagaaaataaataaaataaatttcttaaatttttgataaaattttccatttcttacaaaggagaggtacccaagtgacggtgggacttccgaatgaaacttacaatgtaggtagattaccccccctccccttttgtattataaaatttttttatttttgctaaatgaagcttctggccgagatatgaagcttttcctttttgccttattaatgtcattcacaaagaatgaaaagccaatatgggcgtctctggctcagcggttataccttccatttcttttttcttcttctaaagttcaattcccccatcctgcagataattattttttgttttttacatatccaaaatagtttttaaaccttttaacattaataattttggccttaataatatattttttaatttttattctacattaatttttggcacgtgtgatagtttttattgaaatgaatgaagcaaagaatttgtttcatcatgctaatctgaccattattagagaggggatttagatgtgctaaaaatctt

SEQ ID NO: 19289 - DNA, 2134 bp, Heterodera glycines
  unsure (1)..(2134): unsure at all n locations
gtaaaaaataaactacccggctcgaaatctgcagtaccnggcggtaccgcactanccgtccctgttgatatcgataccggtcgtaactttgcatacggtatcggcatagtgatcgcagtaccggcatctgctntagtgaagaataccggtgccgctctattcaatttacaaaattagttgaaatcttttcaatattctatattaaaatttgttaattattatagaatttaatacacatggcatataaaatacaaaatcatttccatatgtcggttttatttcaagattaaaaataaaatattttgggctttagaatctcttcgaccttatttggctgctcgaatatgtttggctttccttggagtttctcgttggcactcgcgtacatgcaaaatacccatttggtgcctatctgttccgtttcgtcaatttttgcattgacactttttacatcgaattagcattcaatcggtgcaccgctttccttttcccacgtctttacagcaaaatttgcacagaaaagtttgtccatttaactaatgagaaaaaattgtatttggtgttgccaagtggacattttttgccttcgagggaaacctttggggtttttagagaaatttgaattaattcgagaaaggatttttaaaatgccaaaacatttaaataaatattttcgaaaaatggtttaaatatttacaaaaataatgactaaaaatgaaaatttcgagaaaataatgaacaatgcattgaatattatgaaaataaaaacgaaaaaaatcggttttcactttgcattttccaaattttaaataatttaattttaaatttatgccgccatttgttaaggaacatgaaaacttgcgttgtgtgcacatgtctcgtgtcaattgtttattcaatttacatgaattggtttccggagaggcgccctttccattgtctgattcagttgggctatttcgagccgatgacatccatcacgaaagtgtgacgaatgctcgcttttagcttaatcattttaattatatttaaattttaattaataactatttatttcttccagtatatcaccgcaacattgccggacgcggggctttatgacgcggttcaaatcgctgaattggcttccatttgcattccctttttcctctatggcataacagtgatcaaaatggtgcacgatcacaagaagaatccctccacaagcataagtatttctttttttattgcgtggttttttggttgcgaaattattcattaattaactaattaatgaccttcggtaaatcccggtgatatcccattaacggggggggggggatgctaaagagagccagcgaaggaagaatcgtcttgtgtgggtctgaacatggatgggtcttttgaaaagggtcacttctcgttctcgacccaagaaatctgagaagatttattgtattgtattattcattttaattaattttatttagtccaagttgcgactgtgatgccgcgcgggagccaatcgaacggagaggagcgtgccaaatttgtcaatttgatgcaggaacgcactcggctcttctccatgtgcttgctcagccaagtgccctactatttgtcccacgcgctttaccaatcgtcccgaatttttgagctcagcgaagacaccgttcaggtgaaaaaaattggcagaccaataaaattttgaaattttcagattttggccatcctttggcaacttctcggcacaatttttcatgtccaacagcccattctgatgctgttgctcagcaaggatttgcgctcatcagtgcgcaacgatttggcaaaaatattcggcacaattttgtgacccttaagagcaattttgattataatcatatgtagatgtccatttttaatgataaaatgtgtgaaatagacaataatgaactgcaaaattgatacaaaaggctcattacagtaactttaaaatggcttgtgtaaagtgcataaattaattttcagctttttccgtcaaaatgtgatctttactactttctcgaaaatacagtattccaagggaaaattgataatttttggcgcagtagattttcaagcttaaccctcctcagcggaaacgagttgtataagcacctttcaaaagccattt

SEQ ID NO: 19290 - DNA, 2697 bp, Heterodera glycines
ccattcctcataatcagctatatgtgaccctttaatgtgcatattcatatatatagtttatatcagattatagcgtttaaataaataaaatgtacaaatgtggtttaagcggaattggatagtgattttatggagcaaagtgaaaaggtggaaaaattgaagtgaaggaatgtgtgaatttcttacgcgtcaaccgctgtttaatttccctcacggttttctgcaacagtctcatactccgtgtgttgctcacccggagccaaaagtcggccgacgaacgggtatttcactggaattttgagaaaaatatgaaattgttcaaaaaatggcggcacatccggcgtatcgatgctttacctcccgccccccccccctaggggtcgaagcaaaacctttccatcccacttacatgacaagcgctgttgccactctttcgcttcttccaaatcggatgggtcaattccggcgtggtcatcaaattcgtctttgatttgcttgacatccatcgtgcccagtgcacgagttgcgtcatgcccagccaatgctgaaaagctctacgatattttgccatcaacttgctttttgttattttgccccatttccaatgctttttcgctcacctccgtacgccccctcgggtccgtaatagtcccttccctttgtcacgtcgtaaatctgaaaatggcaacccaattgtaaatgataaaaatggaaggattgaaaacctttccacagattgccatgcaaatgtgttcgtcttgtactccgtcgtagcgtctcagctgctccaccgtcatgtcctgcttctccaacggttcgacttgcggcacgtcggggggaggcggaatatggcgacgagcgaagaacaatttgtagacgacgtatacgaacagaacaacgaggacgacatctgcagagggacaattggaaaaacatcatttaattaaatgccaaaaatttgcccgttgcgctgagttcgaaaagttctgcaaaagttggcattgggcgggcgtcttacgaatggcttttggtggctgtgcactttaaaatggcaaatcccttaattaattactaattgagaaaagaaaactatgcacccaattgttttgtgattatcagtttttatgtatgatcgaatcaatcagtaaaaaggctaatcactcactgacttaaaaaactaatctggacatattaatatacccatttaggaagacacaaactactacatttttaaattaatttgagatggaaaatttatattgtgtgatggacaaacttcaattacgataaaattatagattaatacttaaaattgaaattcaaaatttttaattaggttaacaaacaccaattaaaacaaatacttataaaataaaagcaattattccatcaaataatttctttgtcattttccgagtctccttccttcaaatgcgcgattatttcgtccaaatatgaatcatcttaatatgaattttttgaatctctaattgaaagaaattaaaattaaatttttttttttaatttaggctccttatttataaaaggagaatgaatggaatcacttaaaacacaataaatgcatagtttttttactcaccgacgtcgccctcaaagcggtgaatgacctctccgttatggaaacacacctaaaaggggtgctcaattatgcagacaaaaagacgacattcattcgaggcaatgagtgaatgttaaaaagtgtaaggaaatgctcacaacggtgggcaccgaagtcacatcgaattgtgcagtaagaaaaccgagagaactgtccacattaatcctcgccaacaaaacctaaaaaaccaaaataaaattaaaaaaaacaattggaggactgacaacatttcatggcgaagaaagtgccctcccctggccaactcacttctccgttctgtccgttcactttggcctcaattctcggcgccaaattctgacacgggccgcaccaatcggcgtagaattggaccatgacgggctgttgggcttggagaacgcgatctgaccaaggggaaactgtatgaattctgttccttgtgattttcgtctccaaccgtcaaagtcattctcagagccaagttcgaagacgttcaaaccatcggactgtgaagaaaaaaagcgatgttgaacctatcaaaaaaggaatcaccaaaaatgaggcctcattttagctcggcatttttggatttaccaaatgatttgcaaaaccggtggaaaaattggaggggccaactccacaaacagtcgaatgcaaaactgagttgagacgtccaacccaaaaagactccaatggcacaaagcgatgattcgctaccaaaaagcgtctcaaaaattgtcgaaaaatcataacttaaaaaaaatttgtataataaataatatttaatatcataatgagagaatccacgtttgcttaacatgctcataaaggaaaagcaaaagaagtccttaaaattgtactggaaactctgaataaaataccatctggtcgatggcacatttgtgagtgaatttaattagaaataacaaggatacacaaattggaaattcgggggtctcattacttttagccatttcaaagtaccggggttggtcattagttagaagcggaaatatgtttaatagtagcctaataagcaatattttgaaagttaaaagacaaagactctagagatcccc

SEQ ID NO: 19291 - DNA, 1463 bp, Heterodera glycines
atgaaaatggttgtggccaaatggaatttgcggcgggacagaaagattttctaaaaagggacattcgttctgcacagcattccctcttctattggtcccctttgacttattccgcctatgttttctgtttttctcgcttttctctgccgctttctacgaatttccgtccgttcgtctgtccccttatctttcgttttgctctctctctctctcccttgcctccttttccctcttccgtccgctctttcgcttgtcctttctttctctgtccttcctctttctccacctttcactttcttcctcttcccctcccttttttcccctctttcaaaataactgtccaattcatttcccatccgttcatttcgcccgtttcttcgtttattccatccatctccttctgctgctgcacttttacttcttccaaatgttcgtccccaatgtctctctctctctctctcttttttcttttgctctttttaatccaatttcttttttccctttttctctcccattaattttctttcccttttcccccatctgtcactttcgctcaatttctttaaaagtgacaccacaatatgatatatatatatatatgtaatatgaatttccatttgttgttgctctctctctgcaaaatgcccttaggcatatatttggtcaatttccaaagtattttttccattttctcttaaaattgccaactaatcatttgcgcgaaattgccacacattttgaaattcctttcccccccccctctctcccttctctctcgtgtttgttactctttcattatgaaattggtctctttctttctttctttctttctcttcgtccatccattcttttccctccgtcgtttttttcgtccttttcattttcgaaatttccaattttctttatttaattaggcaattggaatttccccattttcaattttcccccgtcgaatgaatgttttccaattttctttttctaattgccctttttggccttttctgttaaattatgactcaaaaaaaggttgtttttttttttgctttctttgcgccgcctctctcattcattttttgttccttggcaaattgtttccatttcttttctcctcaaatcaaaaaacatacaattttttaaatttatttccctcaatttgtcccattgaaaatggcaaataattcccttccaagtgactttggcacttaaattctctttgtgtgtgttttgtaaatggattaaaaaagtgttcgagtccaatccaaacattgccccccccccctataaaattggtgggttttcctcccccttttccacttcctcttccctccgtcactttcatttttaattcctttcatatttttatgtacataattccctttttccaattctgacttttcgacaccttttacgctttttgtctgtttcgaatggatggagcggtggggagaactttctttcatcat

SEQ ID NO: 19292 - DNA, 1058 bp, Heterodera glycines
tggctcacggacaatcggacagtggacaatccgacagtaaattacactaaaagataataaaatgccgtcgccgaaggggaccgattgtgccgtatcaagaaaaaaggaaaaaatgcaaatatattgatgagtttttgtaataaccctaaaaatcaaacgatgtggcgatttgtactaaagggtgtggaaacgcattcaacaaccaatttcgttttcttcgtacaccattaagcacttttgtcaaagaaatgtaagaaagtatgcattggaattttattgataaaaatttcaccataattacgagacggcatttgtgtgcgaggaatggcaagaaaaagcgcttttatttcaataaagatgccgccgtcccttcaaaatgccaatacatgttaatttagaatgaaacaattttagactgcattcgcacttttattatttgcatatttttcttttttcttgatacgacacaatcggtccccttcggcgacggcattttattatcttttagtgtaatttactgtcggattgtccactgtccgattgaccacctctgtcgcattgtcctcactgtcggatccagtcacgttccttttcctcctcttttctcctttctctcctttttcctcctcttccttctcctttccttcctattttgcggtgccaaataaattactcgcggcgttcgttcgcgtcggtccgtccaccgccgacacaatttccaaacttttctcccctcccaagggcaccacgccctgcccaatccgtcgagtgcatttccccccaccccactttgatgagtaacacctgccatgagaatgggaaaatctcgtctcgtctcgtgattcagtgatcggtggggggaatcattgggccttcactttcattcatccatttgccttaccttttcccaaaatattgatgggttacgggggggggggcgatgggtgggcgacgtttcttcgtttcgctgttcaccgatttttgtccaactttccctttcccttccctcagcatcaaacactttatcctgctgctgctgctgtttatccgtttatccg

SEQ ID NO: 19293 - DNA, 2380 bp, Heterodera glycines
  unsure (1)..(2380): unsure at all n locations
tgcaaaaaaaaaaaattcttcccatactctcttatttttctatagaagtatcattntaaattaaattattataattaattgattattatttgttaattagcagctaattattaaataaaattagtcacaatttcaagtctatctgtcgtcaatccccaatcgttcattcatttttagaattattattattttttggcctatatacgtcattgaatgcatactgatcaactgcaaagagaacatcatcaataatttgctgattggaaagggaaaaagtgtcaaattaattgctcttctatcaacgcaattcttgtccatttgtaacaatttttgaggtaatagaaaccatttcattgattgcctttagtcttttttgacaattgcaatttttttcgcttttagtaccgaacatttcctcgcccccatcttcgcatcattcgttcattcttcgaatttttttactgagtgaatgacagttgcgatggaccatcaggcgttgattgacgagctgccggaggtggagaaaatgccagcccaacagcgcatcgctttggcccgtgaacgacgtgaacaacaattgcggttgtgtcagcagcgcgaaggacatttgccgcagcccgccccgcgtcggccgcggctgcggttcagttccgacatcgctctgctggagacaaccgtccgtggcgacgcgcaggaaggtgctttgtcgtacaatatttcaatagtgttgtacaataattggcgagattctccctttatagctcatttcctttccgcttttactattgtatttaagttctttgagcgatttttcgaatccgttcataccttttttgaggggctgggaatcggggttcgtagcgaagggaaaaatgaggaaaatctcaaaaactggctattcttcttaaatggctgattttacgaaacgatccagcacaattccaatttagttgagctgatgctgatggatggtgtcaacccaaactcacacaatgaagatggcctgactccccttcaccaggttcgtctaaaaaatgatcaaattttaattgtaaattttattttttagtgtgctattgacaataatgaaagaattgtgcgacttttgcttaggttcggcgccgatgtaaacgccaaagacacggagaatgtataattgtttttttttattcaaaaattgcgattcagaaaattttgcgatttttgatttttgagtttatttataatatagtataacaaatatgcctgaaaaattggttttttctatatattgacaaatttaatttttgtcaactttttagtggacacctttgcatgccgccgcttgttgtggttacattgaaattgtcagacttttaatcaaacagtaagaatcgtttaaacattaccgtactaatagtattattcagcagtgccgatctgttggcggtcaatgcagacggaaacatgccttatgacatatgtgacgacgaacagactttggatcttattgaatccgaaatggcgggtcaggggtaattaattgaatcctcaattttctttataaaattcgaattttctttttaagcatcacccaggaaatgatcgacgaacgacgtcagttgccggagcgggaaatgctcagcgacatgaaactgctccaccagcaaggcattccactggaccaacggatgccggacgaatccacttacgtgagttcagtgtcacatcgctttttgattgctgacaccgtttagctccatattgccgctgccaacggcttttacgacgtcgccgccttcctcttgcgctgcggtgtgtcgcccgcctcgcgggacaaagactcgtggatgccaatccacgcggttggtcatatattagccggataattatttagatttttctatttatatattggaatcttctaggcagcctcttggaatcagcctgatttgatcgaattgctctgtgaatatggggctgacatcagtgcgaagacgcgcaacggggagacgccgctggacctaacggaggacccgcaaacgcaattagtcattcggaccattgcacagacggaggcacgaaggaagcgaatcggacactttggagtgcgagatagtcgacgacagtcgagaaagttggtcattttagatagtcaaattaggcccttatctaagactttttaatggtaaggtatttgaggcatttattattgtgagaacattcgctaattattttataattgggtaattaaaggcgaaagaaattcgaatcaccgcaagccgtaccgcctgccgcgaacaccgacttcattcagacagcccggggcgcaattcggcgtcagtcattacgcgatcggagtgggatgacacttgcacggcttgattcacaacgtgaaggg

SEQ ID NO: 19294 - DNA, 1461 bp, Heterodera glycines
catttaaaaaaaaataaagactatttatttaaaattcctctttattgatgagatctatttgttgcgaatcatttttgccaccttttttgttttttgaggggtctggcgaggccgataggcgccgccgggaaaaatttctaatttttgttaaacgatttttaacctaaaaaaaaaaatcatttttgacgatcttttaaaaaagaaagaaacattttaattgtttagcttcaattttttagcatttaaaagaatagaccaaattatttaaattaaatttaacaatttttaaaattcattaaatatttaaatgccccactctttagaattattcaaatacggagctaatttaaattcgtaagataaagcagcatgaatatataattaaaaattgaacataaagaaaagataaaacaattaaaaaatatataattattatgcctaaatggaaatattaaataggtaaaaaaaaaattagacattcagttatttagaatattattgaaagaataataaatatatctattctattgtttgagaaaaataaaaaaattcgaatctgtgcgcattaatcatatataatattaattaacctgaaataccaaaaggaataaaattaaatgttttaaaattctttaccaaaaatgtattatttaaaacaaacaaaatttaaaagaagaaaatggtaaattactaaagaaattgattaaaaataaatattgatttctttaacttttctgtgcagaaatgtgcttggtttttgcttttttgtcggtcgaaataaaactgaaaaattatgggaaataattaatcgaaataaattaatagtaattaacgaatataatataattgttatttatttaaacgattttcattcaagctcaagtaaagattcaaaatctgggataatcgaatgaatttaaaaaagtacaataatatttgcattgttttagtattgagtctggcggctaagaaaatgcgaattgatttggagatcatttcagacccatttggatcatcaattgtaaaatgaatttatttttaaataaaaatgaatcaaaaaataaattgatttaaaaattctcattttttcaaatattataatttaaatggcattccttttataaaaaattttctatgtattatttaataatagaaattatgatacaataattattaagctttcatgtaaactatttcaatacaaaaaaacataagaaaactaataatacaattaatttttactttaataaaactaatttaaaacccatatacaaataataataaaataaatttttaaatttatatccataaataaaacacaaacacaaaaattatttattcattataaaaattaaattaacttaataatttaaatggtacaatatatgactaataagaaacaaacttgtaaaaaaacgaagagaaagagatatgtgaaagagttctaactagagttacacg

SEQ ID NO: 19295 - DNA, 1052 bp, Heterodera glycines
ataattaatatagatactcaattcaaatagttatttaagattaataaagacgtaaatgatttttcgacaaacattaaaaaaatatatattcttaaagagttaaaatacaattaaagttatatgtaatttcattaattaaaataataaaaataaattaatcaataaatatttttatcatttgattaaaaaaaataattttataaataaatcattaactatagcagaaaagataattaattaaaagtagtaattattcgtataaatataaaggtttttaattaagaaatttgctaaatgaataaaaaatgaattcaaattaaaaattttttaactaaatgtaggagttacaaaacaagaacaaaatatattaaatattcagcaagatcttaattgatatttttataaaaaaataagtggaaaataatcatttaaaatctaaaaaatacatcgaaaactaatgtatttagtaaatactgattttcaattttcatcaataaacatgactttttcaacactagaggttgccagtagagcccggaaatttcaaatttgcggatcccgctgcgggattggtactgaaaattctttgcgggacgggatcccgcgggattaatcccgcaaatcccgcatttaaaatttgcgggatcccgcgcgggattgcgggattttggaaaattcgaaaaaatttcaattaaattcaaaaaatttccaaaaatcaaaaaatgctgaaaaataaatttttaagggctggcgggatgcattaaaaggggttgatgggtcgaaaaatttctaaatattttaataggctaaattttttaattcttaaccaagtaaaaggtatttcacaaatgtttttagtatacgcttgaaaaaattattcaatattttatcaaatttttttttgtcatttttcattattttagaacatttttgggaaaaggagtgactatttttacacgttttatacagaaaggattttttcaaaaactttttgggaacttggaggagggtacaggggtgccgataggcgccgccgggaaatttttaaaaat

SEQ ID NO: 19296 - DNA, 980 bp, Heterodera glycines
tttcataattgatcagtttgaaagtctaaaaaattccttttagtgtggggatgtgcaccaattcgaatgggtgccttcttccggcgtccgttggattcgcgaggcccggaagccaactgttcggcttcagcaaagagatgctccactgcagccagccctgattctgcttttcgagttcctccttcgattgaacgagtccggcactgcaaaacgaattgaagaaatttgattgattcaattttcttggatacttttgcatttccattacgacggttggcaacggactcggaagttgcgttcctcgtttgaatttcaatttgagttcatccaacgaaaaaatgcaattcttttggtgacgacaataatctaaacaataggcttataggctacacaattggcaaaccttattccaagttcaaagaacttgcctgaaatcactctcttccaaaactcaatgaccctatctaaattttagtaactaattagcatggttaaattacaaaattcctcattagtttaccataatttgtcgagttgacatgtcgagcctaagatgagaaatttaagaaagagtataaaaaaagaaaagacgccttacctttaaaaaagacattaagccgctcatctcaacatcattatcccaattatccggaagatacggaggcctgtttggcaatgccataatattaaaaacgtatatttgtaaggttttctagaaaaataaaagtggatggaaaaaagcagcctgtttttttttgttgttataaatagctttctacggatttcaaaggaatttgaaaaaaaacttgttgaatttaaatcttggagttgaagcctaattaaaacttttggaagaaaaaatttataaattttgatttttagaattaaattttttaaaaaataatataatggcataatgtttttagcgaaatggcaaaagagaaagaagcggcttttcaatttcagcggaagtgcgatcg

SEQ ID NO: 19297 - DNA, 1503 bp, Heterodera glycines
ttcatttcagcggaagtgcgatcgtttggtggcgttcttccttgtcctttacctttccctcaaaaagtttatgtttattttacgttttaacagcttttctatcccataaattttaaaatttctcttcagtgtaaataatgtctttaaccaataagaatggacggaataaaattgcagacaatggaaatggcaaaccaattgaagctggtccaagtggcaactgtgctagggagaatctaatccgattaaactcccttaatccttacatgtaatttctttgtttatacttttttcgaaaatcgttaattattaatttggatttttaagaacgtgccctctgtgcaacggttatttggtcgaagcgaccacagttatcgactgcttgcatactttttgcaaatcatgtctgctcaaatattttgaaggtgggcagcatccaattaaaaactaattttcatcgttattgaatttttgcctttcagataacaatgattgtccaaagtgccataaccaaatccaccagtcccatccgtctcattatgtggcatttgatcggacaatgcaggacattgtgtacaaattggtgccgggcatgcaggcggaggagcagcgacggagggaacaggtccacccgcacggatttttgttttaattagagtgacttgggttacaattttcctggtttatcatggtctcctttttaaaaatgtctatccttattttttgcccaaataaattttcaaattccatttgccgttttgcagtgtaaaaagcgccaccaacaaatgaaggaggcgcgcgaaatgaatggacgagcagcggaaaaacataatcatcagaacatttcctcctcctcttcagccaccgccgtcataccgccgccaaatacaaacgatgaaaattcagcggagtgcgctgaacagcggaagagcgcaaatttggcaaccgcggctcctaaaactgagaaaatggacgaaaacggcgacaccaatggtttgtcggtgtatttggcagcagtattttacagaatttgtggccatttgcccgagttgggtcggtaagcgagcgaaaagatatttgactggcatttttaaagggaattgtgcgcatcgcgtgggtgtttgctgtgatgaacaggacgcaaccacggcacaccgaagggtatgttaatgcaaaatttatgtcaaatccgaaaaatttattttgcaattcttacaattcagcaagacgaaccagtgctgatcagactggttccgggttcaactctcagccccctcgaccgcccatttgtgcgtctttcggcattttccactgtcaacactgtgaaacgtcttcttgcctttttgttgctcaacgatatcacaaagtacaacgactttgatgttttttgtaaccgcgaactaatgggacgcgacttttccatggttattaactcatttttaatgcatttatgacatggaatttaccttttttccattttttcaggcctttatccgtaaaacg

SEQ ID NO: 19298 - DNA, 1431 bp, Heterodera glycines
gtaaccttacactactaatgtgccaaaagtgttcaaatgcgatttatttattaattttttttaagtgaaggcaccaattaacaaacttatttaagcgaaggggaaacaaagcttattcttatcctttgtgtattgattaaaacttttaatagcttgtttagcaattcaacgaattccacagcagcagtcgggccagtgaaatgcgacttttgcatgcttttacacaaaaagtcggaaaatgtaaacccctttcatttttataaagattaattgtcatttaattacattccgcaccggaccccttattttaccgtattgaaactggcaaaaaaagcccttgcttggcgtaaacacggcctttttagcagataagcaacaatttcatccgcctttttgagagtttcaatatgatgtgcgatcgcctaagttctggaggtgatgtgtgcaagaaatatgttaaagccatgatgaatggcctgtccaacatcgttggaatacaccttgaacagactcacgctcaatttttctgtaaaaatgtttttaaatgcacgtaaaatctgcttgtaccgtttgaccatgtttttataagtatataattacaattaatgcattccgcttatattttcaattttaacctttgagtttgtctcatagccaagtttacttattgctcaattttcgttgttggtaaaatttctttatgatttaaaattaaaggcattattagggagcaaaacacgtaaaacttaaccaaaaacttaattttggtcatttaaatggttattaaatattttataatgtttttcgaataaggaaaatttttaaaccgagaattttttataagaaaaataatgaattttggcgattaatttttgagaaaatttttgattcataggggtgcattttctgaaagttttttcaattcttaaggatgtattttctgaaaatttttcaaatcatttcttaggggtgtgttttctcgattttattccatttttaaatgaattttccggaaaaacgccaaaaaaagtcaccaaaaacggaaaaaaacgccaaaaaggcaccaaaacggcaaaatgccaaagaaaaaggtaaaaaaaggcataataaaagtcaacgtaaaagcctcaaaccaagtggaaaatgtgttatttacagggctgcaaaaaatatgcacgaaaaatggccaaaatatacgcataaatatgcaaataaaatcgtgaaatatgcatcaaatatgcacaaaaaaacttgaaaataaggggtgcaaaataatttaaaaaaaaaaagtttcttcagcataaattttatcggttatttttgcaattacagatcaaaaatttttcaagattttcggcagtaaagctcatcctattgtctgccaaaatattcttataaattgaaaatgaacgttcaacttcgcaggattga

SEQ ID NO: 19299 - DNA, 3248 bp, Heterodera glycines
  unsure (1)..(3248): unsure at all n locations
tgcaattttaaatttatttaaattttctttctatttttattaaatgtgttaattcatctatcaattttgtcaggtctttttatgggatcaattgcaatgttttcaatatgtttgaccttcttttacaccgcacatctgattggcaaagtgattcattaaataaaatttaaaaatgtcaattttttaatttatagaattgggtaaccatgtgcactaaatggccagaagtgtatggaaaagtgcactgtcgtaaaccatacccgggtaatccgcttaatgtacatttattttattattaattattttgcttttgccttcagaaatggcttacagggcaatgggacaacatgccaaatcattcacatccgccattttgaacataatggttagaaaattttttttttttaatttaaggttaaaaatattttgaattgaaatagtaattttataagattttataaatggcatttaaaatacaaatttttcttttaaatttaaatttcccactaaaacatttaaaaaaaaaaaccaatttttgagttatgaaattgcaaattttccctagaattttggcatttcaactgtttatttgctgttagctgcacgaattttgtccgagctgctgtcctcaatgttcccaaatgttgtacaacatcaaattggtctctgctcaatgatgccaattttggcactgcttcttttgcctgtcacatttttgaaatcgccacaagatttttggttggacaaaattttgaattgaattagagaccggacaactgggatcggaaggaacccgggtcgggataccgaccgaatcccgtttcccgatcaatcccgaagattttggaaaaacgatcgggacggaaccagcagaggtcaggatcccgaatttaatcccgcgggatgccaatcccgtccccggcctctactttgaataatatttttgtttatttttaaaattttcataggttggccgtcgttacggcaatggtcaccacaacattgtccgtgttgttgattgtttttggcacttttcttgaccaacctgaatgtgccccatatgcgcatcatccgccattcaattcgggctcctttttcctctcaattggcatatttttcttttcatttggtggtcacagtgtgttcccgacaattcaggcaattacaaaaattaatttaaaaaataattattagaatttaattgcattaaaaaaatgttttaactattttgcaaacaaaataattatttttcaatgtcaataaaagttgtttcaaccattttcagcacgatatgcgaaggccgaagaagttcactcgttcttcctttctcgcatttgccagtaataaattattattttttaaatgttttcaaaattatttttcattttttttcaaataaatattatatatttttttaccatttttagttgttgcttcaatgtatgtgccaatatcattttttggttattacgtttatggcgattcgttgcacgattcaatcattagctcaattcaaacgccttccattcaacaggtaaatgtgaaaaattaattgaatgaatcaactttaaatgttaaaaaaataaataaatttactattattgggatttcttgaatatttgatccagaattttctaaaattttcccggcggagtttaaaggcaccaccggatcccatttttttttttttttagaattttccaaggcctgaaaatagccaaattcggcgccgaaaatttatgtcaattacattgggaaacaaattttttgactcgaaaaacaaaaaaaaagccaaactttttttctggttatatatctgtttaattccgccatttttcatgtttaaataatttcgtaaaatttaaatgcattattattttgtcgaggtttgcttcttcatataggacatatatgaataaattttttatccaagttttgcaataaaattattaatttttaatttcaaattcattggcaccttattggctttccgttgttttctacattcaaaaattctgaggcttttttttacagttcgccaatttgtttattgcacttcactgtattctcacgctgaccgtggtgatcaatccgctgaatcaagaaattgaacatcttctcgacattccgcatcgtaaaaatccgtttaaatattttataattttttaaataaattttaagagtttggttggcaacgcattttggtcagaacatttgtgatgttttccgttgtttttgttggactcactgtgccaagttttgggccaattttgaacctcattggtggcacaactggtgaatatgaaaaaaaaattttttttaattattattttttaaaattttcagtggcactgacatcagcaattttgccatgcctttttgatttatatttgcattcatcggacaacaaaaaaggcgtgcaaaaattgggcggtgaccaacagcagaacaccactaattttaaacggttttttaatataaataatttgtaatatttatgggaaaatttcaattacatcataatttaaattgtttgtgtaaccaattctttttttattttttccaaaattgaaaattaaaaaaatataatcttaaatcattttaatttaataaaattaagctaaatcattttaatataaaaaatatttgctaaatcattttatttttaattctatatactgaaataattgttttagaattattgaaacaacacctttcccaaaattggcactcaatctcagtgtgataggtaaatttttaaatgaatttataatatttaattaaatattagagaattaaaatgaatattatattataatatatttaattaaatgttgtttatacatagaatatttaaaatgaaaatatttatagttcttgccattgtgtgcggatttgccgccacatattccgcttttgtggaactgtcaacaagccgattttctggcccatgctatttgagtacaaccaatttggcaaataaggcaacaaccactggccaacaattaatgcattgctgcggacaatttcgtaacattacgaggcaggcatttttttatgttaaaaaattaaacattaaaaacaaaaaaatttcgaaataaagttgttttatggattttctgggtcgtagaattcagttctgatatcttttttcggcccatttttgaactcctgacccggattcgaacaaaaattcgaaaatgcaactttcgaacgattcaaaattgaattttcganatttttgacct

SEQ ID NO: 19300 - DNA, 1967 bp, Heterodera glycines
cagaattcgccaaattatgcttcctgagcctgaaatattcttataatttaaatttatttgttagaaaatttattagataattttggatactgttaaataattaattaggcctttaggcccgtaacctttccctaacccgtacttgaacaaaagtcgaaaattccgaaaattcaaccttattgttttatggttttttggtctaatttaggctaggaagtaggaattggttaaaagagcagattcgtgatctgggcccccaaaaattccagaatcaatttttatgattagacattatcacaaaaaaattaataaaccaaaagccaccccccccccctcttttgttttaataaaattcaaaaataccacttttaaagtagcgctaaaatggcattaattttttaaatttccagtggactatttttttgccaaatttcggattgccttccgaagctttctgttaattgccagaacccaaccaataacgatcagcttaatccaagaataatgtaccataaattgctgcatcctgtctttgttggtcatgcgctgtttgaatctcagaaagctctataaattaaacattaaattttaaaaatttattttaaacaccaaattgaatccacgccgtgtcgccattgtaaattttgctcaacacctcctcacattccttgtgcgatttgttctcataaagccaccgggggctttcgggcagaaaccaaaagccaacaaattggacaacactcggaattgcagcaaatccgaccattagtcaaaaaaagattttttattaaatttaaatgataattaatcaataacgaaatgattacctccagccccaattcaacggatcaatgtaggaaaacgcgaacgcaaaaatatttgctgctactaagccaaaagtgatcatcagctggaagctggtgatcagtcgacctaacaatttttgtttaatatttcaaatatattaaaaaaacaatttaaaaaaatattaaaaataatataagaattaaataaataaatttaattaatacaaaacacacctcgaatatgcgctggtgaggattcactaacataaattgggacaatcattgaggcaaaccctacaaattgaatattattttttattatattattaagatataataccaattgctattcctaacaaaattcgtccggccaacaaaatccatttgcttagaccaattgcacatacaattgcaccaaatgtgaaaattattgtggaaagaatgatcatctggaaaggaaaattaataatttttatgttttatatttaaataaaagattttgtgaatcaattaaatttctactatttttaaattccatcatttaaacaattttacttttcttctgccaaaaatgtctgatgcttttccggcaagcagtgctccaaccccggccattcccggcgtaattgaaactataataaaaatttaattttctaaaacaaaaattcctcaccaataagcccaatccatgcgttgctcatcggcttcaggtccgaattttttggcacgtaaagcatcgcagcggagacaatgccttaatttgaattgttcaattaaaaaataaattaatgttttaatttaagtcccctgaaatttagaatataatttatcatattttacaatatagaagaatgttttttcacctgtgtcataaccaaacaaaaaaccaccaatgacagcaataaaagcgagctgaaagcagaaaattggcacattaaaattaatttttgttttgttttgaatattttattataaataccaaattttaatttatattaagaaataaaaagaaatcccaccaaatagataaatttcccaagctttggcttgtgttttggaagttttggaccagcggcggttggcgaaacaatattcatagacaccattttagcaagcaaaaactggtgtgtgcctcgctaaagtaatttaaaattaataaaa

SEQ ID NO: 19301 - DNA, 1094 bp, Heterodera glycines
caaatttaccttttaatagctttatgaaaatagattatactctatataaacacactccccaagagaccaaaaatcaggaattttgacatttggtaaattacatttaaacttcaaaaatttgccagacccgaacccttttactcatggaatgaaatgactaacaagggacatcgcgaactttgagtgctcaaatcgcttaaaacaatttttatatactattttatctaatagagaaatttacagctaattaaaaaaatgttaaattaaataaatctaaaaatataccacatatttttcaggtcatttttagcgcatggcaaaaaaaagaacgaaactttaaataccaaatcgattataacgttaaaaacggttttagattttgacactcacagttcgcgaagtaaaaccgccgactcaccttcgaaatggacaattgagggtaaatgctggcgttttctgcttggaactttttgacgtaactcgcgggaaacagtccgactttgcccttggagtttcgcccttccacccatcctccttcaattccctgcaacggattgattttctttttaaaagtcaaacactttttattatttacctccttaagaatggtaagaatttcaccagtttttatggtaagctctccgctgcccggttgagcttcgaagtcaaactccgccttaacctgtcccattttcagagccatttctagtgacgatttaatctcaggggtaaattttaaaagaatttaaatatttggcaattctaacgcaattaaattaagaaaaaaagggttttacgagtttaacttagttattacatatacaacataaagaattcagtaaaaatcctcgtatgctccctccatccgttcgtagtattcggccttttccgctaaatgaatggacttttttaatcaatagacaacaaaaaattaaaaaaaaataaactatgaaaggatttatgaattgtttaaccatggcaatgaggtcttaacaaaaagaggactctgagcctaaaaatactttgccgctttttaggtggctgagtaaaagcaaccatttatggtctcatttgaagtggtaaaaagtcataaa

SEQ ID NO: 19302 - DNA, 1307 bp, Heterodera glycines
gaaattcctcggaatattttgtcataaattaatttctgcctttttcttccgtcaattcaggtccatcttccgtttgtttttcagcggtatctaccatttcttcttctaattgtaataaattgtctatttcttcctttttgggtcgtttttcaggcaaagattcttctccagcatgagttcgttgcttttccttaagctgtttattttttttggttttatattaaaaattaaacaattaaatcagccgaaagcgtatcatctgacggcacagaggcagcgttctctttaaaaaatgtttaagtttaattatgcggtattatccattcattcattacacctgttgttgtcagttccgcataattacgctgctgaagccacggtatttcggcctttgtctccggtgccacatcaacgttgtcctcaagagagaccgtgataccgctcccgtacagatcagacctgggtgctcttgaaaatgcacgatgaccaagctaaattagccagataaaacagaaaaccaaacgcaaaaactgacacttgcaactgttttcgtgttcaaatcaatggtatcgccttcaattctcggaaggctggttttaatcaccggctcgagcaattcacgtgcaaatcgaagcccgtccatctgcttgagaagcatgaatatgcctgccatgtgctcgttgaattttgcctaaaaaaacgtcgtattttataccattaaacttccttttttgtccaaataccatcgacgatcgtgttatcgttgaaggaccgcctgactcatccggttctaccgatgatttgcactgccaacatcttataataggaactaatccgacaaaacttcatgtgaattatccaaactacctcatttcttgagaaaaaggatcgtaaatttttccaatatccattgcatcatattgtcttttacaattcgctccaatacagcgataatgtgctcttaagtaatttgtagataaaaaagttgctaaaacgtacttatgaacatcatccttctcgcgaacctccaatttttgacgaatgtgatcgattttgtacttggctacgttaatcacggccttatagttgatgaaaaggtaatttacttttcgtagctttccatcgactaaattttatttatacatataaagaacacatgttatatgcatatacataccttcttctggaacgagtcgctcttttacaattttatcaacctaaaaattaacaaaacgaaaacaaaagaaaattaaaaataaaacttttaatgtaatgaggaactttctccaattgtctttggtcaattt

SEQ ID NO: 19303 - DNA, 1047 bp, Heterodera glycines
ttttcttaaggatattttccaaaaaatgtcaagatagtgaaaaaatagtgacaaaactccaaaatagtgatttttaactattttagtgacgaagatgccaaaatagtgatttctagtgaccgatagttacatcagaatcgaaaaattttaatacagaaatgcgttttttgagctcctttcttcaaaacaattgagcaaaaaaaagttttttcactaaaagttgcttccctaatgattacagaattgtggggttgactgtggccattttggcgctggtcgtcctcctcctcatccttttggcgagttattaatttaatatactgatccctaatgaatttgaatagtatttgttcgcgaaattgcgcagttttgtccgcctcctcccctccatcattgtgcacggcggcgtgaacagaggcgtggaggaccctcccattggtccgtccgtttccgcccttccctcctccgatccatccgtttccgcccttccctccgcaggtccgccgtccttttcgcctggcccttcgtccgtttccgctcgtccgttgtcgcccgccgctcgtccgtcgtcgtccgccgctcgtccgtcgtcgtccgccgctcgtccgtcgtcatccgcccaccgcgctggtccgtttccgcccttcccccttccctcctccgatccatccgtttccgcccttccctccgcaggtccgtcgtccttttcgcccgccgctcgtccgttgtcgcccgccgctcgtccgtcgtcgtccgccgctcgtccgtcgtcgtccgccgctggtccgtcgtcgtccgccgctcttccgtcgttgtccgccgctcgtccgtcgtcgtccgccgctggtccgtcgtcgtccgccgctggtccgtcatcgtccgccgctggtccgtcgtccgccgctcttccgtcgtcgttccgctacgaccagagctcatgggcaacgcccgtctggaccggttgataagaaatgaaattgtaattttgttttctgcctgtctcctcactcaatactctctatctcatattttatcttttttcctctg

SEQ ID NO: 19304 - DNA, 865 bp, Heterodera glycines
accttatctctctctctctctctccctctcccttccctctatcccctcctgtatctttcttttcttctccccttcctttatttctatctctctctctccttctcctcctcatcctcctcctactcctcctcccccctcctcctcctctctcttatcttttcttctcctcttccattatctctctcttcccatatttctctctctccgtctctctttctctcccacttccgacttaatcaaacattgagaatccttctccattaccaattcttcagattcttcgtcacttcgcaatattgctgaattggttgggctaaggagagggaagtgcggcagcgaagtgttaattagcgatgccttagggatgggatgtgttgggatggcattgcaaagcacgcgcaaaaagcattctttcagtgccaaagcccgcgcaatttcattttaatttcctcaatctcttttctgatgtcttgaccatttgttgacaatggcatgagtttggctttcttttctcggctttcactgcgttctctcccctcccttttcatctctcttccgccgcctttggctttatccgttcggattgcctcgggcaacaagcttaagcatcacggcaggcaaatttgttcagaatgagtgagggagaggggagaggagagaatggaaagtgtgatacccccccccccccgtcccctccccgcactgttcgggcgaatgtgttttgttttttcattatcagaagatctcctcataaccgcatagggtttcatgcttttcctccgaattcgttaagccatcatttcccctcccttctcttcccccctctcccatttctctcttcctttttccctctctctatctctct

SEQ ID NO: 19305 - DNA, 1900 bp, Heterodera glycines
ctaaattctcctctctcttttcctctcaccttctctcttccttcacccctctctctctccccctcttcctctctctctctctctccctctctatctctctctttctctctctctctctccgaacaaaactatcagcaaacatttcccaatgtttcctcctcttttttttgttggtgtgattcattagtaaacaaaaaattccaaattttctgtcattccctaacaaattcagtggatgtatcattttcttttcttaatttgcctcgccgcactgttcgccccccacggcgttttgtgccgtcataagcattttcaccaccgagtgccaatcatcgatttggacggtgccgaacaattagtgagtgccaacttaaaaagttctcaaaatttaaaaaatgccattaaattcgttcaggtgggcacaattcgtgaagacgatcgaacagtaaatgtgtctccaaagctgcgaatttgcaaggaacaggtcattataatttattaataaactttctggcaatttaccgtatccaattacatcgtttgaccattaccgtacccctaggccctgtctgtcattatgaggtcagctgggcggacgaagacgcatttggtggtgcgcaagtgccattcgaagtgcgcattttggacaccgtggacggaacggcccaaatccggcacaaagacggaacggaagcattggactgtgcggtgaaggcgcaatttgtcatccgactaagtgcggtgaaatgcggcgacgacgcggcaaaaagcgaagcgtaaggaaaaaaggaaagaaaagccatgaaattgttaattaattaatcgtttacctctgctgttcagagtggagctcaaaattgctgtgcaagatgttaacaatcactccccccaatttgatggtacggtaattccattgttacggtcattccatttgcatatattaacgatcggctgggggaagccctgccctctccaactccccaatttgcttgatcatatttgatcaattgtcgcttcaatttcgaattttccctccttttcagctccttggtattccttcgacgttgacgagggccaaactcatgccgaaattgcgcgactgtacgcccacgacaaggactgcggccacccgtacggcgaagtgtgccgttacgaattgaccaatacgctcgcggacagtcccttccgcatcgattcacgcggagtgctcagcgcacaacgaccgttaaaccgttctttggccgagtcgtatattttgacggtggtggcagaagactgcggaatggtgtgttgattaggcagtttaagaaggaagaccaattcatgaattaagcatgtgtttatactttttgataatatgatgcctaattagggttaattagggtaattaattttccaattcatccgtttcagctccgttcaaagtccgtgcttgtcactgtccacgtccgcccgcgttgcgttgatgcgctgcgctctaacggcacggcgcggggtgcgcgtcatgttgaacaaaacgatttgcgagggattgtcgtgtttcctgatgcggaagtaatgacttgggaggatgagcacatttcaaatctcacatttgccaggtgatcgcattcggcgccgcgggtgcggaatgccaagcggaagcggacctggagttggagcagatcggctcggagcatcaagtgaaggcggacgcactggcggagtgcgggctgagcagcgcggacgccgtggaactgttgccggaagaagaaggaatacggaaactccagccggacgggatgaagaagaagaaaaaggatgaagccgagaaagaggacgccgaagcggaagaggaggaggaagaagcggacagagacacggaagggaaagcggcattagacgggaagacataaggtgg

SEQ ID NO: 19306 - DNA, 2866 bp, Heterodera glycines
  unsure (1)..(2866): unsure at all n locations
cagaatgtatttccaatcgtcgcagtgtgtccttggtatccattatgatgngacatctgaagctggcccaaatcagnaaacgcttgccgccgaagaacgtcttaccaaaaacctaagcattaaattttgttttttaattcctttttgccactttctccaaatattcggtcgtaatttagttgtccatccacacgcgcccacaccaacacaagaacagccgacttttgaagcagttgatgatgtttggaattgacctttttggggagaagcacgaatggctgaagcttcttgccgtcagagcgcgccgtgaggatgactatgaagcgagctttttcatgtccggtattcaggaccgtcactgttttggcgcacttttcggtgacgcacgtgccatccgaagggtctaaccatacggccgtttaatcgcaggcgtaaacagcagagtaactaaagcaaagcaactgaaaatttgtgacggttcatgaaacactggagccaaccgttgctagcctaatgataaatgtttaaaaacaaaacaaaaaaatgaaataccgcaaaattttccatgtttttgttgatgcacagttgttgtgcttgtgcgaagatcatgttgcgcgtcacgcgcaatttcttctccctcagcgcatggacccagttcgacgattcctcgtcgaattgtgcgtcagtcaatttcctccctccaccaacaagcggcttgcgtttcgccaactcatgccttaattataatatcagttgaaaaacttgagacatttaaaatttacgtttttctcaatgccgtctcctgctttttccagtcccgaacggtgtttcgtccactttgaagtgtcggctggcggcgtgaatggacgacgtcttggcgaagtccaaaatgacgatttttggtcatggtgtagccgcgacgtttgcgcgttgatggtgaagccaatgcatcggtgttgtcgttgtcctctgcgattgtttgtgtgttgacgaattgtttgaacgcgtcgtcgtctttgtctttattggttgcttcatttatcacaatggcgttcgcgttttggtccataataccgtcatcgtcgagccaacagctgcagcatgtgacttttgcgccgaatccctcatcgtcctcagccaaaaatgagcaaggagcaattgcatggcacggctttgagcatttacggcactggtgcgccccagaacagacgtttttgcagtagcagcacatcttaagtagaaaaatctttaaatgaaaatttatgcaaagtaggtgctatcattttgaactaccttttttagcggttcagaagagttttgctcgtccatcatttaaaagaccaaaaaggtaagtaagaaactaaaaataattaggtaggtagatgaaatctcaaaaaacaggtattttggcgaaaagtttacaaaaaaaaattgccaatttttgttggattgagtgattatagttaaaattttttaatcttttcttccgtcaaacgctcaagttttttacattttttaaggtaactcgtgcttttgaatttgggctgttcattttgtgaaaaatgctttttatttgaatataaccctattaatgtcataagatttttaaaataagtaaataatactttaaatttagaatgctcttatttttgaatattttagctaattgattttatttattaaatttttaagtattgaatccattgcaaaataatttcaatttcatttaactgtatttactttgtttttatttgtttttagttgattactgagctagccggttataatcctgagttcatattgtaaattcaaaaatttaatttctcttcattattaattacaaaatgctttaaattgatgtttatcggtaattgtttttttgaatcttatgttctttaatatttggtcatttttagattaaaattttatatttatttcaatacaaatttttttcaagcaaagttaatgctttattttctgtaaaatagtcaattcattcacatttaaagaaatagtgtgagacgaggcaatagtttgttttagattatgaaaatgtatatttttttctaatattgaaaagttttttgctttaagtaaatatgcattattctttataaattaaactttaatttactttcatgagaaaacagtaaaaaattatgaattaaaatatttattacaattttgggtgaagtagcctcttgttttgcacgtgatagaccattttttgctaagtcattccagtgcactgtccgaagggtagtccaaatctattgccacttatgtgccactacatatatttgattttttttgaattaatactcaaataaattaaacttaaatcttgaataaatctaaaatatttcgccgaaaattaaatctaaatatattaattaattaaaatttgaaaaagtaaaatatattagttaattatttagttagatctttggattatttacaatttaaaatatgcattattcatttagctttttatttgtttttatgatcaaagtttttataaaataaattatttaatattttttaaaattaaaacaaagatgtaaatgagataaattatataattaattttggaataaagtaatatatgaaatcatagaaataaaatttattgttcagctgctcatttgtatatttttaggtcttaaattaaaaaaaaataataattaatatatgtatagaaatttttaattaagaaaacttattgaataataatgttatttatgttattcttaatttgttttgcctttaaaaaaagtttttgatgtatttcattttgttcgttgtgtattttcatattgtggaaaaaattgttattaaaaaaataaaatttctccttattattaaa

SEQ ID NO: 19307 - DNA, 2860 bp, Heterodera glycines
tccgaaatcgaaaattgaatgaggacaaatttatcacaaaatgacaatcaggaagataaatcgcataatttgcatttttccgttgactcgcctaaaatttattcaaatttaaaagaacaaataaaattatgctttaactttgtccaaattgtgcgaagaagtttctcgcaaaactggaaccctttacaatttcctctcaattgtcagagtagatgcttttaaggacactttattcaattgaaaatcataagtggaaatgtaaagttaaattaaagagtgatcgcgttttaaaaagcaagaaacaaagcaagatgttaagtgagtttttatcgctttaggcagggaaacttcctgaggacaaatgaataagcaaagacttaaatacaaatgtgtcaaatgggaggggcgaaaacagacggaattacacaaattatttttgagacattttccgaggggttggaagaattgagtcatttttgagtgagtaagcaacagaagagccaggggaattacaacatagaaaatgccataaactgagaaaagagataacaaataaatataggaaaaatgaactggaccaaaagatgcaacgtccatcccctcctccataaactgtacacagtgccatttcacctctcgcgcctccttccaccgcgaccattccagtttcttccacgctggcaagaccagcattgacaaatttttggcccaatttgaaattcttttcccaattggcgcaccaaataattgacatgagttcgcttttggtcttgtcccatcgtagggcaccacttttcctagtgccactttggcccctgcatcgcacatgaagcgcaccacaacttggcctttgcttgttggcactttgactcaacccttgctgttgcagagcgcaaagcttgtttcgactctccattctcgggtgggtcttactccggcgattgtctctttagctcctgagttgggctcttagactgttgctcattctcttccttttccacacgggaatgctggccaggactcatcgatcgattgttccaaagctgccatcacacgttcctgtccatttccattaatctgagggtggtatgccggcgatgttatgtgttttactccttcgttgaccaaaaatcctctaattctgccgatataactgagcgccatgtcagaaaccaaagtccgaggttacccaaaaattgcaaatatttcaatcgacgtgtgctcttttaaagggaaatatttcttcagaccatttgtagtttggctttgcgcggggaggggcgggtgcatttacctgacatatctcacattcttttactaattctccacttcctctgaaatcgttgacatcatacatgtctgcgtgcctttgccttgcattttacaattgcaaaacgagttttatgaatcattttcaacatataaactttaagaatttctgggacaataatttggctttgcgtgtattttctgattatatttccctctaaataaaagctatcccgattttgataaagagctttaatctcatctccgattgttagttcagcccaattttcctattttcaccattacttttttcaagaatcaggtccgttttcgtttcttttttaattttgctctatcaaggtttcattacctctagggcttgtaagtacgggacttgttattttaactgtaaacaacacaatcccatgtgattggcacgcgtaacagtgcaacagcgactttatttgcatgaccatgctaataaatcatttttggctcaaattcccgaagctatagccatcgctttaatttgggattattagctctgccccgtataaagcgttcgaaaattgtgaattgcgtttacaattgcaggcagctggccatgtgtaggtggtaatttactctctgtggccgaaagagttcgcgaccaaaaagctactgcatgcatttcgattccatcatttgaattttttcatttcccgccacttttgaccgtttgctgacctgttcgctttatttcttttcaatttccctcacaacgagctcattcctcctcaatttcatttttcataacgtttcgaagacgatccgccattcgctccaaatcttttttcagctcgccgtcatgggtacgcgactttttctagccctccttcaaccctttttccattttctccaaatcgtttaaagggagcttttctgcaccaattttattttctgggttcatttcaaagaaaaagggtgtaaaaagtaaaaattcaccgccacaaaaaaattaaactcaaaaattcacggtcacgattcatggggtcaattcggtcaccgtcatgatgcatgtggttcacgggttttttcagtcacggcacacctctaccaaatgggcgtttctcgttacagtattagcctccaacttacttcacactttgtctctccttaaggctgtaaaataacgcctggtgtccaatagctcaaacattatgcgtataagaaaaagttgttctttgtattaaaaattttaatatcattttaattaaacacaactttcaaaaaccaagccgttcgaattcctgtccaaaaacttaagggctgggcttgtaaatttcccaaaattatatttaaactttaaaaactcattgtgattatacaattgtatgatttcctccttcatattattgggtggaagcatttgtcaaaaaaagattttttgagatttcaggcgaacttgttttcttcatattttggtgtgctgttccataatttggactattttttggcaacaaatcgattatgaaaatgcaaaacagtctttgatattttgaccaaaagtcgaatgaaaaacgaatgactgccttttttgggccctgagggg

SEQ ID NO: 19308 - DNA, 1507 bp, Heterodera glycines
cgaaaaatgaaattggaggtcaccagtggcaaccgctccccccgcccgaaaaaggaatagagagagagagagagagaagagagagggagaaagagagagagcaacggaaataaaaaggcagagaaagaaagacgactcagagaaaatggaaattggagaggacgtgacgagaaatcaaatgcgaccagcggacctttgtcggttcgcctggatgcgtttgttgagcataggccaaaaactggtggtaagtttgtttgttaagtgcctcttggatttgtcgtctgaaaaggaaagaaaaaagtgagcattatcgaacaaaaaaaagacttttgctgttcaaattgttcaagaacttcttgcgctcggatggacgcactgtccactaagacattgaggtgacaatcgtttttggactgtccattgctgaaaagggaaagaattaaaaagtgggggtggggggggtgggcgggagaaagtggaattgatcaggaaaatcaacgaacactgaggaaaaactatcattaacgaaagatgaaagaaagaacaacgaaaggctgccaattaggggaatcgatggaaaagggggagagaatgtgccgccgacacattttggaggggaaggaatacggtaagaccacagcagacaaatgcaaatgaactttgacggaagaatgaaaggaaagcaaaagacagtgacagagtaaacattaattggaaagccgttaattatcaatgggattgaacatcggaatttatcccagaggaaactcacgaatcctttgatggattgtcaatggtggctttttgattcggctcatttgtcttcgctttgcgttcgatttctaattgtgcgcgaaatgatggacagacgacgtctaaaagtcggacgaactcgagcattgcctgttcagaagttaggtcgctgattcttttccatgttttccttaaagagacgaaagaatggcactttttcgagggagtgacgaattagacaatttatgacaatggcaatttcaaatgtaaaggcttagggaccatgtacaaggatagaataagacaaacagcgaaagagtgcacaaatccccggggcattgccaaagggcggcggggggggggggggaattttccgtttttggggaaagacggatgccgaagcgttggcagaaaagtctcacccaattcaattgaggaagtgaagctcctcctcaagaaacgagcttctcccccgcccatgaaatgttttattcgattattcaatttgcgcctttcaaaacatttgatgagataaatttaaggcggggggggggaatttactgcatcatttaggctaatgataaaaaaacatttcccacacgatttttaacatttcgcgccagagtctctcgcgaagataggaggtgcaccatttgttggtttttagcccaaattcgggtccccaaatgagaaagcacaaaataaatttaaagcattttttttattcgatttacttcgcctcgttgcccataat

SEQ ID NO: 19309 - DNA, 465 bp, Heterodera glycines
tggaagtgcgattcaaagaagacgcccgacggaataggttcagaaaaaaaaaaagttgaaaaaatttgactcaaaagggggacccaaacttaatgaggtcccggtttttcgggttttgtaccggtttaacatggaattcggtgttagttacaagctgtgtatttttagaccagctaattctgaatcaaatgcaaaaaaccacattcgaatccatcaaatctttaaagttttttgagatttggcttttctatttttttagttaagaaccatgcatatcgaacagccaactttaacttacttttgtaaaaagtaacggcgattttatacgcctgctgagcagttactccaaaatcggaaagcaaattggcactaatttctgtttgttctctcggcgattcatattcaatgacgtccatatttaaaataaataaaattccacaaagtgactgacctttaattataaat

SEQ ID NO: 19310 - DNA, 1928 bp, Heterodera glycines
  unsure (1)..(1928): unsure at all n locations
ggagcgtgtgcaccgtttgttcactcaaattggcaacctaaacccttatattttcggcaatgtcncacggcagttttttggatgtaatgttttctcgggcaaattttaataaatccaccgcaacgcttcaattccaatttatatccatccatccaagaaatcaatgaaaaaacagacattttttggcaaaataatctgtcaacagatcgattcagaaaatgccatacttaacaatttttaatgccgttttttgtcctattattaagcaaaaattcaccaaacatttttcatttccaattcaccacaaattcattcataagatgggagcgcatttctgatgacgagctgcagaagaagttgcgggatgccaagcagaagctgcaacgtcaggagctggacaagcaggagctgaagcgcagggcggacaaacacccgttgcgcaggaaggacccgttgattgaacgcctgcgggtcgctgcgccgcatggaaaaatcaaaatggtatattatacgacatgtgtggactgtgaacctactggtagaacccggacaggaatgcgattccctcagggtttccctggatctcgatcccgaagtttttgaaaaagtctgttaggcatttttgaaaaaatgtaatgtcgggaccaggatcccggccaaatcgggatttgaaaagcctgtggtcctgtctgtctcgacttatttcccaatttcgatatttcttgctaaaattcctctattttaaggagtacattcgaacgatttgcccaaaatgtgcctactttaatcacacacgcatggaatgctcacgggctgatgtaataattatattattgtgccatcgataattttttttttttacagatcggccgtattttgcacaaacaaatttgcaaccaaatggaggagttcaagaaagtgttttttgtccatctccttgaagaccggatggttgacttgacacaggtgttttttttttgagttgttttacctaattcataagtactttggactacttttggcagaaatttgacactttccgtgtcatggacggcattgaactgaacggcacaattgacccggttggactccaattgcaagcgatgtgtccgggtgggtgctgtgcccgatttttcattgggacggacggacccagcaaaaaaaatatcatttaaaaaagacaaatgaatttaccacttaaattgtcccagatggcattgttacgcagatggacttgcgcgagctgtgctctaattgtgccatgttgggccacaagcggacagaatgcaaggagaaagcggagtgcagccgtacacattatgacaaaatgctggaactcgtcaaggtgggcgagagagagagggggaggggggcctaagcggccaactccgtcccagccaaattttaagggtccggttttgcataaaaaaagcatttattcatcgtgcgctttcaatgcataaaaatagtgtccaatttggtcggcaaaaaccttcaaaaaagtttttttaattaaaaaaaaatattagtgtcgtggagcgggttcgaacctccaccaagttgtcatggaatatggccaattttaacagggttatcgcgcgctggtcaaggaaggcaatggcaattttatactgccaactgcaaaaatgatgaacccacccgtgctggtgttgaaggacattgaacgcagtgagccgattgaagagatcaaaggtactcacacgagcgcttatcgacatggtgatggggcattcgaccccccacaattttctgcgccaatccaccatcattcaatcactgggactcaacccaccaatattccaatcaacaggactcaaccctccagcaatcaatcactgggactcaacccaccaacattccaatcaacaggactcaaccctccagcattcaatcactggaagtcaacc

SEQ ID NO: 19311 - DNA, 2386 bp, Heterodera glycines
  unsure (1)..(2386): unsure at all n locations
acaaatctntggtacacataaaaatggcaaaatcaaaatgttaaattaaacagttaaaaagtgttcaaaaatgtcaatgatgaaggaatgagttgttgttgttgttcatcagttttgcgcttcagaattgagaatttgtgcggtccattgttcaaacacagcaatgtgtggagccaatgaagtttgacgatagactaaaacataaaagaaatagacaatttgtaagaaaaaaaaaaatttttttttttttcgaaaatttatgttgaattataatactattgtaagtttttgtcaaaaaattttccaaaaaaacacctgaaaagttttaaaaggggaaaacgggagggaaaaatgaatccataaacccacaaatcgacgaggacttttttgcttcaaaaattttgacactcatataatgaaatgtaaattttaattttgtctaattcttgagaccgcccctagcctgggctcgatgaaccttaaaaaaaccagcccaggctgccctagcccggtaaaatttaaaaaaaaactcgggcccgagcgattaaacggccttttttgaaccaggcggcccgggatcggccaaattggctaattagaagctcgaactctggcccggtaaccccaaaatcccggtctctctctaataaaagcaatttttggttatttgccgataattttttaccaattgaacgttgattctccttgttttcttggctggattctcgcaatgaggcaagttgtgccaacaatttatcaattcgtggcaccacattcggatcaaaggcacggatttccttggcactcaacggaacggcaatatttccattttctggatgcacagagaagggcgatttcagcaaatggttgagcctggaattttttttgaaaaaatttttgaagggtctctcatctcgaatgggcattcttttcgtgcaattacgaacccctaaactggatttgaactaaatacaatggataattcaaatttgtaaatttaaatttatgcttattgttagaaaagatttactttcgaattcaaactaaatgtattagaattgcatcaaccgccatcattaaagaaaagatcgaaaatttcaactctttgttcgaattcaggttcgggattcggaatgctccgaagatgcttttaaattttttccattttaatttgtctttaactgactcacccaacagtgacatttgcgtcgagttgcggataagcaaatttcatgaccaatgaaatgaaacagcgtttcgcttcatcggaaggtgtctaaaaaattgcattttttttacatatttacccaaaatttttattgaaaaccggtggcaatttgatccctcgcgcattgattcgtgttgcatcatcaaatcggagtttcattgattcccaacgcaattttggcgtttgaagcctgaaaatggaaaaccaaattaattgttgggccttagtaagaaaacggagcgagccgaaactctcgagattttgctaattgtaagaaattaaagagaattcggaacaaaattgaaaaacaaatccaaaatagatgagacacagtccaaaaattggatttcttgttaaacaatgagcgcaaattcgacataaaaacgaaaattgtgaaccaaaacccaaaatcttggtaggaaattggcggagactcaactaaaatcccaataatttcgaacaaatcccaaacaaaaaatgcacaccttgaaaagcttttgtcgagcagttcagccaaactttggtcagcccaatgggcaaggattgtggagttccattggtcagccgagtccaaccatccctgttccatgatcaattgctcaaaatcgccggattccatgatttttcggtacgattccgtcacaaatgggtgcacccggtatttgttgatctcagagccatctttgttctgacatttgaaataaattaacccaattcgaaataattatggcagtttgtcaaaaatttctaaaaaaaaaaatttttttgtcacaaaacttgaataaacgttttctgtggatttcaaggtcgcttatttgttagtacaaaagcttatatgaaactataaaaaaaacttattcaaaattaatcgtaatggattttcagggattcgtggccagagcaataccctagaaacatgtaacatgacctacaaatgtcaaatatttgacgatcgcctcacgcccgcgactgctcaatgcgcgtgcctttttgtccgccacccaacagtgaatgccacgccgtccggaaaagacccagagcaaatgttgaaagccaaaatgagctaaaatcgaaagtatagaaagccggtaaaaactttgcgtagaaatttaacagtgggggaaaaaaaaaactaaaaaattcctaaaatattctaca

SEQ ID NO: 19312 - DNA, 881 bp, Heterodera glycines
  unsure (1)..(881): unsure at all n locations
attagagttgtacgggaccgggacctggtactgaaaaaaacgtacaactgagtacctaagtcccggttttgaccagttttgagcgggaaaagtcccggttttcccaaccaaaaagccacggttttcaacccgaaaagtcccgttcccgggttttctcaaaattccccggtcccatacaactctataataaacctgtgcgctacgcacgagagttccgggctcaacacgagaaaagtctctgtttttggtctcgtctcggtctcgagtttttttttgggttctggcaagaaaatgagaaaaatacaaaacgaatataggatccaagaaaaaaaattagagggaggggggagggactgttgaaatccccaaatttaatggggttgtgatgccaaaaaaaatacaaaaactcgggaagtccgactttttgggcaattagatggagggaggagaggtttttaaaacttaaatttaatttcaaatttatctacacatatttatttacggggatggagatgcgatgccccaaaaaattacaaaaactcggattcggaattatggcccaaaaaattggttcattaaattttgtcaattcgagggaggcgtgaggggctttttaaatttaatttcaaatttacctacacatatgtatttatataaaaatccgagttaggccatcatattttcgattttttaatattcaatcattatgaacaaatcctatttttcgccattttcattaattttcacatttcttataaataataataaaatgaaaaaaatattttataaattttaaaatttaatttccaatcccattgatcgattctttccttttttttttgtttgttgctttcacgaacttgcgatngtgaacttttacg

SEQ ID NO: 19313 - DNA, 1652 bp, Heterodera glycines
  unsure (1)..(1652): unsure at all n locations
tagggacgctgccccatcttttgggagttttaccactttnccgtcaaatttgaaaaaattcaatgtattctttggggtagtcgatgatcaaccaaacgcgcaattagtgcaattagtgaaggcacatcatcgtagaacattatcaccttagccaaagggcataaaaattttgttttttcagatgggctgaatatttttttaaagaaaattttccaactccaaggaaaattttttcacaaatttatccgatttcagctcatttttcggctttccattacatccaattttctgaaaatctcccattttttttttttgcgtaatcatttcggcttcccactggctttttcaggtaggctgaatattattttgaagaaaatttttccaaccacttagaaaatttttcgtaaatttacacgatttcaattcatttttcgggttctcagatcaaccaacataaaggagagtaatgaggcgttgcaattttaattctttaatcaatttaagtagtggattttgagaattaaattcgttttttttttaatttatttgttttaattaagaaatcattagctgaacctatgaagttaaatattttatcaaccataaataaaatatataagtgctctcaacaaattgcttaattgtttgatctcccgagcaaaaaaaaaaaaaaaatatagaacaatggagatcggccaaagccacttcagcaagcacaaagctaaggcagctgctccaaaagtccatctgagttttaagcaaataaatttatataaataattttaaaattttaatttaattaatatcaattattttttgatttatattgttccattaagtttgttgttattaggaactgaacaaatgttttcgattgatattatcggataaaacgtcgacgatatcaatgccgagaaaattttaaaaaacctttcaaagctagaattttcaataaaatatctttaaaaaggtcgaaaatatcggtagagataaatacctaatcatgccggtctacatatcttatttccaggatagattacttttagaattccaagaatttaaaatttaataaaatttattagtaataatgtcctttattatttcaaggttgtccttattttatccttatttatgggacaaatctttattttacgggctgaacgtattaaacaaattattttttgacctattttgaatagataaataataaattttgaaaattccaataataataagtttattttaacccattcaaattcaattaagaaagttgtttctatttttttttgaatttttaaatttaatattcaatttattttttatttatatacacattattattaaatattatttcaatttttaagcattattaatttttgtatacaaaaatggatcatgcacggacccaatcacttccatcgcaacaacgactttctgttaccggacgaaaaggcagcgatgttcagcgaaagaggagtttggtggagcacgcagaagcagctgggttcgacaaaaacacaatcattttgacagtaaagtgaggaatgaaaaaaatgcttaattagaaatatcatttgtattcaaattaaaaattataaaatgtattanaaaaatgtgtagtttgttttattaattgtttcattatgtatttt

SEQ ID NO: 19314 - DNA, 822 bp, Heterodera glycines
aatttggagaagctgctttttttgcatcggaatttaccaatttataatttttcttattgatttgtgaacatataaaaaaattttaattgacccgaaacacgaatcccgaaacccgacctttttctcgtcccgaaacccgaatcccgacccgatgttttttcggccgacccgacccgaatcccgacccgatatttttctcgtcccggaacaaacctggtatggaataaacgattttaactaattaataatataattattttaatctattaattagatttgttgaccatatttataatttcgatttattattttattttcccatacaaattacatttttatgagagaaatacagtgtcccaaaaaagtcttgactcaaacctgaaaaactatcgtatagttcatttaaaaacttgaaataattcatgcttgcataacttttggtgctgatcaaaaaagtctcttacaccaacttgatcagatcactccttcctagtgaccgggacacccaaaatacactaaaaattggggaaattttcgaaatccctaaggggctgggaaattttttctagagaaaatgaagccactggaaagatcacaaatttgttacagaattgcttttggaatggtggatctgcgatttgtatatagaaagttatacttggttgaataatgatcaccataaaaatgatcaatttatctacgccataacttttttctagaagcatccaaattaagcattcttggtatcatttgatacacgggaccgggaatttttgccaaaaccgggaccgggtcttgccgggatctgagaagccgggatcg

SEQ ID NO: 19315 - DNA, 1847 bp, Heterodera glycines
  unsure (1)..(1847): unsure at all n locations
agatatttntaagtcccacaaaaaaaaaaatntaattaaattaatacctaatttaatgtgtgcaaaaagtaaccatntaaaaaatattgaaaaaagccaaatatttttttttggtcccattgttcgtttttaatttttccttttcgcatttttattattatctatttgtcatggcagaagtttggacaagaatacatcgcaaggttaggcacacataggtcactttttatttatggtcacaattttgaaattgtgtatgtcctcaaatgttggggatatcctcaaatgtctggtcctcaaatgtcaaactcatcaaatgtctggtcctcaaaagtcgtgtcttgaaaaaatatgcgttgaaaattttaaatgcacttttccatgcctatttgatgatcagggctgcaaaaactatgcacgaaaagtgaccaaaatatgcacataaatatgcaaataaaattgtcaaatatgcaccaaatatgtacaaaaaaacttgaaaattagagatgcaaattaattttaaaaaattttattgctcataaattttatcgcttgtttttgtaattgataatcaaaaaatttcccaaggttttgggaagtgaagctcaactgttgacccactcgcgcatcaattcagatttggacgaaatttttcgttttgctctaatcaaaaaaatttttgttgctaagattttcagttggaatatggcccttacatttttgccagcgacccctaaacactcatcgatttccaaaatccttcccttaaaattttaccaaaaaacttctcttttctcttgaaatctttttcaaaataacatgaaatggggggggggtctcttagtcgatcgtaagggttcgagacagtcgatcgtacgaagtggggggggggtgaagggaggaagaaggagaaaagaaaaatgagggagagaaaaaaagtcagcgaaaaagtcgatcgttaatatgtataaaaacagaaactttataaaattttctcattggcaattcggaaaattgccttatttcttaacaaatttcattaaaaattcaaaatttttacgatcgactaataccgatttgtgaggaaaattgtcgatcgtaagaggagaggggtagaaaaatcgaaaaattttgccggtttttcaaaaaaattccaaatttttacgatcaactaaaatcaatttttttccctttcgtctataattttctttaataggcttaaaagcataaaattgttaattttttggtgaaaattttctagaaatatgcaaaacttaggcattttttggcaaaaatcgtttacaaatcgcattaaaaatggaaaaatttttcccggcggctcctatcggcaccgctggacccccttttcccaaagtttttttgaaaaaagcgccgcaaaaaagtcgttgcccgggtgggaaccccggccccaaacggaattcttgaaaggaataggcgttcaaaatttttttataacactggagaaaacaattttgctttagtttcaattcatgaagagaaaagcctgaagcattatagaattcattctttcagctgttactggaaaattacaacttgtttcaacttcatcaatgcttaaatatgttattcattctcttgaaaatttctctgagataatcccttgtgccaggtagtcttcgggagcggggaagatttgttttccatagttgtcgggacgattggccatgtgcgggaagaatggcttctactcaacgtccaagccgtaggcggggaccagctgaccgagagcacatggcatcaggttgaaggagtcacggaaatgatgataggttcagcttcttctgtgctccaatcttcatctcgta

SEQ ID NO: 19316 - DNA, 1754 bp, Heterodera glycines
ctcttccgctttctgttcctcttccgctttctcttccgctgcctgttcctcttccgctttctcttcctcttccgctttctcttcctctttctcttccgctttctcttcctcttccgctttctgttcctctttcgctttctgttcctcttccatttcctgttcctcttccgctttctcttcctcttccgctttctgttccttttctgtttctcttccgctttctgttcctcttccgcttcctgttcctttccgctttctgttcctcttcctctttctcttccgctttctgttcctcttccgctttctgttcctcttccgctttctcttccacttcctgttcctcttccactttctgttcctcttccactttctcttccacttcctgttccttttccactttctcttaaactttctattccttttccactttctcttaaactttctattccttttccactttctcttaaactttctattccttttccactttctcttccacttcctgttccttttccactttctcttaaacttcctgttccttttccactttctcttaaactttctattccttttccactttctcttaaactttctattccttttccactttctcttaaactttctattccttttccactttctcttccacttcctgttccttttccactttctcttaaactttctattccttttccactttctcttaaactttctattctttttccactttctcttaaactttctattccttttccactttctcttccacttcctgttccttttccactttctgtctcttccactttctcttccactttctgtctcttccactttctcttccactttctgtctcttccattttctcttccactttctgttcctcttccactttctcttccactttctgtctcttccattttctcttccactttctgttcctcttccactttctgtctcttcattttctcttccactttctgttccttttccactttctcttccactttctgtctcttccattttctcttccactttctgttcctcttccactttctcttccactttctgtctcttccattttctcttccactttctgttgctcttccacgttctctaccactgtctcttccactttctctttctcatccactttctgttcctcttccactttctcttccactttctgttcctcttccactttctgttcctcttcctctgttcctcttcctctttctcttccacttcctgttcctcttccactttctcttccacttcctgttcctcttccactttctcttaaactttctattccttttccactttctcttaaactttctattccttttccactttctcttaaactttctattccttttccactttctcttccacttcctgttccttttccactttctcttaaactttctattccttttccactttctcttaaactttctattccttttccactttctcttaaactttctattccttttccactttctcttccacttcctgttccttttccactttctcttaaactttctattccttttccactttctcttaaactttctattccttttccactttctcttccacttcctgttccttttccactttctcttaaactttctattccttttccactttctcttccactttctattcctgttccgctttctcttccacttcctgttcctgttccactttcgcttagactttctattccttttccactttctcttccactt

SEQ ID NO: 19317 - DNA, 876 bp, Heterodera glycines
  unsure (1)..(876): unsure at all n locations
tgaaaagggtgtggataagtttattttntgggattattttcctatggaggnacttnaagnagaganagagaaantgaagcttattatggaaaanattgtgntgnaggngaaagttganaaaatggaagaggaaaaggganagtangaaaaggaattaatgggtaattanagtaagggaatantgtattttanagaataaagtaattttgagattntgnngannannaaatnaaaaatangnaaaatggtnagnagatggaattgataaagganaagnaaatggtaatgaangggagggaaaagnaaaaaatnagttaaataaaantgaaattggaaaatggatatngtatggatnagagnnaangaaaaatgaagaaaattgggnanntaaaatntttaaaangataaaatccggacaaattaggaattcatcattcaaagcttttaatgagttaagtttaaaaatctgaggatgaagtcgaaccgacgccatctgtgagagattgaaccagtcgaaaatccaaagaaattaaattatttttgaaaatttcaggggagggggttaaaacccaaaagtacctcactactcttttttgtcattttgagcgcctaagaactctataaaagtgctttcggatatttttggctctgtgccattgatacacatttagcttgaaattttggtttatgaaaaagcctcttttctttcgtgaaatttaaataatttaagaaattttcgagtgcacaacgccaatcgaatcgttgggattcgaatgcttgtcacaatgacattaaaatcagtgatgacaaaattttgacggtccttcaaaaggaggatatgggtaatttttattaataaaaaaaaaataaaattat

SEQ ID NO: 19318 - DNA, 1782 bp, Heterodera glycines
  unsure (1)..(1782): unsure at all n locations
gatagttttgaaattttgcaatataatagaggacacttagggctatcgaatgatactaagattgttggatntggtttgcagaaaaaaaattagggccaaaaactcgtcctggtcagatataatttgtgttagacactaatcttntcatattcaaagaaattggtgacaaagacaaaatatgagcgccgctctctgctgctgctgctgtctttaaaagccgtgttattgcttatttgttagcttggatgagatcatttttattttgtttcatccttttgttttgtcatccccaaagttatttctttctttgaataaatcaattacactttaattttaattgatacctttttaatgtttgtttaacgggccacatgcccggaggggatgatttacttgaaatatggagactttttgggtttgacacaaaaaaaactatgcctatatgtaaagttaaaacattttgctttttcttgatacaaaaatgttgtgggtttggccaaaacgaaaagttatggccaaacaaaccgagggtattggacgcataaaatgaaggagggcctaattttttaattctttgaacagcaagaaagcacttttaatacctttttttgtttaggttatattttccaattttgttcaaatttcaattttaagcccgaaaatgttcttttacaaagtaaggggggggggggcagggggagtaattttcaaaaaaaaatcgaaaatttaagaaaaagacaacccagtcgaagacgaattctgaccagcagaagatgtgggaacagaagtttaaggaaggacaagcaaagctcactgaggtgggatcattttaggagcaattaataaccaattaattttcttttagactatttttgtcaaattctgtgaataagaaaactcgtgaccgttaaaatttaaaataatttttgaataatttttttcaaaaatttttattagaatttttttatcgatttttaaagattttgagccaaaaatggatagttgtcagtttttgaggaattttctaattaagaagaatggttcaggaggtgctagcataattggaaattttaatgaatttttttaattgccaaggaaaattttccatttctttccctccttcttttcatatacatactcaaagaatattgaacatttattttattaaaggccgaagcccagaatcaaaagttgaaaaatgacattgagaaaatgcaggcaaaattcgacgggaaagtagcgcaattggaaaagaatttggaggaattgcagaaaaatgtaatgatttgatttttcatttatttatttttaggtcatattagggtggggcggtaatagggatcggaaaccgattggggaatccatttctgttcaagtctaaatcagaattgaatttaaaaaagttgaaaaagaatcgggaaaaaagtatcaaagatattttctatatgtttattttttgaatttgaaaaattgaaggcacttttgaaaatttatttttttcagcaaaaggaactggtgacggaacataatgaattgaaggcaaaagttgacaaaatagaacagcaggaacaacagaagcagcagcaagaagacagcagtaagacacagacaaacgatggtaaggaaagacaaaaaatgtttctaccattttttgagttatacggtagcacttggtcagacaagcaatggatttttagatatttaactatttttcctacagttttgttttgatgagaatgcatgaaaaccagacccgaaaattcatctaatttgtaaaacagt

SEQ ID NO: 19319 - DNA, 1148 bp, Heterodera glycines
tcctttttaaactggccaaaaagtttaggcttattttttttttcagaaactgatcagaagcgcaccaaactttgcagggatactgaaaggaagagaaataacctattttaaatattatctagtcagttcatttaaataatttttatccaaaaaatttttttttgggttttcggggcagtccccctgaaccgatgcgcccagatttatggggagaccgaatccttccggaatagcttccctatagcctgtactttaattctgcgttggatttttgctccccataattgtttgagtaccccaaacggacacttgaaaaaatcgatttttttgttttcggggcagtccccccgaaccgatgcgcccagatttatggggagaccgaatccttcgggaatagcttccctatagcctgtactttaattctgcgttggatttttgctccccataattgtttgagtaccccaaacggacacttgaaaaaatcgatttttttgttttcggggcagtccccccgaaccgatgcgcccagatttatggggagaccgaatccttcgggaatagcttccctatagcctgtactttaattctgcgttggatttttgctccccataattgtttgagtaccccaaacggacacttgaaaaaatcgatttttttgttttcggggcagtccccccgaaccgatgcgcccagatttatggggagaccgaatccttcgggagtagcttccctatagcctgtactttaattctgcgttggatttttgctccccataattgtttgagtaccccaaacggacacttgaaaaaatcgatttttttgtttcataaatatttttttcagaaagtgctctaaagcgcaccaaattttatttacaacttaattttagcactctgatgctttagtatcaaaaaggaagatggagaaaaaattttttaaaaaatttttccttatattttggttatatcgttttgcttttggtggggtgcttggaacagtggaatcatgcgcacccgtccgatctggcaagttaagcaacgattgctgactagccaaaaggttcggtgccgtgatgaaacgaaccagcactgcttaccccgcggcacccagcacggtcccccgaaggaatggatttaattaaattctct

SEQ ID NO: 19320 - DNA, 2222 bp, Heterodera glycines
  unsure (1)..(2222): unsure at all n locations
aaatctactattttttttattcactatgaaaatcgtgcatttgaatcgattttgagcaataaatgtgaattttgttgaaaattgagtttttgactttttgttcgaattcgggttcgaaatggatgtcggattcgtgatcagcgaccccgaaaacctatattttgactttttttacttagaaattaaaaaaaaaattatgggggacaaactgaataagagcccaatttttttgaaagtgatgaccatcagcagcacatttgggatgttttggcccgcgaaatttggccaatttttgcgaccaacattcgccatatagtattcaaagaaggcaatcatttggacaatttgcgcagtcgcacttcaccgacaattctcactgatctcattcaattgaattcaatctgttcctatggtctgttccccgatgtgatcgctgatgatgatgggccaaatgcaaattatgctgagccggcgttggccaaattgttgcacaatctgagaacggatgatggacgaaatcgccaaattctgtacaaatggctgcacactccgacaaaaaaatggccaaccgaagcganntggtttgctatggttctntgggctatgatccgttgggtccaccaatcctcgaatgggtcaacaatttcaaagaggtggtccgctatattttcttaattgtgtatgttttactaattttgtttaggcatttctccgtgccaccacttctgtcagttacaaaattcgatttaatttatttttggaaccaatgccaattgaaccatttgaattggtgaatgaacggaccaatgagaagctgacactgacggaggatgaagattacgatggtgaattcattggcggtggtgaagtcattaaagattggctgttgaaacggtgtccaattgttggggagacggcggcggttcagcagaagaagaaagacgaaaatttggaccatttgtgcggactctacttcaatcttcatggaaattgtattgggtgagcggaaaggaggcttatttttgaatagagcccggaggggatgatacagtagtgtcctctctcttacagtactttcccagaatcttggcagggccaggggttcctattaaacaggccttgtccctcctgttctcgtccatctcgaaaaccctggtcctcttgtccgaatttttttcaaaattccgtgctctacttttagctgttctcatccatttcaaattttgcttaatttaggccgctgtctccgccagatcaaagcgatgaaaaagtgttctcttttcccggacccagtgatcagcggaagaagaaaaagtgatcattttgggaaatgaccgatcatttttgagttgtgatgtattggattgattgatcatattttgtttggcacatttaatgctgatttgtgagttattaaaaatgggatttgagtttggtaacaacaacaacaacaaaaaaaattgatcaaattgaacaattctctggactccgatttcacatatccatttcaatggcataaattaaccattgaacaatccgcgcaacgccattccccattacttaatgtacgcataaattaacaaattattgccattatttttggccagcagacctttttaatctcttccatccgtttaacatcgctcaatttttatgtttttaccaaaaaaacggacgaaaggctaattgatccatttgagggtacttatgtactttacagaccataaaaaataatcttttaaaaatcataaaaaaaatttctaaggggttttcatccccataagaactggttgcatgacctccattgcgactgccccgaaaacaaaaaaatcgattttttcaagagtccgtttggggcactcacacaattatggggagtaaaaatctattattttttatttttctattctccttttttaaggattcggtctccccataaatctgggcgcatcggcctcggggggactgccccgaaaacaaaaaaatcgattttttcaagcgaccgtgttggcgtactaaaacaattatggggagcaaaaatccaacgcagaattaaagtacaggctatagggaagctattcccgaaggaatcgggctccccataaatctgggcgcatcagttcggggggactgccccgaaaaccaaaaaatcgaatttttcaagcgtccgtttggggcactcaaacaattatgcggagcaaaaatccaacgcccaaattaaa

SEQ ID NO: 19321 - DNA, 904 bp, Heterodera glycines
cacatcgtttatgtcgacaattagacggctctcttcctcacacatagctcttcaatcttctctatgtaaaccttttcctctgcctgtttgattttgaattttactttatttttaggttttactttacactgtcatccaggaaattcaaatattcctgtgttatctcgcgcatccgattctcatccgctttgtcggtcattcccaatgttcgtaaacgattctccattcttttctttgttaaaaatattttccgagttaaaataaagtaacagaaaagttgcttttcttaaaatgacagtataatgtaatgaaaatggcattagtttgaacagataggtaaaacttctttaaaaagagaacggaatgggaccattgaattcgcaaaaaaaaaagaaaagaaggaaggaaatataaattgaaaatttaaataacgctaaaaaaatttttatgaaacgaattttattttaatttgtattgaaaaaaaagaatttttcgtggttttttctttagtaagtttctgacagtgacagttatgttttggttttttagttttcaaacaaattcttttcacttgcatttacggttttttgaccattgaatccttttttcacgttgttttattttattttgataatcggtcttttacattttttctttttttcattccttttcaagaacttaatttgaggattacattgaaaataattaattagacttcaaaatgggtatttcccaagacagatggcacaagcggcgaaagactggggggaagcgaaaccccattcacaaaaaacgaaagttcgaaatgggacggccggcagcaaatactaaggttttctgaattaaacatgtgttgttttattttcgttatttatcaaataatatttcattagattggtcctaa

SEQ ID NO: 19322 - DNA, 1502 bp, Heterodera glycines
cccccccccccctccctttgcctttgtttgcttttccccctccctttccgcttaatcccaactcgaatttcccctcgggcgtgttcattaaaccaccgacaaatggggagaaaatgataaggccgagggcaatggctggtgaaagcgaaggagggaatgaatgcgagcggtgcttttgccggtcgctccttttcagcgaatcattcgccgggggaaacgccgccgccccccgcccaatccttcgccccccgcgcgtccgacactttatggagaaagcgttttacatgcaaagcaaacgtgcggcatttgtgggccaaagtttgccagaatgacgcattggccaggaaagggcatggacaaatggcaaattgggggggggggggggaaacgggggaccattcgcttggaattccgttcctctgaaatcaaaaaggacaaaattggccgagggagaagcaccaaaaggcattcgttcacttttctttttttgatggcattcattgattatttcacttcttccagacagattaaaatttctgtcgttggcactttcttcgccttccatttgttaattccgtcttctttttcccctcttaaaaacggaaaatgacggccaatgagtcctttgccttggatatggcaaaagttgaattggtgcccatcagtccggtcattttgcgcgtttccttcatcatgtcactggcaatcctcggcaatgtgctgcttgtgtttgtcatccgtcgtggcaatgccgtggcacgacagcgtttgtcgccggtccaggcacggaaacggaaatccaattggctatttgcaatttgatggcactttcccctccctcgccttcagcttctcctcctccacacttgcactgctgacttgctcttcgctttggtcatttgccaatgcctttcctcgctttaccttcctttttgcttagctttctctcggcactcaaattgccattctcgccacttatccctattttcatggacctgatttggttggtatgcccaaacttagcccgtacgaccctttttaagttgtgccgttttgtgcgctaccttcaggcgttgccaatgtacgcgagtccgtgtgagtggggggggggggcaatgttcgcaatgtctttctcgctttatccgttaagttcttctggtggccataagcattgaccgttaccaagtgagtttagctcggttttcttccaaaattggcactttttggcgatctgtcggcccctcgcccattaccgtagtgaccgttaccgtcgtcccaattgccttgggattttcgcttggcttttggcccttctctgctccgtccctcaattgttcttctggcgcaaggattccctgagcaatttgtccctttttggagaggaccaaaagtgaaaccaaaacaacgaatttaccctttttatggtaattttttgatttagcgaaactccgatcagagaggagtgccacaccatctacagcatttacagtcagtgccatttc

SEQ ID NO: 19323 - DNA, 593 bp, Heterodera glycines
gtcattcatgggacgcataaacttgcacctaacttttgcttacttgttgatgtaaagattcatcaagttttgaaagccttccgcgatcgtcggaatgtcagagatcgtttggtcctttaaataattttcaactctttgcgaggtcattttgctgaagcttgaaaaaacaaaaaattgtgaattgtcaaagaataagaattttatgcgctactgtaaaagtgacagatttgaaaaattttttcacttttttttcatgcaattttattttttataaatgattttttttttaaagtgaacaaattttcaaaatctgtcacttttacagtagcgccgaattttaaatctacactagagaccggcgcgggacgggatcccgcgcgggattttgcgggatcccagtccgcaatcccgcattttttggaaaatgctggatttgcgggatcgggaccccgtcccgcaaagaattttgagttccaatccctcagcgggatccgcaaatttgactttttgtgcgggattctgcgggatttcattgattttttgaaaactttaaagaacagaatgtcaaaatttttgaataaatttataataaa

SEQ ID NO: 19324 - DNA, 1131 bp, Heterodera glycines
  unsure (1)..(1131): unsure at all n locations
tcgtcgtttgatcgctcacacctttaaagaagcgaaggaatggccctttctttctttccgtgcgcgggtaattaaataaaataaataaataaataaccaaacaaaactaaatatttatcggaggaaggaaaatgctttttcttgaatcaccccccccccccccccgatcgatggatgactcaccaaatcggtgcgtcctttcactttgcccaatgggtacgagtccatcacattctccaccagtttttggtcgcttgcctgctcatatcggctccgtgcttcgaattgtgtcttcagtaccaacttaaagggtgcatttaccagcagaaatgagttaaagccacaaaattaaatgatggcttttaaatgcctggaggcggcagtctttcagcgttttccgtgtcccatttctcacgtgaagatgggctctgatcaccttaacgaagccgaagtttacccttatactcggaaatcgatctaattatttgttatcgagacttttcccgaaaagcggggtttgtcccaaacatagaaaatagaccaggaccaaagaccacgattcctcgagactgaaccaggtcacgcttgagaccagtccgagcccaactccgagacttttcccgttaccacaaatggcaggaattccctggcttaacctctcccaaacaaaagccggtgcggggcaagctgatctgaaggcagactgtgccgaacggaagcgtacagacggtgaagtcaatttcgtcttggtagtcaaagtgcttgatggcatgtgggatgtcgtcaaagtaggacttggccaacaccaaaaaggggaacacttcgacggccgaacactgcgggggaaagcgaacactgacaaatgagcaataaaatggaaaagaaatgagcagcgatcaatttgccaataataaaattatggccctattcacatgctccgcgttgccgacaagctgcactttgatgctgtatcggatggagccgaattggctttcaaaactgctcggcactgagtcccgggatggtcacgcggaggccaaatttgtgccggcccggcgacaattcccatgggctggtggacagagcgngaccaccatgcgcagataagccctgtgnggcggcattcacagt

SEQ ID NO: 19325 - DNA, 2693 bp, Heterodera glycines
ccattcattttctgtttttcaccttgctcattttacgatcccacccgggttccttctctcttaagatttaacaaaaattaatcccaacaattctcctatccccttagcctgcgggcaagaaacagaaaatatggccggaaatggaaatgaattaatgagaacggaggatgacgaaaattctgatgattttttgaatttgtttgaaaatttggaactgacgacttctgaaaaattggctagtctaagggaaattgagaaaatatttgcggacaccgcaccaccgccagctggtcaaacgccaattgaaaactcagttcttgggtttgtgttcatctcacaccccatattgtgggcactggtacaaccggacattttgggcgaacaaaatgagctattggaccggaaaagtttaagcttaaaatcggatcaattagtcttccaaagtacatcaagttatgtgacgactattacactggaccctaacaataactggccacatttcacacaaatttcgttgaattggaacaaacaatctctattaggaactcgggtcaaaacaattgatttgaagcaaatgacttctcctccaaaactgggacaatcagtgaatcaaattgtcccttcgagctgctgtggaataattagggaagtgatccaaaataaaatcacctcagacattatggccattgatgtctttttgtatggggaagaaactaatcagcgttttttcccccaccaaatcgattcaagcgtcaacctgacggagttagaagaaggcacacgggttcaaactacgggattttgggccaaaacttctgcaatggaatggccaacttcgagtgatggaattcgcgattggtggactgagcagatctatatagggacgaacttaaaaatatttggcgctgatgaacatgaagacattcatcaatggctccaaaatgaacaatttcgactatcataccgttacctatgtgccgccatggacttgcaacaatcaccaaaacgcagatgaattgatttaacaaaaaaaaactccatttcttcccttttcggttcgaattggcattctttggtccaattgtttcctttttcggtttttaagcaattttctttttgttgccattcatttcccatgggattttggtggaaggcgccgttctttttgcacatccaattccatttttttccccttcaaggccaaagaattcatttttttctcttgcaccattttccctgattttttctccctttgcacaaattatcaatgtgccggtgtttgctaatgtcccattttgcaccgccccttatttctggcaatcatagtctccagagaccaaaattcattccgaataattcctgaaatatttttgcctttctttcaaccaaacgcaaaattcatattaaatgccaaagaccaaaaatctttctctttttattttttcccatgcctacgggccggacaaaagaattgcttgcaagaaattgctaatgacctttctgctattgagtttgaacgttcaaatcgtagagtcccctcaagaaaatcaaattaaaggaatttcagtggacaaagcgatttgtgaccatttttgtgcccatccatgccagctgactaatttagtatttccaaccgaagaaagaaatacaactttgggatggacttgtatacacctaaagccaaaaattgtccctcaaagttggtcctcatttttttcgaaacatgcttggacaattggcggcataatttttactcttgccggcatttccttttgtgtaattcgcgcatatttgtggtcaattgaacccgattcaattgaaattaatgtttgaattttcgtttccttaaatttgcaatttccccgcttttgactgcgtctttaattaattccatatgtccaaagttttgcatttgtcctgccatttttttttgcttcgtgccaaacatgacagccgactgaaagcaattcatctcccgttccctcccccattttttgctcttccccgtcgcgacattagctttttgcggcgatgactctcccctgccgctcaagaagaaaaggtttttgcctttttcttcccattagctcgccgctgttgtaacatttgaaaaaataaattgcattttgctgtaacgcccatcgtccactcggacccgtcgttatttaaggccggctcatccttcagaaaagccatttcttgccttcattctcatttttcctccgctccttatttttcatttttccattttccattttcttttttcaatttttatttttatttttcagtttttcatttgtttagatgcaaaaacctattccttcaaatcgccccaattcttctgtctccaaaacccttgcctgcgggcttgaaaaaattgtgaatttgagtggaaatgagccactctcggtgccggtgctggcggatcggagtgatccgctgggactcaagtcggtccaacccgacccggtgccaatggaaagtgccgaggctggcacaaaagaaatggaagtgatggaagtggatgaaatgagcggagaaaaagggaaaaagggagaaatgggtaaagaaaaggtgaaaagtggtggaattgaagaggaggaagaaagtgagggcagtgagggtgaactgctaggagacggtggatttggcaatttgcaactaaaccccagcctgagggcgggaaataaagc

SEQ ID NO: 19326 - DNA, 2464 bp, Heterodera glycines
tcattaattacagaccaaacggaatcgatgatatacatacatatcaattaataaaaaaattggagttgttagtattcttcactctttccttggccgctaacgccaccctcttttttttcatgtgcatatgaaaatgttggtaaagccaatttattaatttatgaatgagcaaaaattacatacaacaacactcaaatggtaaagtccgacataataaaggtcaaataatcgcttcaatcaaccaatcaattcatttctgttgtttctgatcagtgatcagtgatcaccactcggcccggcggaagaagcatcgagaagacttacaaaccaaaattaagaaatatgtaaatattttattgagcatctttaaattaattgttcacccgttgtcgattccgccgtagccaatgaaaatgccaattttgttctgtcgagcatcaaattctgcttccatttccttctcccatttttcctcatcacatgcagaaagtggacaacggatgagcaaaaaacaatttccatcttccgcattttcttgtgacagtgtcaatttctccccggtgaatgcgttggtcagtttaaatggcacaacggcggaagaaagcgaagacaacggcggaacgtcgatagaaatgacgaaattaacgggagaagaagcgatgaaaaatgcctaaaaagaaaaggaagggtaatatgtgtggtagtttaccccccccccccccatttttcaaaaaatttttttttgtttccaaaagacatggactccggactcgaattcgaacaaaaatcaaattttgaatttcacatttttgttcaattttttgtttaaatacacagaaacgaagcagaagtcattattgcttcaataaaagatcatttaaattatttttagactaaaaatggaaaaaacgaagatttgagttttgactttttgtttgaatttgggtctggggttcggaattggctgaaacggatgtcggatacagcaacaccgaaaacctttgggattttcaaggcttttgaaaacaaattttttttcgaaaattagagggaggagctccattagaatttaccaccaaaaaacgtattaaactggactactcaccgttttgatttgttccacggatgccaaccattgatccaccgttgtcttctcaattctgagcatcttcggcaaattgtcggcacgaggcgtgaacagccatttggccaccgcttggccatccgtcgcattggcactgtcgtcgggcggaaattcggtggaaatgccgtcgtagaaagtgacaacgcgaaggcatggacaatcgttgagcattgacggcgcaaacatgcgcatttgatgaaaattcattgtgttcaaatgcatcagaatggtggtgttgttgaacatcggccaaatgttgagcacaaagaatgccgaaattcgaacattttcagtggcaatggccaattctgttgcacaagtggccagaaaacggtgaaagcggtggagaaaagtgaacacattttggtcgatgaagctgaaaatcaaacgaaggtatgatgatgacgatggtcattgatcacaaatcattcttactagatcgaaatgcttctgaatgccatcactttattcggcaacggattttgcggggttggcaaagtttttccattggaattgacaattttcatttcaacggcgccattctttccaaatttgagtcgaattttcaatttgcccaatgtccatttgcgcgttttgaagtgttcgtcaacgaagcagtcaaatcggcggctgatcatcgcaattccgaggccaagctgatggcgtggaagcaaatcgaacactttgagccaacagtcggcagagatgaagctgaaacagcaaaatgattagcatggaaaaaaatgaaaaaataggcgaactaaattgacaaaattcaatattaatggttaatggtatttatatacctataaaatctaggacatttttgttaaaaaataaagctaggcagttaaatcagggcgcgtatcgaaaatttttcaaaatcagaacatcaacccaaaaaatcagattctggggtcgaaaatcaggacattttgcaaaattgcttcaaatcagttatttttacaatttttcgatcaaaaatgtatcaaatattatatttttcgtctcccattatcgattttaacaattttggggagaaaattagcaaatcatcaattttagcgcattcggaatcaaaaaatcagatttttaagaattttttgcggcgcatttttccaaaacacttttaggaaatgggcgaggggggagggtccggcggtgccgataggcgccgccggaaaatcttttggaatttcgctctgatttggtaacagattttcaccaaaaaatgccaattttgcaattaaattaaaagtcaagcgaccacttttttgcttgaaaaacgtttgttttgcggcgccttttttcaaaaaattt

SEQ ID NO: 19327 - DNA, 2139 bp, Heterodera glycines
  unsure (1)..(2139): unsure at all n locations
tttaaaaaaaatcaaanntccgtaagggcatattcttcgaccaaaaagtcctcgcaaaaacgcgatgacatggcgaacaaattcaatgcggcgagttagacctaaaaacgtaaacaatatgggataaaaatttgaaacactataaacccgaatcaacggatgggaccgcttcttcagtgtcttcgtcgccgtcgtcggacgctgcgtcgtcaaaatttaatcaaaaaataatcatcttcaaaacgtcactcaattcacaaacacacattgcgatgcttaattgtcatttaataaaatgctgttaaactgaccctcaatgttcagtgtcggctccaattcgcctctccaccgctgttaaactgaccctcaatgttcagtgtcggctccaattcgcctctccaccgtcatttttgatgttgcacgtgtacgccccgctgtccttagcctaaattttaaagtcattttatgtcaacaatggcgtttttgaaccgctttagtcgacattggcggcttaataacaatagaaataaatttaaaaagaagtttggctgaagagaaagacaaattagattaaacaaaagtatccaagacatacgggagcagagttcgcatgtgtgccgtgccgaacaccaatgcatttttcaaagtttgggaaaaaacattatacaaaaggattccaaataaaaaaaaaaatcatttttaagtcgtcaatatttatccaagaaaaaatcattttcaaaaatggtttttcgatagaactttaatcaatttaaacgccttttttttgcctttttcgtgccttttaatgcttttttaaattttttagtgcctattataatgcctttttcgcgattttttgtgcctttttagtcgtgctctaaatataagaaaaatttctttaaattttgtgattattatttataaatttcccagttgagattgtgcagttctcatcctctaaagaacatttcatgtcaatgccaatttggtgaacaatggcccccccaacaaacgaaaatttaaaaactttatagatagatttagtccaaaaatggcactcatacgattttacttgttaagattgtgtttgaactcccatcgaaaaaaacattaattttgaaaaatgagaagaaaaaataatacttggaggggaactgatccaacgcaaaaataaggaacaaaaccaagaacacaacccgctggaccacgcatatattaacaaacttgaacaaaaaagaacctaaaatttataaaaatagaagtttaccaaaggccaacaatcattaggggtgtaaaaaagtctcggtctcgagtctcgaaaatcgagaccgagacttgaaaacccgagactcgagaccgagaccaaaaaaacccgagacttttctcgagaccgagactcgagaccgagactctcgagcatcactagtgtttatccgtacaaactcagttactacttaatgcgatgtttaagacaatttttaaggttttttggtgtagtcagttttcacatatgtaacagcttctgtttttcataaaacctattttttctaaccacctgccctttgtttgaaagtaacatatgaatcagagaaataataaaaattagcaaccatgataaatcaaaatttgaatacaaatagaattaatacatcaacatttttcgaactcgctgatcaccaaaaagataattcaacatccgatccaaaaacaaacagcagaccaaatctcccaaaatacaacaaatcaatgtatcacgcaattcgacggggatgtggacaagctctgaaatgggccatattcaaatatagcaaaaaataaaataaggtttttaataaatctaaccaaatttattgttgagatccggaaaggtatttgaagcaaaggcgaccattgcaccaaaagagcaaatgattgagtagaagaggggcttgttttctagacgtacaaacaatagaaaatcactgtgaatttagatgacaaaaatttcgaatcgttttagaaagcataatttcccttctatcgggactgatccgcgtgagttgtgtgtgttacgaccacaaaaactgaccaactaaactctccatgaaaggtctgccacggtaattgacggcaaaagttgcaatttgcagagaagcggac

SEQ ID NO: 19328 - DNA, 2851 bp, Heterodera glycines
  unsure (1)..(2851): unsure at all n locations
cggcgcctctcggcaccgccggccccccaaaactcaatttttttttttttgcaaaaattgtcccaaaattgcaaaaattgctatttttttaggaaaaatctgttagcaaattgcaaattttcaaaaattttccccatggctcctaacagcaccgccgcccatccccccttctgttccccaaaagtttttttgaaaaagaacgccgcaaaaaaatggtggtcaaattcgatgttgagacgggttcgcaaaaagtatcaaattttattttttagtctcatattatctaaaattataatttcggtacattcgggatcaaaaaaattttgcgtcagaccttaaaatttattaaagtattcaattattgaattatatttctatttttattccactttaatattttaacaaacattgaggataccaaattataatgtagagtatttgtaacagatttgtccaaaaaaagaactataattggttaatttgtgggtttatggctatttaaaaattaaaaaaaaaaattttttaaagttagacaaagtttcttattaattaaatttcaaataaaataatttaaagaaaatatgaaaaatcccctatcctaatggggaattgaacccagtagacaaataatgaaagaccagaagtaaacgggattcccgggttttcccgcgggaatcccgttcccgccgggctctactgataattaactaaataaacaaaacaaataaaagtgaaaatgtaaatgaaaaataatataataatatccaggcagatattcactattgtatttgtgttgtttaattgattaattacaataataataattttgttaaagtatatatttaaatctgtaagattttcttagttaattggctatcttcaaatgcaccttatacgatatgaataatcaaaattattgattttttcgttttaaatatgttttttaattattgataacggaattcggcaatttttaagctgaatttatattaatattctaatattctacttttttattaccatttttttgcattttcaattaatttaatataattaaaaaataataaatttgttggccaattgtaaatctttctgaacaattacttagggtggaacataatttttgatacccaaattttttccaatttttaaaaattttataactccgttatttctgcgcctatttaaatgcttctttttttattttgttcttcatggtgtcctcttttatatcttactatcgtttcactttttatttgattgatagatttttctgccttttttcccgaccatgccaaaattgaaaattggcccactaatttttctcgaattttttatggtcaaaaaccaaagttgatataacaaaatcttagtttttctatacaatttagaccagtagaatccgaatatggaataaatttattattgattcaattttttttgctaaattctgcaataaaagctaattaaatccatgttacagccaatttaattattttacaacataaaattttcatgatttataattgaattatatttaaatttacaaaatgatcataaaatttaagtttaaattttatttagtcttttatcatatttgatttgaatattacaatatataaatttaataaataaattaaaaatttacaaaacttttcaataaatcattccattttcttttcaaattctcataaatatattgcttcaaaattttttaaataataaagcatcgtagtgctgtttcttgtcggatgcactaagtcatatttttatattttccgaggataatctgagtttacacaaaatccaataactcgaattgaagaaaattaagcaatattcaaatagtttaaataaattattaatttccctaataaaagttaaagaaatcatatttaaatacaataatttgttgattaaagcattaaaaattttattaaaagtcttaaatatttgatttatttaaaatatttatctccattattttaatattttattgcctttttgtttcattacataatcagtgcccggatttatttttgctaaaaaagccaaatatacagtagtatttgccaaaaaaaccacaaaatatttgctaaaaatcccaaatggcttattgtttttgcaaaatacgctatgtggttattaggtgttatttttatttttaaaaacttataatcgtttgtattatttgtgagtttatttttcggtagaattattctaaattttaaaaatattttaagaaaaattaaattattatttaattacattataattctgaatattaattaaacgttttgtattcaattacgtttaagatattatatattttgttttattattgtaattaaattttacagctaatggaattatttaatttgaattatactaattaaaaaactttttaaataatattttaataaatttttcttttttttctttttttactcattttttattttcttctcgtttgacaaagagttgaaaaatggacataattataaaattcttcaatattgtattttttaattttgtaatgttaaaaaatgtaatttaaattattcaatactcattaattgataatttcagccaaataaatttactgaattatatatgatgaacatcgaattatttgtagtaagttaaatatttttattatattattaaatttctgcgattataaaataaaatttaacaaatatctctcttgttgattaatggcagttctcttacagcattgacgccttttataaattaatgtccgcttaattaatacaatccatntaaatttatgatggtgaataaaacaatttaattaatattgattantttagtaaatctatttgtattt

SEQ ID NO: 19329 - DNA, 1379 bp, Heterodera glycines
  unsure (1)..(1379): unsure at all n locations
tgattaatagggatgcgatttttaggtaagaaaaatcccagaataggtacttaaataggtaaaaaaaaatctcaaaataggtattaaataggtacaaaaattccaaaataggtaccaaaataggtaaataaaaatttttattaacgattttttagtggaaaaaagcaaacaaagagggaaaattttggttctacatatctctttgtaaacgaaaatttaaatatattaatattttctttgataatattgacattttaaattaaaaattttgtcaatagaaaaaataaataaattttgggataaatttttgagaaatttttccaattcttagggtgcatttttgaaaatttttttggtcgattcttatgggtatattttttgattttattgcatttttgttaagaattttttgaaaatccttaaaataggtaaccaaaatgccgaaataggtacctaggtaataggagaaaaatcccgaaataggtaaaaataggtattataaaagtgggtgtaaatctccaaaccaagctaaaaactcgttttttatgcttatctcaacgttacaagtgcgcaaaaattttaggtatttaactaaatatcgcatccctactgattaatgtaattaaatttaaccgattttttcgatcactgtcatggtcatgatttttggcttttcttatttcttagtgtcacggcggacctaaaaacagaaagaaactaaatatttttcaaaatggttactgtaattgcttggacgtaaaatttaaaaaaaaatcctttagtataagaaaaattttataattctactttaaatttgaaaattattttatttattttaatttttatattttgttcaacagattcgtggcaacaatcatttcaagggaattgaatttagttttttatcggcctcgggcaaaacgaagtatacgaacagaattacggcactcaggcaaatcaatgccacaaatgggttcggctttttggaatcaggagaccggattaatgtaatggtgcaaagcaaggatggcacaatgccaaaatcggcagtgaaagtgtttttcttaagcgaggcattggcgttcaacgaaatcagtgagtgatgaaaaaagtaaaaaatttattaaaaataattatgtaaatacaaaatttattaggttaggtgaaatttaaaaacaatcaaaattagaaaatcaattttcataatttttgctgtatttttggcaccgtttcttacaaggttggcgtggccttcctaaatacatgtgatttttcccgacctgaacctgaaatgctcttaccattttgcacatttttgccagacaaaaattattnaaggtcatttttttgggttggaaaatttaaatcttttttacacc

SEQ ID NO: 19330 - DNA, 1735 bp, Heterodera glycines
ataatgaaagcagaggtgcgcaacgagcaactgaaactcagttattacatcgtaaaattaaaaaaaaaaattaatatttttgaaacgattttactgtatttaaaagaacggtacatggaacggaacaacaaattgtacggctgtgaaattgacggaaatgtacaaattcgaattcatcgtcgtcaatagcacagcgttcaatgtgtccgttaatgaggtgcagaactgtgcctacagtacaccacttccgctatggacaattcaatacatttcggtatgaaatatttttacaatggaacttgagcaatttcctgcaaaattaacgaattttttgggaaatttcaaaatcaagtttttttttcataaataaacattacggtagaaattttttatacggtagaatatattttttacacttgaagctgaacaactttcgctgcaaaattcataattcttgcttaataagattttaatctctaattgtttaaaaaaaatttttttataaaattaaagttttaaatgtaaatttaaacaaatttatagtaatttcaaacaattgataattttttttttgtagataattattcaaaaaaaaaaattttgcaaaaaaaactttttggtaatttaaggtcgattatgctaaatggtcctttcatccgcccattatcacttgtaacccttcaattcgatgctttgagccaacatccaataattccaatatgtttatggcatttcccgagaagaaaggaaacaattgaataattgcgcacaaaaaaacaattataattattttattttactttatttataaaatttttactattttagaaaaataaaatatttatttattatttcttcaaaaagaaagactttttttacattttgtcatacatccaaaaatggttaattttaattcaaaaaaaaaaaaaactgaaaaatcaaataaaatttaggcgggagtggaacaattggtcaatcaaaatatcctttcctgattttatggtcttgattatttaatttttttgtatctttatttatttttatttatttcgttaaattaaataattgaatgaatgtatgaaaagtttctaaatatttctagagaaattcctccctgattttgatgtcttagattatttatttttattagtctttatttttatcatttagattattttttaaataattgaaaaaatgtattaatataatgaatttgaaaatgttcatattattatttccaaagaattattacttttcctatggtatttggccaggattgggcaatgaaaaatcataatttaaagtggacatggcgctgccaaaaatgccgccagagacatttataaatatcattaatttttcaattaaagaaaaatgttgaaataagaatgtcaaaaacttgtcacaaaatttgccaaaggttttttcttaatggcgcatgacttagtgccaacaaaaccatttttgaattcttgaatcttggttttattattatgcaaattttgtgcctttatggattaaacttaaaataatttaagcaaattactaaaaaagtagttagattttccttgaattatgcaaatattttgtttatacttgcttaaaatatatatttttgaataaaaaaaaactttttacatacatttcgtgaaaccttaacagctcagaactcagaaaatttaaaaaaaactttaactgttgaacttagaaataagaaataaaaattcatagttga

SEQ ID NO: 19331 - DNA, 1182 bp, Heterodera glycines
ttcgtcagattgctcaccaacgactcgctgccattttctctaccatggtgtttacgaggtgacactcgtcacgagtccccttgaaaattgcgcgtaaattatggcaacaaaataagaaaatgccaatttatcccctcccctttttttaaggttggcacgatggaacgggcggagaaaattcggacatacaattaccgggacaatcgcataacggaccatcggctcaaagtttgacgggggtacccaccacccactgtttaaaatttctgtgttgttctccgaccttgggtcttggcgttgcattcattacttttcccaattaactaaaaaaatctaaaaaaaaaaatttttttaaattttcttataaaaaaaaacttccgagtggagggaaaacgaaacgagctgctctcgagtgggacccagggtcgttgcgttttcctgctgggcctgggtccctccctaccaaagatttcttgtccaaaaaacgggtcaaaaaccctaatgtttaacttgaaaaacaatttgttttcccctaaaaaggtgacagtgcacggagttggacaattcttggacggtggccaaatgcttgaacaaatggtggacgcactgatcgaaatgtacgaacaagaaagtgtgaagcaaacgggggaacagcagaagaatgagggggaagaatcgggcaaaaaagtttaaaaattttgcgtttaatggtaaaatctagttgttttttttttgccaataaaatgtcatattaaatgcgacattttttcggaatgggggaacgaaccaaaccgggtcaatgatttcgagaaactttttttggtgtcatgacaactgatcattattatttttaatgtcaaaacgagtttttttgcttgaaaaactgacaaaaaaaatttttttatgttcgttcggtgtattgccattatttttttttaattgggtgaaagtgacaacactggacataatacacaacaatataaataagtaaatgagtgacaagaaatgggaaaaaacaaaaaaatttccgaataataagaaattacacagcgcagcaataattaataaataattttgagagtcggctgattgatgggccaccaaacggtcaatttgacgaggacaaagtgccggaaacggcgggggaagagagcgcggcggtcaatgccgcagccaccggca

SEQ ID NO: 19332 - DNA, 1961 bp, Heterodera glycines
  unsure (1)..(1961): unsure at all n locations
aaaaaaaaaatttttttacgagcttggtttcataagtccctgatgtataaatagaaaccgtaaaaatatttatttactcacccctctttcttgtgcaactctgcaaagcagtactcagtcagcgccatgaaaaatccttaacatataacacaaaatggagtctaattttatgtttccaaattcccaaggggaggggggttgccttttgaaattccgataatttctatggaaatacccaaatgtttatggaaaatggcccaattttggggggtactcattgaaaaacaccacgcacggtcaatttcgccgtcagtgaccatccacaggcagccgatcacacatggcgcgcgggcgatcatgtattcgtagacggacgagcgcccgtccaggccgggcccttcgtccacaacacggacagaggagcagcccatcagcacggagacggcacggcactcactttcgcggatcaacgaacggccaaaatagcgaccgccactgccatggcccatgtaactaaacaatggaaggaataatgggtgtacaaaaaataatgttggttgatatacaatccaggaaagggatggaaattctaatttctcagatattttttatcggtaaaattattatttttttttcaatattcaaagtaaaacgagaaaaaaagcaaaggagtgtaatgaagtgtgcgcacccatttatttgaacatgaacttacaggaacaggtcatgttcgttgagcactgctcgcatctgttccctggacggaacctgcagcaaaaaatgaaaaaataattttttttttaactagaaaatcgttcagatatttagaaaattaaaaaaaggctgttgcttaaaaccggggggaaatgcatccatcatttcctccacctgtccaataatgccacgccaatggaaacgcttgatgaacgcggcaaggcgttcctgcgtcttctccaagtcaccgcccgggttcagcacgtagtaggagttgcgcccgtccaccgatgtcggaatctgtgctttttcaattgcagtcaacgcgaataatcaaatgggcaaaaaaaaaaaaaaattgagggaaaactaacattttttgtctgctccatcaaatgttcaaacagatggaagcacgggatacggtagacgaacggtgcgcgacagtaaattggcaaacattcccaaggcaaatggctaagtgactgacaaggggacgaaattcaaacaaataaatccattttaaaaaaccaaccggcggaatcaccaacatggtgtactccttcattgttgatacttttggcgattttccaacaatttttgagcgataatttgtccagaaattgcttatgaactgtaaaaatttggtcggaactgcctgaaaaagtgggaatcaaaattccaataagaaatcgttcaaatttagccatacatcttctccttcgaattaaaaaaaaacctaattctcctagaaaattcagaaaaatttcaaaattttaaagctgaccctcgtcgtgtgctgctcatccggcgaatccaagtcgatttgttgtttgtctattctgtacaacaatttgccaaaccctaaccattcgtccatcgtttcaatgaatggtaaaaggcgtgaaagtgtctaaaatttgggacccaaaatcattttattttttattttttttaccagtgccaatgccttcgccatgccatgttcactggtcagtgtgcgttccaaccgtttcagttccgtggaattggtcgtctccgcgttgacgggaagtggcaggaaaaggggggcaaatgaagagagccaaatgaattggaaatgttcgacaaatttctaaaaatttacacaaaaaatgattaatttcatggaccgaaaatgaccccctaattatagtccanaaaattgttttaccctccattttggcgtcccaactgttttcgccactgacctgcagnngccatgcaag

SEQ ID NO: 19333 - DNA, 2588 bp, Heterodera glycines
cgggcgaggggagggggtccggcggaaaactgatttgttaacagaccaaaaaaggccaatttttccaataaaaggcaagcaatgactttttcaaaggaaagatttgattgtccggcttgttatttgtgattttttgaacgagttctgtccttatttgtgaatttcgtcatttttgtaccagtgttacctatctcaggaattgaaacagaaggaagggcacactctgaatttcagtttatctccaaatttgggcggctaacattcgaattccaaacgaaatgtgtgactggtagacttataggaaggaccacttttgtctaaaactcattttgacctgaatttacaaggagtgagcagaccgagttctacgcgagctaaccctccgaccaaacagacgccaaattttaccaccccgccccccttcctacaaaagcatttgaattgaagcacattcgccccacccagcattttcaaagtataaatgggtactgtaataaaataatttcaataaggttcattatcgccgtcaaaaatgaggaagaacaccaacaaaaccgtctgagaccttacgaaagtccttttgactgggcgccgcaagtgtcggcgccgcaaatgtcagcgccgcaaatgtcgcatcaccaatcagtcgttccacaaaaaagctcagtgattgattggtcattttccggaagcctatcgcaccactttcgggcaccaaaagtgcctgatccggaacccggaccggcccggttaagaacaattttttgttcagtttttcaagggctatctcccaggccgggtccggttcttgatccattcacttggagcccgtcatgggtcggggggcacatctgccggaggaccctcagcctcgcccccgaccctgtcgatggccaacccaagctaagcttgccggtaccagcggcttttttgtacagctcgatgagctctacaaaacggtatcaatggcgtcaggttgtgtttactactaatgtagaaaattggcgagaagtgatgccaaaaattgaaaaatttgaaaatgacttgcgtcccgccgtacattagtattaaccggacggcaccgtgttttgtgaattgaataattaaatttatttatttaattttatcgatcactgagttttttgtggaacgacctagcaccggggaaaaccttttcacttcgtatcacagtgaattaaaaggcttttcctctttttcatttagtgcttttcgattcgcttttcccgacggacgttcgccgccggtgccgcctctgtccgtcattttacgtcagtctttgctcgccaatcattcgaaatttcgccaagagccggaaaaacttcgacatttttacgacaatggcgaaacaaatgcttttatgagaagcacttttcgagatgatcagcattcaaagaaaattgtgatgggtaacggcggaggaggagaaaaggaggaaaaaagagaggacgaaaagcgaaagtaaaagcgaagggcggcgaaatgggaagaaaaacgaagaaaagacgaaattaattagtaaatttaattgttttttttataaattatgaacatccttcttgtgttacacaaaaaatgcttgcattttctaatgttttgtcagactttgacaatttatcaatgttccttttctgattgaaattgacggcgaacacgcccaaaagtaaggaaaaggcagaacattgcgcgcattggcgaagaacctttcaaacaattgggtggcaatttggccattgttaattaatgcaatttgctaattgcctaaccatccggaggatctttggcgtgcgcatttcgttgttttggatgaattgtccgctccgacggtgagaagagcgaagtcgtaaaagagcgtatgacagggcgactgctcctcggaatgatccgacacaaaatgggtgctgacctttgaaaggccgtcctttggatttcaaattgccataattaactcactgccaaaacacgcccgtcctgcaggggaaaccgcgactgccacgggctcggactcttccgactcagccccggtgcccatttgtccacaagtgtctgttggtggggcaagtcccaaatgggtttgcattggaccagcgaatgcgatcggagatcagcagcagtgccattgttcatttgtttgggagggaggagaaatgatgaaaaaaggcttgattgggggagaaagaggggacggacaatgcgacgatgggggctgaccgaaatgcacaactgtagggtgggaaggggaggggaagacggtagcatactgtagcataagccatgccaattcccttttatttactcgactgatttccgggggccattgatttggcccgacgagttgagtggagaagatgaggacaacattgagaaggatgagaagagcggagaagcagagggaaaagccgaagatgacgtaatggaaaagaagggagaaatggcggacgaaagttttggcacatttgtgacggtgggagaaggaattgggactgcacgagtaatggtggagacaggggacacagccgacggacagacagagggaacagagaaacagcgaaaggagcaggcacaaaaga

SEQ ID NO: 19334 - DNA, 1437 bp, Heterodera glycines
tggccccaactaaatttaaaaaacgggcgcgaagcgcccccccaagcccaaaaaaatttaaaaacgggcgtgaagcgcccgtctggccccaactaaattttaaaaacgggcgcgaagcgcccgtctggcccaaacaaatttataaaacgggcgcgaagcgcccgtctggcccaaacaaatttaaaaaacggtcgcgaaccgcccgcccaagcccaacaaaatttgaaaaaagggcgtgaagcgcccgtctggccccaactaaatttaaaaaactggcgcgaagcgcccgttatgagtccgcgaagcggccgaatgttcttaatgaaattaaaaacgggcgcgaagcgcccgttatgaggccgcgaagcggccgaatgtccccaaaaaaattaaaaaacgggcgcgaagcgcccgtcctgaggccgcgaagcggccgaatgtcctccacaaaattatgaatgcgtcaggcgcggagcgccctttgaagccgcgaagcggccgaatgttcttaaaaaacgggcgcgaagcgaccgtcatgaggccgcgaagcggccgaatgtccccaaaaaaattaaaaaacgggcgcgaagcgcccgtcctgaggcttaacagccggccgcgaagcggccgaatgatcccataaaattatgaaatgggcgcgaaccgctcgtcctgaggccgcgaagcggccgaatgatcacataaaattatgaaaatggcgcgaagcgcccgtcctgaggccgcaaagcggccgaatgtcctccacaaaattatgaatgcgtcaggcgcggagcgccctttgaagccgcgaagcggccgaattaaaccttaaatataaaaagggtgcggagcgccctttgaggccgcgaagcggccgaaagtcctccacaaaattatgaatgcgtcctcgcgatacctatataccaaaatcccttatcacatccataaattcatttcaaaaccgcgcatgcactagcaacgaagtcctttgcgcgaagcgctcatgtcagcgcccgtccatacatataaaaagcatactgcctacacaccgagcaatcactgtgcaaagcatactgtctacaccgagcaattactgcgccacccgctagtcttggaaatttgggttaatattggaaaattcataactcggtgatggtttcatcgatttaactataataaagctttaaaaatagagaaaaataaggagaattttacgggatttatttgagttttttatttcaaaaaagaaaaaagttatttcagaatttctggaaattttcgatttttcagaaaaaaattcgtagctgccttctgaaaagctattcgggaaaagtaaaatactataaaaatccgcaatttttttctctataatataaattttattttggcatttttatcacttttttaagaatttttataaaaataaaagtgattttt

SEQ ID NO: 19335 - DNA, 1522 bp, Heterodera glycines
  unsure (1)..(1522): unsure at all n locations
tttttatcgcggttaattagagcaacgaaaattgggttgaatcgtgaagtttatcatttctaactcacttctcaaattgttgataaattgcaaatatatttttccaaaagtatgtggacactttctgaaaataaattctatactcatgtattttccacttattagattttgcaggcttattgctgcatgttctttgacacttcttcaaaataacctatgccctttattcgttcaaaacaccatctttgttgtttcgctttggattgacaagcccaatgataaatagctcgagcgcaaaacgcgtgcatgtttggaaagtatcgttcacaccaataattgagggtttatttttaaatgaaattttatgataaaccttattatctcagaagctatttaattattcggatgtttttatcgcggttaattagagcaccgaaaattggtttgaatcgtgaagtttatcatttctaactcacttctcaaaattgttgataaattgcaaatatattttcccaaaagtctgttgacactttctgaaaataaattctatactcatgtattttccacttattagattttgcaggcttattgctgcatgttctttgacacttcttcaaaataacctatgccctttattcgttcaaaacaccatctttgttgtttcgctttggattgacaagcccgatgataaatagctcgagcgcaaaacgcgtgcatgtttggaaagtatcgttcataccaataattgagggtttatttttaaatgaaattttatgataaaccttattatctcagaagctatttaattgattcgaatgtttttatcgcggttaattagagcaacgaaaattggtttgaatcgtgaagtttatcatttctaactcacttctcaaaattgttgataaattgcaaatatatttttccaaaagtctgttgacactttctgaaaataaattctatactcatgtattttccacttattagattttgcaggcttattgctgcatgttctttgacacttcttcaaaataacctatgccctttattcgttcaaaacaccatctttgttgtttcgctttggattgattagaccaacgaaaatagctcgagtgaacgcgtgaagtttatcaattctaactcacttctcataatttttgatttatttcaaatatatttttccaaaagtctgttgacactttctgaaaataaattctatactcatgtattttccacttattagattttgcaggcttattgctgcatgttctttgacacttcttcaaaataacctatgccctttattcgttcaaaacaccatctttgttgtttcgctttggattaattagagcaacgaaaattggtttgaatcgtgaagattatcatttctaactcacttctcaaaatttttgataaattgncaatatatttttccaaaagtctgttgacactttctgaaaataattctatactcatgtattttccacttattagattttgcaggcttattgctgcatgttctttg

SEQ ID NO: 19336 - DNA, 1539 bp, Heterodera glycines
  unsure (1)..(1539): unsure at all n locations
tgtgccaaggtgttcaaatgctggttggaatgcggcgtctcggcatttggcgccaaggattgaagccttcaaagaggtgattttgatgtgattatttacctatttgctatttttacgggctttggcgttcgctgacaaaaaaaattatacccaaattggggcatctaatcgtaaaattcattcatttatcatttcgtatttcttaaccaattttttccctattttaggaattttacgccgcttcatctcccgtcaatttcatcgctgtcattcgctttcgttcgtcttttgatcatctggttgtgccatttgttctgaccaacgaattgacccgggagcaattgacgttgaagaagatgaacgatatcgaccgtgttcttctgatccgttgtccgattgtgcgcgacgaaagcaaatgggccaaatgggagaaggaagcgattggatggaactttatggaccagtggaatcggatcgacatttgagatgggtcagtgaatgatgcttcttatgcagatatccaaacttattgcttttcgatttttaggcctcttgacgcagtaatcaacccaagtgatcagaagcagaaatgactgaacgatttgttgagaaatgatccatttaattgatgtggattggataatgaatttgagcccatctgatgtatataaaattgttttgttgcagtgatcacaaattgtattatatgtatatatcaggggtgggacaactctcgccaactctcgccatttttggtactctcgtctctcgttttttgggacgagaggcgagagttgaaaatacacccctaaagattgaacttttgaccagtcagaaaaatattcaaatttacgcgaaaaacgccataataattctctttctctgcttcctctatgttttaaaattagagaacaattattttttgataaatggtcagtaatttaattaactttcacaggttgttagaaggagtatgtcgaaaatatggaattatttcaaaaaggaaatcggaatcgctttctgcaaaaattgtgactacaaaacgaattttccgcccaaaacaccaacgacgacattggccactcatttgaagcacaaacactcagaattatacaaggaatttacagaaaaaacgggggcagccaaagagcagcaacagacttttggcataaaacggtcacacggaacataatacaaaacaacattttttacttttagggctttttcgtcttctgcaggcgcattgacatcgacgagtcttgatttaactgtcgatgaggaaatcgaagagattacattggccaaaaagctcgatgaacagccgaagatcgatcgaatttggacaagaagtccatgggaaatgggcggggaaagagcaagcagtgtgcataaaagaaagacaagtcacacccctggtatatatgcctttaggataaattaagcgatttcctgaaattacaggctcattcttttaacctaatgataaagtcggtggtcactgttcctcccaatcanatgggtttaaattaccatgcaaga

SEQ ID NO: 19337 - DNA, 1427 bp, Heterodera glycines
  unsure (1)..(1427): unsure at all n locations
atgaatttttaaaaatntggaaaaanatttgggtatcaaaacctcccgtgccaccctaagtagatcaatttttacgttttaattcttttctatttatgtagttattttcattattcatatgtaattttttttaaatagaaatcatgtgtatttttcattctttctttttaaataatttaattgaaaattttacagaaattattgggttatttaaatgaattttttgttacttttgtgggaaaaatcaaaaaaattaatttttgtaaattctgctttataattattatttttatttgaatttatcttttaggataaattagggaaaacttttcaactattattaatttttttatgcttttgctattttttcttgcttttcttattgtgcaaataaataatatattttttgttaaattataatattttttatatgttaccaatttcgaagaattaattggtcttgttttccagtttgataattcattttcattaaatgatattatataattaaaatatttttatttggtttaatttttgtaaatcttgcttttttgcaacacaagcaaatttttatattacttaaatgttcattattattattttttagttttgatttaaaacaggctaaattttgaaataataatttatctgttaaaatatatttaaacattttattgaatttattttcaaaatcacggcaatcatcagacttatcaaatttatcgtctaagaggatcaacatttttttatcattcggatttattatgtgtttgttttttgatattccttatgattgttttttattgctccaatatattttttcatatttttgaatttaatttaattatttcatcaccaatattgatagatcattgtcacgaacgatttatattttcgttaaaaattatgaataatgtttgtattattgtgctttatttaatattgataattttctatttttaatagtttattttcataaaaaaaaattttaaacaaaaattaatttaataaatttgaaaaaatttgaaaattttaatcttaagaaaaatccagaaaattttaatcttgcacaggacagattttttccaatcagctttagtcgcggttattcagtttattttaataacttttaaaatttccttaaaaaggaatattttctattgacaaaataaattaattaattttatattcaataaaaaattttagatgatttttttgcgtttatatttaagaataattaaggtaaacaaattgttaacatatgcaaatcaatgggaaaagcaataaatttgaagaaacaaacgaaataatctgaacattgtaaattattaaattttttaaattacatttttgttttatttttgtaaatgacattcccgaccataattgctgtcattcactttcaccatttttattataaattccaa

SEQ ID NO: 19338 - DNA, 1320 bp, Heterodera glycines
taatattttaattaagtcatgattttttttgtttgataacggaatgcaaacatatccaatctgtaaaaattattcatttttatttttctgttaaatttaaattttgcttttccggattcatggtaaatttcttaatgtaaattgtttctatttaattttgttattttttaaaaaataaacccactaaaaaaacatttaataacaaattgtaattttgacccatgggtctcaaaatttttaaattttgaccaattttaaaaatcagaacaaaattattttaaataaaaatgatattaaaaccgattcaggcatctatttgggcataattcgaaccccaaccccggatttcgaacaaaattcgaaaaaaagtcgaaaattccttcttcaccaattttgccgtattcatggagaagttagataagaattgatgcgagcttggacgaagtatttgcctctcgagtgattctttatatgtaaataatttattctattcatgccatagtcagggtttaaaaaatcgaagcgctgttttgtataaaatgtgaacagaataatgcgagattatcaaaataaaaatttaattttattgcactttttttagttttcagtgatttccataaaattggtaaatttggcatttttattattctattaattttaggaaaatttttaatttattttttaaattaattagttaagaaattttccttaaattcataaaattaattaaaaatattaataaatagcattatttattaagtaacatacatttattattgtaatttatttgttattaccaaaattcctttttttaaatacatataattttttagatcatttttcttatcaatgttaattttcatatatcgttttttacatgtgtaatccctcgctttttttgaacgccatgtctttgacttttttcaagtttacaaagaataacacaaaatttttgcttttatttttactttcttttaaattattaacactagattttaataattaaattagtattgattaaatattttcttttcttttaaaatatgtaatttttaaaaggtttttgtgattcccctaaattgagtaaggtaattcaagactaatttgttaggctgaataattttaaagatcaaatggttcatatatgaaaatcaatgaagaattgtagacgaaacaaacaaaaattatcttttaacattgtaaagaattgtttatatcaatctaacatttttctttgttattttttatgaacgataattaattttaaaaaatcaattatatggaatatttgtctgttgtttaaattattttttaattgct

SEQ ID NO: 19339 - DNA, 1486 bp, Heterodera glycines
attaaaagcttcttccctccattcattcccatgattcctcccccatagctcttctctctgcttacatacttatgcttttctctgtaagtgaaatgccattgctaatgctaaagctaatgatttggaatgtaataatttcgttgttggcaaactgattgattccatcattgatcgaaacaaaaattcagctgctgaatttacgtttaactttattaaatttaataattataataaatttttttatcgtccgattgcctccgtttttttccctttaaaactttctaaattattaactcttttcattttcaatcaatgtcttgcgatgattaattaattaccttttttgttcagtgagtgatggtttttgactgtcaatatttttaacaaattatggagggccaagaacgccttttcatttcgtcaaaaagtaaatttcggaaattgatgagccattgaaaatgaataaatggattcatcacttttctcatttgccttttcatcgattcgattttcagctgctgccaaccgatccatgagctttctgcacaaatcgtcgtcccaaatggaagtgtacaaattgcacaaaactttcccttccgtcaattcttcttcgtcctcgccttcgtccttcttagaaatgccttcgtgagtttctcctgcctttgccttatcactgccattgaattgaatgtctttttttttgttttttgtttccttttatcgatcgttttgcttaaagaatgagaaaaccaacaaacattttacgtttttaagttaaaaactctcttccaactcaatgtttgttctttcattagcagtgaggccaattgaattttgtgattttccatttgaatttctatccattttccctccaaagtgaaacctttccgcttcatccattttttttttgtaattgtcccttttcatacgcccattggcttttcacgtaacaatgttcgtgccggtcaaatttaccagggcaaccaaactttgttaattcacacgaatttgtattgaggaattattagcattaggccatgaaattgttcgctcccattcggcacaaaatttctttttttattgttaaataattccctttcactttctccattttaaattaacttttttcagtttcctcccatttctttgcctccattttcagtccttttgagcttatgggcggcgatcggccgtcgtccgcagactttgctagccccgtgccacacgtaagaaacggcgcgagtctcgtcgatttttacattggtctcgggttggccatcagctcgagccttttcatcggctcctcatttatcatcaaaaagaaagcactgataaaaacttgcggggtcggcagaatacaaccaaagagcgtcggaaagggggttatggctatttgaaggaatggctatggtaagcggagagagagagagcttttggtacttgcctaatttagatgacactttgaattgttttaaatttccatact

SEQ ID NO: 19340 - DNA, 786 bp, Heterodera glycines
  unsure (1)..(786): unsure at all n locations
ggtcccgaacattcatggaaacacgtttttataatttaaaaaaaaatttttttatgtggcctaaactgcataagtaccaaaaaatataaaagaattttttaatttagccaaaaaatgtattcgaaggggaaaaagttcccagtaaaatttgagaaattatccaattttattgaccatatttataaataattctttttcaaaaatgatattagaagaacatcacacctcgtttgttttcatttttttttgaaaaaacatgatgaatttagaaaataacatatttcgttttcaacaattttgttgaatgctgggaaatgagctgctccgttcataaaattgaattataattatttttcgtaacttttgcttacatttgtctttattctcaccctttttctcttttagtgttcattctttacgttgcgctcgttttgctgttcacttttgtgctcgtcgtttacgttgcgccccgttatggccacaccaacattttggtgtacatcgccgtctgttctttgatcggttctctgtcagtgatttcggtcaaagggttgggcttggccataaaagagagcataacgacggaggaacagttcaccaattggtccgtcctttgcgccttttccattcctcgccacttctcttttcaggctcacttggttttggctgttggctgtcctcggctgtatctcagaggcaattggtctatctcancaaatcattggacatttacaaaagatcgatggtacccgaactttttggtgtttttaaacgagaccnntgcag

SEQ ID NO: 19341 - DNA, 1376 bp, Heterodera glycines
ctattccttatatttttgaaaataattcatatataaaaaatactgtaacttgttataaaattacaaaaaaattttgaaaacatttttatataggaatttatctatattttagtgatttttggtccacaccagggatggcacggaaccagcggcgccttccggcatcgcatccttaattttattgaaaaatttgatcaaaatcggcaaatttgatcaatttgctgctggaacccggaaaattgatacttcgagtttaatttttttagatttttcccaaaaaaataccatttagatcgattctgatattattgaaagcccttaaataaatcggacaaacaaatggaaaagatttgcgaaaatgaaatggaaatataaaaaatatatatcttaaatttgtagaaaacttattataaaatattttaaaaataaattaaacattcaaaataaagataattagtaaaattaattgaatatttaaaactccattaacccatagaaattttaaaatttatccacataatctcaaaaaaatattatattttaaattctgataaacttgtgaaattcataattttttattttcactatccgtagcattaaagtgaaatttttattttaatagtcataaatttcaataaatacaatttaattttataattataaacagaaattttaaataaataataattaattaattgtatttaacaaaaaatgttcattgccaaagcttgtgtgtgctcttccttaacagaagcatggtgaaagacaattaaatgaatgataactaaataaaatacaaatttatagcaaataattcattaagaaattaaatattatttctgttgactccaaactaacattaacagataaaataaactgaattggaaatttatgatgaatttaaaataaaagtaggataattaaaaatataaacacatttatttatttaattatcttatcttctattaaattgtatataatcaacttaaaaattcacgttcaaaaatgaaatttaaaaattcaaatttagaaatcaaaaacaaataaaataaatttaataattgataactaatataataaaaaacaataaataataatattcttatacatatacatatttaattaaactcgataataataataataatatagctactattttatatttgcaaaccaaaaattacgtacgaatacagtcgtcggcaacaaaaaaacctagcgcaacaagttatgtgaaagctaatagttaaattagtaaagcaattatttaattaaaaagcacaaatttatattgaaatgtaaaatataatattttcaaaagaaaattaattaatcactattataatgaacaaaataattttatttcatttgtaaat

SEQ ID NO: 19342 - DNA, 1523 bp, Heterodera glycines
aacttttccggaaattgtgttgaataccaatcttttttggaactcgttcaaatcttgtgtccacgatttacccctttccgactccatcaaatttacttatttgaaacaatgtttgtctggcaccccactcacactcattagcccattgccaatctcagaccagtcctataatgatgcgttagacttactaacaaaaagctatgataacccagaggatgtcgcccgttccctgcataattctctcaaaaacttgccacgtgttcgggggggcgacggtttttgtcccgatttgcgatcccttctcgatcaaatcgagtgtatttgcgtcaaagaagaagccgacgattggtcaaccgacaaattaaaggatcagctgcgcaatatcctaagaagaagggaacagatcgactccgttcaacccaaatttacaccgacaagacaatctccattcaaatctcattccccttctgatcaacgttatactaacaatcagggggacgcattcccaacactaacctttcatacgtcaaaatttaaacccccctctcacaccagacatttttccgaaaagcctaaaattgttccaaaattgccatgtttgttttgtgatgagccctcgcatttttcctcatattgccccaatttttcggacatacctggtcgaatcgaacgtttgaatgcactcaaacgttgctttaaatgtctgaaatccgggcatttctctaacaaatgtactcaaccttcaacatgttcagcgtgtaagggctcacaccctagagctctttgtcgtaataaaacgacccatcagccctcctcaactttttgtactcaaaccttttctaactatggcactgcccacaacaatcacacacaaatttcccctgaggcactatgctcgcaacctaacaacaactttgacattataaacccacaattaaatgatgagcaaagccttttccccaaaaattcaaaacgattaattggccccctcccaactaatcaaccaaataccaatcaatcaatgagtcccctccccccacagaataacattactttttctaatttacaggataattctccgattccaatccttttaaaatgcgttgaagtgacaatttttaacccagaaaaccctgctaaattcactaagggaattggtcttttggatgatgctagcacacattcctatatcgatttacataaagccgaattgctgaatcttaatcttaaaccctcttctattaatttggtagtctttaacagtgatgaacataaacccatttccgcttttaccacaaatttcggactgaaactcactgatggacgtacaattttagtcacagttacacgccaaactgcataccttcccttttcacgtgaactgttatccttttccgagacattacctaatttccaatcagcaaccccaattgtacttcttggagccgattattattatgaaaccgagccaacactaatccagcgtttatcctctggctaccacttcatccaaacataactgg

SEQ ID NO: 19343 - DNA, 818 bp, Heterodera glycines
tagagtgcagcgggaccgggaattttgggcaaaaccgggcgggaccaaccgggaatttttaaaaattcaaaaaaattcaaaaaattttaaaaaattcaaattttaatttttttttcaactgaaaataatacaaaattaaatttttactttgttttttattgaataaactccaaaagttaaagcaaattaaattaatgaaaattttcaaatcaaattttcttcagttatttcaaacaattaatcatttttggactaaatgatcgaatattatagaaattcagatttacgtttcacataaatttttttggcgcgctttttccaaaaaacttttggggaagaaggggtccggcggtgtcgataggcgccgccggggaaaattttgaaatttgggtataatttgttaacagattttcaacaaaaaaaggttggtttttgggataataggctcaaattgtaaatggatttctttaaaaaatgataaaatatgtatcaatctaaaaaaaaagtatgaggaatcatattttctcaataaggaaagccatgagttacaaaaagaaaattgaaaatattttaatttctgtcgagggattgaaccaagggaaagaagaagggaaagtcaaggatactagccactaggccatttgcacaattgtcagtgtttcttttaaagaatatattaatatatttttaaaattttttccttttaactccaattttcttcactaatttttcactcagacccccattcttaccagtgcttgtttttcccggttcccggttgccctaccgggaccgggacctgagcttttcaaaatccg

SEQ ID NO: 19344 - DNA, 1660 bp, Heterodera glycines
tttgcgggatcccagtccgcaatcccgcattttttggaaaatgcgggatttgcgggattaatcccgcgggatcccgtcccgcaaagaattttgagttccaatcccgcagcgggatccgcaatgattttttgtgcgggattatgcgggattttattgatttttttgaaaattttctaagtatttttttttattaatgactatagattatttatttttttctccttggaaggaaaaaatttactttaaaataaagaatttaaaaaaaagattttccgtaccaaaaaaactggttttttttccttagtttttttcatttggttaggcatgctttctttaaaagtttgttgtttttgcaggtcggtttttttcccggcggcgcctatcggcaccgccgtaccctcctccaagtctcccaaaaagtttttgaaaaaatcgcgctgtaaaaaacgtgtaaatagtcactccttttcccaaaaatgttctaaaataatgaaaatgacaaaaaaagattttgataaaataattgaataattttttcaagcgaatatactaaaaacatttgtgaaataccttttacttggttaagaattaaaaaatttagcctattaaaaatttagaaatttttttattatattgtatattttttgaaaaatttccgatttccgacatttttggtgtcggaattccgattttccgacttccgaaaatttttggggcctcggaatgccatccctgatagggaccgccggcccctgttcctagttttttgaaaaattgcaccgcaaaaaagtggttttgaaaagaaaaaaatagtcaaatttatgaaccgttaataatttgatttccgatcaactttttaccgtcggatccaatcgaaaaatcttagtcgacccatcagcctcttttaatgcatcccgccagccttaaatttatttttcagcattactcactcggccgcttcgcggcctcgtacggggtttctctaccttttcttccttttcttcctttttagcattttcttattattagggctgggatttttatgttttaacatattttttttgcggcttagttatggcgagagaagcccaaaaatagcattttctccgaacaatttttgatttagagcgacttataaaaacataaacacatattttggcgttttggcacataaaaacatatcgcacatatttgagctattttggattttttagcacatattttggcatttttgagaaaaatcgtaagaaaaatacaagaaaatctgaaaatggaccctaaaaattgactactttacgtttcttaagcatttagaaaatttctttatatatttaaatgcctaaagcagccaaatcgaacgctgtgttaaatcgtcactggatttcaaagttcccggaaggaacttattcaactgatggaaaaattaatccgggactttacaaattgattgatatcgccaacattttgattggcggttgggcgaaattaataaagactgatattaaatatgtttttttttgcgtaaatacacttggtttttccaatttttagcacatatttttgcattttttaacacatatttaggcctttttttggtttttagcacatattttgggtttttttagcacatattttattacatatttcaggatttttagca

SEQ ID NO: 19345 - DNA, 2929 bp, Heterodera glycines
  unsure (1)..(2929): unsure at all n locations
aacgaaacacgaaacgaaaaaagaaattttgaaaaccgacatcgaaacacaaaacgaaaaaattttgacggacgaaaacgaaacacgaaaacgaaaaaatagccattttcgtacgaaacgaaacgaaaaaaccgaaaattttttaaatatattcaattttaattaagaactttaaaattgtatcctctaactgagggaattaagatcctaataggtggaaaagcggatgtggctctaggacaggggtatgactgaaaaattttcaaaataagaacatcaaggacaaaaaattattgaaaaattttacgaaattggaaaaaaatgttttttgtgataaaaactcaaaatttttacgattttgaatagcatttcgttcaattttttatgaaattctatttaatttccaattcgtaaatttcatttgaaatgaatttcgttttaaatttcttaacttttttacgatggatttgcaaattttttcaaaattatagatacctaatttttgtgaaaaatcgttgcaaaattcatataatcggttaaaaagcgcaaatttgttcgataaatctgtttaacaatttgcaatcaaattttaaaaaattttcccgccggcgtctatcggcaccgccggactccaaaaactcttgtttaatgttcgtaataaaatttagaacgaatctatattagtattttagtaaaaaaaatatggtttttattgattaaaaaacttttcaaaaaaccctgatccgtatacgggtccgtatttttcctgcatacggacttatacggagtaagggttttccgggtttttagtccgtaagtctgtagtccgtatggatgcctagtccgtagtcctgatcctgatccgtattttcgccaaatgtcgctctctagaaaaaaatatcaacatttcaaactttacatacaatttcctggcagatttaatacaatacttcaagaaatatcttattttttcttaccaaaaaagtcattcttaagggtgtatttattttcgtctttttcgtccaattttgctctgacgaaaacgaaacacgaaacgaaaaacaaaatttaaaaaccgaaaacgaaacacgaaacgaaaaacaaaattttgaaaaccgaaaacgaaacgaaaaaactttggtagacgaaaacgaaacacgaaaacgaaacacaaaaagtgccgaaaatgtaggacgaaacgaaatttcgtccatccctggttggcacataaaatgattatgggtcgcataaaatgattatgggacacgcataatatttcatgggacgcataaaaccgaccagaaccaaaaaactgtatagtacactttttgcatcaaaattcctaaaattttagcatttttaaaatacttggtgctatgtggaaaattaatttttacaaaatttgatttttgtacttcgaagaaaaaaaataataaaaatatatttaatattaaataaaacttttgggaagttgaatttgaattttattcaacctaaatcaatattattccattttggttatctcagggttgccatcgtccatgctccgtgtcgtgtccaaggaattggtttccaaggacatgacgggaaaatttcataaaatccaaggacaattaaaaattttatcatttttcgaggaacaggtgggtccggcggtgccgataggcgccgccggaaaatttttttgaaaattagagtgtaatttgttaacagattttcaccaaaaaaggtggattttgcgattttgagatgatggcgatgacaattttttattttcacaacccttcttcaaaatattgttaaaaattcaaaaatttctcaaatttcgttgaattttttaaaatttttccaaatgctgatttccaaggacgtccttggcatccaaggacattttttatttccaagaaagatagtcaaattccaaggacgtccttggcatccaaggacgaatgagaacctgtatctctttatcttccttttacagttttctttctcttctctttatttctctgtcatataatttttctctatttatctcactttatctctctctatttctatgtcatttctctctctcatctcctctctctctcatcctcccctcttatttgatcatttcattgtgtatttatttgtcgaagtggaaggattactttcaataggaaaatttttgggtaatagttcagatggtatgatacagtaacagtttccataaattttttaaattttaaaagtcaaatcaattttgaaccctgaacacgaattcgaacaaaagtcgagtttaaattttcgattgacgtttttcgtataaaacggcttaaaataatcttttttgcaggaagtgatcgccttcagtatgcttccgggtttttagtcctgtggtgattttggtggatggtggaaaatgcgttttttatgcttaatatatcggaactaatgcgcagaaaaaaggcatatgcttcaaaattcgttctctaataataattagagaccagggttgttccgggtcgagaaaaatatcgggtcgggtttcgggtcgggtcggccgaaaaatcatcgggtcgggtttcgggtttcgggtcgagaaaaaggccgggtttcgggtatcgggtcaattgacaaatttttaatttgtttaaaaatcaataagaaaaattataaattggtaaattccgatgcaaaaaaagaagcttctccaaattttctgcagttaaccgatttcttaaatcagtagacgatggaaataaaaccaaatggaatcagatttttcagccttttgcttcgcttanattcaagaaattcatacaaaatatctttagaanaaggataataatgaacaaaaacaaatacaanattttcgattccattgaaacacatcgtttcanaaaaaattctcaatttcctttatctaatttcacccagaacccct

SEQ ID NO: 19346 - DNA, 1929 bp, Heterodera glycines
caaaaaatgattatattttccggcccctttttaaaaaaattccaaaaaataacccaaaaatacctcaggcaaaaaattgagtacgttttttttattaaaaaattcaaaatttgcgccaaaatttttcttcaaaaactcgtgcgttttaactcaaaatccttctacaattccaaagacctttaagataggggaactattccgatataattaatatattccataaataattatacgattttttattcgaaattctgcctatggtcagtgttacttttatctcaactggtatcgaaatgctgttataaattttaaagattttcaaaaaaaaaatttgaattttttaaagaattaaattttttgaaaattttttgcgataattcatcacaaattgaaaaatcgttaaaaaattttcttatatctttggaaatttttttatgattttttaaaatttctgtttgaaattaaaaaaaaaatttcgaggtaaatgacagaggagataaatgaagtggtgcctatcagatagcaacaccgggagtttaatttggatgcctcaagaaaaagttatggtgcactaaagtttcaaaaaaattttatggttgtgtgaaataaaaaaattcaaccgaaaaattcaaaaaaaaattaataacattatgccagatggattttttcaaaggaaaatgaacaaaaatgaagaatttttgactatatcataaaccggtaaaagccggtcaaaaaatgccggtttccggaccggtttggtattttcaaaatgaccggtttccgggccgggcctctcaaaaaccggtcaaaccggtttttagctaattgccgcaaaaatgaaccggcagtaattagttattcgacgaagaggcattgccattaaatggaaggcctaggaaaacacggggtcgagaagcgaaatatatatcaaattcatgatagtgatcccgaaaaccacctaaatttttaaaaacaaatatagaatttaagtacattgatggcaatttgaaaatgtctgtgaaaagagtccgttaaaggaaataagtatttttgatcagaatcaaaatttgtagtcgcatgaattttttcaagattttatagccattaaattataaaaagtgaatattatgatcagatcgagaatagtcatgtaaaaaacagtataacatgttaagagtacaagttgattaaaatgtgcttctcccaacgactgccggatcgaatttgaaattgggcccaaagtttcgctttttcaccagaatccaacaactaaaaaattaaataattaattttcggttttcaaaaagatgagtttgccggaacgccgacatttgcgccgcggacatttgcgccgcagacacttgcgccgcgacacttgcgccgcccagccaaatcgacatttgcgccgcagacacttgcgccgtgacttttgcgccgctgacacttgcgccgcccagccaagtcgacatttgcgccgcaaaaaaaaatattttttaaattttcaacaatttattaacgctaatatttgataacaccctaataaaagttagcaaatggctaatcacaaagataaacgtccaattttttgtctttgacaaggcgtacataatctctatcgtgattaatcttcatattcttgtacaactcgctttcatctgctccatcgtcttgatacgaaccaagaatttctccttgctcttagaaatacaaatggccccgcttgtctctgtcatccattatctcggtcagcaaaaccaatactatccgaccgagatcctcttctattattccatgcacgaacattcaagcgaaacgcctgtttgaagcactctgatttgttcataggaaactcggcagcctaccgacgccgaccggtaaaggccaactccggggagagaccggaagaaaagccaaccaaaccagtaacac

SEQ ID NO: 19347 - DNA, 1973 bp, Heterodera glycines
  unsure (1)..(1973): unsure at all n locations
tttttaaaaaatttccaaaaaattaagaaacttaaaattagacatcatattggttctcagccccttatttttaccccagaaaaaatatttttcccccccattttcgtccgaaaaaaaatttcggaaaatttttagggggcctagctcgaaaaattttgaaaatttcgggccatatggcacaccattcgatagagcttaaaaagctctacaattttgccntaaggcgtttttttgataaaaccaacccctgacgagttatgggcccgggactcaaatgtcccgctcaggccaaaaattttttctatttccgggaaaaaatcgaaatttttccgaaaaaaataccagtcgatagagctcgaaaaactatgttttggaagtggtctccgtttctctgggaaaattcgttaaaaattcctaaaattcaaaaacccgaaaaccgttttttaggcctagctcgaaaaattttgaaaattttcgaaattttaaaaactggaaaaatccagctcattgaactctacaataagtctgctggtaactccccgcccagatcaaaccctaatgagttattcaaccgggactgaactggacaaagttggtactgaaaaagtccacgaacctacagcctttcctattgcagatagaggcttggaattttttttgttttttagaaaacacttcaacttagccccctcacagcagacattttttgatttgggttttagaaaaaaagttacgggcccccaaatgcacgaaaaaatgagaaatcggtccccgggactcagtcgtccgcgcagaatttttctctatagttttcccggattctcctcaaaaagttgtaagacctttccactactttcagggcgctcccggccttcggccgggagattttgttttttgaaacgaaactccttgtcaatataacgtatatattaaatagcgtttataccgtcggctaattttatgtatgaaaatttgcgaattatgtaaacaaaatatgtatataaaatgctaaaatatgtacaaaaatccccaaatatgtactaaaacatgtaaataaaatttttttaatggttattttttggaaaaaaatcttcgtaaaaagtgaactaatcaaaaaattttttttttcttttttttttttcaataaccaaactatgcttagaatcactttttagtattttaaaaattatttttgatatatcaaattttgaaaaaattcgattttttaggaatacatttaaaaaaaaattttaatttttcacaaaaaattaaatttatataaattctcgaaaaagcacaaaatatctaaaaaaataatgaaaaaatgtacgaaaaattgcgaaatatgtacgaaaaagtccaaaaacatgtataaaacccaacgtttgttcgcaaacaaaaaaaaaagagtgtttttcctactaattaggctatggagaatccagaaaaaatatgtatttcataaaattagcagctctaatcatcatcatcattgttttctgaacattttatgtaaatttttcaattttaaaaaagcaaaaaataaataattaattaattaaatgaaattatcgccttgccttctttcttcttgcgttgtttctgttttcttcaaaaagtggcaaaattgtagtggaatttgggcccaaagttcgcttcaatttcttcatcatggataagcaaagaaacgaatggcaacaattgggaagaatggtcagccaaagcgaatgaatctgtgatccgaaataaggaatgactttttttggaatggagatcctcgacttttttgccgatgtccaaaattggattcaaaattgctaattgtttcaagccctgatagccctaagcagtattaaaattaagaaaacacacaatcttctagttaattaggaacataatttctgctgtttgactaattaatgattttttcaaaaatttactgactatcaaattatcaggcacaaccaatttct

SEQ ID NO: 19348 - DNA, 1105 bp, Heterodera glycines
aaaagggaaaaataaatgattttaaaattaaaccaaattagtaaatgggttatgaaaaatagaattataaaaaatgtattaatatttttttaaaaaaatattaaaaaatgctttcttttattaattaaaaataaactttgaatttacaatgattgagtattattgtattgagaataatttttttgacaatttctaatttaaaaaaacattaaattctttaatttaaaaaaatttttatttttaaataaaattttcaccaaaaaataatttaattcaaatgaaaattttttatttattattaataaaataaaaatattttaaatgaataaaaattgaaaataacagaaaaatatagaaaaataatgtgttaccgtccggatccgaacttgcccccccccctcccccttcaaatgatgccaaagaatccccaatcacacggggattctgagggcttaacgatgtcataactgaaatctgatgtcagattagtgatcagcagcctcaaatagccctaatgacatgttttttgaagatttttggtgaaaaaatttttcaactcaaaaatcctatgctcacccctttggtcccgaatcccaaaatcacttttatttttataactttttttaaagaagtgataaaaataccaaataaattttataaaatagagcaagaaattgcggatttttgtagtattttacttttacagtatgacttttcagaaccgagttatgaatttttttctgaaaaatcgaaaatttccagaaattctggaataactttttttcttttgagcattataaaaccaaataaatctcataaaattctcccgattttttgctatttataaaggtttaattcgccaaaatagacctgatctgaactgagttatgaattttcaaatattaggccaaaatcccgagggccaaaaaattgccaaaaaataaagaatttttaaaaaattccaaaaattatgaaacttaaaatagacatcatattcgtactcagcaccttattttaccccagaaaaatatttttcacccccattttcgtccgaaaaaaatttccgaaaatttctagggggcctagctcgaaaatttttgaaaat

SEQ ID NO: 19349 - DNA, 2126 bp, Heterodera glycines
  unsure (1)..(2126): unsure at all n locations
aagatggaagccgcaattcatcaactcactgcggcaatccagcaattattgtcaaatcaaaatggtgcgccagccgcaaatgcgcatgcttcgccaacgcttccgcccatcgactgttttgagccatcggacgatagaagcatttccgattggttggaacgcttcaattttgccctcgactgtgcggcaccgcaactggcagacgaagcaaaggtcaagctgctcatgacgaagctgagtgaagtggctttcagccagtacagcaagtcatgtctgccgaagaaagtcatcgattttgactacagccaaacagaggagcgcctaaagattgccttcagccggccacaatctatttggattgatcgctatgaatgtctgagggcctcaaaaagcgaagatgaaagctttcgtccttttatcaacagacataagcgactcttgcgtgattttcagtttgaaaagctcaacgaagagcaattttcttgcctcatgcttttgacggcactgaaatcaccgaaggatgccgagctgagaaagcgaattctttcgaagcttgcagcggatggttacctggtcgagtatgatggagtcgtcgaagacctccaaatgtaccagtcgaccatcgctgaagcaaaggtcctcgaacaacaaccgatgggctcacgaaacttgatggcgaccaaattgaaggcaaaaaagaaacgaacgaactcggatctttcgtcgaatgcgagcagcatttcgacaggaacacggagcagcaatcgatcgcaacgcgtatgttggcgatgcggtttgagccattcgtcgaggaattgtcgacatgaaacaaccgtttgccgaaagtgcaagaagagtggccacttggaaaggatgtgtgccaagcaccaggcatggttgaagaagaatggaggaaaaaatgaaaaagcggcgaacaacgtccgcgttggaggagttttcctggttaaatctgagaaccagaggaagaatggaataatcgatgttccgattgatgtgaatggcaccaaagtggatttcattgctgatttaggcactgagggaactgttctttgtgaggacactgtgcgccaaatcagagctttgaaattgagccgttgtcaagaacgtgctcagtaccacgatggcacaactcgtccattcgttggcaaaggaaagacaactttttcgttcggagaccgctcatgctatggacatttctttgtttccaaagacggatccaagaatttgctcggattggacatgatggacagacttggattgtcggactccatcagaaatggtctgaaggacaaattccgaactgaggcttccaaagagaacggagcgagccaaaagaaaaagaagaaatcgtcagaaaagacggacgtggcaaaaagaagaatttcttcgctgtgggagcgaatgtgatcgccagcttgggtgatgagccatggcgtgccggacgtgtgatcagccgaaaagaaggcacttacgacgttcaatttttggacggcacgactggagaattcccggcaaaaggtgtacaaccgtacaagccggatgaagatgaaaatttgaattttcttcttgacgggtttggtctgaagagagcctcatccggtggatctatcgggaagcacggcagcgatggccgacgagatcaaacgaaagatgatcttcgagaagcttccgactgtggacacaaggcataagaacgccgatctgaggatgcggatgatggacggaggcccggcatttttcaaggggggagatgttagggttgggacccaattgtccggtgcccattttgaccctttgtttcatttgtatttcccttctcccttcgttatgtcacgcccacttctccgcccataaatacccgcgatgttgacccttccccatcattcttttgcttcttctccatttatttgttccctttgctcccaatcgatatttgaccccgttcgccctgtcccttctttttgaataaatatttattttattcctcttcggactttggggcgtaacaggcacgaatgttttggtcaataggngccttctttcaccggcatgtcgaactgatgacttctctatctctggctgctttttgtgtcgccgtcccttat

SEQ ID NO: 19350 - DNA, 1918 bp, Heterodera glycines
agggtcccccctttttgaaaaaattttcaaaaactgtcctcctaagatagtgccattcttgtcattcattaattttttcctttcttatatttcagcttttctcgacaaaaaattgcaaatgcctgtcgttgcggctgttgatctaattttggagaaccaaatgaattttgttaaaaaacgaagaaaacgaacccacgtgagtcaacaaaaccttccaatgttttgagtggaatccatctgagtgaatttaggatgaaactgatggaaaccacgctgacaagaccttattcttcagtgatccgaattcgcaaaatgacgagtaatattttgtttaaaactcaaattatttttatattttagatcaactgatgaagttttcttgaatgaaattgatctggaaaacccatctatccatgattttttcgttgcattggccgcacatttggataatctccttcaaaaccggaacgagaaaatcagtttccaagctgcgcaaattttcgacttggtttcttgcttttcaaagctttttacaagggttagtgatattttgttgtatttttttatattctttgaatgcaataaaattcgcttaatatatttcaggtacgacgaccgctttttcaatggcttttaaaaaagaatgtgtcaattgaggaagtgttcatcatttccttcttcatcgaaaacctagcagatgagcacaagtcttttacagagcttgtggaacgtatcgttttccttttataaattaattaggccttgttttcattttaaggtgtggtggcagagagatataagcgtcagtctctttcacagacactttccaactcggaccaattgttctttgttagcgatttaatttcgttttcataattctgtttgggttccagaaaccattggtaaagctgcggacgttcgatcgcacttaccaaagcagcaatagcgaagtacaaaaaatgatggacgtagcgcgggacaattttgagaaagttctcattgaaatggtacaaaacgctgagaataaaacagcactcaaaggaattcaatggatgggcgtaagatatccttttgaatttgtttatttttcacctttttaagaaatcaatcctctgctatttctccaaggacactgcaatttttgaatgttctgtgtgttttacagaatcatatgtctcgacggcatttcgatgcactgcaattcaacccctgaaagacgattctgaaaagcgacatttgttctgtttggactgtgttcgtggtcaagccgaagcatctgtgaatgaagctttgctttccgaagaggcgttgggtctgcgctgcatggcatcggaatgccgaaatccaatccttttcagtatttttaatgctaattgtaagtttggcaactgctttttcaccattagccgaaatcagcggatatctttcgcgtgcgcttcgtcgtcgactcgacgatcgcctcacaagtcaggccctttgctccgctgggctttctggcctcgagtactgcttgaagtgcgattttgcaatggttagttagcatgccttttccttagatgctgtgaacaatggctttttacttcctcaaattaatcctgctattctttatattaatatagtaattcgcatgaatgaattgaatttaaatcaaaaattcaagtattttgcagatcatggaagtcccaaaggaagtggacaaagtcttcaactgccagaaatgcggatattcattctgcaggttttaaaaattccaaataagatagtgctgtttcagactttgtgaggaggactggagcaaacactttgggttttcgtgtgacaaagtgaagctttaaagagggggaagcaaagcggagagaaaagtaagtgactatgggtgggagtcagaattaaattttaacaattactgttaagagag

SEQ ID NO: 19351 - DNA, 1825 bp, Heterodera glycines
cccaatgcccaacagaaaactgttgatgacattggcagtgttgttcggctttccgaacacaacgtaaattctctccaatattggaagaaaatgtatgaagattgcaacaccgtttttgcacggtgccatgacgcgaagaaagcgcgtctcttcattactttcacgaacaacagggaatggcctgagttcaaagagaatttacacaaaaacggtcaagtatttactgaccgttttgacatgtggatgcgtgtctggagcagcaaaatcgctgagttccgagaagaactttatgacaaaaagttcttcggaacaatccttggttacggtgaatcaatggagttccaaggccgaggaggcccacatgcccacattgtggcgcaaacagacctggacgcagttccatatgtcattcaggaatacatatgggcgcacattccatctttgcctgataaagatgacgacacgcccattgcaaaaatgcatcgcgaaatccgcgaaacaatgcatatgcaactgcacagatgcagtgacagttggtgtggtcctagcgacccaatttacgggcggtgcaagaaggggttcccagccccttactcaaaatgtacgattttgcgcccggacaggcccgcgatgtatttccggccttcaccatctgatggtggtgcccaattagaggtaaacggcctaatatacgacaactcacatgtcgtgccgtataatccttatattctgctgcgttaccgagtacaccataatgtactgtttgcatatggtaacaaagcaaatattaaatacgcactcaagtaccctttcaaagggccaggacattgttatgtcgagtgcaaagaagagtccggcaataaaattggaattgatgagccggctcaatatgccaagatgaacttccgtggtgcaacggaagcatatgccattgttcattcaatgccatttgcccgtctttcgcatcatgttgtcaaattggcaattcatttgccaaaccaacagcccattgtatatagggcattccagctggtgagcaaagctcaacaaatccagcaaggcgaactgccagaaacgcagtgttcagcctattggaaacaatggcaaaatgagtggaagaatgatccaaagtttaaggacattcttttcgaaaaagtcccagagcggttccgatgggcaaaggacaaatgggtcctgtacaaaaggcagcaaattaaaaggccacctatcggccgaattgttcctgtacccccatcggacccggaaaggttcgcgctctattcacttatgcgtcactttcctggagacccagaccatcttaagatggttaatgggttgctttgtacctcattcactgaggctgcaataatgcatggtcttcttgaagacgacaaaatttgggacaaaactctggcggaggcagctctgtcgcgctggccagatcagatgagatggctttttgtgagcatcctggtctatggccagccgagtaatgccatagaattgtggaacaagtacaaagaccaaatgtacaatccgcaaggcattattactctggcacagcataaagtagcagagcttgaagccctagccgacattgattggcggctgcacagctgctttaacttaagctgtgtgcattttagcctgccagacccgccaacttcaattgccaaaaatactgacgcggcaattgaaaagtttttctttggcgatgatgatttgaatttgcctccagggcaaccaaatcctcgtccacagccaaatacccctccgccacttaacagcgaccaacagaaggtctttgaatgctgtttttgttggc

SEQ ID NO: 19352 - DNA, 1087 bp, Heterodera glycines
agagaaaggatatgaacaatcacttataaggctcatgcttggagataaaggaatcggaaaaaaaaattatctcaacaatcagtcgtgaaacagttcaataattcggaagcagtgccatattgggaaaagatgcacaagtagagtaggctcgaaataaaggcaactgccgaagattaacaaaaattcaaatttattggccccgttctgctttgacaggccatatctcgccagggagtggcggtagaccctttgttgatacatttgaaaatgtagagcgcgtctagctcattcgaataacatcaaactggtttgtttttgtcacgaaacaacccgctgatggccacgtcgaagaaaagtcccaaaatttgacatccataaaactccattttttcataggccagcgtgtttaaagcaaacccgaaactgataggaaatttaaattgatcataatagaagtttaatttttatttgtcccatgcattttctgggaaatcttttcgcgaaaagttgaaaaatttcaaaacggcagacaacagatgcatttcaaacaattcaacaatataatataaaatttaggcaaaaatttttgttccttcctctttggaaatggtcttaaattttgcttgtaaatattcagataacaagttttttttactgaaaattttttacacactacaggatgaaacgcaataaataatgtttgtagacaaaagaaattggcgaaaaaaattgcctcaacaatcagtggtgaaactgaaagaaaaaaacttccccaaaaaatcggagcttttccgacggcatcagctgcatttccaacagttcaacagtataaataaatattaggcaaatgaaaaattttttttccttcctctttagaaagtgtctaaaaatttttgttgttaatattcagaaaacgtgttttttttactgacaatttttttcaagagaaggatatgaacaatcacttataaggctcatgcttggagataaaggaatcggaaaaaaaaattatctcaacaatcagtcgtgaaacagttcaataattcagaagcagtgccatattgggaaaagatgcacaagtagagta

SEQ ID NO: 19353 - DNA, 3008 bp, Heterodera glycines
  unsure (1)..(3008): unsure at all n locations
ttaaaaaattttatagttatttattaattaaataaattcttttagtattagtcgacaatttgacataaaaaatattttatttagtcataatttaaacattattttttgtccaacatttacagattttaatatcttttaataattgtttcttctttttaatgtaatattgtttatttatttatttcattatccttcaattttatgggttaaatttttcttacaataacaaaatattatttatcttattaatatttaaataaatgtttatttattagccgggcacaaatgtctttattatttgcaaaagaattcctttcacttttattttaataatgagtttaaaagttaatttgctttttctactttcatattttacgaaaggagctaaaagaaaaatattgtttaagattgtaaaaaaattatacaacgaaataaaaaaataaatttatgcccttaagttataatctcatttttaattacaaaccatttaaaaatttgttttttaattttttctcttaataaaaactcttattttattgatcccaatttaaatactatttccggtctaaatagtcccttttatacttcatgaatttcattttgttcgtaatttttttttcattgaaaaattctttttatttttaatttttatgctgatgataataaattttttttatgtttcttaaaatttcatttatttttgattattttatgatttttattttaactatttttatatcatctctcatgtcaatacaattccgattcctacaccggttcgcgcctttcttattctgattcttcttcagcagctttctccgtacatttattaatgatttaaaatttttaatttttattgaatacatataaattattattaaattatactattattaatttttcattttttgtaattttattttgctgtttaaaaagaatatataagacaatttatattttcttggcgaagaaggtcttaataaaccaaacgatttatgactattgttgcctaagaaagtatttcgatcggttttttgatttaaattagcaaatcattaaatatacgtgtttaataattattaaattacattaaaaataggatgttttcgatttttagcatttgttcctattttggaatttaaattattatattcattcaaaagttgacttatgtattgaatttataaaacctgttgatatatttactaatttattttttgctgagaaagttataaaaaaaaacattgtaatggaagtaagtaaaaataactcatatgaaaaaacaaattagcactggtaattgtcaatcaaaccctcagatttttttcttttcataattcactgcagttgtgttttccaaaagaagaattaaaaattatttggcattctgtccttacaaattttcaaaaaacaatgaaatcccgcagaatcccgcataaaaagacaaatttgaggatcccgctgcgggatttgaactcaaaattttgtgggccgggatcccggatgtataaatccctcaaaatctcgcaaatcccaaaaaatgcgggattgcgggctgggaccccgtaaaatcccgcgccagattataaagacggacattgctgatgattatcatttttatgtgctttttgtaatttattaaaaatttaaatcatttattttgactttatagcaattatttttaattctttatagtaattaattgttttattgtagattacaaaatgtcgaaagaattcatgatttgaatttattttttattttataaatatgtattaattaaatttcatttattcagttcagttcatctcttttatttaattaattgtaaaataattttatttaatatattttatctctttttactctttaatctcatggtacaaagttgtttttcctgtcaatggtgaggtgtcgcttttcgaaattatttgattcgcttattattaattaaataatgatatgcttaaatttatgagtacaaattaaattgcctttattatttttattaagattagttcatttctcagtaattaaaaaagagttaaatttgttttaatgatgacatttttgaaaagtcaaatttcttttaatttctttttctttatctttctatttttattatttataggttgccttgctataaatcttgtgtttccccaccaaataattggccgataacaaaatactaaattaataaattttcgcaaaataaaagtaattttttaaattttttttattgtaaaatttttggtgtcttaaggtgcttaatacatgatttattctaatttaaattttattactatttttgtattttttactaatttatttttttattttgtttatactttttggtatttttattttaaatttcaaattcgtattctcacgacgtagtcaaagaattgaatatggtcatttcaaagtattttaatgatttattattattcatttaatttttgtttattctcatttttaaatgcccatatttattagcttgcaaagcgtctaatgattatttattttctttctaatgtatatttgtttaggaaaagcttttacaaatttataactttgtatgaataattttgtttaggctttttgttttagaatctttaatgtatatatttgattttattgccagttaaatgaaaatttaatctatttttgtgttctagttttaccttaacaaagtaaacgaaaattttatttaatattttgggtgccttgctctcttttattttagaatctttttgtaaaaaatggttgaaaattaataaagaaaattaaatttataattgatttttcccttttaaagaaaaattatatttaattcctttatatatttttttttataatttattatttattacatatttattctactctttattctttaattattcttttctaaatttataaattattaaacaaaataatttttgatttttagaaattttattttttggagaccagtaaaaganttttttaagcatcattttcaaatt

SEQ ID NO: 19354 - DNA, 1234 bp, Heterodera glycines
ataattatgaataaaaagaaataaaaaatacacaaaatccttatctatgaataataaaactttaaagcaaaaataatataaaatttttttgactatatggcataaggcaaaaattgaaaaaccccgaccccgaccccgaaccatttggtcaaccccgaccccgaccccgacacttccaaccccgacgaccccgaaccccgacttttccaaccccgacggtcgggggcccaaccctagttgttaagctagttttcatttttattgttagcaattaaaaaattttgaaaaacttttcaactattggcgttttgccaaaaaaaaaattaattaacaaaaatacggactgggaccgtagtgcgacatttgcggaccgacatttgcggaccgacatttgcggaccgacttttgcggaccgacatttgcagaccgacttttgcggaccgacatttgcggaccgacttttgcggaccgacttttgcggaccgacatttgcggaccgacttttgcggaccgacatttgcagaccgacttttgcggaccgacatttgcggaccgacttttgcggaccaacttttgcggaccgacatttgcggaccgaatttttgcggacccacttttgcggaccgacatttgcggaccgacatttgcggaccgacttttgcggaccgacatttgcggaccgacttttgcggaccgatatttgcggaccgacatttgcggaccgacttttgcggaccgacatttgcggaccgacttttgcggaccgacatttgcggaccgacttttgcggaccgacttttgcggaccgacatttgcggaccgacatttgcggaccgacatttgcggaccgacatttgcggaccgacatttgcggaccgacttttgcggaccgacttttgcggaccgacatttgcggaccgacttttgcggaccgacatttgcggaccgacttttgcggaccgacatttgcggaccgacttttgcggaccgacatttgcggaccgacttttgcggaccgacatttgcagaccgacttttgcggaccgacatttgcggaccgacttttgcggaccgacttttgcggaccgacatttgcggaccgacttttgcggaccgacatttgcagaccgacttttgcggaccgacatttgcggaccgacttttgcggaccgacttttgcggaccgacatttgcggaccgacattttgcgaccgacttttgcggaccgactttt

SEQ ID NO: 19355 - DNA, 902 bp, Heterodera glycines
aattttcaacgcctcctttctcgacaattggtggccgtaaaatacgtctgaattcacgacatttggccatcatatgcatgttctattctccttttcaaatacgtgtttgcgttgtaaaataatccagatactgtacccattgggaatttgaaccattcttttctaggaagaaaccggtttgaaggtgataaagcggttgccatcgtacttatagaaagtggccataaaatcagttcgtttaaagtgacaactgcactttattttcgtattagccatcagatccccgacttagcttcaaaacaggtaaagccacacattctctaccattgtgaattttcaacgcctcctttctcgacaattcttggccgtaaaatgcgtctgaattcacgacatttggccatcatatgcatgttctattctccttttcaaatacgtgtttgcgttgtaaaataatccagatactgtacccattgggaatttgaaccattcttttctaggaagaaaccggtttgaaagtgataaagcggttgccatcgtacttatagaaatggccataaaatcagttcgtttaaagtgacaactgcactttattttcgtattagccgtcagatccatacattagcgtctaaacaggtaaagccacacattctctaccattatgaattttcaacgcctcctttctcgacaattcttggacgtaaaatgcgtctgaattcacgacatttggccatcatctgcatgttctattctccttttcaaatacgtgtttgtgttgtaaaataatccagatactgtaaagtgcagttctctctgtaaacgaactgattttatggccactttctataaaggcgatggcggtcgcagtgtgaccgtaaacccagttttttgtatagaaaagggtt

SEQ ID NO: 19356 - DNA, 1422 bp, Heterodera glycines
  unsure (1)..(1422): unsure at all n locations
aaaaactttttgggaaaaagtgaaaaatttttcccttgcatcagaaacagactcaaatttttcaacacacaaaataaaatattcagactcaaattcttcacgacacaatataaaaatatacgcaagacttattttttaataaattacatcctttttagaaatgctacataaattttattgtaaatagttacaaacaaactttttttcactgccaatttctaccagttgccaaacaaaaaggcgatagttaagcattgagatataaaaaaatcgtctagaataattatctcaacaatttgtcgggaaagctgaataaatttctgttgcaataggcatattggcacaagacataaatgtagagcaggcacaaaatagaggaaataccaaagattaaaaaattcttgtttatgccccactctgctttggctggccatacctcgccagagagtggagatagaccctttgttgatacatttggaaatgtcgagcccgcctagcgcattcgaataacacaaaatttgtttgcatttgccaccaaacaatccgcttatgacgcgccgaatgaaaattcacaaaaatttggcaccggaaaaactgcattttttcatgggccagcataataaagtaaacccaaaatgtaaggaaatttaaattggtcatgagagatgtttagttttttatttgtcccatcctttttctgggaaaaaacttttcgagaaaagctgaaaaattttccacttgcatcagaagcagactcaaattcttcaacacacaatataaaaatattacgcaagaacttatttttacatcctttttagaaatgctacataaatttttattgtaaatagttacaaacaaactttttttcactgccaatttctaccagttgccaaacaaaaaggcgatagttaagcattgagatataaaaaaatcgtctagaataattatctcaacaatttgtcgggaaagctgaataaatttctgttgcaataggcatattggcacaagacataaatgtagagcaggcacaaaatagaggaaataccaaagattaaaaaattcttgtttatgccccactctgctttggctggccatacctcgccagagagtggagatagaccctttgttgatacatttggaaatgttgagcccgcatagcgcattcgaattacacaaaatttgtttgtatttgccaccaaacaatccgcttatgacgcgccgaatgaaaattcacaaaaatttggcaccggaaaaactgcattttttcatgggccagcataataaagtaaacccaaaatgtaaggaaatttanattggtcatgagagatgtttagttttttatttgtcccatcctttttctgngaaaaacttttcgagaaagctgaaaattttcacttgcatcagagcagactcaattcttca

SEQ ID NO: 19357 - DNA, 1131 bp, Heterodera glycines
aaaaaaaataattttgaaaatgaataaatttacaaaatatttcgctttttgttaaataaatttcaaataaaatatttgtgcattttttatggaaataaatttcatattttcgttccttaattttatattcataaatttaaactcattatctttcttaaaatgatggataatattctgtaaatattttagccttttataaaaataaataaatttattaattttctatttttctattttccttttccttcattcttttgttctttacacatgtaaacaaattcattcatatgaataaacaacgatttttctgaccttaaaaatattgatcataagtcgcagcatttgcatattataaaattctttcaatttttgtcccccttatccgaaaaaatagaccaattcattaaaattcaattttaataaacttataataattttcttgaaaatggttttgttattttcaagccatcaaaatggaaatctttgacgaatctattgttgttgacgaaaaagcgatcaatgaattcactgtccaaagcaatcacaactgctgctgttcatttcgtgatgtgacccaatttgctgcactgtaatttcactgtttaaattttatgtagctgggatttttagatgcttaaaatagtaaaataaatacataaataaatgcttaaaaagtgtcaaaattaatgattgggtccggcggcctgaaaccaaaattatgcagaaatttgcaagaaaattggagtaagttatgtaacaattcaaaaatggaagaaataggtaaataaaaaaataatttttaaaattaaaattcttgccacgaaaatacctttttgagaaaatttttttcatttcttaggagtgctttttgaaattttttttgtcgattcttaggggtgtattttttgaaaaaatttttaggtcgattcttaggggtgtattttttggttttattgcatttttgttaaagaattttccaaaaaatgtcgaaatagtgacaaaacgccaaaatagtgatttttaactattttagtgacgaagtcgccaaaatagtgatttctagtgaccgataatgacatcagaatcgaaaatttttaatgcagaaatgcgttttttgagctcctttcttca

SEQ ID NO: 19358 - DNA, 1426 bp, Heterodera glycines
  unsure (1)..(1426): unsure at all n locations
cagaggggggctctaaatcagggggggcttaccctcaaaaggggggctttatatcagagagtggctctaattcagggggggcttaccctcaaaaggggggctttatttcagaggggggctctaattcagggggggaaaatcccagcctaaagagcataatcagtcaaaatcattttttaaactgaatactcaattaagtcaatttatgattgtgaaaaccgactatagcaaaacattgaaaatcacggacattggcaatgcttacacgccaaatgaggagccattggcacaaattgtccattggcattgggacgaaaaaggggcacaacggatcgttgatgtaagaaatttaacgaaaattatcaaaattaaataaaatgattaacaaaaattattttaagacccatacactcaacaagggtagtgaacataattgcggcatctataccaatgcttcatcatttgttgtccgaattcacaaaaagcgggagaaaaagtccaatgaaacgtaaagtgttaaaattttatctaaatagttaaaaaatttcggttcgtattctatcgtttgtctctgtcgtctgaattgtcttgtccgatcacaattaacaaaacccttaggttttattcgatcgaaatgataaatcacaaataaatatgaaagtctgagatctgatttttgtgatattttggaactcttaattgtgatcgacgactgctagtcccgttcggagttgattattgctcctccgatcactaaatatttattccgttagtctcttctctgcaccttccaacatctcaactgatcacgacgaattgacagtgaaaattggcgacaaacaggtgaaacagcagaaagagagcacaatggagagtccaaaatttttttaaattctgataaataagaaatcttgatcaaatcgttaattaatcttgctgatcagatcgctgtgtccgcccattggctgtcgtccgtttccccggtgatcagtcgcatgctcagcgtggagatgaaggagaagcagcagcgaatgatcactttggacgagttgggcgtggacatggaccaattcatggagtttttggaggccatcacttatctgacaatgagcggaccttttctgcccaaccgtaattctatgctatcgtatttattctactatatcctctggaaaattaaatctaccctttttatgggttgaaaatatgatttttaattttttaaaatgaattcccaattttaagccaaaaatgtactgatgcttctcaaattggccgactacttccaggtgggtgccttgacacttatcaacaaatcctcatttgatgtctaaattttctcgctttagcctgtaaaattttgtgaacaaaaantgtcgaanttttttttagtttttgtaatttctaaaattttacaggcttatag

SEQ ID NO: 19359 - DNA, 2138 bp, Heterodera glycines
atttcagaatcgggtttctcgaccctgaaaacctctaatacaagtttattttcaaaaaaaattttttgaaaatctgtacacagataacccacaagtaccaaactttctccatttttaacactctcgaactgggaaactttctcgatttttaagacgttcgagttggaaaattttcgattttgagtcttagttttataatttgaaaaaacgaaaactttcaaccgtattaaatagattgatcattttcatctctgaatcaactaattttcccccgatcaaccgacatccaaaggtatcaacaaaatactgatcgaatcacattcatattcccaacaattttgtacattgataccaggggtgggacaactctcgcctctcgtctctcgcctctcgccaactctcgctatttttggtactctcgcctctcgtctctcgcctctcgttttttgcgacgagaggcgagagttgaaaatacacccctaaagattgaacttttgagcagccagaaaaattttcaaatttacgcgaaaaaaaaatcttaaatctctttctttccttccttaatgttttctctatttttggatagctccaattcaaatatggtctgctggctaacaaataagccttctgcctttcattatttttctcttgggttcaattccccaacggtatacagaatttttttaataatttctttaaactgcaaatttaaccaaaactttgatcatttgttgacaagttctgttaatatattacactcaaaattttagaattttttcggcggcgcccatcggcaccgcccgaccccaactgtccccgaagttttaaaaaacgcaccgcaaaaaaaggtggaaaaaatggacaaataataaagtttgtttctaaaataaatatatttcatgaaaatattttttaattttcatgaaaaaattttaaagatttttgtttggatttttcatgacttggactcggtttaaaaactaggactctgtcccggctttctgtacccggcaataccctgacccggtatttgcccaaatacccaggcccgtacccctaatttaatatacgattttgaagttttttaaattaaaaaataaggctacagaaaaaaattgaaaaactctcgcctctcgtcctctcgcctctcgccaactctcgtgtttttggggactctcacctctcgccaaactctcgctctcgtctttttggggactctcgcctctcgccaaactctcgctctcgtcttttctgagacaagtcacacccctgattgatacatataatagtcaatattattcccctatttcctcccgcccccctaagcagtttgtttgtttgacttttcccccatttatgaccaccaaccaccacaccctattaacgttcgccggccgatcatcgcctcccccccccccccccgggggggcgtctcccgcctcccgcgcatttatattcattcttctgcgtgatttaatgcgcattaaaagtgtcatcgcgccggcccatcgtcgtcgtcgtcgatcggttggctggggaagtgtcagtcattcattcattcagtcagtcaattagtggtgccgcccgtctctgttgccggcggggcaacaaacggtcggcggcggcgacgcggttgtgcgcgaaatttccgcgcgcgttgcctcccgccctccccgccccccgggggtgcccatttacccatttacgtccgcagtccgccgcaccatccaccaaaagtgtcacacaaatgcatgcacacaacacacacaaattcttcgttgtcgtcgttttgtctttgtcgtcatataaaactgtccgtcctcctcttcctcatcctccgttctgtccttcctcttcccccgtcgttcgttcattcattgactctgtccccgtccccgcaaattgctgaaccactttaacaataatcatcatcatcatcaaacagtctcagcaatcagtcgttttcggcgcttatctcatcaaattattatttgtgtgtcaaaaaatcaatttaataaaccactttttgaaatgccatcataaggcaattggactaattgtgctccatgcccgaattttaggaaatttcgtttccatttcttttcacttccgaaaatttttttgtcgtcacacctgca

SEQ ID NO: 19360 - DNA, 998 bp, Heterodera glycines
  unsure (1)..(998): unsure at all n locations
acgaaaaatgataaagaaatagattttntgggaatttttatgcaaaaagacacttgctttttccaattttttacacatattttggcatttttggggtttttagcacatatttcagcattttttagcaaatatttattacatatttcaggatttttagcacataaaaatcccatccctattgattataaatcagaagagctaggagccctgagcaaaggcggaattgaacgaattgaacttatttctcatttaaatataatattatttttaactaaaaattccagtttgaaaataaggaattgaaatgacaaattaaggaatctcatcctaaaaatgttggattgccattttaattacaaaaaataaaattggcggaaaaatgccaaaataattcgtttcattatttttcaattcattacggtaaagagcatttactgcaaaatgcgcaattatgggctttttaaattttaagaatttctttttgtgcttttttggggctgtactgcagtttattcgttcgttcaatcactgatcattagggatgtcaaaaatatgtacaaaaagtagtcataatatgtacataaatatgtaaaaaaaatccagaaatatgtataaaaatcataaaatatgtattaaaatctgcaaatatgtagaaaaaagttgtgcaaatttattaaaaatgttctctcagctgtttttgcaattgcaaatcaaaaatttctcaaggttttcgggtgtaaaaggcatccggttatctgccaaaacattcttataaattgagaatgatcgctccacttcgcaggattgaatcgaagcatatttaaactttgcaatcacatcgggtggcaaatgaatttgaagatttttgcccctcaagaccatgccgatttcctaaatttcttaaaaactattgttaaaaaccctttttttcaccccgcactgatcgaatccctgcgttttttagcaggacagcgccgaacttttcctgggcaattttt

SEQ ID NO: 19361 - DNA, 1320 bp, Heterodera glycines
  unsure (1)..(1320): unsure at all n locations
aatagtacatcgctgcactacgccaggtcccncatctcgtgatgatcgggcgagggggaagaggcaaaggccatggcacaaacatttcaaatggattaaattggggaaaaaattttgagacccttaacagaaccatttatgttagtaatttaaccaatttgggaacatttgccgccttgatcatgtaacgcgcaccgtccgttactagtaacaataaattttcggcgtaaatgaatgattggagattgtcaataacaaaacgcgcaattgtctcgttgtggtcctttcaagaaccttcaccgctattcacttgggtcgattcattttgccatccaaagtcccaataaccagatttgcaacataacgtccttgcttatctgtcgtttcatcaactgaggcccaaatttttttgccattaaaataatttttaagttcagccattttctgaaacttaagcatttcatggattctaattacacaaaacctgttcgtaacacagtctaagatggttgtgaaatgtaattcggctggggacggctcgcttacaatgttttccaacaaattctaaggaaaatacaaaatattaagaaacctcagtcctaaacctctgaaatctttgttttccaatttgtaaaacggaatattggcagaaataaaggcattgcacaactccattgtaaaggggtccggcttttttgcagtgtccatcaaaaatggttgtttttgtgcacttccgcttggtcgcgtggagagttcgacgttcgatttgtgtttggcagagtcattgtgttgttttagttgtgagaacatcttcaatggtacatgtaaatcattctcgttgtctagtcgtcgctgaagccgtgatgaaaaaggccgttttacaacctgttgtttgcacggctggcaatacacaattttgccatcagtcatgtacgttgttgctccattaatcctgttgatccagtcgcgtatccatgcagattttaatttaattttaggcatagcactttttcctaagaaatttttttgaaaattctcaaaatatgtaaaaaaaatttgccgaaattgtggattttttgatgatttccaaaaatttctgtaaaaaatcctaaatatgtaaaaaatgtatgaaaaaatccgaaaaagtccaaaatatgtaccaaatatgtataaaatcccaaaatatgtataaagccccgaaatatgtaaataaaagtcccaacttttgctcgcaaacacaaaaaagaaagtgtttttcctactaattagagcatggagaatccaggaaaaaaatgtatttacataaaattgacatcccta

SEQ ID NO: 19362 - DNA, 929 bp, Heterodera glycines
tttatttgaatatgccgccgccgcccgcacacactcacacaaacaaacattcccccgcccccggggggcgcactttgcggaccatcaccacatgacatccccgcaggcagcgcaagcaatgaaaatacccgatgccctgtgctgctgctgggcttcatcttccgctgctggcgctcgggcattgtgtgttctgtgtttgtcaagaccaacaaaacgcactctcggggggggggggggggcgcaagcgacgacggcagagaaaagaacacccccccctccggggttgaaaaatgtataagagagcaacatgggggagggtgctaagggggaccacgcgctgctcggctctgctgtgctgccggccatgccccctcccagcctggctcgtgtgtccgtccccgtgggtgccatgccatgcccacccactcgccgccatgttttacacgaaaatgctggtgcgggcgggggagggaggcagcagcgaggcagaagccgacaaaatatagcgtttttccccacgcccagcagcggggaggggcgtgtccccgctgccgccttccccgtgtgatgcttgcttatgcttctgctgatgctgggctgggcctaatcgacacaaacatcgccggtgcggcagcgcggtgcccccccacccgtctcccgccccgccccccgaatttgtgagtgaatgagtgagtgcgtctgtcgtcgtcgttgccttcatcatcatccccatcatcaccatcacattgtcgtgtggtcgcagtattatttgttcaccaaccaaaatgcccccgtctctcccgcccgccggcgccgattcagtggcgagtgtctcgctcacagtcctcacagtcgtccatccgccgccgccgtttactcgcctctcgccccgccgccgcccccggtcgtggttgttgtttgttttgtgc

SEQ ID NO: 19363 - DNA, 1994 bp, Heterodera glycines
  unsure (1)..(1994): unsure at all n locations
tagaatcgtgaaagaaatgattttttgcgataatcgagaccgaaataaaaaaaaagtgataaatccatgagtcaaataatacggggacacccggcacatgccaatttggcattttgggtggtcaaagaagggaatttcttgtggtctgtcgagtctcgagcatttggtcttcagaaaacaagcatttatcacagaaatattaaagtaaaattgagaaaaggcggtaaaagtcctggcatcgaccacaagaaccgggaaatgccgaactgccgtttgtgcccctccgttaggggacccgtcttttgggccccgccggggtcatttaggccacacctttttggaccaaaaccaaaaaatagaaaatatgagggactctttgaaaagcatcgcccatctatctctacctcaaaaagtgccgaaattttccacttttttttgctcatttctatgtgcctatttaacggagtccaaacggcggggcccaaattgccccgactcctttaaattgatgcttttcgtttgacttttttttcccgattaggcttttatttatggtattttgcactaccttcaccaatttttcagtttcccgtacaaatggagttaaaagttaaggtccaaattgtggagggaaggcaataaaaattgatgaaaatcatatcgaaagaatttataaattttcaactgattatctacataaaaaactactttaaattcaaaaaaaaaaatcggccgttttccaaaaataattctcagttttccattgaccctcctccgcctccgcccccaactctcaacacaaataacaacaacaaaacaacaacgatgcttaatcggtcgggggagggggcgggaaataggcgaaagatcaaacagagagagcgagagagagggagagagaagtggagaaaagatgagagagagaagaaaagaggagacagagaaatagtgaaaagaaagagaataatctttaccctctgccgttgccacccctcgggggacatgttgttgtttaatggattagcatcttcaacaacaacatcatcatctatcctcggaaaccgacaggttgactcgcttttccacttcttcctcttcctcttccccctcccttctactcttgcttcgattcctctcctcccttctcttctttctccttttcctcctcccttctcttcttttttctcttccctcttcctgctcctcccttttcctccttcttcctctcatctttctcctctccttcttcctccatcttccgctgtttgtgcttgttgttgttttgttgttttgttgttgtgtcttcgtcctcctcgtcaaacccttgtctgcgttgtttccgttctcctccgtccgttccattccttcctttccgaaacgttcgttccattcccttatctatgcatttattcaccccctctccccccccccatcagaggccgttcgtttctttcctcccccctcatttggttaggtgcccacggcggcgtcgaatcagcccaaccccataagcagaacaaacaaacaaacaaacaaataaccaacaagagaatgtggaagcggtggaataatgaaatttaaggggggggggggcaatgaaacggtgaaaattgagacgaattttttgaaaaatacgaaagacgaacaatcaacatttttgggcgtttcctggtgggccttgttgnccncgttgtttcgttttcctggctcgtttgttggtggtgtgtttgtgtccgntttccggtctcgttggcttttngtcgcttttttgnttcngttttttggttcgggntttggnnctcctgcnncttttttctgggatgtcggnttgcttggcgttcgctttggcnncnnttctccttttcccccctttnttttcgctctccnctttgttcggtttngttgggtaagaagcgngttctggctgntcntcnnnatnnnttggcctataaagaaaacatttacccagtgtaaattttgaattagcgcgcaaa

SEQ ID NO: 19364 - DNA, 2724 bp, Heterodera glycines
  unsure (1)..(2724): unsure at all n locations
ttcaaaaagtaaaatggttntatctagacnagcgaggaaaaataagatttattcgaactatgcatccataatgacttcnagcataattgtgcaaagtttntactaaaaacgtgcttttgatgtttttagcttaaattttgaaaaaagaaatatttaatggttcctatggtgcagataagcaccgtcggagaaattttgaacttttatgcgatttacacatattaattaaccaaataatgacaattgtttattttgatttaggattgaactcatgcaaaaactatagcagacttagccactaggctacatttacatattgtttctttacttaaagaaaaaattttttctttaaaattttcctttccccaatttccatgactattttttgcttaaatacctggcatttctaaaaacagtgaccaacacttgggaggaccgggaattcacagcttttttaaattcagttttttctttaattcaaattttttcgaatttaaaaaatccacaattccgcacgggatcccgaaaaaatggatattcgtaaaatttttaaaataagttggttcagcgaagaaattagcggtactttttggttctgccaaacccccaccccaattttttttaactctttaactccttttttaatttttaatcatggaaaatatactattatttggagacggagagatttatggagatgggcatataattagagaaaatacggtaattcaacattcttgcaatttaattaactacatattactcatttaaataaatgaaattatgtaatttactacgaacttttctaaacaaaatttctttcttcctcattattctgctgactgggtaatgtcgccaatttcgcggaaccaattggcccatgccgttgcggtgtcattttggtcgatgattttttgagcgttcatcggctcactgaattggccaaaagtgtatttattattcatagggaaagttacaaaaatattaattccaccattacatgctcagcttttgtgggatgcttttcatgaatttggcctggaaatagtcgacaaattgttggcacaattcgtccatttgcggtatttttttgaccactaattgcttcattgtttttcgcgttttcttgggaaattttccgccgtaattggccgctaattgcatgaacagttccgagccaaatgaatacatttcgacaaacatttgtaatgatttccatccctccgaaaagtcattcgtttccttctccgataattcgtccaaattgtcattctcccgtcgcttcttcagtgcttcttccactttaagttgggcaatttttgccaaataattgataaattggccataaaagtgattttcagtgagaaaatggaatttcccagtgctttcttttgccaatttgagtgcatttttccgcaaattctgtgccaactcttcaaaattttcacttgttattttgctgacaagcatttcatagggaaatgccagatcgtctaaagagatgttctttgggaatgagatttgttcattggccaaaatcagttcggtttggtgttcgaaaatgagttggacgagtgcgatacggtggtcaatggccaaagggttacggtgaataaattcggcaatttcattttcaacttcgcttatttgaggcaaaaaagcacaaattgaaaagcagaatgataaaagtaaaaatgaagaacagaaaaggggagaaaaaagtgccatttttgaaggaaaatgaaaattttatgggaagagaataaattttatgaaaatgatttttttaaattcatttgctcaatctttgcttataagtgttattgcaaggtggaattttgtttacattgctggcttttaagcttaaaaatgtgattaaggtgaattattcgtttgcatcatttttatttgtgggggtgccaatggtcagcagcaccatcaaaaatgtgccaaatttgtttttcttttataaaaaaaataaaatatttgtaaaaaaatattttcaatgaattagatgtaaggttgagcggatgagtgtatgtatttgggaaaatcaggtccgggtattgtcgggcccagaaaagtcgggtctgatgagtctaagcttttcaactgagttcggcagtgagcgcaacccgaacccggcaaatccgaattaatcagtagagcccggaattttgaaagtaccgggaccgggaccgggcttcgaagtccaaaattttgaccgggcgcccgtacgggaccgggcttttttcaaaatttttggaattttgattaaaaattcgaaaaaattttatagtcctttattttagcttagaaatgtcaagccattgtaaatcgaccttttttactcttcaaaagaattttaaggttcattttttcaaaaagattttgacgacattggggggggggcgacagggccgccgggtaaatttttgaaaatttgagtttgctttgctaacagatttacacgaaaaaatgacaaaactttgctattttgagctacattttagaaaaaaatttagctttttgtactaggcgacgctgaagaaaaactttgacttttaatgaaatttattaagaaaatttttggtttttcatgaaatttgaaatatttttttgtgtaaaaagaatgttatgaaaatgttgttcaatttcgtatggattttggggtctttttaacagttgaaattgcccanaaaatttcaaaaatccaaagttcta

SEQ ID NO: 19365 - DNA, 1149 bp, Heterodera glycines
gggcccccgggcccgtccgggctctattaatcagaaggttttctttaccttcaaatctcaaaaagagaagacactccttttttttgaattttggctatatgtttacgccaaagattgttttcagtttttgctttttcttctggctgcgtccttattttttatggagatttttcgataaattcaaatttgcggatccggatttggattggaattcaaacttttttaatcggaccgaatttgcttgattaatcccgcaaatcctacactttccaaaaatgcggtttctagtactatttatgcgcgatttctattcttttaggtagttacctcggtatttgcttgttggatttttgtcgatgcccgtttttgctgaagagtcggcctggtttcggcatgagccgatgccgtggtggggtcggctgctgttgcccattgtcaaagtgctttttcatttttatgacattataaagaatccataaatcctttcttcccctccccacgccatttcagctcgggccgatgccgcgacacattgcaattgtaatggacggaaatcggcgttttgctcgcacccaaaactgcgcaactccgatggaaggacattcggccggatttgtgcagctgacaaaggttttttttactgtttttatttatttggttaattgactgaatgaactatttccttaacgcgaaaattaaggcgttaatttgttttacggtactaaattttgtttttttcacattcaatacaaatcgcataaaaattaagattttggctctaaaaagatgagtgcttttttgaatcaaacaggacacttgactgcctaaaatctaactccaaaatcgcaaattcctaatttttttttggcattttgctctattattcctcgaaatttccttttccgatttctttcatttctcattttgtttttttcaggttttggattggtgcaatgaattgggcgttgaggaggtgggaatttctattctccaatttatggaaacgaattgaaagattcccctttcaggtgaccgtttacgctttttcaattgaaaacttcaaaaggtgagcatttttatttatttttttgggggggtcaaaaattgatgaaaacgaaaatcccgtccacgaaattacaatacttcaca

SEQ ID NO: 19366 - DNA, 1379 bp, Heterodera glycines
  unsure (1)..(1379): unsure at all n locations
attaaatatcaaatttacgggttatgtaaatctaataatattttttcatttaagcattttattataggatttatttttattatgaaattccctaaatttcttttttagttcaaattttaaaatattttttcttttaaaaaggctttccatttttgcggttttaactaaaatatacgttagaagcattgttagcctaaaaaaaattaactgtttttcataaggcttatgtttttaataaataataaattgttttcgttttagatttttgtaaattttaagaaatatttttgaaatagaatagaagtatcttttttatattgatcagggaacattaattctaattaataatataaaaattcgttttaaattattctccataaatttgattactaatttgttatctgtcattattgaatcggcagaatcgttattcaatcaaagaaatatcagataaaaatgaatatcaaaactgaagcaattaaattctataatcaacgctatttttaacatcaaaataaataatgaattaattttttaattacatttttattgtttttaaatctgtgacttatgaattgtattttgttattttatttaaaatttatttttaaaaatttctcattttattttccatgtactgatgattagatgtttttctgatttctgtcgctgcttaaattatatttttttaaacgaactttttgtatatttaaataatatttattaaaaattacaaattgttctaatatagtaaatagttttataatttaatattttttaaatgcaggaattttatctgaataattacgggaaattttttttattacaaaatatgtgttggaatcaatgttagcataagaattttaaaaaaactgtttttcataaggcttctgtttttaataaataataaattgttttcgtttttttgtaaattttttaaaaattatattttgaaatcgatgaacaaatatttttgtattggtcagagaaggacgacaaataaaatataaaaattcattttttaaatcattattcattcttacataaatttttttcgaataaatttgttgcattgggttatgaaatttaaattatgattaaaataatatacatagctgtttaatattttctcctctcctttaaccgtttcccttttgaaataaataccatattttgataatctttctccatttattttgaatgatgagaataattcacatttaaaaattaaaaatgtcgttgctttacgaattactaattanataataatttanataattacaattaaatttccctannaatcgtntattacagtttttaaatgtaaataaatcattcattttttcatttctttttatataattggcgactgcataaat

SEQ ID NO: 19367 - DNA, 2273 bp, Heterodera glycines
tttaccacaaagtgttggttggaatcactgttagcctttcataaataataaattgttttcgtttttctttttgtaaattttttaaaaattatattttgaaatcgatgaacaaatatttttgtattggtcagagaaggacgacaaataaaatataaaaattcattttttaaatcattattcattcttacataaatttttttcgaataaatttgttgcattgggttatgaaatttaaattatgattaaaataatatagcggtttaatattttctcctctcctttaaccgtttcccttttgaaataaataccatattttgataatctttctccatttattttgaatgatgagaataattcacatttaaaaattaaaaatgtcgttgctttacgaattactaattaaataataatttaaataattacaattaaatttccctaaaattcgtttattacagtttttaatgttaataaattcattcatttttcaattcttttttatataattggcgactgcataaattctttttctttgttttatcttgattttatccaacgtatgctttgaataaattttgatgcatattttatgaattttaaatttgattaataatatttctgctgtttaatattttctcctcttctttaaccgtttcctttttctttcaaatattacaatattaattaatatgcgaatagctaattaaataatttaaggattaaattttgaatttgaatttttcctcaaattatgtaggtgaaacggcatactgtacttggaactgatagagtacgattttgcaaattatagttttaaataaaatgatttatgtacttttttaattttattacattttaccataataattagggtcgcaacttttagtgacgaaaaatctcgaaatattaactaaaatagagagtaaaatgacaaaatagtgataaaagaccgaatttagtgacgaatagtgacataattttcagtcaaaaattaagcaaaaataatttttattcactggttgcagttgcaaatgtggtagaaatatttccttagcaaatattgaacatttttaaatcaaaaatttgtcaagaaagaaattgggggaaaagtttttaagaaattttccaattcttagtggtattttttaaaattttttaggtcgattcttaggggtgtatattttggttttttgcatttttgttaaggaattttacaaaaaatgtcgaaatagtgaaaaaatgtgacaaacaccaaaatagaaaagtttaactattttagtgaagaaacgtcgcgacctaataataataaataaatgaggtcaagaaatttgtttgtttttttatatttcgctgttattttattcttctcttcagctgaaatttaacttaaattgtgatacctttaaaatattaattgaaattcaaaattttcttaattatataattatggattaaaaatgtaatgaaaagcatttggggaaaagtgagggaaaatggaaaaaataaataaaattccattattttaaaggaaaaataaatgacaaaaaaaaaagaattttgacgacgaattaattgggaaaaattcaaaataacaatgagtggatgaatgaatgaataaatgaattgggtggtgtcagtccgtccccccccccccccaatttaatcactccgaatttaaatttatgcagcggcagaaaatgctgctgcaaaatgttttcaaaattcaacggagcttttaatcataaataaattgactccaattttgcgctcattttgttcgtaaattgactagacaggaaaattcaaattagcgggttcgatttcgagattggggcccaatttattgccgggtgggtttgccggattaatcccagaatttcccaaattaccaatcaagttgggacagcaggtcatttaaaaatgaactggaaggactaacggaaaaagggaaataaaatcgaacgaaccgataaaagacagaatttaacaaaaacggtttttggatgacgagctaatttggaaaacaaaattgaaggaactgtcaaaattgagtgaatgaatgaatgcgttgggtggtgtcagtccgtcaccccccccccccgccgcccctcccaccgttttttggtctctccgaatttaaatttatgcagcggcagaaaatgctgctgcaaaatgtgcatttgaatgttcaaaattaaatgaactttttaattagaagttatttgtcaccttttgactaggtcgagaaatccaatttgcgggttcgatttcggaat

SEQ ID NO: 19368 - DNA, 2466 bp, Heterodera glycines
tcgataaggttcaaaaaagctatgatcggaagaattcaaaaaagcaaattttccaatctttttgcccctaaatttgttcaaaattgatgacattttttgaaattatgcaagataatagagcatctgaagggctctcgaatgataccaacaatgttagatttggttgacaaagaaaaaagttatagtccaaaaactgggctggcgccgaaacgagcggcgccggaacgaggtggacccctctttttaagtagcgccgagaggaaaatcaagcccgttcattgcatttaaatgtttaaaaaaaaccaatattcgtctttctttaaatgggcacacaaattcaaaagcccaaatgtacgttgacaatttcgccttcgtttgtgcaacacatcaccgaacgttccatttgctctttgctgaactggggaactgaaaacttcccaattttttccgaatttgtcataattgttccaatcaaaacaattaagcgcatttctgccattttccgctcacttttcgcctcctccgcgtcctcctgcggttccgtgttcacttcttctttggcctccactttgatttccacccctcccacggcttctccattcatcacattttcattttcattgtttgacattttgaaggaattcgaacaaaacggtgaagaatagacggacggcaaaataaatttacaaatttaaaagtcagaaatggagaaaacagagctagagaaaaaaaagattatttgaatgcagccatttttattttactgtttgtcttgggtccaaactagggtaggtcgcagggctggaggcgaccgcgattcgcggcgtttttttttgcgcgatccgcggccgcggcaatttgaatgcgcggtgcgcggccgcggttttttttttttgcgcggtgcgccgcgcattttttggttgtaaaatttctataaagaaaaatttttgaaacgatgtcttttttgaatattcaaaatttaaatgaaattttttttgaaaacttgtattattttctcaaaaattcgttttaaaattccaatttttcccgtcagagctgagaaaaccttaatttttctttaaaaaaattggctctaaatcacaaaataggtcatttttttacaaaactttaaccaaattgcactaaaattttcaaaatttttccctgcggcgcctatcggcaccgctggatccacccccccccctatcagttcacaaaagtttagaaaaagcgcgccgaaaaaagcttctgaaaaacaaaaaatcataggatttcatgactggaattccttcgcaaatttgaacactgactcacctcctcccccattcagtcccttcgggattttaattacttttttatataagaaaatttaaaaaaaaagttaaaaaacggtttaaaaattagaaaattttgagttttaaatgcgcgatccgcgatccgcggcaatttaatgcgcggtgcgcggttttttttttgcgcgatgcgcggccgcggcaatttgaatgtgcggccgcggttttttttttgtgcgcgccccacccctggagggggcggtgccgaaatctaacgaaaaattgtctatttcaatcttgaaaatctttaattgtttaatcttttcgcctttacgaagtcgcctgcctctctcttgccctttcgtctctaatctttcccatttaatgtatgagatgagtcagtccaatgctgtggaacataatttttaaatttcatagggaaattaatcgacgagaaatgttttaacgcttcaactttttaaatttttgcaaattcacaaaaaataaatgttacactgttggaatggttttatgttttttaactgaacattctgctgaagtttgttctcttaatacgggcaatgtaaatggccaattctatgcctttagctgtctctgcttttgtccttcctctattcattttttatgcttttacgctttcggtatgcctatcttttttctttctctctttctctgtctcctctctcctccttttacctgttcttttccctttctttcccattttctctctctttctctctctctgtctcctcccctcactttgtccctttctccttctcctctctctctcgctcccacacactctctctctctcttttatacgtttccctctcaacgaaaaataagccacaggcatttgccaccactctcttgttcttcatgctttttctgctgttgttccattcgtttttcctcttaagacatttttactaaccagaaagattttactaataatttcgtctgaaattaaatgtttttgtctttacgatcttttttattttttgctttttatttcgcttgtccaaagtgctgcttctcctttgtccccagtcgatggaatggacgggcgaaaagcggcaaaaggccaattcattgacaattcatttacctaattatcataatattcgcatttattagcgaacaaatagtaaaa

SEQ ID NO: 19369 - DNA, 1620 bp, Heterodera glycines
  unsure (1)..(1620): unsure at all n locations
cacttaattacatcgatcagtttgcttctgatcacttttaattgccatgccccccnncgcttcagttgcacacctcggcgggatttttcgcgtgcgaattggccgcggtccgttccgcttcgcagttccggcaacagctcgagacgcattcgctgcttccgcccgcgccttcttcgctgcaactgatcacagatgcatcatcttcaccatcatcttccttatcttttgcctccgccaccgtaccatcgtcctcctcgttggttatcgtaccaccgctagcaacgggcggaggcgcgcggccatcgaatacggtatccggagagaatgtgcgcaaggaaatcaaacacaaattgcaactgcgcgcattcaaaatgcgatgcttttcatccgcgtctttgtccgcgtcgtcgccgtgccgccaatctgtcgaaattgttggcaaaatgtcaccgccattcgtgccggcttttaagtgccaaatgatgccacaacagcagcagcagccaaaacagaaaggaacagaacgaagtgaagacaaacaaaaacagcaaaattgggaggagaagaagcagcaaaatggtgagggtgagaagaacgaggaggaagaagccgaggccgaggagcagttcatttgccaaatttgcaacaaggacttccgcaggccggacattctgtccaggtgagatttgtcggcagcgcttggcccttccatgggttttggacaaatccttctgctgttaagctgaactgatcaaaaaagttgccagtttcccgaagtttgccgatcatgcaaacaaaactgaaccttttcgaatgatcagttcccatttcatttaataatcattttgatcgggtttccatttttgtctgatcaatgatcagaataaaataacttttgacctttggtcactgtttcgttccgcttgctttcctcccattagccttaactttgctctctctcccccctaaggcatgttcggcgtcacacgggcgagaagccgttcggctgcgattggtgcggccgcttcttctcccgctcggaccatctgcgcacgcatcagcgaacgcacaccaacgaaaagccgtaccaatgcacggagtgccattactccgcggtaaaagcgcgagcgcatttttcacagtgccataatgttttttcagcgtcgtcgcgacgtactgacgcggcacatgggcacgcggcacgagcagaagacgaaccgcgcaatgttcacgcgtaaacgacgccgaacaattgtcactgtcatgcaccagcatcagcaaaagcaaattaaaaaatcaaatgccatcggcgggggacggaatgacaggaaagggtacggtgtgttaacggaatacgatacggtattttgaaggggattcttgtagtttattgttttgtaagtgaaacttatcggcatgtatacgaagtccggattttttgaccagtatttgcaacactcaactcatttgtgccacttgtagccaatgttcctcctcctccgttttcgcgacggccgcagcaatggcacagtgccgcgacgacggcgtcgaggatcgaatgcgtcgcctgctgcgcgcgaatgtgctgagacgcaagtcgcgcacctccgcggaggaggg

SEQ ID NO: 19370 - DNA, 1272 bp, Heterodera glycines
tcacaaatgttggagagaacccgcgggcagaaaatgcacaaaatttaaatggattcacccaggtctttacctgaacaggttgacgcgcacattctcccgcaaattcgccggtccgcccgcttcccacacgtcgcgcgtttctccgtctggcaaatcgtcgtgccataattcattttctttgaaatgccatttccccgtctcacctgccccatggacaaataccagatggctagcccccagggcaacaatttcctcctccaccgcttcgtccgtgtccaggccaggccgacagttggccacggccagttgcgcgccggggacgagcgcacggagctgagccaattgcgcactttgaatggcagagggcgtgccgaagagcaacagacgagcgtacggagcacaagggatcagctgattgggcaggataatactgtagtccaggcaaatgaattcaaatacagtatctatgcgtcttgttttacttatactaccgtaactcctccacaattatttaatactgtgcctgcccataaaccttcattaatgcacatacttccattgttagactatctctcctaaattttcttctatgtcgcttacatattgctaaactacggtattccacctgtttgctaccgtactcctcctcctccttttctacggcctctccgtcacaatgtccgctcattttaaacggatggattggcgccttttcgccctctttcttcgctttttccatcacaaattctgccgctttgtcccttttatgcgcactgtccaagcgttcttcgatcagtataatttgcatgttcagacgataactgttaaagaaagatactgtaattaattaattattttttcacaaatgccaatacttcgataaaaagggggcggaatgccacagcgaccatttgaatggcaaaaagttttgaggcattttggatcattagagggcaatttacaaaaaaaaatcccctctctaattttgtatccgcacctgacagcgaacgcgtgcaaaagcgcacaaacggaagaaaaccgcgcggacgcttcgctggcgcattggacgaccgcgcgcggctgcggatgtccttcggcgaacgaatcgcactgaaaattaaacaaataatttacaatcaaagcgtgggatgttagcattggatgtttcattgatcagccgggaatgtgttggtccgaagataatgatttggaccaaatttaacttaaatgccccaagagattacggctaaatgagtcaaaaaacactaaaca

SEQ ID NO: 19371 - DNA, 2827 bp, Heterodera glycines
  unsure (1)..(2827): unsure at all n locations
aaaatagcaagtcaattggtgtatttttaaatgcgcaaatgtctgacctcagcatcactttgtcagcgtaaaccacccactcgccgccatcttcctttcttnttctgctgcactcttcctgcagcacacgacgggcctgnnagttcctcttggctgagtgaagggcgaattttgatgttgctcatccccagtttttgactgatttgagcgcgcagtttgttccattgtgccaaggtttgtctctgatgttttgagcagccgaaaattactttcatcaaccgcgggcggttttgacctgtccttgcttggtccggggaacccattctgtaaacagtgatcgggctctcgatgccaagctcatcgagaacgcctgagatggccgttcggtccgcagcgactcgctcggatggcttttgtttctgcgattcgggtagacccattacgacaacgcttcgccgccgctcatgatcttgcacagcttcgtccgcaatttgccgctgtttgagagtgaaaagttcactctgttggctttggacctgttgtagaagcgtcaagcagatttggaacaattggcgtgaaatagaacagtcggtgttgttgccgtcatcttcgttttcgtccataagcctaccaatgttagctagcttttctcccaagatgttgtatgagttgtcaatggcgagtctttttgtgttgtctgtggggggagagaggtgggaggaagaacgcttttcggtctgaggcatcgattggaaattaaggcgaatggaaattaaggcgaattatatgtatattgaggtgaccaagtttttttttcaaattcaggataaagaacactaaaattcagatgtagacctcaaaattcagattattgcaaaacaagggatcagcggccaattttccaattttgcgaaggggtctccggccatgtaaattaatgtaaatcaatgaccttttttgctttcaacaccgcttttttcgcggcacgtttttctcaagactttaaatattgagtcatttacctgaataaaatttaaaaaatgaaccttaaatagcgaaaagaaaaaattaaaaaaccccgaccccgaaccccgacacttccaaccccgaaccccgaattttcaaaccccgacgtcggggacgcaaccctagaagaaatgcaccaaaaattgaaatataaataactaaatttcgaaaggaatttgaactaaaatgaaaaatatatgcgaaaatcccaagaaaaatgccaaggaagcaaaagagaaataaattatgaaataactaattagagaataatatgaaaatagctaattgaaaatctgaattaaaaataaaaattcagtccgccgagagtgccacatcatattcaatgattgaggacatcggcattgccactgtcacattgggaccatgggacaaaaacattttggaaatgttttgcacgagcatttatttaacaaattaattttcgacacgcaaaaaggtcaatttcaaaagctataaatttttaataccgatctaatcaattttaaaaattagactatgtgttcaattaaaatttgtaattttttgaaaaaaaggcttagaggcctggatcccgcttcccaagtttatctgatcaggctttgctttcgccccttcccggctgaagtcgacagtcgcgaaactctcggcaatgctctagcacagttttgaatagtcaattgttctttggtcttctccgtctcattgttgtgcggcggaagtgattgtgatgatcaaatggcagagaaatggagaaaataaaacaaattcataaaatttagaaaattattattttttcaatgaaagttctccaaaatccctattaaggtgtaatctgctaataaattttcaaattttttttgccgcattgttttcacaaattcttttgaggaggagggcctgcggtgcctgccgttagtcgccaaacaagaaaaatttaaaaaatagagtgcaatttggtaacataaaattatccatataatttagcaaattttgcaattttgattcaatgttttaataaatttaggaccatttttctgattggactggagggggtatttttgggaagaatttcaaaaaagaaaattttttattggcttcactaaggctggcatttgtttcgacaccttcggatttttagcttaataaattatttcattattattttaataaataataaattcaataaagtaaaattcaaacaaaccttcagcatacaatcggaataaatattcatataaaatgtccaaatattttcgatatttttggcacttttcttttaattccctcccaattttttcacattgccaattctttctcatcaaatacacaaggccaagttggggttcatattcttgcgtcaaatactttttcattttctcaattacgattaatttaaaagcgctaaggtgccaattattatacccacaaacacatctgacctcattaactcgacgtaaataatttgaatattcttttgtcctcttaaaaaatttctcaaaatttgtcgcttttcctttaataaattcagaaaataaggcatcttcagtctaaaagatgaatttatataattttcattgaatgtaaattctcacccaatttatttcatcatcgaatttcacaattattttatatttgtcatcatttatttcattggcactccaaggaccgtattcttttgccctttcttccgcttttttgaacattttctctaactttttgacaaatttttctccccanatttctcganattattccctctaaaggaacatttgtttgccattcattcgctgtgtcaattgcc

SEQ ID NO: 19372 - DNA, 2277 bp, Heterodera glycines
cccgtggtggtcaccgacgttgaggctggcgccttcaaagcaatgctcaaattcatttacacggacgaattaggcgagatgaacggagacacttttttcgaagtgctttttgcgggtaaataattaaaattattttatttatttatttttaatttttaaaatctaataaaaatattcgaaaatttagccaaaaaatacaatgtcacggcattggtcaaaaagtgcacagaatatcctatggaaaagctgagcaatgtttttgaaacactgctcagtgcccgtttctttgaagaacacgtaaatttaaaacatttaaaatttctttttaaattaataatttttattatttttttttttgaattttgggaattcgcttcgcactgtttgcattacattgaccaaaatgcggaaactttgttccaatcggatgtctttttgcaaattgaccaaaaattgttatgcgaaattttggggcgcgatgaattggtggccgctgaatggattggcatttggaaagccgtaaaaattgaaaataatttaattattaaaaattatatatttaaattaaattgaaaattatattttttaaattgtttatttccgcctgtcaggcacttcgttgggccgatgggcagtgccgtcggaaaggcatcgattgttcggcagagaatcgccgtcaaatgcttggcccggcacttttccaaattcgttttccgctcatttcaaaagagcaattcgcagcggacattggtcagctgctttatgtcaagataaagctattttcttcgtcccctgggattggacaatcttgctgtatccgcagcattcaaactttcatattttgtgcataatgtacattgccctactttctcccgacccaaacccgtcataaagggtcggggtcacttcggcgcggaccatttcggcgccgcaaattttgaaatgctataacttttttatttgtcagttagctttagccaatctagcatcatttgaaagctctatgtgtgctctatatttacatgtaaaaatagaaatgaatgattcaaaaataaaaaagttatgccacgtggcgccgaaaaagccggcgccgaagtgggcggttcccgtcataaacttgtccctctgttcgtcccatcccaagccaatcctatccctctcatttccaatgttatcgtgccatttctacccatttaccacctctgttcaatatgccatccatttctcttattcccttttgtgttttccgtcattacccctcatgctatccaaagtccatccccattgtgccagtatataagtccactcaatttcccccctcgggggctgcgagatgtctgcggtgggtcagtctgtgctgttccttgcctttggcaatcctttcccaaataaccaattgcactgacccacccaaaatgctctgaggttgttgttgacctaaacatattcccggtttcaattcataattatttgttaatgcttttccctataataaattcctctctcctaaaacgggaatttgaaatggcttaacgccttacacccggggacacaacaaatctgtttccgaatcttttccccactttgttttgtacagttccctccggcgtgctgaccattgacgaaatgttccgtgtgcttctgcaccattgcaacacagcggcggcggacagtgtcgtgccgcacaagcacaagcagtacccggtccatttcagtgccaaaccacgggccaactggccaccaacaacaacaacagagggcctattaataggacaacaattgttggcacaaccgcgacaacaacaatcggttggcaatggcattttgtcgtcaatccgtcgccagtgcaacagagtgacggtgagtcgaacagtcggaaaatttatcaagttagtgagtggattgattccgaatgaaaactcgagcatcaatttacaaatatgcacacacattgttcattttctctatcaattaaatttaccgtgattcgaattcgaatattttgaggaggtgatccagcagggttttttcttaaaaaagtactcataatacctaatgagtcggtctctctatgcttttacattggattcaatcagtttaataacttttttcatttgttttccctttaatactaattaattgcctttaggtcgccgcaaagaaagtgtcacggggatttctctgcttcatattttttgtttgtttcattcccccattctttgctttgttgttcgctgttctatttgctggagctcctctttggtctggtgagaaaaa

SEQ ID NO: 19373 - DNA, 942 bp, Heterodera glycines
aaatttcaaacccacggaaattggaatttgttttttattcgctgatgtacaaaaaaagttagacccaattatattccccaagaccgctccgataaaggacagtggaatgcctaaaactatttttcggcaagacacaaaaattcaaaaccactgaaattggaatttgttttttattcgctgatgtacaaaaaaagttagacccaattatactgcacaaagaccgctccgataaaggacagtggaatgcctaaaactatttttcgcaagacacaaaaattcaaaaccactgaaattggaatttgttttttattcgctgatgtacaaaaaaagttagacccaattatactgcacaaagaccgctccgataaaggacagtggaatgcctaaaactatttttcgcaagacacaaaaattcaaaaccactgaaattggaatttgttttttattcgctgatgtacaaaaaaagttagacccaattatactgcacaagaccgctccgataaaggacagtggaatgcctaaaactatttttcggcaagacacaaaaattcaaaaccactgaaatttgaatttgttttttattcgctgatttacaaaaaaggttagacccaattataatgcacaaataccactccgataaaggacagtggaatgcctaaaactatttttcggcaagacacaaaaattcaaaaccactgaaattggaatttgttttttattcgctgatgtacaaaaaaagttagacccaattatactgcacaagaccgctccgataaaggacaggggaatgcctaaaactatttttcggcaagacacaaaaattcaaaacccctgaaattggaatttgttttttattccctgatgtacaaaaaaagttagacccaattatactgcccaaaaccgctcccataaagaacaggggaatgcccaaaactatttttc

SEQ ID NO: 19374 - DNA, 916 bp, Heterodera glycines
tttttcggcaagacacaaaaattcaaaaccactgaattggaatttgtttttaattcgctgatgtacaaaaaaagttagacccattatacggcacaaagaccgctccgataaaggacagtggaatgcctaaaactattttttggcaagacacaaaaattcaaaaccactgaaattggaatttgttttttattcgctgatgtacaaaaaaagttagacccaattatactgcacaaagaccgctccgataaaggacagtggaatgcctaaaactatttttcaggcaagacacaaaaattcaaaaccactgatattggaatttgttttttattcgctgatgtacaaaaaaagttagacccaattatactgcacaaagaccgctccgataaaggacagtggaatgcctaaaactatttttcggcaagacacaaaaattcaaaaccactgaaattggaatttgttttttattcgctgatgtacaaaaaaagttagactcaattatactgcacaaagaccgctccgataaaggacagtggaatgcctaaaactatttttcaggcaagacacaaaaattcaaaaccactgaaattggaatttgttttttattcgctgatgtacaaaaaaagttagacccaattatactgcacaaaccgctccgataaaggacagtggaatgcctaaaactatttttcggcaagacacaaaaattcaaaaccactgaattggaatttgttttttattcgctgatgtacaaaaaaagttagaccaattatactgcacaaagaccgctccgataaaggacagtggaatgcctaaaactatttttcggcaagacacaaaaattcaaaaccactgaattggaatttgttttttattccctgatggaacaaaaaaagttaaacccaattattctgcccaa

SEQ ID NO: 19375 - DNA, 2120 bp, Heterodera glycines
aaaaaattgtaaaaggaaacatttattattcacaattgaacactttcacgatgccattatatatcatttttaatgaaaaaagattttatattggtttttgtttgttttgggaacatcaatattatgagatctcatcagtctcgggtctagaaaatttcaggttccaattttggggattaagtgttgctcggtctttttcctcctggcaaagactcgggctcagcaggccttgaagttaaagtgctctgctatctttggggtttagggttttcgccgtttttgagtcctataaaattctcgatccgggaatgtttccgtaagttagagttctttgttgtcttgggtttaagaaaattttcagtcttgggtttggggctcaaggtttttgagtccctgaaaatttcgacccagagaaattcttggacttgagaaatgacggcactatgaattatgcgcttggacagcagcagaagcagttgatcggttcgtggaaaaagtgatcattgtgaacagttggagcagtgcttccaatgtcaccagcacaaattcgatgccggccccaatttgttcaacaaaagcaacgtacgtttggagcagtgccaaataagcacaaatggccgcctgtgaaaacggattaaatttagggctagacggggttcatgatttttgaaaaaaggctcggataacccatatttggaaacttgtaaatccaaacggactttcagttcgaggcgacatttttttttttttgaaaaatcggcaattagcggactgacttttttaatcgtaatcaagtgttaacaaagtttgatttagaaaaaataacaaatttttttttgccaaccgcggcaatgccaagcagaagagagaagaagagttctgacgatgtttcagtcaaatttccagcgcgagcttaaacaattttctttttaaaatgctagtttttcgataatttttcaaaaattgggctaagaatttagaaaattgaattcacgacaaattcctaggttttagaaattttgaaaaattttattccaggttgattatggattttatttaaccattaatggggtaaggaaaattgaacacaaaaataaacataaaaaaatgatcacaatcactccaaatttaatagagatactccccggtacaggactaacttaccctgaaaatattccaacgcttatttgtttttaaatacttttcgaattttcggtttttccattttttaaaatttttttgaaaatttcagtcgccaaattattccgctcccctccaataaaacaacccgaagaaattcggaatgcctcaatcgggccaaacaagatgacaatgaacgcttcactgagcagcacatggagcgggtagggtagcgaaaaaactgtaaatttttggaaatttccaaatttttttttgaaaattctaacttttataaatgaacaatgcatatgtaagcaaacaaaaaagaatggagaattttgagttgacacgaagcaacaattcaagcggaacggatgaaagctaaaaaaaattaattaaaaaaataaaattttcaaaatttctcacaattttgtcagattggacgaccattgctgtcgcaaaaaattaaattattggattcaaacaatttaaaatttcatttaaaatttgggattctttgaagagagaaggatgtccgattttttttatttaaaatattaaatttcgaaatttaaatgaattaaaattatttaaaaattatatttttggtgggctaatttaagagtggattggagattcacaagttcaataaacatttgagaatgtttgaattttattttgttaccatagcaacaaaattgaaaattttgcttctgcccagaaataatggattattaaaaaataaaaatttttattattactgaaaaataaaattccgtatttcctcaaatagagggctccctgaaaatgcgacactggcaaatacgacatcagcggaaaatccgacactgagagaaagtttttcatttcaagaaaatgcgacactaagaaaatacgacaccaaacttagatttttaaaaatataaatcttatattgttgtgaattttcattctgcaaaactagcatcagtaccaaaaaa

SEQ ID NO: 19376 - DNA, 739 bp, Heterodera glycines
  unsure (1)..(739): unsure at all n locations
ttttttggtactgatgctaattttgcagacttaaaattcaaaaaaatataaaatttatatttttaaaaatctaagtttggtgtcgtattttcttagtgtcgcattttcttgaaatgaaaaactttctctcagtgtcggattttccgccggtgttcccctttcccgnctccaaatagagcccccaggggttctattatcccccccccccgaggcaataattttttttcggggggggggggggggggcttgtattttaggaatacggtaattaaaactgatggatgacattttgaaaaatatttctctctttttattttaaacaaacacattgttgcgcgaaaattaagaacaatttgtaagggcacatgaaatgctttcttccgcaatgcctgcacaaccgctaaaatttaacaagcaaatgaaataaataaattttaggtaataaataaaaacaatataaggattaaatttcttggtttttaaaatcgaacaaaaattcggcaatttatgaagtagagaaaagttagagacgagaattccggacccagaatgggaccgggactcgagaaatgtctcttcggagcggattaacctttagggatcccgatccgggtgcatttttcaagatacgaactcggtttccaatccgggatcacaagaaatccggaccggaacccgattccgaccggtatctaaagacattctcactctcgagattgatcactccttcctgattaat

SEQ ID NO: 19377 - DNA, 1930 bp, Heterodera glycines
  unsure (1)..(1930): unsure at all n locations
gttggttatctaaccaaaacgatagttggttgactgaccgtcgtgacaaaaattgttgcggcgtttgttgtgccgcggcatttatcgtcacggacgacgtcgtcggtgcaggcaaacggggtgacagtagtgcgttcagctgacgaacttggcgcaaccaaacggccaaattgtcggcaaatgaagcggcgcggacggtgggcaaagactcggaacggtaaacggacaatttctgcaagaaaatgagggagtaaagttacacagtccaatttcgtttcggcacagaactgtttctcgctcggcggtcgcttcgcgcgatgccgccactgccgccaaaaatgcatttgtcgcagctgttgctccgcccgtgccgggcgcgtctcgcatgcgtttaagcaacaattgttgctgctgctgtttgtcagtagcgagtggcggtgccaaaactgacgaagcagcattcattgtccgcattgcttcaccatcgctttgcgctgtcattggcacggcatttgtcgccgtctgaagcggtggtggtggcaacaaatggtcaaagcggaagcgacttgtggtcgtggtcggcgcactgacaactgcgccgccggagagaggcggcacagaggagggcgttgtggtggtggaagcgaacgcggagtcggcaatttgcagcggggaaagccccgggggcgatagggacgcggccgagctggaagatggcggcaacggcagcgtactgccggggaagcaggacgaagacgcgggggtggtgaccatgccaaagggactgaacgctgtgccactgaacggcggtgacaacggaaaaggcccggcagaaggcggaaggcccgagtcggaggaggaggaggacaatctgaagcaggacgggacgggaccatcaacaaattgaaacagttcaaaaaggaaaaagcacagatggaagtgaaacacccgatcattcccacgtttgccgtgccttttagagcttctgtggaattggagcactgtcggaggatagggttttaccatgagttcgaccgtgaatgggagtcccacaatattgggagagatgaaaccttcaatctcatcccgtcctaagtggtgggtgatctgctgaccgggaagcgcattggcaccgattggccattctccaatcatttacaaaaaatcccctgaccattccttgtatggtattacagtatttcaatgattttttccaaccgttcatggcgtgttgttcgccgtgtcggccattgttgctgctgctcattcaactgctgctgctggtgatggaaccgggcaagaatgagcctggccgcggcattccctgcggacgctgagacggcacgaaaagcgtgcgcggagtgcgatggggagcaggacgaacggtgatgggcatcagcgataatgggacccaaagtgtaaggatgatggccctgagttaattagaaacgggactgtgatcagttacgagatcaccaatcagtctcgttaactgttaccatcgtgtcgacgaacagttccgccattgtactgcttgaacacgctgctgccgttgtcccgggcgcatacattgctgtcggatgcggcaacggcgttgccgacggctgtggtcgcgtgccgcgtgctgtgccggcactgttccaactcgtcatagacgtactgcaagctgatgacagctgcagctgcagcggcagctgccgatggcacggcgaagacggagcggcaccggtagaggtgggaggggcgacaaaggcaccaatggcggaggaggaaagatggtccatttttggcaattagtgtttaaactttaaagccgtatatatacaacagacttaaattgaacgaaaataattttatttgccaaaagccgcggaagagcaaaaatgtaaatggtgccanaaagtgaatgaaatgaaaatgatggaaataa

SEQ ID NO: 19378 - DNA, 2780 bp, Heterodera glycines
tgaaccagagagttgtcatcttttacagtgtcctaccattcctgggctttagagggggggaatactataaagaaaccaactttttttatcactaaattggcgaatttaaagaaatcccgtttttttaaaattttatcctgcaaaatccgggttcgctaatgatccgaatcagcctccgggttaaaaagttcaaaaccatattaagaatacaaggaaacagtatttttattcgaaaatcggtccggatgcattccggaaaacctgaccccaatttctttaaaactactcgccctatgggatactgtagggcgaaattcttcgagtttttgcctaaattcctgtttcagcccgaccttggcccccttttatctcctcacccacccttcctctcacaaaatctcatcatatcgccccatatccgtgttgtgttgtgtttgttgatgctgactttgagcccacgtgtgctctgcagctgccccagccattttttttatccattccgttgcattatttgcattatctatcccatttttcattttcttcctttctcttctcccatcatcgccatgctttcacatttttgttttatctttcttttttgtttgttttcaatttttattttcaatttattaatcgccctaattaattctcccgcaaaaaaattagcgccccgcactcatagaatgaatggcttttgttgtttctaagctttgcaactctttcataagccaaatagagatcggacgagactctgatcacttctttattagcctgatcacattagagcatttaaagtaatcggagataaatgctctgctaccaagccgcatgacccgattctgatcagttttgatgcttgatcacattttgaaaggataccgatggaaatcacccaatcagaactggtcagatgccgaacaagatttgattacttttgatcgggatccgatcaaaatttatcctctgatcacagtgaacatggctttataatactgatcagattttgatttttctgccgatctcacccggcctctgtttggcaaattttattcgtccaatgtgtttctgttcaaaccaaattatgcttttatttttgtgaaaaatgatataatcacatttttttactggtccatacataattatttgcgcataaatgaagcctaattaatacgcataaattgtgcatcgacaattaaaacaaaaattatttttttcatataaaaaaataaatttaaattaatgcattcattatgcacttctcttttacgacctttcacttaacagacacaacaaaaatattcatttcctcggcaaaacgaacactcacaaaatccgggcaattaatttgtcaattagtcaacgggcaattaaaattaccgcaagttgctcattagttcgttggttggtccattcattaattacccttcattccatactaattcaatgagacacatgcaaattggtataccttgatattgtactgcgcgactcaacagtcaaaaatcaaacacaaaccaccggcgaggcgtactttggggtgatcactgatcattaatcactgactgatcagacaaagaccaaaaaaggcgagagattcccccgcaaaattaaattgagcgcctatgtaattaacgtcagtgctcgtcgagagtgtgtcgagagtcttggcctcgagagccacgtggaaaaaacgataaaagtctgatcagggttggccttgctttgggagtaaaattttatcagggtcgaccttgagccttggaagttgcattccggcaccgatttcaagctcgacaagctgataagaaatccgggagatcgttctcgaaacttgggcacagaccccggcacaggtgtcaagcccgactcgacaaagccaagagaaaatctcatgatcggtcgcgaatgtcagagttccggcaaatcgaggctcggggaaaaaagcacaatctcgatcaggggtgggcgaaacttcgagcttcgtgcttcgagcttcgaaaacttcgcgttttttgggcttcgaacttcgagcttcgtgcttcgaaaaaagttgtgcttcgattcgagcttcggcttcgagtactaagccgagcttcgcccacccctgatctcgattccctatatgtagctttttgcaaccaaaattcatatttatgtgagaaatttgtatcgaaaaaacttaacaattttaaaattaataattttattattagagaaatttttgtataatggactattttgataatatatttggaaagtcaattaacaaataacatactgtaccacttaattaatcacactgttcttcctaataccacgtggagattttgtttttgaaaagtaacggattttggacttaaaacaacggcacggcacggcacgtgtgccacggctttgtgggaaaacatccatcaaaaattgatggatattatgttatgaatctccaacactaatccgccgagcaaagagctgcgcgactttggacggacatccgcccgccggcagcaaaagggcaaaaaagaaattaatgagaaaaaatgcatggaaaaacggaatgccaaaaagaaaaaacttagaagaaatttaaatttttgatttaaaataatttgagtgtaaatgtgaagtgattttatttaatttttaaattttcacttggtattctgtcaattcttaagtttaattttaatctaaaaaattttcaatttgttcaaaatcttcccctgtattttgaactcggcatttttcccgagaccgaaactctcgggcattatttactgatc

SEQ ID NO: 19379 - DNA, 3076 bp, Heterodera glycines
  unsure (1)..(3076): unsure at all n locations
aagcctgatatgtttttgactatgacgtgtaatccactttgggaagagatttctgagaatttgtttcatgagcaagtgtcaagtgatagaccagatttagttgtgagagttttcaatttgaaagtgaaagcacttatgaatgagataaacaaagtaaagatttttggagaagttattgcatggatgtatccggtagagaaccaaggaaggggactaccacacattcatttgcttttgacattggcagaacaagacaaattggtaaatggtgaagatgttgagaagaaaggaattagtgcaagaataccagacaaggaattagaagttgaattgtttgcgttggtgaaaagatttatgatccatggcccatgtggtgatttaaacccaaattgcccatgcatggaagattttgttgacaagaatggaataagaggaaggaaatgctcaaagggatacccgaaagcatttcaagaagagacaattgttcttgaaaatggtttggctttgtatgcaagaccaaatgatggaagaacagttgaagtatttgcaaatggaagaagacatggtttagacaacagatgggttgttccacacaacttatacctgttgaaaatgttcaagtgtcacattaatcttgaaaaggttaacagtgttaattcagtaaagtatttgcataagtatgtgcataagccaccagacagagcacgattggaattagaagagaaaaatgaccatgatgaagttaaagagtttattgacgcgaggtatgtttgcccgcaagaagcagtgtggagaattttagaattgcctatgtacgaccgaagtcattgtattatgtctttgactgtacatttgcaaggcgaacagatttgttattttgacgagaatatggaagaagaagaaattcgagaaagaatttcgaatggatcagagttaatggcatattttgaattgaataaggaaagtgaattggcaaagactttgttttatcatcagatacctgagaagttttgttttaagaaaggtaaatggaccgcgagaaagacatattttaacacaattggtcgaatggtgaaggtgtcaccggctgagccggagcgataccacctgaggctgttgttgttaaatgtgaagggagcatgctcctacgacgatttgaaatcagtaattgatatgaatggcattgtaaaagtatgtgaaactttttcagcctcatgtttagaaagaggactgattagaaatgatgaagaatggaaaaaagctttagaagaggcagagagttttgaaatgccatggaaattgagagaattctttgcactgattttagtacactgcaatccggccaaaccggaggagctttggaatatgtttaaagactctttgtctgaagatttttgcaggagttttagaaaagaattggcttatgctaaagcttataaagagataacactgagcattatgaaggctggaaaaacgcttgccgattttccaaccatggaacagataaatgttgatgatgatgttgagcaagtatttgatttagctgaagaattggatttgggacaaagagaatatgctttgatgtatgccgaacagagagaaatttgtgatgaaattttgcatagaatatggaatcctgtaaatgaacccgcgttctactttcttagtggaccgggtggaactggaaagacgcatgtgaacaagacaattgtacatatgctgagaggacagaagaagaaagtttgtacaatggcttttactggcattgcagcaactttgctgcctgctggaagaacattgcacaatagatttggactgactttggatatgagtaattcgagtattagtccgagatcaaaggcttggcaagaattgaaaactacagatttgttcatttgtgatgaagcgcctatgataaataagcgcgcaatgagaactttggatgagaaattgaaagagataatgaataatggaattgcatttggtggcaaagtcatgctttggacgggagactttcgtcaaacccttccaattcagaaacatgccacgagagctgaagtggttaattcaaccttaaagagaagtgagtattggagattggctaaaagatacaaattgacgaagaatatgagagctcttgaaactgagcaagaatttgcaaaagatttgttagaaattggaagtggaaaatggaatagtgaaaatgatgagataattttgtccgagaattgtattagctatggtgatttagcagaagagatttttgcaaattgtattgcttctgagaattggaatgaaatggccaaaagtgccattttagcaccgaaaaatgttgatgttagtgaaatgaataatagagttttagaaatgttgcctggtgaagaagttgtgtataccagtatagacttagctcaagatgagaatagacaaagagcagatgactatttggatgagtatttgaatgctttgaacccttcagggtttccccgacataagttgagattgaagaaaaatgctattgttttgttaatgcggaatttgaatatagaaatgggactttgcaacggttcgagaatgaaggtagaagaaatgcatccaaatttgatcatgtgtaagattttgactggagacaaggcaggtcagactgtgtacattcctcggatcacgctttgctgttctgaagattacccttttgacctgcataggcaccaattcccgttggtgttagcttttgcaatgacaattaataaggcccaaggccaaacccttgagcaagttggcatagatttgagaaaagatgtgtttagccatggtcaattgtatgtggctctttcgagagcaagagcttggaataagttgagaattagattagatgatggcaatttagagagaaaggtgaagaatgttgtgtacagagagttattagataacagtgattagtaatgttttagactaggtttggatttagataaagtatagtattnagaattnggttttgtatagaanaatctgntgttctttgngctgctcaggacagtacgaacacattncaaagtgagtcattcctttttaattt

SEQ ID NO: 19380 - DNA, 1610 bp, Heterodera glycines
  unsure (1)..(1610): unsure at all n locations
cccccccccnncccgaacccaaaaaagtaaaaaaatttcagtaattttttttaaattttaaacaattttcttaacaagagtgcattaaaatactcaaaaattttcctggcggcgcctatcggcaccgccggacccccattttatcataattttgtaaaattgaggccaaaatgacaaaaaatagtaattttttggcgaaaaattttccaaaataagctcctaattcgggatttcaaaaaaagcaaaaatacacccctaaaaatcgaatttttgacttcagccccccccctccccgaagccaagggtctggctacggccttaatgagaagttcgtttctcatacaattttgaaaaatatttcaacaattttttatttggaaacattaaaaagaaactttattcagcattaattattttttttaaatcgctagaaaaattacaaaaatatttataaattttgtaaaaatttttatataggggaggggaaacagtgcaccctgaaaagtatgtaatttcaaaaaaaaaggttaatgttattatttttggcccggttttccagccaacacccactcgggaatgggatttgtccatttacatttaactatttaattaaattattttttcccatttgaaatgagtgttttttctacccaaaatgagtttgctgcctccagttgtggcactaatgaggttggtgaaacaaatgggtgattagcagatggcaaagcgatgccgccgccgctgccacctgctgctgatgaagtggccgatgaggaggacacattgttgacctaatcattttgggagataaaaaaattaggggaaattaattctctattaagctaaaccaccggagtgctaaattgtatattctagtcccaaaacatttttaagtatttaatataggtaggtattagagttcgacatttttaaaaaagcctggacctggttttcctggacaaaaatccaggaaatttcaggtccaggaaaaatccaggcacctcgggacctggatccaggcctggacctgggggttttttgaaatttgttttttaaaaagcaaaacaatgtttgaaaaaaagcaattaaatgcttataaacctagaaaaaatatctaattttacaataataataataatgtgttttaaatctatttaatcatttttttgaaaacttgaaaaaaaacatcggtcacttaaaataattaattcttaaattttgtccaggaaatccagtttcggacggggggttaggtgttggactggcacgattgggccctaaccaacagggggctcgggccagttttggtagcataattggccaaattggatacatttggtatccttcgatagccctaagtgttcaatatcccttggcccttaagagcatgctaattataatcaacctgttgctgaatgagccgcgcattttctgcgcgcaaatgttcgttcattgaacaaacttggtttaattgagatcttaaaaaaataatttatttaaattaaatattttatttcctaaatgttaattatgtaatttgtgagacatttttgtacttatgtactttaaaaaccataaaaaaaataattattttttaaatcatataaaaa

SEQ ID NO: 19381 - DNA, 842 bp, Heterodera glycines
  unsure (1)..(842): unsure at all n locations
ttagagttattatctcaccaataaattttgaaaatttgaatgttggaattttgttagaatacgggttcgggattcaaatttggtcgaaatggatgtcagaatcagattctccgtccctgaaaagcccttagaaattttttatatgatttaaaaaatattattttttttatggtctgtaaagtaaatagttaagtaccgacattttaaataaattgatatattttaaaaataaaataaaattctgaacatgtttttaaatttagagatttaatttggtttcccctaggaaggcttaattttaagattttaataaaaaatttatatttatttttttaacgtaaaaaacatattttatgagaaaaatataaatttgcattgaacctgattgaagcatttttgtcaatctctttttgtgccatgttttgcgtttggcaaagcgccgtctgcaaatttttgatactgttgcgcagctgactgttttcggcctactgtgaaaaaataccgtaacatataaatacaaaaatggacggaaaattttaatggacgatgtgaaatgaactgacattgaataaagaaaaaatgcaataaaagtaccaataactcataaagagaaagaggcggaggttcgagcccgctccacaacattcgtatttttatttattttcttcaaaaaattaaaattttcgaaaaaatttttttgaagtaaattgaacattcaaaagcttttgatgaggagaagctttttctaagcaaattggttcatcttttgttttttctgggtgctgtattattttccacaaaagaacaanagttttttatatttttttttggaagattagaaa

SEQ ID NO: 19382 - DNA, 1264 bp, Heterodera glycines
gatagggagagcggtgcgcaatggatatatatttcccagagaatttttggctctaaagaggagtccagaaaaatggctatctattttctgaaaaattttataccgcacaaatgctctcaaagcatgatagggagagcggtgcgcaatggatattatattgcccagagaatttttggcttctaagaggaattccagaaaaatggctatctatttttctgaaaaattttataccgcacaaatgctctcaagcatgatagggagagcggtgcgcaatggatattatatttcccagagaatttttggcttctaagaggaatcagaaaaatgtatatctatttttctgaaaaattttataccgcacaaatgctctcaagcatgatagggagagcggtgcgcaatggatattatatttcccagagaatttttggcttctaagaggaatcagaaaaatgtatatctatttttctgaaaaattttataccgcacaaatgctctcaagcatgatagggagagcggtgcgcaatggatattatattgcccagagaatttttggcttctaagaggaattccagaaaaatggctatctatttttctgaaaaattttataccgcacaaatgctctcaagcatgatagggagagcggtgcgcaatggatattatattgcccagagaatttttggcttctaagaggaattccagaaaaatggctatctatttttctgaaaaattttataccgcacaaatgctctcaagcatgatagggagagcggtgcgcaatggatattatatttcccagagaatttttggcttctaagaggaattccagaaaaatggctatctatttttctgaaaaattttataccgcacaaatgctctcaagcatgatagggagagcggtgcgcaatggatattatattgcccagagaatttttggcttctaagaggaattccagaaaaatggctatctatttttctgaaaaattttataccgcacaaatgctctcaagcatgatagggagagcggtgcgcaatggatattatattgcccagagaatttttggcttctaagaggaattccagaaaaatggctatctatttttctgaaaaattttataccgcacaaatgctctcaagcatgatagggagagcggtgcgcaatggatattatattgcccagagaatttttggcttctaagaggaattcagaaaaatgtatatctattttttctgaaaaattttataccgcacaaatgatctcaagcat

SEQ ID NO: 19383 - DNA, 2543 bp, Heterodera glycines
ttttattgcaattattcaaataaattttaacgaaaatggtctcaaattatgtcggattccggagcatttgacaagcgaatgcctggattttctagggttctagtccgcaatccctttattggaaactgcgggatttttcggtattaacccggggtaatatgaatttcaatcccgaagtggagcccgcaaatttctgattccgttccctagttttgactccaactcgaaccacaatctgttcaacttcaaacaatctttttaaatattcacatttatataaattcttaaatattttctccgtgtattgtcttcgacatattaacggcatggaatttccgtaccagatcaacgtgtcatatgatgaggtacacacacacacattctatatgtattttaattcacttgtgcccttttattagtgcatgtgaaattctttttccccaacaaaaatgaatcgatttttgttttttttgaaagatttcttccgtttccatttagcctctaacactttccttttcaattttgtacctttatcccatcgctaataaaattgctaattgtcccatggagcacccaccaaaaaagtggcgtacgctccctcccgaactaatgctggtatgcacaatgctaactatctgcagataaatcgttatccgcagataaatccgtatgcacaatgctaaggattaaaatccgcatgcacaatgccagtttcttttacaaataatccttagcgtagctgcagctaggctacatatgcacaatgctaaagatagggtagcagctacatatctgcagattaaaatcactatcctcatcgagatgaggataatttcgatagaaatgtcgattaaaatcccaaaaataagtttaaaaattggaaaaattgtactaaatgacttttaatacctctaaaattttttgatttaaatttcatgatgattgaacaaaacccgaaaattcgacctttccagttcgggttaggaattggttgaaataaatgtcagattcatgatcagcgacctagaaaagccccaggaataagtttttacggctttttatgcaataaaattgctaaccaaatttgagttagaaaatttctcttgagggatagaaaagataaaaagatgtgtgacgagagagttgttgcggatgagtatctgcagataaaaaaatcttcagctgcagatagttagcgctagcattgtgcatagagattttatctgcagatttttttatctgcagctaccctatccacatatcgctagctacagataaatatccttagcattgtgcataccagcataagtgacgaattgtcccatttcgtttccgactctttttgccgaaaaactttgatcagcacaaactctttgttttaccgtttactccatttgacaaatcgagctaatcgttggaaaagcgaagtaatttacaacaaaaaatttagtcaatttttggataaagaaaaagcaattcctcatttaaattaagcattttaagcctgttgtgtcacaactttggacacacaataaaataataaacacaatttatgtcggaggagaaatgcagtacaaaatataaaatgtaaaatagcaaatgaatggagaaggaacaaagtggggaaggaaggagtgcttaaataaacaaaatgaataaggggagggattgacacgtcacaacattaatcaataatcgatgggcgccaaattcaaattctttaacactccaacacctcccttctttaagctgaaccctcaagggtttggcgagaagcggatcggcgctttccgttggcgttgcgatcgacgcggggccaaaggaggactcggagatcgtcgctttgcctgagtccgtcgaattggtgccggttgcggaggaggctcgcggatcggcgatgggtcccggtcttgctcttcttgagcctggggtgggatccttaccgtatcattaccgtcctcctcaagaggataacggcgtcgcagttggtttgcgtgccggtggacgtttcttccgagagccgggacgtggacacgatacgtcggggacttttccaatctttcgatgatcgttccatttagccaaaatctctttccactgttgaaattcaaaagcaaaacgggatcttttggcaaaaactcaaccgattttgatccgtggtgttgatcaaattgacgggccatttttcgcgcataatcagcttgtgatttgcggattttggctgggtcaatgacttcggcttgttcttccttcggatggacgagagacagctgagttcgaagccttcgaccgaagaacaattgatcgggcgaaagtccgttgagtgctgaattcggggttgtcctgtaggcgagaagcatcttttctgcccaaaattttccatctttggcgcatttcttcatggcccttttgaacgtatcaacgaatctctccgcttggccattggattgcgggtgatacgcaagggtgaaggtatgtttgatgccaaactcgctgcaactagagaagaattctgcggcatggaattgagtgacattgtctga

SEQ ID NO: 19384 - DNA, 2917 bp, Heterodera glycines
aaaccacttttcttttttgtgtttgcgtataaaaatcggggacttttatttgcatatttttgcatattttgaggtttttgtgcatatttatgcatatttcgccattttttggaaaattgttaacaaaaatgcaataaaaacggaaaatacaccccttaagaatcggccctaaaaaattcagaaaaatacacccctaagaatcgaccgaaaatttttaaaaacacaccactaagaattggaaattttctcaaaaattcttcccccaaattttttttcatgagaaaatttttgatttaaaaaatgtcaatatttgctaaaggaattttataaaagaaatgtagcagctcattggcaagtgcactggtaaaaaaatttttttttattgaatttgcagccctaattttcaattttttagtgcatatttggtgcatatttcacgactttatttgcatattatgtgcatattttggccacttttcgtgcatattttttgcatccctgattatcaaagtaatttacaattagaacaattcaatttaaaaatttaaattctcaatgtgtaactataagtattattaatgatatggtgcttggatttattattttttattattttgtgcatatttatcgcataaaactcgaataacagtattttacaggacaggacttcaactcaattagagcgaagtagtttttcagactaatgaaactgaataattagcgttttttaataaattaattatttttaaacaattttcgggaacttttccgttatgcctccccccccccccctcggtctacgtcagttgggccccggcacttatgggccccagcatgtttttggactataacttttttctttgtcatccaaatcaaagattattggtatcattcgaaagcccttcaaatgctctattagcctgcaaaaatccaaaaaattctgtcaattttgaacaaattatggccaaaaaggttggaaaatttggttttttgaatttttctggccataacttttctgaaccttaacgaaatttttcgaaattttgcaggctaatagaagacacttagggctttcgaatgataccaacaatgtcggatttggttgacaaagaaaaaagttatagccaaaaaaccgctggggtccaaacgtgccggggcccaactgacgggttccgtcaaattattaacgtcagaaatttttgagaatcggcgaattgaaattttaattaaatttgtgccgatcagcattgacggggaaattttcaatttttaaattaaattaataatagatgcggaaaatttgcgttaggctgactgaaaaattttgaaattttttggaggcaaaaaatgaaaatcttttgaaggtttgttaaaatggcacgcatatttaaaaattttcaattttcaggctatggcattctcttatcgcaaaataaaaattaaaattgccgtcggaaatttttgagaaggaatcgtcgaattgaaaattttaattaaataatactgtgccgatggaatcgctgacggtaaaattttcaattttttaattaaattaattaaaaaaattgacagaattttcaattacaaaatttccttacaatattttattttctttattttgaagagtttaattcagagttcccaagttttttttttcaaaataagacaaaatggcctaaaaactaagattctgaccccaaaaataagattttttctaaaactaatatttgcgtgaaggaaacgcaataaaaacatgaaaaattgacttaaaacaatattttattagcgtaaaaacaattaaaattgatcatcataagtatttttcccatccgcctattttctctgacaatttgtgattggaaatgagcatttggtacatttgtgggcaagaaagatcgtaattgactttggtttggaccaacgccttgactgtttcgacttgcaaaagatttcgtttatcagtccattgcgatccgcacaaagagaataccctctccacaaatgcattcgagacaggcacggaaagtacgacgctgaccagcttgagcagattaggcaaatctgcaaatctgcttcaaacagcttcttccacttctgttcgggggttaatttttgaaattcatcatttgggaaagaattcaatatttggtttgcttcgttaacatcgtcaaacaaatcatttgttaactcgggcgcaatttgtcgagccagagccaatgcatcgtcgtggggaattttgcggtatgccagcgcaacccattgcaacttttcaggaaatcggtcaatgcgatgccatttgtccaaatacgccagaaccgaagtgtaaaacgactgaaaatttttgaaaatatgcaaccgacaatttttacttgaaattgttcctccaacgcttcgcgtgtgctctcatcgacttttcccattgccaaatctgcaccataaaacctttcactttttcgttgttcaattttccctcaaaatttgtccatttccagcaaaagttcgggcaaaatgactttttctttctaaatttataaaattttttcatttaagatttgtaaacccacccgaaaaaagtcaattgtcttattacataagccaagaatgtggtgtaaaaaatgaatgatcgcaaacgtttgttcagaaaaaatgaaaaaaagagtcataaagaagtgccggacccttttctggtgtcaaaactagttaacatacacagcttccctcccccccccccccccccccgggggctgccccgtgtcgccaatttcgaatttgcccatgcaaattcttggcccaccaaataacctgtccaaaatgatggaaatgataaatacgctccacgcatccatccccggctgacctctgattttggggggttttcacactttttgcatttgtcatgccagtgctaagaatgtga

SEQ ID NO: 19385 - DNA, 1312 bp, Heterodera glycines
cggcggactggttgagcattgttgaagtagtaattgtcgccccgctgataataagcggacggatgaacgaacggcgccaattgctgagggacttggccaggggaagcgtagggcgaagagagaaagccggcggaagcgtagccggaggggacggaccaacctaaggggggggggggagggaagtgccgaattggggaggacgaaccactgtaaaaggagggaacttgggacggaaaattggacgccgccgccatcagagagcccatctcagcggaggacgacgaaatgggcgggaagtaggcggaagaggaggaggaagaggaagaggagggcggcaagttggggccgtacatgaacggatcgatctgtgggatcagcagacccttctgaaaatcgtagggcagcggaaaggaggcggaagacgaagcggaagtggcggacggcggatgggccgccttttgccggtcggaagatgggaaggcgcaagaggaagaggaagaagcctcaacccaatcagttgatcattccctccattatccctttaatagccaccttgtttccccgctctgcttctgtccccccactgctcatggtcttttttcgcggtggttgctggttctcctcctccgtgtcctccaccgattcttcccttttcgtcaccgtccgttcgtccccattccgtcgcttttcgcccttcacaaagctcccaattgccgtcgatgaaatcgaaagcggcgcatttgtgccgtggcaatgcgttcccgttctgatctgttccattttcttttcgtgccgttccttaattttggcctaaatccgtcccatttctttgtgtgctttccaattcacaaaaccttggctcttcggtttttgaaccaaacctaaaaaagagagaaaaaagaaaaaaaaaaagaaaaatgaagaattgaaaagtcggacaaaagcaaaaaccagccgagttcacctgcactttgacgtcggtcagctgaagactcttggcgatttgttctcgaatttgcacgtccggataagcgcagtttttgaagctcctctccaagtaactcagctgctgttccgaatatttggtgcgttctcttttgccagaagacatcaaagacggatgggccaaggaaagggaggaggacgaagtgccggaggaggagcagggcggggaacagagcgactggcacacgttggaggaggacgggccgtgggggagcatcgacggcacagagaacggactgaaccggctggggtttaacgggtaattggccaacgagcactgactgattgtgctcaatttgcactgatt

SEQ ID NO: 19386 - DNA, 1402 bp, Heterodera glycines
  unsure (1)..(1402): unsure at all n locations
cccccccccccnccctttctcccggtgtccatcatccgtccgtaatccttcgcttttcaaatttcgaatgtttcgcggtgtccaattttctcaaaaaaaacaccaaacaaaaaaacaatacattatgaaggaatgcaattgtaaactgccgagtttacctcgccgattcgtcccccccccgggcgcatcattcgccattttgcgccgttgtttaagcggattggcggagattaacgcggcgaatgatcacccgaaaaatgggagagtaaaatcaccacacagcacaatttgcaaagagtcttttccaaatatttgtagtccaattcgaaaggagacagaaaagaatggccgtaggtcattttgagaagaaatgtttaagaaagtgccattggaatattggcacttatttttatggtttaaaaatttccgatattttcgcctgactctcgtctccgcacaatgaaaaacattcgaataaatttcgataagatttactgatcagtgccgctgatcactctctctgctgttgttccctttccattcatttttcatttttgcccttcggctttctctccttaaatgcccaaaggcattgttcccatatcgtacccagcgggggggggggggaaggaatccttcgcattcgcaccgtccaattgttctgtccaaatcgaattttatccctcaaggcactttcacatagccagcaggaaatggatccgaatgaacccattgaaatgaaaataatgaatcccctcgggggtttcccttcaaacacttgccaaacccattcattcataatccaaagcgaacggcgtgatagaattcaattttaccgttacccccccccccccccgcctctcgtcgcccttcaaatgttcttccatcggtcacagtccatcaaacatcgccaaatcacccggaagggcaaaatgggggaggggggggggggagagaatgccgaaaacatcccttggcacggcaccaatcggccgcttcctttgatgttttgtgccgttcctccacacgatttgtttaagtgctcttttcctccgtatgggataatcccaccacacgcgggggagaggaaaggccaatccgatggaagggagaaaaccgtgccaatgattggacagaaaaaggggggtggggagatttggacaattcaaataaaaaaaaacaaattaattttagaaaggtgtttaagaaatgacaaattcataatttcgattaaaattaccaaatttttggaaatgaatcaattaattgaggggggggggggaacggcacggctaattaagggatcatccgtcgtcgttggaggatgacgcgaggaaggcgaaggaacggcggatggctaggggaggacggcgcaggtgagaaggaaacgcatcttcggaga

SEQ ID NO: 19387 - DNA, 1925 bp, Heterodera glycines
aaaaatgtttttttatcaataaaaaagaattttaaaaataaatgggcatttcaggtgaaatttactaaaaaaagttcgctcataataggcaaaaatgagttttttatcattaaaaaaaatttaaaaaataaatgggcatttccggtaaaattcactaagaaaaaagttcgttcaaaataggcaaaatgagttttttatcattaaaaaagaatttaaaaaatcaatgggcattacaaaaattggaccggcatttttcaagtattcggcgcaaaaaaaaagtcgttaagggttttaaaagcaaaaaaaccaaaaaattctttttaattatttggtaaaaaccaaaatttagaccattttttacgattattcggtaacaaaacccctaggggtttaagaagcaaaaaaatcaaaaaattcttttaattattcgcaaaaaaccaaaatttagaccattttttaaaattaaattttcttggatttatgactctcagtaatttaatcagtttgtattacgtgcgcttgctgggcagcttttcgatcaggtccacgtgcgacaacaacatccaaaggcagcagtagtgacgcagccccaactgatccaacgcgtcgccctccgcagtgcctgttgaaaatgaatttaaaaaaataagaagagaaaattttgtgaaaattacgaacaattttaaatttaattaaaaaaaattgcatctttttatcaaattcagccaaaaaaaattgtctaaattaagcattagaaagccataaaacgcccaaaaaccaattgaattttaacctaaaaaaacccaaaattggaccgtaattttccaattattctgcggaaaaagcgcaaaaaaaagccgttaggggttttaaaagcaaaaaaaaccaaaaattagaccgtaattttccaattattcggcgcaaaaaacgcaaaaaaaagtcgttaggggttttaaaagcaatgaaaccaaaaattgttttcaattattctgcggaaaaagcgcaaaaaaaagccgttaggggttttaaatgcaaaaaaacccaaaaattagaccgtaattttccaattattcggcgcaaaaaacgcaaaaaaaattcgttaggggttttaaaagaaaaaaaaacaaaaattggcccgtaattttccaattattctgcggaaaaagcgcaaaaaaaagccgttaggggttttaaaagaaaaaaaaaacaaaaattggcccgtaattttccaattattctgcggaaaaagcgcaaaaaaaagccgttaggggttttaaaagcaatgaaaccaaaaattgttttcaattattctgcggaaaaagcgcaaaaaaaagccgttaggggttttaaatgcaaaaaaacccaaaaattagaccgtaatttaaacgcaaaaaaaattcgttaggggttttaaaagaaaaaaaaaacaaaaattggcccgtaattttccaattattctgcggaaaaagcgcaaaaaaaagccgttaggggttttaaaagcaatgaaaccaaaaattgaacggtatttttcaattattctgcgcaaaattagaatcggaaaacaacaaaataatttaaaaaatcaataggcatttccggtaaaattcaataagaaaaaagttcgttcaaaataggcaaaaatgatttttttatcattaaaaaaaattttaaaaataaatgggcatttccggtgaaattcactaaaaaatagttcgctcataataagcaaaaatgatttttttatcattaaaaaaaaatttttaaataaatgggcatttccggtgaaattcactaaaaaaaagttcgttcaaaataggcaaaaatgattttttttatcattaaaaaaattttaaaaataaatgggcatttccggtgaaattcactaaaaaaaagttcgctcataataagcaaaaatgattttttta

SEQ ID NO: 19388 - DNA, 1677 bp, Heterodera glycines
cattcttaccagtgcttgtgtttcccagttgccctaccgggaccgggacctgagatttaaagtgaaaaaaggaagatttcgagcatttaaaaagaaaaaatggtttttttgttaaaaaatttagttgatcactacccgatcggggtccccgacccccgacatgtcgccccccgaggggtcggggagcaaccctactaaaaattgaccaaaatttcagcctaagaaatgtaaaactttcgctgaaaattcgttccaaaattagtatttatatattgcagtttttttagcacctaaaaattcggtcttatctctatgtaactaaaaatttaaaaattgaattctaaaaaaagttaatttattaatgattatttttaacagaattttgcatatttctctgaacagcttccgacatttattttatttcattttaattagtgaaattacgtgaaaatgtgaacattaattaccgatgttgttgaattgcttcgatttcgaaattgattttatttatttattttatttgcctttttgggtcatcattttgccttttttaccattatgccttcttccccccccccccccccccctctgactcggcatttttttcaattcaaaatgaccctgaaacttcttatgtcattccatcactgtttatttgcccttggctgagcaccaatctctcttcggcacaaaaatgagaatataattaatggcaaaatgacccatttaggtcaattaataagaaaaaaaggacattaactcattttcattttactaagtgggaaccaaaagagcaaaatggacacagaacgggaaccggccactttggcgcaggccactttggcgcaagactatatcattttgatttcacagcaaaattaaataatcttggtatgattttaagtggcttgatagtgcctattaacctgcaaagtttcaaaaaatttagctgagaaacaaaaaagttatggccaaaaaacctcaaaaaattgcattttcctggccattttggcgcagcgcgccatatcttttttaagacctaatataattttttgaaattttgcaggctaataaagaacatttagacctattgattaatatcaacattattttatttggtcgaattaaaaaaagttatgaatctttaaacttgtctgcgccaaaatgaccccgaccccacagaacagcacaaaaagggaaaaggaaaaatattacaaaaatttgcaaaatcaaagacaattcaaagagttttaatcaatgaaaaaactcgaatttccttaaaagcaaaactaaaaggattttcggggaaaaaatcggaatttctttgacaataaatcccaggtaaaaaaatatggaagtaaaaattaccagcagttgcatatttttattgcaaaatttgattaaaattaaaagaaacattaatagaatattaaattcttctctttttatattttattaaacgaatttataaattattttcaaatgaatgcaaggttgttctggttcattttgttgcacacgaccttaaaagcggagaaaattgcgtttttttaatgaaaatatgctcaaaatatggtcaaaattcttaatttttcccccggtggcgcctatcggcaccgccggaccgtaaaatccttaattacagcaaaaattgctcaaatcgcaaatttggccatt

SEQ ID NO: 19389 - DNA, 1932 bp, Heterodera glycines
  unsure (1)..(1932): unsure at all n locations
aaaactttattgtctttgttttttacaaaatcagggcnnaacataaatannaaattaaancgatctnaattaggacaaaccgaaagctatttaattaattaaaaaaggcacncaaaagaatatttaaattgaaaagcataatgaaaaatcactcttcttcagctatcttctgaaacaaatntaattatccctttttcattcctcgtttatttcttctccaaattgtttcttccaattaaaaatattctgatgagaagtgttcacagttttcgcaattgcattatcactcattttcggattttctatttttgtttgccaataaatattcattttttccattttttctttctccgttattcttttcttgctaatgccaaattgtttcttccatttatcaattatgaattggctaactccaattttcttacaaatttcggcataattttggttccattcttttcttgaatattttcttttttgcctatattcttttgtcatttcaatgaatttttgcacaatttctaatttttcttcatcactttttgatttatgacatttatttttttgaagacaaaattctttgatccatttataaattttcgttcgatttgtccccaatttttttgcaattttcaaattaattttatcccattcttttgttgaatattttctccctttttgctttattttttcttttattttataatattttccaattatttctctttttttgagttcatttcgtttttcttctttttttttctgccatttttctccaaatatttcgccaaatgacttttgctgtaactttttcttttctgctccaattttgacaattaaaaataatataattaataatagtagcggaaataatttcatttttgtcgtctcgaaatgattttatttaatttttcttcaattaaatggcaattcattttttggggcatttaaatgattttttttctgattaaaaaactgaataaatcattattttacttaataaaataaggaaatcctgtttaatttcaaagaaataataataataattttatcttaatgacaaaatgtggggagagagcgagagaaaaagtgagggagtgaaagagtgggataagagagagagagagagagaaggagaaagaaatagttagatagaaaaagtaagagagaaaaagtgaaatagtgtgtgagagagagagagagaaacttacggaagaaagagagaaaggaagacagcgaaaaataaacataagtagccattatattatggcattaaaaccaacagagaaagccagaaaataagtagccattaaatattacctaattgtttcaagaaaaatatggagttatttatttatatttgttattatatattttttattttaacaaaaaaatatttcttatcattattcaattgtatttatatttaatttttttcagggtaattaacaatattttttggaacaaaaaaggcgccactaataagtgcgtgtgctcgccggtggcgggtatctgccgagcagaacacaaaccgggaaaaacaggttgactaagtgaacgggtcccaaggatttatcccataagtaaaacaaataaacaatttatgtataaaccgtttttccaacaaaaaaaaagcatttaaaatttaattgaatattttaaaaacaatacgtcaatttaaaattaataaaaaatttttgaaaatttctttctgcgaatgacactccaacaaaaatccgccaagtgctaatttactcacaattttcatttagtcgtcacgttgtatttacgagaatcttgcccttgagtaatggctttttcgtgacaatgcctgaaggaggacggtgattctcttctcatttggaggtcagtccaaaaaatttgggttctagtcggttttatgcgtcccatgacatattatgcgtaccatga

SEQ ID NO: 19390 - DNA, 1917 bp, Heterodera glycines
caataaaaatacaaaaatttttataaaaatatataaactccaccaggatatttttagtgataacaaaattattaaaaaacctttcttttaaaaatttaaatttttcaaagtcatttaaattattaaaaaaactaatttaaaatttcctttcataataaagagtaataaagtttaaaaattattaccatacttttcgcagcagattaagttggaacaattatgtcctcattctccggcagttacctttaccgttcgccggtgcgcccaattgaagactcatcgtcccttaattactctccccaccattcaaatgccacattttggcgccattcctacactttcaacacatttcgccattcgtcggcacatccgcttcaacaatcggcattccatcggcacaactacacatcatcctatcagacaccattcgtgtgccgatttgagccagcctatcgtccggtcagctggcacccgcacccgttaaactgatcgagaaaatggaatgccatgccgaagaaattggactgatcgggaataaatgggagttggcacgatgatccaattaaatgatggcatgaaatagggagatgtgatgggaggggttaattcatattgtaaacaataacttttttattttattttatgcttatcgattaaatgtttatcgcagtgtgccgtaatgccaaactttatccaccatttttgtgacattttgctaaatttgaggatctttctttcccctcccattttgagatagtctctcattttagtttagatttttttaatttaggatattttttttattttactttttaccccagttttaaaattgataaggctcagccaatgatgccgaaatgcaccaatagaaattcttgaaatgatgtcaaaatagctccataaatggcatccttgtaattgaaagaaaaatttgtaatttactgtaatgaagttgttaattttaaaatcggataaagacttaatttgattcttaaattaaaagtaattttattcagaaattttttaaactaaaattgaacaaaatcttcgtcaccaataatttttcatataagcatatgtgtacacaccataatgaatccggatgagaattttcaattaaaaattgtcattttaattagtttatttgatcagcttaatgaaaagttgggattttgcgataaaaaacaaacaaaaagtttatccatgaaagcaaaaaatgaattaatcatgtgggatggaatgaaaaatgattgaataaattaaatgaagtgatgacataagcattaaaacttttatttacatactacgaaataatgtcactataaaagaacgtgctataatctttaatatttcacattcaataaatatttttaaattaaattaatataattatttcaaaaacttataaattgaaaagattggtttatataaattaaaaaagataaattaatctaaattttaaaatttaagatattcaattttccaataaattttctatttgataaaaatggtttcctctattccgcttccaattgctattcttgtaataattttcttggtagccaatatgtcttcaaagattttgtgtgattcatcatcggaagaaacaacatcgacgagttcaacaagttcgaccactagcagcacgtccacatccacatccacgtcaacgtcaacaagtaccagcacaagtaccagtacaagtacaacaccaagctcaacgacgagtacaactacaagcacaacaccaagctcaacgacggagtcaagcagtaccaccagcacttccagcagcacaacccctacatcgtccacttcgaccagcaccgtttcaaccacaaccaggcatggacagaccgggttaaaaatgagatttggtttcataaaaccgtaccccgcccccgttccgaaatttca

SEQ ID NO: 19391 - DNA, 1795 bp, Heterodera glycines
ccaccaaggttcatttcggaaactccacgttcattgatacagtaatattatttatcaagggtacttttaaataaatgctttagaactttttaacatttgaagcattatcctgccataaacttagtacacataatgttgagttggccatttctctctctttgtctcattatattggccttttcgttgtttgtttctctgcctcctctctttctcctccctctctctttgctgcactgctttcccgctcgtccgtctgctcctcctcttttcccattctctctctctcctctcctctttctctgaacctcctgtccctcttttgtttgcttttttgctggcaacacaatggcatttgccctcctccacccaattgagtgggcacacataaacacggctgagtctttccggcatagccaattggcggagattgacttccgtcagcagaagacgcaccgaaaccaatcccggaaatcggaggagcacttaatctggtgctgttagaatttcgatagtttgtttcgacagcaaaacttaaaaataaataaaagtttaatttttgtttttttttctataaattgattttatgtctcggtcggttttttaatgtttccgagccgagtttgtgtccatcccatggtttgagtccagcgaattttttatgaagctatttctcttacgcttgaagttgcggtgtgaatggtccgcctgttgcaaaaccgccaacaggcggagaagaacgtgggaaattttgctgaggaattggaggtagcgggaggagcggagctgcttggagttgttggggaagagcacagcaagcatcctgctgcactgaagcggcgggagtgcaaacacagacgggctgattgccggaagggggtggcggaaagggaggcggattaaactgttgtcccatcggagggggcggaggggtagggggactgaactgttgtcccatcggcggattaaactgttgtcccatcggaggggtagggggactgaactgttgtcccatcggcggattaaactgttgtcccatcggaggggtagggggactgaactgttgtcccatcggcggattaaactgttgtcccatcggaggggtagggggactgaactgttgtcccatcggcggattaaactgttgtcccatcggagggggcggtgggcagcagtcgcttctctgcaccggcgtgcaaatgcaactgattgtcaatgcctgaagtgcccttgcttctgcgccaatttgcggtgccctttgactttccatacagcacgcatctgattgcgacgctttttattgacttcacaactaataattgaagaacttaccagcagcaggggtacacaaacacattggaccatcgtcatatgaaggcgaaacgggaggaggggaggaacagcacgcatcttgcaaaactaaatgagcatatcgaaggacaacgatagtaaagaaattcacttggtgaacatatgcatgtttgtattggccccattgctcctccaggactcaattgtcccattgctcctcctgggcccatcggtcccattgctcctccaggactcaattgtcccattgcacctcctgggcccattcctcctgggcccatcggccccattgctcctcctgggcccattcctcctggactcaattgtcccattgcacctcctgggcccattcctcctgggcccatcggccccattgctcctcctgggcccattcctcctggacccatcggccccattgctcctcctgggcccattcctcctgggcccaacggacccattgctcctcctg

SEQ ID NO: 19392 - DNA, 994 bp, Heterodera glycines
ccttctttttcttccctctcccttccctctccttctttttctctctccttctttctcttccctttccctctccttcattttctctacattctttctctctttctcttctctcccccaacccacccgccttctttttctttcctctcccttccctctccttctttttctctctcattctttctcattctctcattgctttcatttcattctttgcctttttttctcattctcattgatttgtgtttctctttacgcttttgtcctttattcagctgctgctgctgcactgtctcaccgctttttgttttcctttctctctctctctttttccctttctttgcatggtaaaaatccaatcgtacttttgagatacatttttgtcgttggagttttctttaaaaacgttccattttaaagttaattgtttaaaaatattttttcacatttaaaatcttcgaccgattttcatcaactgtttattttgccattttccgaacttttctcaatgagcgtgcacaaatgtaagagttagcagcatttattttgcgattaggaaaagtgtgccaacaaatttccaatgctttagccgtttttggcctcagtttggccagtgtcaccggactgactctgctcgttttgtcctgcgcccttccgtccttcaggtttcaaatgtttagcactcagaaaattgagcaaaaaatgaataaaccaaataaaataaatgtaaaacagtcaaaaaggctctgctgcctttgacccgacaattaaagaattaatgaccacattagcctgtctggtctgatggatttgaaacatttgggtgcatggatttacgaaattcttcccttgccctaattacaatattcgtttaatatagtggttatgcatttcaatttgtggaaatacctaaaaatattatatttcaactaatttttaaaattatttgcgcctatgtccaaaattgggttcaaacttacattttttcaatcttaga

SEQ ID NO: 19393 - DNA, 2097 bp, Heterodera glycines
  unsure (1)..(2097): unsure at all n locations
ccccncttcagcaattgggtggccattgttcgtgctgttcttttactttttggcaccgttgcccatttccattgccaaacatttgcgctacgaaagcagcggaacatcaccggcacgagtttaatgttttggactgtcaaattgggacaaattggagacggattgtccattcttaaacaatgggcgataaaatgtcttggggttcttacgcattttgagtaccccaattttcgagtcttttcaaatgaatttgatcaaaagatacccaataaaagagagcatttagcaaaagatttagcaacagattttggcaaaaaaatgtaaaatttagaagattttggagcaattttcgaagaaaaatctaagagaataagcggatttggcgcgaattctttgctgtcagttgtaaatttagagagttcctctaaaactaactgaaaatagaatttacgccatcttttttgttgattttggcatttttatagagaatttcccgctcatgcaacttagagagataaatgaatagaaatggcaattgccacttttttatgccaaatttgtgccatttttaggccattgaatttgcacaattcgccaccgccggcattgtcctctccgcctttgcgcttcccttcgtcctcgcccacgccggagtggtaaaacaaaaagcggaatttaaatatactaaatttatttaaatgtttgcccgtttttgtgtgccgtccccgttttcggtgttgtgtttttgtcaaagttttatcgcaattcgtcgggcaaaggaaaatttcgccggaatgaaaatttaggaaaaagccgccaaaagaatttaaaattagggccaaaattttaggcgctacaaaaaagtgtccccttttgagttttattaaatccaaaaaagagggacctttttgatttgcgactttttgtgataataaatcgtgaaaatttattcccgtgtttttgggatcactaatttacttcaatgaccaattcctaacgaatttcgatttttgtccaaaattagtttagggatttggaatcgagtttatacatttaaaaaagtgtttcaaaagttttaacttaaatgtctaaagaatggatgcacaaactttgcttttcaaaaaatgcgcattttcccccaaaatgtgtaaaatgccgttttagccccccccccctcggatttcctcccattttcgtccccttttctcccctctttctgttcagatcgctttcggtgcgtttgttgtcgcttcgttgggctcgctggtcattttttgcaccatttttgcctatttttatttgcaccaattggaggaaaacggcggatggagcgcttcagtgatttgagaaaagcacaaaattaaaaatgtttaaattttgtcaatgcgcggcggaagagcaaagccttgtaaaaatgtcaattactattgttttgtgtgtaatttctcatttattgtcccgtgctatgcggtgatgacaacggatggataatgtaaattcatcacattaattaataaattcagacggtaattaaatggcatttgtgcctatgcacaaaaccaatctcaattatgcaaagtgtgttccagatatgtagcataaacgatgactaatttcgagcccgaactgaaacggataaatacccagaacccaaatttaatgaaattcaatgagaaatgcactaaaatagaattttacttatagccgtaaaagtttgtttgcattttcgaaaatttaaactgcaaaaacaagttttcggaaaaaaattagaaaattaagagaattccgaatcttgtcgcgaaaaattctttatcaaataatatattaaaaaaagtaactgaataaaaaggtgttataatatttatttccaaaaaaggttctaaaaataaaaaaggattttttagttaaaaattgctaaaatatgtatgaaatatgtacaaaaccccccaaatatgtactaaaatatgtaaataaaatttttttaatgttaattttttggataaaaattcttcgtaaaaagtgaaacaggcacaaaatgccataaaaatgaccaaaataggcttagaatcacattttagaactttaaaatgatttttg

SEQ ID NO: 19394 - DNA, 3184 bp, Heterodera glycines
agaatatcggttttttcgagttcgagattaggaggtctatattgatattagattcgttatcagcaaccccgaaaacccacgggaacacctttcaccattattctaacgccgtataaatgaggcacaactctgtgtaatatatcgaagtcttacaattagtgttacatagtattaaataccgatttttgttggaagaatggactattgaagatccaaacgatggtaatcggccaaaacacgtataaagcaaagcgaaatgcttccaacctgaagcgaaatttcatccttggtgagttcagcttaattcgcaaaatgtacttaaaccctcagttgcagcccattgtttgttgaaaccttcaatttcttcaaagcttccaactccgcatttgtctgcttccttttgactaatgggaagagattatttccgtccattatatagaaacaaaatttgaaacaataaatctgtacaaaaagaaaggatcagtttaaaggagaccaagtgaatatgtaaaagaagcaatgaagaaatttttgcttatgggtcgctttgaaaaggggtaaacccaactcatccaaacccaactcatcaaaatgggctaatgcatttggtttaaacatctcccaaaataaaacatttattttatttcttggcaaaaataattctaaacaacaatataaattattcaacaatattattaatgaggttgaatctattagtgatttgggcattttgattgataataaattaagattttctaatcattatactaaaattactaaagctgcttatttaaggattcgcaatattgccaaaattttaaaatcccgctctatacgtatttggaccaaagtttataagacatatattcgtcctcttttagaatatgcgcctgaaatttggaatccaacatacaaaaaagatataaataaattagaaagatgccaaaaatattttacaaaaattgcattatttaaatgcagacttccttacataccttacaaacaaagacttgatttattcaaacttcaaacttagaagaaaggagaaaaacaattgattcagttcaggcattcaaaatcattaatggtctcactcatcttaaaaaagacatattcccacaattttctggtcacatcccttataatcagggatggcagatgaaaattttcaaatttgcggtttttctcaaaaaaccacaaaaagcctcaaagcctcattttgaaaatttagcctcattgacctgtcaaaaaaccacaaaatgaggctaaagcctcagatctgccatccctgcttataatcttagacgtaaagttgtgttaaaatcacaatccagtaaaactttaaattcttttatcaacagaacagccttaatatggtctaaactcaacaaagatataacagatgctccatctgttgacagttttaaaaaacgtataaataaatggattgagttaaacaaaaatttagtctgtaaaagagctccttggacttgatattaatttactaaaatctaacgtgtacctaagtggtcaccccttcgttggatattttatttcttctgaataaataaaataaattcttttttcatgcctttttcgggattttcgtgcctttttcaattttttggtgcctaatataggcgcctttttccgatttttggtgcctttttggtcggtctctaattatttcatacacgtctattatatttcaattttagtgagcagaacagaaattgaaaaaaaattgctcaaattgacatggaatatcaaaaataacacttgaacattttaagcttgttttgaataaattttataaaattaggctttttgacccaaaaatggggctttttttgcctgccaatgaagctttttaaaattttaatcttggagccctggtttaaaccagggatggcagatctgaggctttagcctcattttgtggttttttgacaggtcaatgaggctaaattttcaaaatgaggctttttgtggttttttgagaaaaaccgcaaaataaagaatttttttaatgaaaatatgctaaaaatatggtcaaaattcttaatttttcccccggcggcgcctatcggcaccaccggaccgtaaaaatccttaatttacaagcaaaaatttgctcaaaatcgcaaaatttggtcatttttcggacaaaatctgttaacaaatcgcattgaaaattacaaaagtttccccggcgccgcctatcggcaccgccggccccccttgtttcccaaaagttttttggaaaaagcgccgcaaaaaaatcaacttcgtttttcatgttcagaatcccaaaaatgcttatttctaacaaaaaaaaatgctcaaattgatcatggacaatcaaaaatataacatttgaacattttaaacgtgtttagaataaattgtgtaaaaatgaggcttttttgcttgccaaatgaggcttttgaaaattttcatctgccatccctggtttaaaccctttgcagtaaacttttcttgttttcatttttagcatcttagaaagcgtataaaaatagttttgaatgttattaattcttggccatatgatgcacattttccgatcggaattctgacagtcaggatcgttttcgcgtggccgttttcgcatgggataggttttcgcgtgagtacctgtttaggactgaaattggtcggatttgtgcaaaacatccatgtttcgaatcccgaacccgaattttctgactccaaaattcgatgacttgggccgtgattcctgtttctaattttaaatcgagacgacgcatgaaataagcttatgtgttttgtatttttacttttacgaaagaaagatgagagagggaaagagagaaggggaaagatgagagggagtgaaggtggagggaggggaggcagcggacggaggggggggggggcgaataggaaattgaattgaattagtgtttgccttccctccccggcccttctgtgttgtgggccaaaatgagtgggccaccatagacatatatatatatatatattggttatggattttccaaatttctcattgcttcctccgtcaaattaactgtagtcgaccatttttgaggggttagggaacagcacatcccttccccttccctcctcttcccccactccctttccttcgcccctcccgcttttgatcccttccccgggaagt

SEQ ID NO: 19395 - DNA, 847 bp, Heterodera glycines
actttctgaaaaaaatatttatgaaacaaaaaaatcgattttttcaagtgtccgtttggggtactcaaacatttatggggagcaaaaatccaacgcagaattaaagtacaggctatagggaagctattcccgaaggattcggtctccccataaatctgggcgcatcggttcggggggactgccccgaaaacaaaaaaatcgattttttcaagtgtccgtttggggtactcaaacaattatggggagcaaaaatccaacgcagaattaaagtacaggctatagggaagctattccggaaggattcggtctccccataaatctgggcgcatcggttcggggggactgccccgaaaacaaaaaaatcgattttttcaagtgtccgtttggggtactcaaacaattatggggagcaaaaatccaacgcagaattaaagtacaggctatagggaagctattcccgaaggattcggtctccccataaatctgggcgcatcggttcggggggactgccccgaaaacaaaaaaatcgattttttcaagtgtccgtttggggtactcaaacaattatggggagcaaaaatccaacgcagaattaaagtacaggctatagggaagctattcccgaaggattcggtctccccataaatctgggcgcatcggttcggggggactgccccgaaaacaaaaaaatcgattttttcaagtgtccgtttggggtactcaaacaattatggggagcaaaaatccaacgcagaattaaagtacaggctatagggaagctattcccgaaggatacggtctccccataaatctgtgcgcatcggttcggagggactgccccgaaaac

SEQ ID NO: 19396 - DNA, 1361 bp, Heterodera glycines
taattttcaaaaaggacacacacaattgcttctttggcttttttgacgagcaaattcgttgccacctgaaacaattggatgaatttggcgcggatgaattggacagaccgtcgacagattttatggaagcatttttaaaggaaaagctaaaaaaggacagggcgggggaacagcacaattacaggtggattattaattagaaaattgcagtaaagtgactaattgatgatttggagcaaaaagcgaatgccatggcatggcgagagtggcgaactcttcccccccccccctccacccccgccccagaaatccgattttcattttagcttcttctattttcaaaaaagtcaatattactttaattaacggagttaaagatttgtcgaatttttgattcatttgaatttttaatcttaaatagataaaataatctttagtggagtgttgatgcttttcagttcagtttcatgtgtttaagccgatttcgtaccaaaactagaaatatttttataactttttttaattcaaatttttaagttttgaccaactgaaggcaactttattcgatctttggatttcgggacaggtaggcattatgcgtacggtatcgtcttttgtacagtaggattgtaaaaaaacacaggaaacgacaacgacagcgttggcctggggagccgcttacatggttcacaaccctaaagtgatggagaagatacaggaggagttggaccaaactgttgaaaaagagcagcaaatttgttgggaagaccgactcaaattaccgtacacatcggctgcagttaatgtgaggcttagttcaaatgttctctatcggcttgtaaatataaaaatagttataaatttaaaagtgcatgaaattttattttaaaaataatccaaaaaatcattaaaagacaataaaattagcaacatttatgatagattgttttgataatttgtcaaaaaaaatttcaaagtttctttgaccgcgatgggcttttacccaatgccaacgaatgtttggtttgcaggaggtgctcagagtgggcaatgttgtggcccaggactttccgcatcggatgatgcgcgacacactcgtggacaattggacattgcctcggggacagccaatcgttgcacaaatttcggttgtgctaatggacccagaggtgataaatagaaatgaataaaaattgaattttatttagtgatcggaaaatatgttttagatgacggaaataatctatcattaccgttactattttaactggaacattaaaaaatggcataaaacattaaaaattaaaataaaagttatattttgccttcaaaaataaattttctcgactttttaatgcctt

SEQ ID NO: 19397 - DNA, 1119 bp, Heterodera glycines
cctcttcagattttccccgacccaaaggcatttcggcccgtgcgctttttggacgaacgcggaaagatgctcaaaacggacgaactgatcccattcgcattgggaaagcgccaatgcttgggcgaatcacttgcgcgcatggaaatgtttctgtttttcgccaacattttgaatcggtacaaagtgagtgatttctgagcgattttttaattgggttaagtggttcgggtggaaattcaccacatttattctccaaattgatcaaattcccactgagctctatagtataaagataattttattcttaaaaattttgctttttagatattgttttgtatttttttagctttggtttctttcgagcaatttcatttctttttttcactgactaagcaaattttcccaattttttaccatttcaatcggttcaataacagacttttggcatttacactcctcatgactattttatgcttgtcggagctcattatagtagaataggaatatttaacactcattattctgcttttgtcagctctccgctgggcaccaaatgccatcgttggagcgtcggatgggcattcccgtgctgtgcccaaagttcacgtgtcgcgttgagaagcgatgcacggaatagaaacaaacaatttgaaaatgtttttaattatccgatgctgattgactcattttaaacaaaaattaaagttttattttaacattttttccattgagctgcacagaaaattatgccattggtgatagacactaaataatgaaataaattattaatggttagtgctggaattattaaaataaaaaggcgttaaatatttgcatattgatgaatagggatgcaatttttagactctaaaaaccgccaaaataggtaggctttaggtctaaaaaccacaaaaatgggctctaaaaatggaaagtaggcactaaaaacctcatttttaggggtgtaaaataacaaaatttatttaaaaaagtaaaaaaattatgccaagtctgtattgcgataaataatttttaaaatcacaaattcatgttaagaaaataaatgaataaattttgcagatgaatttttgagaactttcatttcttaagggtgtattt

SEQ ID NO: 19398 - DNA, 2933 bp, Heterodera glycines
  unsure (1)..(2933): unsure at all n locations
ttttacgatttcgagcattttgggggcctctgaatgccatcccgggtccagaccaactggatttcttcctggacctgggtttcctagtttttgtccaggaaaaccaggttcaggacaaataagaaaagacncaggttcaggtccaggttagccgtgaaaaacctggatttcctggatataatttttaattgttattcaagtaaccaatgtttttttatttcaaattacaaaaaatgattaatctaaagatcaaatgttcttttatacgatcatattaagcatatttttggtatttgatttttgcaaaaactccttctttctttcctttttttccaaatttcacttttttggaatattatttaattgatttaaacagccatttatttacttcctccgtcccattaacacttaatttggccgttatgttttagggattgaatttgtcgcgcgggggcgttgacggcgccgcattggctttggcggcgtcgcgtggcatcgccagcgacggcaaaagcggtgtttctcctcggcttaaccaacacaggggcaataaccgattggcttctgccgatcagttttttgatccgtttggagaagctgctgaattctttggacagcgcctttcggtgttcactgctaaatttgaaaaaatcgaagaattaaattagtggattagtcgagaatttattcaagcatcaatcagtcattgtttcgaaggcaaatggatttgattactaaccaactaatcaataaatctgatgattgatcaatggatataaccactgatcagtgggtttgaacagtgaccggtggatttgatcaatcggtcaatggcttaatgaccaataggactgattgatcactttgttggtcaatgtgtgtggattgatcaatttccgctttggatttcacctcgtcctatagagaattggagtttcgcaaacagcggtcatactgaagaagcagttgatcagattgttcagtgtgaatttggccactgaatcattggggccaaagaccgaagcgacgagcaaaaaggcgatggtggagccggaccaaccgacgacttggagcagtacaatcagagaaagggccttgagaatgggcaaaccaacgccaacaactgagaaaaataataatttaaatgaatttaattaaatgaaattggagacacttaaatttaaagtgcttaaaatatttaaaaataatttttaaatggaatattgttcaatttgacgcactttcgcccttttttgcacgaatcgttcgccataatttggcataaataattaaatagcacaaaacggagccgtaaatgaaggaaatgttgaaaaacagcacaactttgacggccccagaaccaaaagcatcgccaagagaacaaaacaaaggccgaaaaaagaaggaatttgaaaagttataaattaaaaaaaagaactgactcaattgaggacgaagaaagatttttgaaaattaaaaacacacaaaacaaagggtacggtaaggtacagacatacagtaggaccgagaaagtgttctcgtcccgtttcgcataccttaacaattcagaatttgattaacatttttaccacagattttaaaaataattaatatattgattaatattttggtgattaattcattttggtaccaaaaaggcaaaaaagcgctgagcagccgatcaatgctaatggccaacattaatgtataagcattggacgtgaagaaaaccggcaaaatttgcaaaaggccacaaaatgtcggggacagaaaagcgccgtcgccgggccaaaggagcacagaaaaagggatgaacagctcgaaaaagccgagaagggagcagagggcgtgcagggcgatcagcacttggcaagtgccacggagagaactgaaaaaagaggatggacggtaaggaaaaagtgatcaaaaggaccatttgatcaaaaggtcacaggagaagcgatcaaatgcttttgagagagcggaaaagagagagagagagagagagagagttagaaagagaggggagagagagagagcgaaggggggagagagagagagagacagctaaaaaaaactcggcgtttgcctgagcccccattttgattgagtcatatctcagataggacatatcacataaagttccgctttaaacatgggtttcgggcagttcggcacatgcccaactgaaaagggcactcacttgttcctaattgtcgcaattatcaaaaaagtgtccattattattccgcaaacattgaccaaagcattgaccgaaaatgacaaataaatttgaggcgaatgttttgatgctgttaaaaaatccttaaaatcgaaagtcgttttgaaatgccaaaaaatgtcaatttcttacaatgtaaatttggtgctcatcgcttaaattggccatttgaagtgcaaaataaatatgaggtgaattattttcggttttaaataatttccggcagaaaaattaatttattttttacgcgaaaaaaaattccgttttaaaatgacgtgaaaagaagcattttaagaagcatttgcgtgagatggcaaaagcacgccaatcttccgttgttctaaaatgaacaatgccattggaaaattttgtaaatgaaacaatgaaaaaaagggaaattaattttatttttgaattttaaacaatttttaatgaaattaaataaaacaattcattaaaactcgtcacgagaacatttaattctacgaatgaaaaaatatgggaaaataattcaatgctttgtgaataaatgaaaagtacaaaatgtactaacatttttcaacaattaattttttccttttttattttcatttgaatttttgattaattctttgaagtcttaaatggttttaaaatatcactataataattcaacatatttattttattcatttctttctattttatttaa

SEQ ID NO: 19399 - DNA, 1285 bp, Heterodera glycines
  unsure (1)..(1285): unsure at all n locations
tcttaaaattgagggaaatctttttattgtctattttaagacaaaaagaagacttgtagttcaggaaaacttaattgactcaatcataatttttaaaaaaatgagaaattctatattctttcaatgctaccctccaatcgtattgacgaatttttacaaaaatctaaacaaaaaaatttgcaaactctaattctcatcatgatcaaacattaactttttttttgctgatcacttttttaaatcgataatttgaaaaataatttggttgcgtctgagaaaagttatgagttgatttagtcaaaaatttagcaaattatgcactttttgtccttcgactcaccacggggcattacagccgaattaccataaccataacgaccgtagccatcattttcaccaattctaccgtgttgatcgatcggatacggtcgaatggcagtcgaacgttggagaagaagcaaaatgagcgggagaagaagcaggcaaatgctgaatggcctcattttggggggatttggagttgggatcgggtttggaatggaaagtgattggtggagagatttggccacccttaaatactccaaaagcgatttggtctatatttattattgggttttattgcctttgctataaaaaaattatggattaataagatgggcgggccaatatcattttgactatttttgaattttaatatggaaaacgtaaaattgaacagcacttttgccgttttatgatttgaaatataataaaaaaaaatttgcatgtgaaagcttttggcaaaaaataaataaataaagatgatggaataacgaaaaagaatggagagatagagaggcattaagccagttatgaattcatttttatgtttttttatcaaaattttttgacacttggacaatttttgaattttagaaaaatgaaatttagaaaataactgtaagaattatttttaaaaatagatctatgttacccgtttttaaattttatttcaaataaatttttcaattttatttggttataattagggttgtaaattatatggactaaaaaacgcgaaatatggacattaaatatggactaaaaaagcccgaaatatggactaaaaagggcaaaaatggccaaatatggaccaaaatatggataaaaaatgccaaaatatatgttgtaaacccccaaaaatcccaaaaaaggggtgcatatttaatatttgcttaaataaacctaaaaagtacaataaacaaccaaaaaatggggtttaaaactntaaaatgcatatttttta

SEQ ID NO: 19400 - DNA, 1433 bp, Heterodera glycines
gatcaaattttcaacatcaaaatttgtcgataaataaatctgcaataaaagaatcaccggttttatcttggcaattaactgaagtgcttcgttgccctagtattgtaaacactcaaataaatatggtaataaaaaaaattctgtagaaaatgcgcgtaaaactgcaacttgaagcgtaacattatttaaagaattttttgccgtgccaattcatttttaattcatttgaactgtttttcagccaaaaatggtcatatacaacagaaactcggacaacggcccagcgcacatcaaagggaagtgccgctaaaatttcggcgtgtaattcagtcggcattttacttttcggcatgtttcaaatttttcggcatagtttttgttatcggagaaaaggaaatgtggacggaataagaatgacgaatgaatgaattaatcataattttatcccaaaaattttggggaaaccctgcgaaaatcctgaatttaacacaaaattttaacttaattaaaaaaaaattacagaataaggaaaataggaagtgagaatgttttcgatgcagagattaacgcgttcgcgtcgtccaaaacatggaaaatgtatcaaaaaatgtcggagtgatcggaagcaatagcaaactgatcaattgcctaaaatcgtaaaataatgagtcattttaccaataattagcaaagaattttttaaaaattacgtgaaaatggtaataaaaagttaaaatgattagatttgtaaaatattccttcaaaagtttccggaggcgcgcgcctactggcacagtcggacctaaaattctaaaatttacaaaattgacccaataattggcaattgtttgtgaaaagcttgaaacgaagcccaatttttttcgaaccacgaagctcgagttttaatggagagtttacatctaagtttccaattttattattcaatttcttgctttttcaacattacattttggcatactgtcaccaaaacaaaattcaaaaatcattaacattttatcaacatatcatctcatctgtctgctgccccctttccaccattctttttttctcagctcatcatcatcaatcagttcgatgacggcattcccgggatcacattccgcggcacagcaacaccgggcccgtaaggccaacgcgttggcaatggacgaggtccgaaagttgggaatggccaaggcgttgtacgaattgggaaagggggaggaggcgttggacgagttgggtattttggccgaggcggcgttgccggctgcagcagcataatggcaccgcttcgatggttgggtcgtcctcctccgccgccacccttgccattgttgccgttgccatgccatgaattcgatccccaggccttgccttggcctggtcctccctgtcccggtctccccggcgggtattgcggtggattggtt

SEQ ID NO: 19401 - DNA, 1186 bp, Heterodera glycines
tttgtcgccggttggagcagcagaagtgccgagtcggtgttgaatgagtgtttgcatctgaatggaggagctcttctgaattgcgatcttatcagtgcctaaaagttgccaagacaacaaaacttggcactggagaggcccaagatatgcaaaaatcccgagcagggctgaacgtaactggattgtcgggtttcgggacgagaaaaaggtcaagtttcgggattcggcacgagaaaatgattcttcgggacgagaaaagggtcgggtttcgggacgagaaaaggtcgggggtttcggaacgagaaaaaaggtcaggtttcgggattcgacacgagaaaatgattctcgtggacgagaaaaaggtcgggtttcgggattccggcagcaagaggttcggccaaatcaattgggcgaaattaaattggaaggaaacgcctatcaagacactaggaattccaaggcctctaaaaattacgaattgaataaagaccctccaaaacgtcagggattctgaattcgggaccagccctgacccggagactattgcggcaccaccaccaacacactttcgctccatttcggccaaattagcgcccaaaattcgcacaagcgccgcctcaatggaacgagcagtgatgataaagcggatctgacgatgcgtggtggacgagccgagacgcgcagcagctgctggtgatgaagcggtgcagagaagcagctgacgacggagcaacgcgcgaacggaaagggcctggtcaacggactccaccggtactgaattggccgcgattaatttatgccgggggcagaggcaatcggcatatggcactgcccctagtgatgctcgagaaaccgaacatttccggaatctgggactcgagacatagaaaatttccgagaatttttcaatccgaaccgacaatttctcgagacccttccttatataaccgagaccgaaaattttccgactcgttactttttgactcgaacttgaccacaaaagaaaccaagatcacaaaacataaaatgtttcaaaatcaagactgaaaattttctgaagactcgagcccccccccaccctaaaaaacggagaattctcgagtcacgacccataaccgagattcccaagcagctttaaatcactcattgaagtaagactgctcttgaagcgacagactcgagacct

SEQ ID NO: 19402 - DNA, 2092 bp, Heterodera glycines
  unsure (1)..(2092): unsure at all n locations
cgggtcgaatctcctatagtttggcattttgttntaaaatttaaaaaatgttatttgataaaaaccgacacagccaaagtgccatgaagtcgcgagaccaatgtgaaaaagtaacgaattcaagagccagaattcttttgattaaagcagggaaatctttcattcacgtagggacaatattccttccccgaaataaaaaattaataaatttaggaaaaaaattaatatattttttgaaaatttgtatcaattttgattgaaaattcgttaaatttggaagtttttcaaaatttgcctctgcatttttttggcgaaaacccgctttaaaaaaaagtccgctattttagcccacacaaaaatgcttaattttctaaatttcgttttttcaaataagaaattttaaaaatcaaatttccaaaaattttacttgataaaattaataaaagtaaaaaattttcagtttttctgaaatttttagtgatgagaattgattcggtaggaactgaatgaggggggggggagggggtaggcatcccaaactgatcatctcagcttgttttgatgcccctttccatggcatttgcaccaatccaccgctcaccgatagccctggcgaactcggcccgctttgaagtggccgccgctgatcagcaaatcaccggcggcaccgccaccgtttgcttcttccgccttctgcttggccagttcaatgaccaatgccaactcgtcgcgcagcgcctgatcagcgcgctcaacattgcggtccggatcattgccaaataaatgtgtgccgtcggcgttgaacagttgccacacaggcgcttggaagcggttcggcacgggctggtgaccggcggtgcctacaaagccaatgggccagccgcgctcggcctcgtcaaattcggcttcaagttggcgctcgatgccctcaatttcggcatccaattggccaatttggacgtgcacaaagtgctcaagcagtgcccgaacgtccagctccgagagcagtggcgagacggtcagagagcgattgaaatttggccaatgggtggccaagtgggcaatttggtctaacaaaagcaagctggaaatggtatgccaaaatttgaaaaatagggaggttcgggattaaaaaaaagtctcggggggatcctgaaaataaaaattgggagaaacgggccgtgggagagaaagtccaaccaagtggggcctggattccgtaaatagggaaatttcaaagaagttctaacagagagccaattggggctgggatttgacgggaaaattgcaaaaaaaaaaaaaatcgatcaaattaagtcctcagtgcccacgactctgtaagacaccaatcgacttgaaatagtgccgcaattgtacggcacaaccttggagttgtacattttaaatgtgccgatgcttgagatccagtgccgatatgccaaaatcacgagagttttctcgactcagtattctcgaacagacatatggcacaacacatacagtacagtaacaacacaccgtactgaccgtgcaaagggagtgccgggtaattattgttgtcgggtacagtacgctgttgctgctgctgttgttgttggtcttctgtaggcatttgctgccaccacaaatggtccacccgctgtgccgacgggtgacagctcaaattggtggccaacagaatgcacttggccaacgcgaactcgtccggggacttggaaagagattatcaataatgtgggaagataaatgcgttttgaattaatttaatttaattaaaaattcgggaattttaaatgcgagcaccaaaaaaaatttagagaatgaggcagacgctaaagcaacaccaacaattagggttaagccccgagccctcgaagggcgacatgtcgggggtcggggcggggaataggtccgaaaaacgtactcgagtcggatcggtagtctccgggctcgtatataagcgcaacgaaattgcacatccgctgtctcttttacaagtgctatagtgtatagtgttctatagtgtagagtggaagagggttacatagaggaaagactcactggtcttcctgataccataatctcgaaaatc

SEQ ID NO: 19403 - DNA, 2816 bp, Heterodera glycines
  unsure (1)..(2816): unsure at all n locations
cctctctaatatttgcataaattcatatccatatacattctaattttatcctttcatcataattaatatatttaaaaaatattttttctttttgcctatcgcatattatatcaatctatagatgttcttccgtggattgagttcaagaagtgagttttctgatcaaatttctgcgcttaattttctgttcttcgaagatgtctttcctcaaagtgttcgcccgtcgtctctttttgcatgtcacttttcttcgggtaccaacgatgatgttttatttgaacgggtcaatcaaaaattggtcatcacgctgaacaggcccaaggcattgaatgctcttaacttgccgatgattcgcaaaatttacccccagcttagggtaaatcatttccggataaatctactaacaatgagtcgctttttcagaattcttccttcgatttggcacttgtcaaaggtacgggtggcaaagccttttgtgccggtggcgatgtcctcggtttgtcagtttgttgaatgcttatgtattttttttctttttagctgtctcaaaatcctataaggcgaatgatccggaccgaatttttcagcaatttttcctagaagaataccaactcaatcatttaattggatcactcagccgaccctacgttgccttcatcgatggcattacaatgggcggggttggtgtgttttgctaaataggtttgagtgcgaagaattaggcatttttgtcattgtccgattacaaaatctgtcctgggttttagggatgtggcctctcattgcacggggcttttcgtgtggctactgaacgaacaatattggctatgccagaaacggcacttggcctttttccggatgttggcggaacgtactttctgccgcgactcagcggtcaactcggcatgtttttggcactgacaggtggcaatattcatgtattatttccagacattgatcatttttcctcgtaggttttcgtctccatggtgcggatgtgttccatgccgggctggcgacgcattatgtcccttttacttttttacaattatattttcctttttcaggtcgagtcagccaaacttcaacaagtacaagatgaacttttggcccttccatctccaacaaaaaaagacattgaacaattgctccgttcccatgggccgtccgatgtcgcttcctttgttttggacccgcatttggaactgatcgacgaatgtttcgcggcggaaagtgtcgaaacgattatcgaacgacttatgcgcagaaacgacagtgattttgcgcgggaacaatgcgaaatcttggcaaaaatggtggggttttgttgtacagaaatattggactaattcttcggtttttttacattcttaacgattttcatatttctttaacagagtccaacttccttngaagtgacatttcgccaaattcggatgggtgctaaattaaaattcgatgaggtttttatttttcatctttccggcctcaaatgttatattttttaggtttttcctattgaatatcgccttactcagcgttttatggcagcaaatgacttccatgagggctgcagagcgagtgagaatataaaattgccttttatgagtaattatttaagcataaccgattttttagctcggcaacaaaaataaaaggcttataagaatgcccaagttttttttctttccctgatatagcaaattagcatttaaccatttgagaattattttttaaatatcagcaaacaactttgctttattcaactaattgtaaaaattttgttttttttataaaattgcaaaattttgggaaaacttttcattttcagttctgatagacaaagaccgaaacccaaagtggcgcccttcggcattgtccgatgtcaacaatgccattgtcgatgcctatttcgcaccttttgacactccccaaaacgagcttcaattagagcgcattccttctaatatttaatgaaaatattgtatcttttttaagcattcaaatgttgcaaaaagaggaaactatcggatttctatatatttataaatgctttgttattttgtgccttactttttctaattatgagtattttcgttaataattacttttcgtttatgctttgggttttcccaatttttgtttttcaaattcttttctcattgcttttcctttctttttcgaatgtcttcccatccctccgaatttccgtcctcgtcttctgccccctctgttcacaatcaacaagcagctgaattcgttctgatcgagtacccgggagtgataaaaaatgttcaagcagcactcgacactttgggtggactgcgtgcaatttccaatgtctgttgttttttttttgttggttttttgcccaattgaatgatttttaaaatttaatttgcattattttaggcacatttcaacaacagtcaattggaattgcaattccaaccccaaaatccgtttaattcggcattgacgggcgagcggcgaagccaagcggcggttttctcgggccaagccaatttggtgttgcgcattcgaagacgaaaacggaggcaaacggctggaggaggcgagtaaaaaaacaaacaaataaagccaattaataaatggttcaatttaagtgattggagacattaaacttggcacagcatcaggcggaggcgccgagggaaaccaaatggaaattcgatgcatcggaatggtaaaaaaacaaacaaacaaatttaatttaaaaaaagaactcgctataatgccaatgatgataaaaacaaaaaatgagtgagaaaaataaaaagaaaatagccgtaaaa

SEQ ID NO: 19404 - DNA, 2518 bp, Heterodera glycines
  unsure (1)..(2518): unsure at all n locations
ctcagatggcccgcgctcacttggcggcgctcatcctgcaggggctcaggtggncatggacccctcccacacctacccttggctaccgnaatccggtgaaaaagtgatgtgtaactactagcctcagttcggaatttgtccttcagaccatctctgatggagtccgacaatccaagtctgtccatcatgtccaatccgagcaaattcttggatccgtctttggaaacaaagaaatgtccatagcatgagcggtctccgaacgaaaaagttgtctttcctttgccaacgaatggacgaattgtgccatcgtggtactgagcacgttcttgacaacggctcaatttcaaagctccgatttggcgcacagtgtcctcacaaagaacagttccctcagtgcctaaatcagcaatgaaatccactttgtgcccattcacatcaatcggtacatcgattattccattcttcctctggttctcagatttacccaggaaaactcctccaacgcggacgttgttcgccgctttttcattctttcctccattcttcttcaaccatgcctggtgcttggcacacatcctttccaagtggccactcttcttgcactttcggcaaacggttgtttcatgtcgacaattcctcgacgaatggctcaaaccgcatcgccacatacgcgttgcgatcgattgctgctgcgtgttcctgtcgaaatgctgctctcattcgacgaatgatccgagttcgttcgtttcttttttgccttcaatttggtcgccatcaagtttcgtgagcccatcggttgttgttcgaggacctttgcttcagcgatggtcgactggtacatttggaggtcttcgacgactccatcatactcgaccaggtcaccatccgctgcaagcttcgaaagaattcgctttctcagctcggcatccttcggtgatttcagtgccgtcaaaagcatgaggcaagaaaattgctcttcgttgagcttttcaaatcgcttatgtctgttgataaaaggacgaaagctttcatcttcgcttttcgaggccctcagacattcatagcgatcaatccaaatggattgtggccggctgaaggcaatctttaggcgctcctctgtttggctgtagtcaaaatcgatgactttcttcggcagacatgacttgctgtactggctgaaagccacttcactcagcttcgtcatgagcagcttgacctttgcttcgtctgccagttgcggtgccgcacagtcgagggcaaaattgaagcgttccaaccaatcggaaatgcttctatcgtccgatggctcaaaacagtcgatggtcggaagcgttggcaaagcatgcgcatttgcggctggcgcaccattttgatttgccaataattgctggattgccgcagtgagttgttggattgcgtcgcccatcttaaccacagctcgtggactttcccctcagctcgagagtactcgttttaaatgacgtgtcgttcaccactcaattgttagcagcgccaagctactagacagagtgggtgcgcgtggatgaactgaaatgtgtcgccaagacacaaaatcagcggcgcaaaatttctcactactaacagtgtcaaactgttagcaggtccaacaaaaagttgttattatcgcctagataatagcaaatgcaggcagtcttcagcgatgacacagcaaaactcggttgctgtcaaacctcttcctccacaatcagatcaataagcccacagtcaaaagtctgcacgggcgtcgccaattgttacgccccaaagtccgaataggaataaaataaatatttatttaaaaagaagggacagggcgaacggggtcaaatatcgattgggagcaaagggaacaaataaatggagaagaagcaaaagaatgatggggaagggtcaacatcgcgggtatttatgggcggaaaagtgggcgtgacataacgaagggagaagggaaatacaaatgaaacaaagggtcaaaatgggcaccggacaattgggtcccaaccctaacaaccaacacgccggacccagccgccaccgcgttcaagctcgagtggttccagggagacgggatggtgcgccgcaagaacttgccgatcgagtacaacgtctgatggaaggatgcttcgtcacctcaacatggacatgataggatcccacccacccaccgtcccaaaattgtcattttgtcccccatcatgtaaattgttgtatctgtatgtaaatttctgtgatcatcacttcaaatgaatgtatatttaattgttgcctatgtaattgtattgttgttgtgcttaataaatgctcatatgtgcttcaattcaaatgcttttgtaggaaggggggcggggtggtaaaatttggcgtctgtttggtcggagggttagctcgcgtagaactcggtctgctcactccttgtaaattcaggtcaaaatgagttttagacaaaagtggtccttctagagaagtctaccagtcacacatttcgtttggaattcga

SEQ ID NO: 19405 - DNA, 2581 bp, Heterodera glycines
ctcggtgtgcgcaatgccaacgtttctatgcccgtactcgaattgctcggtgattttttgtacaaatgaccattgattgcattattttaaacaaaaatgctcgtgaatcggttaaggtctttctggtcttctcccagtgcatccacgaacctttctccgggcgcgaatgaaccgattgaatggtaaatgccaatggatgcttactgggataaattttcataattaaaaatgaattttttgtatcttggtgggtactgctgattttgggcttgtttaacctcattgtattacatatttgattgacattttgttttcattcagtccgttttttaatttataggcattgctggaaatgcgcaatttttcaatacgcagcagaaggaggaagaagaagaagctgatcagaaagaagatgaagaaaacggcgatggaaaagaaagcatcactcaagggatttaaggcacataaatgttgtaccaatattttgattaaagtccgttttttaattttgaatttagttcctttaatttacaattgatttatccgtttatgagcaaatttgggcttgggatgtaagacaaaatgccaataaagccaattcaataattttttgcgcgctaagaaaatcactgatcgatgccctatttttttttttgatcaggtgggcttgacccatagtgcaactacctatccaattcctaggcagcagttttcaaataaaatcagtaaactaattgtttttctaataattctaaaaaccctaagagattttgtttccttacaacaatatgttttgcctgtttcagtgtttcgatattctcaattccgttttgaaattaacagaattgaagtctcaatcatgcggtttttgttgagcgatgttcggccacaattattcgactgcatttgttaatcgcatttcttctccgtttcggttgctgtgccttttcattgcctttcttcttctatttcgacaaaccaatgccaattgttcccatcaatttttcttccgtgaagacaatcgccccacagaaagccaaggcttggaaaaattagaaatcacttttaagttagaaattctttaatttaagatgaaaacagccatcaaagccttccctggaccttttttgaggacaccaaacaatgcgacgacgaactttcttcgttgctttcgagtgggaatttctcggacgcacaacgacaggaggaaggacaacggttggacagccagcagctgacggtgactccgtgcgttgaccaattgctcgacatcgaattgacaccgctctctgtttttccagtcggaaaaaacatgtaaatgaaaacaaaacactaatgttgtgttcgtttttaaatgagaggggggatttttatacgggtttaggaagattcattaattcttattgtacataaatgatgaaagagtggcaatagaccagtttaggtagatccccctttttggttaaatttttcttttaaaaaatatttcagttcgttttgtgtttctttattgaatcacacagctaaagcggtagctttttgattttgcagtatttctgttttttctctcttcagacttccctatgtgcaactgaacatctccgtcaataccttttcttccgttgatcagctcttctttcgcttccgttgcattttcgcaccaaattcggccgattatttgtgccataaccatagcattcagctggagaagtggggccaaatgatttggccatgtcggaagcttcaaatcgaacggaataatcaggtacttgtcaagaagggcatttaatttacattaaaataagcaatggcctggcaaaaaaataaaataagaaatggtttgacaaaaaaatgtccaaattccagcacgtttctgttccccaattccacttctcctacacgtgctttcgactgttcagcctttcacaatatgtcatcgaatttttcgtgctaaatcggaatgaactttgcaggtacagaaaaaaagaggcaccacttttatctgtcatgaaagaatgggaaaatggatcggacaaatcttgatggtcaattggctgtgcaaagcattcttttttaagacgcgagttgcttttcaccattcccatggagcagcagttggacccgaaaattgcggacttttacaacgcaattcaattggaccgggaaaggacggcactcgtcgcgccgagttggtctccgctggttgcgttggacacttcgtttgacgatgtcagagcgcattataattctattcgatttaaaacacttatttttagtgtctttttgttcaattgcatccgtcggaatggcttatgcaaaatcagcaatatcgtcccaagacaataaatgtcgccgttttttccacctttgacaacgacaacaacggcactgacagtggacttaatgccaacaaaaatgatgggcacggccaccacaataaccgaacaattgaggactatcagccgaagagcattgttgggcctgaagagggctatagcccactgaaagcggagaacagcgacacaaatgtggcagtgacaatggaggcgaacaaccggcacagccaccttcactttttggt

SEQ ID NO: 19406 - DNA, 1154 bp, Heterodera glycines
  unsure (1)..(1154): unsure at all n locations
ctaataattaaaaagtaagaaagggttgtgcatttggatgttgactctcggataataaatttatatttgttattaaaagttttgctagattcattaaatttttaaaatttaataatcattagtcatggaatatttttacaaatattttttctttgcaataatttttcttttagtggtttatgctgaattttttctaaattttaataaaattgttaatttatttctgcaatatttaatgttgttaaatctatatatataatattttcctttccattaccttgccatcaaaaaaacatttttatgtgtttttttaatgttgaatttttttaaaatattcaatctatattaattaattttatttatatgatcataaattgaatttcatggaattttttttttattttttgtatacgacaagttatttaaacatgaaaatttttagcacaatcttatcaaattttgccattattcattattatattattaagttaaaattttgaggttttcaaaaatacaaagcaaattcttatttattttatatcagaatcatgttgcaaacaaaacctttccaaacttcttccaatttttggatttaatttcatcattaattattttctaaaaaatgaaataataaaaaattctaaaatgaggtatgtacaaaaactcctaaatatttaaaatagtaaataattgaaaaaaatttatctaatggtgaaataggacgaaatgccataaaaatgaactaaataagcttccaatcacattttatatgttttaaaaattatttttgatatctctttttaaaaaaggatttttaggtgtacattttcaaaaaaaaaaaattaaattttccataagaaaataattctcaaaataattaaaaagatgaaaatgtgtaggaaaaattgaggaaattttgatttataacgaatatataagaatatttaaataaaactcctacttttggtagtaaaattacgaaataaatttgattttactcgaaaattttttcggaaataataattttggncttatgtgactcggaaaatgaatatgtgttatatgccattggatagagcatcgttgacaactattgtaaatttttaatatttacggctgattgcgagaaataaaaaagttgtgcggcctcaaaa

SEQ ID NO: 19407 - DNA, 1688 bp, Heterodera glycines
aaaagtgaagaatactgacgtagttgcatttctatacaaatgatatgtcattcgacttctttcggtctataatgaatgaatctgaaggaatttttcgggggtcatcatttcctgatgagttacatacacgggactcaagtgtccaaatccagcggtactaaactatatctatccgtggctaaaacaaaatacctaattcattagttaaccgttgattttgtttttaggcgaagcctaagctttaaagtagggtagcacgagaccgagaccggtaccgataccgatccggtaattaccggttttttcaggtaccggtaccggtctcggtcccggtttttgaaaaaagtcaagtctcggtcccggtttttgagtatcggcggtaccggtactaaccggtactaaatatgcactggtaagaatggagttctgagagcaaaagaaagagagaaggttgggaaatgggaaaatatttgtattttgaataacatttcgccaaattttacagtcagtgggttgtgtgtcaagcaattgtccacctcatttatttctttcattttttgatttccatctactttttttcatttagaattaattgattaaaatgtctgatatttggaaacattacaacaaaaatttgactggtgcaatttgcaaaatctgcgcaaaaaaagtcacccgaagtgacggctctactacaggaatgtggaaacatttggaagcaaagcatcaaaaggaattttctgtgttaaaaaacacagaaaatttagggcaaatgggggaggataaggtttattgtgatttttattgtaatagagactaatttttagaaacaaaagcaaatacaatcttttttggtgacaaaaaagaatgagacggaaattgctgaagaacgcatcgtgcgaataatggtccggcaaaacaattcattctattttttcgatgacccagacttaaaggatttgtttcaaaaagcacatccgaacattgtacatcataatatatcttatacattgtgaatttatttttgaaggatcttggtgcacgagaacattttcgccgaaaagtgattcccaggatgtccgatcaaatccgttgtttaattcaatcgggagttggatctgatcattatgcaattacgagtgacggttggtctaagccgacactgtcaccacaattacaaaggttgataattattttttaataatgtttaatcattttaattgtaatttcagtgtcactgttcattggattgataaaagtttctctcgccacgatgccgtacttttgttagtaaaattacgaaataaatttgattttactcgaaaattttttcggaaataataattttggcttatgtgactcggaaaatgaatatgtgttatatgccattggatagagcatcgttgacaactattgtaaatttttaatattacgggctgattgcgagaaataaaaaagttgtgcggcctcaaaaacgaaattttatgcctaaagggcgatttccgagctttgttcactttctattaattgcaaactttacatttattatttttttaatgattttactaaaaaagactatcataccatttttaatctaaaaaaggattttgcggtatttatacatgcgattttgaagggttttttgttcaaaaactattttgagtgtgttttatagttttacttcactg

SEQ ID NO: 19408 - DNA, 1661 bp, Heterodera glycines
  unsure (1)..(1661): unsure at all n locations
atttcgtgaattgagaccctgaaaagctttaactnttggtttaaaataatgataataatgtcatttgttttgcataattcgcctgtaatcacttcatttttccaatttgtcccctcaaattctctccgcgccgtgccattttttatattccaaaagcatccatcgcattttggtcggccgattggaatgattggagttgcgcccgaatgctttcgatcgcttcttccaaatcctccaatgtccgctggtcgtcctcccttatggtcgggtcggtgtcctgctgaatttgctggcgaagttggtctgcacgttgctgaagctcttggagttgctgttcgatttgctaaattaacaaaatgataactcatacaaaggaccaaaaaatagtaaattaataattttaataaaaaaaacatatatggcttaaaaaaaccaaaattatttctgaattatgacctaaaactgtgaaaatatgacctaaaagtcccaaatttagagggtgaaattgatttggaaaaattccctttccaccgaaagggttctagaaaaaatgcggataaatcacaaaaatattctccctaatatggatctgatctaccggaactggtcgaagttttcggatggttaaaaatcagtaacggtaaaagtcggaaaatcggggagcggtcagtcatcagatgcatttttaggttcaaccagtaattttgcatttttctttttttctttgttggtttcttcaaatcccatcccaatttgacctgaatgttgacagtgatttgttgcgaaattttgaatggaaattggagaataaaaaattgaataaaaattaataatgaaaatgttctcattttatttatttattggtaatcccaattttctcctctttttcgtttgaatgggaaaaccaaagcttattttctgctgctaatggtgagaaattaatttccaaattcagcaaatgaaataaatattttttaattattcagctgcaatttgtgataactattaattgttttagtaaattaattcatttttactaatttttcttaattgatgcaaaattaaaaatttaatcaaaaataattaaatgtgaaaaataataaataaaaacaattatggaaaatggtcacaaatggccaaaagaatgctttgttggcattagattttaggcacagaattacgacatgaaaaaggggtgccagggcattttcaaaatcctaccattgaaataagatagctctacgtatttagaacttatcccctacatttaagccccggacaaatgaaattggacatttgcgcccggaatttatgtgcccgacatttgctcagcattccttaagggctattttgggacatttgccgcttgatcattctaaatttatatatgttttgaagagaaattaattatagttagcatgcatcaagcattcaatatttcctacactattattttaactattttttgttagcagaaatgagttaaaatttttaaaaattcataaaaaattaataaatcattggattattcaaatttatcccaagtcagtaanaggatggatcatttttctatttttattaaaagaattaattatttattcattnttattttaagtttaaaagaatctttttgttttttttgtttctttaatttaattttt

SEQ ID NO: 19409 - DNA, 1574 bp, Heterodera glycines
ttaggtgttctctatcagaatattaatttgaaatttttcgaaattacaaaaaaaattatggtcataaaatttaaacaaattttcagtcagaattttttgtccataacatttttgaaagcaatgaagttttttatattaatgtttagtcattatagaaaggatctcaaaatgctaaaaggaaaattttaatttaattgcttatgaaaaaagttctaaagcattcattataaatgctttgtttttaaaaattgtgtcagtttttttccaaattgtgaaacagagattacctatataattttattcaataaaaaatgaaaaataaaaaaataaaacttataagaattttttcaataccattatttaaaatttcaaaagaggaaaatctttacccaaaggaatggccaaatgccaaaatgtatcatcattcgaatagttcaataaaaaactgaaaaaacaatgagaaaagaaagtaaaagcgcagtagggagaacagaacaaaagtaacgcagcgaaccaattaaaacataataaatgaggtgagggaaaacaattagtggaactgatagccaccgattcgattgcgattgtttagccaaatcaaagctttatagacacgcccgtggtagaagtcggttttcatgagtttataacaacagatccctgcaatggtaagtgcaaaaatggaaggccatgactcaaaaaagcctaaagtaattgtgaaaatgttgagcaaaacgaaagcgactgccaaactgaggatggcgagcagtacatctgccgtcttttcaatttcggcttgctggctccgttttctgcgtcggtgccctcgtggcgacgttttgccatcatttgctgccgacgtatcggctggcccaccttcggcacccaaaagcagcacatttggccacaattgcatgagcaattggagcaaatcgcttggcattggcacggcattcgttgccagtgtttttttgattattttttgcacatttgccgcttcattttcacccttttccatgccgttgtcgtccacttttttggttttcgtcttctctttccccagtttggctttgttttgttttttgtcgccgactcttacacttcgttctttgtttatttctctggtttgcacttcatccttcacctttctcacttttcttcgtcttaaaacgccatccttgtctccatcattggcataggcttttctctccctattattggcattggcattttcctctttgatctgacccttcccattgtccccatgctttttgtcacaccctttgccctcggttcgttcttctgcttcttctccatatcttatgccatcttttccttcttccgcttttccctcggcatccaattgatgggacatcactcgaaataaatttttaacggaaagaaacaatttctgcgcttcagtttctgatcccgacttttgtgccaagaattcggccaatgtcccattaaatccgctaatggtgctaattttctgctctttttcattcttcctcaaatgttcaataatttgtttgccattctctttaatgaaattcgtaactttctccactaaa

SEQ ID NO: 19410 - DNA, 2608 bp, Heterodera glycines
aactgttgccaaactgcacgcggacgggcacaaagtgctcattttctcacaggtcctccgccgatggcatttcgctggccctttcattactacaatatttttaacaactatgagagtaggagggttcgaaaaaattaggaaatccacatattttttcttggactgtgggagacctggaatgcatgaaaaatttgtttttttttggtttaaagtttctaggatgtagttctatttccatttttgtccatattttgacatttttccagaaaacctgtaattttctctgtaaattttttgaatttaattattattttttgttgattttagttaaaaattggaaatttttgcttttacagaaaattaatattttagctgtttgtttttttttcttataaaataatggggttttggttttcatttagcgaatttgatgaaattccaggaaatttattatatccatatttttgcaattttatattcattaaatttgtaaaaatttaagatggtccgtgtgcttgatctgctcgaggaatacctgtccatcaaagggtatctccgtaattagaaaattgataaaaaaaaattaaaaataaataaattctcgattaaagctacccattcgaacgcattgacggcaatatacgcggcaatgatcgccaagcagcaattgatcgcttttcgaggccacaaagctatgatcgttttgtgtttttgttgtgcacccgagcgggcggtttgggcataaatttggtgaataattataatttattattatttttttttaatatattttaatcatcttttgatttgaatttttttttttgaaaatcttgtttttttgagatctctgatcatgaatctggcactattttaaccaagtccaacttcctaatctaaatttgaacaaaaaacaacataaaacgagaaatttgaattttcgatcttggttcaaattcggcttacaaattagagattataaattggtccaaatggatgtaatatttgtgctcattgtcagtgactaaaaaaaaacccctagaacaaattttcatgaattattattatcacaaaaaaaaattatataacctaataaaattcaaaatatacgactttttaactagcgccaaaaaatctcaagaaattaataaaattaaaaatatttttgtttaaatttttttatgtggctttaattaatcccattcatttgcctgccgatcattatacaatatttatcctccactcttccactgtgatcagacatctgcggacaccgttgtgctgtttgacagtgattggaacccgcaaaatgatttgcaagcgcaggcgcgatgtcaccgcattgggcagacaaaacccgtgaaaatttatcggctgatcaccgccaacagttacgagcgcgagatgttcgacaaggccagcctgaagttgggcctggacaaggccgtcctccaatccatgttgcacaacaacaagggcgaaagcacacagcaaatgtcacgccaaggtgtgaaaaaagaggcaaaagcagatgaagccacccccagtgcatgacaaatatcgtcgagacataatgtcgcagggacaaaacgtcgtcgagacataatgtcgctggacaaaacgtcatcgcaaaaaaatattttcttttaaccctagcctaaatcaaaatttttctataaatcagaaatttttgtaaacagaaacatcgaggttttcaaaaaacttctttttttctgcgatcttttgtcccggagacattttgtccattggcgttttgatcatggtggcgattgtgttatcctgatcaggggctgacttttgctaataatttctttgaaaatgatccgggttttattttctttttttaatcccccccccctcttttccaacacagaggtggaagatttactgcgcaagggcgcctacggtgccatcatggacgacaacgagggcaccaagttcagcgaagaggacattgacaccattttgttgcgccgtacacaaaccattcggctggagccgggcgtgaagggctcaacatttgccaaggcgtctttcacatcgtcacacaatcgggaggacataaacattcaggtgggaaaaaaagaaggcagttcattgggtatggtatggaatacggtagttgatgagtgcgtgggttaccgtactcttttcctttcaactattggggtggaaactaagttctgtcatagctgggaatcgctttctttttgaatttttaaaaaatgtctccgttgctccgctggccagctctcatttgcattttgtaaagcaatgtctgcggtttcgaaaaaatggccattttaattttccatctcattttggattttttaaaatttttgaatagaaccctcaaaaatcaaaatccgatcacttttattgtacgggtcaaaactttgctttgatcggttggaaatttattaaaagcagtttttctggccaaatcaagtccggagaatccaaatctggcctcagatttgatctctgaattttctctggcattgtactgctccatgtcgttgacaagaagttgaagcagtacagggtcatagaacagcaactgactaaatctgaggcgatattcggattc

SEQ ID NO: 19411 - DNA, 1015 bp, Heterodera glycines
  unsure (1)..(1015): unsure at all n locations
agtttttgagaattaattgcgtaattagaatttacaccctctagctgcttggaatgtcctccgtttttgttgtcccatcacttttttttgcttctgtttcctgctgctgcttctgctgttgttgtttctgctccagttgagaatggacatctgtcatttcgtcgtcttcagcaccgccgggaatggtaaatggacttttttctgatagaaacaacgaactttaatttattttaccaataaattactttaatttattttaccaataaatttggccaatttttatcaaattgtaagggtgaaaactaattttctaatgccccacaaaattgtcaattaaatttattttacataaaaattatattctgccgaaaaaatgtaaattgaatcattaagccattttctgtctttacctttttgttgcttttgttcactgtcgtcgtcgccgtcgttggccgagtccgcttccgccaattgttgttgtattttgacccgtttgcgcaactgtggcgaaatgaacacaatcggacgctttttccgctcatgtttgttggtgctgatgtcgtcagtgctgtcagaatgatcctgaaaattaaaaaaagttcgaattctaccgaaatgtaatagaaattggtatgcgtggacgaaaaaagaagttttttcggcatccatccaatcatttaacatctaaattgggtgtcacctgttgtagttggtcgctgatttggtcggcgacacgttcaaggaactgattacggcatttggtgtaccgtttgatgatttgctctaagctgatgttggcctcttgtgacaaagcgtacgcttcctcttcaaatggaaggcaatttgtaaaaagaataaaatgactttttccaatttttatttattttttgacaaatctcacagcaatattatgagaatgtgatggatatgtcagtagaatatatgaaacaaaagatataaaaaaacacaattttagatactaaanatatttttttttttgtgaaaaatttctttt

SEQ ID NO: 19412 - DNA, 1139 bp, Heterodera glycines
cccatcataaactaaacaaaaaggttaatgaattccgaaaatgcgaatatttacctgcaaaaaaagagcactcatctccaaaactgaggatacaattatgcgcatcctaaattcatttttaagatttattttatccgttttaccaaacaaaaaacacagacctcctgatgggttcgccatccttaaatagttgccaatttaaatgcgaatggaccaatttcaacgaactcttccctttttataaaatattaaaaatgcccaatttgaatttcacaggtggataatgtcgaactcaccttgcatggatgtcgcagcaaaactaaaaagatgttagcttaattgcaaaaaaaaggtttaaatgtaccgaataaaatcattctccccctcctcgtggcttttttccttttccggccttgaaagatacgcgcccattgctcaacgaataaaaaataaataaataaaatatgcaaaaaaagtacaaagaaatggaacatgtaaattcattggcaattacttctaataagttttttttattcttttacattaaaatacatttcaaatacctaaacagttttaatatgtacaaggcggagaaggcaaagaacttaaaaaaaaaaagaaaaagtaaatggaaaatctctgatgaattgtgcaaattcacgggaaaatcgcaacgattttaaatcgcattttgttaatcccaaaagagaaaataaatatatttcaaaattttccaaaaactaaaaaaatttccatcggtaaatcagaaagataatattcaagaaaagttaatgaataatgatgaaaagatcatttgaaaacaatgaaaatgagtgtaaatgttaattgagtattatgtggcacgaagaagacgaaggagtacattatgaatttataaaaaaacaaaacacagaattggcaatattggaagagacagggaaaacagcaaactgaacagaaatagcacaggagcacaacaacaaaatggaaaaatggcggggaaaagaaatgttagtggccaatactggcggtgctgctgctgttgacgacacttttgttggcaatcaaaaaatggaggagtaaatgctgggggaaaaaggatggcaaaattaattggacaattgaaatggtttaaggaa

SEQ ID NO: 19413 - DNA, 1466 bp, Heterodera glycines
cgtcccatcacattttacgcgtgccaacaacactttacgcgtcccatcacattttacgcgtcccaacaacactttacgcgtcccatcacattttacgcgtgccaacaacactttacgcgtcccatcacattttacgcgtgccaacaacactttacgcgtcccatcacattttacgcgtcccaacaacactttacgcgtcccatcacattttacgcgtcccaacaacactttacgcgtcccaacaacactttacgcatcccaacaacactttacgcgtcccatcacattttacgcgtcccaacaacactttacgcgtcccatcacattttacgcgtcccatcacattttacgcgtcccatcacattttacgcgtcccaacaacactttacgcgtcccatcacattttacgcgtcccaacaacactttacgcgtcccatcacattttacgcgtcccaacaacactttacgcgtcccaacaacactttacgcatcccaacaacactttacgcgtcccatcatattttacgcgtcaaaaaatgtttttcgaaccgtcaatcggaaactttataccttccgaatagtctaattgttcttgtttgtatactttgatcatcgaaatgtgcaaaagcaactctaagcacacttaatgatgtcaacagaaattcaactaatataagaaaaaaatttacaaaagcctaagcttaggcctagtctaacaataagccattgttcgagttgcctgtgtataagttgtcatgataaccttaggtttaacaacgaaatttatagttaaaaactttactgaatacctgacaaaaaaaaaagtttttctcttagttattaggacaactataataccatgagaccagggatggcacggaattccgaaaatttttggggcctcggaatgccatccctgccatggacacaaaatgtcatgggacgcgtaaaatgtgatgggacgcgtaaaatgttatgggacgcgtaaaatgtcatgggacgcgtaaaatgccatgggacgcgtaaaaccgattagaaccattgcttttaccaaatacgaaacgaaactgaaaaaatgtcattttttgcgttgattttttccaaaaaaatttcacggggattccaatgttgtgcaattgtatagaattgtggtcccgacgaaaaataaatttaaaaattttattttaatttttcctggggtggtgaaaataagctgattacgaacatgaactcaggttttctctatgattttttcatcaagtgatttttaaaattaaggaaattgttggacgtaaaaacatacaatgtgttgtagaactgaaaaagagctttcgaacgagctattgaatgtatggggaagttagatttttagtttttcgaaatttaattattggtctctttggtttttatgaagctgtctgaagttccgggccggtttgacccaatttatttatttttatgatcct

SEQ ID NO: 19414 - DNA, 1024 bp, Heterodera glycines
  unsure (1)..(1024): unsure at all n locations
cttctcaaaccacaaaatgaagtgaaatgaaatntggactgtagttcaaatgaataaattaatttataaataaataaacgaacaaaaataaataatcatttaagagaaattgtattaaatgaatgaaaagatattttgaatgaataaaaaattgaaaagtaaaagaggaactccgttcacctcctgggccaatgctggtggaacttttgttaaaatttcgaatttcaaaattaataaatttcaacgaaattttcccaaattgtcaacattaactttcttgcttaataaacaaattgaaaatttaatttggtttttttcaattattttaaataatcaaagggcgttgatttgcaatattcccaattcatttattttttcggggctcataaacagctgaaatgccaaataattgaaaaacaacaaaagtgcatcattgcaaaagccaaaaaggctcaggacatactctgagaaggcaagaaaagcctcaaataaatgttaaaatcggtaaaaaaatgaaatgaaaatttatgaatatttgaattatggccatgacggcaaatgtccgactcattcgtcagtgttttattttttgtaaattgaatgaaaatgaagaaagtattttttgaatgaattaaaaaatagtcatttttctattaatcagaaaacatacataaaatggtggtcaaatagcgcaatatcaccaaaataagagcaaaaatgccaccaattagtggcaaaaacgattattgacaatttctgaaagaaataaacaattttaattctaatttaatgacagtttaatttataatcagttgataatctgccgaaatttcgcaattgaaactctcgaatctggcaaagtctcgaaactcgaaaagactaaagagtgagtcaaaagacttgggtcttcgcttttgctgattgttagaccgacgaaacaaacaaaatacgaccatcatcatctgagttgaaaaaccaagagcgaaaggtcatagaccgcaccaaaatgccgggacatttcgcc

SEQ ID NO: 19415 - DNA, 1542 bp, Heterodera glycines
gcttttttgcacattttatcggggggggggggggacttttacggggacgtgacaaggcacaaccaccaccccatctcgccatcgggctgcgggtgggatggcggtacccgcctatcgccgggttgcttctgccggcagagaccgcccattttggcactgtcggccaccgcatttaagcgccttggggccaacaaaaaggcattcaatcccaactccccataatcctcctcttcccttcctaggtcaataatgaccgcgttgattagactcgtgtaagtcaattgggcgggttattcaattaagatttattttttctactcaaatttttagtttttttgccagcattgtctgcgctatggaaactgctgccctgggacggcgctctgtcaactcgagcgcagcggagccgacgaacgaacaaccgggtaaataagaattaaattaatttatttaaaattaaattaatatggagacgggggattatttttcgctgatttattcgtgaaaaatttttgaaatttttttgaacgtcgccaaaaaatgtaatcgtgtcaaaaaaatcaatttatattttttagtgaacaaatcctctgcgaatgagaagaacatggacgtcggagcgaatttgtttgtgggcaatttggacccggaggtggacgagaagttgctgttcgacacgttcagcgcgttcggtgtcattttgcaggtgtggggacagccaccaagaaaacaattattttttaaaaataatttccaataattttagcctcccaaaatcgtgcgcgacgtggagacgggcagcagcaagggccacgcgttcatcaattttgcatcgtttgaagcgtccgatgcaggtcgtctcatttatttttcaattaaaatttgacatttgttccccggacatttgcctatgtccaacgggtttaaatttgagtgatgtttaggcaatcagggatttaaaaaacttatttgaaccctattttggacatagccacaaatgtatggggcgaaaatatctgcagacggaaaacagagagttgcaacgaactccgtcaaattagaatacaaaattttgggaaagttttccgaaatttttctttcagcgctcgaggcgatgaacggccaattcctgtgcaaccggcccatcacgtgttcgtacgcgttcaaaagggacaccaaaggggagcggcacggcacaaccgcggaacggctgctggctgcgcaaaatccgctgttaccgcaagaccggccgcatcagtgcgtttgtttttgcatattacggcacaaatttttttgtgagaggggggggggggggatttcactaaattgtttaatctctaaattaaagacaatttagaatttgtgccctaattgcacaaatattgaaagcgttcgtcccacttccctcccctcccacattaaatttaattttaaattctccactcaagtcttcggactatctctagcaaaattaccttttgcaattaataaattaggaaaaaacggatttgccgacgttcataaaaatgtgccattttcaca

SEQ ID NO: 19416 - DNA, 3040 bp, Heterodera glycines
tgccaatgccatttatcgtagccgaatttttttcagttcacgacaacgacaatgatgatatgcattttttgtaaaaaatatatttttaattatgtttggtaatgaatttaattaaggaaatcttaggtagctcttaaaactttaatttttttctactagctttttgtaatttattgtaataaaaatctcttaaaattagttttaaatactaaacaaaattttctaacttacaagtctaaagaatcatttaattaatattttaatgaaaaaaaactctactcatcgccggagacattttgaaggcaaatggaggggaggaggggagaaagatggatgacaagaaagcctcgcctgaggggcgggggggggggggaatccgtcggcggaggggacgcattaattcttttcgtcggagcggccaaaaataaataaataaaatttgctgcactactgagctctattagtttacgaataattattaagaaagtaaaaatgcaaaaaattttgacttaaaaactaaaattttttgatacaacagaagcataaaacaatttttaacatccgtacaatagcgaatagcgcagccggaagaaaatttgaaagtttatttgaattattatagttaatgacgcgccgaattatcttctacctttatatgcttcaaatactttttatggagaatttcagcaaggcaaattttgtaaattcatcatgatattttttaacaaacatttttaataatttttcgagaattgggaattcattttaaacattccttggctatctgtttttttatatagtgaccggcaattttattggtatttccgtacaaataatttccgcttttcaattatatttttttaactttatgcataaaatagatagatccattaataatgaaggtagcatatgcaaacagaacgaatgtacaaaatatacatcgcattttcggaacctcagaaccgttcattttttaccgtatccatagcctccaaaaccgccaaatgcaccgtaaccaccgtatccgtatgcttaacacagaagaaattaaagaggcgaaagagtggttaaaattccttcaactaacaaaacttagatcatttggacgcaaaaatcagatacaaataatggatttacaggaaaaattcattgctcaaaaattttaaccccttttcttaggaaaatttaaatttttatcctgttttttagaaaaaactatccaaaaattaacattttttggattcggtttaaatattgaaaggattattgaccgagagttcgatttacgccagatcgtaaaaacgtcgaccctttcaaaaaacaaaaatcctgatacttacgcgaatattttttgacgaacaccacgtgcggaggtgacggcgggggaggcggagggggcggtggcggtggtgggggtggcggaggaggcggcggagggggcggtggcaccggcaccggcattggcacaacggggtcaaatggtgcgccgaagaaatcgaacggactgccatacgaggacaccgtgacgatgaacaacgaaagcatgcacaggctggcaagcggttttggcacaaatatcaccattttctgcctttggactaaaacatacaaaaattcttacgtctcgtaacaataattaattacaaattttgagataattttagttaatttaatttttaaatgagcgaaaaagcgattaaatcccgactttttgtttccactaccttaacaggggggacgaagccgagaaatcgtctgggaattaaggataatggctaataaattcaagtttttttgggtgatcggaaatgttaatgcatattcaatagagaagaatcacttctttttatactgccgcctttctgtgggcaaaaaaaaaatgggtgaaaagtcctccaacctcaaaattggcgcaccattacaacaatgccaaatgttctcgggagctaattggatcgagaacgaaggagagaagaagcagcatgggaagggtgcgcctccttttccaatttccattgtttgtgctgcacgaatagacaattttctcaatttatttttttttgtaaagaattgggcacctgcaattttactccgaatttttgcacttttctcaccgtaaaaaattgcttcccgaatttttcacggtggcgcaaaaggcaaaaaaaaaaagagagacggccgacgaaaacgacgaaaatgacgacgaacacaaaattggctctgttcttaagcagcgacggaggcaaacaaagaacgaatgaatgcatttgacttaataaactcgttcccccctcctgtggaagcgctaattactcgattactcggaaagtacagacaaatttccattttttgcccatctcctcacaaattgatggattacaaatttttctgtggccttaagataattaacaataaataagttgattttcttttaataaatttttaaaatcattttttatacatttacaaaaattttttatttatttcaaacgtcgaaagcagccaaatcgaattcactttaatcgtcatgggatttcgaagttccttgctggaacatattcaattgacagcttttaaatttacaaaacaattttatcagaaaaagaccattttacccacgaacacatccaaaggtatttgatttattattgtgcgagcaaaaaagaataggaaaatgagcaaaacaaaaaatcaataaatttggctatttaataagatttgtctctccgctgtacatcttttttttgatccatttaatttcaaattatcccacaatttttgagttaaaaaaaattaagccatatttgctttaataatggcgattcaaatttattgctgtgtgcatttatgcaaaccaataaaaacttccaatactccaaacatttcgtcatttatccccgcttaattagtcaatatttttggttctaaaactactgtaattgacattaattacgcaatttttaaatgtagattgcttttttttgaaaaacttgtcagaaagggtgcttattattgccattctgatggtttttatgctgat

SEQ ID NO: 19417 - DNA, 3017 bp, Heterodera glycines
cattttgcgattccgttggaaacgatatgcagattactattcgggggtggagagatagtacacaacttggagaggaagtgcggagaagggaagagagaaaggtagagacaacgaaaacactctgtccctttcttctcttcccttggccacccatcggctcgagtgcaaagggaaaaggatgagaagaaaagcaatgaagaataaaaaatttatttaaataaaaataaaaatttacagtataccaaaaaatgcacgaaaaataaacagccaatacacttgggtttttgcgcgaaaaaaaagtgtgaaaaccagggacagtcgaccacctgccccagaaaatgcgcgaaaaaacagccaatacccttgggtttttgcggtaaaaaaggtgaaaaccggggaccgtcgaggtgtgaaaacccggccaccgtcgaggtgtgaaatttcacaccttgacggcgacggataccgtggactcactactaattatattataataatttctttcttttttttatatttgaatccaattaatttcttttctgttatttatgcttgtctttttatctcatgtcttcatactctccttcctcttcttctccaggcaccggtggtgcttacatttaatattgcatgtctataaaatataaatttaacttagttttttcttcaatattattactttggttaattattatctttttattaaaactttttttttcaattgccaacagtaaaaaatgttgatcaatttttattattttaatttttttaatgatatttcagaagttagcattgatttattcaagtgactgaaataattggctcttatttctgccgaaagtattattattattattattattgctaaattaaatgagtatttaagtgaatattttttacaaattttaaagtggacccgattatattttcaattattgattcaagaattgaattattttagcaaaattatttaatattttattaattaagcgcttaaattatttttcaaaaattcttgttcatgcctgtgtagtatttcttcttgaaacattccactctattgaaatctggatttgtttttattttttctattcataattttagaaatatacataattattgtatcaatgagttatttgtttaagaatttttaaaaatttattaagtttatttgtaaatgacttattaatcatttttttttaattttagctcattacccatttcaacaagcattgactgtgaaaagaaaattgttttcaaaataaatatcctttattttattttatattttgacatatatttgttaggttaacgtaactattatagatagacataattctttccttccaccgattctttacttgttttaaaactgaatataatttttaatattcgatacgaatttatttttaataacatcttatagtaattgtattttttattacttttttttgttttgattgatgttttatgtcaaatatattttaaaattgaaactacataataaaaattatattatttgctgaattataatataatcagtttatccctgccctcatttgttattatttttaatactatgatttgttttaatatatcttataataattttaatttttatcgattttgagcgtttaaaaaattaactttcacaagaaattcctatatattatcaaaatagattaaaaaatgaatattacatttgacctttgtgtttagtttgtcacgattaatttgaaaatacttttaaattagttatattggttaaatttatatattgatttaatttttgtgactttcattaaattgttttatcgttggattaaactaaaaaacaaaacaaaacaaataaggaatgttttttttcttataaattatatgacatttccctgtttgtttaaataattaaaatttgctgtttaatttaattaaaataaattttaggctttattaatcaaaaactatctacattatttcaactatttttattttattctttttttattactttatataaaagataaataataaatttaataaaaaaaacattttacaattgactttttgatcaataatttgttttgtttttatgcctattagtcaacttcttattgcctatatttatttttttattatttattatttattttctttttttcataaatttcttcaataataaatattttattttaaattgtcaaaaattgactcaaaataattaattttatgtgaaaatctataaacaaatgaccaacaaattttcaagatttgcgcttccgttccccagtttgtgtactgtttgccggttacctttttacagtatgatatgtataatttttagaatttttaaattatttatgaaataattttagtcttaaaaaatttcttttaattatttaatgaccaagaaaaagatgacagaaattttacgtgtaaaccaaacttgtgaacaatttttgactgtttgacataaggcaaaactccccgaccgatttggtccaccccatctccgagccaacctctgctgatcccgaaaaagtggaccttgatttttctcacccccaggggtcacagtacctaccctaccatactttgtagtaataaatttttccaatttccaaaaatgaatttattattatttagctcttttttctttaatctcattttcttcatttgtttgttcgtatgcgtctttcttaaatgtataaatattttttttttgttgaaatggtttattattttaagtttgtaaaaaatgattttaattttaaattattatttgttatctctttttttctcttcaaatattttcttttttatttcatgaggtcacattttcttttaatatgctcattttgccgctagttactaagcgtagtattttgaaaattttttcacttttttttggtctattttttttttgttttttttacacataataatgaatattaaacattaacaagacaattatggcgaataaaaagtattttcacgcatttttatctcaaaaaaatttt

SEQ ID NO: 19418 - DNA, 780 bp, Heterodera glycines
atacaatgcttcgaaacggcaaattgtcgtttgggagaacacttggccacaaagttcggccaattgctgtcccacgtccgcctgagtgtagccgagcttaacacgccgttgtttgaacatcttggcaaagttctccaagtcctcaaaaaagtccgtcggtcggtcccttcgcttccgccggcccttacctctgaacacagctgttcctcctcctccgtcatccccaccgtgccaatgccctccaaaatgcttccgccgtgcggcccttcgtttgcgttttcctcctcgtcttcgtcatgttggagctgttgttggtgtatcatcgaaggactgtttcgcctcttaacgttcgcttcgtttgtcgccttttccaattcagaggaagaagaagaagaagaggacgaagcagaagaggacgacgccgagtggtgctgcttgtcgtcgggggaagggaaaagcattcgcgagggaccttctgaaagggaaaaggacgcaaaatgccaacaattgtcgttgggtggcacccccccccccaatgcgagccatccccggcaaagaacccaatttaacaacgtacccatcacaaaagaggtttgtgtggttggagtcattgccattgtccactgcaaatggggagcgattagcggaagagccgtgggatcggatggatgcacgagggacggaggtgggggagcgaggggctgaggctggccaaatttggtcggtttgacaatgacggattggcactgctgcgattggttggggggagggaggggtgcg

SEQ ID NO: 19419 - DNA, 1460 bp, Heterodera glycines
aatgattgtgtgccaagagtagcccattgttgaagggcgaaatctgcagcggaagaggaggaggaagtgagaagtgttgggtacgtgggaagaggcggaggcagcgaaagaggcggctgacccattggggaaacgacgattgggtgcggttgtgacgaatggcacgggccgtaggcactgccaatggcacaaagaggcgactgaacagaaagggcgtgaagctaaaggggcagtcactagcacaccaattaccgactgatcaacaccaaaaggctgaagcagcgccatttggtccattggcataatcataggataagacgcagtcattggccaatcagacggagagagaaaaggggacgaaccgatgagacaattggcagaggaggcggaggagacggagcaggtcgggacggaagcggacgaggcgacggaggaggacagaagaacgggcccgaaatgggcatgggaagggagcgactgaacaaagtttgccattccaaagtcaattggcaaaatgccaaccacccaccggttgctgctgataatcaacgatcatcggccaaaaatgtgtctccgaattcgccgtcgacgcgtcgttcttcgctggatggccctcctcttctccgccgccattctccgcaattatttcgccaatgtttcgtggccatgtgccgttattccaacaatgccattgctgaatataatccgcgcagtttccaaaagtgctgtccgcgcatgtgcgaaatgtcgcagaagagattgttgcactgtccgccggaggaatggaagcggtcctttggtggcgcgcgtcgactgccaccgcggctgccattacggaggcggcgaacgcggcggagggcgccggaggcacggggaggtcggaatggtcgctgaaagcaaaggggccgaggaatgcgacaattttgggagcggctgaccattcggatgacgagagcagctcccgcttgacaggcaccgaaggcgcattgcgcaaacgcatgacggaagaaacggaggaaacaatcggaggagagcgaggagacgggccagaagaagatgaggcatttttgggatgggaatggtggacgaagcgacgggagagcaacggctgggccaagtggtcgccgaaatgcgaaggaatggatgacgagggggaggcggacggcgagcaagaggccctcattggcattcagtggcggcaggggggagagattgcgccttggggagggaatttgcatcaaaaggtgcgggtgaatcgggcattggtgcaatgaatgaatattcaaatttgaacaacaaattcaaattgggcaggaggggggggggggtgttgggaaagacaatttgggggagagagagttggggaacgatgagagggtggggtgggaagagggagagggattgggtggaatagacggggcaaataatgggacgacaccaaacctcccggcgggcaaagg

SEQ ID NO: 19420 - DNA, 1081 bp, Heterodera glycines
  unsure (1)..(1081): unsure at all n locations
aggctctccggaacggattagcatncggggttacgagatagaaaattgtcctaaaaagagatagccatttttctgagaattaattcacaatttccgcagctcttagggtaatggaaaaaattttgaagaggctctccggaacggattagcatcggggttacgagatagaaaattgtcctaaaaagagatagccatttttctgagaattaattcacaatttccgcagctcttagggtaatggaaaaaattttgaagaggctctccggaacggattagcatcggggttacgagatagaaaattgtcctaaaaagagatagccatttttctgagaattaattcacaatttccgcagctcttacggtaatggaaaaaattttgaagaggctctccggaacggattagcatcggggttacgagatagaaaattgtcctaaaaagagatagccatttttctgagaattaattcacaatttccgcagctcttagggtaatggaaaaaattttgaagaggctctccggaacggattagcatcggggttacgagatagaaaattgtcctaaaaagagatagccatttttctgagaattaattcacaatttccgcagctcttagggtaatggaaaaaattttgaagaggctctccggaacggattagcatcggggttacgagatagaaaattgtcctaaaaagagatagccatttttctgagaattaattcacaatttccgcagctcttacggtaatggaaaaaattttgaagaggctctccggaacggattagcatcggggttacgagatagaaaatgtcctaaaaagagatagccatttttctgagaattattcacatttccgcagctcttagggtaatggaaaaaattttgaagaggctctccggaacggattagcatcggggttacgagatagaaaattgtcctaaaagagatagccatttttctgagaattaatcacaatttcgcagctcttacggtatggaaaaaattttgaagagctctccggaaacgatagcatcgggggtacgagatagaaaattgtcctaaaagagatagccatttttctg

SEQ ID NO: 19421 - DNA, 1051 bp, Heterodera glycines
  unsure (1)..(1051): unsure at all n locations
aaaaaatttgaagaggctctccgaacggattagcatcggggtacgagatagaaattgtcntaaaaagagatagccatttttctgagaattaattcacaatttcggcagctcttagggtaatggaaaaaattttgaagaggctctccggaacggattagcatcggggttacgagatagaaaattgtcctaaaaagagatagccatttttctgagaattaattcacaatttccgcagctcttagggtaaggaaaaaattttgaagaggctctccggaacggattagcatcggggttacgagatagaaaattgtcctaaaaagagatagccatttttctgagaattaattcacaatttccgcagctcttagggtaatggaaaaaattttgaagaggctctccggaacggattagcatcggggttacgagatagaaaattgtcctaaaaagagatagccatttttctgagaattaattcacaatttccgcagctcttacggtaatggaaaaaattttgaagaggctctccggaacggattagcatcggggttacgagatagaaattgtcctaaaaagagatagccatttttctgagaattaattcacaatttccgcagctcttagggtaatggaaaaaattttgaagaggctctccggaacggattagcatcggggttacgagatagaaaattgtcctaaaaagagatagccatttttctgagaattaattcacaatttccgcagctcttacggtaatggaaaaaattttgaagaggctctccggaacggattagcatcggggttacgagatagaaaattgtcctaaaaagagatagccatttttctgagaattaattcacaatttccgcagctcttacggtaatggaaaaaattttgaagaggctctccggaacggattagcatcggggttacgagatagaaaattgtcctaaaaagagatagccatttttctgagaattattcacaatttcctcagctcttacggtaatggaaaaaattttgaagaggctctccggaacggattagcatcggg

SEQ ID NO: 19422 - DNA, 1988 bp, Heterodera glycines
  unsure (1)..(1988): unsure at all n locations
aaaaataccgatcccaattttaaataatttaatgaaggttgtcataatacaaatttcaatgagaaaccaaaattattccaataaacttagattcaacatgctagacacaaatacttattgataaaatctataggaaaaacataagtgatttttattcaaagaaaagcatttaaacgaagtaataatcgttaaaaatctacctagctaagagacattttttggccatgaatatgtaaaaaaacaatacaataaaagataattttgttaataacttaaagataacaaataaattttaatttacattctgtaaaaataatacacgcaaattattaaattttatttttattattggttatgataataaatgaattactatattgtgatgaactttgcataaatgaatttgttcgcctcatttaaacctatgactttttaatcaaacaataaaattatgattttactagtattcttaaaataatccatacctagataattaagagtaaaatgaaaaaaaaacaaaaagacctaaaatatacaaaattaaatgaatggtaacaaaataataaataattgtaattgtacataaatgcttctgccctctagatttatcaaaatcatttggagtgttggatcgctttttgagtgatttttctcgacaaaattcagtgaataaaacttaaaataactaaaagataagagattggctaattataccaaaaaaaaatcaaacataaaaacgtctttttattcatatcttaaggaactatataaagaataaatgaaataagccaataatccaactatttattattataaatttaacttaaccaatatataaaaaaatcgatcaattacaataataaattttaaattgaaagagcacaaacaagaataattaagaattgctgccgtgttggaaggcaagtgtcaagaactatgcaaaaaagaaactataaattacatatacgatctattagaaataattattaaaatttgatttaaataaaaaatactaaaaatattaaatttaataaatccaaattacaataaaaattatggcaatataaatcaatgcatcgaatagttcaatacaatgaaaatattcccaaaagaatcaactaaaataaaataaagaaaataatttaaaagatttattttttaacaataaaaaaattaaatttgcctattaaaagagcgtcttttattgaaaaaagaaaaaatgtaccattatagaaaacgtgtaaagctaataaaatgcttttcaactaaaggtattcaaaattaatgtaagaacagataaagtaaaaaaagattcaagatatatgtttttcatttatagtaaaaaaaataatatctattaaaattaattaattgaaaatcaaaaatcaagcaaccgaggcatccaaatctcagtaaagaacgtacgcaaacaatagatggtgaaaactttttaaatcttgtgataatagttcaacataaaaaggtgctaggacaaagtccgaataggtaagttattaaatttgataaaaaataataatattattttataaaatgttaatttttaatttttatatttaaaagattttgatacatttttgagctttttattctacatataaatttatttttaaatgaccttatttgttaatacgtaaacaaattttaatgtacaataattgtcatatgtttacgacatccccatttatttcgtaactttgtcaaatgacggtcaatctgcacaatattggtatcaaaaaaatacatgcatcgaaacctcagttgagttatttcggcattttttggaagaattcagttaaaccgagttttaaccggtttnaaagtatgccattttgcttacctaagtnaaatgttggcgaatttttgtttgatgccgttattatgtgtttccgcatctttttattgggagatctggggtcctttttggttttcccttgtctcttctccggcattgcaaacatttattgcag

SEQ ID NO: 19423 - DNA, 1221 bp, Heterodera glycines
caaatttgaaattgtttaacaattgccttgtccatgttgagaaatgcggaaagtcttcattttcccactttccagctgttagacattcgaatctgtcgatgaaaagttgattgtggttttgcaaagagcttttccaaaattttcactgcttcatcatagttgaaatcagtaactttttcggtagatagaatttgttgtactccgaaaaagcgttttccaaaagtttgttcatcaaagctttcactttggtttcgtcctgtgcgtttggtgacgcacaatcaattgcaaacgaaaacctgtcaaaccattcggaaattctgctcttttcttcatttggttcgaagattccgatgtccggcaaatgcggaattgtcgcatttgcttgctggttttgtcgtggttgtccctgtcctccgacgaattgagcaaactgcgtttgggcctagtgcgcgcttgaacaccttttttgtacgaagtacttcctcggagggcaagtacttcgtccactacacaacacctttcaaccctctgttcggacgaagtgcttcctcagagggtaaacagtaagtccgctacgtccctcgtgaagttatgcctcggaggacaataactacacgaaactacgaacactagacaagcctcagagggtccttgtctaggctctctaatttgctttcccttcccctgtgtcaccgggattcgttgagttaatccgtggttcacagatccacccaggagcgccaatttgtcccgattgcgttcgggccaaaggccggtcactggggtcggggcaagtagggacgagacacagaataaataaaaaatttattccggaaggacctcaaacttgggtaattaaacaaaatatttgaaatggaaaaaaatatcacaaattgatcacagaaagtgccatcaccggggaattaatcacaaatgaaattgggcaccgggatgggacaggaaaatttaaggaaatgggggcattcgggcaaatggaaaatcacagaattcgatgcctgggaccgggaggaacagaaatggaaaacaccgggccacagatcaaagatcaacaaccgggggtcaaagaatgatcacaattgggggccatcacagttaaaggcaaatggagggcgggagagaaacggcaaaattgccaaatgaatttgggttgtgaattttgggggcatttggccgtttaaataacaataaaattagataaaa

SEQ ID NO: 19424 - DNA, 811 bp, Heterodera glycines
actgccacacaacgtcgcaatttctatgaaaaagacctaagactagaatagcggagaattttggtaactaatcatttttctaaaatttaaatacacatgttctaaatagagaagccgtttaatttggtgtttaagccggtaatttcggttattccgacaatgcctaaaaagttatggattaatttacattgtaattctagcatatattagttcgcctctcggaatgacatgcattgacaatagagtcgtatgggaccgggagcgggtcggtaattcccggttttgccagtcccggtgccggcgggactaaataagcattggtacgaatgcgtggtgagcccaagcgacaaaaatatgggtgtggcgaagcgacaaaaatatgggtgtttgtaataattaaatttaattattattttaattttattttccaagtaattaatcatcacttagcttaagcttagtaaattaataaaattaagtatttagcgacagctcgaagcatcctctactaattatgaaattttcaaaaaattagtaaaaatttacaaaaagttgtgaccaaaaaagtacgaaaaattttgactcaacaattttgaccctagctttcttgaaattcaataaaattttttgaaatttaacagaacaatagagtaatctttaagctatctaattatataaacaaaattaaaattgattgccccccacccccccatataaagaattaatagggtcatatttttatgatcatccgaaaaatgtaaagatatttaaatgccctaaaaactgttccaacttaaatgaaatcgctccg

SEQ ID NO: 19425 - DNA, 2289 bp, Heterodera glycines
  unsure (1)..(2289): unsure at all n locations
ttaatgggtacatttttggatttagtcaatttttgtaacaaagtgcacttaaatggtataattagtttgaaaacaatttctcttggaaaattgcgtggttggtagcggtctcggtcgtgaatagaggtaccggtacctgccttttgtggtcgcggtaagtaccgctcgcaatcttgtcacagttttcggtcctgtccaactcaaatggacagcgagtaaacatataaaaaatcatattaatagacgcatagatagtcagattctagatcagcgctcaagctacacgagaaaaaatgcttttactttgccgaaaattatgatatttttgcaggcgcataaataatataacaactgctttaactgagaaaatactatgaatggacagttcccctcccccccccccccccacgttctttcatgaccctcaatagtgacacacttagtataaacaaattaaacttattttaacttatctttcaatctttcaataattattattaggttgtcattggatgatttaacacgtctgttttcaaaagtgcacatttgtttcctggacgcgcatgcacttgccgaaattagagaaatgacggacaaatgcattaatagagaattngataatgttatgtttgatggtgtttggaatgatacaactgccggagggtcaattcgatttggagcaggtagaaaaaattcaagcaaaaataagaatttacaaataagggaaattagcaatntaaagaatcttcagtcttgcactaagttaaaaaccagaaatacatttgcccttcgttccaactaaagttttgtatgggttggtttttgtactacaaagtcttataagcagtttagaattaagtgtaatttcaattgttaatctttttaaaaccgggtaaaattgttattcaaattgattataataaagtattaaattgaggttagaaaattgtatatacaccagggctgggcgcaattgcggattacgaaattgcgagttacggatttttgggatttttctgcaattttgatctgtaatttgacttggattatttttcgagacgatttcttgtaagattatttttataaaaataaatttttattttatttaaagggatggctacctgtatttcgattgtctcaaattcaatttcattttttctccagtattccaaattggattatttctgaattttcttcaaaatttttttgtaaattttcagaaggatttatttttttcttcttctgaatttttggtccaaattatctggattttttaaaatttcccatcaattaatattcctggtccagcttgggacccaattttttcaatttttaaaatttggctattcagttctttaactgatttggttgcccaaaattgtatcgtcgggcttatccattaccaaagccaataacaatatgcataaatccaattataaagctcagaacttcaaaaatttttacaaaagtgacccaattcaaaaaattgaattttttagacccaaaattataatttctttgtataattgaaataaaaaataaagaaaatgtttcccgaaaatccatttttttatttttattaattcaatttaaaaatttgtttttcaaaaattatgacaaaaattgattttgaaaattacggattgcggattacgggaaattgcggggttttggacccccataattgctgattacggatttccgtaattgaaaatccagttgcgcctagccctgagccacactatagcctcataagttaatgtgatagtaaatcgtgacggaataaaattttaaaataataatttatcatcataacaaatttcggcattacagttttaattttagaaaatttcacaagaaaccctcaatattggataaaagttgctggtgacaacccaaacaaaagcgtgattctgatcatttcgttgatgcaaaagtatcaacgagaagaacgccggccaaactacgcagctggtttcaacattttcaaaatggtagttaacataaaaatgggtttagacaactaattctatatatggaagcattcttttaaataataataatattatttaaaattaaaaaaaatgaataaaatttttatttattttaaggttattcttgaaccatgaaagttatagcattgaataaattatgtttatacggattgctttcgaataattaaattcattaacaccaattaatataattaatattatttatttatcaatcactgagttttttgagacgccggcgaagattatttcgaaatataaaatctgttatggagtt

SEQ ID NO: 19426 - DNA, 979 bp, Heterodera glycines
ccatgcgagcgacaaatttgccaattttgggccggctagcaaatgagtgaaaaagccaaaagtatctgttcaatgtcagagcaacatttgcagatttgcatgagccgctgcttcgcgacccggacagtttgctgagcgcattgctgtggccgctgatcgacgcggacgaccgattggacgaagaggaaaccgcgcttctgccggtgcaattgcaatattgggagggccgcagggacaacactgccgagagcggtgacaaagtgttgcggacactttaccaggtgggcaatgcgtacacaaccattcattctttctttctttctctaattatgtgaattgcccgtgggctgattagtgagttcgcttttggcaatggccgacaagcgaatgcccccggggcaaaatgaactcgcgtgttcattattcactcaccgctcaattagtcaccaattacgcccttccattcttttatctttgtttaaatcacaaaggaatgtgccgctcactgcgctttctttgctgcgttttgcttccttctgctgtttcttcttttccttcatttcccgcccctttttcagttttgtgccactcgccacggccgacaatgccttcgtcggaagggcatttacgcgttgttacgcgaattggacagagcaacgaagccgcggaacacgcacaaatcgacgaccatcgaagaggggcgaatttgcacaataattgatgatgatgaaggaggggcggaagaatccgctggactgaacggacatggccaagtgctgcgggcgctcatcggcatgctcatccgttcggaggaggacatcggcgtgacggatgagtccatccggcatttggctcggatgatcggcaaatgggaacagaagcggcggaaacggaaaggtcggccgatcggtgaacgccttttgctgatcagagcgatgtgtccctttcttcccttgtcccctttgcatcaaacaaaaaa

SEQ ID NO: 19427 - DNA, 1325 bp, Heterodera glycines
agatgaattggatagagccgctaaaagggagggaaaattaatatgtccattgggggggggggggcaaagggcgggacattttgtgggaataatccgtccgttcatcaaagaaacggagggggagggaatgctgggttctttccacgacagctgccactttacatttattttttattgttatgtgctttttgaataaatttttaaacttaattatccatcataattagctgaattaattaatgaatggtcagtgttggctcttgacttggttacttttgttctttgctcgacgggagaaacggaggaaggagttaatgactctttccgccgactgtttgcccatcggataagagagcactcacattctcttcgatgtctctaaatgtgccgtcgtagccaccgaataaggcgattgttcggtcggctgaggagtccccctccttctttaatctgctttgcgctgggcttccgatcagtcggtctcctcttcccctgccaaatgcttctcccccccccccctttcgcccattctccttcccatggcgagggatgcgcgaagggaatggacaaaaacaaagaaaagccaagggaggggcggtgtcgaatttgcacaaatgccacaatcactagacagtccaaaacatgtccatccgtcggtcccttccctttggcttcatttcgtcgttcgttcgtcccttccccgccttccatggaaaattggccatcagtccaattctttcttccaccaatttcttctcgtcgattgtctgtcgtccttttacgatcgcatgaaaataacggaagcgatgaaaatgggcgccgggcgaggagagaattggaatgggaagggaagggatgaaggggagcccgacaatggaattattattttctcccgtgatgccaacaatcgcaccacccccgagggattctccggttgcgccccttcataaatctctcagccgacggtcggcttgatgaaagaaagacacggaggtggggaaaggacgagtggaaggggaggggagggagggtgggtacgatcctgcccctccccaccgcaccccctcgctctgccgtctcccgtcacccttttccctgtgtcttttcgtcaccctccggccccaacggcgtcgacgagtggcgacgggtgggggagggggcgggcccgcatctgctgctcgctcccgcaggcgtcaaactccgccccgaaatttgctgtcggcccgcgagaaattggagctggaggcgaggattcgtttgcgctctctcgtctgtctcgctgtccgctatgacgcgtctcgccacactctctcaccccgcttagg

SEQ ID NO: 19428 - DNA, 3073 bp, Heterodera glycines
ataattaataataaatttaataaaaaaaaagtcaccaaagaagaacaaaaatagaaaaaataaaataaaaattcctatttcaccttccgcttcagcataaagaattaatttattccaaacactgaagaaaatgcactaaagaataaattatttcaaattttttcaaatttatttcattattatattgaaataaatgcatcaaattaaatattttaatattttattgataaatttattaaaatattaatcaaaatttaatgtctcctaagaatgaataatttcttctctcatttggctttccatctcaaatgttcatgcacaagtattaatcattttttcaattttctgatcattcattttggaattcctattttgttgaaaataaattttcaattttttaatttttcctttcttcgtgattatttttaggctaattgcaacttttttttcaattttctaatcataaattaggctaattaaattttctcataagtttcgcttaatttgctgccacttgaagaactttctggtttttttttaaatttatttttttgaaaaattgtaatttcagttcataatattatatcaacgactctcgcataaactaattgacattaatattgtactgttgtcaatacaaaaaagaattaaggcaaaactcacggaaaatttgataggatttaattaattaatttgttttttagatatttatgccaattaaaaattaataaaataaaattttatgcaaatttaaataaaatatctcaacaatcaattcttgctttttaattaaaaaaaattcgtacacttttaagaatgaaaatttattatcacaattgtttcttacatttgtcaattgttctacggctaactccgattttcttgcaaatttcggcatatttttggcgccattcttttcttgaatattttctttgttgcttatattcatttgtcggaaaaagataaatttaaaaagaataatataaaaatttgtcatttttgttctaaatttttttgcatgaatatcttttgtcaattatgggcggaaaatgcaaaaaaaaaacaaaaggatcggcatgaaatttcatactataattgaaaatagtttttgcatgtaacggtctaatgtacaaaagcttaacttaataccctttagctgcatttgttcatgaagtttttttaatgtcttaatttctttattttgatagcttttgacaagttctatagccccgtgattttttataaattcttcaaaagcagaattattggtagtcgaatactcaaataaaaaaaaaattttattcattttttaaatttttatttagtttttaatttttatgttaagaatatataaaaactcatcgtatgtacattgattttacctttacgtggcagcgtaaaattatacgtgtttcagagttattgatttcacatataaatttttgaatggcaaaaaaatcgagtaaataaaatatttttaaattttattattatataaattagtgaatcgcataattaaatattaggtttttcttatcccaaaactgagtttttttcgcatcgcccaaattcttgaaaatcaatgccaggataaatacgaaattaaaattgcattttgtgaaaacaatgattttgttgctactaatgttgctgcatctgaatatttgaaaccgcattttgatcaccaattttcatgcgaaacaaacgcttcatgctttttcctaaataatcaacataaattaaaaacaattaaataaatgaaaatcaaacagtcaactaattatcacataccgaaacattttatattcgaaacaaatttgatacggtaagcattgatggtgcaaaatgatacgattggatttaaagcggacggtaaaataattggaaaaggtgagagtttgttgtaatacagaagccaatcccatccttgtatatcaatattgaaaagcagaaacacaagttgaaaatttaatgaaaaataaatgatgatgggcatagaagcctaaataataaatgtaaattaaataacaaaatattgaataatttatatttaaatagtacaataaaagtgctcaattaacctgaaaaatgagatttcgagaaacttgtttattcacatcaatcatctttttggctatttcagaagaagatgaaacgcttcaaacacaaaaattaaaataaaaaataattttaaattaattaccatttggttttcatgtccaagaattttttgatacaatatgctagtccaaacattatgatataagcaaaagtgcttataatgacaaggtaatataaacttaaagccaaatggatatcctaaattaaaaaaacgaatttttaaattttattgatttaccgttacattaattgcatatgcagccaaaataatttggtcgtcgagatttatgcccaaaatttccgcgacagatttgtcgtccaatattgcgtgatcagcaggtggaaaaaagcaaatgaacatattaacgcaatatgcaaacgggaacaaaagtatcagaaaaagcagcaaaaaatatttaagggacgaaatttttttgccacttaattttgaaaaattattttttagtttattatatataaaaataattagggattcttttttaggcacaaaaaatagcgaaataggcatcaaataggcagaacaaaatcgcaaaataggcatcaaataggcacaaaaatccgcaaataggcacaaatataggcaaaaaaaaaaaaatttaaattaacgctttttaggtataaacacgtaaaaatttacatatttcaattgtaaatgaaattattaaataatttaaagttttttctaaatattcttcatttgttaaataatattgcaataattttagtaatttttgtcataaaataaattaattaacaaaattattgccaaatgaaaaatttttagtttaattatatttttgatcactcgaattaaccaaatcggaacagaaaagaaaaaattagaagaaaaatcatttaaagaaatattcgggggaaaatgggaagaaaaggaagaaaaacaacgaaatgaactcaaaaaaagagaaataat

SEQ ID NO: 19429 - DNA, 2223 bp, Heterodera glycines
taattaaaaggctttattttcctcactttttctgtgcgttagtgtttcttcttgcccaacaaattgcacataaattcctccgctcaaattcttcacgcattccttaccagcatcaaactaaaaaaaatttaaataaataaaaaaaaatattttaaatgtctttacttctgcagaatgcaaaaaaagtgccggcagttcgtccgccaattttttgcccttttcaaatcgcaaattcattgcgttttgtctctcttccctacaatcaatttgtttgttactgaatttaaattttgatcatttgttaattacatcgtcctctgcgagtacaattcgtttcgcaaaagtgcggcccgacaatgcgattggaggtggacaatggtcgagcggagatggccaaataatcggacgcattggtgggaacggacgagcgattggaggcggacgaagccgcgaatgatcggaaaaataaattccaaattaaattggaaattgaaaataaaataaaatggaatgaaattaaatttaaaattgaatttaaatattttggcgaatgaatcaccttttggtaattctttttctgtgtgaaagtgcgccaattcttctgaaaaacgaccgcggcccatcggaggcgcgcgaactgttgaagttttgcccatccgcgaagaattttttgggccaaaacggcacaatgacggagccgctctttgcgcaaattttccatcagaaaatgagcttcggactaaaatttggagaataaaatttagaattatcaaaaaatgacagaaacaaaaaattgcattttttaaaataaattatttttaattaaatgttttactttaaggaatatttttgtccttccaaatgccaccggcggtgccacacttttgccatttgcttcaaaaattcgttggcaaatggcgtgcgtctcctgaacacaatggccattttgaagcgtaacaggtgctaaaaaaacttcaatttacggcaattaagaaagtggcaaaaattggcactgcgatttattttattttttaatttaggactacgcaaaatcggcacgagaatgccgtagcgcgaaacaaagtgcgaatattcaaagctggctgtgaatcccgcgcgacactgctcgacaacggccaaaagatccatctgacgcatttggcgaaggacgacggaacggtcgaaatgctaaaatcggattaattattaaaatttaaaatctttccaatgccgattttggtactatttaaatacattttcctctgctggcgactcatttggccgaatgcatcgtacaaaatacgcatccgccgccgcacttcgccccaaccgtcccaccaatgcgtccattttgcgtcgacaacaattggacaacgttttgtgtttcaaatgtgcatcattttcgatgctaatactcaattattaataaaggataataatgataatttgtcaaaatgttttcactttcgttcgctgtcgccgttttgagtcggcaattcaaaaagaagttgcaaaaagggcaatttgcttccaattagcatccgtcgcaattggtgcggggaatggcttctgtttgtggccaacattcccttggcctaaagtcattttttgattttaaaaacatgtatttcttctttttttgacttcgtatgtcacttgacccgtgtaatgattgaccacaaattgggcacacaattgcgatttcgggctcacataaaagcattgcttttgcttttgttgtccattcgtttgctgtgtgttgtgcaattgttccaacaattgatcatcggaaaacttaaccactttccatttataattaaaattaaaattactattttttacattcggtgcgccactcgcatcatcaatttgtcccattatgctcaatgaattgacggccaacatgtccaaaattggccaattgtccgaaaattcgacacacccaaaactccatcctggcaaacactgtgcttcgtattcactctttaaaagccgcaaatttcagaaaaaggtcattgatttttgttttaaaataataaaattaagttcaattggaaatttctttggctttacctgttcaattttgaaaatgagacggacgaaaaattgctgaaggcattcggcggaataattaatgcaaagttgctcttaaaacaattaagaaagcaatttgaaacaacataagcaaagaaaaaacacaccaaaatgttggcacatcaaaat

SEQ ID NO: 19430 - DNA, 2826 bp, Heterodera glycines
  unsure (1)..(2826): unsure at all n locations
agcacanttctgttactactcaacttcttgaagtggtggatgatttcagttttgctttagaaaatagaaaatcaattgatgtaattttttttgatttagctaaagcattcgacacggttccacataaccggctaatatctaagctccaaaacattggtataaataattccttattaaaatggattcagaattacttagaaaaccgaaagtttttcgtcaaaatcgggtctgatttctctgacgaatatccctgtctcagtggtgtgccgcaaggctcaatattgggaccactgttatttcttatttacatttacgatttaccaaaattctgcgaaactgaaaatgttaaaattaaactatttgccgatgatcttaaggcctatcatgttctttcaaatatttccttttctccactccaaaattttattaacaaatttaatcaatactgtaaatttaacggccttaaaatcgcttcaaataaatgtttaactttacatttaggacacaaaaatcaaaaaataaattattttattgatgactttcaaattcctaaaaatcccggaaacgaaccagtcagagaccttggcatttattttactaatgatttgaaatgggcacaacatattgacattatctcgaaaaaagcattacgatctgctttcgctatactaaagtcaatcaaaactcgtgatacgaaaatacttgtaaatttgtttaatatttattgcagaccaattttagaatttggatctccaattttcaatccttatttaaaaaaggatattgaaaaactggagaatgttcaaaaaacttttttgagagtaatatttagacgtaacaattatgctgctgattaacctaattatgctgaattgttaaacatttatgatcaaaagtcgcttgagagtcgtaggttaaaaatagacttaaaactttttcatgaaataattttaggtaaaataaatttacaaaataatgaatccttttctttttccaaaaacattgtaaaaaatgaatacactataagaacagcttattgctcaaccaatgctagatacaattcgttctttattcgaacctctcgtctctatagacttttacctaaagagacgagattactaaatccaaatgagtttgccaaacttcttgaaagatctgatcttaatttgttgatttctttgccaccccaactccaaaagttgaccaattgattgttttgatattattatttcattatttctttatttttcggcgtcacgcttttgcgtataaatgattgattgatatgcctttttttgcgcattagtttcgatatattaagcataaataacacattttctgcatgatttaaagcttctaggttgggttttattatgccttttttttacttttttgtgattttcgtgcttttattaatgccttttttggcattttttcacgaaaaattccataaaaatgcaataaaatcgggaaaatacacccctaagaattgaaaaatttctcaaaaatagatcgtcaaaatttattaaaaaattttaggtttaaaattttctttattcgaaaaaaaattataaaatatttaataatcatttaaatgaccaaaattaagtttttgattgagttttacatgttttttgctccataaaaatccttaattaaaaattttaatgtcttttgtcatgcctatttgaggatttttgtgcctttttcactccttttttgcaattttttggtgcctattatagcgcctttttcgccatttttggtgccgcctttttttacgttttctactaatatattaatttcgcaatatgtgagtttcacaaagtaataaaattttgaattatttattgacacgtttatttttataagaaataatgaaagaaattgaaatgcaacaagtcggaggtcgagagtagaaccctgccgcgggatgggatcccgcgcgggattgcagaatccagtccgcaatcccgcattttggatttgcgggattaatcccgcgggatcccatcccacagaaattttgaattccataatcccgtagcgggcgggatccaaaaatttgaaatttccggactctagttaaggtgggttggaggaggagagtgtagagcagtgctgggcgtaactggattttcaattacggaaatccgtaatccgtaattacggcgattttctcaattacggaattccgtaatccgtcatgacgggggtcaaaaaaccccgtaattttccgtaatccgtaacccgtaatccgtaattttcaaaattttaatttttttaaaataattttcaaatttttatttaaaaaattcaataattttataagcaatttaaaagcatattaaaaagatttggcgtgaccgaaagtgcggatagacgccatagaggaaaattttgaagatttaagtgcaatttgtaaaagattttgcgtcaaaatggtagtgctgtccgagaccaaaaatttcccgggactcgagaccgagaccgagactcgaccccgggactcgagaccaagcccaaaaccccgagaccgagaccaaaaacccgagactattttcaaaaaattttcttattcgcttaaaaatggttaaaaaaatttttttgcgtatttcttaacaaatttttgtttgtttttttaattatgattcaattaggtaccataatcaatccaaaaacgcaatttgttttcgcggtttttgagtcaatttaaaaaataaagggaattttggaactccggcggtgtcgataggcgccgcctggcaaaattttgaaaatttgaaatgcatttgttaacagatttagcccaaaaaatgtccgaat

SEQ ID NO: 19431 - DNA, 2021 bp, Heterodera glycines
gcccagtgcgttggacagacatttgtacaacaactcagggtgggtgtccgtcacacagtccgtttgactataataatcaccaaatttgactaggttgaggtccaaaacacggagctgtacgacagcggaaccctctacccttacaaggcgtactcgaccaacgaactgtcctttccgaacagtgcaaagggacactttatggccagcgcgggctaccatctatcgcggaagcacgacgacgcgacggacgccggttttctggcacgctgtgcgcgcttcgcgggcggccgtaaagcacgcttcctttcccggctggacttcgacctgggcaaccaggagctgtatctgttgaacaacatggacgtcctgttcaccatctatcgggcaaaggatgcgttcctgttacaaagtctagcggcggcggcagcagcagcggcgggccaacattacgcgctgtatctacacgacataaagctgtacgtgaagatggttgaggtgcaaccgtcgctgaacctgtccatctacaagacgctggaaaagcagccggccacctacgcggtacggaagacggaggtgaagtccgtgtttctgaccgccggccgtaccgagatggaccacaacatattttccgccgccatcccgcgtcggctgaccattgcattggtggcgaacggagcattcaacggccagctggcactgtcaccgttcaacttcaagccctacgcaattcgtgagatcagcgtgcacgctgccggtcatgtgtatccggcagtgccacaccgcatggacttctccggctgtgcctacattcgaccatttgttgacatgtacgaggcgctgggcatggccaactcggagcgctctatggacatcacgctggagcagttccacgacggatggaccatcttcgtggtgccaatgacatcgacgctggacgacagttgcggctttgaactgctccgctccggcaccaccagcattcggctcgcgttcaacgaagcgataccggcaggcggcgttgagatggtcgtgctcggggaattcgatcagttgatcatgattgactacaaccgccatattgtatccgactcaaaaattgcataaaaaggagcccatattatgattaactacacattgctcaacgctccaaatttgtacctatcaacaaagtgtcttattcataaacctcacacaaacataaacatatattgtctgcccacgataaacatgccaaacctaagctgggtgattttgtatgagccacgaggggacggactggtggcgccacatcccctgttcaatgccagacctgaagtgccagcacgggtgattgacagtgcgccactcatttcgccattgcacagcggtcagcgtgaaattaccttcaagcattatgtctaccgccacccccagcaaagacatttgtaaatttaagaaattgcactgacgagcaaaagtgtgccatctgccgttgagatgaacgttacgatgagcgcagatggtgtggacccaacagcagcagcagccccagtcatgtctgtgcagatttggtccgcactgctcctgttcaccaactacgccatcatactgccgttgttcatcatttgttggttgtcggttgtacgctggcttcgtcactccggtctcatgccaccgtcgtcgccacactcgtcgacgccaacatcgtctcgacgtcagatcaacaacaacaacaacaacgaacacaacaaaatccggagcatgttcagtgatggtggggagagcgggcgactgcagcaacagcacaccgctgccgtcatacgggaggccaaccgtgtgacgtcccaaatagctgcggcaacagcaattccggagccaatgcgcagcgtgttgaccgcctcggttgcgattccgatgatcgtgtccgctgcacaaactggtggtggtggtggtggtagtgatggaagtgacgtgacaagtggcgacggctttcgtgacgagcacattcacagtgaccgttcaacagacaatgatacgattgt

SEQ ID NO: 19432 - DNA, 2052 bp, Heterodera glycines
  unsure (1)..(2052): unsure at all n locations
ttgcattttntgttaacaaatttntgggcaaaacgccaaaatatgtgaaaataagttcttaaaattttttttaggttttaggtgctaaaaataaaaacctagaaaataggtgctaataacttgaaaagtagcttaacaagagccaaaaaaacatgtttttcgtgtgtttcaggccacggggagctcaggaaaaaataggtaaaaacctaaaaatcgtagccctacatattacactcaaaattgcataatggaaaaattcttcgaatttctccccacaaacgagaattaaaaaattttatgggtacatttttgaatataggcaatttttcgtaacaaaatgcactcaaattttcaaattttttttcaaaaaatttcacttgggaaaattcctggttggtcccagtcccggacaaaaatcgaggtcccggtcccgacttttctggtcccggtaagtcccgtttccggtttttgtcaaaattcccggtcacgtgcaactctaataattaccttttttgctaacttgctatttaaataggtaaaaaaaaatctcaaaataggtattaaataggtacaaaaattccaaaataggtaaataaaaatttttattaacgattttttagtggaaaaaagcaaacaaagagggaaaattttggttctacatatctctttgtaaacgaaattttaaatatattaatattttcttagatactattgacattttaaattaaaaattttgtcaatagaaaaaataaataaattttgggataaatttttgagaaatttttccaattcttagggtgcatttttgaaaatttttttggtcgattcttatgggtatattttttgattttattgcatttttgttaagaattttttgaaaatccttaaaataggtaatcaaaatgccgaaataggtataaaaataggtacctaggtaataggtagaaaaatcccgaaataggtaaaaataggtattataaaagtgggtgtagaagctccaaaccaagctaaaaactcgttttttatgcttatctcaacgttacaagtgcgcaaaaattttaggtatttaactaaaaatcgcatccctatttattacaatttccaaaaaattttccggcggcgcttatcggcaccgccggaccttcattttaccttaatttttgaaattttaaccacaaaatgggtagaatttgtcattttttatctgagaaaaagatcgaaccggaaaatgcagattttttttgcatcacaacctcaaaagctattggtaaaattttttttttaaatttcgcttttcgcattttcgcatattttggcttttcgcatttcgcttttttttcatttcgcatttttcagtttcgcaaatttcgcttttcgcatttcgctttttatttttcaatttggcccatccctggtgtatagtaaggcaattaaaaaaaaattaanaaatgttcagcaatttttgctgcgttttcaatctttattgtttaaaaatcaaaattcgtttgtatttggcaattgtcacatttatttctgcgttgcatggatgtattgtcagtttgggtttgcttaatagtggaaacttacatggtgacctaatgatcacttgttgcttcattgactttttcatggtgtaatttaaaaaatatataaaggcgaagcacgaaaaagtgcaagtgatcaaattaaaatcaaaataattattttaaaaatgaaatcaaaaataattatgttaattacgatttaattgtaacatttattatttaaattccgttacataattaaaatatttttttatattaatgattttatggattgctttgttgattttgacttataaggctaggaagcgtggctggacgtaattacggattacggaaattacggcctttttggaccgccgtaatgacggattacggatggccgtaactgaaaaatcgccgtaattacggattacggatttccgtaattgaaaatcggttacatccagccctgctatgaagacttccttaaaaatcaatatgaatcattcataaatttttttctacaaag

SEQ ID NO: 19433 - DNA, 1039 bp, Heterodera glycines
ggttaaaataaaaacaacaaaatgccaaaaaatgccaattctattaaaaaaaaatcaaatttagcacgccaaccttagccgactggcgcgccgcctttccgccgcgagccgttccgcttgtgcaagcaggcgtcgggcgagtacttccgcttccgctgatgtcatgcgttgcagatcgccggcgcgcgccggactgggcgccttgcgtgtcggcaacagcgcaacctttcattttagcaaataatttggttgcgccgatttagcgcaaaaattggacgccctaagatgccctaattagcatttttccttaccggcacacgtcgcgcggagtttgtcggcctcggctgactgccgccgtgtacaatcattggctgacgccgattagccggccttccaatacacccctaagaatctacttaaaaaatttcagaaaaagtaccctcctaaaatcgtcccaaaaattaaaaaaatacactcctaagaaattaaaaatttccccagaaattcattttcatggcatttttggccttaaaaatcccagtcctactcatttgcaactgcaattagtaaataataaattttggctcaatttttgttcgattcttaaaagtgtatttttcgcttttattgcatttgtgttgcgaaattttccaaaaaatgtcgaaatagtaaaaaaatattgacaaaacgccaaaatagtaaattttcactattttaagtagagtgccacgggaccgggattttcggtgtcaaggcagttcgtacaatttcaaatgggaatggccataatttttttgaggaaaaagaaaattgcagctgaacaccagcagaaacattttgaaaaatttgacccaaaagggggacccaaactgtactagtaccgctaatggatgtcggaatcccccgccaaaatcctgaaaataattgtcacatttttgaaaggaaattcattcattcgatagatagcaaaccattttatacacccgattatttagcaattgagaggtttttctcataaatgcatttgatcaggatgaat

SEQ ID NO: 19434 - DNA, 2261 bp, Heterodera glycines
  unsure (1)..(2261): unsure at all n locations
tttaataaaaaacttttaagctctgatggggttttgaacaagcccaatttcgagaaagaattactcgattgagtaaatttcggcataaatttgaagagaaaaaaaggattttcgatgagagacctattttgattttggcagcaaatgtccgaaaatggcccttaagaaatgggccgcaaaagacggaccgcaagcaactgaagaagaggaaaaagaaaattgcagctgaacaccatcagaaacaacaacatcagctgaagcaagaacattggaaggaggagagacggaagagaaagagagaaaaaggagcagcaacggaacaagtattgctaatggatgtcggaaatcccccgccaaaatcccgaaaaataattgtcacatttttgaaaggaaaattcattcattcgatagatagcaaaccattttatatatccgatttatttagcaattgagaggtttttcttcataaaatgcatttgatcacggatgaatatgatcggtcgatcgatcattcttaattaattcatttcttcttctgcggctgatcactgtttttgttcttttgtccgtcactcatttgtcagcagacgacgcccctttttcgctgctttgtcctgcttcgtcttcttctttcggtggcggagacaatggactaaattaagcgaaattttaattacttaaacaaaattaaatgccttttttatttgctcacccaatgcaattagtgtcactattaagccaaattaacacattgttacaattgttgtcccaatttccgtcttcccaattgaccgccgctgtctccccaataattttgcatcgtttcattatccaaccgatgccccattcatttttctttgctttggccaatgtcagcttttcctttgtccattcgttcaccaattcgaatggcaccattggcattgacggcgcacgaacagaaaaatgaatttcgtaactgacgtaagaaatggcattggcacgaagaaaatgctaaacaatttgattggaaaacaacaatcagtcatttgtcgaattatggccacaccagggatggcactgaattccgatttccgaaatttttgataaaattcggaatttttcagaaattttcgatttataacttttttggggtcgggtttcagaaaataactcagaatgccatccacagaccgggtacacccctaaaacgtcgccgtctcgtataaaaactaattttctgaatttccagaaaaataaaaaaacgacttttttacatttccttgaattttcttaataatttttttcgaatttatctatttttttttgatttaggctagataactaaattttaaataatttttttaattaaaataaaattttgcggctacgttttgtcccccccccccccccccggaccacacctccttgaaattgtcgatccaatcagtgttcgtttgttcgtagtaattatcgcaacgcaattgcttgggttggccatcttttctcggagagtgcaaccatttggacaatgcttggccagcagtaattgttgcatttggcccatcaaaatcaccaccaaacgcagagggcaacagaccaaatgaatggattgaaaccaattggttaagatcgatgagaattgtcggcgaaatttgacgaagcaaatagtccaaatgatcaccacgggaaaagcacaaatggcgaatatttgccgaaaaaattggccaaatttcacgaccaaaaatgtcccaaatccgctggccttccgtggtgtgtgatgattgaatccgcaagtgtaaattggtgcctcttttgtcgaaaatttggtgatttgaacgaagaaaagcgatgacggagtgatcgatgtaactgaaaatgaaataaatgcttttattgtcatagctctctggtttttaattactcaatctgaaggcatttaaaacggattttgctgggcaacggacggtccggcaacggaaatggcacaaatttgtcatccatccgcacagatagtttcggttctggtcctttgtccttgcgacgaatttcgattgatctccaaattgtcaattcgcttttgccatcgaaatgtttgtccaccaacgcatcgaaacgtggcgaaagaagtgccaatttgaggccgagttgggcatggtcaaaactgggcaaaatgtccatccaaacgtcgttgcaaatccaactgaaataatgaaagtaaattagggcaaataagaaaatggacttttgaaanttcttttaccgtcggttcattttttggt

SEQ ID NO: 19435 - DNA, 873 bp, Heterodera glycines
tcatgaaaatacatttccgggggttttcggggccgctgatcacgaatatgacattcatttcgaccaatttcgaaccccggacccggattcgaacaaaaagtcgaaaatcgtaaattttcactttttataaatgataattttttaaattccttttagcaaatggttaattttggggtccccgatcacgaatctttcaattattttgatcaattccgatttcctaatctaaatttgaacaaaaaatcataattttaaaaattcaaaatttcgatttttattcgagttcgggttagggattagaaattagtaaaaatacatgtcagattcgtgattagcgacctttaaaaccccggataaaaaattatcatggttttttatcttaaaaaaattttgcaaaacaaaagggtccccccttttgtttcaaaatcttttcaaaaaggccaacttttacagtagcgccacactttctcttttttattgccatttgccccgatgtttaggcccgggtgtgctgcagcatcagcaaaagccggagattttcacggcatccagcagctcagcggccagctccagcacaacgttcagcaccgggcggggcagcggctcctccatggctgtgccggtgaccgcggcgggctccacccggtccaacacgccgaccagctcgcaccagacaacggcacggcacaaaaagtgattactgattgactgccgcggggggttttggacgggccgacggacgacgacgacgcaatttctgaccagtcggatcagatcgatggcgaaagcacaatgtgcccatccatgcacatctctcccggttttgtctccagctgctcctgctgtgcaacacaacacatttcggtcacattt

SEQ ID NO: 19436 - DNA, 1539 bp, Heterodera glycines
aaaaaagactcaatgggacgaataaaaaaaagtatcaatgatagtaataattgattaatattattattattttaatttgcaaaataataaaccataacttacaaattagttcaaactattcaaaacattaaacagtctaaaataataataattaaacacaataatcattgatatgtttttaggttcgccccattggcacttttatagttcggcctagcatttcacaaacaatttcatacataattcgtatagattgattattgatcagcaccagttttgttttttgtccgcccatttttcttagaaaataaataattagactcttattttgctcggtcaaactttggatatatttgttttcccacttttgatgctttttcaattttgagtgttgtgcctattctaatgggacctatgcccatcataataattcaccaatgcaaaaatgtttaagcaaattaatttttacgcgacagtttagacactcagctgcagcaaaagagacaaaaaaaaacagcaaaaaataacaaaatttcatgtcaaaaaagacaaagtcaatcaaattttcttaggcgccgatttttctccccgtttctccgcgtctctttttttattgccgggttcagagaatcgagcaaaactttcgtttccgttgcctttgcaccggcggcagtagtgtaacccccccccctccgtgacacgtaattacccccttcttgtcacagcccccatcttgttacagtgcttttacgttttatccccccaacctgtaccaatgcttttacgttttatccccccaacctgtaccaatgcttttgcgctttatcccccgacatgtaccaatgcttttgtgttgttctgtatcaggtttggcaggcatttcccccatgttgtttcactgcttttccaaccattttttttgtttctatttttctattctttttccccattatgtttcagtcccaataactctcatcatcgattcccattgcgtctcatcgattttccgttggtcatttccagtgtttttagtaaacaaaaaaatccacaaacttatttacttttttcttataaaatttcttgtttcttttttctcaatttacattacaatctgaattttataaaaatgtccttctctccaaactcgaattgggacaacgactttttcaccgggcagcaacagcggaacaacaacaacagcaacaatggcgcaacggcgaatagcagcaacagttcctccctcgggtggtgtgttcgtggtaagacatccgaaccaatatacctcatataaaattttttttgttttaattagagcgaatctctcttctcctcctgctcatgcttttggtcaacatggcccattttctgatgatgttcatcgtgctgctgaacagacgttgattcaaggacgatgaaaaaattttattatttttcacaattgtgatcatttttttgagatctctttttttttgatcgcttctctaaaataaaacttagaagagaagaattggttcgtttgtgagcgtagaaggggagggg

SEQ ID NO: 19437 - DNA, 2667 bp, Heterodera glycines
  unsure (1)..(2667): unsure at all n locations
caaaaataaagtataaaaaatttttcgaatgcatttatttntggtattaaantaatcaagtgggtgaaaaaagattgtctaaattagagaattntaaataaataattataaattttttgttacttttttggatntaaaattgaactttcccaaactgttgttccctccccttttagcatctcggcttagccgtgccgttgcctcggttatttccataatatttgcattttagcgccaaacattgggcagaaggggtccaaggaacaaacgttccgaaaatgacatttttaccctgggagtttttggccgggtactgcccccaaggcgctcgctgctcgctcttcattggccacttaagcgggggaaagtgaggggggagaagcggaaaacagcgcccgaggcaattcagttaagccttatggccaaatttgtactggaaaattcttcggaattggaggccatccgtcgagggcgtgccaatgggggaaaataattctgatttaaaaaaaaattatttattcgacgaaaatttgaataatttaaattttttaaaatacaaattctttattttttctatttgaattgaaaggaccaaaaatcggagtgaaatgaacggaaattttgagatatttaaagaatataaaggcaaaaactaatttagtgcctaatttggggactttgcctccccggggaattaatttactgaaaaatgggcaaatttgtgaaaggatgtcaagccaaagaagggaggaacacgcgcgcaatatttcattctcggcacaaattgctttggcatgggaatttatggggggggggagttggtgaaaattgtgggaacagtagaaaaactgaatttgtgaacatattccatgggaatttcaaacgaattctttggccaaaaaaaattttaaaaaataaatgccaaatttgtcaattgagtcgattaactgtccaaaaatgttgttcactttgccactctgttcaattgattgccattccgtccgtccgtccatcagtcagtgccgtgtgccatggggccataaacaggcgaaggcggccataaaacgcaccggtggccaaccataaaattttattcattacaaacaaagtgcccatttaaccatggaaaaagtgccttctttattcggcaaaattatttttttgaaattaaattttggcaaaattttatgcgaaacaatgggacaaaattgaatttaaaaataattttggcaaagcgcgggtggggcgatggattttggggtccaaaaatgttgcaacaaaggcaaagcaatgcaattcattcattgtttgtttatttgtttatggccgcgggggaagtcgttccaatgcgaccactctcaacaattggccgaattcagcagcagcagcagaaggccaggaaaagccatgtcattcaatccaagtgaaagcggcggaagggggcaaacatttttagaaatttgggactttataccggccaaagaaataaatgttggccaagctcacacaacaaacgaacgcatggcaacagttgaagtgatttcgggggagaattaagccacttaaagaggcttacattaaccaaaactctccgccatcccttcgtggccaaagggtggcgcgacttaagacttaatggatttatgcctctgttcaatttaaattcaaatttccgctgaaatttaaattaaatttaagccctttgaatcagagaaaagtgcaaaacaagcgcaaaccgacaaatttctgtaagccttttctgttttttttgtttttttaacttccaccggtgatagaaaaacatcaaaaattttgaagattagcgtgcaactggaaatattttatcccttttgggctaaaatattttatatagaaaatttgagaaaatttttcaaatcctaatacttatttttcattttaagaaaatattttcgtttgtggcaattgccttcttaaacccttaaaattgaatataccataaaccacaatttttttttgttttaaatttatttattaaacattacgccaaaaaatgaaaaaaaatcaggaatcaaaggacaccgaaattaaaagccagcgcactcacaatcagcggtaggctgttgttgaatcacttcttaactttgattttgagcaaaataccatgcgaattcccacaaaatgtacatattcatcatttcctatgactgtgaacgatcgacggaatatttattctttgtaaacaaaaaaaattatatgcgaaggaaagtgtttgctcaggcgaaaatttatatttgcaattgtacaaaagtctattttgcgagaggatgttctttccaagcttttcctggcttttgacctgaattttcgatgaaaattcaccaaattccacttgattttattgctttcaaattttaccatttcaagggttgtaggtaaagcatttgatcaaatttatgtggtaaaagcctcctcagtaatgattcaaaaaatgcgcagttggctgatccgtcatcgtgatcaaaccgcagtttcatacaaccgatttggacggccaggcactccgacaaaataaaattgtttttttaattgaatttttaggggaagaagaggaggacaagcccccgccgacctcaattttagtggcaccatttcatgagaatgctccagagtttatcctgttcaata

SEQ ID NO: 19438 - DNA, 2818 bp, Heterodera glycines
  unsure (1)..(2818): unsure at all n locations
tatgatttttattttttaaatatattttntttgataaaatctaattaaaaagttttgttttcccattttattatgcccattttaattggccttggcagccctttgctcggttattaatatttaaataatttgttaatatatttttttacgtaaagatatttcggcaaatgttgggtcagaattattggacaaatatggcctcaaagaaaacggagctgtgctaattgaccagcaaaacatggacaaatttatgccactgtagcaaaatccaattaaacactttgtctccattaaaaaggcatttaagcgaggacgaaattctcaatttggactctgtcatttttttacccggcggatcagcacttaacacaattcgcgtgttccaatgggttttgaacggaatcaatgggcaaaaaaaagtttaatgatgcgattaatcacttaattagctcatagtttcataaggctgatcgtgcaatatttttcggttcggttggcgatgattccgaagcggaaatgctactcgagaagaccgttgagacgggtgtcgaagcgaaattccaacggattgagggggttcggaccgggaaatgcttctcactgattaatgccacaaatcggtcaattaattaattttattaattttaattgtatttttcccaattttagttcgctttgcgcttgccttggcgctgcttctcttttctctttggattttttgcatttgcccgaaaatgcgaaattaatcgatacagcaaaatttttttattcatctgtgattcaaaaaataaaataaaactaatataattaaaattattaaggcccatttttttacggtttgccccgaggcaattaaacatttggccacaaaagcaaatgaattggagaggccttttttattcaatttgagtgccgattatattcctggaaaattcaaaaaggaattgaacgaaattatgccatttgtggacattctttttggcaagttttcatttatcaaataacaaaattaactgataaacttttttgttttatgtttaaatttaatagtttcccccaatttagctaatgaaatggaagcatttgcttatgcaaaggcaaatgaactcaacccaactgatcatttgcatcaaattgcattgcttttgacagaaattaaaaggaataaataattaataattatttggataagcaattgtttttcttttttgttttaggccaacagaggaaaacggggggcgaattgtgctgattacacgaggggaaaagccgctaattgggcacaaaatgggacaataaagaatttcctgtcatttttgtggataaaattgtggacacaaatggggcgggcgacgcattttgcggaggtttctttttgcgctgaattttgaatgtttaatcattgaatgggcaatttaaaggctttttggcagcattcgcctgtgacttttcgctggaaaagtgcgtgaaattcgcactgtccgcggctgccataattgtacagaattgcgggtgcactttcccggaagaatgggtcggcgaatgccgggagcgaaaatgacgacaaatccaagaaagtgcctaagggacactgaaaatcaatggcttaaaagcaaggatattaccaatgtgaattatgaaatgccaaatttaattcaccgtcttttgcagtattgccaaattgccccccccccctctaaattaattaattaattatatttaagcaaattgtaaattcacttttggccataattgagacagtttactttataataacataaagcagaagcttgaaaaatcatgcccattaaacactgtgtcatttcgctttcgctatttgtgccattgcaaatgcaaaattcggaagtacaaatcggcatgttcgtccgctgctggctccattttttgactgtttttgtttttgcgtctcaagaaatagtgatagaccaccaaagtgatgatggcatgggcgaagagaagccaaaatggaaaatgtaataattactattttaattaattaattcagaaaatcgcaccaaagtgattgtttcgtacgtgcgaatgtacaccaaaatgccaaattgttcacgtttgattcgaatataacccgaaaggatgttgaaaatggagaagaaaatggtgtaggagaagtccaacgggaaaatgatacgcatggtcaaaatgttttcatttgtttgatagtttctgctcagtgaatagtcctgcactttgttggagctttggagggaataaattggtttttaaagacttaaaatattcaaaagttgggaaatgatcaaagcacttggggattggctcagattttcgggatgaactctttttacaactaattaaataatttgtgctttggtgttccccgctaattcctccttttcttttcccccttttttacaatgcccgctttagtcgtcgattcattctgatcaaaaaataatcggcgattgaaatgcaaatgacgagaaggagaaaaaaataatgtgcatataataattcggtggcattgtaacgaccagtgagcgtaaaataaacctaattaataaagcaattaaaatgcaaataaatgatgtattaattaatgagttatattaacaaacaaaccatgggtttctcaaaggtcgggtcgatagattgtgctgaagcaaacgtaaacgcagaaagcaaccaacagagttgccttaacgaattggcatatgacgacaaatatttaccttttttaccactaaagccaaaatgccaacgccgaattatgtgccggccctttcttaattgcgcacacacaacgtgacacggacccttt

SEQ ID NO: 19439 - DNA, 1824 bp, Heterodera glycines
ttcatgtgagctgttagtgttgtggctgttttcatctcgaatttcagtaaaaattcttccaagccaatcaggttctgttggctcttcctcaattttgcataactcaagcgggtagaagcgattctcttgaccctcgggaaagcgttctatcacacaatgcaggaatgggtgtcgaattttaatgcggtggcgaacataaaaatgtgctgacacattgacattgaagggtctccccagtcgtccgtaagccatagtcgttgatgcgccttgcggtgttatgccaccaaacgaaaatgttttggtgtagccgttgcggtcattgtaagttgtttgcacttgtcgtccatacagtgctttgacaacaagttcacaatctgatgggtgattaagacgatcacgaagatcagatacgcgacaattcaaaacttgagcgattttttcagtaagaagcattatttgcgaatataaaaaactaaatttaaaaaaattaacgaaaagaagtaataaagtgagtaaagcagtgaaaaatatgagcgaatattaagctatttataagaattttttgttgtatttctaggttaaacaaacaataaactgtataaaaacggaaatcgtgatcattttattcatcctttattcaaaatacattgaaattaaacaactaaattaataatgtccactccaaagcaggaaaataaatttccaaaaaaacccgaattttgcaaaaccgagcaaggtatgtatacctattttattaattattttaataatattttcaaactattcagacgatgatgaagttgatacggacccttctcctgaagaagttgagaaatggacgccggagcaagtgattgaatgggaccagcgttgctatggaaaaatgcctgccgaagaagagatttggcaagaattcctcgacaacggagaagcgaacgtaaataacttctttttttgtctttcgataattattttattaaaactaggttatacgtgaatttttcggtggaaaaggtgccatggaagttgagaagagccttcgtgaatacgccaagaagaaagaaaagagggatgaaattttgatgagaaagcgaaaagaatacgaacaaaagatgggaaataagaaggacgaaaattaatttcgcaacattgtatcaaaattcggataataaatcagaaaatattcaacattcgactttttgaaatgaagataggttaacaaaccattggcagctataaaacaaaaaaatttttacagttttaattcattcataaatttacaaagcaacaaccaattcacattcataatgcttcaaaacgaggattcctgcatgaacgaaccaaaagaaattccaccaaacgtcccaataactcaatcctggaaactttttcgcccaaaatacatgttgacttaccgcttgtgcgattgtaagttatttatttaaacttcaatatgttaaatttgtggcttaagtctgtctttcggcactttggaacaacaaaaacaaattcaagactaacgaagaacgatcagtgatcagttttgaactctgtgagaagtgtacgatcgacaattgccgagcaaccgacattttggccccattcaaaccaaagaaataaacttgatgagacttataatttcgcatctaactcatatccttcaattaataatatcattatatttgttattaatttttaataaatcgttatttatttaaaaaacctttcaatcgtattaaatatttataaatctcttttcgttgcgccttagtcattattgtttgcgcaaatattgccaaaaaattcgcctctccacgattagca

SEQ ID NO: 19440 - DNA, 2919 bp, Heterodera glycines
  unsure (1)..(2919): unsure at all n locations
aggggaatattgaatttatcaagcacgattntggctaccataaaaagattttttttaaatctccggaagtcatttgaaaattatttgtaaaaatcttttaaagtataatacagaggctattaaaattaagaatagaaaaaataagaacgaatccagctattcaaagattgtcatgtttccaccgaagaaacacatacaacaggcatgaacaagaatttttacaaaaatatatttaattgcttctatctatgaaatttatatatttaaataatttttataattcttatatattataatatttcattgattttatttttaaaaaataatgaaaataatgaaaaaaaattttggtttataaatttaaaaaaataatcatttagaaaaatacctttaaaattttataatttgatgtgcgcacatgacaattaatgccgaaaaaaaatatatttatagattctttaaaatttatatgaatcttagacaattctaaaatataaaagtgcgtttaataatattattgaaaaaaatattcgtaaataaaaacaacataataaatgttttctaaaatgttcgattaaaattacattggaattacatgtcatatcactcattaaaaaaaaaattcataaaaatatttaaaaacttattaataaaattcataaagaatattaaaattaatatttcaataaaacaaataaggaaaaacatatggcacaggataagcaatagaaccatgtgaattcgtcatgataaaaatgaataattaatatttaacataaattccatatcagtaatttaaaatttaataagaaaagtgagggcctatataaattgataaaaatacaaaagtattagaattttacttgttagctacttaaaaaaacaatacaatttaaaaaaaggataattattattctttttgaatatgaatatcaatttaatattaataaaactaatttatttaataagaattataatttttttaaagagaaaaatgaatcaaaaatattcgagaaacataattcaaattataaaaataatttccaaaaaatgaaaataataaattatttagaataaaataaatgaaaaaattaattgcaattgacaaaggagcaagcaaaaaatctggaatgattcaacaatcatatgataataaatattgttaataatactttttgaaaatactattgcaggctcattttataatccataccagaagagaaatttaaaaaaaaattaatttttaaaaattttctaataaagcgatattagctatattcagtttacgcgcttaattattttttgaaacgtcaaaccatttagaaaaattatttattcaaaaataagtagaagtgatttaaaaccaggataatagtcggtttacagaaaaaaaaaattttagttgacaaaacaaaatgatcaattaaaagaactaagaggacagtagaatatttccttcagtatcgggtttatgtgaaaacagcagataaatttatcattgaccgatagattaaaaggtaaatattaaaccaaaagcagaaaaattataaattgatggatagatcaataacaatcaaatacgaaaaataaaaattataaatgataattaaactgtaatatataatttaaagtagggttggtcgggaccgggaattttgggcaaaaccgggaccgggtttgtttgcttttttccattaaaaatcgttaataaaaaattttatttacctatttcatggttttgtacttatttataattattttgaactttttttatacctatttaaatacctatttcgcgatttttcttgcctaaatttcccagccctaatcataaactacaaaaaaattgcaagaattgtactgaaaaaatacaaagaatgacgaaataattattaaatataaaaaaatcccacaaaacacgtgtttgaaaaataatatatatttttttaatatatacaaattaaatatcatttttctttcatttataattacgtacaaaaattaataatattataataatactaaaaagtcaaagcaaaaatgaatgacaaattcttttacgagaacttgaaattgaacaaaaatatttcaaatcgcaatttcataattaataataatttatataaatttaaaaaaaaagaaaatgtactgaaattttatggagaattaatttacatttatataaacttttaaaaacaagaagaaattaaatagatataaaacaaaaatcattaagaaatgtgggtcttttgttccaatgagataatttttgagcgcattgagagttaccaccaaagtttgcataattaaataggattttaaaaaacttttgcatactcagacagataaataagtgattttataaaaaataaaattgaatgatattgaaacaaattttgcccgaaaaaaacaaattctaatggcaactgattcttttaaaagaattacaaatgatagatgaaatttgaaggaaaatttgaactaaataaacaaatctatctttaacatacgaattttaaaatacattttctctagtatcaaaagattaaaacccaaatagaacttttacacgattaactttatattttcatattattatggaagaaagacttgtaaatctgagtgctgagccgaacctaaaaaagtatcaatgataataatatttagatttaattattaaataataaatgacaacttagcttaaacttagtcaaattaatgaaacttggtattgggaaatagctctatgtattgtcttcaattttaggtaattaaaaaatctagcaaaaatttttacaaaaagttgtaacgaaaaaattgcaaaaaatgtagactcaatattttgtccctattttaaaactcatttaaaaattaatttaacagaattatagagaactctgggctatctaaacatattaa

SEQ ID NO: 19441 - DNA, 2465 bp, Heterodera glycines
ctcatcccgtgttcatcacacgttgtggtttcgactttcagtgtgaatggtgcgaccaaagaatggatatggattccattacaagtcaatggccaccagatgaaacttgcagccgattcgtgttcacatttgtcgatcatacagcttccggtttggcaaagtttgggcgaaccgaggttggaaaaagttggtaaattagtgggttccttttcgggccacaaattgaagttgttgggaagtttcaaatgtgacgttctgttcagaggagtcacaatgcggcttgaactttcagtggcagacaccgaagcgccgagcatcatgggattggattggatcatccctttcgagcgtgccacccaacagccaattgccacgactttggagcagcagtcgcccattgtcaacagtgtgcaaccaacaaatgatccggtcaaattggaagggcaaatcaaggcttccttcccgaaggtgtttcaacctggcctcggacattgtgtgaagacgaaggccacgctgcatttgaagcaaaatgtgaagccagtgttctgccgtgcgcgacctgtgccgcatggagtccaagcagcagtcgacgaagaattggaccgacttttggactcgggagtgctgaagcccattgatttttcgcgctgggcagctcccgttttggcagttcgtaagaaaagtggtaatgtgcggatttgcattgacttttctacgggactaaacgatgcgctggagttgaacaggcatccccttccgcggaccgaagacatttttcatgctctgcgtggagccaaagtgttttcgcagcttgatttgcgtgatgcttatctgcaggtcgaactggacgaaagttcaaagcagttagtcggcatcaacacgcaccacggactttttcaatatcagcgtcttccttttggcataaaatcggccccgtctatttttcagaaagcgatggaccaattgacgtccggtattccaggcgtgtttgcctatttggacgacatcatcattgcttcggccgatcactcgcagcatgttgctgctctcattgaactcttttcccgaattcaggactatggatttcgagttcaattggacaagtgccactttttgaaggctgaattgaagtttctcggacacgttgtctcgtccgatggtctgaagcccgatcccgctcgatccgatgccatccgtaatatgccgtcaccgcatgacattggcactttgcgctctttcctgggtgcgctcaactattacggtcggtttgacaaggaaatgcgcaatttgcgtacacctttggatctgcttttgaagaaggacactccttggttttggggtcctgatcagcagaaggcttttgatcaggccaaacaggttcttcaattggatttgttgctgacgcagtatgatccgagtttgccgatcattgtcgctgcggatgccagccaatgtggaatcggagccacgatcagccatgtgtttccaaacggagtggagcgcgtcatcgagcacgccagtcgaacgctcactcccgctgaacgaaattacgcccaaattgaacgtgaagctttgtctctgattttcgcggttcaaaaatttcacaggatgatttacggtcgtaattttactctgttaacggatcataagcctctcttggctatattcggtaataaaaatgggatcccgatctacacggcttcccgattgcagcgttgggccctaattttgtccaattacgattttacaataaaatatgttaaatctgcaaattttggacaggccgacgttttgtctcgattgatttctgagcaccggacagacgaagaagtcattgtcgcccacacatcggacaacgacgtggacagcactgaagaagtcgaatatgctcttcttgtcaacttggagcagctgccagtcgatgcaaaagaagtgagcgaactgacgacttcggacgatttgttgcagcaggtggcacaattcgtacgttccgggtggccaaacaaatgcccagctaatgaattaatgcctttctattcgagacgtgatacgctcaccctcgtgggcggttcaattttgacaggaaaccgagtcattgttcctgcgccgcttcgtcaacgtgtactcaagacgttgcactttgctcatcctggcattgtgcgaatgaaggcgctggctcgcaaccatgtcttttggcccggtcttgacagtgacattgaggcaatggtaaagcattgtgcggaatgtcaattcgccgccaaaatgccgccgaaagcgccacttcgaccatggccaattcctggtgaagtttttggacgtgtccatattgaaattgcaggaatgcgataacatttatctcagctagtgtgataaacttttataatacacattaactaaaatttattaaacttttgaaaaaatatttaattttaagtgtgccttttccactaataatttaacaaagt

SEQ ID NO: 19442 - DNA, 2966 bp, Heterodera glycines
gcgcttctttccttcgttggttttgctcctccggtgataacggcctaaaaacggacggcattttgaacgggttttaaacactcagaaacgccaccgtcgttcgttcgcttctcactcacccaacgcaactcgacacaatacaaccaaaagcggacatcgcacaaatcgggccaaattttcgttcgtctttcgttttgctcgttgaaccgcccccggcaccgtctcgtccccattaattggacatcgcttcaacagccaattagcattataatgcccatcgttttccgtctccaaagtcagcttttccctagttagttcgttcaccacttcaaatggcacaattggcgttgcgacacggagcacaaaacgaatggcgtaactggcacgagtggtggtggtggcacgaagaaattcctaagcaaaatgaaatgaagaaatgaaaaatgcaatttctgatatgatcagtgatcaaatggctctattacagtttaaacgacaataaaaaagaccgacagtaaaataatttgacaattttaaagcactataacttcttcaaaattatcaaaattaaacattcttggcagcatttgatagccttaacagtttcagcaaaatttcaattatttcgttatttaaaaaaaattatagccagaaacatcaaaaaatcggttttcaaaaagctttgatcataaatttttgaatcttgagtgaattttttccaagcttagtagacagagaactcttggggctaccgaatgatgtcaataatgtttaatttggatgcttcttgaaagtgttatggtgctttaaatttttccaaattattttatggtcgtctctttttttatagtcgtataaactgcagtaaatccaaaatatttgctgtatcgacgacgacctccttgaagtcgttgacccatccactgttccgtaatgaattgtaatctttgcaacacaattgcttcggctgtccattttttgtcggagtgtgtaaccattttgacaatgcttggccagcagttgtgtttggcacatcgtcaccgatcaccgcggggaacagatcaccggaattgatcgaaatcagccgcttcagatcgcagagaattgttggcgagatgtgatgacgcaaattggtcagatgagcaccaccaaaaaatgtcaagcggcaaatgtttggcgcaaaaatgggccaaatttcatggaccaaaacattccaaacgatcggcatcacttcgacaatgcgtaagcacaaatcggtgggtttgtcaaacactttctgattggaacgtagaaatgagatgacggtatggtcgatgtacctgaaaagggaatacttttattttaaaaatgtttggattttttttatcattttgaattacgtaatccgaaggtcctcaaaccgaactttgttgggcaacggtcggtcaggaaaggcatattgtatagtagaatctcgataagactaaaatttggttaaattttcaaaaaagttttttaaaaaaattgaaagcccgctgattatagatctgaaatctgtttcgccgatgtcctaatcacggacccgattcagcaatcgaggacccttttttgatcaaaaagagccatacgaatttgggaaatttgagctcgactttgtgggttaaaatttagtcgaaaggaatgtcagattcgttaccaggggccttgaaatggactaaaaagttatcgtataatttttttttttttgaaatttcaacccaaaaaaaccagttccgagtaaactggtgataaacaagtaccgagtcgtcaccaataaccacacacagttttggtttcgcaccaaaatctttgtgaatttcgatagtcctccaaattttcttttctgtgccattgaaatgtttgtccactaaaacatcaaaatgaggcgaaagaagtgccattttgaagccaagtcgaagacggtcaaaaaatggcataatgtccaaccaaacatcagtacaaagccaactgaaattattgaaaattatttacggtaagaaaatgaaattccaaattttttaatgcaaaaattttctcacattttccttaaacgccgctccattttgctacacaaagattagttaatttgtgtatggtatttgtaaatttgtgaattttttagacaaatattttattttataccgtaaaatcgaagaaatttggaagaaatgcgaaaaagcacaaaaatgaaacgaatcatttttgcctataaaatggcctttttcttcttcctcccctttcattcattcgctcataatttccccccgatcattttattgccgtaatgtcttcaagaattccgtacgtttttctttttatatcatatagcatttcattaagaaaaatttggccagggttgccaagattgaaattttcagtgaatttcataattttatttgagtaccgcatcagtcggccccactaaaacttcaaaataaaactaaatttcacatttggctttcctggccttggcactttcctttgctttcccattccattcattattcattttatttcccaaattcgttttcagttggtacgccgtgtctcttctgctgttggttggctgtggcaccattctttggttcttttggaacaacgtcaaaaaacgacgacgccccaacaaaaaagaaatgtaaaaaacaaaaataaatatataaaaatcaaaaaattccctttttcagcttcatctccgccgactgttggctcgaagtgttcgctttacttccgccttctcagcttggccttggaatcgctctgatcagtcgccgatttgaccgccgcgtggacgaacatttcaaaacacgcaaatggatattggacaaagaattgcgaattcaggagaaaaagcgatggtttggcgaggaagcaaatggaaattgtcgatgccaacggagaaaagccgattgccgaatcccacaaattccgttgcccaacgaagtcgtcgg

SEQ ID NO: 19443 - DNA, 3081 bp, Heterodera glycines
ttttagctttgtgcaattcgtcgccataattcggaaattgcatttcacagattgctttttgtggaagaatcgaagagggaggggaagggacggagagaagggaggagggatatgtccgttctttggcatcgggggaagtgccgggcaaaagaatggcatttccatgaaaacagagggcaaagagcagaagggaaattaacaatgttagtcattcaatttattcatttataaatggggtcaatttgttgatcaaatttccataattcgaccaccacggcgtatttcccaaaaatgccatcgtatttctaagaaatttttgggaaaacggtggaaaggtgaagaatatgaaaatgaatgaatggcaattttatcagaatttcagtgataatttccatttattcattgggtggcagcatgcaattacaaacagtgaaatcgaaggcacagtcaaagcccatggcaacgagcaaacaaataaaaaaggcgtgccaatgagaggcttaaggccgagtccgtttggacctcacagagggaaagggagggagggaaaaaggagggggggggggatttacgggggtgcccaatttattaatggacaaagaacggtcttctgagatctaagaaatggcaaaagaaaaactaagaggaatgagtcggatgatgccatgcgaatggagaacaaataaaactacaaaatgacgataacagcgggtcgatgttggggcaattgggtaggaaaatgggcgaagagacggcacaaaatgccggaggcattgtcctttgggccaatctttcgggacaggtaagtgcaagtaaattgtgggcggggtggcaaatggagcggcaaaaatgggacaaatgaaggggagaggggagacattttgctttggagagtttgccgagtgcaattaccaccttcacattccaaggggggggggggaattccgtgccaaaaagagcgggggagggggcggggaagggactgaccacgagtggccggccacaatgccaattgggcaaagaatgaatggcacgattggcatttaatggaaaagtgccatttggaattccttttgcttcattttttttgtatttggccaaaaaagagttcacagggcttaatttaaatgaaaggaagttttcgttaggctttcgccaccctttcacttcaatggatgggacggataaaggcaatgtgagaaggtgccatttggcataagaagacatatcgagaagccctcgggggagagggagcggaggggaggggagggaacggcgataattacagcgaggagaggaggaagggaaagggagaaaaaggaggaggagagacagggaaaaagagggaaagggaaaagagagaaagggaaggaggtaaagaaaggaaaaagagagaaagggatagaaaggaggatgaaagaaaataaaaagaggaaagaagtgagaggaaaagaaaagaaaaaggaaaacaaaaatgaaaggagggaaaaagagaaggacaagaggaaaagaatagaaaggaagacaagagtctcgacatgtcgagaggtgaaggagctccaattctttgttagaaaatattatgaatttctgggcataaatgtaattcacttcaacacgcgaagggccaccaaatgaaaggcagcgaacggacggaagcactcccttaggcaattttaatttgataaaacgggggggggggggatgtcattcctcatttgtgatatggaacggtatttgtaatattattcgtaatttggaaaacccgggaaaagggaccaaaaaagggcattcattgcactcaaatttgtcttctaacttctttttgagtacaaaaacgatgatttaagcacaaacaaatatttttatttgaagaattgaccaaaaataaggagaatccaaagtaaaatgaaatggaggaagtgcaaagacaaatacaaaatgacaaacaaaatgggaaattggcaaccaattccgttttgttgaagtcattttctgttctaaaatatttgagttttcgaaaatattataaaacaaagcgaaatgggagatcgaaaaatgatcggagtacgcactttattggatgaattggcgaaaaccctcatcagaaaatcaaatggtcacttgggcacccaaatcgtcatcaatgtccgcactgtccccctcgtcatactcgaaatcctggagagagaaaacagggttacaattaaaaattttttcacattttcgtttcaaaatcaacccaaatgccacctcttcgtcatcctccagctcgtcgtcgtactcgtcgtcatacggactgttgaggccgtattgcgttgcgtgtggcatttggccagtgccgtcgccgccttcagtcatactgctcacggcccctctaacgcgctgactttgagacggattttggccaattggataaatgtgacggacgacagttccggcgggacgcaaattttccatttgagaggaggcagacgaaaggttcgaaggatgggcaaccgtcgcaacgcctccagcggagtccccagctgcagaaccgatgccttcctgctggtggtggtgctccatcggatgtttctgctctccctcgcctccctttgcatggccattgccctccacattgttcttgacgaggtgcaactgttcgtgtttgaacgaagccatcaatttttgttggatttggtctaagctctgctcgagctgtttaattctataagatgggttattgaaggaagctaatgtaagtaatgcttttgactgcaccgtctgtctttcatttcctgcgcggccgaatgggtcaactgcaaatggccgacgtattcgcgatgagaggcgatgagtttgtcacggtcgtcagcggcacgagataattcattcttaaaaagaatagattaaggagaaaagaaaactggcacaaccagaagttggtcgatgatgtcgttgaattgctgaaccgacgtcccgtgcacaatgctgccccgataattctccaattcgcggttgattttgaaggattcttcgctgtaagttggtggtgcacagagactcagagagcgaaacccggaagaaacattcgacggg

SEQ ID NO: 19444 - DNA, 1444 bp, Heterodera glycines
  unsure (1)..(1444): unsure at all n locations
ttaagcttttttctttggcatccaaatccaacaatcttggtatcattcgaaagctcttaacatgctctattagcctttcaaaaacgaaaagtttttcaagcctgtaaaaattttattaagaaaaaacttcaaaaatttcgacttttcgcaattttcatgcataactgttttgataattgtctaatcgcaaagcaatagcttagaaaaagcttctaaatagattaagctttcgaacgacaccaacaatgttggatttggtttacaaagaaaaaagttaagccaaaaacatgctggcgccgaaacgcagtggacccgggaaaaataccacctaacaaataacaaacatttaaacattttttaaaattatgcgtctctaccgcacatattagaagggtccgtggaaacagagaaagagaaattatgaaaattgctttcagaaaaaattgtcaaatttattttatcgcctcttttttttatggtcgtgtgaactgaaatagagccaattttcctgcattcgggccacctaggaattccttgaaattttcaaaatttttgccaaaaacttaatctgtgcttgtttaaaaaaggattttccaaatcaattacatcaatcaattgaaaaaggccaaagtgtgctaattgcagcaaaaatgaacagacggcaagcaatttaaaaaataaattacaaattttcattttccaaatttttttttgccgtgtttcagttggatttgtaacgacgtgtggatggacattcttccatcttttgaccatgctcaactcggcctcaaaatggcattgctttcttatcgttttgatgcgctggtggacacgcatttcgatggcaaaacggaattgacaatttggagaggaattagtgtttgcaaggacaaaggaccaaagccgagactttctgtacggattgctggcaaatctgtggattttccgttgccggatcgtccgctgcccaacaatgttcgatttcagtgccttcagattgagtaatttttttcaaaattgtttatgttaaagcattttttattttttcagatacattgaccactctgtgctcacatttctccatgccaacaagcacatttgggacaaaagtggcaccaatttggaattgactctgtgttcaagcgataatgatgatgagccgatttgggatgttttggcgcgcgaaatttggccaatttttgcaccaagcattcgccacttgggctttttcgatgacgaacaatttgacgctttgtgccgtcgcattttaccgacaattctcactgatcttgatcaattggtatcaatcaatttcgatcagctgatacttgtgattgctgatgatggacagaatggaacttctcctnggcaagtgttgtccgaatgggtgaacactccganaaaagacgggcaaccgaagcgattgttttgcgnagattttgac

SEQ ID NO: 19445 - DNA, 883 bp, Heterodera glycines
catttgattgatttctctcatcagagatgcttttgttgaatacacaaaacattcaaaaaaaaaaaattttttttatttttttgcggtttttggcacatttcttccaatgttggtgatattttgtcttcagctaaatacgtgcctgatcctgtcatgaaaaacaaggcaaacaaagaatttgcgaatgtttcatgcttgattttcttccttttaaaacatttgcccaggtgatttcgccagtgagtgaattcgccagtgagtgaattcgccagtgagtgaattcgccagtgagtgaattcgccagtgagtgaattcgccagtgagtgaattcgccagtgagtgaattcgccagtgagtgaattcgccagtgagtgatttcgccagtgagtgatttcgccagtgagtgatttcgccagtgagtgatttcgccagtgagtgaattcgccagtgagtgaattcgccagtgagtgaattcgccagtgagtgatttcgccagtgagtgatttcgccagtgagtgatttcgccagtgagtgatttcgccagtgagtgatttcgccagtgagtgatttcgccagtgagtgatttcgccagtgagtgatttcgccagtgagtgatttcgccagtgagtgaattcgccagtgagtgaattcgccagtgagtgaattcgccagtgagtgatttcgccagtgagtgatttcgccagtgagtgatttcgccagtgagtgatttcgccagtgagtgatttcgccagtgagtgatttcgccagtgagtgatttcgccagtgagtgatttcgccagtgagtgatttcgccagtgagtgaattcgccagtgagtgaattcgccagtgagtgaattcgccagtgagtgatttcgccagtga

SEQ ID NO: 19446 - DNA, 900 bp, Heterodera glycines
atttttggcatgtcaaaagattggaggaacggagctcacaaggggaaaaatggtataagcaaattgaatgaattggaaatttacaaaaagaggggtcacaaaaagaaagggacagtcggccagcctcaaaacgacgtttagcgaatgggacaactgagtagaaattccgcctttgttgggcatttgcagaagcggcgtttccgtgctcaacaaaaggtgggaagcatcgcggaaaatgctcgaaagatggacaacactttcctaacaaaggaaaaccgaataaaatgattaaaaaaaagaaaaccgactcgaagaagttgtgtaaataaaagcatcagcgaagaagtgacggtgccgtcattatcattgcccagggaggcaaccaacttattccaggtttgctcaacctgaaattggccatcatttttaaacaaagaaagacaaggacagagataccgagcccgaaatgtgatgactgcactccaaaggagtcacagttacgtcgttgtcatgcgcaacagcaacgacttcttcaacacgttcctggggttgttgtggctgtgcatcggcaacggaatggagtcgttgttggatggggaagagagaagcaaaggcaccccctccggtggtgctggtgatgctcatccgttcgggcgtactgagcgaaactgtgcggaaattcattaccggggaagaggtgcccgtctcctcattgttccgttccgacaaatgataatgctgggacgaagagacggccgacacggcggagtctgcggcagaaacgttgctcatcgtatggggcagggaatgtggtttctgttgctgctgattatggggggaagcggaaggactcgtcgcttttttgtgccgcttctgccattgacgtttgttgtgccgctg

SEQ ID NO: 19447 - DNA, 1545 bp, Heterodera glycines
aggggacatgatgacacactgtctctttcggcttcttcgtcttcgtcctcctcctcctcttcgtcgctgtgccgtgacaattggactggcgttgtgtccgatgagacatcatttgaatcgctcactggaatttcaatttttaaattgattcgtaaataatcagtcacttttgctcggaggtcgtttgatcactgttcctcctgcatttgctgtccctttcttttctcctccacccattgcgacgccattccgacaacttttgccattgttgctgcccatcgaatggcgcgaaccggtcattgtacgcggcgacgagccaaagttgccgatgcacgctctgttcgcagccaatgcactttggtggtccatctcgtcctcctcttcgtcaatgtaaaagtcgtcttcatccggcacatcctcctcctggtcttggttcgttccgttctgtccgtccgtatcctcgcgacagactccacaacgcgctgttctcattgtggacaaccaattgaagcaagactcagtggactccgagacggagtcgtgttcagcctcgaggaagtcgaactctttgaacactcgcgggaacgaatcggtggttcgtaatgatgccaattcgccgccactattcgccccgctgttattgcctcccacaacggcactcatcaaactgtttggactcgacatgcgatcaaagccgatccctcccgacactcccatctcatcggacggttgctgttgggaccaagcggaagggtgagcagtgtcagcggagtcgggtgagggcaacattgaagcaccattctgacagattgccgagctttttgctgccaaaactgttgtctcccgcactctttggtgaatgtcactggaagaatgggagaaaagcatctgaaaggataaatgagaaattgaaagaattaatctgtgagatcagatcgaattgcaaaggaaacgaaaacgaaccgaagaatgtttgggtgatcgggcacgatgtccggacgccgaaagaacagagataagtctatcgcgaaccttcaaaagttcagagtaaagggaaactggcacagttttgaattgttttactctgtttttcgttagcctttcattcttcgctgttcccatttcagcactttccttcgcaaaagtcctttcaaaatgcaactcaaattcgggctttcgcaatgccgtggcattcttcttaaaatcaaatgggccatttaagatcatatacataaaaaagagaaagggagaccacctcattttgaatcaaataattgtatgaaatggaattccactgatccgtcacaattttgagtattttcgatgcttcgcgtccgtttggcccgtgaatgtgtttgagaatcacccgaataaccttcaaagaatggtcaaaaaatcagtctttgtttttgagaattttttacctgagaattgatcatttctggcggggattcgttgtaattggcataagtgaacaacaaatgcatcacatccaacagaacggaatggaaggagacagaacaattctccaaccatctgacaaaa

SEQ ID NO: 19448 - DNA, 2518 bp, Heterodera glycines
  unsure (1)..(2518): unsure at all n locations
ctatcgcagctttcctggatccggaagttcgcatcatctttcccttcgcacaacaggaaagcagaaanagaaaccggagcaatccttgcaacagccaagcaaccccaacaacagagaacggagcgacgcgcgaaccggcacagcacgacgaacgccaaaagacgacgggcacgaanaggacgaaacaacgaacaaccaaacaaacagcaacgaggaacaacagccgaagaacgaccacgcaaggcaacgcgacaaagagacggacgcgacacgcaacccgcacaacaacgaacgcaacaacacggagcagggcaaggacaagccggaacagcacaccacggcaaggacagaagcccagggcgcgaagaagggcggaagagaaggacncaccacgcgcaggcaaaaaggccagagcgacgaagcaaacacacggaggagacgaggcgccagcgcngagacaacaccccgcaagcagcgcgacagagagcgcccaagcacgctggcgtatttgctcaatcctaccgagtgactcttctcagcctcgttggagtacgcccgcacccgacattccgacccaccgtttctaaaccactcgggatcgaagagggaatgccgctgcgtgaaatgccacgaacccccaaaccaccagcgcgcagggcagagcaccgatccatgtcaccaatcaaattggacacgatcaccagaacggctcggtaccaacaaccacgaacacagagccatctcgacctcacagaagactcgccctttgggaggcccagacgaaaagaattctgacgggcccatctttttcacgccggaatgtcggaactctgggattccgactgccgatcaattgatcagcagaattgaagaaaggaagtggcgacccttccccctccctttcacatgccccgcgcaccccgttccactcctctgtccccctttccttcaaattgtcaattgtttttgtgtgttcctcccccactccgcgcacaaattaatgaccaatttgtcaaaccgcaacttttcgccgccgtccccaatttggcgaatcgactccaaagaactatgaacccccaaatttcccgttttccgcccattttgttcatctgttcatttttgtcccccgtttttcatttcgtgcccaattttcggcccattttcgttctgctcacatttgccactttttatttaactttattgttatttaagcggccaaaaatgtcccccaatttcacaaccaaatttcatttggcaattttgccgtttctctccccgcccctccatttgcctttaactgtgatggccccccaattttgatcattctttgaaccccccgattgttgatctttgatctatggcccggtgccctccatttctgtttctcccggtcccattcattgatttctgtgatttcccatttgccccagtaccgaatgcttcctttctgaaaattttcctgtcccatcccggtccccaattcatttgtgattaatcccccggtgatggcattttatctgtgatcaattttgtgatattttgttcaccatttttaaatttttgtttaattacccaagtttgaggcttttttcccggaataaattttgcttaatcaattctcggcgtttgatttggccggtcctcgtccctgcctgccccgaccccgcaccggtagaattcacatttggcccgacccagagcaatcgggacatttatttaatttatttgttttaaatagtattttttttcttttggttattgtaaactacgctttcatttttcttttctgaatttgggtcgtattataattcaaaaataatgtttatgtaatacagataaattaattagtaaatgatgttaattttaataaaatttgaataatattttactaaaaataatctattgatcattttctttgtttttttgtttttaattttaaattaattaaataaatttactttaggtctaaagcaagtttttttaataaattacgaattacattttttattttgcattcgccgattttactttaattattatttagtgtttaaataatataaagtttctaacttatttttatgctatttttaaaccagatgttcattatttgagaatttatttttatataaatttaatgttaattctttactattattacttaaggctatttcatttatataaattattataataattaaattgtattttttttttgttttttaaataaatgattttaagtaaatataattttattagatagcattaaattattcttagttcataacaccaacggtttcagaaaaatttggtcaaaagcaaataaattttatttacatatatatattaaattattatttaagttaataaagtagaaatgaattaaacaaattaattaatagatgtcaataaattaatttataaaatcctcttgaatcatgggttatgctgtggtcatttgcgacacatattattaaaaaataagataattcgttttaaaattgaaaatttttatttttat

SEQ ID NO: 19449 - DNA, 1181 bp, Heterodera glycines
ggggggggaaaacacgaaaaacaatgaatggcacaccgatcagtgatcgacagagggatggaccagagaagcaatttaccaaaagggagagagagagagagggagggacagagagagagagaaagaaagagagagagggagggagagacggagaaggggtgagagcgatgggtggaatgtgagaagaattttaaaaaacggaactcgactctcgacttcttgtgaggcaacgatcccctgggcggcataccgaaaggttttcttcgctaattgaagtggggcctcgtaaaaactgtgggtgataaattgattaccaaacactaattatcacctcattatcgtccttttactattttttatcgcttttatttccctgcccatcggctgaaaaacataaaatgtctaatcgaacaaaagcaaaacacaaaacaaaaacaaattcataatatgataataataggaagaagaagtgaaattcgtacgatggcattgccaaatgattttttttttgcccccgtgggaaggaaagggtcactgactcattcattttcttttccccgcagggccatttttgggcaaaaataaacaaaaaagcgactttttggaggtgcgaagagcgaaactttgcgcaattcaatactaatgacctaaggaggagaagaagaagaagaaacagaaggaataaacttacaattagcataaattaaaaaataataaatttatggaaaatttaaaagaaagacggagagaatacggtggaaaagagagaagagaaaagaagcggcacttaaaagaacaaaaattcaaagtttgaaccatctttttcccctgggggagcaaaaattatgggggaaaagcgtaaaataaaaaaaaggacgcggaaatggcagaaggatttgttgaattttggaggcaataaaaaggcacgagcgcgaatttgggggtgggaaatgtgtgaaatttctcggaggcctccccacccccgggggccaattgggcgttgtccccccgggggacggacggatgtccgcacgatttgaacgacgacggtttgcatcaaattaacaattttatgcggtgggaatcgcggggatttgtgaaattaaaaagggcggacaatgggagaaaaagcgaagaaaaatggggaaaaatgggggggggggaaaattttgaaaaaaaaa

SEQ ID NO: 19450 - DNA, 1761 bp, Heterodera glycines
caatgaatgccaatttccccccccccccccccaaaaatccctttggtcgcttcttctgattttttttctttttcgccataaaattctttgcaaaatcatcacaacttttcgggtgatatcacaaaataacaaatgaataattaggttaatgaactaacttatttgttattacaatttgtcctcaaaatggtcgcatcggaggggcgccacaaattccgtcacaatccctgaaaatgcgacagataaagaaaatcattgatccggcactatttcaaaaataattaattaataattttgaattttgcataattaacaaaataattagtgaattaataaatgacttttggccgccatttgcgtgttaatttggccattgctgcgaatgaacggaagggagaagcaaacactgcgaatgatgagaaggagcagaaacagaagcggagggaagaggaaaagcagagggaaaaggacagccgaactcggccctggggaaatgccaaaggacgaaaattcaaatgattccattgaatccgacgattgccatggcctcccccccccaagcgatccatattttgctgatacatattccatccacttccactcactttaatggctccgctgagatcattttgtccgttttgtccgcgggtgcctccggcaccgccgccgcgtcttcgccgagtccagcagcaaaggtgcggacacgttgaggttgaggactgaggacgggcgtcgccgtactgctcccgacggggctccacccatcggaggaggaaatgccaaaggaatgaccctaagatatcggaaaaggacggttatatcgtaggaacgaagggtacggtagcatcaagacaaacaaatgaaagtccgttagttttttacctgtcgattttcatggaaaatgtcgccgaacatttcgaagaacaaagggtcggttggacgagaagaagcggtgggaaaagtgtgcaccttttggatgaattttcaaaaaaaaattgggacatttggccaaaccattcgaatattttcaattaaatcgcgggagagaagctgaaaaaggaaaagcgaagtcaaaccaaaattaatttgaaggcccaccccccaaaatgaccattagctttggcaaaatatgaagcaattttgcgaagcgcagcgccgcgtcggagggaagggacgcggaacaaaacggaggcaatctctggggagaatgctaaaagggaaaaaaggaagaaattaggggaaaataattgagaaaatggcaactaattaaaaaggcaaattaatggacgataattaaggaaatggtaattaatgaggcaaaagaaaaacaaagagagaataatgaagagaatgtgataattaattaaccaaaaataaataaaaataaatgaggaattaattaaaaaagagtttcattgattctgaatttattgttgtgatttgtttcacattgtaaagtgccgagtgcacattgtccctgaggcgttccacaaaattttgcccggagacggacagcaaattgccccggggggcggcggggctccgctggccctccaaatcgccaattccgttggaatccatggccaaaacgatgatcagctgagataaaaggaagttggaagaaagccaaaggaaactaagggccaaaacggcacactttgaccatgacgaattcctcctggtccaaggcaagttcggtgagaacgcggaccaacgaataacgcaacgggagacaatttgttggctgaggaaactgtgaga

SEQ ID NO: 19451 - DNA, 1038 bp, Heterodera glycines
tttcttataaaaatctttttttctaagattttgcatttttccgagttacagcgcgaggttctcgtattttgcaaaaaaaaattcctaaaataactattcttttttcaaaatcgcaccgatgccacgggaaaacaaatcaaattttacagccaaataactttttccaactttcattagccctcccctcattgcaaagtatttcttacaattaggctgccgtgttggtgctgagtgtgttgaccggcggtgtgtttcggctgttgctccattggtacccggaatggttcgtccgactgaccgcctccaaatgcgcactttcccggtgcgaccacgtgttggtcaggtaatgaatgcacgacaataactcgtcccccatttaaaattttcttagaaaaatatttccaatatttttttctgcaaaatttctaattttattttttttttaaatttttcggtgtgtgtagtgcaccatgaataaaaagcggcgttactttttcaaaattaaatctttttatgccgtttccatttatgtcaactttttggtactaaatttttcaaattgtttggtactaaatttttcaaattgcttgatccaagcagtgccatcagcgaacatttaatatattttttccgaaatttcttttgagaaattaaaaatatgttatttgacagggacgaccaccaaaacgtcgtctttcggcccgttcatcggttggaagccaaacagtgcggccaaaaggaattggcacttcccggcggtgccgggcacacccttttggtggcccaacttcgcttcttcacttatcgcaagctgaaatacctgtggcatccgcacaaccggtgcttctccaccatttcacagttggaatctgatgtaaaaaaattttttgtttggtgtgaaattcctacaaaaatatttgagaaattccaaaaaaattcgttcggcatttcctctcttccgacatgaaaaataattatttggtttttcaggtttacccaaatctgaaaatcgctgggtatctctgtaacatttcatgt

SEQ ID NO: 19452 - DNA, 1809 bp, Heterodera glycines
  unsure (1)..(1809): unsure at all n locations
attaaataaatgtatttgtggtagagttcgaaaacgctactggttttgagttaatctgacttgaaacttaacgaactttttgaatttagtaaaataattgtaagccacattgagtttgtcgaaaaaaacactaacaaaacgacaaaaaaatgatcccaaaaaattatccggggatgttttttggggggggggggggtggaggggtacaccgccattttgccaatttccatcacccttttctcagttgcccctttcgtacttccattccgcgtccaccaatgcgcagtttggtctgtcccatggcgaggcggcccagcgtatgcacacgtacgggcccaacctgatcgaggtgaagctgaaaccgctggctgtgctgctgttccgcgaggccatcacacccttctacattttccaagtgttcaggttgggctggggatgggataatcatttgcagagggaatttggggatcaattttaccaaaaatttgttccactatgaaaaattttgactgttttctggttgttcgacattaaaagttgatccaaggaagagaaaaatccattaaaaattataaattgtaaaaaatgtattttttttaccgatgcatattttttagtgtccacattcgtcgtcactcattcccaaaattttttttttgttttttttcaaaatttttgcatttaaaaatgccgtcccactcaaaatgcctttccctgccccgtttttgcagtgtgactgtgtggtacatggacaattacgcctatttcgcttcaatcattgtgttaatgtcggtgatgtctatttcattggatgtctatcaaatgcgaaaacaggagagaaaattgaggtaaagccgccggagggggtgggggttagaaattaaaaattcaatatgtttttttttcaggagcatggtgcacacccacgagccggtgcatgtgttgcgcgatggtggccaagtgttggagttgtccagttccgaggtaacacatatattctttggcaaaatttttaaaaatttcaaattttaggattttgaaaaactgaaaagtttcagtttagtaaaaacaaatttaaagaattttttgatttttaaatggatttaaaaaatctttgaaattagtgcgaaagaaatctattttcaaaaaaaaaagattttttaatatttttggtgggctgctgctcccctttcctcggcctgtttcaaagcataaattattaattaattttttccgaaataaaaaaatccaatattaaaattaaatttttaatttttgaattgaattgtttttatcattttacagctcgtccctggcgacattctgctgatcccgccccgtggctgtgtgctccaatgcgacgcggtgctgctcaacgggacggtgattgtcaacgaggcgatgctcaccggcgagtccatgccgatcaccaaggtcaatcgacggttccacttttttggcatttcgtttcagattttagcttttaatgtatttttacaataaatatgtttaaatttattttcatccctttttcatttatattttgtttctattttgtcataatctttctcttttttgttaccattttggatttttcagttttaatttcacccgtttttggcatttccatttgttctcgcgtattttgcataatttttgttccccattttcacaggtggcattgccggaatcggacgatgaccaccagacggagttttcattcaaggaacactcaaagcatgtctctactaggcactcaagtgcttcaggtgtttgttgtcttacagatttggacctgcagnngcatgc

SEQ ID NO: 19453 - DNA, 1222 bp, Heterodera glycines
aaaaaaagaaaaatgggattttggaaatattttttcaaatttttcccgggcaaaccccgtactggaaaatttccaagaaagtgttgggttccctgatattataatttcaagggccgactcagtccacaagggatagaaaaaagaaaatgggatttttggaaatatttttcaaattttcacggacaaacccgtactggaaaattccaaggaagtattgggttccctgatatataatttcaagggccgactcagtccacaaggatagaaaaaagaaatagggattttggaaatatttttcaaattttcacggacaaacccgtactggaaaattccaagaaagtattgggttcactgctatataatttcaagggccgaatcagtccacaaggatagaaaaaagaaaatgggatttttggaaatatttttcaaattttcacggacaaacccgtactggaaaattccaaggaagtattgggttccctgatatataatttcaagggccgactcagtccacaaggatagaaaaaagaaatagggattttggaaatatttttcaaattttcacggacaaacccgtactggaaaattccaagaaagtgttgggttccctgatatataatttcaagggccgactcagtccacaaggatagaaaaaagaaatagggatttttggaaatatttttcaaattttcacggacaaacccgtactggaaaattccaaggaagtattgggttccctgatatataatttcaagggccgactcagtccacaaggatagaaaaaagaaatagggattttggaaatatttttcaaattttcacggacaaacccgtactggaaaattccaagaaagtattgggttccctgatatataatttcaagggccgactcagtccacaaggatagaaaaaagaaaatgggatttttggaaatatttttcaaattttcacggacaaacccgtactggaaaattccaaggaagtattgggttccctgatatataatttcaagggccgactcagtccacaaggatagaaaaaagaaatagggatttttggaaatatttttcaaattttcacggacaaacccgtactggaaaattccaagaaaaagttgggttccctgatatataatttcaagggccgactcaatcccccagggaaaaaaaaaaaaaaaaggggattttgggaaaatttttttcaatttttcccggaaaaaccc

SEQ ID NO: 19454 - DNA, 2495 bp, Heterodera glycines
cgcaacatgggcggagatcattagttcacaattctaaatttaggaattgtttaattaatatattcgatgagaaatggcgttgaaaaaattagggagcccttttcggttgttgttattgtattttttgattaaagacaatgctttgccgcctttgcctcacccccgccccctttatcccctctctcgtcccctcccttattacccctctcatccctctatcctcctcccctctttccttcccgcccccttcatcccctctctcgtcccctcccttattacccctctcatccctctatcctcctcccctctttccttcccgcccccttcatcccctctctcgtcccctcccttattacccctctcatccctctatcctcctcccctctttccttcccgccccttcatcccctctctcgttccctcccttattaccccctttcatcctcgttcctccctctctcctcctcctcccctctttccttcccgccccttcatcccctctctcgtcccctcccttattaccccctttcatcctcgttcctccctctctcctcctcctcccctctttccttcccgccccttcatcccctctctcgtcccctcccttattaccccctttcatcctcgttcctccctctctcctcctcctcccctctttccttcccgccccttcatcccctctttcgtcccctcccttatttcccctctcttatctcccatttcttctcctctcctctctctctcccctatttcttttcccttccattctcctctctatcccaccctccctatttcttgcgtcaaatctctcttctcttttcccaagttctatctcctcccctccttgcgcctctccctccccccccccccctctcccgctaatttctcaactttccccactcgccgttactttcctattgtcggaactctcccacacaattctcgactattttcgtatttactttcatatattttggcacttccccattagttggcattgcataaacacccataaaatcctaaacaaagaaaagggagaatgaacggatgtgagaaaatttaaggaggggaaagcaattgacgcaacatcagaaagaaagacactttatggtggtttatttcactcaacggacggaaaaagcggaggggaggaagggaaaatgtatagggagggaagggaagggaaagcgatgccaatccgaagagaaatgggcaaaggtcagcagcgaatgatgaatggcattggcacaacataccatcaaaaattgttgaaattttgtcgctgctgaagcacaggtttgaatgctttgggcgaagaggagatagtgttcgagtgaaatggccgaaaaacatttgttggtccaaagttggcattttctttgagcacatttgaatttggcacggttgaagacatattgccaatgttttctgaaaaggaaaattgccattaattaagcgaacaaatcgggaatataaaaatgtttttgcctttttgagagacgcccaaaatagactgaacagaatggcgcacttttggcaatggcgcaacattggcacttttggaagagggcacgggaaacgaagcggacgaagttgcgacaaaatgctgcgaagagagcgaagacggcggaagaggaggggaaagaggagacggaagaggagggggaagaggaggggggagatgattgggagggggtcgaccgataagcgaagagatcaaagccatcggagggggccaaaaagactgaagaagtaaagtgttacacataatatcagggcaagtctaaccaagttcgactgttgtggcctgcagaagaaggcgttcggtggggcgccgtttggcgaaggttcgaaagggccaaagggcaactgaaagtcaatgccatttcggttggtgcttcgcttcgtttaccattggcttcggccttggcaattgtgccgttgggttcatttttgctgttgttggctcttcaacttttgcttttttaatttctgtccgttggcattccgtcggttcgtccgtatcccttttgatcgttttcgcctgcgttaattgcccactgaattctcttaaatttaattgaatgaattttggcttttccttctttccattaccctttcctctttcgactttgctcctttttctgatcacaattcggctttttcttctcctcctccgcccctttcaccgattcggctgctgcttttgtcagtccgctgcgctgcagaaattccatcattcgaaggtgtcccgcggcgggatcagctgttttaaaattgtccaatatttaattagttcatttgtcttttcttttaattagtgccaaattgtgtccctcactctttccatttgctcaccgtccggttcgggcccacagtattcgaagagtgggatttttttggtgccgaaaagggcatgctttttgaggatgagtcgcattgccaccagcacaaaacaatgtcgtaaagacgacggcatttgctacgcggcggcg

SEQ ID NO: 19455 - DNA, 1103 bp, Heterodera glycines
agtgattggaatgtttggtggggtggagtcccagtgattgaaatgttgggtggattgagtcccgttgattggaatgttggtgggttgagtcacagtgattgaaatgttggtggattgagtcccagtaattgaaatgcagaagaattgagtcccagtgattgaatgctggtggattgagtcccgttgattgaaatgctggtgggttgagtcccagtgattgaaatgttggtgggttgagtcccagtgattgaaatgttggtggattgagtcccagtgattgaaatgctggtggattgagtcccgttgattggaatgttggtgggttgagtcccagtgattgaaatgttggtgggttgagtcccagtgattgaaatgttggtggattgagtcccagtgattgaaatgctggtggattgagtcccgttgattggaatgttggtgggttgagtcccagtgattgaaatgttggtgggttgagtcccagtgattgaaatgttggtggattgagtcccagtaattgaaatgcagaagaattgagtcccagtgattgaatgctggtggattgagtcccgttgattgaaatgctggtgggttgagtcccagtgattgaaatgttggtgggttgagtcccagtgattgaaatgttggtggattgagtcccagtgattgaaatgctggtggattgagtcccgttgattggaatgttggtggattgagtcccagtgattgaaatgcaggtgaattgagtcccagtgattgaaatgctggtggattgagtcccgttgattgaaatgctggtgggttgagtcccagtgattgaaatgttggtgggttgagtcccagtgattgaaatgttggtggattgagtcccagtgattgaaatgctggtggattgagtccccgttgattggaatgttggtggattgagtcccagtaattgaaatgtagaaggattgagtcccagtgattgaaatgctggtggattgagtcccagtgattggaatgctggtggattgagtcccaatgattggaatgttggtgggttgagtcccgttgattggaatgttggtggattgagtccccagtgattggaatgttggtgg

SEQ ID NO: 19456 - DNA, 2063 bp, Heterodera glycines
  unsure (1)..(2063): unsure at all n locations
attaatttcacatgatacaaataaatctgggtgattaaaaataaattgctatgggattaatactgacggattgtccgggagcnncggtatggggatnggtaataattcgttcgttttctaattaataacattttccattgtttccacaacatctcccattcagtacaattttgccattaatgtcatttctctgtttgctctcattttgcgtagttccgttcctttcgcttatctcaaattctgtgatcaccgcgtagtgatcggatggccaatcgttttcccactgatcagggattgggcgtagtgagtttttgcctgcataaatctcagaacggatgggccgaaagaatttgttaggcttgaagaaaatgaagtcgattctgtcctgcggttcgggaatcgtccagtcccattcgggaccagccgatttttgcactgtcgaccaagtctctcctgttcttttcattttaaaaccgactcttggattgttaaaaatacctgggtttttcactaagtcagggttaacggaacggtatgagtccacaaatcctttgtccgtcaataatttggtggcaggccattcgaaagtccatccgccatggttttctcttggaatgaattcaatttaagggacgaattaatggaaagtttcactttgtttcttcgatccaatccaaatgggaaggactgttgaagtcacctgcgacgatgaacggttgttcctcggaaaggtcgttgaattttttgaatttgtcgttttcaagcagttgttcgatgttttgcgcacgacctttcagtttattttaacattattttgacttaatttttaccgtttcaatttgcctaccgtaaccctctttattccgttctccactcataatctgcttctcgcttttcacttgtttgttgtttgctgcgtacggtccgtaagacttccaatcaaggtgctttaacaattactaatgcattttgaaagtccggcgccatttttctctgtttctgaccattgaaaagacgtttactcgttgtccatcttcgagttcaatgctaccaccgaccccataagtaacaattgaatgattgaagaaattttcttcatggaaaaggaagtcggaaatgtcgcgctgaaattgcattgcgatgggctccgagatgaactgaaaatcggtcttttttcaacatgagactgtcgatggcactttgtgctttgtgataatcgccgtgtctggataagcagcattcggatgatgtatcattttccacttgcctatccccagtaaaatggttagatttgtgccaattactgctgattgaagttcctttaaaatcttaatggatggtgttgcttttcctgtacaacttgtatagcgacaatgtccgggtcgaccgcctttatttgctctgctattttttccagcccatttttaacgcgtttgccggacagccatatgttgaaagtcattacgcgcagcattctttgagaaggtccaatttgggaacccttttccgaggaattgacacttgcagaaaaagtgatcgaattggcgagaaatagaaaaaggattgggcaaagctgaagcattgcacgcgaaatgacggtaattaccatcgctaaatggtaaaaaggaaaagagaacgcaatgaatgcttcgttggatattttgtttaacgttttgacagttgtaatgtcattccatggtgagcccacattctctactcttccatcgtcattaccattaatcatcaattaatgagtttgtgtaacagatatcaatcacccccatcatattcgattggtttaattaatttatttttcattccacacacactgactaatattattccaagtcccttcctattaatgaaagtgtgaaaatagcagagttttaatttacggacacgcccataaaaagtcattaattatcacagactgttattgcatgcatatcactgtgttttttaatgtccccaatatttaataaaataaaagtgcatttttattattttatacaacattttcttccagcaggggggatggattttcaacaccgaagcacatcccc

SEQ ID NO: 19457 - DNA, 1947 bp, Heterodera glycines
aatcaaaacggatgaaatcgcagcgtatttggtaaaagattatagtgtattacccgctaattgacttaacttttatgcaaaaacgtgttaatcacaaatgaaagtccatttaaagcaaagtgcgttaaattatacttttggatttaattaaagagcattcaaatcaaaagaaaattttatcatgtattttattatataaacggttcagtctgttgcctctcttacaattagcttagttcagtgggttaattgctgttacgcttgcaaattggcgttggttctttccccgctggtgagaatgaccgcgatgaagactttcattgctttatgacttttgtgtatgattatccaaaattcttacctacattatctgagcggtttttctttttttgtttttattatgataattatagatttggtgacagctcatcataaaggcaatgtaatgaaagatttggtgagtggttgtcgggcggaaagccattttggatattagacaaaagtcgaattcgctaaccgaactaaaattaaaagattaggtgaccatcgaagaagacaaagacaattttatgccaaagaaagatcttaaaaagtttgacaatcggaggatgaatttaaatgcgaaaatgctaaaccaattgatccaagaattggagagggatttggctgaacaaatggcgacgaatggcggagaaatgccaagaatccgtgagataatttgcgaagtttgtgccaaaaaacaaaaacaattcattatcggtggcatttgcccttttccctttagcgctgttgtacatttgcggatgggccgagattgctaaaggcgtcgctcactttttggcaattgatttactccaattattttcattttgtccctttgtttggtaagacaataagcaatgctgaaattatttttatttgcttcagcgtaccaatgccaacaaaaagaaaagggcggcgtaagagaaattaccacacattatttccgcgacacgcccggtcagtacttcgtccttccccgaccgatttctcatccccgtccatcattcgttcagacgcggccatccttccctccgaactccaacatctggatgccattaaacgcttttcctttcaaaagtccacttggacacggcacagaaatcaaccgatggatgaggaggacgattttgcccttttgacaactcaaagtcaaccatttgaccacaattttatgggaatcggtcaaattgtgggcataagacactaaaaacacggagcgtttcttattgttgattgattgtttacccataaatgcatattaccataattgcaatgctttctgataccttccaataattaaaatcgcaaattgacccactccctcctttcatgttggccgacgtccctccctttcatctccatggcaacttgttcgaactttcgcttagccgtctgaaatgggagattaattacagggaaagcactaactgttagcagggtcttaaaagggattaagtaccaaatattgtgggttggccggagggagaggggggggggaaggaatgtttcactttcgcaatggatggatggcatcccaattagtcacttttctgcgctttttgcgttgtcaggagttcttcctgcatttatttgtccattttcactttcctttcgcttccctccaattgttttgttttcctttatttatcctcctaattcgattgtgaattatgcgcatcgacgacatatgggaaagagccaaagcaaattgagcagcgagaaaatccgaattctcgccaagcaaagcaattgtaaggagaaaacgaaagggcaaatggaaattcagcaaattaattcctttggaggaattggcaaattattcgtttcggaatcgttccttttttctgccattttcattttcctcgaccttcgcaatgcatttttcttttattcgtttagttaccg

SEQ ID NO: 19458 - DNA, 976 bp, Heterodera glycines
aagttcaaattttttgtgctaaaatttcaaggaaaaaaaattctgataattttctagcgggttttttttgaaatttttttgaaaaacgcactgtgccgtccgacgcctcgctcatgcagtgccacaggtcgtcagtgtccgcattggcgtattggtgcctcttcagataggcgcgcagtgccttttggaagatgggctcgcccaagtagttgaacaacatggcgtcccatggcattttacgcgccccgtggcattttagcgtccaatgacattttacgcttcccattttcgtccctatttatgcgtccgaacaataatttagtgacccatggcattttacgcgtccaatgacattttactcttcccatcacattttttcgtctctatttatgcgtccgaacaacaatttagcggggcggagtcgttatttaaaaaacatcaatatgatttgatgaaaaattatttataactagctcaaaagcaaccaagtttttcattcttgatatcattcgttaagtgttctctaccagactacctacaaaattaaaaaaatttcgttaagtttcaaaagccatttataatagtaaaaaaattcattcactgtcataattccaattgtccgcttctctccaaatgttcggtcactcataggtttctttatgcattaacattaatcattgaaaatttttcaattgggtacctcaaaacttgttaattttagatattttttctttgaatacggtagaatattatttttgagatgtccaattttgacaccctctcttgcttcatggacccacatttaaagggcaactcgatagaaaattttgtgctctttccaattggcctgtataatttttacagaaaacatttccagtcccctaaaaattttttgtgccaacttagttttttgataaacattttgtttctatattattgcatcaccaaaaatgggagttgttgttctttgtatcgt

SEQ ID NO: 19459 - DNA, 1036 bp, Heterodera glycines
agcatctcttcaaagagaacgagaaactgcccgtaatatgactcggtacccgtcaacatattttgacaaagaccagtcatatatcggggtgtttggcaaactacaacctggtccaataactatcttggttggtttgaaataaacattgactaaatatgttattaatgggatatcattcatatcaaatttccaagggggggattcgataacggataacgaagtcaccttcccgactattctcccaaggaaaaaatcaaatatttttccatttaaatttggtacctaagcagcatcaattcattgatgttttagacactcatggaaattaactccgaggcacttgtgctgcaaaaccccagagccgggggcttcattcggcgacacgacgggatgacaattgctggcagacgatgcaccgaaggtccgcaagtgtggactgaacttcgcgagttcatctggcgactcaacgatgagctcgaggcgccgggttctgatgctgttgttgttgctgcgaaataccatattaggatggcaagtttcatttattccaataataaaaaaaggaaaagcctatttctgcgattattttatatcactgtctctcgctatcccaatgttcttcgctttctttctttctttctcaccttcaacgtctctcttataccttttcttcgtctctctctttttctctttcttttctctctctcctctctatctttttctttggtgttctttctcattttctttgaaagcatttgctatttctctatctacatatattttcctccatctatcactaggggtataaataatatgcacaaaaaatgccaaatatgcgcataaaatatgcactaaaaatcactcaaacatgtcctcaaaacccttaaaatgcccaaatttgcactaaaaatcgtcaaaatgttttttaaccatccaaaaggccaaaaattgtgtaaaaatttttaattgtctattattcttccaaacccttgaatttccttggttttagaaataatttaaaaaaaaggaattatgg

SEQ ID NO: 19460 - DNA, 1176 bp, Heterodera glycines
cagggaaccccaacattttcttggaattttccagttcgggtttgtccgggaaaaatttgaaaaatttttccaaaatccccttttttttttttttatccttgtggaatgagtcggcccttgaaattatatagcagtgaacccaatactttcttggaattttccagtacgggtttgtccgtgaaaatttgaaaaatatttccaaaatccctatttcttttttctatccttgtggactgagtcggcccttgaaattatatagcagggaacccaatacttccttggaattttccagtacgggtttgtccgtgaaaatttgaaaaatatttccaaaaatccctatttcttttttctatccttgtggactgagtcggcccttgaaattatatagcagtgaacccaatacttccttggaattttccagtacgggtttgtccgtgaaaatttgaaaaatatttccaaaatccctatttcttttttctatccttgtggactgagtcggcccttgaaattatatatcagggaacccaatacttccttggaattttccagtacgggtttgtccgtgaaaatttgaaaaatatttccaaaatccctatttcttttttctatccttgtggactgagtcggcccttgaaattatatatcagggaacccaatacttccttggaattttccagtacgggtttgtccgtgaaaatttgaaaaatatttccaaaaatcccattttcttttttctatccttgtggactgagtcggcccttgaaattatatatcagggaacccaatacttccttggaattttccagtacgggtttgtccgtgaaaatttgaaaaatatttccaaaaatccctatttcttttttctatccttgtggactgagtcggcccttgaaattatatatcagggaacccaatacttccttggaattttccagtacgggtttgtccgtgaaaatttgaaaaatatttccaaaatccctatttcttttttctatccttgtggactgagtcggcccttgaaattatatatcagggaacccaatacttccttggaattttccagtacgggtttgtccgtgaaaatttgaaaaatatttccaaaaatccctatttcttttttctatccttgtggactgagtcggcccttgaattatatatcagggaaacccacacttt

SEQ ID NO: 19461 - DNA, 952 bp, Heterodera glycines
  unsure (1)..(952): unsure at all n locations
tcatgctttgaaaaaacaatagtggtttgttctgtgactttcgtgtgagacactaatgtgtgtcatgcttttgaaaaaacattagtggtttgtttgtgactttagtgtgagacactaatgtgtgtcatgcttttgaaaaaacattagtggtttgtttgtgactttagtgtgagacactaatgtgtgtcatgcttttgaaaaaacattagaggtttgttctgtgactttcgtgtgagacactaatgtgtgtcatgcttttgaaaaaaacattagtggtttgtttgtgactttagtgtgagacactaatgtgtgtcatgcttttgaaaaaacattagtggtttgtttgtgactttagtgtgagacactaatgtgtgtcatgcttttgaaaaaacattagtggtttgttctgtgactttcgtgtgagacactaatgtgtgtcatgcttttgaaaaaacattagtggtttgtttgtgactttagtgtgagacactaatgtgtgtcatgcttttgaaaaaacattagtggtttgtttgtgactttagtgtgagacactaatgtgtgtcatgcttttgaaaaaacattagtggtttgttctgtgactttagtgtgagacactaatgtgtgtcatgcttttgaaaaaacattagtggtttgtttgtgactttagtgtgagacactaatgtgtgtcatgcttttgaaaaaacattagtggtttgttctgtgactttcgtgtgagacactaatgtgtgtcatgcttttgaaaaaaacattagtggtttgttctgtgactttagtgtgagacactaatgtgtgtcatgcttttgaaaaaacattagtggtttgtttgtgactttagtgtgagacactaatgtgtgtcatgcttttgaaaaaacattagtggtttgttctatgactttcgtgtgagacactaantgtgtgtcatgctttgaaa

SEQ ID NO: 19462 - DNA, 1024 bp, Heterodera glycines
  unsure (1)..(1024): unsure at all n locations
atgtgtgtcatgctttgaaaaaaacattagtggtttgtttgtgactntagtgtgagacactaatgtgtgtcatgctttgaaaaaacattagtggtttgttctgtgactgtcgtgtgagacactaatgtgtgtcatgcttttgaaaaaacattagtggtttgtttgtgactttagtgtgagacactaatgtgtgtcatgcttttgaaaaaacattagtggtttgtttgtgactttagtgtgagacctaatgtgtgtcatgcttttgaaaaaacattagtggtttgtttgtgactttagtgtgagacactaatgtgtgtcatgcttttgaaaaaacattagtggtttgttctgtgactttcgtgtgagacactaatgtgtgtcatgcttttgaaaaaacattagtggtttgtttgtgactttagtgtgagacactaatgtgtgtcatgcttttgaaaaaacattagtggtttgtttgtgactttagtgtgagacactaatgtgtgtcatgcttttgaaaaaacattagtggtttgttctgtgactttatgagacactaatgtgtgtcatgcttttgaaaaaacattagtggtttgttctgtgactttcgtgtgagacactaatgtgtgtcatgtttttgaaaaaacattagtggtttgtttgtgactttagtgtgagacactaatgtgtgtcatgcttttgaaaaaacattagtggtttgtttgtgactttagtgtgagacactaatgtgtgtcatgcttttgaaaaaacattagtggtttgttctgtgactttcgtgtgagacactaatgtgtgtcatgcttttgaaaaaacattagtggtttgtttgtgactttagtgtgagacactaatgtgtgtcatgcttttgaaaaaacattagtggtttgttctgtgactttcgtgtgagacactaatgtgtgtcatgcttttgaaaaaaacattagtggtttgttctgtgactttagtgtgagacactaatgtgtgccatgtttttgaaaaaacatta

SEQ ID NO: 19463 - DNA, 2336 bp, Heterodera glycines
attgctttatggcacacaaaaagttgcaattgctttctaccgatcactttcttccctgagagatgaacgcattttcaacgctcggcttatgatcgaacgatcaacagcaattgtaagattttatgttgcaaaaaaaattgtaattatgtaaaacgactgtaaaagttaaatttaacagttttaaagttacaagatttaaaaattatcaacttatattcgtttaaaattgtttattttgtaaaaataacaccaaaaaatccaaatttaactaatttttgtattaaaaaatcaaaagcaattttctaatgaaaaaaagataatttaaaatcatatttaattcatttgtagaaaataccaactgtggcaaatgcacttgcaagtcaaaagaagattcagcaggtgattttatgaattttgatataaataacacattaaaatataaattatttataattattaaataagataattatatgcttttgcaaattgcttcatttctccgcagattctcgcaaagcccgggatggtggaacgctttttcccgcacccaaatgaagcggacaaagtggcggcaattcgcaaaacattcaccggattgtatcgcgtccagacatttgcggacggacatttgcggacggacatttgcggacggacttttgcggacggacttttgcggacggacttttgcggacggacatttgcggaaggtttctgaattaaaaaaaattatttttttagaaaaaaaatttggaagagtgggcctcgtcagtatggtctcttccggttaaaaagcaactaattacgtgtgtttcggcccaaccgtagacacaataacttaaaaagcgcacaccaacaaacaaaaaaagcaaagcaaataaattttttgattaattaatattttaaatttattaatggcttgccaaaggcccaactggcaatttaaacataatcagagacactcaagtaggtcaagttttttgtcattttgaatggcatataaaaacaatgttgtcagtccatgcttgtcagattttgctctttttatttgtccatcggtcccttaatagctattctatatttatatttcctatacaattaattaataccgaaaaaacatatttccttaagtgactcacggtccatataagaagcgatttttttgaacaaattttcaacgcgaaattcgtcttggcttacaaaaaattctgtatccattacagagaatttgagtgggaaaacgtggcagttatagatgattcataaggcgaaatgtatttctttttaataaaaaataaaaccttcgtttaaaacgtcaaataaatcgtccactattaaaccgactaatgccccagctccgccaattaagtgctcagatttttttaatagccgaacttcacggaagagtcttcccaaatttaaatttggccgtgggatatgaactctagcaatgatttcaacagaaagaaaaataattaaaattagtatggttattagcttcatcttaaagactacatattgtataggcttaaataaacgaactttaaaatgaaaatgaaaaaagatatgattctaataatagtttaagtaaaaatatgtttttatcaaaaattgtttttgcttttatatactctaaacgcggttccgccgaaagataattcgctgatcagctgtcagataaaggaaatgcggttccgccgaaagataattcgctgatcagctgtcagataaaggaaatgcggttccgccgaaagataattcgctgatcagctgtcagataaaggaaatgcggttccgccgaaagataattcgctgatcagctgtcagataaaggaaatgcggttccgccgaaagataattcgctgatcagctgtcagataaaggaaatgcggttccgccgaaagataattcgctgatcagctgtcagataattaatgataagcacaaaaattactataaaaaccaaagataaaagctaattattcaactccctagttcttcttactctcaatcgtcacatttgcacaatgtattcaatttaacggctaaaatattttatctttttttaagataatgccattttttattttttccatttttcttttgtttaacggagggctagcaattaacacatctaaaaatcgcgctttaatatattttggagggtacgaatatcgtcaaaaggggacgagtgtcgatgggcaaacccaattttggcaatgtacacaaaagaattgtccaggaagagcacatggtcctatcggcactttggatattacacgtattgtgtctgaacataaccatccccaagtttcttctcagaatactgtaagagaaat

SEQ ID NO: 19464 - DNA, 2354 bp, Heterodera glycines
  unsure (1)..(2354): unsure at all n locations
tgatttataaaaaatgatcataaacaaatgttaaatgataatatatgtaattcttctaaattaaaacataaaattttcggtttttattattatttaaaatatcctttntaatgaataaaaaaataaaagcaagaaatcatgaaacacatcaacaaatttaaattaagcactaaactaactctattttatttgtttgtttgcatattttttggtattttacttgaatgtgtgtttgaatttgaatttatatttaataaataaatattttttaataaagaataaattcttatgcataaagaaacgaatataaaagaatgtcttacgcaagaagcgaacaattaatatagaattgttttaaaaaagaaatgcatttaaagcgatttaatatcatatgtagattggtctagaacgattaacgattgaaataagcaataaaactgattaattcatattatttagaacaacaaaaatttgaactttgaaaggagagaaatataaatttaatctcgtgatttatgtattattttgggagaacataatttagaggatatgcattaataatccatcttttaaaataaaatgggaatgaacagttcaaataataaaaatatatttgaattaatcaaagacaaattcaattcttttaatgttaattagtctataattaataccttttaacggaattaaaattgagataaatcgctcgagcatatataattaaattctgtatattaaagaaaaaatgtgagacaccgaggggtctaaatttaaaaagagctaaagaagatatattaattatattgaaaaatattaaaaatgtttcaaaattacaaaaaaccttatttcattcatcaaaaaaataaaaagattaataaccgaacaattcattaagaataaaataattgaagagtaagatatattcttgcaaattacttaaaataataaatttttggaatattataacttgaatgatagcttgtcggcatgctaaaattataaaatgataataaatcaatcagactgaatcttgcatgaataaataaattttattaaaaaattcttaataaataaatacagaggagccacaaatatttattcgttagaatagaaaaaaatcaaaaacgctcaaaagaaaaatgttttactgtagtacgaaaatagttttaatttttctatatcagttaaatttttgaataaacaattaatataacaaataattaaatagtgcattctaatgaaaaaaattttattttactatactatattaattttaatttagggatatcttaatttcaagaattaaatagttaaattagaaaatcggaatggtgaggaaaaaaggatacacgacgaactatatggggaaaatagttaaaattttgaagtttatatttgttggataagggaccacaccgattattgattatattttccctttcactccctctcttattgtctctcgtcccgccccttgaccagccccataaatatgtctccctttccctcactccgggcattctcccattcattccaccatttcattattttatttatttattccctgctgtcctccatatttatttgtttaataaataatttatttatttattggacaacatttgctttggttaaaaaccaaacatttttattgttgtagtaaatacacaataatttggcgcagtcagcaaaggacctgctctacatctttgggtgagaaaaggcatcaaattttgttttcaggacacaaagccgagacggcaaaacaaattcaccgaaaagccgggactggctgtgaattgttttaaagcctatttggcaaattcttcaaaaagcagtcaaagaaactgctagacaccaaaagccgggtcggcgctccgaattcgtctaaagccgggtcggctcatcaaaattcgtcaaaagccgggtcggctcagcaaaaattcgacaaaagccgggttggctcgtcaatttcgtcaaaaaaaaagcaggcaaaagaactacttatccgggtcggctcgacaaaattcaacaaaagccgggtcggctcgacaagttcttcaaaagccgggttggctaatcaccaaatttgatggaccccaatcagcttaaactgattttggaggctgttttgaaagcatcagcggaacaaaacaacagttctgctgcattagcgacatcaatcgatgctcgcctttcaacatttgagtatgaccctgagttagggcatacattcgacgtttggctcaagcgctacggccagatcatcgcccaggacggacacgcactcagcgaccagtccaagtgcatctattgattggcaactgggcgaagcggagtacaagcggtacatcgac

SEQ ID NO: 19465 - DNA, 1655 bp, Heterodera glycines
  unsure (1)..(1655): unsure at all n locations
cgtcattagtcgtaaagaataaaaaaaaactatttaactttttagattcgttgtgttgtgttaaaattcaatatgattgcgtaatcaattttattacaataaagaaattaaattaaaaatgccttttggcatgattatcgccggaccatcagggagtgggaaaagcacatttttaataaaatttattgctgaatcttcggagttaattagccctagacctgcttcactgctttatgcatttggtgaaatgtcaagtattgttccaacactccaaaaatgcggtgtgaatgtgtacccgggagtgccccctgaggatttgattaaccgtctaccaaaaccattattgtttattcttgatgatcttttgctttctatcgatgaatcatatcttagtgctctattcaccaaaaagtctcactcaccatcagaattttgcagttgtttttgtcacccaaaatttgtttgaacgaagaattaaagttgcgagacaaaatgcccaatatttggtgttaatgcgagctccaaattccgcattggcgattcggaacattggagttcaacttttcccagggaaattggattatttcctttcggcctaccgtattgcgaccaataaaccgtatggttatctcctcgttgatatgcacgctgcttctaaccccctgttgcgactaaggagtgggatatttaaggacgatgaagaagaaggaaaaaagatcattttcattcccaaaaatggccttttgtaaaattggagaaatagtacataaaaattttgattttattcgtttacttgccaaaaccaaatcgatgaaaaaaaggagagaaattttanaacgtgcaaatgccgatcaattgttaacattaattngaatagctttanacattctttgttcacattttaaattaacaactcgtcaaagaaaacgtttgttaccttacgctaattttgttcgaagtcttgctcgtcgaaggaccgaaagagggggcacggaaggtcctggttcaaactggaagggggctcggaggagtttttgcagctctgctcactcctattcttattgatttggcacgcactgctataaattcaagctcaaagagcgacaattgatcattttatcatggcttcaaaatttattctcgtacccgaagaaatttagcatggcttaacaagcagtgattcgggaaacataaacttggatttttctaagcatgcgctggaaagaacaaaaagaaagagggagaatgtgagcgcaaaaaatattaattataaccaagaattgtctcgttatctccacctgagagatgaccaccaaaatcaaccagcaaaatagaaattaccaaagggatgaaggcactaatcaaaaaaggggatgaaagtgatgaagacgaacaaatttttgatttgggatcagaaagatcacatcctcccgtttcagaaaatcgcagacagcgtcggcctcatcaccattaccatgacgatgaggaaatgccattagtaccagcaccagcttctccacccccaccaagctgtaaataggggtcaaaaaaggaaagcaaattgagtattattcctcatgggaagagggagctaagcgacaactcatgcaaaaaaacgagccgacttttttcctctaaaatagctaaaaaacaaa

SEQ ID NO: 19466 - DNA, 2856 bp, Heterodera glycines
  unsure (1)..(2856): unsure at all n locations
tcagagcttattgtccctagacctgcttccattctttacgcattnggagagatgtccagcattgtgcccgcgctccagaaaatgtggtattaatgtgtatgcggtagttcccttngaggaactgataaaacgtttaccaaaacctttgcttctcatccttgatgaccttttgctatcgattgatgaggcctatntaagtgcattattcaccaaaaaatcgcaccaccagaactttgccgttatttttgtgacacaaaatttatttgaaaaacggattaaagtagcaagacaaaacgctcaatatttggtactgatgcgagcccccaactcagcacttgccgttcgaaacattggtgttcaactttttcccggaaaattggattattttctttcggctaccgtattgcaacaaacaagccctatggataccttctgatcgatatgcatgctgcctctaacccattgctgagacttcgaagcgggatatttaaggaagacgaagaagagggacaaaagatcattttcattccgaaaaatggggtcttgtgaaattggaaatattgttcataaaaatattaattttattcgctcattggcaaaaaccaaatcgtgtaagaacagaaaacgaattttaaaacgcgccaccgccgatcagttgctcacgcttgaagaaatttgcttgaacatcctttgatcgcgtttcaaaatgacaacacgccaaagaaagcgtttgtcgttaaaggcgttgattaaaaggggagatgaaagtgatgaagaacaagtttttaaaaagaacccggctagtgaagcactctccgaagatcagcggcgtcagtttgcggaggatcaacgccttttcaccattccaaattcgcaactaaccaatgagcaaaagagaagacggcttcagttcgtatttaatcgtaactccgcaaagtacggtgttcacggggacaccgttttaaataacgcgggaaaccctataaccgacagtagtgtcgcccaagctctcgactatattatagaacgcagagcgggacgaattccacagtttagacagcccccaggaacaaaagttattcgagatcgcattaaccgtgacctaattttgcgaacatggacggctccaccagtaccaccaagggcacccaaacggagattaccacaagcagagcaaactccggaattaaatcaaaaatcccaaaagctcagaggaatgaggcaggcgagaggcagggaacaagaaggattgacacttccgtttccaacgaggggagtcaagcggaagtcgacggctctgtcagcagtagaaacggaaattccaaccaaaagccaacgtctccgaccaaagaaatggacaaatcaatagaaaagatgttagaacggttctacaatgacccaaaatcccctgctgcgtttgccggtgtcgaccgattgtggttggaagccaaaaaggaacttggaaataaaattcgtaaaaatgatgtaaaacattatctggaggggcatcgcacctacacattgatgaggccaagacgcataaattttccgcgcgctagaacaacggctgccggttttatgaccgactgtcaagtcgatttggctgactttcaaaccctttctcgacacaacaggggaaatcggtatttaatggtagtaattgatgttctttcgaagcggatttttgtgacacctcttcgtaccaagaaggctgatgacatggtagacggctttaaagaagtgttttcaacgatgccaatgaaaccacacagaattttctccgacaagggtacagaattcagaaatcagaagctgaaaaaactttttgatgaagaggaagttgagaaatatgagagcacacattctgagaagaaagcagcattagccgagcgcgcaatacgacaaatcaaaaatcgtgtgtatcgctactttgcccaaacaaaaactctcaattgggtggacgtaattgatcaaattgttaatggtattaataaatcaccgagccgggtgcatggaatgcgacctattgacgtgaactttaaaaattcacaacaaatatgggaaaaaatgtttggagatgatcagcatatggccctttttggaaagcccagaaaacgagccagatttgtccctggtcagacggtaagaatgagcatagcaaaaggtcaattcgagaaaggttatatacccaattacggcgacgaaattctcgaagttgatgccgtcaaacgccacatgaaaccaatgagatataagctacgtgattcaaagggggagaaatttaaaggatttttctacccggaagaattggcacccgtacgtaaggatgccgagacgacttacagaattgagagagtttttcggaaacggaaaatgcctgacgggacgacagaagtactcgtaaaatttattggataccctgaaagggaatggattcatgagacccaacttgtataaatacttgtaaactttgcattgtatcattattattttttttgtataaatgtctaatacattctttgtgcacttacccagtaatagcccagactacactgagaatacaccaaataagtttagagttcgtttaccaaaacctatttatttcaacggatcttgggtatgcggattacacagcattaattatgcctattcttggccatcaacgattggaaccttagatgatcagtggatcaacatacattttacggatggtttagataatgaaaggcttaggattgttcgagtacccgtcccgaaagcttcaaacacaacaattgaaaatttaagaaattttcttatttcaacactaaagaaccatgctgagtctctcgaaaaaattataaaagatggttcaca

SEQ ID NO: 19467 - DNA, 3738 bp, Heterodera glycines
gaaaagaagaaaaaggaaaaggaggaagaagagagaggcaagggaaaggaagaaaaagggaagagttagagagggagataaggaaaggagaaaaggggaagagttatagaggaatgagagagagagagggagataaggaaaggaggaaaggggaagagagaggcaagggaaaggaggaaaaagagaagagagagagatacaaggaaaggaggaaaggggaagagttagagaggaatgagagagagagagagaaggaaaggaggaaaggggaagagttagagaggaatgagagagagagagagaaggaaaggaggaaaggggaagagttagagaggaatgagagagagagagagagagatacaaggaaaggaggaaaggggaagagttagagaggaatgagagagagagagagaaggaaaggagcagaaggtgaatacagcgacaatcagcagaagcccacgccttttagctattttgttattgctttggctatcaatttgttctatgccttttcttgctttatttttgcaatgattcggcttttccgttaactgcgattgcgcattcaaaaaccaaaaaactatcaattatcaaaaaagcgagcgacccacagcaattttctcgtgaataaaaacgagacgaaaagcataattaggtacttttttaaaaaacaaaaacgaaacacaattattagaattaattttattatgaaagaaataaaaaatgaaaattttcaagttaaaatttcaacaattataaaagtcataattaatatagggactggatttatatgaacaaaaacgatgaaatatgtgtaaaatgaccaaatatggacaaatttttaaaagcatcattgtggaagccatttttttgcatattaatgtaaaattgttgctctgagagtattcggtggcaccaaatgatgccactggaaaaaattatgaaaaagaaatgatttgttaatgatagattttgcaaatgatttcaattttggagcattgttttgataattctttcttataaagataacggtaccataacaatattcaccaaaccttcagttttcggtgaaactaatgacggaaaatttttgcatttcggagctgtttaatctgatgaatttgggtggaaatgcgtgcaaaggcaatggatgtgctttgctgaagtgactgacaatgaaaaggaaatggggagtgatcaatcacactgatcagagttcatagattcaccgacggactaacgccgaagggatcgtttcgatgccattcatttgcttaccttagccgcattctctgtttttttacttccctcggagaaaatttaaaaattttcatctgtaatagagaaatatcaatcaagtttttgttttttgttttgtgattgattgttttgtttttgaaaaaatttccatgaagggtccaatcgcattttatgagcccaataaaaggcaattcgcaatactttcctttgcctggcttttatttaaagccgagttagtataaaataaatataattgtgggaatttcggaagattacattagtttcataatctgatcagaggccttcttttagcgtgccgttcgtctctttcgtgaagactttcacgttgcttccgtcttcaatatgatcagcggttgtctgattccaccggcaccaaaaagttcaaattcggtggatgaaaacaaggacaacgacggacagaacaacgcttttctatccaaatgttgttgatcgtgctgagacaaaagtacgaaagtgcaagtgatcgaagtaaaagcaaaataattatttaaaaattatttaatttaaatacataaaaataaaatctcaccgattttttgatatggttacatattataaagttttacttatgtagcgattaaaaaatatttaaatgaattctttaaatgaatgaaagatttttttatattttttttgtcatattaatttaccttttctgtttataatttttaattgtgtagccaatataatatatattagcaaattaaactttaaataatatattattaataaatttaaattaaataattactttgcttttcctttgatcacttgtacttttccgtacttcttcataccacccaccgttgttgatgatgagaagagacaaatgaaaatgggaaaatggaggggtgtggtcaattctgattgtgaaagttaaatactttcttagaaattaatcagaaccgttacaattcaacaaaatttaaaagaattatttctccaactaattaattaaattaaaattgttttctaattgttagagatcgacctgtacctggatccaggcctgaatttttcctggatccaggtacaggtacaggcaaatttttggcaacctgtatttttcctgtacttttgtacaggtacaggccatttttggaatttagtacaggtacaggctaaatacgaaaaaacctggattttcctgtacaaaattttagaatttattatttcaagtgatcgatgtttttttcaatttttcaaaaatgatcaaatatatttaaagagacataattatagtaaattagatattttaagatgttcctaagcaattaattgattttttcaaacctttgtttgatttttaaaagaagttccaaaaaatacaggtacaggccaattgggaaatacaggtacaggctttttccaaaataccgagctctattgaaagccaaaagagtcccctttatggtttttcggggggcctaaaccgcaaaagtccaaatatgaatacaagccaccaaaggatttcaaattttcatttcaaagaaaatcctgaaaatttgaaaaaaaatcgtgctacgccttggtttggaattttaaaattcaaattccgcatccaaatagaaatgtgaggcgtcttttctcattcacaattaatacttccgtgaatatgctcgcatttctaatacatttcttaaagcagcagttccatctattctttccgcctcgcgtctctgctgcgccctttgctccaacgattcaaccaatctcctcgagtttctagacgaacgacaggccacgcaagcaatgaaaatcataaacggaactccaaaaatgacggtgatggcagttatagcaatggctgcataaatcattgcatcgaacacgggccgccaaaagggatcagtgggcagaaaaaagggcggcttagtgacagcaaaagaattgttggaagaaatctgttgaaaaataaataaaccccaaaaaaccgccccaaaaaaccaaacgaacagtgtctgttgttgtgctggtttgagtttggtaaataattttacaaaaaattaaaaatagtttgaaaagtactgataaaataaagtttagagttttctttttccagattgcgagagcaaaggacatgagaactataaaaatgtttgctttttccatttgcctctcattatttaaaaatatttctaacataattattattgtgcccttttgacgtccttcgcaattctaatacggcaaattgtgctaattgccacaaaatgaaccgacggtaatgagttttaaaaattacaaacttcatttaactactgttttcccgcattttcagttggctgtgcagcgacatttggatgaacattctgccgttttttggtcgtcaccaactcggcctcaaattggcactgatttcgccacgtttcgacattttagtggacaaacatttagatggccaatcacaatggacactttggcgaccaatcaaaa

SEQ ID NO: 19468 - DNA, 1676 bp, Heterodera glycines
ctttttcatatgatgttagaaaagataaataatcccataaattctcctgatttttctctatttttaaagctttatttgctcaaaattggtcaacccttaggctagatatgaatttttcaatattcgcccaaaatcccgagggccaaaaaattgccaaaaaataaagaatttttaaaaaattccaaaaattatgaaacttaaaatagacatcatattcgtactcagcaccttattttaccccagaaaaatatttttcacccccattttcgtcagaaaaaaaatttccgaaaatttctagggggcctagctcgaaaatttttgaaattttccggccatataatacactattcgatagcattttaaaagctctacaattttgctctaaggcaatttttcgctaaaaccaacccctgacgagttatgggcccgggactcaaatgtcccgcttaggccaaaaattttttctatttccggaaaaaaatcgaaattttttcaaaaaaaataccattcgatagagctcgaaaaactatgttttggaagtggtcttcgttttcccgggaaaattcgttaaaaattcttaaaattcaaaaacccaaaaaccgttttttaggcctagctcgaaaaattttgaaaattttcgaagttttaaaacttggttggatagcctttcaaatactacacattccccccccccgaagaaaaaaattttaagaaaaaagggacaaatttaaaaaaaaattgcataagtttttggtttatttcttaactttgaccaatgtatactttcagtttggcttacatttgcaaaggtgtcctgcgtcgtgttctgctcgatgtcgtcgagttttgtcccattcgggtgtttttcccgttgtattttatgtcaaatttctctcttaatttagcctttccttcactctgatgatatcgtcacaatgacttctttggaacaaaatggacacgtccttttgctcagtgggggcaccgatcggcgcttagctctctcactttttaagccattggccactgaaagcattaacggacgtaatcactgacaatgagtgtcttttttcttttctttaccccccccccattttagcaaattgttttgcttcttcgttcttttgtctcgattcgtcgattgtccaccgttcaaatttggaatgcgtttatgtcgttgacgattggccttggcacaatgaaacaaccgattccggcaaaagggacagattaattttgagtgtgggcgggcgttctgagatttgtgcatggaaattgcaagtcgacaatggaaattctgacaatgaaccaggaaggagtaagaagggcggtgaaatgtgccatgaatgatgggctgttaagaatgccttcctcagctgcactttctctcgtccactgacatttccgcccactcttcgggtgcttctcctccccaggactgtcgtctgttggccgttcgtcaccttttgtacggcccttttttggcgcttctttgttctgatggttctctgcggttggttttactgctgtcccatttctgactcgattatatgctttttattatttgcttcagaattgctaaaatgctctgttcttttcgtcatcgttttcccactttttccctcatttcttccaaatggaccattcgcattcccttcgcttgccatgttcactgc

SEQ ID NO: 19469 - DNA, 1017 bp, Heterodera glycines
cattccttcgcttgccatgttcactgcttgggagctgctcaaacatagcaaaagcgtgctttgcacagccacggatggtcatttatatgcatttgcaatttccgagtcaatgcttcaaaaacattttggcgattgcgaaaccatggaatccgttgacaatgacaacagccaatcgtcgcatttgaactcttttttaaaattgcatttttctccttttctcgttgaaaagtgtggcctttcctcacttgccacagccacagtatatgaggtattttgcctttgttcacatattttcaaaattgaagtcactgttccacataggacaacagcatcattctgattggctctgaaactggaagcattagcattttggaatggaaattgggtcggaaaacgccacaagaagaggcgccgggggttgtgctgttaacacgcggagattggcatgcttccaccataacaggtggaatgagcttcttcccttttactgtgttttctttaagctctccgagcagtcccttcccctccctcgtcgtttttcattctcagcgtttctctcgactgtcggcttggactcggtctctacgacactctccgtcacgaggttctctcattcagcaacagtacattccgtccgttaatccatcgtcccccttttcacagattcggcctctccgtctcttccctttgtgcgtgtcggaccctgcttctctccttgtccttcctttcactggtggtcattcgccgtcggattcctctttccttccccatacgtttacatctcaacaaatcgattgttttgtctcaggttacggtattgaacatttacaactgattgtttacagtactgatccaaataagtaacagtttctttcattcatttttgtttctattttgcttttgttataacctaatgaattttttgttggatatgagtaatcttttcaattaaagatatatatctacctctttaatttacgaatatttatctttttaaattaatttatttagcagttt

SEQ ID NO: 19470 - DNA, 3582 bp, Heterodera glycines
  unsure (1)..(3582): unsure at all n locations
aaaagagagtcgaaagtgatagacttagacgatttccaagtgcttttatacaggaaaaaaagcatttctgtagattagaggttgacaaaaaaaaatattagggtggaaaaataagtttttcgttgctaatttaatggggaaacaactttagattagaaaaagaattntaaaaaaaacaaaaatgaccaaagcaattagcatattaatgatcagcattcttaaaaatgtgtttaattaactaatttcaaaaaaaaaattttgcaaatcaagagtcccgacttaaattatcaaaagtaatcactaatcgaatattttgtcgactcaaaatctacaataagtgccggaaaaaatttgggcagataaaaaacatgatgcaattaagttccaatgagtggaaagagagtgccaatgttagttacctatgctaatgacttttgagtctaatttcataaaataacaattattgtgaaaactcacatttaaacccaagcgatggcaacagctcttccaaatttggagttgactcaattttgaattttggcaaaaagacctgaagaattaaaaaatgagcaaaaaagagcggaaatttgccatttaatcaatcacctcaactctaatcactggtgattttttaatcattctgatcagtttggccttcgtcagttcccccaacacttttgtgagtccgtcgtttgaatttggcaaaacgatgaaaaggtatgcgcgcattccctcccacaagtcccagtccgatcaaccgcgatcagttgttcgccttcgccttgttgtcaaccgtctcaatgccatcccgggggtccacccaatccaacagcgaggcgaaaaggacattcactgctgttacccatgcccagatcagcccgaaccagaaaccggcattcaactgactggaagaataaacggggaaattttaaatgattttttactccgattttcgaattttgatcaatgataaaagaggttgaaatttatttcacaagcattaaaatttgaattttcgcctcactttcgcaatttgtggtcaatgctgtcctccggctcttccatcgaattgccataaacgagttctgtccgctgcgcaatgtccgcccaattgtacatttcggccacctgtcgatgcttcttcaacgggcagggcaattcgccattctcgcgccgacggatggcatccaaaagaccaattgcaattgctgtataaagtatttggattataaatgagtcaaataatgatcgaacaaccaaaaattattgttaaattcaatgggaatcaacctaatttaaagttttaaatttggctacggtaatggccccaatctactattgattttggtactgtaatttcataaaataattggacaatgcctttcggatttgggtcgaccaaagagatgaattccggcggcaaaacttcgggaattcctccaacgcgagtagacaccacatgaagacttaacacaaaaaatgaataaaaattgaattcaagaacgaaatgcaccaaaagtttgatcagaggcccaaaaaatttttaatcatcaaaatttaattatttttttagcaattttttctgatgaccgaagggcccagcgacgcttaggaatttttttataagattctaaatgttgtaaaattctccatttttcaatgttctgaagcaataaaattccggaatcagggagaaatgatcaggtttgatctatgggttggaacagtacccgcaactcgccgcttcaacaatggccatgcaaaatgcctcggtgagcgatgtgttgagaaagatttggccttggacaagcgcatcacggacctaaaaagaaggcagcaacaaattaattccaaaaaacaatgatttgaataagtacaccaccgtacacctaccgtatcatggggaattgtgcccaacgttttgacgcgttcgtgcaaccgacaccgttctcgcatttcctcaatgtccactcgttttggaccatcgccaccgatcagaaattggactgaaatgcaaaggacggtgataaagcattattgaaagtattcttggaatcccgatttccgataaaattttgggtctcaaaatgccattcctgatatccgttatcgaatggttccatcgaaaataaaaatattgtttgattttaaattatttttgcaaaataacaaataataatttctaaaaattattgggaaattttgaaaagattgaaaacaaaaccccattaatttactaattaattataatcaccggttgggtgccgttcacaaatgtccgggatcacttccaccaacaaatcggcgcccttccggtagacgagtcggctgagcaccaccacagttgtgcgcttttggcacgcgaaaagggccggatcgggcgtgaacagtgccgagtcaatggcgttcggaatgacgaaaacgcgctggggtgcgacgcccgcccgcagcacagtgttctccttgctgaaaaacttatggcatttatcaaaatgaaaggaatgttattaaggcaataatggtgggtcggtcgtctatgtgatcagaaaagggagcggaaacgagagggagtgagagagagagagagagagagagagagaaagaagtacaataaggttgagggaagggtagctatgtcgttatttaaaaaacaatttaatatttacaatagagaccggaatttntgaatggccgggaccggggccgggacctggaaaatcgacccgcacggcatcccgggaccgggtctcccgtttttccgggactcccggtccccggtctcattttttttgggccggggccccgccgggggacttttccaaattagtgcaactttgattataaaaattaaaaaaaaatatgataatcttctattttagctttggataggccaagcaatgtaacgaccattttgtttgttttcaaagcaacccgggaccgggtggggggtcccggcaaaatcccggcccgtgctccgtattgagataaataatttttaaatcaaaatttcttgtaagttttgaagatgcatttttgataaaatatttcatttttaggggtgtatttttgaaatatataataaattgaatgttaagaagttataaaaatttattcatttttagaatatttaacaaaggtaatcttgataataaaaattatatcaatgtataaattgttagtaatcaaatgtatgtaattaattttgaatgattgcagtaaatattgatttcactcataatgatggttttttaaaagaatgcccttttttgatgtttttaaataacgattccgccccaccgtggtgaggaggaaaacaaaaaggcgaggggggggggggataaaaacgacgaatgcggcgctgctttgtgagagaaagggttaaggagccagagggatcgaaaattaagggagagagagcgaaggaaaaaatcaatgaattttttacgaccatatttttttaaacaaattttcatcaaaaaattgctagctttgtggtttttggacaaatttagtgggaaatttgcttcacggcctccccctcgcttctaaaggacgccattttggccccctaggggggggggg

SEQ ID NO: 19471 - DNA, 2649 bp, Heterodera glycines
attagcagaatgtgaaattctctcatttgttacttattgatcattttgtctaattcgcaaaattacagctcattattcgcgaaatataaactgaatcagtgtttgcggaatgaccgagctgataatcgccaataatcttcgattacaattttcttggtcacctttttggaattccaccatttcaactccttatcctctaaatataaactgaatcagtgtttgcggaggaccgagctgataagtcccaataatctccaatttacaattttcatgatcacttttgtgatattctcaatatttcaatttcttatatccaaatgtaatctgtataagtttacagtaggaaattgtaatttgggggttattggcgatttcaaatcgatccttccggaacactgatgctgtttatatttagagcgtaatgagctgaaaatgtcagaattcaaaaagtggggtcgcgaaaatagtaaatctgaggttattggcgcttatcaacctgatccgtctgcaacacttaaacagtttatatttaaagcctaattagcagaatgtgaaattctctcatttgttactttatgatcatttttgtctaattcgcaaaattacagctcattcttcgctaaatataaactgaatcagtgtttgcggaatgaccgagctgataatcgccaataatcttcgattacaattttcttggtcacctttttggaattccaccatttcaactccttatcctctaaatataaactgaatcagtgtttgcggaggaccgagctgataagtcccaataatctccaatttacaattttcatgatcacttttgtgatattctcaatatttcaatttcttatatccaaatgtaatctgtataagtttactattaccacaatagttgaaacgcaaaaatgtgaaattcaaaaaatttgagttttcgactttctattcgaatttgggtccagggttcgaaattggtcaaaagggtgccagattcgagttcagcaacaccaaaaacccatggggagacatgccaaattggacacatcagctgaaagaacaaaataaattacttgatcagcgaatttgaacaatatacaaagaaaaatgaataaattccatgtaaattaattaacaagtttgcattttctcaaaattcgcagataaatttctcatacttccaaaatgtattaaatttgtcaattttatttcatttttaaatacggaaatagagatatgaaacaacaacatttgtccaacgacgcactaaaatcggtaactgacgttggcaacaaaatcgttcacatactgcgcctcaaagaagcaaagatataatgtcttttctgggttgaagttaccttaaacgggatatcgtggtgatggtcccttttcgttttgtgtatcatatcaaacacgatgtcctccacccttaaatcaataaatcttcatattagacacctaaacaaagcttacagcagatgcccctgaccatcgaaacggtcgaattgcggatcatccggttcgtcaacttcgacaggcattttcaaattatggccacgaaaatcagcatacaacttcatattaaaatgagaattataaataaatgaaaaagtcacaaccttgagaagaatttgttcggggaattcagcctcgatcgtttctacaaattcggcaagactcattggaccagtgatctcaattcggtcgacaggagagtctccaggagtcgaacttcccgtgtcgctttggtgcattctaattagacagaaaacttaacggctaaattttatttaataaatagttaatgttttaagaggataaatggtatgtagatcgaattataggacgttcaaacaaactggaaatgcaaataactccaatatcataatacagttcacttttagaatgataacttcaagcgaaaaatgtcaaatttgtaccatcaaatttattgtcaaattcgtatgctgtgtaatgtcagtgggacaataaaataataattaaatagggcagataattctgcaacaaaaagagaaaagtttccgggtgtagttccaaaaaagcgaatggtttatgatattgttaggtgtgttcaagtagagtcaaagtccattgccgccgtcattcaccaccaaaactgtggatgttcattcagccaacactaaacaaaatcgtagcggaacttctcgcctccgggctcgcccaggtcgggcagcgaaccagtgacgatggcctttaaaatggaatggcttttcgtgtttccgggaaaaccatggcttaaaataatggaaagaaccaacctgaatgacccattcgctggacacggccaaaccgccccgttcctcgaccagcttggccacctcggcctggcagtccgtctccgccagcagcacatcaacgggaggctcaactgaagaaacaaatccaaaataagtgtaataattcactcaaaatgtgtacttttggaacagaattccatcttttcctcaaggttagcgctcgatttggaggcaaatggttcaccaggaccaatgccgactaatgttgcgcccaaattttgcaggatcggtgtccaaatttcggcaaaactgacctaaagtgaaaattgtaatgtgatattttttcaattttcagtcatgttacaatgccagggtc

SEQ ID NO: 19472 - DNA, 938 bp, Heterodera glycines
  unsure (1)..(938): unsure at all n locations
gccggccgctgccagtccacctctctcccttgcctgcgccgactgctgccagcactcagcccaagggagccatccctttcttcgccggccgctgccagcactcagcccaaggtaattttataaataattgcatatttcggtgtccgtatttaataacccaggaataaatgggttgattaaggccttagaatccgagagtaagacgatttttataatgctcgcggacaaatatggagttttacacattatctgtgcctatcctggaataaatttactacatttttaggaaagcgagtaaaaggaagctcgaaatttataaagcagattgtctgtcgagttagtataataaattagtgaattctcgctactcgccgaccgctgccatcactcggcccaagggagccatccctctcttcgccggccgctgccgtccacttaatcccttgcctgcgccgaccgctgctagctctcagcccaagggagccgtcgtctttagccggccgctgccagtccacctctctcccttgcctgcgccgactgctgccagcactcagcccaagggagccatccctttcttcgccggccgctgccagcactcagcccaaggtaattttataaataattgcatatttcggtgtccgtatttaataacccaggaataaatgggttgattaaggccttagaatccgagagtaagacgatttttgtaatgctcgcggacaaatatggagttttacacattatctgtgcctatcctggaataaatttactacatttttaggaaagcgagtaaaaggaagctcgaaatttataaagcagattgtctgtcgagttagtataataaattagtgaattctcgctactcgccgaccgctgccatcactcggcccaagggaagcatccctctcttcnngcggcgctgccgtccacttaatccc

SEQ ID NO: 19473 - DNA, 761 bp, Heterodera glycines
tatgggtttttaggctattaaaaatgaaaaaaataataattttaaattaaaatattttttattaattaaattcaattaaaataatggtaaagaaaatttttaaaaattttgatttcagggggggtcttggaattttctgagtcccaatattctgtatttttttaaaataaattaacaatcttttaaattttttgcttttaaatcgctgtttttgtggaaatgttttttcaaaaaacttttttggaacagtgggagggggcggggccggcggtgccgataggcgccgccggaaaaattttgaaattttgagcgagatttgttaacagaatttgtcaaaaaatgaccaaatatttggttaatttatgggtttttaggctattaaaaatgaaaaaaataataattttaaattaaaatattttttattaattaaattcaattaaaatagtggtaaagaaaatttttaaaaattttctgttccatcagggaattgaaccgaagagacaaataatgaaagtaaaaaggtttagccacttgaccacttataaatacggcagcacgctataaatgaaaataaataatttatttattttttctcaaagatttctccttcttcaccaattcccttctcttttctcacccagacccccattcttaccagtgcttatttagtcccgtcgggaccgggactggcaaaaccgggaccgggatttctgtttttccaaaaaccgggaccgggatcgggacctgaaaaaaccgggatt

SEQ ID NO: 19474 - DNA, 2406 bp, Heterodera glycines
aaatcacttttgcgagtacgcaggttgtgcacacaaaattcgggtgcactaccccggaaattaaaaaaaaaaacaaattcttaattattgaaatttttttaaaaacttggagttttttataagaaaaaaaaatttgaaaaaattatcagcgattttttggaaaattttttgaaaaaacttagtaattcattgtaaaattttgataaatcacatgaaaaatttttttaatttttttttcttgaaattttcttataaaaacatttctaatatttaaaaaaaaattatatttagggggggggacgacccgggggaaatataatttttttttaaatcttagaaatattttacggtgaggggctgggggaggagggaaacgaaatgccacaaaattcgagggcaaaacgccaaattgaaatcgaaaaattaaaaaataaataaaataaacttttttttaatcattttaatgaattaaacaattggttttcaggtgttgatgagtgtcccgattatggaatgaattcggctagtgacgacgaacgtcggcattttctgcgccgttattttgtccattttggccaaccaattggggaagagtgtgaaatggacaaaatgttgtgcaaaattcggcactttgaagcggtacattcataagcacaacaaaaatagtgtaactgttcattgtttttttccttttcgatatttcccatttactctaacggtctgatcattagctctctcgttgcattatactcactctaaccgtctgaccatgacctctcctccccctttccctctctctctctctcactgtctctctccgccttgtctctctctgtctccctctgtctgtctgtctctctatctcggtgtctatcgtttactttaacgtctgatcctgtactcttttcattaccaaacatctgatcatacattttctcattggcatacccatctaacgtctggccatgtactctctcgttgcattatattcactctaacgtctggcccttgtgttctctcatggcgccccctgttttttaattacttttaatgctttttctatcactttacaggcagcccattttttctggactctgtgggccatccatcaggcagcaaaatccgcgattcaatttgattacatgctttacgcgatcacacgccatcgttactgcactcagcttatgacctcattaggcattgctaaaaataattagcacaaaagcacaacattaattgatttttgggtaaatttttattgggtctgtccttaagaaaaaccaaattacgcatccttaatcggtcttaaaaagttttatatgtatatttttcacgttgtctatactttatcaactctcttaatctgcacttaaaaattataattgaccgtatctttctttatctgttcttcctgtgcttaaaaactgtttaattgctcctattatttatttattttttaaacctgtccttaaatgttgtttatttgcccttaaaaatgacattgatttgctcttacattgaccttttaatcaagctggaaaattaaaaatcacgacaaatttctgtaaaacaagacactcgaaaattttattttgaagttattgaacaaaaaaaaaaaaattcaaaaacccggccgtttgattacggtactaccgtatacccttcgctttatgggtgtttaaccttttttattttatcttaccatacaaataaaagaataatttgatacaaaaataaaattaaaaattattaaagaatgatgatagataaggaattaggggaagagatcgtcgtcagaggacagttgaaatgattaatgaggatgttcataattttcaattaaaaattgatatccaatcattgaggcctccttaaaatttcaaggtccgaaaatggattttttggggaattttaatataaatttttaggaggtctaagaaatggtcttatttggaattgagtttttcattggctttcgttggtttttttaaaatttccaaaaaattatgggaggcctcaaattttctaaagtgtaaggcattggcttattatcaaatcaattcaacaattttgcacctatcgctttcttgccgcgatgatgatctttcgcacacagaaaatggcagttagggtgaagagaattgcttaaatttttagaaaattatttgaaatttttcaaaaattaaaaatttttttaaaaataatacggcatcatatttacccaagagaatgacaaagatcagctgcgctgtcataatggcgacgcccaatttgactttgaacagacactgtaaaaagagtagattaaataaatctgatcagtttaaagtgatcaggaatcaataaataattaatgagcaagggtggtgatcaattggattgaaaatattgtctcgaaagaaattt

SEQ ID NO: 19475 - DNA, 981 bp, Heterodera glycines
ctggagggttgagccccagtgattgaaatgcaggagcttttagtgccagtgattggaatgctggtgggttgagtcccattgagtcccggtgaaatagtgggattggaatgctggtgggttgagtcccagtgattgaatgctggagggttgagtcctgttgattggaatgttggtgggttgagtcccattgattgaaatgctggtgggttgagtcccagtgattggaatgttggagggttgagtcccagtgattgaatgctggagagttgagtcccagtgattgaatgctggagggttgagtcccgttgattggaatgttggtgggttgagtcccagtgattgaaatgctggagagttgagtcccgttgattggaatgttggtgggttgagtcccagtgattgaatgctggagagttgagtcccagtgattgaatgctggagggttgagtcccagtgattgaaatgctggagagttgagtcccgttgattggaatgttggtgggttgagtcccagtgattgaatgctggagagttgagtcccgttgattggaatgttggtgggttgagtcccagtgattgaatgctggagagttgagtcccagtgattgaatgctggagagttgagtcccagtgattgaaatgctggagggttgagtcccgttgattggaatgttggtgggttgagtcccagtgattgaatgctggagagttgagtcccgttgattggaatgttggtgggttgagtcccagtgattgaatgctggagagttgagtcccagtgattgaatgctggagagttgagtcccagtgattgaatgctggagagttgagtcccgttgattggaatgttggtgggttgagtcccagtgattgaatgctggagagttgagtcccagtgattgaatgctggagagttgagtcccagtgattgaaatgctggagggttgagtcccgttgattggaatgttggtgggttgagtc

SEQ ID NO: 19476 - DNA, 1155 bp, Heterodera glycines
cgctaggtgattattggagcccagaaaaaattgtagattcagaattttaatgtaataaatagaagaggtacataaatctagaaataagcatattacagtgattgggaagaaagatctaagtgattaaatactgataatggagtacataaaataagcatattgcagtgaaagaaagatttaagtgattaaatactgaatttggggccatcaactcctttgtttttgccagagtttgtgtgccacaaataaaaaatgcgggaatagaggaagaagaaccaaacaaagatgaacgatgaaaaacagtttcaggaagcgcttggtgattattggagcccagaaaaattgtagattcagaattttaatggtaataatagaagaggtacataaatctagaaataagcatattgcagtgattgggaagaaagatttatgtgattaaatactgaatttttggggccatcaactcctttgtttttgccagagtttgtgtgccacaaataaaaaatgcgggaatagaggaagaagaaccaaacaaagatgaacgatgaaaaacactttcaggaagcgctaggtgattattggagcccagaaaaattgtagattcagaattttaatggtaataatagaagaggtacataaatctagaaataagcatattgcagtgattgggaagaaagatttatgtgattaaatactgaatttttggggccatcaactcctttgtttttgccagagtttgtgtgccacaaataaaaaatgcgggaatagaggaagaagaaccaaacaaagatgaacgatgaaaaacactttcaggaagcgctaggtgattattggagcccagaaaaattgtagattcagaattttaatggtaataatagaagaggtacataaatctagaaataagcatattgcagtgattgggaagaaagatttaagtgattaaatactgaatttttggggccatcaactcctttgtttttgccagagtttgtgtgccacaaataaaaaatgcgggaatagaggaagaagaaccaaacaaagatgaacgatgaaaaacactttcaggaggcgcccggtggttggttattggagcccagaaaaattgtagattcagaattttaatggtaataatagaagaggtacataaatctagaa

SEQ ID NO: 19477 - DNA, 944 bp, Heterodera glycines
acacatcttcaccaaataatggggccgatgattaattgatcactgagccaatcacttttcactgatcagagagagagagaaaggaatggaaagagaataaaggcagagaaagagaggggaaaggactgacggggaaaagggtggaacaaaacacacacagtcacaaaatttgacgggtgcgggggcggaagccaccagccaattgttgtctgattgatgggttttgattgcttaattcattgatcagtcaattttctcaccaaaacgcatcattagcgctgatcagagtgtggatacgtcatagcatccgtccgatcacttttcccgttactaccaaactgattcgaatccctctcttcccgtctctcttccgatcagagtcatccgtgccttgtgcctgtgcctgatcgcccgccggcttcccgccattcgtttgttgattggtgtgattgatcagttccaaatcaccagcacatattatcgcggatcagtggcggcgcaccagcgccactgcccgatcactttctcatgactccacacacacactcgcacacatcacaactgctgatcagattgttctctcgtaccccggtcgatcagtagcaatcgtttgtcgctgtccgcgtttaccgataccctttgctactgatcatacatttgagcctcggcgaggctggcgccaagtgcggacagagagcgaaaggaatgcgctttctctccctctctctttctctctctctttctttctctctctatcttctctctctaccctctctctatcccgccgctctctctctccccctctctctctgctttctctgtatgttcatcaccagtagcattaacaattgttattgcttatcacacaattcaatgggaagattgtgatagtgagagaagaagcccccttctcgccgggggggggggggggggggggggggggg

SEQ ID NO: 19478 - DNA, 2299 bp, Heterodera glycines
  unsure (1)..(2299): unsure at all n locations
ttttttaaaacggaaatttttgcccggcaaaaattttcattcaaaaaattttttggggggcgacggccggcggggggaataaattgcaactgacatttgtaaatagttctgggaatgcattggggagacaccattcccattcacattattattaaatggcattcattccttgacaatgactaaccccatcccggcgcccggcgttatttaacccatccctttaaacgattacaaaaaaaaaccaacaanaaagaaattacaaaatgccaattcccctcgggggaaaagggactcaaatttacatggtgatgctattgtaatttattttaaattaggtagataattaaatgtacttcaaatttttaaatagttaatcccttcaagaaataattaattaaattaaatttatttttaaaaattaagaaaattgatttcctttattccttcctttttttaatttcaatttaaattccctcggggaaaaacggactcaaatttaaattgtgatgccgctggaatttattattaaaatgagtagattatattaaatttaactttaaataattttcaaacatttaatccttataagaaaagaattcattaattttaaattttttaattaaaaatatagtgtcctttattccttttcaatatttcaattccccgagggattgaatttaattggcaaaatgaaatgccaaaagggttttttaaatttattcattcaagaaattaaagctgagaaattaattttaaaaaagttttttgccctcacaatttttaaataattcagagaacttaagatcgattttcaaattttttaaaaatttatttgaaatacaaaaatcccttattgctcggactaatctttgaattgataatctaatgaattatgaataaaaaaacaatatttctattccattcataagagtgactctctctctttttttttattattttggcgttgtgttacgctgaaaatccgtccgtccgccggcgtttttcatttttcccccggggcgccgcccgctgcataaaaatttataaaaacgacccaaaaattatgcacaaattatttatttttattgtcactgttatcgccgccggggatcagcaccaaacggcagcaccaaaatgcattcattgagcagtgattaattaatttatgcatatttattttctattttttgctgtctatcggcggaaaaattatccaacggcgaaaaggcaaatgaacaaaaaatggagaaaatcagtcagtatccatttcagtttttaagtaattttagctgtagttttgggctctttggtctctcaattttctgttattttgtagggacaatttattttttatttatttattttttggtccgatcggacggtaggacaaaaacttcccgaatttcctaaattcgtgccgaaaaagctccggcattccagaaacaaaatccgcggccccttatttttaataggtttgtaaagtctttaaatttttagaaaaataaaataaattttaaaaagttttaattcccatgattcatgtttgaataaataatttaaaatttatttttaaaaaattcttttttattattttatattttaatgataaaaataaaattttctctaaagaaaatgatcattttaaaagaattaatctgttactttctgttttaataaatttaaaattttaattttttattaattaattctttccaaaattaaaagaataaaattaattttcccaaaattaatttccaattcaatttttgctccctttggcattttgtttcatttccacaaaaaagcaatctttggactctcaaaatttaaatccgtctttggccaagtgtttgagggatcacacaccgccgccggccggcccagtttggcactaattctactcagaatttgctgcccaatggtatttccccgctaatccttccccccccccatggcttatcagctgctaaaagcttaggaaaaacgcatataggctaattgcgctaaattattctcacggcattttagcgtgtgcccacgattttttgtgctaaatttcatctgaatccaaccgagggccacgggactgagttggaacgggccacattttgatttaaaaatgccaagaattgcgtttttgtttttttctaaaagtaaaaggttattttctagtgatgctcaagaatctcgggcttgngtaaactttttanattanaataattttaatgtttatctaagattttttgaaaaattttcnggtttcgtgtctncgcgcgagaaaaatctncgggtttttttg

SEQ ID NO: 19479 - DNA, 1078 bp, Heterodera glycines
  unsure (1)..(1078): unsure at all n locations
atcacacttattttttctttgtttttcgctcaggaattttctgggtgcatttaatttcctcccggtcgtttcctccacccccgagaatttttttacgagaaagtttcaagaaaaaaaaattttttttaaatttgtgattttttcgaattttaaaaaataggaaattttctcataaagaaatagccggtttaaccggcggcgcttgatttttttgaaaatttaccggcccggcaaaagctcgaacccgtccgggttttaaaatcctattttactaaacatcatttcattaaattcgaatgccattttttagcccacttatctcgaagttgcgcaaaactgggtcgtccaaccgttcacctcaataaacgccttgctgaccatcggtgaaattctggttgatcaggtattgtattgtatcaatacaaaaacaaattctttcccccaatttaaaaatgggaaattcgatttttcatggatttttctcacaaaaatttaattgacgtcttcccccaatttttcctctttctcccaaattaaaaaaagaaaaattaaatttttcacaaatttttattaaaaaatccaaatttttctcccaaaaggtcgctgccaccgaaggggtgcccgtgctgcgggccggcgctttttgcatccaacaacgggcgccattctttcgcctcagtgcgccgctgttccgcaacattcaaatggacgagaaaaatgacgcggacattgcacgaatgatgtgggattgtatggtgggaacatttttggaatttttcaaaaattagaaattatttattcattatttttaatgcatttggtatggcattggcacttttcggttttgaatgacccgtgaattttgaattaaaaacaaaacaaaagatggaggcgtcttatagtattgcatttataagaacatttaagggaacaatgcaaaaaaaattcagccattttggaaaattttttgaaaaaatccggccacaaaacagaaaggtaccatagcactttgggtgggagtcagctgtgtttccacctttcctgaagatttnntaattttctttgagtttttttatga

SEQ ID NO: 19480 - DNA, 1089 bp, Heterodera glycines
ttgatcaaatttttttaaacttggtatgtagatagagaatttgtagggcttttgtatgataccaagaatgtttaatttggtcgattacaaaaggatatgacgattttttgtcgaaaaaccaaaaaattggggatgcctagtagttggggttttccctttatctatatccccattttattttgtttttgaacttaatcgggttatcccggtcctcccctatcggttggttacccgacacttgcacctacatatttttctatgggcgagggtcgacgcctaaattttacgaaaggagtccagccatgtaaatcgtcgaattttttttttttttgctcttcaaatcactttcttttttgcagcacgcatttttcaaaaaactttggaggaatattttaatgaatctggctacgcccttgttagtgattatgcaaaaaaaaaaaattgacacattttcccattcgtttttttagtttcattgacggcaatttcatcgcttttttcgcccgtcttcgtcctcttttcaccgcttgtccaataaatttggacattacaaaaacaagacacattgagttaattgcgctcaacttttggccaatggtcgacaaaagcatttgtggcctgcctttgtttgccaaagattttcactgtttgcgcaaattcgtgccgtcatttctctgcgattgtccaccactgtgtgttgtcaatatcttttatgactatctgtttcccgaattgccggccgatgacagtgccatggcgtcggatggccaagcgttggccaaatggctgttcactgcccatccggacaatgtgccaaaggttttcgaatgctcgtggggcaggaataataaggacgacggggattggccgttcaaaattgctgacttcaaagcggtaaacttatcattaattaatgatgtcactcaacgaaatttcgtcactttctttaatcgtgcgaggatttttaagggcgaaaataaggacgaaaagctttcaaatttaggggtatacttttttaaattgttctttttattatgaaaataatttcagattaaggcaggcaattttattcactgattgcagttacaa

SEQ ID NO: 19481 - DNA, 3030 bp, Heterodera glycines
ttagaaaaaaaaaattttttgaatttttttaggcaacctaccccaacaaaaacagcaacagttgcagcagcagtgcccggacttggagtgcatttggaacaatgtgtggtcaaagaatgagtcggtccgtgccctttaccctccggcagtgtacgcctcgctcaagtcgttcatcggtcggactcgttgtgacgggaggacaaccgaattatgttgacggtcagtctccaggccccaaccccccccccacccccccaccattaaatttttaaattttttgtggaatttttttttcgtcaaaaaagtaatgacgaatggttggcctatagagaatttcaaaaatatacatttaaaaaacatttaaaaaaatatacatttaaaaaaacaatgacaacgaacgattttttgggcgattttatttgaagggacaaattaaaaaaaagagaaatttgactgaaaacaaattcgatttgagaggattacttttaaaaatgttttgaccaatttttccaaccaaacagaaattgagtgttgcgagtccatcaaatggtactggctgaaccgtcccgtgttggacccggagatggacgactgtactgctccgcgtcgctgaacggggcacatcggcgggcacgatgagcatttcggtgggtggggggtgccattggtttcagggcggcggttggcggtgccgttggcacaccgcgacggcagagccgaagcggcggaggtgcgggcattgcatacggcggacgccggtgccgcattacaattggaactttgcggcggcggtgccgacttcaacaaccgggactcggcactgggcagcgatgtgagtaatttcattttttgtgccgttttttgttttgttttggaaattgagtgtttctggcggtgccgagggcatccacaggaaaatttttgaaaatttcttactcaatttgtctgatgtgctctcactcacaatcagcacttgtggtcaacaaaatatatcattcattttttacttttttaatttcgtcaaaaaaattattcatttttcagaacccaaccagcagaagtggcaccatccgttgtcggcatctccaaattgacccggacaccggacgatgtcggacatgctcataccggtgagcagaatgaacagagggtcatctggggaacagtacgtccccccctcccgaaatttttttttcaaacagtaatttaaggaaaattaaagaaaaggcatcttgaaaatatcagcgatttcttctttcaaaactttatgatgaatttaattttttttttttaattttctaaaatattaaaattttcctattgatttattgtttttccaactttgttagaaacaaatttctctgatctttttcaaaagaaaaacatttgataatttgatttaaataaataaaaataatatttctctccgttccagcccaacaagttcaacccgtacagcaacagcaactgccactctgatggactcgggtcgtccggtggcggtggtggcctcaacgcgtgcgctccaacctcattctgttcgttttgaggtaggtgtttatgtatgtggtggttggtgctgcacaccaatgttttaattttaaaaaattaatccattttcatggaaaattttcaatgattttttaaattttttttggcggattgttggtgggcgattttcatcatttcccagccgaaatgaaaaataatattttgagtcaattggcgtcgaccgtttttcttcccttttttgcatttgccttttcatttgcttttatttgtccattttttacatattttttatcatttcgtttattttcatatatatttatttgtttattcattctttcatttgtttgtcttaaacagatgggttcatcaacaaattgtgctgataaaatcattttttgtcatttacccctcctccgtcgaatgatttctctttaattgaatcaaaatttacaaatatatatacctaatcctattttattttccttattatttgcactctctctccccaaaatgctttataaaaatcccttttcattcaattttaggtaattagggtaaaagccggggggatcgccgccagtcaaacggtgataaaaaaaatcacaatttcaccgataaaattttaataaaattgtaaattaattccctattactttgaatattgtacagaaaacagctcgacatttccatacagtatgcaaaaagcaataaagtactgtaaaatcaatgattgagaaagaagcgagagggggggggggagaagtgacaaactgaaaaaaacattgtgagaaaagagacagacagggcgagaaaaggagaaagacggtggaaaaaggagaggcagagagagagggagagagagagagaaaaggggagaaaacaggagacactgagagagagaaaagagagaaagagtgcactatttaaataacggcagtgcaaaaaaggaataaaatgataggcgattggctgataatggcggaccgacggggcgggggggggagaggggaagggcgactgacgcgtaaacaatcccattgccccccccctttcatcattctttttttccccccgcaatttcttcatcgatttgactctttcgtttcattcattttgcttaaacgtgtgccaatatttgttattgccattaatttgcaattaaattaaattttaatttatttaaatgtaaaataatcattttttgtgacctcctttaatttttttcgaccaatttttagtgaacattgtcggcgcgggtcgtctcttcaagcgtcaaatgtgcaaagcgttggggcaagcgccgggcattgtcacgcgggagggaattgcaaaaggcgtgcggatcattgacaacggcggacagtacaaagcggcaattggtggcgaacggtgagtggggggggggggcgacggacgaacgttgcgctggtccaaaaacaatcgtttgggatgggttcgagtcgacttggcctaaagggtttttcgggcatcccatggtattctgttgtaccctcatca

SEQ ID NO: 19482 - DNA, 1705 bp, Heterodera glycines
aatcctcaatggcattgttcaatgcttccattggcgttgtttcgggatttgtttggacacggagcaaaattttgtgttccaaggggtgggggtttcggtagccggcaaaaagcactttcggatctttgaggagctgactgaaagtatataaaatggaaagccgaacaagaacttaactcactgtttgaggaggtttccgagggtgtggtcctccttgttaaaagtaaacaccgccgcattcggcacttttgtgtccttctcaatgaccacctttttctctccatcagccaacagaaacggctcataggcagcaggagtattcatattcaagaaggccgaaaaaatgaaatggaattttattgaataatcagcaaatgaaaatacaaattgttacaaacaaaataatgagcaagttttgttaaatgtgtgatttattcgttcgttttgcgaaaatgaaatggcggagagtaagtgattgtttttcagaaaagacaaaacaaaaaaatttttggacaagacagtgaaacaattaaaatgtgatttatgaaattttgcctcgaatttaaatttgcattaattaaacaaacaccaaaccatgtaaaagcactgacaaaaatggattttagcacaatagcaaaaatattcaaccgtcaatcactgtcgtcctcgctgcccttcttttgtgccgaaatcattttgccgaaactgaacgggtcttcgtcttcctctttgtcgtcctcgtaacaaaaatggccatattttgttgcttcgtcaccgtaatgatctgtttgtaaatcattcatctctctactatttgaatattaaactcaccgaaattgtcgtccccacttgtcgagtcgttttcatattcgttggtgcgcactccgtccgcgaaactgataaatttgccgttctcttcgtccgggtagtcatttttgtagtattcttccgcgtttgagtccgattcgtcgtcgtatccgtccgcgtctgagtcgtcctcctcgtcctgtccgccataataaaacaacaattcgtcttcctcgtcttccgtgaacagcacaccatccattttgctaatgttatggcttccactcggcgctctctccccaatcattgcaaagtttttcgcaattgtcgtagtcccttctacgccagaggcttgcccctccgaagaattccactggtcgttaagtcgcattttcttggtcgattgaattagcgtgccgaaaggatcatcccgccgcttccgtctcagccgaatcatccttggcatacccctgggatggggtcttcgcgcttgcccaatctgttgatgattagtgaaagacgacgaggacacggactggtcgagatcacacccttcctgctcagcaatcggagccaaattgaacgatttcggaggaatattcattgtcgacgaactttctacattttgtttgtttgttttttgaatttataaccaaattaatgatactgatgagattgaacaatccaaatttaaaaaaatcaacgcatgatacagatagtctatcatcaatttatattgtcaaaaagaacatagataataatcgccggtttgccgtgtcaacatcgttcgatgtgttcttttgtcccgtctcttcgctctctcagatcactgctgctgacactgcacgtgctgtgccccgcccggccccgtcggcacttcgtcgtcgctgctgtcgtc

SEQ ID NO: 19483 - DNA, 837 bp, Heterodera glycines
  unsure (1)..(837): unsure at all n locations
tttttacatcggtccttttcatcaaccatttctcctaaatccgaaggaaacttttagtacttatttgattgtgaccctcctattgtggaccagattcaccttcacccgagcattgatcacatcgcgccgccatctgttggatcattccaggcccaatctgacgcgtgcgaaagacctttccgcttccctgacaacggtcacatttccgaaccgagccttgttttccaccaattctgaaaaatttagcaccacattttatggatttaaatgaataatccgcatttcgcccgccctctcacccgttgcacgttttgcacagcactttcttcgtcaattgcaattttgtattcttccctttgtacaggtcttccaacgaaacttgtaaaggctgaaccgtcgtctcccccttgcgcgaccgctgccttcccccgctaaacatttgctggaacaacccgcctccgccgcccataaaggagggcatgccgcccccattgagcatttcgaaaagatcttcatgattaccagcgccttaaattatgaagctttacataaaaattacacaattgctctgttttttcattgaaaacctggaaatgtcatttctgtgtatggtgaacgtcgaagttgtcaacttataaatcgaacagcagaataattagaaataacaaatctaagacaaattcattttaaagcaaaaaaatttttgaacaatatatatttattactcaattatgttggaaataattagaactaataaagatgctttgtttttcatccanaattttttctgctgatagagagggtgtatatggaagaccaaaaaaagggttacctaaa

SEQ ID NO: 19484 - DNA, 1802 bp, Heterodera glycines
ttttttcttttcctcaaatgttacgattgcccaatcttctcagtttttcttgtcaaatctgttttccctcccttgatgaattaaacacctcaataatgaccctttttacttattcaatcgtctgatcctttgtcttgtgttttggtttatgtcccgggacaaaaaatgtgatttatttactctccaaaatgtttccctttgttaattaatgagcgttcttttctttccacccttaggaatgggccctttccttcagggggtttgtttggggaaatgaggggaacattttcgcatccgaccgttttgcacagacgatcagatttggccgccgtgggccttccacggtgctatgtcgtcatataaaaaccctcaaaaagggcgttatataaaaaaccctcaaatggttttttttgtgtttttattgatttttccttgtgttttgggcgttatataaaaaaccctcaaaaagggcgttatataaaaaaccatcaaatcttattgttaccgtattaatttagaaaaaacaatcgtgccaataaaataaaacctatataaaataataaatcattttaaataaatattttttatacaatattgacattaaatgtaatcaattattggatttatgtaaatgttacgtcatctaaaaaaaattattcgctagatttatattttttattattcatattaatggaaatgcatggaccatcaaaagccgtatattgtatattatttattttattcatatttctttttaaaaatcggatttacgattacattactggtggaagccgtgcttctttttgatgaaatgtcttacaatttgattgatttgagggttttttatttttgagggtttttatataacgactcagcaccgtttaatttgctatcgaatacgcaataacaattcactcgttttatttataatttttcgtattgatgaatttccttcaatttattaaattaaaacgcatgtccataaacatatgcaccgcactgtacctatttttaactgtgatcaaaatttggaagtccttaggcctaattagcagggaacggaattgatcccaaaagtttctgaaaattcaccccctaataaatgaaaattattttctcaaaaattcatctccaaaattatttatttattttcttgacaactttaaacttaatactgatttggcttaattttgttgctttttagagtagggttcgagccccgcccccgtcacccccgcccccgccgggggcgggacaggttttttgggctcacgacagctccccagggttagaagaaagcgggacgtgactttggccaaatcccataatggtaatcaaatttcgcccaaaccttcccctccatccctttcaccctctctctctcccccccccgctctctctctctctctctcccagctcccatcctctcttattttctctctctcttcctctctttattttgttttctctctctctctctctttctttcttttcctgtctctctatctctccccccccccctctctctcccagctcccatcctctcttattttctctctctcttcctctctttatttttctttctctctctctttctctctcccagctcccaccctctctcgttttctctctctctctctctttctttcttttcctgggtctatgtctctcctcccccccctctctctcccagctgccatcctgtcttattttctctctctcgtcctctcgttattttgggttctcgctcccagctcccagcctcgctcggttgcgctctctctctctctctgtctttcttt

SEQ ID NO: 19485 - DNA, 1354 bp, Heterodera glycines
  unsure (1)..(1354): unsure at all n locations
gcttctncatagcntatncagtaggaaaaacactttcttttttngtgtttgcaaacaaaagtttggacttttatttacatattttagtagatattttgcaaatttgaatatctgttagaaataaatttaaaattcgcccctatcggcacgcccccccccnncaaaaaaattttttttttcttaaaaaaaattacccaaaaatccctaaattttggttactttttagtcaaatctgtgcaatttatgtcaaaataaatattatcaaggcgatcaacgaataaaagaatgtggagccaaagaaattattcataaaaaatattttttttgtgagatttttggagctaattcaaagcaaacccccgccccgcccccgcggggcggaattatcgtgcccccgccaccgcccccgcgactctgacccccgcccccgcgaaaagccacctccgcccacggggctcgaaccctactttttagacaaaatttacgcttttactttgaggtgtatttttcgtttttattgccacgccaaaataggttaaaataggttttttaaaacattttttaagttttaagcttctaaaaacctagaaaataggttaggtataggtactaaaaactcgaagtagcttaacaaccaccaaaaaacgtttttcgtaataggtaaaaacctaaaaatcgtatgttatgaagcgattctaaatagttgaatattcatttaattattttatttaacaattgtttatttcattttactaagcaaactttttcttctgttgcaacgaataatcggcacaatgaaaaggcagaaagaagttaaattcaattgaattaatatttttaaaaatcaaaatgtgcaattaaaaaaaaactcaaattggactaagtttttcgctgattcgttcgttcgcgtggggattttttggcactatattaagaatttaaaaaataaaaataaataaatatgtaaaaaataaggtctaatttaaaagtatagtaaatttaatcaaatttggaatctacctaagtttttttcacaaattccctacttgattaatatgcttaggtattttgctggattcattattagggctaatatttttagggttttacctatttttttctgagctcctcgtggcctgaaacgcatctcaatactgatgccctacttttttaatttttaagtaaaaatatattattaaggcgccatttgggttatttaatatgaaatcacagcataatttagtattttatttagtttttttaattttttaattaatatcatagtgcccaaacttcatgtcgcttcttccgtgaacgttctcattttaaattaacaatttcaattcatccataa

SEQ ID NO: 19486 - DNA, 1236 bp, Heterodera glycines
atttacatggctggaccccttcgcaaaattggccgctgacccgcccctcgacccccttccccagaccccttcgcaaaaatttcggttgacccactcccctttttcatgtatggtaccaactgcactagtaccaaaatggccaattttttaaaaatgattacaatttgtgcccattcgttttcacagatacatcgaccgcaatgccatcgcttttcttcaccatttttgccatcttttcacctctctcccactcactttgttcatttggacaaggaatgacaacatttggccaatgatcggaaaaaacatcaatggcatccatttgccggtcgactttttccaccgtttgcgccaatccgtcccgccaattctcaacgagtgtccatcgcttcgcgttttcgcctctttttttgactacttttccaccgaatttccggccgatgatagtgccgcggcatcggatggccaagcggtggtcaaatggcttttcactccccgtccggacggtgtgccaaaggtgttcaagtgcttgttgctgaaggatgatgcgagtttggtgacggttgtggacgccttcaaaacggtaatttacaaaatcattttatgttcgaagctgtacagaaggatcagtttttgtacttatccagtttaggtggcccaatgctccacataattgagttaattcagtacttgtacagtttggatatccctggaaaaacgtttttattattaaaaacataaaaacaaattatgtagtccaaactgtacaactaccgtaaattctagaaattagagtccccctcccctttgttttttaatttaaaattccactatttttcggaggcccccaactgccggaggcaccgggggcttaaagtaaaaaagtgccaagtctgaacatttagtttttagtaagaaaatcaagataaaatttttttgaaaacactaaaagttcatcaaaaaaaaatcgctgaaaagttttttcaaaaaattttttttagcttggctggcgactttttctgttttgaaagatacatacacgaattaattataaatttaaattttgcacatctttaggcatttctcgatgaaacttcttttcccgtcaatttcattgttttcatttcgtttcattggccttttgccgacgccgttgtcctttttgagctgaccaacgaatctacacgagaacaatttgaccttgaaaaaactaacgaatattacgaccatttttct

SEQ ID NO: 19487 - DNA, 1657 bp, Heterodera glycines
  unsure (1)..(1657): unsure at all n locations
cgatatttcgtgaagaaagtggagagttccagcgcaatgtcttcggtgaggagtcggcgaatgatgcgcagaaaattgacgacctcttcatcgatgtacctgcagaaagtagacagatagaaaaatgaatttggaaagcaaatgacgatcaaatggaaattgatcggaagctgtgggcaatgtacggcaacggagtggtgggcagtggcatcgtattgaagttggagcccttgattgtcgtcatgatttcatgcagccgattgttccgtcttcttgccactagttatgaagttgcacgaagcgccgtcgtcatatgcggacatgtctgtcagccatagcgttttaccgaacaatgggcagcaaaaataccgggctgagttcgacaaagtttgctccataagaacgtctacgcacaaaagtaatctcttagagtccagaataagagcattcagcaaactgcctccaaatcagttataagttcaatttattccgccaaaaacgtatttaatattatttttcgcctcccatgatggtttataacgatgttggggaggaaataagcaaatcgtacatttcagagcattcgggatcaaaaaatcccattttaaacaattttgtttgcggcgcatttttccaaaaaaacttttgggtattgggcaagagggagggtccggcggtgccgataggcgccgccggaaaattttttgtaattttgttctgatttgttaatagtttttcaccaaaaaaggccaaatttttgcgatttttaaagcgattgttaacggatttttgtcaaaaattccaaattttgacacaaatcttatattttttcttgatacatagtgacatttcnccataaaatttcaaaatttttttataatgataannnatnnnnncnntnncccnnnntcnnnncntttcttnnnnatnnnnncnantcnnancccctcaaaaatagcatttctgcattaaatttttttgatttgattttagtgcatataaaagcatattttgtgggttttgagaataaatgcatatttcgccatttttgcattttgagagcatatttcggtcatttttggcaaattttcataagaaaaatgcgaaaaaagcgaaaaatacacccctaaggacctactatttggaattttttttaaaatacacccttaaaaatcgaaaaaaattataaatttttataagaacttttgtaaaaaaaaatatttttataaataaaaataattttgtttagcatacatataataaatagagaccggatttttatgtgctaaaaatcctgaaatatgtaataaaatatgtgctaaaaaatgctgaaatatgtgctaaaaacccccaaaaatgccaaaatatgtgctaaaatatgtgttaaaaattgaaaaaataagtgtgtttttgcataaaaattcccaaaaatctcattctttatcatttttagcccatacaacgcaaatcaaatacatttcgaagtgtttggggtaaaattgtctttttttgatacatcatttctataaattgaaagttccagcagagaacttcgaaatccaatgacgaattaatgaattctagatttcattattttctactatcgaaaaaaaaattttttaatttgaaaaattatgctaataattacgaaaaaagt

SEQ ID NO: 19488 - DNA, 2829 bp, Heterodera glycines
ctgctgctgccgctgttcgtcatcgtcgtcaattggttacggtaaatgtgcgttttcgccccgccccctccgccgccgggcgcaaatcgccgccgaccgacggacgaaaggcacaaagtgaacgaacattgggggggcggggcggacggactttgtggctgcgaatggagggacaaaacggcggagaaaagtggcaaattgaggggagggggaatcattcgtggcgaaaattgagaaaacgccaaaaatatttttactgttttaatgccaatgccattttgactttgagtgaatttgtcccctaaatttgtgtcgatttcgttttattttaatttatttatttaaaataggaaaattaaattctgattttgcgacttcaaattttacgctttcattgaacaatgtcctgttcatcagctgtgcagccgccgtcaagtaagtgaacgaaccgtaaaaaatattatttaaaaaggcaattaatttttatttttattattatttaaatttaattaaaaatgcgtttttaaattgcgcaatgctttttaagcccattaaatttgtgttggcatcaaaaagagatatggtaaagaagccaaattggcaaagtcacttattcttttgacaaaactgtcccttttttaaatggcgtctaattaatccgtgccaattttggccatcatttgccatccatcatttccttttttgtttgatttttccgacattcgctctctctccaatttcccaattgtccatataaaagggtttgtttcaccgtccccctcccatttccccctcccccattttcgctctgttccatgctcaatgtgggcactcactctggacagcgtcgtcgtccttctcgacatgtcctgaagcacttcacggatttgcccccttaatccaatcacatctgtccttcacaattggtgaacacaaagtgaagagggacagcagggcaaacacagcacagggagagagagagagcagtacaactgcagcagacagaacaccacacacatttgcacacatattgttttgcggtcattgacacaaatggccgtcgtcaccatttggggggacggaaatgccccgggggggggggggaggggggaattgagtcgttgtgatggcaattaatgagtgagtgcaatgcaaatttggcaatttggacaaaaaaatgcaaatgcctacgggaaaatttttgccgatcaaattacgacggcgtcaatgatcagacaaactcaattctcattcactgatcattttgggaatatcatctgctgattctgagtccgtttcattcatttttccctatttatttaaaaattccgtagttcaaaatgctctcccccattcatttgccatgccaaaatggtcgcctcttgattggagaatgaatttgtccctgaaatgccattattacacaaatgccccctcccctttcccaagtcgagagttacgccgtccattggcaaagtccgtccgtctacggcacttctgctgatggcgcttctctcaaatccgccaaaaagggcgaagaatgtttgccaagttggcacatcgtcgccgctcttcacttattaatttctgtggccccataaaatgcgggggggggggaagtgtggtgggatttgtaatgtgtgggaaatggtggaaaaagaggagacaatggcatttatataatttaaaaatagaaaaaaagtcataacggcatttgaaatggcatttaataaaacgcattttaaaattgtaaaaatggcatttggaattgtggaaaatgcggtgaaaatgggaaattttttgcaaattttcaggtcggattttgctggacgtgccctgccgagtgtgccaagaccattcgtcgggcaaacactacggcatttttaggtctcaccgctttttattgttgtgtttttgggccagaattgaccaaaacttttagttgcgatggatgcgccggcttttttaaggtcaaaaataaaaatttgatatatatttttgtgtatttttaaaaaaaattcagcgctccgttcgccgacaaagggaatatttgtgcaaaaataagggaggccccgtggagggacaatgtccggtggacaaaacgcaccgaaatcagtgcagggcatgccgactgagaaagtgtttggagattggcatgaacaaagacggtgagaaaagtgggggaaaattgggggaattttgattaacggacaaaaaatttatatttattttttaaaatgaattaataaacatttaaaatgggttttggtcctttagtaaaatgaggaaaataaatcataaattgagcaagaaaatttaatttacttatccttaattgttgaactatttttgtacaattagaaattctctataaattataataatttcccaactaacatgtgccccgttggcttagtggcagagcgtctgtctagtaaacagaagatcgctggttcgattccagcacggggcattcaattattttttgaattttaaattaattaaatttgttttttaatttcgcagcgtttcctttttatatttttaatctgtttttagctttttccatttttttaatattcccttctttcttgtcattttcttcttcgcttcagctgttcaacacgaacgtggcccccgcacttcgacgcttcgccgtcagttggcgttcggactcagccagcagttggcccaacgtcaccaccagcggatgttggccaattctgcggccgtcaaaaaatcgctgcgtcttccgccgccgacgacggcaatggcacattcctcacggcacaaaggccgtcctcgtgccgggtgagcaacaaactgatt

SEQ ID NO: 19489 - DNA, 1038 bp, Heterodera glycines
  unsure (1)..(1038): unsure at all n locations
ttcgtaggatctgcgatcgtccatctcaatgtatggagtattctgccgaagggacgcaggaatgcgaactggtgtactgtcactacgtaagagaggaggactttgtgcggatgagcaaagagctcaatatcaccagcttataaggagagtgaatggtgtggaaaagcctataatgaaatgcaatgccaacataaagaaaataatggcaacataatgccaaaatagttttttataagattgatagtggaaaatcgccatccttcgctacaatgtctgataccgaggagacaaagtacgaaatgcgcaagaacgaggcgctatcggtgccattctctactcagacccagcggaagtggcacgagacggaatagagccgggtagaatgagccgaattcattcattcactccttaatactttctatcccttccccccagggcacactttcccttccgccgtttggatggtatgccaatgccaatgccaatttgatttggttctcacttgtccttttcagccaattggcggtgttcagcgcggctcactgaaggaattgaacggcgatccgttgactccgttgctgcccgcccgtgccgatttcttcaaagaacgcactttggaagaggtgatcccacccaatcaatcactgatcaatcgatcaatgcctttccataacattcattctcaaattctcaacttctaattaattccccgtggcttttctttttcaatgccaatgcactgaactgactgatttttaccttttatccttctaaggctcaagagcaaaaagtgcttccgtcaattccggtccttccgctgagttatggcgacgcgacccaaattttgtcgcgaattgacggaccaaaagtgccgccggaatggcagggaaattgtggcaatttctcttaccgtgtcggacccaatcttgtcaaaggccaaaggttgaagcttgaggttcaatccaaaatggagacaaggcgagttcagtgacangttccaataatgcccacttcagtacggcacaaatccccgacttt

SEQ ID NO: 19490 - DNA, 2007 bp, Heterodera glycines
ttcacttaccgaaacgcctcttggctcacttatccgctcttctcaggcgatacgaattgccttttgtcaacgagcatctcttcgacaacaacaatttggccgtgagaatggccaaatttgaaatgatcaatgaaaggggagtttaggttcacaaagcagtgggacaatattgggcggagctcggccgcgcattcgccgattctccgctgttgccaatcaacgccactgtttttgcgcataaacttttggccgactatgttggagctgtgaaggaggtgatgaatgatgaactgatcgtttacatgaatataacgatgcatttgactgatcaattgatcagtgagtgatcagaagttttgactgatcagttgatcagtgagtgattaaaaattttgactgattaattgatcagtgagtgatcagaagttttgactgattaattgatcagtgagtgatcagaagttttgactgatcagttgatcagtgagtgattaaaaattttgactgattaattgatcagtgagtgattagaaattttgactgattaattgatcagtgagtgattagaaattttgactgattaattgatcagtgagtgatcacaaggcttttgactgatcaatttatcagtgagtgatcacaaggcttttgactgatcaatttatcagtgagtgattaaaaattttgactgaccaattgatcagtgagtgatcagaagttttgactgatcagttgatcagtgagtgattaaaaattttgactgattaattgatcagtgagtgattacaaggcttttgactgatcaatttatcagtgagtgatttaggcttttgactgatcagttgatcagtgattagtcatcttaatccttcccattccttttcagtccgttttgtctcttcacttgcgttttcccaatgcttctgcacccgccgttcgtcagttgtccaatttgttgcagaacgtccgtcttttcattgagcaagcggaaaaatttgaaaaggaattgtccatggagaaggaaacgccgaaattggcacgggcaaacgcgcgactgcgcaagttggaccaatgttttgtgaatccgacgatgggtttggcacgagaagagccggagaagtaaggggacgatttggggaggggaggggagtctttttgaatgcttgtccatattttcgatcatcacattggtcccacatttctttgttttatttcgctttttccccatttttttgtcaggcgccacgtgctcttttcaatggccaaaggtgactcttaccaagtggacgtgatggccgcagttcagcagaaggtaaatgtacacaccaatcagcttcggttccattgcctctgatttatttgctcaaataaattaattggccgactttttgggaaaatttatttgttacgacagattgtgcaattggcgaatgccaaaagtgagaagcaaagggccaacagaggacgcgaattggcattggaactgacagtcattcagcaggccacgctttgtgcggtgagaacactcagagagacaatttgagcagcgaaagaatggcgaagaaacagacaaataaatgaccctaattaactaattaatggaaagtgacacattttgagatggaattgctgacgattgagaggcttttagccacaaatatttattccagtggataccctcgactaatttcactttctttccctttccgatcattttcaccgatcaaaaggatttgcccttttatttaataatccgtcaaaaaacccatttttattcaatgttttgattggttttccattttgcttcacatttcgcgaattcgtgcctcgtcaaattggtgattcaattaagtaaaatggaaaaatggtagtgatgttggtgaagtgactaatgacgaattatgggggggggggggggttggaagttcacatcgacagaacattcccagcaaaagtacgccggcgccggcggtttgtacgtgcgcttttttgtgatttgatttcgga

SEQ ID NO: 19491 - DNA, 1227 bp, Heterodera glycines
ctctagaagtccaaattggctgaaatggcattcatttcgacaaatgttgccgaacacttttatcttctatattatggctaaccaaacatcggcggacagggatgtttgtgccgtgccagaaatagcgccctctgcccttacaaatgatgataatgtgcaaatgagcaaaaaaccaattgacgccatatggagatggactaattccgatgataatgatgatgatgcttctcgagcattataacaaatgccgagacatttaacaattcgagaccttcccgagttttttttggtcgagagtcattttgttttgaaacgattctcgagacttgggctcataaatatgatggaaaatgacgagactttaaatgagtcaaattcgacacgttttcacgagtcgagagtcatggcacttccgtggtcaacaggaaacccggcctaatccctttttatttgtttctattgccctttatgacctttaagttcgccatatgctggcactatttaatttgtattataaatacgctgaaaacgatggtaaagcggcaaaaagtgccgaatgaagaagcatagggcgccactaccattttgagcgagacctttccgataaatgtaagtgccaaattgaccctgttagacggcggcaaaatgtgctaaatgccatgtggattaaaaatgttcttttgacatttacttttttaggattcattttccttttgcaaaagaaaaaaaaaagaaattgcagtaaatttttttatatttgtgccattctgctttatgtattaatgtggtgaaactgagcctgccaaattggctcttgaaagattaattatttgatgcagcccatttttaaaaattttgcacaatttttcttaatcaatttcattcaaatttccaaaaatttcctcggcgctgactagcgggcatcttcggaccctcattttaatgcagcattttttgaaaatttgatccccaaaaatgcaaaattagttatttttggcgaaaaacccggttataaaatcctgcttaatttgaaaaataacactaaaaaaacatttttttccccgaagagcaacaaaaaaaaaattcaccggatttccgccccgtcccactaaagttttctgcttacgagcctgagttagtacaattaatcctttttcattttttcaccaaatatagtgccgccaacttggcactttctgctgtttgttttaatgagctgaaattgag

SEQ ID NO: 19492 - DNA, 995 bp, Heterodera glycines
  unsure (1)..(995): unsure at all n locations
gagatttcggccggcgagattccgtcgccgagattccggcggcgagatttcggcggcgagatttcgtcccgtcccccaaaagggtgccccttttgcgtggcactggatttataattggtgtccaacaacaatggtttaccaatgcatgcacttacttttgagttttcttaattgccatgctttatccctcccttgtgccatgccgcgttccctcccccgcttttgttcggaccagcgcaaaatgcttcacgcatggcttgtttcacgcggaagtaaaaaaaaaaatttttttttttcaaatttaattcaaaataccaaaaagttaaattgagtttaaaaatcgaagtttctgttgctgttgcgtgactgaccacagaacatttcatgtgctttaaagcaaaggcctcatttttcagggttaaaatgcgtgggcaattttaaaattccgtaaaaatgatgaaattttgaagtttaatggcatgttcaaaagtacaaattggcttgcgaattggaaaagcatccttcaacataaagcattttcggctctatttcagttaatgagttcacttagtgaccatccttagtttcttaggctataactttccaaaaacttaaagtctacatattttttttttaataactactcgtcgagccgtcggaattccgatttccgcattttttttcttctttttttttgaggcgtcggcacatattccatgagtaaacattcgcttatgccaattttntcaattttgtcttatcctaccgatggagtagcgaatgctttaagttcacacttcatttagttcattcatttcatcaaatctttatactaaatcaattttttgttgaggttgagaagtgcaataaacgcacgtcacataaagtcgtcgtcaatttctttttttttncaatgaatgccaattgtacatacatataagcnacaatttgttggcacataagcaaaaaaaattttttttttttattttacacat

SEQ ID NO: 19493 - DNA, 1552 bp, Heterodera glycines
  unsure (1)..(1552): unsure at all n locations
ttacagattacacatttcttactactgtacatacagtccgcccattgaccgattggttgtcacagattataaatgatcacgattgaggctccaacaaattgcgcaccatcaaaacacatcacacgacaaaattgttgcacaaattttatgaacagaaatgaagtgaaaaattcgtcaatttaatttgaaaatatttataggaaaatggaaaagaattttccataaagtcacaggaaaaaagtgcaaaagataaatttgtaaaatatgagacaattttgctcttatttggatgggcaaaaataattttaaaaaagcaaaaagtaaaaaagagagaaaaaagcgaaaaggaagaaaaagagaattaattggctttatttttgttgcttttggtccacagcagcacagaaaaacaaatagacaacaacaacaaaataatgacgaaacaatgttggagaatacgggaccggggcgggaattcctggtcctccgaggtcccgattcccggtctcagattttgaaaagctcatgtcccggtgccggtctgttaaatgaattaaaagtgtattttgtttgaagcttatagcaagcagttttatttgacttttttttttaaatttcgcccaaaaatgctttgaaaatcaaagcaaaaaatgtccaacttttaattttttagaaaatctgaattcttagtcaaaatttacattaaccctgtttgtcctgaatttttaaatataaatactttccattcacaagaagataattcataataattaagttaagggtgaaaaatttaaacttttaaccattttatactcaaaaaagctggtcaagataaatgaaatatttccatttttagggggcctacttttaaaaaattaaatcgatccataagagatctatttttcgtgtacatatagaattttatggtggtgttttcgcagggttatttaccaaaaattgcaaaaaatatatatgccgaaatatttacactaacaccaaatattttaagcctgttgatcattcgattagtttatttggcccatttatatttaacttatgataatttaatcgctttcataaattcttatattatttgcgaatgttttttttctgtcatttcattatttattatttatttatttattattcatttatttatttatgcattcactttgctttgttgcatttatcacatcttctcatctcgttgtccaaagattcattccttgaattgatttggccttacaattatttatattccacattcatttattcaacaaacaaagcgactaaatatgtaacctaaaggcctatatttaattcgaaattaattttgattaattatttacatttaattatttaatactaaaaaataattagatgaataattatattacgctttanaaacatgcctgcaaatatatttcgaggtgccgaccctatggaagtgtttgataanattatcacaaatgaggccccgccaaaggcacgagttggacatgtaaaaactaagtttaaatacaataatataaatattcaatggtaatgcaac

SEQ ID NO: 19494 - DNA, 2369 bp, Heterodera glycines
ttattttattttcagcaatttttccaaatctgagcacttcggaggaaatgagtgttctgattgccagaattgctgagctgaatcgagtgaacacaattgaaccatcaatcgcaagcagatcggatgtgttagggcaagacagaaacggtaggaaatatttaatttttctggatactgtaataatccaaaaaattctaagtcaatgatgatgggacgaccagcttttctaacggtaacaacagaacaacaacaatcggcggtgagaaagttttattttttcgtttaattttttttaataataatttgttaaaagttaatttctgaagttcaattaaatgcaatttgaggagaatcattgcttcataaattataataattttttttaaaagacaagatgatctaataatgaaattacgtaaaatttatttatttttaattttcagacagaagaaaaatgacgaaattgttcatgttgacggtagtgaacattacggtaacagtggcactgatcggcttcattgcggtggtttaaatttagaataattccttcttcaaatatacgttatattcaataaagaatcggactgagaatgcacgaatcaccgcattggaggaacagcaaaagaaagatgaaaattttgttgacgttttgaaagaccgatttggaaagggtaaaaatgaaaatttaatttataaattttaatattttaatttatttttttgcagagcttttaaaagctgtgcatccggacattcgcaagaaaattgctgaggtggaaaagaacaaataggtttaaaaaataaataaaacgaaaatcagtttagaacttttcgaacccaaaacacaacttttgggatgtcaataccagtcacactgatctcgaaatctttggctcgggatctctgaaagtgcattacaaaggcgatggaagcggtaagtggattgatttctgattaagtactaaggatgtgtgcaattaaggttttccggaactaaaaaatctcccgaattacgagcgggttacggattttcgcaatttatttttgtccattgagctggtttggcaaaactctttatttggaataagttttttgggcttttactgaattatatttaaaaaaatacaatgtggaatgaattttatttatttattttttaatacaaataatttttagtaataaatattttatagaaaataacattaaggtcgtcgctctgtcttcgctaaacacccaattttgttctctgaatccggcattttttattttgaaatcaaaattaaaaactgcaaaaggtagcactaccatatgaaacatatgaaaatggttgatttttattttcaaattcagtctttgctcaattggactcgccaccaaagcgatgccattggacggaagtgttggccaaaattcggacagttgcgcatatcaaagcgatggccaattttgggccaatgggtcaacgaattttggaatgccaaacttttctcaaggcgatttcgtcggttgtggcattaatttggccactcgtcgggtcattttcacaaagaatggccaacctttgagttgcttattttattttaaattatttatatttcaattattttaagatacttctgatttattcctttcgccttcttttgattttccattgtttccgttcatttctttaaacaattctggcgatttgattgagacaaattttggaccaaaattcaaattcgaccccgcaaaagtccagcagcaggtgaaaatgagagaacagaataattataaattatttatttaaagtaaattttaagttaattctcaaatttccacgacaaaattattgggatgtcaatgcttgtaatgagaatctccaaatcattggcaacaaaagtctgaccgtccattttcacaaaaatatttctggtattttcactaaaaataatttataaattctattttttcttaaaaaaaggtttttattccgtcttcgctaaacattctattttgttgaacaaggatttgtccaaatatttttactacgaaatttcggtcaaaaatatgaaaaagtaagagatttatttttattttttttgaatatcaaatttagctgaacttatgaaagtagattatttaatttttcatttttcagttggatcaccttcggatttgccgttaaacagcagtcaaaatttgaatcaataattcaaaatggcacttatgcgtatcaaagtagaggctatttatggattaacggagaagaaaagagaataatttcccaatattcgtacggtgaggaagataccgtaggaattggcgtttatttgatcactcgacaaatcgtttcacgaggaacggacaatctttgggttggcaaataa

SEQ ID NO: 19495 - DNA, 1155 bp, Heterodera glycines
gggagtccaagaaaaaaaatgctattccatataaaccaactaatgaaaacgattgagtgcccgcaaaaagagagttaaccttttgagaagcgaaccgttgcattttgaaataattagggacaaatgagggattgggcaaaggcaaagttgggatgggagaaagcgaggtttgcacagccgaagagaagcggtcgcgcaaatcgaccccgaaatgttagccttagcgccccctcagcagatccgcggaatttttcattcaattcgaggaaaatgcaaacatcggacggacggaggaaacggacgcgtttctcaaactcaccacggagacggacaatcaacattctcatgcactccatcaagtcacgcgaataaaccatcaaaattcaaatgctctcttctcttcctcccccctccattggccatctctccgatgtttcccccattttccttcctcgtccatttgtccccttctcccctccttttgctccattatcctcgtctcattattttcttcctcctctttatttatctgcttctgatcaccttgtttgtcttctcggccaaaacctttcttggtgacccctctccgccgccttccctttgctgcgcctgcgaattctcttccccttttccctccgcctctccggcgctaagatttgcgcgtcgccggcgcaaattggtcaaatgttgacccatctgaccgaaagcacttcagagagagccaaaatcaacacgcaatttgcattgaccagccgaaattgccaagaataagcggagatacgacgaaggattagccaatttggtgaaggaaataaggcatgaaagaaggggagagatgaaggcgaagaacgaatgaaaaacggcggatgacgacgaatgaacgcttctcgggggacgagggggaagatgggggtaatcagtgtcaagagagagaggggaatgagtggccgaagaaggagataaagtgctaaaagtgaagtcaaatgaggaagagatggaagagaaaaacggaaaggaaagatggaaaatagaacggaaaatggacgaggaaatcggaagggaaagagaagggaagggaggggaagggaagggaggggaggggaggggaggggaggggaggtgatttttaggtgtgaatctgcggattaaaatcaa

SEQ ID NO: 19496 - DNA, 425 bp, Heterodera glycines
gaatgaatgggggaaaaaggggggaaaagggaaggaaaggggggaaaagggggaaaagggaaggaaagggaaggaagagggggcgaatggcaagagagaaaattaacaatttgtgcctatttttttttgatttttcttaaattcatcgaccgaaagattaacaaaaaatgacccgttttcagtaaggcattttacaataaatgccgaaattggctttaatgaattcttttaattacaattcccacagtcatttctctcctcacaattagaggacaaattgtggcaatgctcaagagtctcgggcatcattagcaattcaaagccgcaaaatggaggaaaacaatgatttaaagccaaggaaagaaagagcattttacgtatttaatttctcacatttcccattaaaaataaataaataaaaattc

SEQ ID NO: 19497 - DNA, 2382 bp, Heterodera glycines
ccaagcgccgtgtctcagagggagaaacggaagggggaagggggaagtacccatcccggaaaaaagaaaggcccttcttcggttcatcaatttagacgagatcgatctcgaataatttcattgatttgttaaataaatttggatgttaatggttcctgtgctagtaattcacaagatctttacaagttctggtcctcttcctaaggtcatactttcttggttccgtatccgttttttcattgacatttttctcctcatcggcttcaatttctggtcttgtttccggctctcgggcgtggatttcctctaaattttcgccttcccgggattcggggtccatttcatttcggattcacggacctttccgaactgacttcttccacatattgtgtcgtatcaaggcaccttttctctccaaatggtcgcgttcacatagtgcagggacgacacaaaatttatccacgctatatcatttcgttcaagtgtagtattttcgccttagggtagaaaaattagcataagtttggcaagtgtttctttacccgttcacttcgatggccaaattcttgtcctcgccgatcctctcgagcatgccgtccaagaggaagttgccatgtttgtactcgccgccagggctttccacatggcgaagagtccatccgttgtcgcgcatctcttcctcggcacgccacttgaggtattttcgtgcgatggcactctgcttcccacgcttctcgtagccaaggtgggggatgatggccaccctctctttgccgacgtgcgacaagaccacgaagaacttcatgcaggcggacgggatggtgatggagtcggtcagctcctggctcgttgcagcggcgaacaactcccgcattttgaccattccatgggcgagaatttggacatctgaagaaaattgcatatttttttcaagattttcccgatttttacctgctttacagtagtccgcaatgacctcacggaggtcaaagggcgtgttgcggttctcctcgtaccactgctccaacttcttgcgctcctcagggaagtgcccgccagggtagtagtcctcaagcggcggaagagtgtccagcacaacaccataatttgccgccttaattttttttttttttgattttatttatttattgatttttttttttttttaaattttaccttgttgaacttgtgtgggaagtactttttgttgtccactccctcgatttccaagccgaacgtcttcacaaaggaggccagcttgatggggatcagtttgtaactgaaaaataatcgattatttatgttattttacactttttacctgtcccggaagatggtggtagtgattgctcctctcttgcgggccttcatctccagcaggtgattcccctggcgcacgagttcgggacgcacacccatgcgcagcatctcgccgtagatcagcacgtgatcgtaacgtgacccttaaaaatcgataaattttccttttatttttgttaaaatttatttacctgcgtgtgcgtatgcataggtcgtcacagagcgcggtttctctccctcctcatcgtagccgagcatgtagttgttttccgcgtcgttgtcgtcgctttcatcgtcttccgcttccatgtcgaggaaggcatttgcagcaggattccgaccgttgttgttgttgtcaccacgcttccgtttgcggcgcttctccgcagggtcgatgccgaggacatcggcttcgaagtgcaggagccacttggtgaaggccgtcagagggtcgtccaccacgtaggctgtttccacttcagtatcgtagaactcgaacggcgcctatgcgaaggttctcgtcattccacagattccgcagctccggtccagtggctggtcccagatgccctttgcaatgcattccgtgcaagtgacgtgcgcgtagcagaagttcacctgaaagaaatacctaattttcgtatattttgtgttttatttacctgatgtctgaagcgcaggagttcggggtccggcttgaagtccgtagtgcattaaaaaagggagtaggggatgcgcgtgaaatgttgaatcttcgtactgtacggtatgtaatattattgtggcacatggcaggggagaaaaatcatgaaaggattcatattgcaatgtagatcgaaaaattagcggataggggttgcgctctcatttccacgaaaaagatccacgggcagttcaagcaattttactgttttaaaactaacattttgtttggattttttgcaaataaaattgaaatatacaaaaacaagttcttaaccgtgaaaaacaatgatttgattttttaaagaaaactcattgattcatttaaaatttgatgaggaggaatgggattttcatgca

SEQ ID NO: 19498 - DNA, 2934 bp, Heterodera glycines
ataaactgggtacaacctcctcccccccccccaaaaaaaaacacttttcacactcgaaatttttaattgaataataattccaaaccttgaacgaaaaatagaaaatccaaatttttgaattccgcatttttgtttcaaaaacggcttacgaattcgaacatttgaattttcaacttttttgttagagtcagtggttgtgaattggtcgaaagactccgaaaactacaggaaatatgttttatgataaagaaaatatatcctacggtattaccaaaatactttttccgttttggttaattttgagtgcgttatgtacttttacagcagagactgttgtgctgctgccaaacgtgcagcaaaggctggcaaaattcatttggcaacgccggaagaggacgacgaccaagcaatcaccatcaccgtgaccagtgccaagaatggtgccggcattggtggtggtggtggtccgccagaagagagtcagccattgctcagcaaacagacggacgagttcgacggcacggcatcagcagaggggggccaagcggtcggtgggggttcatcaacatcatcagccgtttaattgccatgtcagcggcggagaaaaagagatggccaaacaacagcaaaaacagagagaaaatcagttgttcaaggacatgataatgttgtaataatcacagagttcccctttttaagattaaaaaaagtctccaaatctgattttggccccccccccccccaaaaatattgtttttaacacaaaatcgattgagaaatatttacttaaaaacaacatcaatttttaattctttgatatcattttgataacctaacaaataagtgttttttaatagctcacaaaatttcaaaaaattttcatcaattttaaatgtgcttgggaactctgtaaaaacgggagtcttttattaactatcacgtgtcattttcataatgatggtgttttgcttcacacattgtcaaattgtttttgttttttgtatccatttttgagagtgttttgcttaccctattttgctaggagttaccattttggaatcaaaaaaatatgcggaatatactcggatgtcattcattattttttcttttttttaccagtcagcaaccaattaggtaattaaaaatggatacaattgcatgagaatgcacagcgcccgcctcgctaaaatcgccatttacacatatttatttccttgtttagttttccgtttagttttttctccctttcatacctctttttaaatgttttcttttccccacacatttcgatacattttaatcaaatgcaacagggtttagactagagaccggaaatttcaaatttgcggatcccgctgcgggactggaactcaaaattttttgcgggacgggatcccgcgggattaatcccgcaaatcccgcatttaaaatttgcgggatcccgtgcgggattgcgggattttggaaaattcgaaaaaatttcaattaaattcaaaaaatttccaaaaatcaaaaaatgctgaaaaataaatttttaggggctggcgggatgcattaaaaggggctgatgggtcgactaagatttttcgattggatccgacggtaaaaagttgatcggaaatcaaattattaacggttcataaatatgactatttttttcttttcaaaaccacttttttgcggtgcaagaaatcggaaatttttcaaaaaatatacaatataataaaaaaatttctaaatattttaataggctaaattttttaattcttaaccaagtaaaaggtatttcacaaatgtttttagtatattcgcttgaaaaaattcccgcgcgtgatccctttccatgccggtctttattctacataaatccccacaaaaaaatcttttttttcattcattctggttgatataaataaaagataattttttttaaatggatagcctttttctccctctttgtttcatagcatgataaattgtcctcattttcaacaatggcgccgaaaaagcgtttctccgattccgtagtttatgggtttgagagagcaaattctgacactcagaatctaaactttcgtttgataccaagaagtaggcattgatcaagtaagaaaaaagttatggccaaagaaactgaggatgatcgatcattgattggatgcccaaagtgcaataaagccgaattccctgctgcttctacactgctgctgttcagcatccagcaaaaatgttggatttagtaaaaggtggataagtcatagggggtggaatggaatatggtgattgtgggacggagataaggaaaggggcaggggtaggggttgctgctaataattacttatacatacaagcggtgagagggagaagaagcaagcccatactgatgccatcttcagtagatccgaggatgcgatataattaatatacacagagactaaattgttggatgaatgatgccggaattggtaaaaaaaatgaatgaggtaaagccggttttgtcccaatgaatgggagagagagagaggaatgtgtccatggaactccgtgaagcagcagcaaattaagtgatgggaaaaaataattcaaatccaaaaaaacatcggaatttttcaaaacgtaaaaggtgataattaatagagaccgagatttccaaatctgccggaccggaccggactggtattttcaaaaaagaccggaatctggatccggtctctcataatccggtcaatccagattttcaaattgccggatccgtaaccggattggtaaaaatttaaaattcagttgttaatttgggaaacaacccgcaaaatgtcatcaattaaatgtacagaaattataacagtttaataaaacgaacaaataaatagtttcaataattgtaattcatttggggaagagatttgttcaaaaaaataagtgatccttaggcaa

SEQ ID NO: 19499 - DNA, 2747 bp, Heterodera glycines
agcccgtacttggccggcgaggttcaccaggccgggcccaccgaattggcccacgtggcacttgttggccagggagcaaaattgacggacgagaaggcggttgcaatccaagcagtgctctgtgctgccattggtcaaactggttcgtttattttaattttgaagaaaaaaaccattaaaattaaattttttttaaaatatcgttaaattaccgactttccgaatttaaaaaaaaaatatcgcaaaattgctatacttttccattggtttaggacaatacactgacaatttgaacattgcggcgccgggcgttgttgcccaacatgtgttcaaggcgtccaacctcaaccagttccagctgagcccgatcaatttgctgcacccggacactggcgttgtcggcgtttatctgtcggccgaagggaccaaagttctgccatttgtcaaagccgctgcccagggcttacgcgaaatggcatccaaaccgatcagtgacgagcttctccaggtgagaaaacattgttttggaatgcccttactgattgcaaaacgaatttggcaacgaaattaccattaattccattcagttaaaggttttaagcctagtagttccgatttcgagtcctgtcaggatttccctgaattttttccatcaatgtacctggggtcatggtcactaaaacaaggttctattatatagcccggaaatccaattcgtgttcaattcccgaatccttatccagactcttggtctttaaaaattctttccttttatggcccaccatcatttttttgatttttttttatatgacaaaatcccaaacagatcgccaaacggactgcggaaatgcaaacattgaccaccgccagctgttcgtcatcgtttgctgctgaccaggcgtgccaattgttggccaagggcaccgcactgacacccgacgaattcattgcccttttgaagacagtgactgcggacgatgtgaaaaaggtgaacccaattttccaattggatttcattacaaccgctaaatttgtagcactacgtcccccccccccgagaatgtataaaaaaaactttgatttttttcttgaaaaatttctatgttagtaaaaaaatttaaaaatttctcggggaaaacgatgcgggggaggaaacgagctgctcccctaaaaaatagggttcaattttccatttgaatttttcaaatttcatcttttaaggctgcttcccaactttgcgccaaattgtccatgtcagcgtacggaaaagtggaccaagtgccttacctggaccagctttaaatgtgacggacgaaaattttaatgagtgattgaaaagggtcgcgccgaaagagaggcatatatataaaaataggaattgcattcttctgctaatatgtagtgtttcatttttttgtgtgtgttcccgattctttgttatgtgcagtaaaatctgaattaagcgaattgttttcattttcacggttttttttcgcgtattttaaacaattttttttcttattttccgattgtttgttttttaagcaattaacaaaactttttgcatttgtaatgttggttggacgtgagccggaattcatcaaattggagtcgttgctgagctcggcactcggtgcccgcgctgattgtgacgctgctgctgctgctgatgatgagccaaaaccgttggccgtttacatttgcggaccgccggggaccggcaaaacggccacagttggggcggtggtcaaaaaattggagagcgcacacaaggtgaggttttgttggacattatactgcacttgcttttgtgcatttcaaagatttaatatgactcttgcagttcactcgaccgtaaaaaagacactataatttgacaattttaagcgtaatttcaaagaatctatgtttcaaaaaaagagccaaaaatgttcggaaaccattttttctaagttttcttgtcctaacttttttttgaaacagttaaattctttggaattttgcaggcttgagctcttggagctatccaaatgatgcaatgaattctagaaaaagttttatagtgaaaattgtctaattttttattttatagccgtgtaaattgcaataaactttatcacaacgacgtattttgattagaaaatggcaccgtttctgcattttttgccaatttgaattacaaaattacagtttgagtttcaaaaacaattttgagtggcgaaaaatacggacacaattccttgaaatttaagtttcacttcgtttctgtcaactgctactccacacagtcatcgtccagtttggcaaaggaagtgctctccaaattgggccacaacgacgtgacggcgaacagagcgaatcggaaactgggcgaagtgttcgacagcaccaaaaagccaatgtataattcaaataaaatgccatcatattcaaatttgtgccaagttttttaattgggtagtttgcgaaataatatgtttaaatcgaatttttagtctcattttgttggacgaggtggacaatttgcagagtggcaagtcgaaacaattgctgtacactgtttttggatggcccactcagtccaatggacgcgtaaccgtgataggtactcaaaatgtcatttttaatgtttttataccaaaatccattttttacaaaattttgggttggcatttatcagtaaatcttctttgttcggttataggcatagggaacaccttggatttgacgcagcgacaaatgtcact

SEQ ID NO: 19500 - DNA, 3557 bp, Heterodera glycines
  unsure (1)..(3557): unsure at all n locations
atataatttaancatcatcggcatacatttttatgcccctttttgccgcttcatttgtaataaaggacggcagatcatttctaaaaattaaaaagagtaatggccctaagacacttccctggggcactcctgaaaatattctgaaactgtctgacaattcttcgccaattttaaccttaaaactccgattttttaaaaagttagttaaaaaattatgaatttttccttcaattccaatctttttgattttttgaagtaataaatcaattggaacagaatcaaacgccttgacaaaatcaatatagattatgtcaatttgttgattcttttgtatagaattatatatatcgtccaccatttttaatatttgggttgtagtcgatttattttttaaaaacccaaattgttctttatcaaagaatcttgtactgttcagaaattctaaaattttgctactcaaaattcgttcaaaaactctacagacagtgctggttaatgaaaccggcctataatttaatggatcagttttttcaccttttttgaaaattggtaccaccaatgatgttcgccatatttccggaatttgaccggaatccaaaattagcctaaatatatctgctaatatttttgtaattggttctgcacaattttttaataaaatgtaaggaacattatccggtgaagtggaattacgccggggaagtcttcttaatatattccaaattattcccgcattcaattcaatgtcagaaagtttaatcttattctgtgttgattgagtttgtggaccattaacaattgattttcttaaaagacttttgaaatatttctgctaatatcttacatttttgaacattgctggaaaacatatttccagcattatcaattaacgtaggaatttcattaacttttgataacttatttcgaataaatttgttaactgaattttgcccctgggaaataatttttaactcttgttcatttcttaatttgtacaattgttttttcatttccctagaaataattttgtaatttaaaatgagatcacttttttcagggaatttttttacaagcttatgcaaacgtaatttctctgaaaataagtttcttattttttgaggatacgattgttttattatcgattttagaggcctattgggtataaaaatatcatataatttcagaactttatttaaaaattctttatatttctgttcaacggtgaacactgagtttattgataaatcaattcgattttcaagtaacgcttgacttaatttcgaaaaatttatatttttaaaatctctataaacattagaattattacgactgaattttacttttattttaatccgaccattttgtgatcggaagttgaaaaattttctagaactgtcaattcattaattaattctaattcactagtaattactaaatctaaaattgctttttctctggttggttccttaacatgctgtatcaattgtctttggtgcataaactcaattagagaattagacgccttatcatttattttttttactttattttcatcccataatatatttgggatattaaaatcaccaccagaatatggtattttcagaatcgctttggtccgaaatgaatttgagtagctttttagtattctgaacgttacaatttggtggacgatatatatttataatttgtgttggtttttttaaaagtaatttaatgtgtataatttcactttggaattttgtcccagagaaaagtgtctgataagggatcaaggtttttaatagaattgccgatcctccgccctttttttcagttcggtttgcaaaaacaatttgatattggccatttatcgtaagttccgcttctaccgtatttctggagtttaaccaggtctcattgatcagaattatagtggggtcatattttttgactatgtattctaagtcagatattttatttgctattgatcgggcatttattaaaaggcaagaaatccagggattattttctaccatttttccaatttttttgtttggtttgctcgcgtgtccctagcgagttctgagtgggcgggactctctcagagatctgatctccaagtcaaccacaaaatacttatactcacctgcggcaatattggcctgataggcttgttgccggagggagtataatattttgagctcgctttgagtcatatctctgcgaactttgatgtgttggggcacattgggcaattttttcacagcattacggaaattataaatgaatttatcgcgcgaatatttgtccgtaaatggcacttttaaaattcggtccctttttacccctccatcagtccgcgtccttgggtggcgatgaatgtccggcgacagtttgtccttgacaccgcattcatcggcaatttgctccaccagcgcccgttcgtcgattgcctccggcaatttttcaatgactgctcggttggccttctccttaagctgctcggagttgatgattgcatcggttatcatccgtgaaacggcgccattcccagcgaagggcggcggttgaccccattggagttgagtgccgttgttggaagtgtgtgccgatggtgaggatgagatatgctgggggtcagcaaatcgattcccataccgattctcgcccgcaattagccattccaccaacttttctaacttttctagtcgttcgatgactgggaccaatgtggggttccctgacccttctaacatcttttcaagtcggtcgagacgggcgagaatgtcctccccctcatttaaatttggggaattttgccgtcgttttttggtcatttagtacgggaatgaaatatttggagaatgaaaaaaaagaatgaaaaaaaacctaaagtgagacgtgacaatttttggttacaaccccatcagcagcaaaagtgcaaaaattgttggataaaaaaggatgggcgaacagaatgacagtgagtgcaaaataataatgaataaaataaattcaaaattttaagaatgttctaaaataaatatattatagaaaatcgaaaaagtaaccaaagacagggtcattttttgacaaattatgttaacaaatcgcattaaaaattacaaattttcccgacggcgcctatcggcaccgccggcccccctttcttcccccaaaagtcttggaaaaaacgcgccgcgaaaaaagcggtgttgaaagcaaaaaaaaaaaaaaaggttaatcaatttacatggcggacccagacccccttgtcttgcaaaaaatctgaattttagtgttctttatcctgaatttgaaaaagaaggctggtcaacctgtacatatacttctgaaaaattctaatgctaaaaaacaagcactcgcgtgaaaattgaataaaaatttcatatttgaaaaattttgtccaaaaatttttacgtcggaaaattaccggtttttaccggtaccgttaccggtaccgatggaaaaagttggtaccggtaccggtttttgcattaccggtcagtaccggtaccggtttttttacaattaccgattaccgctcaactcta

SEQ ID NO: 19501 - DNA, 2866 bp, Heterodera glycines
aatggacgagttgcagaaatgcccaaaacagaaagtgaagagtgcgcgagggaagggactgttgtgtgccattgaattggacaacggtaagtcggaaaaagaaaggacaacagagagagagaagagtaagagagcgagagagagaaagagaagaggggcagacagacagacagagagagggcgagaaagggaagggggaaggaagagagagtaagcggagagagaggatagaagagagagagagagaacggagaggaaaggataaagagggagagagagagagcatgtctgtgtgcatttttcaaaattaccctgacgaagaatcagtattccgggaaacctctgacagaatccggtcattttctgggctctacaaaaaaataaaatgtggaaaatttgaggcattgacgcttggcaaatgtgccttcgtctaatggacaacggagtattggcaaaacaaacgcacgaacacacaattcgatttgctccgccattggttggttggattgaaaaccaaaaattaataatattccatcataattttaattatttttcaggtaattaatgaaaaggacacacgaacagtggccaaaatcatcggacggacattaaatgcattcgattgattgtgaaaattgtgacactaatacatatccaccagggatgtgccgagccagacaaaatccgattccgattaaatcgccgattccgattatggccaaaaatccgattaattgcgattccgattcggcacgtccctgatatcatccactcactacaaaagtaaactgtattgccatgaaagtactatatatgtttttaacaggaaaaaagagaaaaatttaacatggtcctacattgcaagatttttacaggcaaaaatgttgacttttaaatctcccttaatcagggcgaagtggatatcttattcttgttcaatgtgccagaaaacggtaatagtaccgatttaagaattttttgcgacgcatttttccaaaaaacttttgggaaatgggcgaggggggagggtccggcggtgccgataggcgtcgccggaaaattttttgtaatttcgttctgatttgttaacagattttcaccaaaaaatgccaattttgcaattaaaagccaagcgactttttttcacttttaaaaacgcttttttgcggggcccttcttccaaaaattttggaggacatggggacccggcggcgccgataggtgccgccgggaaaaatttgtgattttagtacgatttgttaacagatttttgtccaaaaaatgaccaaattttgccaaaaagcttattttcttgataaaataatgacattataccataaaatttcaaaaattatgagtttatttaagaaatcagaacaaattttggtcgctaccccaaaatcagaacatttctgacaaatcagaacatttttattttatcagatttggaccctccaaatcagaacattttattttatcagatttggaccctccaaatcagaacattttattttatcagatttggaccctccaaatcagaacatttctgataaatcagaacagatcacacccctgttttatatggactaaaaaccttcaccaaatcaaaaaatgttaatgcagaaatgctatttttaagcccttttcttcatagtgaaaaggacacacgaacagtggccaaaatcattggacggacattaaatgcattcttgtgaaaattgtgatattgatatccacaaaaataaactgtaaaactatggaaatactgtatagatatgggactgggtcgttttggcgcccacgttttggcgccagcgcgagtttttttattataacttttttcattgttggccaaatctctaacaatcttggtatcaatcgaaagcccttcacaagctctattagccttacaaaaaacaaaaaaaaatttagcttgtaaaaaagttattaagaaaaaacttccaaacttttgggtttttttgtaattttatgttataacttttttggtaatgtctaatcgcgaaacaatagcttagaaatagcttctaaacacgttaagctttcgaatgataccaagaatgttaaatttggttaacaataaaaaaagttataatcaaaaaactcgcgctggcgccaagaatgtcggcgccaaaacgaccccgcacccttaccaacgcatcccaaaacgccaagcacatctcataaccgctaaaacgaacttttgcgggattttcgaaatttgaaaaattttgtccaaacaagcacaaaaagtatacttatgtatatacaacacgtacctctctaacaacagaactccaataaattttttatatttttcttgtaaaaattttgtataaattacatacagtcagggaccaaagtatttgagcaaactatgcaatggaaatcggcggctctctcgaagatgaacctatgaggaggagaaggagaagaagagggcaacaacaacaacaacaaaataataacgatgacgaagacgatgatgatgataatgatggtaacgaggagggagacgacgatcacggtcatgatgctgataatgaggaagaagaagaagttggaacaaatcggtcggtcagactttgctttttcgacgctgaaacgtcccaagatttaccacttcaactgcgtacaaaggttgtacagaaacatgttccgatgctcattattgccgaaattatctgcgaagcgtgtataaatgaaggaatttcggttcattctggtgttggacaatacgcaaatgggtgtgtgtatgtggtcctcctgcggaaccagggggcgtcgctggtgtctcctcccgttctgaaaggacctggggatgaacatgctctaccggccaacgtcc

SEQ ID NO: 19502 - DNA, 1182 bp, Heterodera glycines
  unsure (1)..(1182): unsure at all n locations
cagaaaagtgancgcattgcggcgcaaactgtcgcccatcaaacgacggaatccgttcagcttttggtattcggaaaagggctgaaacagagggggaaattcgaacaacagttcgggatttctgaccaggtcggcaatatgagtctctcccactcggaaggaccactttgccctctttgtacgcctcgttgtgcttgtcaatgaactgtttggcgctataaatattgggtatttcaatttcaaattaatttagtattttcagctaacctcaaataagtcagcatccgttcgttctccacttcttggtccgcgtatgctttcccttaatttttatctcgtttattttccaattccttatgacttgccatgcttctgtttgtaagcattccaatcggaaaagccgcgttcgctaaatcatttttatttttaatagatttttaaataatcatttttcattattatggccattttgtccatgccattcccatccctttttacatcatttgacgaagagcagacattcgttctgtcggtgttcgaatgtccgttttccgttggccaatgttctgcaattcgatcgattcgtccgagtcggccaattcaattgcacgctcgcgggcacgccaactgaaaatggcataattagcagcaattagtaaagtaatttcataatttattattacccatttgtctgaagtagaagcattgataataagaaaagaagaaacattttacttgctttataaaattgggagaattgaaatatttgtctgtctaagctaaattattttttaacataattcttttaaatttcgaaatatgactaattagtcatcatttgttatgtaaaaaggggatagagatgatgtgatgcgattttatgaaaatgaatgaattggttgtgtcggatgatgaatgtagtgagagtgtcccattggtgagtgaatgttttttagttttccttgcaaatgaaagacgcaatttttggggaaagggcgggggaggcgaaggggtggacagcaactgacttctccgatgccttaggacgatgaagattaatgcataaatagagagcttttgcccgctgtcccctccctccattcatccgtctttcgttatcgataaggaaaagcgattgggggaggagagagagagagggaggaggagttaatgaggggggag

SEQ ID NO: 19503 - DNA, 1395 bp, Heterodera glycines
  unsure (1)..(1395): unsure at all n locations
ggcccttttcccgaatttggcnccaattattcctcgccatatttcactcgcaccgccacttattccttcccgaatcattaccattggcaaaacgaccgtttctacagtgccttctttcgcgcgtcttaccgtagtactgactacagtcccgagagtctctacagtagtcggatcgcttaacgctgaatgaaaataattctgctgctgctggtagtcgcgcaaaatgcaaagcaaagaaagtgacgatttacaattaatcatttttactgaaatgataaaacaattcactaacatgatatacgaattgtgtaggttttttgaatgtttaaaaaataaacacatttattttttatttagtcaatttttgagtaacaaatccgcatcaaatagcaaaatgcaaaaaaaaaacttttaaactcacgaaacactcactcattagttatgtatttgtaacaaaaaaaaagtaattatttttttcctgatcatttcataaagttaaaagatttatttgttttgccattcttttatttttattaaaatttttcatttttattttcttcataattatttgccgattcggaaaatgaatcatcatttataactttcctaaccgaacatcatcaattaattaattaattgctctccgccacctctcttttcggctgttccgttgcgtcgaatgttttatgtaaatttctgcgctttttcaattccttccaatcgcccgctttgaactgctgctccaattcctccaacgatttgccgtgcgtttcgggcaaataacgccacgagaaaaacaacgcacaaagtccgatcagagcgaaaatgacgaaggtttgcgattggccgatcagattgaggaaaatatgaaaataaatttttttgaattgccaatgaatgggaaattttacgggaaacatttggtcgagaacgcaagcggtgccatagacggccaaaatcgcgacgccctttccgaagccgcgcatatccaacggaaatatttcattcatcaaaagactgcaagggaattgggccgagaaacaaataaaaaattaatcattggctgattaattcgctataatttgtcaaatttgtgctgtctttaacctggcaaccggggaacagcttccctgcacaaaagtcataaaaacgagcagaaggccaagcgtaatccaaccacgggtcaaatcctgcgccagcagcgcagaaacggcggcgatggccaaatgcacgccgatgatggccacctgcgcgaccatcattagccaacggagggacactcgcgggaccagccaaaggccgacggacattgcgancacggcaccatctgacattntggacgannttgcacaatttaatggcgggggataattgaaaaatgaacgaacaccgatc

SEQ ID NO: 19504 - DNA, 3177 bp, Heterodera glycines
  unsure (1)..(3177): unsure at all n locations
ttttgtgcctatttcgccattttgacgatttttcagatttccggaaaattcgttaacaanaatgcaataaaaatgaaaaatacaacnccctaagaatcgacttgaaaattttttagaaaataaacncctaagaattgaaaaaaaaaattcacaaaaattgatcctcaaaattcaattattttttaaataaaaatttttggtttaaaaatttatttttatcgaaaacaactttaaaacaattgaaatatgtataagcaaaataatttttattaatttttacgtgtttcactacctaaaaagcgttaataaaaaattttttttgcctatttaatgcctattttgcgattttttgtgcctaaaaatcgcatccctactaattagagtaggctttcatttcatcgcttcattcattcggtgaataatggatttttacattaaataagaaattattatatttatttatttcattttttttatttttacaaatttttattggtgaatagagaaaattcagtcatttttcaaaatttttaatcattttgttttttaaataaatatttttgtctttttaataatttctgttcgagaatgtctgttgatatcgagaattttaattttcttaaacaattttgcttttaaggacaattaagggtatattcttctgcaaattgagggaaatgcatttgattttcctactgattttgccaatcctttggccggccaaccatcgaatgccatggacaaaaagtgccaaaacattctgacaaaatgccaaacgactcaagcaaaatgacaaaacactctgacaaagtgtcgaatgattctagcaaaattcccacccaaattgccgtcgggacagattattttttgctcgaaaaatatggacaaaaaattctaggcaaaaatagcaaacacaatgaacaattgaaaaggtcattatagggctaaagaaaaaaaagtatctgctggaggaagtttttgctaaaaattcaaaggtaattaaaaaagggtgatgtgtaggacagtcgcttgtgggacccatatttccaattagttgatgggtagagagaggagattgatatagatcatcaatagtaaatatttttaagtgtttgctttaatttaatataggattcctgatattaaataacaaataaaatttttggaaaattgatcaaaaatggggaggcaaaccggactagtacctgtttttcattaaatttgttgtttttgccttttcattttcaaatgcttttttaggccgtctttgcctcgcgttacacaatcctcgcgctgttgaaaaagttcaaagttctcaacataatattttttggcgattttggaatcggtgccctctgggcatttaacttattttaaaaatgtttattcttttgccaacaaaatttatttgcaattttctctttaattctctgacttttgagcccaatttcgaaagatcgccaaaaaaaaagaaaagaaaatactgtttaattcgtctattctttgcagaagaaaattttcaacaaattgaagcgtcgtttgggcaccgaagaggcgaaaatggccgatgtttttgccaattggtacttttggatttttaaggttcgcttttcattttttgggtcatcgaaaacctttcttgttttcccatggaattccaattaccaaatgttttttagcatttgcctttgccttatctgatcagagtgatggactgttttctcgtggaaggtgactaatttcgcttaattattaacacattgcaattttaaaagacaacaatttttactttggtcagatggaaggattttttatgaatttcgtgggatttattcctcataaaattcggggaatgctttgatgtgccttcgcttctcaaaatttttactaaattttcacccaaaaatgaatcattaaaacggtttaattatttgttttgtgtgtttgtttaggtcagaaaatgttggcccgtgccgcactgaccattctctatttgtggtccaaacagcaggacgagccgcacaaactgaaaatgatggccaattccacgcccaccgcaacgccaaaggcaccgccgctgggcgccgccgccaattcgcccctcgggggccgaacgaccgccggcccactcgaagaccagcaaatcttcgacatttcgacagaggtgccattngggggtggagatttcttttttattgtactgtagtagggaccgggagggatccaaatgcaattcaccggtgggggtcataaatttaggggtttcctttggccttttgtaaaattatttaaaacagttttccctaaattttctctcatttcacacacattcacattaaaggaaatgaaatgctttcctttgctttaaaatcacttcattcagattttgattaccaattaaaaattccacgtattcaattaataataacattttttcccctttttttgcttatgcattattcatgagtcataaaaaaacatatatttttttcatacgctcctttcgtaattttttctctaatttcatagcaattgcttagaaaagggttttctattcatttacacttttgattgggtttcccaagcaaatttttggctttttctctttatttttaatttattttttctctaaattgccaattttgctttcattctcagatttccgacgttgcctgcagaatgccaatttcggtgcaaactttcctcgacattgggtcagttgatatattctatatttttcaattaatgccattttttgcgcagtttttccatccgtcgttttggcaacagttttttgtaccgtaaacagcgccattacgaagccaaatttcgtaatttggtggctcgacaaagggcacaaaagaacgcccgacaagtggacgaccgcatttatacgccgggtaaggaaattcagaaattaactgagtgggggggggctgaaaaccgacaaaaaatgcaccattattttcatgcttccgccgctacaattaagcaaaatttttcccatctttttttggccattttatgggttttttcctttggtggtgatttttaattgtttcagctttctcttctcaaattgttgacgaagaagtggccagggaactgatgggtgcactccccgcgcggttggtccctttttatcataaaaatttaggaattttttaaacaactcga

SEQ ID NO: 19505 - DNA, 2281 bp, Heterodera glycines
  unsure (1)..(2281): unsure at all n locations
cactattttttactatttcgacattttttggaaaatttctcaacaaaaatgcaataaaaccaaaaaatacacccctaagtaaaaaatttnacaaaaaattaggattttcttgaatttttaagtcttataaatcatagctttttggtgagatgattcatctcttagcttctgcttaatgattacttctaatcttccaataattaagaaaaaattcatccaggtttcattgcctttttatcgaccgaaaattttattttttggcattttcttctgtaaaactcaaactttgcctcaataagtcaaaaaaatcacgaacaaaagtcgcaaaaactcaaaaaagtcataaaaatccgaaaaagtgtaaaaagtcaaaaaaagtctcaaaaaatgcatgttagaagtagggatcggatttttagtggcaaaaatcccaaaataattaactaaatagtggcaaaaatagtggcgaaaaagttccaaataattacttttaatagaaaacttttaagctctgatggggttttgaacaagcccaatttcgagaaagaattactcgattgagtaaatttcggcataaatttgaagagaaaaaaaggattttcgatgagagacatattttgattttggcagcaaatgtccgaaaatggcccttaagaaatgggccgcaaatgtccgaggcgcaaaagacggaccgcaatgaggaaaaagaaaattgcagctgaacaccatcagaaacaacaacatcagcagaagcaagaacattggaaggaggagagacggaagagaaagagaggaaaatggaggagaaaaaggagcagcaacggaacaagtatttctaatggatgtcggaaatcccccgccaaaatcccgaaaaataattgtcacatttttgaaaggaaaattcattcattcgatagatagcaaaccattttatatatcttaattcatttcttctgcggctgatcactgtttttgttcttttgtccgtcactcatttgtcagcagacgacgcccctttttcgctgctttgtcccgcttcttgttcttcttctgctggtggcggagacaatggcctaaattaagcgaaattttaattatttaaacaaaattaaatgccttttttaattgctcacccaatgcaattagtgtcactatcaagccaaatgatcacagtgttccaattgttgccccaattttcatctttctgaagctgaacatccgcggcctctccaattttgcatcgcttcattatccaattctccaagtcattttcgttttctttggtcaatgtcagcttttcctttgtccattcgttcaccaattcaaacggcaccatttgcattgacggcacgcgaaaagaaaaatgaatttggtaactgacggaagaaatggcattggcacggagaaaatgctaaacaatttgaaaacaaaaatataggcaatcaaaaatcagtgatttgttgaaaatgttgggccacacctccttgaaattgttgatccaatcagtgttcgtttgttcgtagtaattatcgcaacgcaatcgcttgggttgtccatcgtttctcggagagtgcaaccatttggacaatgcttggccagcagaaattgttgcatttggcccatcaaaatcaccaccaaacgcagcgggcgacaaatcaccggaattgattgaattcaattggttgagatcggtgagaattgtcggtgaaatgagacgacgcaaattgtccaaatcaacaccattggtaaagcccaaacagcgaatgtttgtcgaaaaaatgggccaaatttcacgacaaaaaatgtccaaaatcggctggccattcgtagagtgtgatgatggaatccacaaatgtaaattggtgcctcttttgtcgaaaatttggtgatttgaacgaagaaaagcgatgacggagtgatcaatgtacctaaaaatgggatgaatgcttttattgccataaatctctgattccgaattactcaatctgaagattcttaaaacggattttgctgggcaacggacggtcgggcaatggaaatggcacaaatttgtcatccaaccacacagatagtttcggttctggtcctttgtccttgcgacgaatttcgattgatctccaaattgtcaattcgcttttgccattgaaatgtttgtccaccaacgcattgaaacgtggcgaaagaagtgccaatttgaggccaagttgaggacggtcaaaggatgggaaaatgtccatccaaacgtcgttgcaaatccaactgaaatgggaaaacagtttag

SEQ ID NO: 19506 - DNA, 2208 bp, Heterodera glycines
aaaaagataaggaaggcacaatgaacgaatgagtgaattaatggcacacattgcggtaaaaagtgccgcgccaccattcactccccgagggcacagcggcaaaatgcaatcaatatcaattttatctgctgtcattaggcatatatttgtgtttgtttgaaaatgccgccagcgccgctcatccgaaacaaaaaagtgcggtgccgccgacgatttgtgcactgcgcgccctcccctccccccgcctcagggcatttatgcccggagggacgggcagataattagcaaattgcgcgaaatattgtgccatcgccgtcgtcatctcgcgggagacattgtgccaaattgggtatcaaagcagcgtgcttggaaaatttggataaataatggaagaaaatttccgaaatttaaattttttgatatttaaaatttagtagaaattcaaatccaaaaaaaattgtgccaaaaatgtctgacgattttaatcggctgatgtcgtcaaattccattcacaacatcacacaagagacggacacttgtgacattgagccgtggattgaagactgggtcagttttggaaaatttaaattctttttaaattttaaaatcagagtttttcaagcaatttgtcagatttttttaatgaaaaaagcatgggattaaattggataaaaataaaaaaattacaaatgtatcaactaaagcaatgctcacttttgttgtaataaagataatgtcgtgggaattgctcagccagcccaatacgctaaacccacagaataagaagcggagaacacaacaattcttgaaattttaattggctaatcaaaaaatgcctgaaatactcccgttgaaatggatgcattttggctcaaaatttccaaaaatttataaataaaaaacaaaattattttaattcttcatatctttcgatagtactaaatattctctattatcctgccaaaatacaaaaaaatctcgttaattttccaaaaactaatgacaaacaatgttagaaaaacctgcatttttgagttcctctggccataacttttttttggaagctaacggaatttttttgaaaatttgctggctaatagtgaattcttagagctatccaatatcaattgcaaatttgctgctttttattccctatttaggcattaatttggattaaaaaaaatcatccatttttagcatgaaactccaaaggcacgttcccacacgacgccgtcggaattttaccaatgcatgagcaacaacagcacaagaattgaacttgtatgcccaacatttgaatttggcgctgcttttttcaatttggcattttgtattatcccccaaggaaaagccgaagcagcagcagaaaagcaccagcggaggcggcacttctctgctgtttcgccgaatgtcctcaaatgacattgatgacagccactttttgtgagattttaaatctcgctcgaaactgatcggggcttaattatgtagttaattatacacgattagcatttcaattttctttaaaaaattccacaaattaaatccggaaagttttccgagttttcgatttgtttagagctctacttttagactgataaaccaaaatttgtcacgtcatttctgaggttgaaatttagtggtataccttgaaattcgaattttccgaaactcgagattgagaccgagaattggctccgagagtcggtcaaaaaaattgggcaaaaagagtgttaattaaccccaagaatcgaggtccgagaattgagccgagacttaactcatgaccataatctcctcccgagaagatttgataccaagaatagaagccaagagcagattattagccgagagtcgagactgacacccccaaaaagccaaaggatttctcgggtcgaataacttggcactttctgcgcttgcgaaaaaagccgagattttcccagcctatctatgatcgggatttaccatctctgtccatcttattaaggaaggacagcccaacgccgtgggaagagcagcatcagctgccctttgatgcgatggtcggcagaacgccgccgacgggttggcatttgccgacaaagacggacatggcaacgccgcaagcgaacatgctgaccacgctgcggggccgactccgctccatcgtgttgtccaaagccaaaatggtgaaatgggaaacaaaatttttataaaaaagcggaa

SEQ ID NO: 19507 - DNA, 2727 bp, Heterodera glycines
ttgccttaggcaacattgggcaccaaccatcccacaatttccggtgaacgaccgacgggggtgggcagctacgggttttgcaaaaattgaaatcccggatagagaggattttgcgtgaataatccgccaaatccggtccgaacaaatgtgcaattcttatttccattgcaaaatgtaccgtaagcgtgccttgggcgcagccttctttcattttcttactgtacaatccccgctcattttttcaaaaggatctttaacaaaaacagaagcgatttaggatttaccaaaacaaaaatggtattgattaaatatttgaaataccgcgcatttggcgttatgtttttttttgtttttgtgattttcgcaacgccggtggccgccgtttccaagaaatgtcagaggtcgcttttttaaacgtaaaatttgttaaaggtttcaaaaaattcacatttttacatttctttcgtgcgccccttcaccaccaaatcgacaacaattttcaaaaatgggcacggaacatgacgatgacgatggtgaaaaaggggtgcaacaattgttggaacagttcgtcgccgagggcgccgtccaattgggccaattcacgctgaagagtggccaactgtcgccaatttacgtggacctgcgtgtgctcgtctcggtgccgaaaattatggcatggatttttttaaaattttttactattttaaaattgttttgctaatacggcgtgaaaacactaaaaaaaattttaggattttaatcacataaatcacatatagtcaatcaaatcgtgtccaaaaatggggtccgaattctccggctcttcgcccctctgctgggacccaacccaacctccacctgcatattcaagaaaattcacatttgctgttgtttctcgcattttcattttgttgaatttcagtaaataattttagggaaaatttcgatttttatcccaaatttctgttggatttttaatttacctaaacaaaatgcatataaaaaatcactcttctcactcaacagaaagaagctgctcgctgtctgtgctcggccattgaactcgctcagctcgactttgattacgtggttggcgtcccgtttggggccattatgttggccacagtgagttgctttctgacccctcggaaaatatgaaattttcaattcaaaaattagggacgattttccgtaaattggaggcccaatttttgttagaatttgctgaactcgaaaatttttaatttattgtccaaatatatctcaaaaatcgacattttaggataaattaacactcataaaattctccaccattttttagttggtctccgcctcgttggacaagccgatgttgttgaagcgcaaggaggccaagacgtacggcaaaaagcagttgatcgaaggccgtttcgaggcgggccaaaggttcgaacggcggcgacggtgcccaaattaggctagcaaaaaatttttaaaccggatttcatatttttacaaagttttcacgcttattcccctcccacctgaccgtccgtcatccctggcctcggagttgaattagttttttaaatgctcaaaataaaaaaacttcccacccttttcggtttgaaagggtaattaggaaatttttaagaaaaaatttgtttgaaaattttacagcgatttctatgcaaatttttgagaaaaactattttgaaaaaggcgctttaaaaaaattgtaggttgaaattttctcataaatttctaaggtttttctagatttgcaaaaaaaaaaatagaaatttttccggggggggggagggacatggtgacgcacccaatttaggcagttttccaaaaattccagcgcactgatcatcgaggacgtggtcacctccggtgccagcgtgttggagacggtggccgccctccgtgcggttgggctgcgctgtgtgcacgtcttttgcgtgttggaccgccagcagggcggtgagcagcgactgggccgggaggcggacattgttttacggaggtgggggccaaaggggagggggttttctaaaaatttacacaattttttcatgttttttttaatatttgggagggttcgccaatcctgaagaacgggtgtccctaatttttaacttttttttaaatcttgggctcaaaaccagtttttagggggtttcgaggctgctgattacgtatcttaactctgatttgcccaattccgaaccccggaccttaattcgaacaaaaaaatgagtttttttcaagaatggattttttgaggtaaaagcttctaaaaaaatatttatttttttatttctttcaatttgttttcctttttttgtaagcatttgccgttttgtgactcggtttcctttatatatgaatttttaattatcaaaatttctcttttaaacaaatttttccgggtttggacaaaattttttccatttttcaaattaaattgaatattttttcagtttgctttccatgggttcgctgttggactttttggagcagtgcgggaccattgacgcgggcaaaaagacgcaaattgttcaccaacttcaaaacccgatctttgacgacagcgccacgcatttgcaggagcaaaaaacggagaaaaatgaaggtcaaacggaaatgtttttttaattaatttttaaaaataatttttgtttgctttttatttttccgtttctaaaattagaaattgcattattctttgggtatattagt

SEQ ID NO: 19508 - DNA, 797 bp, Heterodera glycines
agaattctaggtttctctttaaaatttcaaaaaacttcattgagcttaaaaaatgttatggccaaaaaattaggatttaagattttttttaattttataaccatatctttttttatacttaaaaaattgaaattaatattcagataaagaatagccataagctttgaccaggagatattagccaagttatgaatgtttatgtgtcacattttttgtttttataccccttggcagatttacgaaacgcccacgttggcggatttacgaaacgactcagcacgcgtgttttgtaaggggtgtcctcaatgaggcgtgtgaaaatttttgacctgtacttcctctgctggacggcttgtttattttattaataatagagcttagttaaatggatttgtttcttaaatttcaaagaaatacacttctaaacaccgaaattttggaaagaaaaaactcgaaaattgtcaaaaattatatttttggttttcgtgaatttaaagaatcttcaaaatttcatagtttaataaaattttcaaaattttttgcccattgctaattttttttgtatcagttaaaagaaatcggtttttaaatgactctctaatctgattttggctatgaaaaatagaggagcacttctgaaattcaaatttaagaaggaaaataaatgggcttcattcaaattcgaaagaaaaaaaagtcacgtgctgcggatttaaacaaaaacactcgctcaacagagtcggcgtcagtaccaactgcgccatttgcacgacacagagactctttaaaaatgattc

SEQ ID NO: 19509 - DNA, 2051 bp, Heterodera glycines
  unsure (1)..(2051): unsure at all n locations
attttntaaagagaataagaaaccgncgaggaggaaattgnaatatttaactgaatcttgttaagattttgcatattaattcgcttcaaaaaacatttctttcaaaaattatcattaaaaatctaaatttctccctgaatccaaaaaataagatgaaataaggacaaagagcttaaataaggacatttcaaatttgtaagatttggaccctcaaaataaggacaaatcttacaaataaggacaaagggtaaccctgacctaaattgccttttttagcatacaaaaaagggtcttttcaatgtttcatttttaacaacgcacaatcgcaccaattacacaatggaaatggacgaatttgtgagaaagcaaaagttaaaatatgaagcacaacatacaactgcatcatacacatcagtgatgccgcgggttgagaaaattttcgggtcgggcactcaaaaaatttcgggtttcgggtcgagaaaaacctcgggtttcgggttggcatcactgatacacatataataattgtgaaatgaacaatatttcggtgtcacattatccattaattaatttaattaattcattcatttctgctgctgaccactcggcccaggggaagcgtcgagaagactaaaacaaaaaaaatgaaacgatttaaatcggaatcattttttgttcacccattgtcgattccgtggtctccaatgccaatgtaaatttggttccactggtcatccataagcaattccttccattgtttctctctctcattctgcgcaattggacaacgggtgagcacaaagcgttgctcactactacattttgacaatgccaattgctccccagtcaattcgttggtcatcaaaaatggcgttaacggcgaacattgaaagaaaatggagaagccaacacgagaagaagcaatggaaaatgcctaaaaatgggccaaaaagtcacaaaaaagaattgcacatggttaaaaatttcatcagtcaccgctttgaattgttcaattcttgacgaccattcattcgctgataaattcacgttgtactttagcaccttcggcacaccgtccggacgagacgaaaacagccatttgaccaccgcttgaccatccgtcgccatggcactgtcatcgggcggaaattcgggcagaatgtcatcgccactgaacatgacaaaacgaagcgatggataatcattgagaatggcgggtgccaattgacgcattcggcgaaaagcgaagttcggcaaataaagcagacgaatgcaattgcggagcagtggccaattggtggacagaacgaacgccaaaatgcgaacattttcagtgacaattgtcaaatatgttggagatgaagcgaaaaagcggtgaaaacggccgagaaatgtgagcacattgtggtcgaagtaactgaaataagaaaaagtgatcaaaatatttcaatgtatcgccattcttacgagaacgtaatccgtttgaatccgatgactttgttgggcaacggaatctgagggattggcaaacgcttcgaattggcatcgacaatttccatttccttcctgccaaacaatcgcttcttctctcgaatccaaaattctttgtccaatatccatttgcgtgttttgaaatgttcgtccacgcggcggtcaaatcggcgactgatcagagcgattccgaggccaagctgagaaggcggaagtaaagcgaacacttcgagccaacaatcggcggagatgaagctgaaaaaaggaatttttcgattttttcaaaattttcggatttttttacatttcttttttgttttgacgtcgtcgttttttgacattgtcccaaaagaaccaaagaatggtgccacagccgaccaacagaagagacacaacgtaccaactgaaaaacgaattcggggaaatgactgaataaagaatggaaaaacaaagaatgggccaaagtcattaaagccaaatgtggaattttaatttcattttgaagttttaatggggccgaacgatggggtaaattttcaaataaaattatgaaattcatt

SEQ ID NO: 19510 - DNA, 2851 bp, Heterodera glycines
atttttaaagctaacaataagcatatctcaattatccgatggcaaaggaaattaaatttctataaaaatttaacaggagttaatttattagaaaatccatcaaaaaataatcggcttctcctcgacctattcaaacagctgacagtttgccaagttctttttaaaggaggcactgaagcaagagcccagctgtgaggttgaacccgcagaaaaggacgacgtggcatgcattttgtacacaagcggaaccacgggaagaccaaaaggtacaaatattctttaggttttttctagagtagaccgggatctggtactgaaagacgggacaactgagttcctaagtcccggtttttcaacccgaaaaggtcccggtccaggttttgcccaaaattcctggtcccgctctactctagttttttctaatgcaaaaatcccagaatttttcttattcagtaaaaaaaaattacgtattttttcaaaagatgtccaaaaaattcctagagaaaaaatgttatctaaaaataaatctaaaaaaactataaacattgccaatatgtgcaaaatccaattatacaaaaaaattccaaattttaacaattgaaaaggtgccatggtcactcacggcggtttggtggccaatgccgagacgtgcactgacatttggcacttcagcgaaaatgagtgaacagaatgccaaaattttatttaataaattaaattattttaaaaaatacagtattaatttgcacgttttgcccttctaccacatccacggcctgttcatcagcttcaactgcacgctaatgtccaagtcgagttgcattttcttgcccaaattcgacgtggacgaaacaattgcgtatttgcccaaatcgaccgcgatgatgggcgtgccgacattttacgcgtcggatttttttaaaatttttttttagtattttttctagacacatttagaaaaaagtaaatgctttttcatcatttttaaaaatttcccaaaacttgcggtttatctcccgtgtaaaaaatttttcgagggacaattggttaattttttgattggtttttgcccatttttagtcggatggtcgaacacgcgggactgaatcgggccgcggtgaaaaacatgcgcgtgttcatcagcggctccgcgcaactaacgccccaagtgtttgagaaattcgagacgatgaccggcatgcgcattttggaacgctatgggtgaatttactaaaattttaaaataatgcgtgtgcttaatttatacatatgacagaatgacggaaacattggtgtccacatcgaacccgtacgagccgattaatgccagaacttcgggctcagttggccaaccagtgaagggggttcaggtaaatgttgacaaaagcagaaaaaatgacaattttcaatttaatttcaaatttaaaggcccgaataaacgtggacggagtcattgaggtgaaaagtccgagtctgttcaacgggtatctgaacctgccggagaagaccaagcaggaattcacagcggacggcttcttcatcaccggcgacatgggcgaaattgaccaaaacggtgaagtttatttattattatattaaattttattatttttgaattaattaataatggagaaagaaatgaatttagttaatgtatgaggagaaaataccaatgaaaattcgtaaaaagttaatgaattttttaaaacgattgaatgtttaagtgcctttgtcacaccccaaagttttggaaaattaaaaaaattatttaaggatttaaagtataaatttctgttgactttttctgctcccataaatgatttgttcgtgtaattataaaacttaattgtttgtttgttttttaattaggcttcgtttggatcaaagggcgccaaaaggatttgatcattacggggggactgaatgtttacccgccggaagtggaggacgtggtgaccaacattttcggcgaaaagctgaaggaatgcgcaattattggtgagaaataaattattattaatttcgtaaaaattcttttttaaatttaaatccaaatttattaatttccttaactttttactaactcagaaaaagtacatttgttttctaaatgccaatttaaatgagtaaaatcatttttttattttcattttactaattatgccgtatttccgaattctgtcgttggcattctcttccttaaaaggtgttccgcaccccgactttggcgaggcggtcgtcgccgtctgcgaaccttccgatgccttcgcagaaaagctcagcggcgttgcgcaccaattgacggacgatgagaagagtgccttccgtcaaacattggcaccctacaaaattccaaaggctgtccaatatatgccgttgccacgcaatcaccttggtcaatcacaataatatttaataaattagatggacatttgagattggactaggtccagagaatgattcggacttggccagggttttttgggctttttcacagaaaaatgatctatgcaaaatcgatcggtggggagaagcgagagtaaatgtatagcaaaagtgccaacccagtaaatatttactagagaccggacgggatcgggatcccgcgggattaaattcgggatcccgacctcgggatccgtcccgaaggattttttaaattcatcgggattgatcgggatcgggatttcatctggatcccgaaccgggatccctcccgaccattttaccaatcccgcaggatcccgcgggattgaagtcacgataatttttagaaaaatctccattttttaaattaagatcttgaattttaaattaaaaaatattgccatttgttaatttttcttaaaaa

SEQ ID NO: 19511 - DNA, 1602 bp, Heterodera glycines
tatatagtatattatgtatttgtgcttttaaaatatacaattttatttatgtaaaattattaaaaaattcaatattaaataaataaaaatagataaacaaaaataatagtatgtattttataaaaagtaaataaagtgtattttatacttcaaaaattttggtttataaatggaactgttgcatgaacgctgttggatttttttgttgaaaccaaaaaattggaatttatttgacccaaaatttttgaaggttacgacaatattcactgtaggcttgtcaaagtaaatttgttcattatttgatgagttttacgcaacgaaaaatagggtcaacaaattcaaattttcaatataaaaatttatttaattaatgaatttaaaatcagttgtaaaacaacaaagaataatcagtgattattaatcactataattttttgaatgatttcatacattaatttttaattgtaaattatgaggtaattatttagattgatgataattaatactaatgagtgaggcaaatcaccaccgatttaattccggtaattgcactgatatttattacactctttttttagcatgggaatattaaaaacttaatattggcaatttatttactcttctgaaaaaagcgatacttgtatccaaagtttatgcttgaaagagttttaaaaacagttttattcattctcaaatggcctttgtctgcagccaaaaccttttgttataataaaatggattttatagttttttttcttcgtttttggttatggaaacccctattaacaatggacactttagtacccgattcgtttacataaaaaagggcaagtgtgcctctaatttgcatttttctcatcgttttgggccgttttaaatcgattccgaccattttaaagtaattttaagtttgagtcctcaaaccggatatttacccttttttgtttttcattttttttgaagggaagaagtaccctcaactatgttgaaatttgaggattttttggttttatcctacgacccttaggctaaccgagcttaaatttttatcagacatacttaacaataaacattagcaaataaaaatgtgtttttttatatctttcccaaaaattgtccaaaattttctgttactctaaaattaaaacaaaaactaaatttaaattcttaaaaaagaatggatttaatcgacttgataaattcagatttcattcatcttaacttataaactcggaaaaatcacatataaaaacgtagttatcacccaattcttaaatagaaaaattattttttgtttttccaattcaatccaataattggtctgtaaaattcggtccacaaaaatggctgtttcttctaatttttgtttgcataaaatggctttactactatattagtattacattcatacatgtatattttcattatttttatattatatatgcttcggaaaaaaacatatattttgaattgaggccgagacgttaaacaaccctttcgtaaattttcacttaattttatacaataatgatcttctttttttacatattagtttacaggtaacttggaagtattttaaaataacattatttatatgaaaaa

SEQ ID NO: 19512 - DNA, 1178 bp, Heterodera glycines
cttaagtgtcaattctttttcgcatcacataaaaagaaaaagaaacaattggcaggaccaataaaaagcaaaagagaaggctaacaaaaaaaagaagcgacagaaaacgtaaattaaaaatgctaatgaaaaagtaccgtataaaaggcaaacgaaggaataaacaaattaatgaattgtgctgtttgacattcattatttttctgttgcaaaatttgcataattacataagttcggcaaaaactgaataaatgaaatgataaagaaaatgcactcacagactaattaactaatgaaaaaaatatattcaaatttaattgccgcagggaatgcccctcccccccctgcccaattagtttactcagttgtccgtgttcaggtcccggtcccgctgcactctagtttttgttttccccattcccccatcgttgtttattcagtactgctggggacgacaaatttcttagaaaagactaaaactttttttcaattttgaattgaatagcccacgtctttcaattcattcaatgttggcttcttcagctcatttgtcagccaattttacgcttcacacatttgttatttaagcacataattttcttccaattcctctcataaataaaacttggcattcgttgactaaattcacatgcaaaatttttattacataattctgctaggccttttcatatttccattgctcaaaaattataggtaagggaaagaaaaaagaaaaaatggtcaaaattgcttcaaaccgcaatttttagccgaaattcaatcgtttccgcttttgcctttcgttaaaaataaaattcatggattgcacttagacaatgacggctcctctccatcaaagtgggggagagaggagaggggaaaggggataggagagagagggagagaaagagagagagagataggggggggggggagagaaagagagaggaggagagaagacagagaaaggtgggggaatagagataggggataggagagagagggggagagaagacagagaagggcggggggatagagagaggggataggagagagagagagagagggagagagagagagataggggggagagagaggaggagaggagaggggaagagaatagagagaagggtggaggataaagagaggggataggagagagagtgagagaaagagag

SEQ ID NO: 19513 - DNA, 3155 bp, Heterodera glycines
ccccccctttccattccggtttgattttttctatgctttcaaagcgcacaaatgcattatgttgaatgcttcggatgtgttcgagtcgatgttccgttttgatggcgaaaacgcaaaggaaaaaagtaaaaaaaaaaattggaaaatcctttcaaaataaaaaaaaattaacgagcatctcaacacttttggcacattgttcggctgagcagtgaaaagccatttggccaatgtttgtccatccgacgccatggcactatcatccgtcggaaattcagtgaagatatcgccggcatataaacagacaaagcgaagtgatggacattcgcagaaacggcggaaataatccgtaaacgcaatgccataaatgtttttaactacataaaaatgaatagaaaggactgattgaatttatttatagtcagtcgtcaattttacgatataatgattgatgcatttgaatccgatgactttgcgtggcaattgaatttgcggaattggcaatcgtttccaatagttattggcaatttccattttgttggtgccattttctccaatgttgggccaaattcgaataaattccaatgtccatttgcgcgtcttgaagtttatatccatatttttgacatccctactaatgattgtgacttagatttaaatggattaaaagctagagtttaagacaggagaggccaaactaactaaagaataacaattggtcacctatttacatacctaacataagaaaaaagagaaaagatcctgagaaattagcaacgatttaaataattaatttaatttcaaaatgaaatgaaaattgctcaattttaagtatcgcttgctaccccataaattgtttataaattattaatcgcgaatttaatgccaatctttccttctcaatgtggctgcttataccttaatttttcctacagcattttgtgttatttggcatatgatttgaacgaatcgctttcaatcctcctctgccattgttaagtgtgtgttttttaatcacttgtacaattacaaattttgcccattttttggcttcactttatgcaattcatctgtcgttgattcggcgctgatcagccaggcgacttatcatcactgatcactgatcgaaggatcaagttttttggtgagagggcaccgaaaatgagcgtcgtttttttgatttcatttacgaattaattatttttaaatttgttataaatcatctaccgatcatcctaattgctgcattttatcacaaagtaatatgatattaaaaactaattgttcataagttatttttattaaatgaaataattacatttaaaattaccttttcaataaaattaaacagataaaatagaataaattatttgtctgatgagtcatagataacaatttttagagaaaagcggcgcttccccccacccaatccgatggttcggcttaatcacccacaacacattcatttacataaaccaatgtttttattttattttcacttatttttactgcttttattgcatcggtgtgtcctttaacagaaattcccattcatttccatttcaactctttttttggttttttattatttttaaataacttttattttattttattaaaatgcatcgtgatcatacggaaaggaataaaaatgcttattcccctcaccaattgccatctgacgagtgttaagcatattaatcgcttaatttaattcatttagacagttcaaagccactccccccattccaatcttttgcttgtccgccgattacgatgcttcttcttcgctctgtccctcttctgtccgcttgcctttccttctttggcttccttttgccgcctcccattggtgcataaaaagagcaaatttcggcaaaaaacactttcattcccaatttcttagtcggcctgcaatgcaagcagtaccccgagctggagccggggacaaagttcagcaccgaaccaaaggaagtggactgtgaagggaaaaacgacatctgcacggtcacgaactgcaaggacgggtcgaatggtcgacaaaaattaaaataataaatttgaatataattttaaattgctttttttgagtcgccatcccatggtacacacacggcgactgtgacattgagagtcgctttagctgcgacaaattgggcgcacaatgcacggccaaaggtggcactttttgttgccacacatgcaaagaagacctgtgcaatacggaggacatttggtaaaaaagtgaagtgaccaattaatgtattaccgagaaaaacagtcgaaaatgccattgtgaccggcaaccgaacatttatttatgtggggaaagggtaattttaaatggaacgaaagttaatgatcagcaattagtgagaatgggaggaagctgaccgcttacgtcatccaatcttttttgaccgttttaatgtaaaaattgaataattagtaatgcattcattcttaataaaccgagagcataaggaatataaattcgagatgtttccaaactatttttgagtcctaacaccgctgcgatgcgtgccggacagcaggtgatcgcacttgtggtgccgttgttggtcgctgtgtttgcgatccatgccgccaaaagtttaattaccttattttgtactaattgaatttttgtcccttttcatcgaagtcggcttttgagaatggacattggacgacgcttttgctgcgcaagaacaaacagtgccaaaattttgagaaagtaccaaaaaaatgtgaccaatttttaagggtttaataattattacaatttatatatgtatcatttatgttatttattgattattatttttgtaaaaagtgtttattttttgcataccttaagaattgtaaattaaaaggtttcactcatttgcaattccgtaaaaaaataaataataattaacatgggtaaaaattccaaaaaattttgaaaatccccatattatcttaaatatttacttggaaccctcataaatttatcagtaagtgattatcttttaatctcaaaaagaatgaaaacgaaaagtttaaaaaggaaaatatcagttgaaaagggacggacagaacggtgacgggacgttagtcaaaaaccatcaaaataattttatgcgtagctgatcaaaacgggcgttagtcaa

SEQ ID NO: 19514 - DNA, 2977 bp, Heterodera glycines
aattagaagagaaaaatgatcatgatgaagttaaagagtttattgatgcgcggtatgtttgcccacaagaagcagtttggagaatttttgaattgcctatatatgatagaagccattgtattatgtctttgcctgtacacctacaaggtgaacatatttgttattttgacgagaatatggaagaagagattcgtgaaagaattgcgaatggttctgagttgatggcatattttgaattgaataagacaaatgttttggcaaaaaatttattttatcaccagatacctgaaaagttttgttttaagaaaggaaaatggacagagagaaagacatattttaacacaattggccgaatggtgaaggtgtcaccggctgagccggaacgataccacctgaggctgttgttgttaaatgtgaagggagcatgctcctatgatgatttgaaatcagtttttgatactaatggcaatgcaaaagtttgtgaaactttttcagccgcatgtttagaaagaggtttgattagaaatgatgaagagtggaaaagagcattagaagaagcagagagttttgagatgccatggaaattgagagagttttttgcattgattttagtccattgcaatccggccaaaccggaagagctttggaatatgtttaaagactcattgtctgaagattttagcaggaattttagaaaagaagtagcttatgctaaagcttatagagaaattgcacttagcattattaagactggaaaaacgcttgccgattttccaaccatggaacagataaatgttgatgatgatgttgaacaagtgtttgacctagccgaagaattggatttgggacaaagaagttatgctttgatgtatgatgaacaaaggaagattagtgatgaaattttgcatagagtatggaatcctataaatgaacctgcgttctactttcttagtggaccgggtggaactggaaagacacatgtgaacaagacaattgtacatatgctgagaggacagaagaaaaaagtttgtacaatggcttttactggcatcgcagcaactttgctgcctgctgggagaacattgcacaatagatttggactgactttggatatgagtaattagagtattagtccaagctcaaaagcttggcaagaattgaaagaaacagatttgtttatttgtgatgaagcgcctatgataaataagcgcgcaatgagaactttggatgagaaattgaaagagataatgaataatggaattgcatttggtggtaaagttatgctttggacgggagactttcgtcaaacccttccaattcagaaacatgccacgagagctgagatggttagttcgaccataaagagaagtgagtactggaggttggctaaaagatataaattgacgaagaatatgagagctcttgcaacagagcaagaatttgcgagagatttgttagagattggcagtggaaaatggaataatgaaaatgatgagataattttgcccgagaattgtattagcaatggcgatttagcagaagagatttttggtcaatgcattgtcttagaaaattggaatgaaatggccagaagtgccattttagcaccgaagaatgttgatgttagtgaaatgaacaatagagttttggatatgttgcctggagaagaagttgtgtatacgagcatagacttagctcaagatgagaatagacaaagagcagatgattatttggatgagtatttgaatgctttgaacccttcggggtttccgcggcataagttgagactgaagaaaaatgctattgttttgttaatgcgtaatttgaatatagaaatgggtctttgtaatggtgcgagaatgaaagtcgagcaattgcaaccaaatttggttgtgtgtcagattttgactggagacaaggcaggtcagactgtgtacattcctcggatcacgctttgctgttctgaagattacccttttgacctgcataggcaccaattcccgttggtgttagcttttgcaattacaattaataaggctcaaggtcaaacccttgagcaagttggaattgatctgaggaaagatgtgtttagccatggacaattgtatgtggctctttcgagagcaagggcttggaataagttgagaattagattagatgatggaaatttagagagaaaggtaaagaaatgttgtgtacagagagttattagataatagtgattagatatgtgttagactagctttggctttagatttagtattgtattagaattggttttgcttagacaaatctgttgttttttgtgttgctcaagacagtgcgaacacaattcaaagtaagtcatccttttaatttcataattaggtaacctttctccaaataattgttcataacacatttgtactacctagcgggggatgcgccgaaggcgctgactccgctagtgtatataaaaagaggggaaaatgctaaaatagcttaaactgttggcccgtatccaagtgttgtggttggtgtgctgtgtttgcttttaaaacgaagactggtcagaaagagaagtgacagaaaggagaaaggaagcgaaagaatcgattgaacggagaggaaaatgccgaagagagagagaagaaaacgggaaagaataacacatgggaaagagagagaaaaaagggaaagagagtgccaaattgagagggtgacgaagagagaaaatgccatgccggaggaatggaataagcaacgttttcagcagtaaagaaagaatgaccggtcagcgaaagaaaactagtgggaatttagaggaaacaacagagagtgagaatgggagagaaagagcgagagagaagaggagagagggagagagataaagaggagaatgagtgagaggggggaagagagaaaaggagagagggagagagataaagagagagagagaaagggggagggggttaaacttttcaaaaatgaaattgat

SEQ ID NO: 19515 - DNA, 2500 bp, Heterodera glycines
gacaaaaatccaggaaaatccaggtccaggaaaaatccaggttgccgaaaaatggcctggacctggatccaggaaaaatccaggcctggatccaggtccaggtcgatctctagttgttagcatttttcaccaaaactatgcgaagttaatttgcgattttcattggacttctccgtgaaaacacttatttgttagtaataatggtgatagagatcgaaaattcctgagaatttcgattcgagcccaagaaagagtttaatgtttacacattccgaattctttaaatttttatttggtattttttttatttacttagaaccatgaacatagactactgatcatgctcatatcatacacttcacattaatataaaataataaaaataaataaataatattgaaaatatttgaaaatattttctttttacttttcttttgattataaatgcaataataaattggttttattaaatatatattttttacaatatgttaaattaaggtgaagcaaattaggatatttgttaagtgttctttggtgactcacagattagaagtgcaaaagatatttattttattcgagattcaatttctgagaaaagtctaataaaagagtttgttaatttaaaaaaatttctttaatttattttattattatttttttggttctccggtcgaattcgaaaactttaatcaattttaaaatttctcattttattaagatatataattaatgaatctcgcaattgttaaattatgtcgctgtttaatacaatatttttcctttgttttttttctctttttatcctttccttttgcgtccgtcgccttaaaaggggcgccccgcggcgttacgaaaggaaagggaaccgcccaactcgccgaggccaactcggcgcgaattttcgttgcggctttatctcagccaaactcgcaaactcgccgtaccgaattggccgtggtgagttagccgtggcgaagtgacccaacccaaaggaaatgctcctttttagctgttcctttggtgctgcgacttattctttggtctttctttcttatttttctctctctctttctctctttgtcttattttttcctttctctgtctttctcctcacccttcctcacactatttcgcggtcactcttttcgttctgtctccaatctcttcgccttcactcagctcagctaatgtccgtccgtttgtctgtccgtccgttgctccattctttctcttcgtctctctgtctctaatcgtgtccctctcccactctctctcccctccgtccccgcgctctctcttccccccccccgctctctccctttctctctcccatttccttttctaattctattgatttcctcttacatatttttggtctttccttcctctcttattattcctagcattattttcgccatcaaaaccctttaatttctcaattttcttctttccccttcattcatttgttagcttttccattcttcggatagctaaaaattaatctttcttgaatttacctaatttctgagtcgcaaattaaaattgaaattttaatgtttttcctatgcctcttaatgtcttattagggggggggggggggtgagggaggcaaagagctccctgaaatacttcaaaaatcaataaaaaaattttcaaaatgaaaaaaaagaagggaattaaggggcggtggtgctaataggcgccccttaaaaataaagatgagctcattttaaatttaggctgatttgacctctcaaaaaagcataaaatgagtctcaattctcgcagttggctgtgatctgatcttttcatacttttttttaatttttttgtcttttccatggaaaatatttatttattggatcatttaacaaatttgaaaatttttaagtgataattataaaattaaattaaaatattttgggcttcgaaatgaaaggtcggacgaatatgccgcttgaagcagtgctggcacttgtccatatggtcaaggctcgccagcaagaattacgcaatcacacgaaggtggggggggggggatggcacaaattcaacaaaaaaagcattaatttataatattacatttattttcataattaatataattatttcatttaattttcattattattttgtgttaaaaatattatttaattaatttaattttaaaacattaatttattataattaaagttgtacgggtctgggaattttggaaaaaccgggacttgccaggagggccagaaaggccgggagtcccggcccgggactggcgcctgaattttcaaccgggacggggtaccgggataaagtgggaattttacaaggaaaaaatccaaaatttaaatttaatattttttaggtgaaatattataaaattaaactttcctattgtttttcatttcataaaagctcaaaaattaataatttaataaaacaaaaatattgaaattaagcatcagcaggtgtcatgccaactcgtacaaaaggcaactcg

SEQ ID NO: 19516 - DNA, 1100 bp, Heterodera glycines
ctatttttgtcggtattttaattaaaacaatttatgattttgaccaaacatttgttgacttcttctcaatttggctcatttgagtgcttaataccattttaaattgtggcgcttaatgacaaatttcgtcgaaattccctccccccggcgcttgcctcaacccgccgcttatctctctgtgtgtataaatttgtccctttttggccaaatgtcatcattctcccgtaatattttcattgggttttatttgtacctaataaaataaaaagaattaaaatataaaatttaattattctcctaaacgttcttccgattgataatgaatgataattaggggaagggtcgctccgttcctaaaatttattacccacagaataattgggctatcttttgtctttggcctcaaaataatctttttcccggctgtcactgcccattggttctctcaaattggctgaatacccaaataaatgaggcaataatttggcaatgggacaacaattaatttattattcagtaattaatacccataaatttaatagtaattattcaattcaccattaatgttttttatcaattccaatgtttcgctttttaaaacttaataatcagttttttaattcaatattaatgaacagaatgtacaaacggacttattatatttctgttcttgtcgtcgctttcggcagttcgttttctttttacaggcaatttctttacaaaatttaattaatgtttataatttttagttatgatgttgtaaatccggctcaaaagtaacatttaggctaaattaatataaaataaaaattaataaattattttacgttttccccttttccgcttaatttttaaatgacccccccccccccctaattagcattgtgatgagatggctgaatgacacttatcgggcacggggacaaccaaaatcggcgtccgagcttgactttgtttggtctgtggtggtctccagcatcgccgtcggcgcaatttgcggggcgttgtcgacaaagtaatgagaaaaatagcaaaaaataattattgaataaagtttttatgaactttttttttttgctttttagggcattaacggaaaa

SEQ ID NO: 19517 - DNA, 1190 bp, Heterodera glycines
taaataaatgtttatttttcaggtgctcggtgatgctcagaattggcccgtcgcttttgccttctccggccttcccgcttttattctttgctgtgtgctcccattttgtcccgaaagtcccaaagtaagcttattcattaaattatattttttttcctaattacctccttcccctttcatttaagttcactttgttgtcccgtcgcgaccgcgtcggcacattggacacattggcacggctggtcaatgttcacgagggacagaccatgttcgaagcattgcaacgcgaaggacagagcacacaaacattgacagtggcggacggagtgagtgatttgaggggaaaagcgaaaggaatgcactgattgatcgaacactgataaagcctctttcgcagaacatcgatcagtccagcgcaatgtctgccgcctcaatctgccgactttttcgatcgacggaacttcggatggcatttctgatcagcatgtgggtgatggttgcccaacagatgaccggttgtgctgccgtttttgcctattccaccgatatgtttctgaatgccggattggaaccgtaagaaatgcaaaaaaaaaatgggaagaggcattagaatttatatttcaggtcaatcgcgcgttacagcactttggcaatcggaattatgtactttctattcgcttgcagctccgttttcttcatcgaacgaaaaggtcgagtttaatttaaaatataatttaatgaaaaataattaaaaagaaatctcaatcagaattattcaataatttaaataaaagaaaatgttttaattaatattttaggtcgccgtgccctctctctgttccaattgacattggtgacaatttcactcagttttatgagctttttttcgtgggtacaagcatcatcgggggtaatttgggtaattaattgttttaattaattgctttacccacagagtaaaattgccagttatggttccatcatggcattgttggtttacatgtgcgggtacggaatcggaagtccaattccgtggatgattgccagcgaaatattcccaaccaaagtaaacaattttaaatttgtataaaaatgccattggcgtcttttttacagtaccgggccagcgcagttactgtggccattacgatcgcgtggactttggcatttgtcatttcgttggcatacct

SEQ ID NO: 19518 - DNA, 2509 bp, Heterodera glycines
  unsure (1)..(2509): unsure at all n locations
ggaatcggctcatcgagcagaacgacttcgatctgaaggagagttttctttgagggggaagttttgatagtttggagtactacaaagtgccacactttttaattntaaaaaccaaagggggacccttttggcttgcaaattaattttttgtttgaatattttctaatcatgaaaacttatccacattgttttggggggcctgatcacgatgacatcaatttggaccattcctaatccttaactcgaacaaattctcatttttcgagtacgactttttgttccagttcgagttagggattaggaattggcaaaattggattcatgatcagagacctaaaaaacctcccggtaaaaattttttttgcaaaccaaaaaggtccccctcattggttttttaataaaattcaaaagtggccattttgtaagtagcgcctaaaataaaaataaaattacgcagagataaaataactggaagaaaaactaaatcttggcttaccaaatacagtcccaaaattttactttttcaaaatattgcacaaagattttccaaaattaaatcagctggacatcaaattgaaaaataaactccacgccaaatcctacaaaaaagaattttgattcgtggcggggtgaggtaaacgaactgctcccctatactaatactattaatgttccaaaaaatataaatagaataattttataattcgacaatttaaagttttaaaaatttactaatattcaaacaagtttttgtatttgtttgtaagacctaccactctgaaccccttctccaaggggttgcaaacgtagactccgttcctgacaaagttctgttggttggtttcgtataaaagtgcctgcgcttcctccaacttccgcttccacaatgatttgaagcacagcatggaaagatggcatgtcaccaggccgagaatgttctcgaggtaagcaatcgccgtcagtttctccgcctccgcgtaaatttggttgagatcagtgacaaaattcagccaaatatccctgtcaatctgaaaataaccaatcaaacgaagggccaaactgttaaacatttacgtaatgttcgagctcttcaggaaagtctgtgctgaatttcacaactaatgcttggctgtagtcgcgttggatgtaaatttttctgcgctcattcaacgccaccttccgtttccccaacaaatttgaattatttaaagacatcagaagtgattttgctgttaaaaaagaaccatttttatgtacaaatttattcagaagattaaagtcaacagagatttgtgtacgaaacggaagttaaaaaatcaaaacggaccaaattaaaaggaagagaacacagaaaaaacgacaaatataaatttaaacagagggaggagacacagagaaaagagcgtaagagagagagtaggagagagagaagagagagcgagcactatgggtcaagcccagtgttagacaaaattactcataacgccaaatagcgcatttggcgtaaatttttgcgcgctatttcaaaatttacactggaaaatgccttttttgtattttttatttgatctgccataactcgcttcattcccaactaaactgaacaaatttggtatctaaaaaaagattttgaaaaggggaatctttttctaagcgaatgttaagtaatttgtcatctcagaaaaaagttgtgggaatttcaaacttttatcatgttataactcaagtcctaggcagctctttctaaccaaaatgctaaatttattcttttttctattgattctaaatgttcaaagtgattttgtacccttataaccaaaattattagaattttcgaatttggtgttttttcacgtgttagagacatgaaaatagtacgccaaaaagagagaaaaagaaatgcaaatttttttcatcccatttttgtaatgttctaggccgaaatttttactcaaaacactgaaagtttgttcataatttttttctctatcgctatgcaaaatttggtacggatttaacataaagaaaaaaagttagacatagaaaagtaaatgttgttttttacatcattaaaatgaagagatagtacgccaaagtgagagaaattacaaagaaaaagagaaacgacgagatagtactaggcttttccgctgacccacaaaatgtccagcccacgaaatgtccaagtctcgaatttgagttttttattattcagatgggcctaaggttaggcaaggggtaatataaagggtatattcgtattcagcgaccccgaaaaccctaaaaatcctaaattaaactcattttgtttttataaattttgaaaaattttggacatttcgtgggtttttactcttttggacatttcgtggcttggacactttgtggggccgccggcttttctctgcacagtggggcgtacccatagtgtatgtgtatgtgctcttttctctgtctctctctctctatctctcggtctttgtctttttgttttctttactatttatct

SEQ ID NO: 19519 - DNA, 2826 bp, Heterodera glycines
  unsure (1)..(2826): unsure at all n locations
cttcaatgaatcgtcgtagtggttggtgtttaatttaattttaaatattcttattttaaaatttaatttttttttttttttttgattttgtcttaggctcttccgtccatttgcttcacaacggacagtcgccgccttcattttcggctgcaacaagtccacatgagcaacaccaacaacaacaacaacaacaacaaaatcgctcacaacaattttcacccatttttactgttcgtaaaatattgttaattttttagtattttcaagtttaatttttctttttttttaattcaaaaataatattcaatttaaaaaaaaaatttcattttgtagcaatcgccaaggcaaaaggcattttgtgtcgaattggggcgccgagggtgcaaaattgtgcagggtaattaattaattagatttaattgattatttttgaagctaattttattgttactaataataataattcacttacagtgacttatgacagagctgcacaaaattcaaaggaattgacagtgacacggggcgaaattttagaggtgaaaaaatgtgaaaatgttttaatcatttaaaattttttaactttttttttaactaaaggtgctcaatgacacgaaaaattggtgggaatgtcgcaacataaacagccgatcaggtgaaattttttgccggttcgatctgatgaatctgatcaaaacaaaaaatgtgttttttttaccgttttcactaaacaatggcacccgccggaaggattttatacaatttttaattaaaaagcaaatttttattgtttttctttcaaaggttatgtgccgcacacaattctcactgtactggacgaaagtgatgaatatgacggaccgcataagaatgaggtgaaaaatttggttgtccaattaaattctctcagggctccagtctcgaaatgtggttttaaaaatttcataatttaaattttcacgggacgggtcatttcgccgcgggccgtttcaccgccgcctataacttttggcggcggcgaatggtcggcggtgaagtgacgacctcgatctagggatataagtaaatgggtttcaattacgtaaacccgtaattaagggggaggggtctaaacacaccgtaattcctaattttcgtaacccgtaatccataattgcgtccagccctgatccccgacaattaaaaataaatctcaggcctttcgctcaaccaccgccggctcgtccaatcaccaattcccatcctccggcacatcgacgcccgaagtgatcagagaacgacggggacggaacggcgaatttcgctatttttaacaaagccaaaattgcaatttgttaaatgcatatttgtttatgtgtagaatcattttcttgcttgtttttctattctttttattttgttattttaccatttttatggaaggcatttaattaattaattagctaagcatttagccaattaattaactaattggtcacttttttcccttgattgatgagagttgaaattttcattctgtgttgctgctgccgtgttatacgcatttgtgctgattcgagaaagtctgtatcaatttcattctccatttaatctctctacttaatccgtgcattgtaattaatctaataacttctatattattaattaattgataaactaaaacaaaaaaaacatttattcacctattttagcattaattttcaactaattaatggtgccctcttattttaagttcattaattatttttccaagtgccgttctctcgatcaaaaatttctaatattaattgtttatgcctaattaacactttttccacgtcttatgtttgcttattcatttatattacatatatttctaacctcatcagctcactaattaattcacttgtttaattaattagcatttttatacgaattgctaattgttgtaaaagaattttatggccaaatataaaaaataaaatttgataatttaaatacatttaaattacaaataatcaagttatattgcgttttggatttattttgctttccaaatggcactgacaattgactcggcactcatcggaatggtccaccgccgttggccatcgaccacggacactttgatgggatttgcttttggattgatcagtaccaacacacgattgccttaaaaggaataattttattttaaaataaaaatattaattttttcaacgtaattaatccgaaaaatcaattaagcgacttttcgatcactaattaccgccgatcgtttcaaatgctacatgttcaatttgttcttggtagccaattgttgtaccattcaataggacaaaatctcctagaaaatatatttttaaaaataaattatttaaattaaaaaagtgttaattactgtatgaatgaatattttcaattggacggtcctctaattgggtgccatttgcagcgaaaaggatggaggaaagaacggaagaatttcgtggcacaaaatgactaaaaattaaaatcaaacaattttaaaacaatgcattttatgggatttcaaaaaaaatacctgaaatgtgcaagaaaataaaacattggctgcttatagaattggtcagaagatgcattcacaattaccttaattaattaatttaaattgataataaataaataataatttaatcggaggcgggacaaaatgttgccgaagagtttttggaccataatttttgttcctttgaactanattanaacattcttggcactgttcanaaaagattgaattcatagtttttttagtgtcgtaattgaatttttttgaattttgttttgttgcttaaactccaaatttat

SEQ ID NO: 19520 - DNA, 1545 bp, Heterodera glycines
cgcctcatttgataaagttttgtccccaattttgcagatgtgacgccgctttgggactgctgtcaatatggtcaattaggacatgtgccgtgcgctgatcgcccatggtgtcaacatcgaattggggacggactctggcgaatcgacgctgctctgcgcatgtttcgaaggccgttttgagattggtgagtcaaatgcatggatgatgctgccgtgtaattattgccaatgttttcccatttttcagtcactcttctcgtcgagaatggcgccaacgttaatctcgcggacagcgacggaatgacgccactaattgtcacttgttactttaccggaaaggttgtgaacaagttgttgcataatttgtgactgaatgttttttcgcgttcatagattgacattgtgctcctgctgcttttacacggtgccattgttggacagacggatttcactggtgcaattagtctaattgccctaaaattattggattaatattcccttttttcaattttagggatgaaatttgctcttttgggagccgccagggcgggctatttggaagtgtgtcggctgctggtgaacggatgggcagcggatgtcaaccagcaaacaattgacggcaccacagctctgatgcgcgcgagcggtcggggacacgtggacgttggtgagaaaaattgtgccaaattttgacaatttttcttcattttcagtgaattttctcgtcgaacatggcgccgaccttgaccacaccgactttgatggatacaacgcgttgatgtgcgcagtgaagaacagaaggacggaaacggcacttcatttggtgacgatcggcgcgaacactgaccaaattggcattgatggtgagcagaaaaagtggttaaaccgcacggcttttatatgtaatttgctcccatttacaggcaaacgggcgcgcgacttggctgaagaaagcggacttgccgaaatgattgacattttccgtgccgcggctgagcagcgggaaaacgccgatgggtaaaataggatgtttttttgatccaaaaaaacaacaacacattttcaggcatcagaacgaacattaacagcggcggatgagagggaatcgcggctcaaaagaattggacggatgtgccgaattattcggaagatattctcgagcacttatgtattattgcagtgtatttgttcatatttgaattcacttgtcgtgtttgtctgctctgattgtacataaataacaatttttttatttaacaaaaaaataataattataggtatcccaattaagaatacaaaaaaggatcgatcgatcatttctgaaataattcattcattcttcccgatgatcactgcttggccccgctgaactcgagaacatctttttcgttgcttctattcgtttcagacaatggcctaaattaaatgcaatttaattcggtgaaaaggtaaatttcaaaatggcaaatgccactgaatcactggggcttacacttacccaatgcaatttttgaaggcacacaaatcaaaaaagatattgttcaa

SEQ ID NO: 19521 - DNA, 3641 bp, Heterodera glycines
  unsure (1)..(3641): unsure at all n locations
ggggatctctagagtctttcctcttcgtgttatatgaaaagattccgtcatccataattgcactgggaaattccacaatccttcactattcgtccaattttacttgtcgaatttttcaggacagcgcgtgaacgaaggggcggaagaccaactcgccgcagcagtcgactcagtgggcgacggacgatgagagaaagggaacgaacggacagagaaaagaaacaattcgtccgtctgatatgttttaattgatcaaaaaggaaatgaatcggatggaatgctttcaaatgaatccgactgcgaatgggcactgctcctccccattctctccatgcttttgtgagcattcgaattgcccgtggggttcaatgtgggaagtccattgctccgagtccgactcgtacgaacaaaggccggccaaagtgcacggaatgcggggaagtcggtggaattggtagagaagacctctggcctgaagcagtcaaatgggaggcatggaacagaaaagatgaaaagcttgggaggaaaagccttcatttcgaaatggcactcgccttgcgcaggatgagatgggcatccatgtgcatggacagcgaagagaagtaaaagaggatttcgtcatgtggcagattttggtccacaacgtcgggcccataaatggaaacgacggcacacgcaatgaacagatggaagtagttggtgcgatagcgtgaccagcatgccttggagcggatatttttagaaaatatccaaaagtatattcgaaacctcccaaatttgtaaggagtcgcgggagggaaactcccgcttgaagaagagcagaatccaccggtggacgaacatcaggccgggcgcgtccccgccgagcttggcaaggtgtgcatggaagtcgggcacgaacagacgaagcagctcacggatgaagtccaattggacttccatttccgaaggctgttctccaccattggaaggtcggaacagcgtttgctcaatcagatgcacaaaacaccaataggtcaacggctcgtcttgcaaagtgcacaaaagtggggccaacaaatcggacattccctggggagaaaaggggccaaatgaaggcattttcaatggcacaagataaagtgacaacacaagagccttggcagaagtgccaacctggatgtagccgatctccggattttttgtagcataagtgagaaggatggacctgacaaatgagtgtgttttgtttggtataatccccgccacttttccccctcctcatcatgccaattttgcaaagtttggaatgccgaattcgccttccccccattgccctcccccccttttcccctcacttcatcgtttccaaattggggttttcttcccccgcaaagaatgagttgcgtctgtccgtcctcaacacgtccttcactatgctttgttccacccccgccatttgctgctgtttctctttttctttttggtgcgtcgtttcgcctttcgttttgcgcattcgctgccccttcagcttttggtattgcacaaacatttcgtttcggatgttttcgcgttgttccgtcgtcgaattccatgggtaaacgcgcaacaaaaaatggccacaattctttgcgaagggtcggctcaatggacgagaaatgaatggtctgaacgggcggagaagggcactcattagggcaaaatgcaccattcattgccacagttggcattggcaaatggacagtcagttgctttgggagcgaaccctcgcccccccccccccccgccctcattatttgcctttctgatggtgaatccgtcctccacactcccatccgcgctcacatacgaccgccacatttcccagcccaatcgctcgtaaaggccatcctccgggtccaactccgtcctggccaactcagtcccgggactgatcagcaaatgccgttcttggccatttgtgtgtggcgactgaaatgtgcgttcattattcggttttcctttgcacattccatttgcccctctttcacttcgtttccgatcgctgactttgcctttacggcgttccatcgttcgaacagttcggtgagtctgtccaaccccgtgtgatggaagtggaatattttgtactgcgagtcgaggctggcgatcaccaattgtccgcttgtccgttccgcgtccgaataaaacacgcgcatcgatcgcattttgccttgacaatgaatgcatcgttatttttaggcaggactttgacatttttccaattatctcttaaatagttcgagagtctcgggtctactcgaaaacagtatcggtggcaccatttgccaatgtacccaaattgacggagaatagtgaggagggcgcgcgtccgcctccgcccttctgccgccgcctctgctgccccttttgctgctgcgtctgtcccttcccttctccgtccgcctcctcaatgctttcatcggccaacattaaattgtgttcccgtgcgaattgttctggaattacgccgtgcgttaatgtcgcggcacaatttttccgcaaggcatccaaagattttgctgaaggagcggcgaacgatttaattgcgtttaatagggctcaattagcacttttggccacttcctgctgctcgtcgtcctccgacgatgagagactgtcgcccgtggcattgccaaatttgtcctcctcctcctcttcgtccccatcttcgcccgaagttggctcagaactttcggactaaggcgaagctcatgatgatttgagtgaactcattattacctgctgatcatagcgaatgttatgctgtgcggccgttctctgctgctccaccggagtgtttgggatcaaacaaatcgatgggattgacagcttaaattgtttaagtggccaaggccaaattggccaatcaccgcccatcaccaactccgatcagagtttgtggcctcggtcggctttggccctcctcctcggtcttcgccgttgtcccattgatctgttcccgaccaatgggtccctccgctccatcggtactttttacagcactctgaaggaaaagcattgcccacggcttcggtgtgaatgtccaattcgtcccatttgtttctttccctttacctcgccgtcgtcacttccgattgtcagcgaccgattagaacacgtgaaacgggtcacttgggccccgcctttattcccccctccggcttctttttgttcttcggccccgtctttgatgcgtcccctcaggggagaaacgcaacgaatgcttaagggaaaagagcgaataaatgaaaaattaaaaaagaaataaaattaaaatataaaaaataacgaatcaccacaataacaaagaaaggcacaacagaacacaacggaagaagaagagcagttgcagaagagacgaaaagaaggacaaattgaaaagtgaaggcgaaaaaaggcacaaagagaagaagccaagacgaaagttcagctaattgtaagttgtctttcttaatgccgacaatcactgatcatcccggccgtaagctgtgccttggattttgccaatggcaatgccaatgccattgtgctcttctcccaataaatgccaacctnggagggagttttctccagcagagcgttgggcaaccattgcaagatcaaagtgatgccgagctgat

SEQ ID NO: 19522 - DNA, 1741 bp, Heterodera glycines
tgttaatctcgggaggggggggggggcacgggtatcctttattgatcccccaaaaatggacctgtttcgcttgcattgcaataaacacataattatcgaaggaaattgacaaaataaattattaaaataaaaataaattatttatttcaaatgttatttgaaagttgattataaatgcgttgattcactgcttattgtgttttacttttctcttgcttttaccctttgctatttattgtcattttccaaacaattgtttagttttggccaaattcatttgccggacaattggaaaaaaagagatacaagcaaatgaatggaagggaaaagaacagaataagcaaaaaatattaaattataaagatgaataaatacgaaaaggttaataatactaaattaggagaccttaattagttttattttctcatttctggcataattatcagcttgtttatcttccgctcaaacattctcttatcgtttaatcacattaatgacttcctctttttacataatcattttgttttaggtcagcgacatcataaaaacaaataaaaagtgaagcaaaagcgaaataaaattttgtattttcgttcgttttttcgtattaatttaatgcaatttaaatttgtgtgtttaaatttgaattattattttgttaattatttgacactttgctgatattaagtgctttttgttccgtctaaatgtctttggcctggaatttcttcacactttctgcccgggtttcctactgcaattattgtgactacaaaaaggccaaattttccacataaaaccgcaaagaaacaacacaaagtttaaatgttggcaaaaagccgtcaatttgttggtccacagcagtgaactgtgtgaggcaccggctcaagctgtacccgaacctgctggagaacaatattctgacggaaatcgaaagagatggagaacgatttgcccgctgaagagttgtgccaatgcgaaagcagtggaaagcgcaaatttgagcggagaaattcgagccaatgcgaacagattatttggcgaattgatacattttgaggtgcaaatgccaatttaaaaaaactaaaagcattcggcacaaaatgaaataaaaacatttaaatatttaatatattcacttattaaattcaccaacaaataatgaaaaaaagccattattaaacttaaattcatatttattgggtttgttattaaattcgaaacttcgtttttcaggaaatttgttttgaattgaaatgaccaatgccacaattattggcatttacatgctattttgaatgaattctgaatgttttgaattttatattagattggaattataaagattagtaaattccattttgacaatttcagtccgtcaaatgattgcgtctgtggtacttcttgctagagttgagcggtaatcggtaattgtaaaaaaaccggtaccggtactgaccggtaatgcaaacaccggtaccggtaccggtaccaactttttccaccggtaccggtaccggtaccggtaaaaaccggtaattttccaacgtaaaaatttttggacaaaatttttcaaatacaaaatttttattcagttttcgcgcgagtgcctgttttttagcattagaattgttcagaagtatatgtatattgagggtgaccaagtttttttttcaaattcaggataaagaacactaaaattcagatgtagacctcaaaattcagattattgcaaaacaag

SEQ ID NO: 19523 - DNA, 984 bp, Heterodera glycines
catattttccatggaaatcctttgatgtacacagtttcgcttttacgttcacttttaatgatttattgcgcaaattccgacactttttcaatttccatcaaaattgttccattggatttgttgggatcagaagggaatttctccggttttcatctttcactatgacatcaatgaccaacatcattctttccctcttctaagaagacgacgatccttccgggctgatggtgtaaagggtttcctccacccctaaatagtgcaaatagctatttcgtaaaattgagtttattaaataagatagttcgttcattttctattgtttattaattttatttttaaggttaccgtgttccctataaaatatatacaacttccttaaatatatccgctaaaaaaatccataaaataatcatagttgcttctttttccaattatatttagatgggtaccgcctaataaatatgaaattttttttccctgttatttttcaaattcaaacttttcagcgcaggggcgaaaagcaggaatttgtaccgattgggccaaaaatgacaaattttgttgtttttgggtcaatttttcaaaaaataataattcaatgagtccagcggtgccgatgggcagattcttatttaaataaaaaacaaataaaaaataattttggattattttcacttgaaaaaagtaaaatttgaattttttttaaatttttgaatttttaaaaattcccggttggtcccggacgaaaatcaaggtcccggtcccggcttctcaggttccggcaagtcccggttttgcccaaatggcggtacccgatacactctacttaaaatccgtttcaattttttgccttttcaccctaatttgcgcggcgcgcagtccctaattatatactaggatatggaaagcaatcattcaatataagataaatatctcaatcgagttcacagccgaaacactagccgcaaggtctgaaagtcagct

SEQ ID NO: 19524 - DNA, 1250 bp, Heterodera glycines
ttctatttttaggcttcttgacgaaactcccgacccgagtgatcagcagaagtgaatgaatgaattgttgagaagtgatcgatcaatttgaattatttaattattgacgtgctcataaaaattgttccttttttactgttgttggaatgatcaatcaacctatctgtctgtgtaaatcattaggataaatttagcgatttcctgaaagatttcgaaaaaaccaaggtactgaagtttccaatcgggactcagttatccattatcaatacagtttgcaaaaaaaggcaccaaaaatcgtgaaaatgcactaaaatcccaaaaaaggcatataattttttttattagtgactttagggagcaaaactcgtaaaacttaactaaaaaacttaatttggtcatttaaatgattattaaatattttacctaatacttttttcgaataagtaaaatttataaatctaaattttttatcaagaaaaaaatgaaattttggcaaccactttttgagaaaggttttcaattcttaggggcgtattttttgaaaaattttcaattcataggggcgtattttttgaaattttctcaggtcatttcttagagggtgtatttccccggttttatttcatttttaatggaatttttcggaaaaaacgccaaaaaaggcaccaaaacggcaaaatgccaaaaaaaggcatttaaggcacgaaaatcccgaaaacggcaaaaaaaggcataataaaagtcaacgtagaagcctcaaaccaagtggaaaatgcgttttttatgcttaatatatcggaactagtgcgcagaaaaaaaggcatatgcctcaaaatgcgagctctaattatcaaaaacaaagaagaaaatgaactatgtagagttgagcgggaccgggaccaaaacacgaacaactgagtaccaaagtcccgggtttttcccgggtttcccagccaaaaattcccggtacgcgaccggaattcaattttaggtaattatgcagtttacaggccctttttaacatacattttcaaatgcctataaatctgttttagaaaataatgaaaataagtgttaaggggttttttgggtcgctgatcacgaatagagcacccatttttgccaatttcgaaaccctgactccaggaaatccaagtccaggtcgacatggaatccaagtccaggtccaggcttttttcaaaataccgagcaatgataacgacatagcaccggggtgggttaggttcgga

SEQ ID NO: 19525 - DNA, 754 bp, Heterodera glycines
taaatgtatggagaaatcaagttttcaattttttacgattttttgaaatttcattattaatccctaggggtcgtatgagacgggcgtctggggttcgaatccgcttggctgcgattatttttttaggtacttgtacagtttacccccataaaaattttctaaaattatttttgggtcatttcttaggagtgtattttcccgatttttttggcatttttaatggaatttttaggaaaaaacgtcaaaaaggcaccaaaacggtaaaatgccaaaaatagcataactttttaaaaaaataatttaaaatcgaaaaaaaacaagtagttgacaaaaattattagataaaaatcaatgcttttcaaaatctgagctcagttcgtgatcagctcattttaagcctagaaaaaatacccgacaaatttttaacatttttttttcgtcgggacaccaattcttaatattgccaaaaagggcgctaaaaatatgcacacatttaaaaattcataaaaaaaaacttttttggcttttattttgaagaaaggagctaacaaagcatttctgcattgaaattttcgattctgaagacactatgcgtcattaaaaaatcagactttgacgcttctcaccaaaataatttaaaaattttggcgttatgtcaccattttctcactattttattaactatttcgagatttttcatcactaaaagtcgcggccctagtcattaaaaatctgtcgaaaaataatccccccg

SEQ ID NO: 19526 - DNA, 1676 bp, Heterodera glycines
  unsure (1)..(1676): unsure at all n locations
gaaaatcgcattttgtcattttccatcttttantagtcgttaaaattgtttacacttttttcaaaaaattctttcattatttaaactccgactcaataaattgtcncatcttgaacncactgattatatgaataaatttttcaaaaaagaggtaaagcagccgataaagatttgcgaatgtaaaaatnttataaatttgctgcncattatattcgttgttgtgctttttgcgcatatcatttaataattgtagaaaaaatactgaagctccgtagctgtaaaaactttaattttggagattttgttattcaaaattatttaaaaatgttgttttgatttttagcgaatagatcgaagagaataaaaatagaaaaattaatcaaaaaggtttaaaattgaagaaaaatcgcaaaataataattaattaaattcacaaaggcccgaaaaaattaaatttcaagaatatttgcggtcgttttagcttctttttcactttaaaataattagcttaactgcttatattactactatatatttttaattttaagcaataattgttattaaattattttttttttgtgaactaagcagcagaatttttatattttttaaattcaaaaatgaaaactttttgatttgtgagtcaatttttttaaggattttggtttttgtggatgtggataagcaccgccgggtaaaatattttatttaactatttgttaaaaaatattcattttaaatggctttttttaaatcctttcccttactcgtttttcaaaatggaaatgttcttgacaatttgctctaaattcagcgattctttatggctcaacaataaacatgccaaatcattttttgtcgtttcatttaacaaatcggccaaactttgctttgacatgattaaaacattttctagctgctgttcataaatcagtgccaatgtttgtcggatgccaaaatatgccaacacaatgatttcttttatcgtttcaaatttattcagtttatttgcggcaaaaagctgaaattaatttattttcataattataaaaaatacataaattaatttaaatacattttctctttttaaaaatacgaccttttgacaggaatcattaatatttggtccattggcaatcacatcaaaattttcagaaacattttccaatgttttgcggacccataacacaatgaagtttctttctttttggcattgattaatcttaaataaattaaagtaattttaatttaatatttcaatttgttacataatcattggtgatgtattttttatggtacggggtttccaattgtccaattatttttcgaaataattgcatgtaaaaataaagcgctttcaatttcttggtttcaaatgtttcggcttcaactatttttctttcaaatattagaatgttatttggctggacagatttcattctaaaaaaaatgaaaatgaattaaaaataatgttatttttaggcaaatgcctaaatttgggtgcatgtaacattgagataagcataaaaaatgagtttttagcttggtttgaagcttttaggatcaattttataattgctatttttgcctattttggacttttttatggttaatcctacatatttcagaatttccccaaaaataaaaattgattccctaaaaaataattttttttt

SEQ ID NO: 19527 - DNA, 1482 bp, Heterodera glycines
  unsure (1)..(1482): unsure at all n locations
ccaattcagggccgatttggtccaaaatttggccccctttcatttgctcaaatcccgaatcaaaaaatcaaagtgaatttagcattttgttgtggggaaggacatcattgggatggttaaaaggcaaaattcagcataataaaatgccatatttgactcacggaaaaaggaaatggaataaaaataaaatgtggttattttaagataaacataattaaccataaaatataaattgttattagagactagtgaaacaattgctggagcgggaattgcgtcaaaatcccgtcaatttgtaacgggactcccgtcgctatgagagggaataattcaaaaatttatttaaacaaaaaacaaaaatacatttactcaaattttgaaagataatcttttttgttaaagaaaaattttagaaaaattaataagcacaaatttaatttttaatgctatttcccaaacatttttagggaagctaaggaggagggaaaaaagaaaattgagcggttaaccgatttttgtcataaaataatgaaatttctcggttttttggtcaatctcttaataagaaaagaaggcttctgtagtccagcgatggcgatagtcgctgtcgggaaaatttagctaattttgacctatttcgaaccgggaatgccatcaaagtcccgctcccgtaaaaaaaaatcacgcaaggaaaaagcacgggatcgagattcccgcaaaaatctcgcgggaagtcccgatcccgccggtctcaagttgttggttatacatccattttgtgccactttttccagagcacatttttagaaaatcaaagtgctcataaaaatgcatctctattccatttaaaattaaattatatttgtaaaatttaatacataaaagttttttggcttgctgtgcttccatttgctgctcgtctaatgcgctgtttcccatttgttcttccaatttctgctgcctttcgtttgcattttcataatcattgcttttctcggtcattttttgttgtacaattgaccaattagaatttaaaatttccatgtcattttcaattttattttcacgtgcctctccaaacattgtagcctctgatgatgatgatggtagtgataatgatgatgatgatgataatgacggaaaatgtttataattggggatgaattgattttgttgcaaattttgcgaatggcacattaatgacgaattgtccctgtgttaatataataattcagaaactgatttgataaaataacattaaaagcaattttttcaagcacttttctatcttatatactgaaaaatccacaaatttaattatcagtttatatagaaacgattaaaaaaccatagggggaggggtgattaatttttttaaactgttttacattttcagggtcaatgaataaattaaaagcatcttattaatttttcaaaatttacagtcaaaacttttgnttttttgggaatatttgttaaatt

SEQ ID NO: 19528 - DNA, 1017 bp, Heterodera glycines
tttaaattcttcacggatggaatgcgactcatccacccccaatccatcgtcccattcttcggaaagtgtccattcgtcggtgagggtggaagatgaattgcaaatgggctaattttggcagcacaaattgtttaaatagtctgctgatgcaacagatccattaaaaattaaattcagagcaaaatttcatttttaaagtgcctaaataaaataaaattttttttttgaaaaaaggtttaaaaaccataataattgcatctaatttttaataattaaaaaaaataatcattttgagctttgtgccacattttttttatcggttttgacgaaaaaaaaattcgaatttctgaattcagttcttcctccgaaaaagcatgaatattaagcatttaggtgaaataaaactttcattcgccttttcttttaaattcaatttatttcattaatcactcaagtgttattaatcgtttcataaaaacctttatttagaagcaattaatggctaattaagaaccaatttgatcttcattagatagagagattttctttaatgaaattttttcgagaaatgattttattatcacaatgaaatgtgccattagatttggttggctaattagtccacgtttaacttcaaaacttaattttgaaagctgatgtcgcgtgctcagcggtgccaaccgctcgcttcgttaatggacaccgtttttttaatgcggcgtcgccttttcgaatatggcgtaatttaaatcccccggggtggccacgcatttggccgtgggcgtgccccccctcccccccggccaatttggcctaatacgcgcgtccgtccatccgtcctgccaattgcccatcatttcgcgcccacttatccttccttccttccgcccccgtccattttcattattattaccatttacttttgctctctctcgtcactcctttcttcatctcgtcatatatctttctaatcaccacaacaaacacatcactctcacctaaaaactgtggaaaatg

SEQ ID NO: 19529 - DNA, 1558 bp, Heterodera glycines
ttgattgaacttttacagacagtgaacagcgggggaaaacgtcgacattaaagtgcataaaaatggccagaaaagtgcgtctgcggccaaaaagtggacatcggcgcttcgcgttgtttccgcaatgacgcgcttgaagaatttgccaaaggcaaaaaaagcatttttaattgttcaaatttattttaattacctaattattttctaaagaaagagaaaaaatatgacgcggaaagtcgcgggtcgtccttctccacctccaccgaatcaacgccgagcagaacatacccaccagcagcaacagaacaaggtgaggtggtgggtagaaaagaaatgatcataataacctaaaatttgcaaaaaatagaagtttaccaaaagccaatcattaggggtgtaaaaaaagtctcgagtctcgaaaaccgagaccgagacttaaaaacccgagactcgagaccgagaccaaaaaaacccgagacttttctcgagtcgagactcgagaccgagagtctcgagcagcactacaaattagccgtttcagatgttcaacagaatgccgtcgttgacccggtgtatttggcgctcaaacaggcgaccaccaaatacggcgccccatcggtgggcggttgcagcagtggccgaggtgggcaaaatggtggcgaaatgaagcaattttaaaacatacaaattgaatggattattaaggataagctttaaccgcttagagaaaagaaaagccggcgatcactttaaaagtgacgatcgcttcttagagaacaattgagaatatttggttttttgtcaagaatttgtaagcaaaagtgccaaattatccggccaatctttaaagcgcatcaatgcatttttcttcaacagaaagtcgcagaaactcgcaaaatttggcatatgccgcgactccatttgacgccgagacgttgcgccatagtgcgcgcaatctgtcgcaaacttcgctgtacgactcgggcaaccattcggagaacgaattgatgctgctgctgctgaacgctaggtcgggctcgaccccgcaactgcacggtgagtggggccaaacggacgatgtcattatggtcaattaattcctgaattcaaatttaaaaactttgacagttttcctacctattacctagataccatttatacctatttcgccattttattacctatttaaggattttcagaaaattccttaccaaaaatgcaataaaaatgaaaaatacacccctaagaattggaaaattttctcaaaaattcattacccaaaatgtattattttttattgacaaaatttttaatttaaaatgtcaatattttctatgtaaatataatatttaaaatattgatttacaaacaaattgaaccaaaattttcctttttgtttgtttttttttcaccaaaaaagagttaataaaaatttttgtttacctgtttttctatatatttcaggatttttgtatctatttaatatatatgttttgagtttttttatacctatttaaatatctttttcgcgattctttttacctaaatttcccagccc

SEQ ID NO: 19530 - DNA, 1638 bp, Heterodera glycines
  unsure (1)..(1638): unsure at all n locations
gttttcggggcagtccccctgaaccgatgcgcccagatttatggggagaccgaatccttcgggaatagcttccctatagtctgtactttaattctgcgttggatttttgctccccataaatgtttgagtaccccaaacggacacttgaaaaaatcgatttttttgttttcggggcagtccccccgaaccgatgcgcccagatttatggggagaccgaatccttcgggaatagcttccctatagtctgtactttaattctgcgttggatttttgctccccataaatgtttgagtaccccaaacggacacttgaaaaaatcgatttttttgttttcggggcagtccccccgaaccgatgcgcccagatttatggggagaccgaatccttccggagtagcttccctatagcctgtactttaattctgcgttggatttttgctccccataaatgtttgagtaccccaaatggacacttgaaaaaatcgatttttttgtttcataaatatttttttcagaaagtgctctaaagcgcaccaaattttatttacaacttaattttagcactctgatgctttaatatcaaaaaggaagatggagaaaaaattttttaaaaaatttttccttatattttggttatatcgttttgcttttggtggggtgcttggaacagtggaatcatgcgcacccgtccgatctggcaagttaagcaacgattgctgactagccaaaaggttcggtgccgtgatgaaacgaaccagcactgcttaccccgcggcacccggcacggtcccccgaaggaatggatttaattaaattctctccttcggggatttttttccattaggtcgtccgttagcgttcgattgctctagtcaatttttaaaaatttttgttgaaatatttgtcgtgctctgaagggcgtgggagggggggggggggggaaggcccaccacgaggccgcgaagcggccgagtgagtaccttcggtgcaggaaaatattaaggaagagagttcattatttatttgttttttgcaaaattaattcataaatattttttagaacgtgctctgaaacacacaaaactttatttacaggttagtttaggcactcagatgctttcactatcaaaaagggagatgaataaaaatctaaaaatttttaattgctttttaaacgagcgaaaaactttaggcttaactttttttttataaactgatcagaagcgaaccagattttgcgagggcatcaaaaagacaaggaaaagcactgctatgatgctaactccagtaattctgaatttaaaattttttattaatttttaaagcttcactattttatttttttagcaaaattaattcataaatattttttcacaaactgctctgaaacacacaaaactttatttacaggttagtttaggcactctgatgctttttctatcaaaaagggagatgaataaaatttttaattcctttttaaacaggccaaaaagtttaggcttaacttttttttcagaaactgatcagaagcgcaccaaactttgcagggatactgaaaggaagagtaataacctattttaaatattatctagtcagatcatttaaataatttttatccaaaaaannatttttttttggg

SEQ ID NO: 19531 - DNA, 1461 bp, Heterodera glycines
tgcttcataaaatgtataagtcaatctctcttttaatattagattttgtaatttaacgttgtcccacttggctatgagtttcttctgcagcaaacgtatggggttttctaattcaataaatttttactttaacaggatttcatattttatttcgtttcttataatttttcttggccaacgaagatgatttcttttcattttctgtaggtctcgaattagtatatttaacaaaatttaatcttttttcttttcagatattttacattgtttttcgaagttatgttatctaaataattattttatatagagttttataagttttgattcatccattaaatagtaaattatataataaataaataattaaaatgcattattttttgaaatattttaaatatttgaatgtatataattattaaagaataaatatagatacaaaaccggataatgtaaatatatttttctataaatgtatatatatatatatatatatatatatatatttatttatttatttattaattgtatatatatatatatatatatatatatatatatatatattaaatatatattttaaaaaagcaatttaaaatgtatttagttttatagttttaaacaaatattagtttttttaattattaaaaataaaagacacataaaatatctgtttaagatattaatatttatgtacatttatataatcctaacttcgttattcaaaagaaaaagatgagagtgggagatagctaatcccatcttgaagcaaatttatattttatattttcttttaaattcaatggcatttagagtgtgaatcgtaaataattaatttttttaaatctaaaaattaataaggagaaaattaagccaataagttgtgaattgatatatgatggagatatcctacttgtgtcacttgtggccaatgcagccgtttttagcgagtgaatgcgcggcatttagcgctctcgggacggcacttcactctcctcacataaattattatttttaatcaaattaattttttagctttattaatgtttataattgtttttatttttattaactagacaatatttaattttttaattcattgaatagttttttgaattgatttttaataattttgaaaaaattctaacttctttttatatttatttaaataaaagcattaattgttttaagatataataaaagtctaattgttcttatatataataatagcagtaatttttattatatttttttggcagtttactgttattttaatttcttgaatcccttttaaggttggatttttctttgtttcaaatatgttttgacaataaacttttttattttccattgcataataaaacattccttaataatggtttatttaaaataataaaacctgcagaacccaagaaagaaagtttaaggggagcagaaaaaaataaccccattattttttctttt

SEQ ID NO: 19532 - DNA, 1667 bp, Heterodera glycines
  unsure (1)..(1667): unsure at all n locations
gggtaacattagaaaataccccattatttttcattgtacatttttgtgttttttttcctaaaatttccaaagccaccgatctatgcaccataaattagattggttaggattaatatctttaattgaattacccttatacatttggctcgaatattgaaattgtagacaattttgtgatttttttcttgttttagtttatgggcatttttgttgtaactaaaattttttttttattatttttattttgattttcggttgtataaatcggatgttctttttgctatgtttctaattaactaagcgaatattttatttgattatttatgcttagtgtttatttttaaatattttttatttttctatattatttttaaattttctttcaaacgcgtagattacgatgccctccggacagtcatccccaatccaatccttagacgtgttgaagttgggaagatatttgtacggcaagtcttcgtcgcctgaaagttctttacataatttcagaaattttgcttttattatgttatttaattttacatattttttctttgctaaagaaatttggtattattgtcccagatgaacaaccgctttttacgcttcttcacgagcttgtcttcgactttacatattaaataattgcgagattatttctctagtatttactacaagcattaaatataaactttaaaaaaataaatattacattttatttcaataaagctttttttaatttgaataaattttttatattcaaaatctttaaattttattttttactataacgcgcgattttatttcataacttgaaaaagaaaagaaaagataaaatatctactctctttcttttatttctttcaatattaatacatttacattgtaattttggaattgtattttctaattgttattttgcagagaaattttcaatttttttgttttttctaggtaacattttttgagtattttttcgacaatactatcgatcggacctctttccggtccacattttcacaaaatattaaaaaattttatttatcatctaatttttgggataagtaaaagtattttatttatttcaaagataaatcacaatttttatagaatagtaattttacttaattattctataaattaataattaatactgttactttggacggccgtaccgcgttgaagaacgccgccgtaaggaaagggctgcaagggcggctgcttttcgcagagctggcagctttttttagtctggtcattccaaattgttgatcactcattgttgctacttttatttaataaagcaaaaactatattcaaatcaatctattcagtttgtgtaaattacaagggtaccaccgtaaatgtactgtaagtatataattatgatataatagtttactgtagaatgcttactcttaattaaatgaaaacaaaaacataagaactatggaaaaaaggttggttaaacatatactgctacaaatagagaattctcaagagatacaaattcacaagccagtgacgctaattanaaatattaagtcgcaaaagatagcttttaacattaaccaatgccgtaactagaatggcgtaaataataaatgagaaaattntaagctaaatttaaacaattggccggaaatgagttccatgaactaagtgaattt

SEQ ID NO: 19533 - DNA, 2422 bp, Heterodera glycines
tatttttagcgttttattgcatttttatgtgcgaatatattgtgatttttcttgaataagcgtacggccataattattatttgaacaaaaattactttctttgtttccctttttaatgacagtcacacgattgtcaccggagatttggaggttcacgtgacaagcgttggcgtcccaaacattttgttggaaaacataattaatcttaattagttttacatttcaataaggaataatggcgaagaattaaaagcacacaccataaaaacaaggacaaataagatctcttaaatttttttatgacctaggaaaaaacaacaacaaaaaatcaaaaatcaaattcattaccgatcagcagagaaagaaaatatattttaaaaaatttgccttggccgtccctttggcaaattcggtggcaaaaacccaaaatttgaattttacttcttaggcaccgaaaatctggatttcctggagaaagctcaggctggatccagccataacaaatctggatttttaggtccaacacggaatccaggtccaggctttgttcaaaatgtcgcactatattctttagtaccggttagtactggtaccgccggtattgaaaaaaggtaccggtattccattaaaaattcataaccagggcttataagtgctaaaaactgccaaaatagtcaggtttatctaaaaaaaaacccccaaaataggtgctaaaaattgggaaataggtgccaatacaatattcttttttggcaaaggaaagaaaaaacatttttataaatcgcaagtttctctcaaattaacccccgaaaaatatcccaattcgggaactggggatcccgagtatccctaccgtttttccaatttcagttttggcatctttgttctgattttcctcattggcattgattatttgtttgccttctttgctgttagtgtcggacatttgcttaaatatggttagaacccatttacaaaaaattggctattcctgtataaaattgtttaaaaatttcagctaaattttccactgatagcgtctcgtcaggctctatctttctacaaaacttaaataaaattcgagcatccatacagtatttccaatttccatttttgtctcttcctgctgatgcttttcctcatttgcagtgtctcgtttgtctttgatgattatgttatcatttcaaaaaaactgtttttacctgcatctgaagaaggctcgtcaatgttttttggcactttgccagtgccatttgcgcattcaaagcacagccaaataatggcaataaaaagggtaaaaaataaggagcgattcgtcattttgttgaaattacaaagtgatatctctgatgaaaaataaattttaattggcaaaaaaagattcaattgaatttgctaggaaagttcaattttacgcttttcaaaattatttgctttttatgcgaattatggatgtaaaactttaaaaaatattaaaaagtgggagaaaaataataatatatgtcaatgaatatgaaatattagagaagctatttgaataataagaaaggccaaatcaatgaattttgctgcattttgttgaattttctctaattgactttcttcataaatatttgtaaatgctttcttcaaacaagcttttgatttatttttatttaatttattaataatttttatttatttttattaatcaataggtttagaaaccctttaataggtttaggttcagcccggcacccacccataacatttgatgttgtgtttctgagtatgcctataaatattaaataataaaatgttaatcgttgtattttgcatataataaaagacttcgaacttttatgaatttgagattaaaatttttagaatttttcaattttttttcaaaaaaaattttctttttgaaaattccggttggtcccggtcccgacttttctggtcccgataagtccctttcccggtttttgtcaaaattcccggtcccgtgcaaccctacactagactaattttttcctttccggtggatttataatagggttgggcccccgacgtcggggttggaaaattcggggttcggggttgtcggggttggaagcgtcgggggtcgcgttcggggttcggggtcggggttcggggtttttcaatttttgccttataccatatagtcaaaaaactttatattatttttttattcattaataatttatgtgcttttttatttcttaattattttagtatagaattaattaaaaacgcataaggcatttttaaaatggcaaattttcagtgaataaaaaatgtcaaaatttcaaatttttcctccggcgcctggcccccaaataaaaatagagggattttattcaaagaaatgccccaaaatttctgatcacctttctttttgtttttcaaattatcttttttc

SEQ ID NO: 19534 - DNA, 915 bp, Heterodera glycines
ggaaaaacgggaaaaaaccgggaatttcccggtcccggtcaaaactggtcgaaaccgggaccttgatactcagttgtccgtgttttggtcccggtccaggcgcactctagaatagatcaatccacgccataaaaatatttaaaaatttcaagaaaaatattaaaaaaatttagagcttttttttaaacctacatagatgatactaaaaacaaaatttgtgaatctccagaaaaaaaaacaaaaaacttaaatttttcttaataattactattttcggccctttcttttggcactttcgccgcctttacgcttctctttttgttcagaaattgttggctaaccaccggggccaaagcccgatttttgaactcccatttatgttaagagaatgcaaaaggaaattattaatagcattattgattgtggtttaaaatttcattctttgcacttttaatttgatttcatttaataatttatttttccccaccttttagcttttgccagcacacaaattaattctgaactcagcttccgatgtttttgaggcaatgttccgttttgactcccaaaataaaaaaggggaaaatggtatgacaaatgaatttaatgaaattaagaaaaaaatttcccaaatattagctccctctaataagcccgtggaggtcactgatatcggagttgatgcgttcaagacaatgttggactttatttattccgatgatttgagtggactgaacggagacaatgcaatcaaagtgttttacgctggtaaattttgtggaataaaagtttatttaattaattaattatttatctagcaaaaaagtataacattccgggcttgttcactccgtgtttgcaagttccaattccaaagttgcacaatgttttcctcgcttatgcccaggctcgtct

SEQ ID NO: 19535 - DNA, 1528 bp, Heterodera glycines
atagaacattttttatatttttttactttatttaaattaattaataaaaaatatttcatcttaaaaattattattttgtctttcttaaacagcctaaaaccgcaaatttaccaaaatatcggtgggggggggggggtaaatttcttacagaaagacaaaaaaatccgaatgaatggcttaaagacatttttccagcgggcccagaaccgtcgctgtctgtgatcagaaaaagttttggaaaaggaatccaaaataaaaaaatttttacttttcaatttcatggaaaattcccccctcctaatttgaaataaaatgcggtgagttaattttagctcaatttgataaggtagatttgtgagaacttaaatcttaaatataattttttattttaattttagaatttttaatttcaggcagtttaaaaaaatttaaaaaaaaattataaaattatataacaaatatttttggtatttatttattcttataaaagtttttttttgttgaagaaaaactattatttaattgaataaaattaatttaaatggaaaatttgatgcctcaatggtggccaatgagtaacggttgaattggtcaaaaattcgatgcataaaattgtgggcctgcggatcgccccaattgttttctcgcgcatcaattcgtttcgcgtgttccatcagttcagttcctaattaaatatttaaataaattatttttatattagagaaagttatttattatttttttcgaaatttaaaattgtcaaaataattagaaatgtgtgattttaaaaaaatgttttccagcctattttataagatgtggattatgcaaaacatattttattgaaatgttttcagaataaaacatttcttcaaaaaaattttttttttttaaatgggcgacttttttcggaaaagctattaactgggaaaacttttttttggttagaacaaaaaaaaaaactcttcgtttcgagagaatttttttttctcaccaatttcaaaatcggcattttgattgcgaaaacagttgtgccggattagcacattgctggacgagaccaccaacgctgcatatggtgttgaacacggtttcaagaatgggaatgggttcagcaccgtgttgccgcgtaccgaaaagaatgaaacttttaaaaaataaatttaaaaaataaattatttttttttaaattaaataattcatttgtcaattaggaaaagatagagaaaaaaatgagtaagatttaattttaaatagttctaattaatgaaagtaaatttagaataataaaaataagagattaaacttagattaacattaggaaaaaattatcataaaaattaaaaaataaatgtttaataaaataattaatttaattattagtgaaaatggaacaaataaggttttgaattttaaatcattttaattaagaaaaggggaaatttagaataataattaaaaaaataaataaattaccctctcttaaagaaaataatatattacaaaacatctaaaaaatgataaaaat

SEQ ID NO: 19536 - DNA, 1073 bp, Heterodera glycines
aaataaaaatcgaaaatagataaattgtttattcaaaattacagtaatattttaacttatgaaatttaaatattaaaaaatatttctagttttatgaaatttaattaaggcattaattacatattggccagtaaaaagaataattatgtatccacaaatcatcacttatttcattaaaaaatagaaaaaaagagtaaaataacttcaaacagcttacctctgaaaataagttttgattcataagtatataagtataagtgaaaaagctaatgtaattaaacatttaggaaaattaaataaatcaaattcgaatttataatgaaatttcaatttcatattgagaatgagtaaaacattttccataattttaataaaatataattaaaactaattcttttaaatattggaaaacatttatatgaattttaaaaatatttataaaaattataaagtcaatgttttaaaaaatagaaatgattgactactttatcctaaaatagaaaagaaaatttaggaaaacacatcgatcatggaataaagaaacagggaaccatttcagagaggttcttgttgacttgtcaaccattttaattattttccgaaaaatagcataatgatacgaataaatatatgaattatcacaaaaaaaatttaaaaactcaagtccaatcaaagttttaattataaaaatctgctaaatttttcgcttgtttactaatgctgatgcggctcgtgctcagtcagtgattaaggtgcgcataagaaatcgatgatgataataaaatacaaccaaaaaaaaaaaaaaatcaattttagtttaaaaatgaaaataagagagggaaaaataataaattcattctatttaaaataagtttaagttttattggaaaaaattattatatttttacaaattaaaaataatgcatagatactaggcctaaattttatgtaaatatatattttttcctatattcttatggacaatagtaggaaaaaaacacaaaaattcattaattgttttactataagacaacacataaatatacgaatttaattaatcaattaattaatta

SEQ ID NO: 19537 - DNA, 2473 bp, Heterodera glycines
atttgccatccctcgacttaatcgggcaccatttttctgaaaatgaaattctcaactcccaaattgattgtacatacctatcagtcccgatcaatcacattatcagtcccgttttaggcgagcgccgatttgggcgatttcccgcccccaaccccactccattaaatccccaaacattctcccgtgatgatcaattccattcccccccccccccaaattccatttggtataccacaaaaccccacttaactcccccctccgcccgcattcttcactactgctgtggtgatggtaaaagtgcaataaaaacagggttgccattcgtccttgaatggcaaggacttccttgaaattgggccctctttcttgaaaataaaaaatgtccttggatgccaaggacgtccttgaaaatgaacatttagaaaagttttaaaaaaatcaaagaaatttgagaaatctttgtaattttcaacaatattttgattaaattatggcattatgtcatttaaaaatgtaatttttgagaatttttgaaattttatggcattaagtcactagtcactatttttcttaaaaaattagccaaaaatcgcaagttttggtcatttttggacaaaaatctgtaaataactcgcattaaaaattacaaatttttccggacccccctatcctcaaaaaattttttaaaaagcacgccgtaaaaaacccattttataaacaaaaaaagtcgttgcatggcttaaaatcgcaaaaattaggcagtttttggtgaaaatctgttaacaaattgcattcaaattttcaaaatttttccccggcggcgcctgtcggcaccgccagaccccccccccccccttttcccggaaatttttggaaaaagcgcgccgcaaaaaagcgtttttaaagcagaaaaaagtcgtcgtaaatgaagaaaatgataagtgaaaacaaaaaaatgttggaaaaaatccattccggtgaaaaatacaagccatttgaataaatattaaccattttgcattgcatataataaaaattttaaatgtccttggatttcatgaattttccccactatgtccttgcaaatcggcatacccgtccttggaaacggagcatggacgatggcaaccctgaataaaaactaaacatacaaccctaagaatcgtaacatatgtaagtgatttcatcagtgataattagggctgtcaaaaatatgtacaaaaaatgttaaaattttggtatctcctttttgaaaaaaacccgatttttaggggtacatacatattcaaaaaattttatttttttcacaagaatttttataaattttcaaaatttctcaaaaaaattagaaaaaatgataaaaagtccaaaatatgtaccaaatatgtataaaaaccccgaaatatgtaaataggtatgtctaaaaatctcttcctactatttagaacatggagaagccaggaaaaaatatgtatactagtgataataattacttttttacaaaaaacttttaatattacataaagaaaatatttttttttataccaacaaaaaataataattaattatactgaaaaagtatcgcaacaataatataatttaaattaaaaaaaattcaaacttaattgactctaaaaaaatacgcccaaagaaacgaggcagagaagaaagcgattaaacttgtgagtgaacatgattatattcaacaacatttactttaaaacacattcataatctagaactttgaatattttgggattaaaaaaaatgtgaagaaattaaaaagatgattaaaaaattagttgaaaaatattagatttcaattatcattgaaattttcaagaataatttgttaaattaattaaattatttagtgtaattaaacttgaaaataataatttttagcgttccattggccgcaatgtccgaggcgcaaatgtcatataaccgttaatagggcttatatttatatttgctaaaaactttcaaatttaggatgtaaaatgacaaaatttattcaaaaaggtgaaaaattagaccaaatcaatattgagctaaataatttgtaaatcataaattcttgtcaagaataaataaataaattttggtgattgaattttgagaaaattttcatttgttagggggtgcatttttggaaattttgggtcgattcttaaaaaccacctctccacacattgaaaattaaacatttttatagaaaaaattaaaaaaaattattcactcaaaaaatataatttatttttaaatacataaaaattatattttatgattaatgaaccaaaagttatagaattaaaattttttaaaataattttaacataaaaaacaattacaatttttaagtggattaaaaatattataatttatgaagaattatctattttactataaatgaataatataattaaaagttaattaaatatagttaattttatgcattaaattaataatt

SEQ ID NO: 19538 - DNA, 2628 bp, Heterodera glycines
tatacagattcgagatggtatatacaaaaaggtgtattcttcgagagcttattttccttaatatgaatattaaagattgtattcatgcatattcataaaaagtgcattagtcgggtgatttattcataaatgcgcatattcgaaaaggcatacaaaaatatattcataaaagtgcatattcgagagggcatatttcagaaaaaaataaattctgtgtcaggtgctattttcacaaaaaagaaaattcgtctggttaccaaaagggcatattcgagaaatattaaagcaatttaattttctgtaaattctcattttcataaatttttcaaataaggaaaatgaataacaaatcctttgcttttttgcttttatattcacattaatgcatctaaaagatgctgaaatgttttaaagtaatgttaaatttaataaatttttaatttttttctggttacgcaatttccattccttttagaccattgtaaattttccatttttaggaatgtatttttcgaaaaaagcattagctcgctgcttcttcctacggttgttttaaattttaaacatgctaaattgtgtcaaagtcctttttttaattagggttccaaattttgttatcacttagcgtggcatcggcatgcctgtcactttgttaaggcgcttttacccgcccgacccgcttaacaatgccaaacagaaaccaaattcattattgataccccttttgccgtcttaccgtgaccggaaaatgtgccagttgaaaatgtgtcattgatacaaataagttaaaagaaagttctgtagcattaagtattgtaatataaaagtaaaattctataataacattgttctaaattccgaaccccggacccgaaatcgaaaaaaagtcgaaagtctaaatatccgaaattgaatttttggtccaaaatcgatttaaacacatggaacacatggaagtaaactgaaaggccatcaatcaatccttcaatatgaaaacatttacgcattttttaaaccaaaaactcaaaatttaataatttggattatcgacttttttgttcgaattcgggtccgtggttcggaattggcagaaatggataccggatttgtggtcagtgacctccaaagcccaaggatttgtttttttatcacactaaaatttcattgacgcattttcctggaaccgtctgtacaatgtgatatgaaagacagagcccattgggcctggcgcagagtgggccaactgcttatatgttagacaaatttaacaaaatgtataataacaattttttatgttggccaaatccaagaataaatggtttcattcatgtaataatatattcctttgtgaaggcctattcataaaaatatacattaatccatgttattcgaaagggaattttcgtaaaatttaaatgcacataatttgtataaatcgttcttttttattaaaatttgaaggtaagaaaaatgcgcaaaaaattcttcgcttttacaatttttctgttcatcgttttgcaattaacggatgctgaaatgtcaaacggtaatgttgtttttaacaattaaatgaataagcattaataatctttttacgaaaatggctttaattaaaatgaaaatttttcaaatttttccgaattttataaccgttataatcggacattcacttgatccatttttcataaattttactgtatttccactggagttttttgattggaattataaaaacaaaattttatttgcttttcatggatttcaaaaaatttatgtcgtaatttggtatgttcaagattcaaaattaacattttgttcaattttcaaaatctcttccattttgaaagtatttgatatgtttagagaagaaatatatttttattaattaaaatttttatttcaatttcagaatacaaagaagcgtgcaatgacacatgtgctgctttaccaaagcagacttgcggtcgtggaaggccacaaagtaacagtaactcacagataacttgctactgtaaatggaagaccagcggatgctgtttcggagaagggtgtgtaccacgtgaacaaaccgcagatgaaattacgctttacggtcgcaccggaatatgaagaaaacaacagcagaagcaacaggcaaagaaacctgaacacttccactgaccaagatgatattttgacattttcggaatgcaaaatttgttgcgatgttatgccatttatgttacatttgttagcggataaaaattgttgtcttaaccagtaaaagaattcgaaagcgagcgaatatggatgaaattatgcgggcacaaaagtttataaacttgggatcaggttcaggatcaatacattgtactcggatttaaatacactggtctattccgtttatcagactcatagaaaattcggacaaaattcgaacctgttcgggttctctagaaaaattttttacttcttggaagagctgtgattttattttgtttatttcttattgattatgcttaaaaaattcattgaataattgataatgtcatatattaattggtgagaaacaacaaatgaacggttaaatggtaacgcaaaacggaaaacaggtgagtcattctttgaaagcatactaaacaacataaa

SEQ ID NO: 19539 - DNA, 1249 bp, Heterodera glycines
  unsure (1)..(1249): unsure at all n locations
gcactgtgctggcgactgtgcctgcagcagaacaaaaactgtggcacatcgtgccaaatgaactgtntagcaattatggacagccacagacagaagcgattgatgtggcgtgatcattttgtgctaatgatgccaaaaaggcataaaaatttgacatttggcatgagaagaagtcaaatttggcaaaaatttaactggccaattcggaaaaagcgcaaaacaaaatattcgtcttcatcttcaacaacgacgacaacacaaattaacggtgctgctcgagcaaattttaaagagcaacggcactttttgagcggaaaacagccgatcagatcggtttggaggcgggcgaaagttgcacttggcatggaagtgagtgaacaaatcaattttaactactttttttaatgttttaattaacttggaattatttttttaaattttttaccagttttgggaataataatataaaaacggatttatttaagcgcaatagtgaagtgttggtgaaacagttacacgtaaggacgacagcgggtgtttttgttgcgattcgacgcccaattcgcccgcctccgccgccgccaattttcgccgacaaatttccccatgcttttacctatgccggtggaaggtgggtgatgggaggcactgttaaaataccaaaaaattttgaagattttaaattatgctttttctgtgtacctattagcaagggtgtctggcaactccaaagtaaaatgtgaacccgaaattccggaaatgggtcatttgggtgccaatgttttggcaacaaactaaaaatttaaaaataaattaaaaaaaacacaaatagcagcattcatatttaaaaataaaaaatatataaaaggaaaatataattcttcttttctcaatttttaacaaaagatttcaaagggcaattcttcgagaattttgtgcaatttctgataggcctactcattttttgctgaaaattttcccaaaactaagtattttttggaaaacttttaaaatttatgccattttttggggatggcccgatcaagtatnnatgatcaagtgggtggtaaaatgtttttctgatcagcatcaaaagttatcttattngntagcagntatctnctctgttttagtgactaaccaccaaaagggggggtgaagtttgagaaaattatttttagccaaatattcttttacagaagaaatgatagtaacattagaaagcacattttaaatgctacaaaaagcc

SEQ ID NO: 19540 - DNA, 1095 bp, Heterodera glycines
agcagcaaggaggagcggagatgaaaaagcaagaacagcgggaatcatcagcagatgaggacgaatgggacagcgattaaacagaaaaatttcgatggatggaggagtaattaagcaaaaacaatcggggctaattagcccaattgagtgccctgaactcattcacttcgcaatggccaagtcgttttaactgtcttcaaatcagagaatccttcctaatgctattttgccttccttgtcactttttgttgttcaattctccgccgattacccaaatgtccttcgaaacgatcgcaattaatgctcaaatcaattttattgcatcagaaattgttcgagtgtttgtttatgcaattgtcaatcatttcgttgaactgctggtcaagtccatatttatgtatttattcattgacgcacaaaacataaatttttggcgtttattgttgaaaattggaagaaacagaataaacaaacattgaaattaatgtcaattagttttttaattgttacaaacattgaaaagggtaaaatgtcatggcgctgttagatttcgccagtgagtgatttcgccagttggatttcgccagtgagtgatttcgccagtgagtgatttcgccagtgaactatttttctttttctcgccgtctgtatttgatttcgccagtaattgaactcgccggtgattgttttccccagataaggcaaaattcaacccatggacaaattttaactatagaaataaacaaataaagggggaaaggtcagcaattggtcatctcgagacgagaacaaacaaatttgcttcgccaatctatttgatactgcgcctaatcagtttctccaatttgttggtcagcggtgtgtgtgttccaaatgtcatcttatcgcaattcacaagaaaaaatttggggttttggctctcgttccttggtcacttttttgaattccgtcttgcgaaccaaaacaacaatttcttcttattttctatggcattgcttcgttttgatcaaacaaaatcgacacggggaaaaattttgctaacaaatggaggatacgaatatgtttttgaggttggaaatttctaataaaagaaga

SEQ ID NO: 19541 - DNA, 1810 bp, Heterodera glycines
  unsure (1)..(1810): unsure at all n locations
gttgttaatttaaaatgtgaacaaagaatgtttaaagctatttcaattaatgttaacaattgatcggcatttgcacgttttaaaatttctctcctttttttcatcgatttggttttggcaagtaaacgaataaaatcaaaatttttatgtactattgctccaattttacaaaaggccattttttggaatgaaaatgatcttttttccttcttcttcatcgtctttaaatatcccactccttagtcgcaacagggggttagaagcagcgtgcatatcaacgaggagataaccatacggtttattggtcgcaatacggtaggccgaaaggaaataatccaatttccctggaaaaagttgaactccaatgttccgaatcgccaatgcggaatttggagctcgcattaacaccaaatattggacattttgtctcgcaactttaattcttcgtttaaacaaattttgggtgacaaaaacaactgcaaaattcaattctgatggtgagactttttggtgaatagagcactaagatatgattcatcgatcgaaagcaaaagatcgtcaagaataaacaataatggttttggtagacggttaatcaaatcctcagggggcactcccgggtacacattcacaccgcatttttggagtgtttccataaacaaataaagcaatccaatgtgatccaggaaattgatgtgggtccaaattgaataaacaataatggttttggtagacggttaatcaaatcctcagggggcactcccgggtacacattcacaccgcatttttggagtgttggaacaatacttgacatttcaccaaatgcataaagcagtgaagcaggtctagaactaattaactccgaagattcagcaataaatcttattaaaaatgtgcttttcccactccctgatggtccggcgataatcatgccaaaaggcatttttaatttaatttctttattggaataaaattgattaccaatcatattgaattttaacacaacacaacgaatttaataacttaaatagttttttttattctttacgactaattgacgcaatggctgctgcttcttcatcttctgcttccttcttcccctttttcttcggcaaattctggaatgtctttcttttgttggtttgagtttggttcgtctttcttctgttcaccactcattcccatcgtcgctgcagaaatcggtgaaaagaaatcggaggcttttggctggtgctgtcttggttttggtttgggcttgaggtggtccccactaattcccatagtagctgcagaaatcggagaaaagaaatccgaagcgcttggcaagtgttgtcttagtttcggtttgggcttcaggtggtcgccactaattcccatagtagctgccgaaatcggagaaaagaaatcggaggcattactctgcggttgtggaagcgcttttttcaccttgttttcgtcgacttccattcccgttgttgctgccgtaagagcatcaaaaaattcatttgcttctccatgcttcttttgaggaacatccaatcctgtagtagctgccgtgatagactcaaaaaatttttggtgtagtttgctcttccgttcctcgctcatttccctttggctttagttgaggcggaggcggtggnnggcggtaaatgtagaatggagtctcggtctgagtacaacattggagcgnaaaccgtggtcgacattaaaactccaccctttgtacgacatgaatattatttttaagaaaggcatataatatttaaaaaccttaaaaatgtatagcccggcactcataacatagtca

SEQ ID NO: 19542 - DNA, 2348 bp, Heterodera glycines
aattcagattttgaatcccccattcctgaattttgtataaaatttgatccaaatgctcattgtgtttttccaatgttgggctgacaatgatcagatcatccaaatatgccaatgcgaatggcagatatgacaacatgttgtccattattgactgaaatatgccaggggctgatttgacgcagaagggaagacgttcgtattggtaatgcacgcggagtgtagcaatagtgcacagcttcttcgaattttcttctaattcaatttgaagatacgcatccgacaaatcaatctttgtgaaatattttccaccatttaatgtgacaaaaatgtcggatggaagcggaagcgggtgctgattcaattggagcgaatcattaagcccggtggaaaaatctgcttccattcctgttgttgctgccgtaagagcatcaaaaaattcatttgcttctccatgcttcttttgaggaacatccaatcctgtagtagctgccgtgatagactcaaaaaatttttgtgtagtttgctcttccgttccttgctcatttccctttggctttagttgaggcggaggcggtgggggcggtaaattgtagacgggagtctcggtctgagtacaaacattggagcggaaaccgtggtcgacattaaaaactcgacctttgttacgaatctgaatattattttaaagaaaaggcatataatattttaaaaccttgaaaaatgtatagcccggcaactcataaacatagtcaaatggcacgaatcgaggactaattttgaaacgagaacaccaaattgttactccttcttttgaaatgcaccattccgtctcgcactcagtggccttgcactctcgacacttgccaacgatgtcaaatggaattgttcgaggcaccgcaatcctctcgctgatcagtgtaatgccattggtcgtatgactgatctctacagccggcaaaatgttgtccatgataaattttttatcgttataattaatgctcattttttagatgaatgagtttgaccataaatttcgacttttatataccttcccccatcccatggccattaccccgtctttattctctacagatattttctccatattataaaatggtccctcatgtttgttgttcttgagtgatggaccaagccaactaaaagtaggtcattgctcgagaacgtaaacattatggatgatatcattccagcgtcattcttatttgtttttcctctcttttctaccttttttttcttaatttagcgatggcacgacaaatgaaccttcctctgtttaaacgccccaaaccgactgtaagacattttcacgttggccaggtacataatattttaatattttttcaatctttagtttttttaatatttcagttgattctttttgaaaccaaacattcagcaacggggatttggtgtgccgttttgctggtgatgttttttctagtgtggttcctctggtgagtttaagcattcattttatttaaacattttatatttattttattttaaagatggtcaatggaacggatgtaccctggcacttcgtcaatgaaacgaaggacggatgaggatggtaaacaaaaattttgataaattatccgccaatttatcttctgcttatcgataataaataaataaagaaattttccatatttatgaaaattaaaatacaaaatttttatataaaattttgaagtaaataaattttaaatgaattattgtttgtagttgttcctaataaaataactaatttttaccccaaaatattttattgatcagagaaaaaattaaaataaaatttgaaaaatttaaaattaatcattatttaaaataaaaataattaatcctctttaagtttaatcaattcatttccattttctccaaaaatctctttctctgttcgatcctcgccccattttactaacggacaaagtcatcagaggcctgcaaaaaaaataaattcataaatggtttcgcttaattcattactaccttacctttcgggctaaagcgcaccgaacgcccacctccgacgcgcataggactttctgtcgtgcgaccagcgctaaaatttttaaaattcacttaaacaatgcacggtgcgtactgtaattttaaaaatctaccatattcttcacgctgaacacagcaagcggacgcccaacctcctcctcgccgatgcggacaggcgggcgcgggcgagagcgtcgagcaggcggagtccccgagcgagggcgaggagcagcgggagtgccttgacggaccctcattttcatgaaaatgagccagaaaatggccacctttgaaaaaaagaataaatcaaaaattgg

SEQ ID NO: 19543 - DNA, 2372 bp, Heterodera glycines
  unsure (1)..(2372): unsure at all n locations
aagacgaccaacgaaaaacgtggccgaaattgcacctttcncaagcgggtctctgctcagcccgtcgtcgccgcctcttccgctgccattggcacttccgccgcaaatgcgcccaatttggaaaggaaataaaaacatggaaattggggcggagagagaagggaaatgcgaacggagcaacaaaaagattggattattattttgttttccctgttgctcttaattgtatggacacacacaaattgttgctgtttttattttgtttcgttgttggacggaccgacgtcggtcctccagcctaattataattaatggtgttgaaattacataattacgtacatatatttatattgttttataccataatttacacggttattaaattccgtcgtttcgtcctctgacttttgttggtgactcggccaatttctgtaattcctttcattctttctcatccgtttgtttttggtgtacattttcacatcctttcccatcgtttagctttgattcactttttcgttcattccatcgcttttagtggcgttggatgggtgtgggtgattcttccaacaattccaagccctcccccccccccctcagtcattccgttattctgtcaaatccacgtgttcagctgcgtgcggaataataaatgaatggcggcggggcattgacttttcaccaaatttcaggacacaatttgccattttcttacacattacaaaagcgaaccttttaaaataggcctaaaaaattttaaaatcagttttttggcaaaatgccgtcgtcggctgtccaacaacagcccaagtcgctggtgcaacaatactcccaaattgtcgccgccgtttcttcctattgggtctgctccattggccttgtgttcctcaacaaacacttgctgagcagtcccgatctgaaggtgccgtaggtgtcactgactgatcaatctgtgccattggccatgtgtgttctttctatctggtcacttttttgatcgggtattatcggtgccgttctgtctgatcactttccttgatcgggtgaacatgatcggtgccattgccatgtgccgttctctctgatattttttgacctggtgatcatcgatgccattcggcatgtgccgctctgtcctccgatcactttcgatcgttctcccgtttacctcaatatgcctctttctgtccgttcagttgaatgcgcctctgttcgtcacgtggtatcagtgtctgacttcgctggatttctgtctgttctgctctctcctctccaaatggttccctcgtctgatcaatttccccgacatgtctcttgaccttcgcttgtcccgggaagtccgttcgtccccttttttctgtcttcccaatgatcattgattttccttaaggttttgcctttgtccatcgttttcgtcgcaatgatcagtttcaacaatttgtgcctcaaatatgtcggcgtgtctttttattatgtaggacggtctctatctacagtgtttaatgtggtaagtaagcactctttatttttgctataaataaacgaaataattcctgtgcaatgtgagcaccgttggttcaatggtagaatgctcgcttcccaagcgagtgacgcgggttcgattcccgcacggtgcatcaactttttttccatttaaataattatttttatttttactaatttcccagatttgttcctacctcattctcggccagtccacctccaaaccggctttactctgttgtatgatgattattgccggcttttttctcggagttgaccaagaagatgtcgcgggtgaattcttcaccattttgtgctaaaattgtttacccaaacttttcctaattgcttttcgttaattggacatatttaattagcgtcccaaattcgttataattggcacatatgtctttaagactccggtgcctttttcccccttcgaatgcgcttttaaatgcccaatttcccctccctcccccaggcactctgtccgtcattggcgtcgtctatggcgttttggcgtccctttgcgttgcgctgaatgccattttcaccaagaaaacgctgcccaccgtcgctgactccatctggcggttgacaatgtacaacaacttgaacgcgtgccttctcttccttccgctgatgcttgttgccggcgaatttggcgaagtgccctactcgccgcacattgtcaagctgaacttttggggcatgatgacattgagcggcttctttggcttcatcatgngctatgtgaccggtgggcaccagtgccgttgtcattcaatggcaaaccaaaatggctaaacagaagcattcaggatggcaatccaagtgactcggcctgacgcacacatcagcggcacgca

SEQ ID NO: 19544 - DNA, 823 bp, Heterodera glycines
cgaatttttgaagtgaattaacaaatgtttaacggggcggtgacgcaacccatgggaagaacggcaattcaaaatcggagagtgtcgattagcattaattaatcataattaattcattggcacatcccccccccccccccgtttttgattggttcgatttccatgctcatttatgtatttgttcagcctgctttgaccattgcaataattgtgtgatttttgattttttgtttttattttctattcattttgcccgccctttgactgttttatttggatatttttaaatttattaaatgataatgtgattgaatcatctcattccattttgggtcatcgcatttttgttttcgactcattttctcgcactttgtgtgccaatccaactttctgtgtgttttttctttcgcgcgccgtccttccattttttggcgacttttttcgccgtcgtcatttttcggagcagaaaattgtgtttgtttaacactaaaaccaaatccgcatcatttaatgtgaaaatggcaatcaaaatttggcgcgggacactaaacgggggggggggggggacggaggagggaattcattcgatgggcggacggacgacgaaacgccgccgccgcacctttgcccatggaaaagcatctgggcctcaattttatgcacaaagcatggtcaatgtagttcagttctaatcgcttttgacccgttcatttttatttttgaaaaatgccaatcattcgccatgaagcataatttggccatagactggtgaatgattgccaagatgactcccattgtccccccgatgaaaaatgatacaaaa

SEQ ID NO: 19545 - DNA, 1086 bp, Heterodera glycines
cttctctctctctccctctaacttttctccttctccctctctctatcgcgcgttttctcttttctctttctctgtttctcgatatctctttctctcggtatctctctctcttcctctctctccccctctctcttctttcacttaacttctctctctctcattttatttttcttctcctctccctttctctgtgtctatccgtccctctttatctctgtatcataattcctctctctctttttccctctcttatctccccctcttttttcttttctccctttttcttttttcttttctctctctctctctctctctccccctctccctctcacttttctccttctccctctctctatcgcgcgttttttctttttttattctctgtatttctctgtatctctctctctttctcactctctctcttcctctctctcttttactctctctctctcttttactctttcttacctctgtctctctctcttcttctcttctcttatcttttctctctgtcctgcttctcctcttttctctccctctctctctcctcttctctctctttcttctctttctctctctgtttttttcaatccattattttttatactcataaaagcatattttaaattaataaatttaattcaaattcattaaggaaaaataaaaattacattttaggaaaaagcaaaatatattgtaaataaattcataaacattattatttgttaaaaaattttctttctgtcattttctattttttttgcaagtttcgtgtcaaaaaaaaagtcaagtttaaaatgatacgtacggacagcaccaaattagtatagtgggtatttgataaaagaaaaatcaaacaaaaaggaagaaattatataagaaaagaatggaggaaaaaattgaaataagacaaatgaaattaaagaattaaggcttaaccaataaaaattttacaaatccaaaagtaatgaaaaattctaattgttcaaaaatttattggaaagaaaaatgaatataagcaaaaaggaataaaatattccaaaaaaaatgacgaaaaattatgaagaaatttgcaagaaaatcgga

SEQ ID NO: 19546 - DNA, 1010 bp, Heterodera glycines
  unsure (1)..(1010): unsure at all n locations
taggtccacgctgatgacttttgctcggaggcgtanaattggatcgcaataattacgactatcagagtgaaaattggcaacatcagagacgaattggccatcattcaagataaattatataattttcgtatttaattgtgagcaatgatttaaatttgcaaaaagattccgtttaaatagaaaaaatttgtaaagaattgtgaaatattttgggaacgggattagcattgggctgactaatctgtgctgcatttaatcacatcattagtaattcttaatctattttgtttggcgttgtgaaactcgtttttacgaattttaattttccgtcaaccataaattatttttggttaaatggcggcggaaaatgcttgcacataaaattgactgtacaaacattttttgcattatttctgtcatgttgcatatttgctagttttttgagaaaatttgttgatttatgtaatttttttaaaaaattctcttaaatggccattttaagtaaactattatcaaaaattcccaaaatttcaaatttgtggcaataggtatgttgttttttctatctgtgactttttcattcattcaaaattttattgcttctgttgtatattatgtaattaatttctccattttcagtacatctatgacctcgaagatcaaacattttttttaatgaaattcattaaaattccaaattttttgcggcggcgccgcggttcctaaaaagttagtttttttggaagaagcgcaactcaaaaaacatctttatagattttttaaatttggattttcccaaattgctgatttttgaccccaaacgctgattttaaaaattttgatttgggagccctgcataaaatagcaaaaatcatgcatttctaatttaaataaatatgaaatacaaaggaaatttaatttaatttttccccacaattggaaaaatctgtcatttttcactagcgctgaaacaaataatgaaaagacagaacaattcgcgaagaaaataa

SEQ ID NO: 19547 - DNA, 782 bp, Heterodera glycines
atacacatacatacaaatgaatatacacatacgataatatacacatacatacatatacaacaacaattatacacatatatacaacaatgtttatcctctcatttccgtagtgcgacatttgcgggcttgaaatcttcttcaaatttcaaaaatttcgactttttgcaattttcatgtatgacttgaaaaatgccggtaatcctgtattttattggtcccataaaaaaagagattaaaaagttgtttttatgcatttcggagtaatactcgggggttttcgggggcgctgatcacgaatatgatatcaattttgacctatttcgaatcccgaacccgaattcgaacacaagtcggaaattaatttttcaccaaaattcacatgtattgtccaaaatcgattcaaattcactaaatggccttgaatctttattttctattatattccgttcatttgaataagtttgggacaataaatgtgattcttggtgaaaaattaattttctccttttgttcgatttcgggtccggagttcggcatagataaaactgaagttagattcgtgattagcgaccccgaaaaaccctaggaaatgcgtttcaacaattttttaaaaattttttataaaaaaatgttcgaattcgggttcgggattcgaaataggttaaaattaatgtcacattcgtgatcagagcccccgaaaacccccgggtactactccgaattgcataaaaacaactttaatctctttttttatgggaccaataaaatacaggattatcaaa

SEQ ID NO: 19548 - DNA, 1063 bp, Heterodera glycines
agaaaaaatcactatctcttcttttttggaatattttacgtgtcaaagggtgtgcatttaagcgactcgctgtgcttgcccactgcatttcaaatagctggtaatttttatttctccggcctaatccagaaaaaatcactatctctttttttggaatattttacgtgtcaaagggtgtgcatttaagcgactcgctgtgcttgcccactgcatttcaaatagctggtaatttttatttctccggcctaatccagaaaaaatcactatctctttttttggaatattttacgtgtcaaagggtgtgcatttaagcgactcgctgtgcttgcccactgcatttcaaatagctggtaatttttatttctccggcctaatccagaaaaaatcactatctctttttttggaatattttacgtgtcaaagggtgtgcatttaagcgactcgctgtgcttgcccactgcatttcaaatagctggtaatttttatttctccggcctaatccagaaaaaatcactatctctttttttggaatattttacgtgtcaaagggtgtgcatttaagcgactcgctgtgcttgcccactgcatttcaaatagctggtaatttttatttctccggcctaatccagaaaaaatcactatctctttttttggaatattttacgtgtcaaagggtgtgcatttaagcgactcgctgtgcttgcccactgcatttcaaatagctggtaatttttatttctccggcctaatccagaaaaaatcactatctctttttttggaatattttacgtgtcaaagggtgtgcatttaagcgactcgctgtgcttgcccactgcatttcaaatagctggtaatttttatttctccggcctaatccagaaaaaatcactatctctttttttggaatattttacgtgtcaaagggtgtgcatttaagcgactcgctgtgcttgcccactgcatttcaaatagctggtaatatttatttctccggcctaatccagaaaaaatcactatctctttttttggaatattttacgtctcaaacgggtgtgcatttaag

SEQ ID NO: 19549 - DNA, 1357 bp, Heterodera glycines
  unsure (1)..(1357): unsure at all n locations
agctgatcaagagctttcgaatgataccaaatttgtccgaatttgaccgtcttaaaggttcagaggtcccccttttcactcaatttttcgagttttgaaccggttcaaaaagcggttttttggcatttccgcaactcgacctatttttccatgcttagctccttgagacgaatcgattggtatatcatttgacccatttttcacggggcgttcactatagtttatccaaactgaaaattgctaaaattttcgaaaatattcctaaggggctgggaaaatttttttgggaaattgaataggcctctaaaaaagaggacaaaattctctatcggattgccttttataggttcagcaaatctgttcgttcatatttgcttttttgttaggccatattcttttggcataacaaaggaataaaattttattattgaaaaaaacaattttttgttaaaaaaaaatttgaagcaatatttttgaccgatattatatattaaaatattttcccactttcacttgcgtttccgtaagaccattttccttggccaatttgtcccgttgagaagcactcaaatatttgttggccacaaattcgcgctccaatctgtccaattgctcagccgagaattggaacctttctttcttttttggcggcacttcgacctcaaccgaaaagtttttggcatttttttgtacttatcttcactcacttcatcgcattccatcgcgtccatttggccaaggcaatcggtggcggacggattgaattcaaaaataaaatagaggggacctgaattttgaaataaaacctgggcgaggcccctggatttccgacatgaacattttgttcagggttcttgacggaaagtcctattttgggtactttcctgttttgaggccacacccaaaaatttaaatcaacaaaaaggaacgcgcaaaataaacaaggcaaggcgcgcngcgcgtaacactaatgaggnaggcataaatgcaacaatagcagataaattccgtcaaattgatcagnctgataagggaaatacaattganggaagacatattttgngaatgaatgtggtnggtgaaatgggatttggnccaaaactaagggcccaaaacacngataatttatgncatacacagcngagtggggaagcggcgggcttgtccgaatgcctaatttatgcggtgagaatgtgaattttgtgcgncccttttgttgattttttaaaatnnttttgggtgtaanctctcattaacaggnnaaggtaccaccaaatantgttnntctgttccgtttggnnggccggcttgggggggaaccgaataaattggacanccgcncnncggattttggaca

SEQ ID NO: 19550 - DNA, 1936 bp, Heterodera glycines
tagaaaagatcaggcattctataagcaaatgtccacgaaaaaccccacgaaaaaatgggcgataaaatggaaaataaaacttttttcattatgaatgaaatgatgcctttcttatgctgatgttaaaaataataataattattatttccattttatttacgcttataaacaaaataatgcagaataagataaaaaaaaatctttttggtccaactaaaatttttgtttatttatttgatattaaatagttgtccgattttatggggtctaatttaccggtagccctgggctttcgggtcaccatgtttattgtgtacatatgtatgtggtaactttcatgatttctgtgagaaaatgttggtcaaaatttgctgcccggaggcccgaaaatttttattaccgtaaattttgaattcccaccctcccttttacaatacaatctaaaatcactatgttttgcattaatttaattgagaaattccctaaggcataattgggcgtcgttttgtggcaccatttctttctctcctcctcctccgtctcattttcccccattattaatgccacaaaatgtgtgctgtgttctcttaactttttgactgtacttggaatggcttcacttattgggttgacctaaccccaaaaagcgttcattgacaatgagagaaacattttagggtgggacgccatccaacaacaaataaatgccaaagagaattggaaatggtacagtaagacaggtaggcttggacattgagagttgaaaaataattttcaacgatttttatttgttattttacaataatatgaagaaaaaaatttaagaggggtcagtgccaagcagtttttgttgttgcagcgtttttgagttttggcaccgcattcctatctaattcttgcattttatatcacgcaacatctatagtagggattggcatttaatcatttaaaatatttcaaaaatcaacaacaaaaaaatttcatttctcattaaacaaaaaggatacaaattaaattgaagaaattatacatatttaaaaatatatttttgagccgaaaatgcccggggcgaaagcggacggggccgaaatgcctctgctgatgactcggttgaggtcaaaccaataatttgcttaataactaacgcccattcccagcacagtccgagtgaggggtcagtcagtagagcacatttatatgtagtggttaataatggacgaaaatgagtcacattttgaatgatgatgaggaggaggagagaaggaattgtgtcacgaagcccctgcattaatttaaattagtaaaatattcgaaaatattttttttaaaatcgttaggatttttctagaactcaactaaaatattcatattgtttattttctattaccatttaaaataacaaaatttgaccaagtaagttttataaaaagttatgcccacaattacaaataaaaaaacttttattcatataatttttgaaatttttcatgccaacaagaacattaagggctcccgcatttgctgtaattgagcaatttgtttttttaataaagctaagggtcatgaaaccataaaaattcatgggtttatttgcatgatcacgcttcatggaccacccaataaaaaaactatttatttttaatttatagatttaaaaaaaattttccatgtcaacgaccgatcaccggggacaatttggtgccaaggaatgtttagtaagcgaacattttgtgtcagcttatttggccaaaatgcgaaagaataataaattggtctttgggaaattggccaataaaaaaatagaaaataaaaaattgcgtcattaaaactgtaaattaattttaattgtaaagaaacaatgccccaaaaaaaagcgacgtcaatttctacctgaacaaatagagcgattggatcaagaatatcaggctaacaatta

SEQ ID NO: 19551 - DNA, 2055 bp, Heterodera glycines
  unsure (1)..(2055): unsure at all n locations
cgtatggaggttgttgactcagaatcggtgaaaatcaatttccggaaaaatttttccgcagacgttcgaaataacacgcttccgagttcagattcgtgatcagcgaccccgaaaacttatcaaaaaattgggttttaaaaataaaaaaaaatttatcggggcgtaccgcacaagtaccaattcgtcacttcctctcgggtcgtccccccccccccccccgttcaatttcagaaacttaaaaaaattcgaaaatttcacaaagaaaatttttgaaatttttcagtattttttcaaaaaaagttattaaaatttttattatttactttatctagaaaaaatatttctggaattttgtggcaattaaaaaacctcgagtttttacgaaacgacatcaccgcatttgactttgaagtacggcacagaagcgatcattttattggcatttgtagggaaaaattttaacgcttttaaattttgaaacattgactgactgacattcattttctatttgttatttttgcattcctcggtttttctgggatcgtttcacttttttcttaccgagaaaatttgttcaagtattaacctctgtttagtttcatttcttaatgtatgattggtttctctgctgcagtgattttttctttaattttcatttatcgcattttttggcataaaattgggcgaaaaatctttttgagctttaaaatgtgaaggacagcctttaaatatttctgagttttatttaaaattattatacaattgaaatttattcgcgtgattaatcataaagcgttgctgctactcagccaatgcaattggaaccgtacaattgaaagacgattccgttcaaattgcttaaatcttcctcatctttatgctgatccgtctccccaattgggcttcgcttcaacacccaatcattcacacagccaaattcgcgttcttttttcactgccagcttttcttgggttctttcattcaccacttcaaacggcacaattggtgccaatgcgcgaagttgaattttaataatgtaattggcagaagaggtggcacggagaaatgcctaatgaatcaaaggataaatgacacgtcacccattggccttttgcttctgcatgtaccggtcataaatgtacatgtgcaagccgtacgccgactcatccctcccccaatcctaagaaatgaaaaatttctcgaaaattcatctcaaaatttatttatttttcatgacaagaattttttgattttaacatatgtttctcaatactggtttggcttatttctgctgctatttgaataaaaatgttttcatttactccttaaatttcaggctttttagaattattttccatttttaatgactattttatggatttttagagcctaaagcctacctgttttgcaatttttagagcctaatatgtataaatcctagtcattagtcaaaaaactataaaataaaaaaactgcttataaacttgttcaaaggcaatttttgtccacgacaaaaatgtttactacggagattttgccgacctttttcaatttgttgatccattcgaagtttggtggtggtcctttgctataacaactcattccgcatgtcaatcgtttagggcgaccatcggtggacggaatgtgcaaccatttggacaacgctttgccaatttttccatctgtcccaccatcatcagcaaacatgtcggagaactgaccaccggcataaattgaactcagattgggattgaactgaattgttgatgaaatgaggcgaagcaaattgtcccgatattcgattttggaaaattccaaatggcgaatgtttggcgcaaaaatgggccaaatttgttgagccataacatcccaaatctgcttgtgtttagcagtttcgtcgatggaatgtattattgacaaatccaagttggtgcctcggtcaaaagcttgcttattggaacggagaaatgcgacgacactgtggtcgatgtactannagggatgcttttggcactnatgcacattaagcgtccatcgccactttctttggtcata

SEQ ID NO: 19552 - DNA, 1429 bp, Heterodera glycines
tagcgcgatagcgctttaaaacatcagactaatgcaattaatgttttaaaataacaaatgagggccatatattaccaagccacgcatgcacaccatagccaactgggcaccctagttatatatacgttagaatgataaggcaactcatcttcaaaaacaaaatctcgggaacggctaagcacaccgggctgaaattttgcaccaaggggtaactcgagacggggcatctgggaaaactataggttttccggtccaagggccaactgagtaccagcggctcgaaaactgactttgccgacagtctcagtgttacgaaattttttgcttttgctttcagagcttagcggaccccaaaaggcacaccccccaactgtgctctacaactttgccagcaaaagttttttgatcagaccaaaggcctggcctggaaaaatggcagaccgaggtcatctcattttggacacttcagtaccaggcgaataccgcgtccgggtttgatgcgagcgagggggcgccagcggactttttgtagagctttcgaagctctatctatccatctttaaaaattttaaaaattttcaaaaattttcgagctaggcctaaaattcggtttttcagtttttgaattttaggattttttaacgatttttccggggaaaacggagaccacttccaaaacatcgtttttcgagctctatcgattggtgatgtttttagaaaattttcgattttttcccggaaatagaaaatttttttggcctaagcgggacatttgagtcccgggcccataactcgtcaggggttggttttagccaaaaattgtcttagatcttttttgtagagcattttaaatgctatcgaatggtatactatatgaagggaaattttcaaaaattttcgagctaggccccctagaaattttcaaattttttttggtgggccaaaatgggggtgaaaaatttttttctggggtattttgaggtgctgagcacgaatatgacctttgttttttgtttcggaatttttggaattttttaaaaaattttgaaaattattcattgtttgggcctcgagaatttgaggtaatttttgaaaaatcataactaaacttaggcttgtccaattttcatagaataaagcaagaaaaattgagaaaaataaggacgattttatggactttaattggaatttctatctgtaaaattaaaaaagttattccagaaattctggaaattttcgaatttgcagaaaaaaattcagaactcggttctgaatacctattttcacaaattaaataatgaaaaaatccgcgattttttctctatttataaatttatttcatattttaacccttttttcaaaaaaggtataaattaaaaggatttcggaattgcgacaaaggggggagcacttggttttgaggggaaaa

SEQ ID NO: 19553 - DNA, 2559 bp, Heterodera glycines
agctaatagagaaatgatagggctatcgaatgataccaagaatgtttaattctgttgacttttacaaaagttgtggacagtttttggttgaaatttccatttgatggtttttatataacgacatagcaccctatgttttacatgtttaggtttgccccaattttcttcctaatcccttgtttttctcttttttattcatttatttatttggactacacccaatttgtttttgacccgattcattttgttacaccaactcattttttgattcaaatgtcaaaatcgaggcacaatcgatgaaattagccttttttgaatttggtttaacttaggaagcaatgcttttgaagttggttagcacatttttgttgtattttgtctgtttcaattaatttcgaaaattttttttttcgtatttttaattgttttcttttgttttcgtaaaattggagtcataattcgcgaaacatagtgttcatgtcatattaaaataaaaaatttcatcaaaaaagaggttgagagaaactcagaaatttcaatacataaatttgtcaattaaaactataaaaccacaaaaaccaaataaaaagcattcctaagttatagcttataggtcaaagaatatttaatttggtcgattcgactcaaaaagcgagtttgcccaaggcaagttggttttgccatttattcttctgatcattagatcccgcgttttgaggcaaatgctttttttttttttgctaacttgatatggccaaatacgcacgaaaaactagtttttagcgtgtttgaagcctttaacttgaaattggtgccatttttgctttttttgcaattttggtgtcgaattccggacacgtaatttttctgccttttttgacttttcatgccttttttaaatacggatctattcagtaaaccccccaagatattgatttatatagatagactaagaaccttcaccaaatcaaaaaagattaacgcacaaatgctaagtttaagcagccctttcttcatagcataagcacagaaatatgcaaatccacataaatttataactctattcctaaatgaatgttttttgcggttaaaagagcgtaaaaaccgagaagacccattctcgcttctataaaaaatttcttctttatttatcaattccatctcacagcaatttttattttaaaatacgcattttaatgtataaatctgtgccttccgcttcatttttgattaatgagttcaatttttattaagattttgccgataatcaatggacattttcaccaattatattgttgttgaagaaaaaacatttaccatttggaacaaaaattcatatttccaagactgtactcaattcgcaacactgtaacttttttgaattttattttgactgaattaagccccatttaaaaactccaatatgattaatttattttagtagtttcaaagttgatgcaaacactttttcattggtaatcaaggacaatggcaatgccaatcagtcgacggaagtgccattggcacaaattaccatttggggttggagtaacaagggggagcaggaggcaaaagaggtgagtgagtgcttaatgatcattgattgatcaataattcctccggcaaaaattaattatgtgaaaatgatgatgccaggagggtggctatattacagtttatggtcatattttatatcttcttacttgatcaatgcctaggttcttagtttcaaacgaaagcttgaagtctagagttttataaccaaattatactttttgctcttttcttgtatttagagattgccaagactttaatctttcgttgatacaaagaatatatgattgatttttgtatgaattacatattttataaaaatttgaataatacaattctctattatttccccaggtgaaaattctgaacattggagggaaggcaaattttggcaacattgggtgctcaaatggttctcagcagatggctaccattatcatcagaattctcaaaaagcgcgagaagaccgacacaaagtgagctttatgaaaatttaggaattaatcgattttttaaatttttcttatttctaaaataaatgaataattaagaaaaccattttaaattatgaattgagaatggaatttccggttcagtccgccatgtcctccactcagttcaccggacgacgatttgactgttcaagttggagaacagcaggtgaagcgccaaattggcactataagaaattcaaattttttgtgggactcgttcccgcaaatcccgcacgggttctcgccgccaaccgtagcttttgtagtcattcacaattagcctctgaatgttagtgaaaaatttgcatttttggcattaaattttgactggcaaaatcggtggcacaaaaacacgttgcataggtcgagtcgagcgagcgagctgatcgagttttgatcaaattgacactgggtttattgatcaatcttgatcaaattgacactatatttgtcctcaggtcacggtgtgcgcgccccattggctgaatgtcccgtttcgccctagtgatcc

SEQ ID NO: 19554 - DNA, 2408 bp, Heterodera glycines
  unsure (1)..(2408): unsure at all n locations
gttgaaactgtcaatgactttcaacaattcgcctttttcaatgtcaaattgcactcaacaattctcgagagaaatgaactcaaaaaactattgaatttctagttccaacttattaaataaatcatataattattttgtcttttcacttattaatgcagtatatatgttcaatttaattgcaaataaagtccacccaaaatcggctcaatttcccttcaacaattggttaaaagctaattagcttcatcaatccataattgggcgacattgaaatttttatccgtataaaaaatactatggcaagaatgagagaaacgagcaaagaaagggctcatagagtccaatttctcatcggttcatccaattaacaccatcttcgggcatcactcccccattccaattttccatcaacagtttttgcgccttctttttatttagatctcagtctttctgaaattactttacaattacctaattgaccaattagtgctaattgtgtgcccaccggtcggcctctcccgccacttttctcccgccctccttcaactgttccgtcttctcttttccgtattcctttgcgctctcatatcgctcttgtgccccctgcttcgcgccttcgtacccttccgacgctttttcgcgcgctgattcggcgtaatcggactaatggttatataattccggttttaaataataatagaatttcctaaaaaaatcaccgctttgtccttagtttccgtggctttgtcagtcgccgtttccttcgcagaagaaaacgtatcggcaacctacaaaatcactcttccaacttttttctctttgttcttacagaattcggtgctacagtacccctccccgccttaccgagtccttcgcccccaccagccaatccttcgtgccttccgccgcgttcgacagagtgtccttgcttttctcgaagatgcctttgtcctcctcccgctgctgttcgttcggcggctgctgcacagtcacttggacaaagccaacaacgataaatgccaatgctgtaacattgacggcagtttaattgagtttaattaatggggaggtcagtacttaccccaaatgagcaagcaattaagtgctgttttggaatgcattttcaaataagcaatttaggaattgtgtaatttgttaaggcttaaaacaatttaaatttcgaggatttgaaaaaaacagatattcaggataaaagacaattgcgggaaagaaaaaaagaaaaatgaatcggtcgatggacgaccgaccgatcctatttatgtatgtgtccatgcttcttccccctctcccgggaggcaccacaaatgtttttgtttaccattaggcataagcgttcgacactccttctccttcttgtttttatttttaaagtaaacaaaataagcacaactgttaaagtgatgtgatctctgaacagcgagttttacacaatattgatcagctccttccttttttaagcttccttttgcttatgatgagtcattttgatcaatgatcggctaaagttctttcattctcaatacataattgtgcaccgtccgagctgacttcaaagcggaccaggaaaaaacgtcgccagccgaaacgtcgccgggcgaatttttggaccataacttttttcctactcaaccatattaaacattcttggtattgttccaaagcttatgaaaaactctattaatctacaaatttttcaaaattttttattaatgtacaaaaaaaatcagagcaaaaaagttcgaaatactaggtttttgagttccttctggccataacttttttgaaacttaacgaaaattttttaaatttagcctattaatagtaaacacataaagctatcgaacaacaccaagaatgcataatttgatttacaatgaacaaagttatggtccaaaaagtcttccggcgacgttttggggtgcccccacttcaaaggacataatttgaaaagataccaaaaaatataaaatatcatttattagcagggctgcaaaaaatatgcatgaaaaatgaccaaaatgtgcacctaaatatgcaaataaagccgtgaaattgcacaaaaatcgcaaaatatgcacaaaaaaaaactttaaaattaggggtgcaaattcattttaaaaatttttctcatatattnttatcggttgtttttcaattgcaaatcaaaaatttctcaagattttcggcaatgaagctcactgttggcccactcgcgcatccattcaaatttggatttaattttaggcataatcaaaaattttttctaagagatattcanatcggaaaatatttgacgaaaaatggcaaaatatgcaaaaaaaatcggaaatatgtacaaaaaatggcaaaatatgcatgaaatatacagaaaaacccaaatatgcaaa

SEQ ID NO: 19555 - DNA, 871 bp, Heterodera glycines
caaaataggtgctaaaaagggaaaataggtgccaaaaagttccgaatttaggggggtgtaaaagcgtaaaattttatccaaaaagttaacaatattaagccaaatcagtagggaccggacttttaggcatgaaaaatttgcaaataagcgcacctaaaataggcacgaaaaatgtgaaaaaggcacaaaaaaattacaaaaacgccaaaaaaggcacaaaaaattggcaaaaggcagcaaaaattaacacttttgacaaatttttatattcattttatcattcgacattctaaattctgccccaaactctaaagctaatctaatttatcaacagatgaacttgacccagctgacatccttggcaatggctcaacaaccaattcttcgcaccgacaatttaaagcggtacggtcacttttacatgagacatttggcgtttccaattttaaaatgtcatcagtagggcatccaaaaatatgcacataaaaagtgaaaaatatgcacataaatttttccaaatttgggcaaaattttcacaaattcttcaaatttgttaaatttaagcataaaaatctcgaaaatagctaaatatagtatgaataatcattttagaagcaaaaatacaaaataaagtaaaatttatttattttgaagaaaattgaaaaaaaatggagaattttctattttttggcataaatttccaattttttaaaaagttacatttttcattagaaaagcccaaaaaatgatatttttgaaaatttcttcggttagaggcaaaatggcagctttaatagagggggccgttttaatagaggatttgctgaaaaaatgctcaaatatgtacataaaatatgcaccaagtgccaaa

SEQ ID NO: 19556 - DNA, 1736 bp, Heterodera glycines
taataaaatattttttcattttttgtaaatttagcttcatatccttttggtcactttttgggcaaaatttgttaacatattcaattaaaaatgcaaaaattctcgcggcggcgcctatcggcgctgccggacgcccactgtgttccccaaaagctttgtcccttcctttttagccaatttttcaatttttactaatattgttgattggttttaattataatctttaaacatttaaagaaggcagataactgcttgaacttgagtgaagcagcaaaagcaaaaaatgcaactggccatcccccatttatggaaagaatggtatgaaacggcgttaaatgcacaaatcgcatgtataaaaaaaatagagcaatttagcgtaatttttaaaatgttttagcaatgccaaacatagaagttgagtttgccaaaacttgtttggcctcatttgtggcgatatgtgggatggccaaaaggaaaatttatggatggcttaagggttcgtaaagtaaaatcatattttaaatttaataatttttacataaaaagaaataaatgttgtaaaaattgaaaatagtttttaaaatttcttttttttcaggtaaaacaatgtgcaattactctttttaaaatgtgatgccatgcaagaaagtttaatgaaatataaacatcatacagaattaataatattaaaaatcatattgaatcttttttatttttatactcattgtttatttattaataattaattaattattattatgttttgttgtaatgatttttcactgcttttttatgttactcaattttcgtgttcttttcatttagttacatcacttcgttatgttttgttaattattttttattcctttttttaaattaattactacattatttgttaattttaaaagtaaaaagagccagaggcaattaattatccatattgatgttttattaaatttaagattcaaatatataagcttatttcaaagttgattcggtgaattaatatttttgcaataaaaaatatttattttactttccaagcattgattaaatgaaaatttgaaatcatttcagtttaggaatttcttagtttgaaaaaatgtgatcgctttattcctctgttcatacattgacgaatttcaaaattcagcatggaattcgagtgggaaattcgcaactcaatttagcggaattggagtcagaaggcaaaagtgacaactgctcgcgatttgcctcgaaaaagtctcgcaaaacgtcggcattcaaattgagaaagaaattctgaaaataaagaaaaaagggtttaaaaattcattaaaaatgcataaataaatcttagactttacaatttcaattaattttttttttggttattaattttttgctttaacttttaaatgaaagttttgattagggctacgatttattttcaaatttaggggtgtaaaatagtaaaattttaaccaaaagtcaacaatattaatccaaactattattgagatacataattttcaaaaacaaaaattctcatcatgaaaataaacaaataaattttggagatgaatttttgagaaatttttcatttctcaggggtgtgtttttgaaaatttttggatcggttcttagtggtgtattttttgtttttatttcatttttgttaacaaattttgggcaaaacgtcaaaataggtgaaaatagtttttttcaaaaattttagttttttgttgctaaaa

SEQ ID NO: 19557 - DNA, 976 bp, Heterodera glycines
atttctgaaagtgttactttgtgccaccaaatctttttgctctccttacctcggttgatgttgagcgttccttttccatttataagtcaacccttgccgataacgataatcgaatgcgtttttcaccccaaaatttggaaatgtatctcatatgcaatttcaaccaataaatttgaagaaattttacattcaattttgaaaaatttatgtccatattttgaattttgacatttttgccattttatgtccatattttgcgatttttagtccatattttgcaattttatatccatatttttggactccctaatgatcaatttgagcatttttttttttgttagaaataagcattttgtgaaattctgaacgtgaaaaacgaagttgatttttttgcggcgcttttcccaaaaaacttttggggcgcaaggggggccggcggtgtcgataggcgccgccgggaaaaattttgcaattttcaatgcgatttgttaacagattttgtccgaaaaaatgaccaaattttgcgattttgagcaaatttttgcttgtaaattaaggatttttacggtccggcggtgccgataggcgccgcctgggaaaaattaagaatttcgaccatatttttagcatattttcattaaaaaaattctttaaattgccaaacattatgccaatttatcaaaatttaaaagactctgaggattttccccaaaagcctcaaaaatcctgaaaatttctcaaaaagccaaaaaatcctcaaatcctcattttccaaaaaaatcctcattgacctatcaaaaaaccacaaaatgaggataaatcctcagatctggcaaccctgctaatagagaatctcaagagctatcgaatgataccaaaaatattgaatttggttgctaatgagaaaaggtgttcgcaacggcgccaaaacagtcggcgccaaactgaccggttccctgtacagcttacgaaccat

SEQ ID NO: 19558 - DNA, 1703 bp, Heterodera glycines
aaagtgatcaaaattgaagaaacaacattgatgagccatcaaatttgatcaaaactatgaatcgttttcttctttctataaaatgatcagtgattaccggcaaaagaaaacgaagtgatttgatggaagaggaaaaaacaaatttttttttttttgaccatgaatggactaattttttgcttttttaaataataatcgcaaatttttttaacttgaattcatttaaaaataaaattgcatattcataacgaatcccggcattttgagcataccggatcctggcccaaaaattttcggccctcccatttctaatcccggtttctttttcataccacggtaatgctaattcaaagcagaaaaataaatttaaacaaaataaattgtaatgaggtaataaataaatgacagaactaatataaaacaaatcaattacagtaagcaatcatttgtcttaatttcttctttctgtccatatgccgggccgcttgccgcttctgcacaacatcatttcccaccagcacaatatggtcattgttgcaacagtcaaattaattatggtaattaggccgagtatgatgagggacaattggttggtgattacggtagaatgaacaggcattgctactgtatgcttcaatgcggtgttggcattttgcaaagtggcaagcatttgcgtattctctacgacctaaccaaaaacaaaagttaattaattaattaattaaaacaattaattaattattttttcaatttacaaaaatttgctgtgcatagaaaatcaaaaaataatttattttttaaatttgttatatattttcattttttcgattataccgaaaagaggtttttcatttatattttttaaattttgattttttggaaatttaaaatctcaaaaatttcttttcgctaattaatctttgtgcttaatttcattttttaatctaattcatcgccaaaaaaattaatgcttatatgttcactaaatattaatgaattctaaaaagtttcattatttgctatattatcccttaattaataaattatattgcctaaaatttgcataaaaccgaccataattggtcttgtgaacacgtccaccttcgtgccaccattttgttcatctccaataacttggccactttcgttttgctgtgcttgtgcaacgctgcgcacctttcgctgccttttcgacttgcgtcttcgagtggtgtactgctcggtgacggtgtgccgtggcacagttgcggcacactttggcggtgttatgccagcgcagccattgtccaactttaggcacaatgtaatttggcactgaaaaaagtggacaaacgaataaatgaatgctgaattaatatccgaaaaataaaataggcaaaatgttagtaggcgcttcgtgtgggaaccgaaccttactcctccatccattcccaacagggctgcttggcgtaattacggattactggaaattacggcgtttttggacccccccccccccccgtcattatggattacggaattcggtaattgagaaactgatgccaataattacggattacgggtttccataactggaaatccagtcacgcccagccatgtttctcaaccatttagctatccatggacattcacaattttttatagaattgattttaatttgcctaatataattttcttcttgaacatttattaagaatttacct

SEQ ID NO: 19559 - DNA, 1054 bp, Heterodera glycines
  unsure (1)..(1054): unsure at all n locations
taatgagtagggctgggatttataagtttttgcttattttttctgcgcctttaactcgacgagaaatgcacgaaaaacacattttttgttcgaaaattttgcgttttaacgcacttattcgagcttggaaatgcttatttcggatgttcgcccttaaaaatgcatattttagatgttcgcacttaaaataagtttttgcccttattttggcgtttcgtgcttattttcgcacttatttcgcgatttttgggaaatttttaataagaatgcaataaaacgaaaaatatacccttaagaatcgaacaaaaaaattttcaaaaaattcacccctaagaattgacccaaaaaatttcggaaaaatacacccctaaaaatcgaccatctctacccccgaaaattttgaaatgtatctcatttgtaactgcaatcagtgaataaaattgtttgccttaatttgaaattattttcatataaaaaacagcaatttaaaaaattatagccctaaatttggaattttttcgtgcttattttcgcacttattttgcgattttttcgcccttatttaaggccttattttggactttttcgcgcttaaaaatcccagccctattaatgaggtatcttttggtcttcctcgccaaattttaaaatttgtttggggcaagccctatccttgccgacctattttcaagacaaaatctttgaatttctctgttttttggtcattccaagccctggtggcatttatttgcaaaaatttgaagaaaaaaaatagacacaaaaatctattttctgggataatttttattctaaaattcctaatttctcatttttatttccccacttgcctgcttccctagttggagctattctgcgtggcctaggcctagatctgtgttttaaattcttaaaattttcaaaattcccctctgccaagcatttgacagccctcgcgctctgtggcctangcttttttgaaatttcaaaattntctccgctaatctttggtccccatggnctagacacattggcatgccattttgcaaatttgcaa

SEQ ID NO: 19560 - DNA, 1008 bp, Heterodera glycines
gcatttatcatgcttttatttattatttcctaacattttttttttacattttatataaaaattgtctttttaaaacttatttatttaaaattttatacaaaaaaatcgctagaaaaaagtgaattaacaaatgccattttgggatttaaatttaaatttaatttaattgtggcaagaaattttgtctgatttggccatttgttttgtcgatgtttgtggccattttattattgttttttttcctgacaaattttctaacagaaaaaaattttttttttaatttatttatttttaatttttattagaaaataatgtcaataagaacaatcattttagttcatataaaaaaattgaagcctatttttgcgctatttcagaaattattttcaaaatttaatttcaatatttaaaatttaatataaaattttttttaacaaaaccaaaaaatatggtgggaaaaatgtatgtaaagccaagcaaaattgattttattgcgcttaaaatatttcattgaaaagcacaacaagccctaaaaatgtttacggagatttatgacatatttttggccaaaaatttggccctcccccgcccattttgggcatggccaaataattggggcccagcagggccggccacccaccgccatgcactcaattgctttaccattttggccatctccaaattcttggcattttttcccattcaattttcttccactagactgaatgacctttgaaaagcgccatttttggtccgaaaaaattatttaaagtgttttttaccccattttattattaatatttgtttaaaattattttttttgtaaattaaaattttatcgaaaaatatttaaaaagcttttataatttttattgataaattgtttaagtcttttttcccattttattatgaatatttgtataaaattattatttcataaattaaaaaacttttaaattgaattttttatgtgaaaatatttaaaaagctttataatttcattatgct

SEQ ID NO: 19561 - DNA, 1444 bp, Heterodera glycines
aaccaaaattattattattaaaaatagaaataaaaaataaattattttttactttttcgatttaatgtccatgaattttttaataagaaatgctaaaccaaacattgtgaggtaagcaaaagtactcactgtgatgattagtaaaaaccgatagccaaatggatatcctaaatccaaaaaaattaaatatataaaataaaatgacaaatgattttttaatttaagcaaatcgaaggaggataggctgctacatttttcaattgagaaaaattctgagaatttttttgaaaaatttttggatttacaaatggcccaaatactttttttttcattagactagggttgcaaccagggctggccgtgattgaatttccaatcacggaaatccgtgagccgtgatcacggggctttaaaaaaaatccgtgacccgtgaaccgtgatcacggcaccccaaaatccccgtgatttccgtgatccgtgagccgtgatccgtgattataaaaaaaaattttctaatgattttttatttaaatttatttaaaaaacggaatttaatcgcgggaaaaattcccaaaaaatgttttaaagaaaccaaaacatataaaccgctttttttgcggcgaccttttccaaaaaatgactaagtttacgatttttggcacttttttgaggaaaattagagctttttgtagaaatctccaaggaaaattttttatttttaactaatttattaagaaaatttttcaaatttttcttaaatttaaccaaaaatctatttatgtagagaaaaaattttgattaggcctgtcgttttaaatttagcgacggagagaaaaaatagggtttttagcagtttatatgccaaaaatggtaatttttctgccattttggggtcaaaatttcaaaaatacggtaaaatggggaccgtctgccggtggtgccgacaggcgccgccgggaaaaattttgaaattttgagtgaatttgttgacagattttgtccaaaatatgtccaatcattggttaatttattggtctatggacgtttttaaaaataaagaaaaataattttcaatgttatgaaatttcttgttaattaaatttcaattaaaattatcaaaacaaaatatataaattgtcctatcccaatggggaattgaacccaagggacagacaacgaaagacagaaggcgtaaccaccagactacatatatatgtttactttctaatttgtaagcagaaaagaatttatttatttttctcaaaaaattcttcacaccactttcctattttcgtctcaataaaaattccctatataaaatgccaatcacggatcaaaatcacggaaaatttgaaaaaatccgtgacccgtgatccgagatcacggcaccccaaaaaccccgtgatttccgtgatccgtgagccgtgatcacggccaggcctgc

SEQ ID NO: 19562 - DNA, 1561 bp, Heterodera glycines
cataaagcaaagggtttttcgtcacaaaggaaattgtggtgcttctttattagagaccggagcgggacggggaaaaatctgttaataaatctctctataaatttctccggcggtacttatcggcgcatccctctgttactagtcttttgaaaaactggcggcgcaaagagagcggtttgaatagcagctaaatagtcaattatatgttgcgttaacagatttgcttcccgatctatttctgccctttgaaccattcggaaaatattatgcgccctttcaatgcatccctccagcccttataaatttcttgttcaatccttcagatattttctagtttttcgaacttcttttaaatttaataaaaaaagatttcgaattttcctaaatcccgcaatcgcgcgcgggatcctccaagttctagaggcggaatccgcgggattaattgcacgggatccccaccttcaaataattcagatttacaatccggcattgcgatccacctcataacgagaggaccctgctttttaattattatcaaccatcaaaaagaataacccccccccccccccgcccttcagagcacgacaaatatttcaacaaaaatttttaaaaattgactagagcaatcgaacgctaacggacgacctaatggaaaaaaatccccgaaggagagaatttaattaaatccattccttcgggggaccgtgccgggtgccgcggggtaagcagtgctggttcgtttcatcacggcaccgaaccttttggctagtcagcaatcgttgcttaacttgccagatcggacgggtgcgcatgattccactgttccaagcaccccaccaaaagcaaaacgatataaccaaaatataaggaaaaattttttaaaaaattttttctccatcttcctttttgatactaaagcatcagagtgctaaattaagttgtaaataaaatttggtgcgctttagagcactttctgaaaaaaatatttatgaaacaaaaaaatcgattttttcaagtgtccgtttggggtactcaaacatttatggggagcaaaaatccaacgcagaattaaagtacaggctatagggaagctattcccgaaggattcggtctccccataaatctgggcgcatcggttcggggggactgccccgaaaacaaaaaaaatcgattttttcaggtgtccgtttggggtactcaaacaattatggggagcaaaaatccaacgcagaattaaagtacaggctatagggaagctactcccgaaggattcggtctccccataaatctgggcgcatcggttcggggggactgccccgaaaacaaaaaaatcgattttttcaagtgtccgtttggggtactcaaacaattatggggagcaaaaatccaacgcagaattaaagtacaggctatagggaagctactcccgaaggattcggtctccccataaatctgggcgcatcggttcggggggactgccccgaaaacaaaaaaatcgattttttcaagtgtccgtttgggatggtcaaacaattatggggagcaaaaatccaacgcagaa

SEQ ID NO: 19563 - DNA, 1610 bp, Heterodera glycines
ttaaaaaattttattttttaaatttaattttaattttataatttcttaattctttgcgtaaattacgcaacaaatctcaggtttttcgtaacaacattaacgcattcgcgttcaagctttttcaagaggagcctttccgagcagcatttcggggtatttttaaaagaaaaattataattaggaaattaatttatcgaaagaaaaaggtgaaaagatattaatttcgttataatttattctttcaatttaatatcaaaatgatttaatatagcaaaaaaaaaaacggtgaaaaacttataagcattttttatcgaaaaaaatataaatattcaaaaaattttgaactattgaaaaaatatttattgtaaaaatccaacacaaaaacaataaatattaaatgaatttcttttttccaattagcgcaccgatgccgaactaatttatcaaaaacatcggccaaaagtgagcttgcccgctttggctatgaggtcaaattcgacacagcaaaatgcggcagcaaatgcacaccggcgcagttcgtccatggccgatttgggaggtgcaaaaataaatttgtgattgattaaaatttttaacatttaaaaatatttatgtaaataattttaaacggagaaaatgaatgcttttagcaaattttaaaaacatttttgtaaatttttcaagacttggtaaaacaatgaagcaaaaaaaaaaaattagacattcaaatttattaataaataatgctaaactgtttttatctaatttgaatatttttttaattattaaatttaattactttttcgctcgaatgaaatcggttggccatgcaatgaaaacggcggcggaagatgagttacggtatgaaatcattcgatttgccgcccgaactacagcacatggcattccgatggtaaaaatttattatttttagagaacagcaaaaaaaattaaaattttaaaattaaattttaaatttgaaataaataaaaacttgaaattctaaatttatcaaaatattatagaaaattaaagacaacgttcttaattttctggcaaatttgggcagtattttgaagcaaatttctaaggacaaatcctagttctattaaatgcatacaatcaaagatttaaaagattaaaagatttattaacaaaattttaaggggttcctgaaaagccgagtttaaaatgaatttgaataaaattttaaggctttcaataaaacccgaattttcaggaaaatttaaaagaattatattgatttacttaaacagacactttcagtgaaaattatatttaaaaaaactttggaaatcaaataaaaactaaggccgcgcatgccaccagatggtacgccaaatggatgtggatggccatttctttggcatcggttggcattttttgctacaatgtgcacggggtgctgcaaaaatattggcgcaaggacaaaatcaccactgttcaggtgagaagaatgtaaaagaatatttaaataaatttgacattatttaaaaagtttaaattttatttttttatttataaaattatatttcaatttaaggaatgtgattaaatgtttttgtatttgatttctaggtgggagggat

SEQ ID NO: 19564 - DNA, 1349 bp, Heterodera glycines
  unsure (1)..(1349): unsure at all n locations
cagttggacacagtgccaaaggttaaataaaacgccagaaattaggggaaacaaattaatttttaatttttnaagaataatgtttcgttatgcatatgcaattacgatcgccaagactcatcagtgtggccgtgctatagcaaagcgtacaatttttaaattgattattttttatttaaataatttttaattaatttttttactattttttcaagaagctggatcgaatcaatgtgtccagattgtaatggtaattgttttcctttttattcgataaatgacaatgtttacaatttctttcccaaataagcaaaaatgtaaatctgagattttgaccctaaaagtaaaatttttcgataaaaaaattttcgggcgcatggaaaatttttggaaattttgtaatttttaataagattaaattaattagtttgtaaaaaaaaaatagttaaaaaatcctcaacactcgaaaataaggacagaaacatagaaattagatcaacttataaacattgtgcataaattaaacattttaagacattggctactgtaatctaccgtacaccaatggtaccaatcctttgccatgtttatgtcagaaagtcggcgcatctgaattaaaaatatataatttaaatttaattttttaagaacatcaattactgtctgttacgaccggaaagactgaagcgaatttgggaaatccgagggcgcgcaataccagacgaaggtgtttatataaaatacttaaagaattaaattaatcatttaaaaggttaaatattatttagctattatatttaaaataaaatttatttaattgtttatattaaaattcaaatttattttaatgcatttaattaattgagtatttatttttaaataaaaaattataggctcaccgtttcgttctgatttcttggcccaattgaaggatcttggctatgaaaatatgactgatgaagtcgcaattacaacgaaaacgcttgaaaagtgaaaatattgctaattcattaattattattaaattaattgcacttattaatgattaatcagtacttattattccgaaatgggccctatttttcaatatatttctttgcgcaatttccaaaatttgaatttttgaattatgccaggctttttatttttatgcattttttgccaggctcgtgctcacaatggccgggctgccggtggaacggcgcattgcgctgtcctacggtcgcagtgagttcatccggatgtgctcgttcaacggacaacagtgcaacatccaaaacggtgaagcctaattagtaggactgcaaatttcatacaaatacataaagttcctgcattctccgtgctct

SEQ ID NO: 19565 - DNA, 3346 bp, Heterodera glycines
aatttttttaggtcgattcttaggggtgaattttttaggttttattgcatttttgtcaaggaattttccaaaaagtgtctatagtgaaaaaataaacaattgagcaaaataaaaaaattataatttttcaaaaaaaatcgcggccctattaatgatgcttaaaatatttttcattttaaattattataagaacataaaaaatgagaaggaatataatttgagatataaaaataaatttcttacataaattactcatttgtcagtctaaatgtaaataataaaaatacataaagatcaaggtttaaaaataattaaaaccattaaaattgaattttaaaataaatattttttgaaatttgtagtaataaaaataaaaacatatatattatataaattataccatgtggatatgcaaattcgatattaaataaataaataaataaataattataatcatgataatcctccgatggagaaaaagggagaaatgcctttttgcacatgaaatattaaaattaaaaaagaaaataaaaaacaataaaaattatcaaatagaaactcataaaaaaaactaacaaaattgaaacaagccaaaagaaacgaaataattataaaaatgacaaatcttaattaattttacaataaaaaataagaaataattaaaagaatataattcaatattttagattttacagaaaaataaatgaaaaaaaactaattaattttaattaaacaaaccgatgacacctgttgtaaaataaatttaaaaataaaataaattttgtgaatttataaaataaaaattatagtaattaaaacaaaaatgagtcatctttgtcattttttgaacaaaataattaaattttcattaacttatctaacggcaccgccgtacccttctccttccccaagtttttcgaaaaaaaacattgcgaaaaaatatttaaaatgcaaaaaaaaatcgtcactcttttttatttgagtttttagggagcaaacacgtaaaacttaaccttaaaacttaatataggcgagaaataccttcgccggggaggaaccgaaattccccgcatttgtcggagaccaaccccattttgagaagacaaaaaatttgggaaacaaaatttttcattttgaaaaattccaaaatgctgatttttttactttaaattttgttttttgtcggttcaaatactgattttcaaatttttcagttggcagtcctgtttttacactaataaaatattgttttaaatagtttttcatgtttttattgcgtttccttcgcgctacattagtttttaaaaaatcttattttcgggttccgagttttcgtttttataaaataaaataattaattaagttttattttaaattaaatcattttcacattattaggtaaatataaaattttccgtttaaagaaaaatttgctgacggattattcagtgaaggattgtccatcactgacgaattgtccgtaagccgcccacacgtacgcatccaacacattgctgtggcacgcacaccgcacgcgtccgtccactgtctgcccctaggcaaattttcgttccttctccctcccccaactatttcctttgcctttcttctttttcacattatccttttcttttatgtatttattaatctctctctctctccacaacagattttgctttacgccaaatcaaatgaaggcacacagagagagagagagagagagagagacaagaagggacaaccaaattagtatagttaattgaaaaattaattttggaaagtttttcgtgggttaaatttttggattttaagtttagagcactaaagtgtcctggtttttcaatttatctgattttgaggtttagaaacaaaacagggaaattctgattttaattttgttgttaattttatgctattttggcttcacttacaggccttattcgtaatttccaattaatttcttatttgccaccaaattcatttatttcccccgcccgtaatggcagtgcttagcaaattgacaagttcaacagttaccaaaaaggttgttttggcaacacttgtggaaggcattggccgtgcctcgggcgaaggtaaaattacggaaaataattctaagaaataaataaaaaagggataaagataatcaatgaaaatgaatgagaggtgcttttttctataccacgtccaactgatctcgttttttcggctgtgtgtcccgttggtttaaactaaaaaaattgtaaaaaataattttcatttaactgaattatgaacctcacccccccccccccccctacaaaaaaataaattaattaaccaatggaccgccattttcattatttttcccgtactaaaaaatagtataaattgtttatgggccaacaaaactgttgctgattgtgagcatattgaattatttcatatttaaaacaaaacaaagaaaatgggaaataaaaatattttccataaaattttccaaacaattaaccgaaattcctacaatttttcccaaaagtgtgcattgttcggcacggacatggccacgtgttccgtcggcgtcaaggccaaatgacatggaacagggccaaagacaattggtgggttttttgggctgctttcttgggtcatatcggtcagattttatcccggacaaaaatataaaaattaaaataaatatttcccgacggttgttcgaagcccgccatttttctatgcccgaaaaacttgctgaatggctatttttgtccgtttttgggtccaaaactgacttttgaggattttatggtcaaattcaaaacaattaattatttctgaggggaaataatgcgaaacttttgttaagcaaatcctttttaggcacttttacgttgtcggcatcggctttatcccctgcttattgaccattgtcttctgccatgtctattacggtatgtttcgttgttttttttactgtgaaagaatttacgggagtaagattttttgcaaatctgactgtgttttctggcgatttcgatattttaaacaaagcctggattggcccagaaaaaccaaggcttgtcctgacttggatttttgtgaaatttgttttaaaatgcaaataaatgtttaaaataaacaattaattgtttaagagaaataagtgacataacaataataataatatatttttaaacctatttaataatttttttggtattagtaaattaaattaaagtatttctcacttggaataattaattcataattagcacaaaggaaaccaggggttttggtgcgttacctgaacctgggttttttctcgtgagagaattcctgggacctggacaaaaatccaatccaagaa

SEQ ID NO: 19566 - DNA, 2408 bp, Heterodera glycines
aaatatgattcctaatagtttttttaattgacacattttatcatttttaaagaaaatccgtacaaattgagcctagtaatcccaaaaaccaacctttttgttgaaaatctgtttacaaactacacctcaaattttcaaaattttccccccggcggcgccctattggcaccccccgggggcccccctcttttccccaaaagatttttggaaaaagcgcgccgaaaaaagtgatgtgaaaagtaaatctgaatttctaataatattcatcatttagtccaaaatgattaattgtttgaaataattgaagaaaatttgatgaaaatctcaggtcccggcaggtcccggtcccggttttggcaaaaattcccggtctcgtcctactctagtttttaccccgattcgtttttttgtgttatatgtatattaactgtctgacttctcgctgtctgcactcctacataaatataagacaaaaaccgaatcaggtaaaaacgaatttgccaaaaacgaatcgtccgtcgtccatttgaccccttatacactaagacggagttggcgaggcggagttggcccattccgggtatcggagccggtcaattcagtgccgacgattcagtgccgacgattcagtgccgacgattcagtgacgacgattcagtgttaagacgattcagtgacgacgattcagtgacgacgattcagtgtacgttgaaaaaccgacaattcagtgtcagaaaatttggcaaaaaaaattccaaaaaacccaaaaaattgcaaattttattaattggaaaacataaataacgcggtcggccagtgtaattgttgatgagggccggttccgtctcaaatatttttggactcaaattttttaaaatcaataactaatttagaaaaaaaaagtaaaaattcttttacttcgcagcctaccgcagcctaaatatacctggttttttaaaagttgtggttaattaaaagtatattcgaaaataaaaattttttgaaatgaatttaacattgcaaatgtccagtaattctgctcgggattctcagtcttggtcctcgtgtcgggaaatttagcagccttaatgtgtccagcactttgtttgcagcgaatccggcacccattttggaccccgaacccgaatataaagattaatttacataaatttcgtctaattttcaaaaatacaccccctgagaaatgaaaaatttcctcaaaaattttgttattttatacgcctaaattgaaactttaacacctattttgaggtttttagaaccgaaaacctaaatattttggcagtttttagttttgaacacccaaaaatattaggcatattaaatatcagggctgccgaaaacatgcaaatgttttttttcctgccttttccatgctataaataataggaaaaacacgttctttttttgtgtttgcatataaaaatcggtatttttatttgcatatttttgcatatttcgagatttttgtgcatattttggctacttttcgtgcatatttttggcagcactgttaattatatctcaactttctgttcacattctgaaatttaaaaaaatttgggtccaaaaatatttgagacggaaccgctcttttactactaagacggaaacggccccagatttatttagcatagagtataacaatacagatcaggcagaatttctaaccactcaatttatattgtatttttagtggttttttgaaatttttttgccaaattttctgacactgaattgtcggtttttcaacgtacactgaatcgtcgtcactgaattgtcttcacactgaatcgtcgtcactgaatcgtcgtcactgaatcgtcggcactgaatcgtcggcactgaattgaccggctccgaagttttcgattcgataaccgatcaaaatataaatattttggcatttcatacatataaaatacaaaaattctttaaaaaagcgacaaaaaatgatttattttggaattttcgactttgtgtccaaaaatcagatccgggattttaaatggatcaacaaaatgagtgtgagaacaatttttacgcacttaatacgctcagataaacacaaaaaacgggttttccgcttggtttggggtgtctacgatgacttttataatgcctaactttgcctattttggactttttgtgcttaatgccaattttagtgttgtgcctaaaaaacgaatccctatgcattaccattaccatgaatcctcttatttatatttctcactttttcttattacctgctgatttgttttaatttaagtttttatttttggctcgaaatcaatttttatttaatggcaccgcctgtcaaaaaaaagcaaaaacttttgtccgccgttgaaaatcagcagcaatcgtcgtcgtcgggttcattt

SEQ ID NO: 19567 - DNA, 1100 bp, Heterodera glycines
aaaaaaagagatagtgatttttctgattaggccgagaaataaatataccagctattgaaatgcagtgggcaagcacagcgagtcgcttaaatgcacaccctctgacacgtaaaatatccaaaaaaagagatagtgattttttctggattaggccggagaaataaaaattaccagctatttgaaatgcagtgggcaagcacagcgagtcgcttaaatgcaccccctttgacacgtaaaatattccaaaaaaagagatagtgattttttctggattaggccggagaaataaaaattaccacctatttgaaatgcagtgggcaagcacagcgagtcgcttaaatgcacaccctttgacacgtaaaatattccaaaaaaagagatagtgattttttctggattaggccggagaaataaaaattaccagctatttgaaatgcagtgggcaagcacagcgagtcgcttaaatgcacaccctttgacacgtaaaatattccaaaaaaagagatagtgattttttctggattaggccggagaaataaaaattaccagctatttgaaatgcagtgggcaagcacagcgagtcgcttaaatgcacaccctttgacacgtaaaatattccaaaaaaagagatagtgattttttctggattaggccggagaaataaaaattaccagctatttgaaatgcagtgggcaagcacagcgagtcgcttaaatgcacaccctttgacacgtaaaatattccaaaaaaagagatagtgattttttctggattaggccggagaaataaaaattaccagctatttgaaatgcagtgggcaagcacagcgagtcgcttaaatgcacaccctttgacacgtaaaatattccaaaaaaagagatagtgattttttctggattaggccggagaaataaaaattaccagctatttgaaatgcagtgggcaagcacagcgagtcgcttaaatgcacaccctttgacacgtaaaatattccaaaaaaagagatagtgattttttctggattaggccggagaaataaaaattaccagctattgaaaatgcagtgggcaagcacagcgagtcgcttaaatgcacacccc

SEQ ID NO: 19568 - DNA, 3101 bp, Heterodera glycines
  unsure (1)..(3101): unsure at all n locations
gtaaaagaattttttaaattaaattgaattagattacttttattatttttaaaaaattttagcgcatggacgaagcaccgatcagcagtgggacaagaggttttagcagctcgagcagatggtcaggccgacgaaggtcaagcccaagcccatcacagaagggggtccgcttaaataattaattaaaattgttttcatatttaaattaattttttaataattttaaagtttttatatttgaattttcaaaatttatcaaagcattttatatcttacaaataataaaatgtcatgaaataataatattttttctacgaaagttttatttcatttaattttattttttaaaaataatttaattttattttaaaaataatttttattttattttttattttcggcttttttaaaattcagttaaaataaaagatgaagctgactgaccggtggcttaattgaaggaaatatttattattattttgtttttttccttctaaaactttttaacataaaatttaaacaataaaaaaattataaaatttgtgtttatttatttatgctttagtcccgtactgcgttggacggtttagctgcttcgtccgctgcccaatcgcctcagtttgtgtccggcatggtcagctggcgcatgccggtcactgtactgctccaaacattgggcctcctttcctacaaagaggcatagtcttcaaattggctaaatgtggcaaaatttaatttattcctgatcagatcattagctaattaaaagagattcatttaattgattgcttttggtggcattttgatcatcaaatcaattagtcgatcatgcgagttttgatcagaccaattaattcctcgatcaattagcaacagactttttccgattaattttggccttttgctcagacccattagttgataatgccaatgttggtccgacccttaatcccctgaccaatttgcaacagacttatttaaccgattaatttttggccacttctgatcagatcaattggttgaccatgtgaattttgatcacaaacttaattacctgatcatttagccgatcaaagtgatttaattttgctctaccggataacaactgatcaatttaaacaaaatcgttttagctcagtgatcttcgacgtgtacacccgcattgggatgagttgtgcggacagttgctgaaccagggctattatcagttgatcggccgagcgcagtggttgttgacggatagccaacggaaggttttcgtgccaaaaaaatttaaaaataaattcaaaaattatttttaaaaattccaaatttattttcgcttatttcatttatggaatttgcaaaataaaatataacaactttttctaagcttttttaaaagattcaccataacaaaaacaatttcatgcaaaatttaaattaattatttaaattaaattatacattttaaatgcaattaaatattttcaattaaattattattttaattaaatttagttgaaccgtgagcctcgtcttgcgcagcccattcagctgttgacccgtctccatgttcatgtgttaaaccccgtggacgcaatgcgctcttttctggacgaaggtgacaaaacaaataaataaacaatttcactaatttattaattgaaaaatgttattaaatttttactaattaatttattaaattcaaaatatgatttttgcttttaatttataaaattattgaatttgaatttttgaattttatttttcacttacctaacgcttttaaattttattctttattatattttcaatattttaaactttctaacaaagttctttcattactatacatttgtatgcatttttctttatttaaaatattaattatgaagtattaaattttaatttttaaattatttccggcgttttgtgctttccctacggcgctttgttggaccgcgcgttggccatgcttggccgtattgaagacattgtgattagttccgccgaacagatcaattacgacgaggtgagctcacaattagtagtagacaattactttttaaattattatttattttaaaaatttatttttaattatttcatttatttacattttaggccagcgatcagcttgatcaactgcaggatttggcacgccgtgccaatgttcactatcgccaagtggtggagccggaggcggaaaagcgcatgagcgaggttccatagcaaaatttttaaaaaattccaaatttcgaacattttaaaaccgtaaatctgtggcttttcagatgtacaggctgtcggcacagcagcgtctgcaacggttggactcatttctggtggagagcagcatgagccgagtggaaagagtagggcacagagaataataaattattattatttttttaatggcatcaattttaaataattaattcaaaatattgtccataccacttcaatttgtcttgttggttagcccttttcgcgaatgaattaattatttttgatattttgaaattagaaaaaacggacattcgacaaaaatggcatttacaaaatatgggactgtcgagagaaaaatggatgccatttgtcgccaagatcctaacttttttggcactcattaaattttaattgctttttgaaagtgctttattatccaattaggagttgaagaaggtacatattttcattggccagggattttcaaatttttggcactcatttaaattttactgcgttttaaaatggcctttttcacccaattaggagtcggagaaggcgcgcaatgacatgcgctgggagttggagcagttgaaggaccaaaatgcgcagctgaaaaaggagaaccgggagctgaagcatttgtgcgtccgcttggacggccgcgttgacgttttggagcggaagttcaaaacaatggcacggctgctgcaataatgactggatttgacgaagaaaaagtgtggcacaatttgatcagttaaattgttcgttggcgggccgatcaatcatcgatcgatcgattggttgtgcccgatcaaagtttttgatttttgacactggnttttttttcttgataanntatattacactattttaaaaacatatag

SEQ ID NO: 19569 - DNA, 3259 bp, Heterodera glycines
agagggggggagggaataaatttgcaatgaatgagactttgggggggggggggagaattgtttagagaaaatcgattgcgtgaagaaaaagaagaagcgttttgcggaggagggaccgcagcacaacacagaaacaacagcagcaagaggaggaggagctctgagcagagcaggaccttgaccgaccgaccaatgactaccgactgacttttgctgacgaggggggggggggggggatctatcggaatttggggggaggacgaagaagatgaagatgacacattctctgggggatagggtcgattaatgagcagcaaatgcgcgattatcaatttggatttcgatgggatcagtcagtgctgatgcctgctaaagcgcaagaatgacttcgcggagagccctagagggtgtcaaaattggtcaactcaaaatgaccaatttctctaccgcattttttcaagagaaaattttcccgatttcaagccctttttggtgtggccctccgatcaccatgaagtagtgatctgatcaaaactgtgtaatgtttttttcattaatattataatttaaaaggatttttaaatttttttttttaaattttaaatttgagtttttgttaaataaatattttgcttcattaaaattgaaccgctcgcaatcgccttttttttatttacttgaaataaatttaaaacaacattttatgcaatgggaatcagcaatacaaatacgtacatagaggttgtgcagaattttattcaaaaagagaaaaagggcagtggattagattggcaggaaatgttcagaaaaaaaaaatggaaaatgataaaatcgatggaagcgtacgggcaaaggaatgggatgggatgaattaatgataatgaacacaaaacaatatgtggtaatattgtgtaatacaatacatacatatttatgtacgaagatgatgaacaaaacaatgaaagcaaaaatgtggcgattttggggaaattttcttaaaattgtaaaaaaaaatgtgtgccgaactcaacaagcttctgattctattgcactttattgagtccaatcaactacatagcacaaagctttgggaaattgtttatcttagccttcgttaaactataagtgctttcaaatgataatgccaaaaaaagttcggtttgttcccaacaggtatatataaaaaaagttatggtccaagaaagtaaaaaactcaggattgattgattgatgattggaatcaaaaagtgcaatatgtagaagctttataataacattagtaatatgttcgattgtggcattgacccggctaacttttggcaaaagggcttgttaaataaaaaaatgtaaaaaaaaaattagaataaatcccagaatatggaaaaactgacaaaaaaaagaaagaaaagatcatagactgaaatggagacacgatacagttaggtagctcatcctcttccctaaattgtcctcctccccaatccttttaattttcttcatccattaacagtgttaggaccctcccacattctgcgattgataagcatgctgctgcccaggagaggagccgcgcccgccgtcccgttcaccgtgtccaaaaacggcgccaatgattccatgtgcaccaccggcgccgccgccgcgtccacgccgcctcccgcctcttactcgatggcaacagcggcactgacaattcggcgacaccgccgcactgctgctgctattcgatgggcgtccattttgcaaaaaattttttgaatggccatttacgaccacggcacggagtcctcgtacacccttgcgcacctggatgatcaaacattcattcacctcccctcctgcgctttcaatttaatttttaaacccacccgtcgctctccgatttgcccagtcgccgccgcctgtggaactccatgccaaactgtgcatgccaacaatacacatcgaaagctggttttcggcctcatcgccttcatgcacagcgaatcgtccacaatttggcccttcaaaacacactcgacatgtcgcatgcgaacgccgttgccacatgacacagaacaatggccccatttggcggcacgccttcaaaaaatccaacgagttcgcccagttcagcacaaaccattcatttcttaccaatatgggcatggccccggactacacactttgtagctttgtggcttctccgtctgctgttgttttttgatgcccatgcacttttggtccgaaacttttcgtccttccgaatccacgcattggacaaggcgcgtttggaagccgtcctggccacaactgacggaacatggactccacgtgccgagtttccttagaaaatgttcaaaaaatttagatgcccgttcattttgcgatacaaaatgagatcgactcgaaaacttactggactgatcaatgttgaataaatttttgttgtataataaaactgatcaaatgaaattggattagccataattaactgaccaatggggacaagcggccatttggcattgcttctccacaattcgttcccttggttcgcaatccttctcttccaatcgttgcccatcaggctcacgaacgcacatggcctcccgtcgctgaacaccatcaccacaactgaaaccaaaacgaaattcaattggttggtcttgatcggataagggtcccggattcatgctctattccttttgaacggcttcacacctcactgagcaaggtgaccattgtccaaagtgccatcgtgtgcacgagtgttcattgcacttctccgagtccaatttgacttcagcggcacacattcggacgtccaactcgcgaccagcagcatcttggcacgacgcatggcgcattcggagtccaccaccgcaagagcgtgaacactgtgccataataatttttaaacccatctgctgctgctcggctttcccctcctcactctcacctggtaccattgtgaatacacccaacgtgggcaaggcgttcggttgcactccgtctcgatgggctcgtgtggcactccctcacagaaacgggcgtccaatttgtgcccatttctcgtgtcaatgcaatgcaaatttcgtctgctcactccaccggcaccacaactctcggagcactgattttaaatttaaaatacaatttaattcaaacgattaagtaatgtttattaaaagtcacctgactccattgcgaatatgcccagttcgtctaaaaaccacaaaagattactcagatagaattatcagaaaaaaaaatcagcaaa

SEQ ID NO: 19570 - DNA, 1379 bp, Heterodera glycines
gtggttgtaaaaaaactttttgggttaaatgaattttttttggaagtgagtcaacccccctattagtgctttgctgtgccgagacccggcaggcaatggatggctttcaatctgcaagaaattagatgggcaatatgtggtttgtaaaaaacttttgggtatggaattattttttgaagtgagtcaaacaccttattagtgctttgctgtgccgagaccggcaggcaatggatagctttaaatctgcaagaaattatattggcaataagtggttgtaaaaaacttttgggtaatgaattattttttgaagtgagtcaaacaccgtattagtgctttgctgtgccgagaaccggcaggcaatggatggctttaaatctgcaagaaattagattggcaatatgtggttgtaaaaaacttttgggtatggaattattttttgaagtgagtcaaacaccctattagtgctttgctgtgccgagaaccggcaggcaatggatagctttaaatctgcaagaaattagattggcaataagtggttgtaaaaaacttttgggtaatgaattattttttgaagtgagtcaaacaccctattagtgctttgctgtgccgagaaccggcaggcaatggatagctttaaatctgcaagaaattagattggcaataagtggttgtaaaaaacttttgggtaaggaattattttttgaagtgaatcaaacaccctattagtgctttgctgtgccgagaaccggcaggcaatggatggctttcaatctgcaagaaattagattggcaatatgtggttgtaaaaaacttttgggtatggaattattttttgaagtgagtcaaacaccctattagtgctttgctgtgccgagaaccggcaggcaatggatagctttaaatctgcaagaaattagattggcaataagtggttgtaaaaaacttttgggtaatgaattattttttgaagtgagtcaaacaccctattagtgctttgctgtgccgagaaccggcaggcaatggatggctttcaatctgcaagaaattagattggcaatatgtggttgtaaaaaacttttgggtatggaattattttttgaagtgagtcaaacaccctattagtgctttgctgtgccgagaaccggcaggcaatggatagctttaaatctgcaagaaattagattggcaataagtggttgtaaaaaacttttgggtaattaattattttttgaagtgagtcaaacaccctattagtgctttgctgtgccgagaaccggcaggcaatggatggctttcaatctgcaagaaattagattggcaatatgtggttgtaaaaacttttggtatgaaatattttttgaagtgagtcaacaccctat

SEQ ID NO: 19571 - DNA, 801 bp, Heterodera glycines
cgaatttagggtacggatttgtgtatgtatgaaaaagcaaaaaatgaaataaaaaggaaggcattacacacatttaaatgttaaataataataataattgtgatgataaaaaaggggtctcctggtttcctccgcccaatccgatgagatatttatttattctttctcatgtccatttcgtcttaatttattcattgtttttgttgttgctgtccatcatgtccatgtctgttgaacgttctgtacactttgctgtgcgtgctcagtgcctgtgctgcttggtggcgctgttcggtgttgaagagggccagccgtttgtacttggagccaagttgcatcagctgaagaaaaaggggagggacgacatggacatgaccaagtcaaggcagaaaaggaacggagttgaacatggactttgctgggggttttattagtacacaaaaaattatcacgtaatccaggcccagtttcagttttgtttttcttcaaaatatttaattttacaaagattttctctccttttcttgcatatcagtataaatatgaaatgtgtcttttttaagattttccatattctgaacactagactaaattttattattttcaaaaaaaaaaatttttttttgaccaaatctttggttagaagattttagtccgactttttttaggggggggggggggggcgggtgggaatttcttttaaggctttggtataaaatttgcaatttttcatatttaaaattcagttgtccatgaaaatgaaatgctttttgttgtaaaaaatcaaattattattttttt

SEQ ID NO: 19572 - DNA, 1888 bp, Heterodera glycines
  unsure (1)..(1888): unsure at all n locations
ttttggcccgcggaatgtgccgtcgttattgatgttgcttttgccgcttttggtggcgcagcagcaattctggacgtgtaccgttcacccataaaacggtccaacaccttttgctcaaactcccggatggttgccttggtaatcggtttcaaatatctaaaaaatgtgagattttttgtttttgtttttattgcttttaccatttccccacatccctttataaatttttgcattttcctttgcaatttaagcggttttaatataaattgtccaaaaaaagcttacaattaactgaaaggggaaaaaagttgatttaaattgtcacaatttgatcgaaaaagtacaaaaaatcagggagtgttgttaattatgacaactatttattttttaatagccaaatttttttgttttaatttgtgtttcggcctaattgcacttaaaaaaggaaaaaaaggaagtaattctcgggttttttttaattttgttaataaaaaattgctcactcttttgcccatgtccaaaatcggcttggcacgtccaaaatgtgtggtggctcctcctcctctggcgatgacaaaagaccaagatcaatgagactggaaaatgacaaaattaaaaatatttttcggtcggattaatttaacaattaaatcgcaattttcttacgaccaaataaaaattttagcaaattttcaggcctcaaaagaaatcaaattaaaaaaaattctttgcacctatgccaaaaattgagttaaacaatttttcaatccgataatgttaaaccgatcaacaaaaaaaactccaaaattttcagtttttttacaaatttttcaaaaatttttatataaaattattacaaatttgtaaatgatccgacgtccgagctctgttcaccgctgcacagccgtgcctcgcgatgaatgccatagccatgcctcgagtggagttcatactttggcattggccgattggacaggtcaatggtcggataatcgccggtcgacatgtaagtgatttcgccatggattgtcttttggcagtcgacgttcagcgaaatcaactcctcaagctcatgctgcactgactgctgaaatgtttaggaaaatttggtatttttaccatttttttcaaattccaaacaatgggaggaaattgggtagcattttaaccggcgaaaattagtgaaaattcggagtttttacaagttttcgagtcgaaacattaattgccagtctcttagattaaaattagatctatataagcaaaaaaaaaaaaaattcggataaatgagccaaaaatggcagttttttcctggttgcacaattttaaggaaaaaatttgtttatgggactgcaaagagctaaaagagtagccactttggatcctctaaaattttccattggttaaaaagcttttttttctcatacgtaaatgccggatcgtaaatttgcgcctgcaacccggaaaattattgtaaaattggaaaaaaacgaaccaaattatcaacgtcaaatgattttctgcttgaagggtttgagagaaacttgtgaatgttcggatatttgtcggcattgagctcgtcaactttcagttcaggaaaaatgccgaacacatcgacacaaacgcccgaccgtttctcatcatttaaatcgagtcctaaaaattaatgcattttattaaaaatttggagattttttgtgtgttgattgtgagtataaacctttgaggcgacaagtttacccccncccccttttttgaaaaaaaaaatttcaaaaattttaatgtcataaaaacaagtttcctgggcttttcgaggtcgctgatcacgaatccggcatccatttcgaacgattcgaaatcccggacccgaattcgaacaaaagtcaaa

SEQ ID NO: 19573 - DNA, 2495 bp, Heterodera glycines
  unsure (1)..(2495): unsure at all n locations
gaaaagcgattggagcaaatgcttttatcgagtaaaatgcnaatatttgatcatacgacttctttctattgaacacttttcatccnaagtgcttatgtgtgctacatccgctctttctctttntttttgccaatttctcaatggcttcggcgtggtcggcggcggaccgttcggcgggtgctgcgctgctcctcccccttcctccggcgggcccacccctctgacgacggcaaggcggtgaagcgcccggcggaggagttcccggcggaggggcgccgggcggaggggtgccattgggtggcgcacagtccgcttcgtcgtcgtccgctttttgttcagagtccttgcttttgtcctctcttttggcacgtaaaatgttgtctcgtttttttcggcctttgtttccgccatccttcaaaaggaatctattcgctaattataagcagttttgctgatgtgacctttcctccgtcggcgggtgcttttttaccgtccgccgggggcggagggcacccgggcggaagaggcgcggacgacggatcggtgggacatggcaaatcgtcgcagaggacgaggagaacggcggaaaaggcgagtgccaacgaaagaaagggcaggcgaatcatttgggacagaaaatgggccgaattgggaggggagaaagaaaagagtgggcttaaatagagagcgaaacaatgaaaataatccttcaatttaaaacggacgaattcgaatccttttttaataccccaaaattcgtgccaactaattattttaaaacacaaacaaatttaattgcccagccattgaaagagagagagagagagagaacacagattaactggcgaaaaacgctcagattgagaaaggtacgatttgtaaatttataatgggcataattggaaaacaattttacaatgtacaataggtaaagcagaaaatacgatccataaacagctttatcgtctcttccttttccacgctattttcctccccaaccgtatcctccagcagcgttatagtctctgttaccgtatccgtacccagcaacattaccaccatatccattgcttgcggaattgtaactgccgccactgttcccataacctaaagtaaggttttagttcatgctaccgtgtccaccttcccaccagcattaccatatccgtatccagcgccattgttatagtatccgctaccatacccgtagcccgccgattgctgtggggctcttatgtgaatgtgcacccgaacccgctgctgatggtgtcgatggtggtattgctgttgaaaatgggtggtcagcttctttcagaaataattctcgatgtttacttgtccgttttcatatccgccatatccgtaccgttttggccgcgaatgatttgccaaagaaacgactgatggggccaaataatgagacggaactgcaacaattgaggagcaaaggacaaagaggaagagaaaagtgaaaagaaaattcattggcaatttttgagaattattttgggaaaattgcggacgattcattctttttataggcacacaaagtcaagtggaggacgaacgtcagcaacaaaattaaaaggggccaataaggccgaaaaggaaacatttgacgaacagaggcacaattgttgtgtttttgagtaactcttcacatgcgatgacaaatttatttttattttgaaatatttttaattataataaatttaatttttaattctaaacttaagagttatgaataaaaatacctaatgtcttaaaatacggtcaaggtcagacggtaggggtcaactccgtgtggccaactccgtctcagcaatgttcaaaaagctataacttttttctttgttggccaaacttcacaatcatggtatcattcgaaagccctagatgtttagaagatatttataagctatttctcagtgattaatcagctctcaaaaaagttgtcagttgaaaaccgcaaaaaaggcagaattttcgaagttttttatttctatctttttttatagttcgaaattttctgtaatttttagtaggctaatagagcctgtgaagagctttcgaatgatatcaagattgtttgattcggtcaataacttcaagagttatattgactcaaagttggctcagacggagttggcccgttccgaggtcagatcctgcataggtagtaggttcaagaaacttttaaatataacaaacattttgccaaaagcggattttttaaatttgaaatatgaccccacctctccctcccttcggggctttattcctttgttttattttttggttttgccaaccacttaggtatgtaaattctcgaatctaaattccattttaattttatttacaaattttgcaattcataaataatccttttaaatgtcttcaacttttaacaatgaatattaccagcgaagaatgcatgctgaatttgtgcctttaccaaaggtcgttggaattataactttaactttttccaatac

SEQ ID NO: 19574 - DNA, 1843 bp, Heterodera glycines
gttgtgtgggtggtggcggcggtggctgcggaggaggatgtgccggaggcggatgttgtggtcgcagaaaacgagaagtacttaaaaatcataaaaaaattgaaaatccaagaagtggtggggtagagaaatttgtcgaattttttaaaatttaaatgggcagtagtttgcttcacgcaccaaatttgccatttatacggattagaatttcgtatccagattcccagatatcccggattttgttgtagtaaaacccagtggatctgggtttgagtaacatagccgggtcggtttaagtttgcaaatcaaattccagacaagattcggacctgatctgttctcttatatcagtgggtcagggtttgagtatagccgaatcagtcgctattttcctggaaccagtcaaattccagactggatcccgacctaatctgttttattatcctgtttcaaaatatccttggtaattttcattttgaaggccgtccaaccgttattcaaggaccgaactgtgccatgtccacaaactgaatggcgcgaaatcatcagacaggttatttgaattaaatcaatttctatataaattttcaactaaatattttcagagcattttatcatcggctactgtaaaaggacgtgccgacacttcgccaatgaaaattcaaatggcattgacagatcgatttccccacaacaaattttttgtgatttgttcaccgtttgagcaagacaacaaaaatccgagtgaaagtgctgttaacgatggacaccaaatgccaattgaagcgcaattaaggtaaaaactagagaacgggccggtcggttttttttttttggtttttttcgattttcggtttcggtttttaaccgagaaaaaccgaccgagatatttcaaagtttttcggttttaaaccgaccgaccgaattaatcaaaaaaccgaaacaattgaccgacttttttttaatgcgatttgttaacagattttgtccaaaaaatgaccaagtttgcgattttcagcaaatttttaagaaaattaaggatttttagggtccggcggtgccgataggcgccgccggggggaaaacttgaaaattttggccatatttttagcaaattttcatcaaaaaaattcccaaatttgtggattggatttgcggaaaaaacattgataatttcttgttttacaaaaacttagcaaaattttttggaaaatttgagtgaggtaggtcttggagagtgtactaacaagaagaatcaaaaaatttagcaaaaaaaattttcccaacctctagaacaccattcgatatagcttcaatagctctacaattttgatcaaaacaaattcttaaaaatcgaaataaaccgaaaatttttcgtcggttttatcggtttctgttttttcgggtttttaaccgataccgaccgaccgagaaattttttactttttcggtttttttcggtttttatccgaaatcgttcgaccgactctctttgtacggtctctaataaaaaccattttttttttgtttgatagtttgcctttttggtattgagtttactgtagttaaaattttgcaacatccaattttggtcctatttttcaaaaataaacatgttaattagcataaaattcatttattttttaataaaccaatttttaaattgactagttaaattactccacatttttcataacaaataaacgaactcgaccttttttccgatttagttctgccggagatgggtactgtagcgtaatggagagcctactgtggtgccacgctgtttcaatgagtgcttaataaaaatctttttgaaatgttgcaacaactaattaaattt

SEQ ID NO: 19575 - DNA, 1181 bp, Heterodera glycines
ttcgttattattttctgctaaatgccaaattgttttttccatttgttaattatgtctcggctgactccaattttcttacaaatttctttatgattttgttgccattctttgactgaatattttcttatatatatgttatataggttttgagtttcgttgctaaaaccattttctcccggccgaaggccgggagcgccctgaaagtagtggaagggtcttacaactttttgaggagcatccgggaaaactatagagaaaaattcagcgcggacgactgagtcccggggaccgatttctcactttttcttgcagtttagggcctgtaactttttttctaaaacccgaatcaaaaagtgcccgctgtgagggcactcccccaccactgtcctctacatgctggtattttttatttttttattagagccaccccctggcctgcacgcttggctaattgaagtgtgctcaaaatgtacacttcagtaccaggcgaataactcgccagggtttgctttgaccgaaaaattgtttctgagcaaaaatgtgtagtatttgaaaggctatccaaccaagttttaaaatttcgaaaattttgaaaatttttcgagctaggcctaaaaaacggttttcgggtttttgaattttaggattttttaacgatttttcccagagaaacggagaccacttccaaaacatagtttttcgagctctatcgactggtatttttttcggaaaaatttcgattttttcccggaaatagaaaaaatttttggcctgagcgggacatttgagtcccgggtccataactcgttaggggttggttttatcgaaaaaactccttagggcaaaattgtagacttttttaagctctatcgaatggtgtgccatatggccggaaattttcaaaaattttcgagctaggccccctagaaattttcaaaaattttttttgggttgaaaaagagtgggtgaaaaatatttttctggggtaaattagggtcctgagcacaaatatgatgtttattttaagtttcagattttttggaatattttaaaaattctttattttttggcaattttttggccctcgggattttggcctaatatttgaaaattcataacaaatcgaagggttgatcaattttacaggaataaagccttaaaaatagagaaaaatcaggaga

SEQ ID NO: 19576 - DNA, 2339 bp, Heterodera glycines
  unsure (1)..(2339): unsure at all n locations
cgcccaaaattcactcctccagtttaattcgaaaactctcgtcgcatctttctctaacggggcgggccttcaaaacaagaatgtaccaacctcggaaagaaaaaaaaatttcatttcagagtccaacatttttatcgtttgttttttcgttttggttttttaaattaaagacaaactatttttttatttaattttttacttgaaaaaattatttatttttggtaacgattgaaaatccagcaggtccatctcagattccgtcttttcttgcgcatggatcaattagtccaattttgttcgtggcatttccaattttgaaaaattcggcacttttccccctccaaaattttgtcatttatcttttctttttccactttttgtgttatcatcattttctgtttcataatcttttttagcccatcaaagctctctctctctccccgtcgattcactacccccaaaaattattccctaatgagaaaataaacaattaattctgatgggtcattccaatacatatgatggtgatgacggtgctgctgctgatgtgtccctcgtgccgttcctttcccccgcccaatgccgccccaataatttccaaaccataatttgtcaatgctaaattattggcccctgaaatcaaatttcaaggattcctcattagttttaatctgttcagcagaacaatggccgattcattgtgggagagcattaattaacgcttcttcgtttttctcgtcagagttagcataaaatttaatatttcttttggcattacttttcggttcggatgtttcacattcaaccggcaaaactgatagttttgcccggccttgtaaattttcgttgaaattattattattttttaatcagggttgccatccgtccttgaatggcaaggacgtccttgaaattgggccctctctcttgaaaataaaaaacgtccttgtatgccaaggacgtccttgaaaatgagcatttggaaaagtttaaaaaaaatcaaagaaatttgagaaatctttgtaattttcaacaatattttgattaaattatggcattatgtcatttaaaaatgtaatttttgagaatttttgaaattttatggcattaagtcactagtcactatttttcttaaaaaattagccaaaaatcgcaaattttggtcatttttggacaaaaatctgtaaacaactcgcattaaaaattacaaatttttccggactcccctatcctcaaaaaattttttaaaaagcgcgccgtaaaaaaaccctttttataaacaaaaaaagtcgttgcatggcttaaaatcgcaaaaaattaggcagtttttggtgaaaatctgttaacaaattgcattcaaattttcaaaatttttcccccggcggcgcctgtcggcaccgccggaccccccccccccctctgtcccacaaaatttttggaaaaagcgcgccacaaaaaaagcgtttttaaagcagaaaaaagtcgtcgtaaatgaagaaaatgatattgcaaatcggcatacccgtccttggaagccgacattgggcgataccaaccctgttcttatttcttanatatattcaaaattttgaaattttatggcagaatgtcactattttatcaagaaaatataaggtttgcgcaaaatttggttatttttgacaaaaaactgttagcaaatcgcattaaaaattacaaaatttttcccggcggcgcctatcggcgccaccggaccatctcccccttgtccccaaaagtagttattttttcttctaattttcaaaattattcccttttcggtgggaattcaatcacaattttaacaattaaaatgagaaaatattgttatttttggactaaatttgttcacaaagtgcactaaaaatttcaaaaattttccccggcggcgcctatcggcaccgccggcacccaaaaccttatttttataaaaagttggctcaaaatcgcaaaaaattggccttttttggtgaaaatctgttaacaaatcagaatttggacatagaagcaaatggcggggccgcaaaagtcaataactatttttttattttgtccaaaaattaataaattacgatttttattatttttgaaggaaactgaaatatcttggtatcattcgaaattttgatgaggagaagttttttctaaacaaatgttaagcaatttgaagagttaaaaaaagatttgggcattaaagaatttattttttgaataactcataaactaacaaaaaactttagaaaataaacatagaaatcgatgctgcttaagtgagtgattccaaaaaaagaaattttgtcttcaaatcaagctaaaagcat

SEQ ID NO: 19577 - DNA, 1229 bp, Heterodera glycines
aaaaattaatgcaatttttaaaaatattttgtccaaaaattgagaaatagccaaaaaggtgaaaaaagtgaaaggtaaagggccaaaaaggtgataaaagttgagattaaagttaaacccagccatggtttatgctgtactataaacaaaaaatacaccccttttttcttcatttttggcgatggataattgagtccctgttcaaagtggacatttcagtagctgatttttttttgtcacaagacgtgagagattttgaaatattgcggattggataattgttttacataaaaaccccaaaatttttaaaaaaaaggataatttaagtccagcagaagtgccgatatatgcgacgacagttaaaaatctaaaaatttagcactattcttaattgataatattaaatttaaatttttgggatttgccaaataatttgttgatgatgtggcacaaaaaaaaactatggcataatttcccattattaaacggaaatatttatttaagaaaaacaaaagcatatgataaaaaactgagtttcaaatgttttaacataatgtacaaataatgggaaaaatcagcgaaggtttaaaaatcagttttaatttatagaaatttaattaaatgtcataaaaattaattaataatatgagataaaatgagatattttattttatttttttatttgtcttaaagaaaatatattcattatttttgaaaatatatttttaaatttatttagaaatctgtccatctgtttctttgggagatgagaaaatattttgctcatatttttttgtctaatgccgctgtcttttttggcttaactgaacaaatttttggaacaggtttgctttttcttgccaaatgattcattttttggagaaatttacgaagaaattttttaattgatcagaattttaaattgataaaaaaataggtcgattattttaatacttattaatttgttttctaaaaaaaacaaaatattaatttgacatcgatgtacaattttattataaattttttgaatattttactaaataagggttcgtgtccgtccttggattcaactgatagcccaaattggtattagggaaattcaaaacggcacggaattatttgccaaccaaatttttttttaatttcgcatttatttttcttaaatttgataggattgatagtatgctattggaattattaaagtaccaccttaggggttgtttgaatta

SEQ ID NO: 19578 - DNA, 1569 bp, Heterodera glycines
ttatacttattgtaattaaggtgttctaaatgcggctgtgtggtggaaattgaaaatgatgagcacaaaatttcgtgccccaactgcaattatgcaatgtgtcgcagatgcaatgcgaattggacggaagagcacgacaaattgtcatgcgaacagttcgccaaactcaaaaattacaaagatgacccattgtaatataataaaataattaattattaatttaagtgtcttaaattaaaaaattattctttttttagtgataaaaagatagcagatgcaattatccacaaatgtattcaatgcaacattagctttgtaaaggaagacggttgcaaccatgtaaaataatatttataaaatgagaaaaaaaattttatttacaaatttttctacagttttaagaaataatgaattttgaatttttaaagaatttcatagaaaaatttgttttttttttctttaaattccggaaataagaaccctggacctatttcgtaagaactaaaattgacagccctgttaaatttttaatttttttttttataaattattttaaaaatttagattttttgtataaaatgcagaactgaacaatgctactgctgcagaaagtcaattgatttatttgatcattattgctggtcatcaaataaaattaatatttaaaaattagaaattaaattaaattgaataaaattttcctttaattaaaataaataaatattaatcattttttataataaatttccctgttttttaaagctgttcggtggaattgccggggaagttaagcgcttttaaatgtaaaaattgtggaaagtgtttgcaatctttggatatgaataaagttgaagcacaaaatgcagaacgcattcgaaaagtaaaaaaaaaaaaatcctgtaaatatttttaatttttttttaattttcagtgtcatgaattcaaaaagaaattttttacacctttttcaaaaaagtttgaccgaaaaatgaatgacaaattaaaaggatccaccagaatgaatgaacaataatcatctgaagaacattgaaggtcaatcaagcaaaaagcattttggtaaaaattatgaacgctaaaaaactaataaatatttcgattcatgtaattttgacaaattaaaggttttaaaaaattcgtactaacaattgggaaagaaatagacttgttcctatgaatttaaattcacaaaaaattttctttaatttatttatatttaaaaaaaaattaacttaaaatccggggtaatattttggaattaagaaaaatatttgaaagaaataaatctattgagttcatatgtataggcgtataattttttaattattctaaagtatatgcgcgtgtgttatttacaataaaatagttttattcattggtctttttggtcataagttcatctgttgattaaccggtttcacttgaattacattgggatgttgtgtttgtcccattattttcgcaaaaataaatcttggtaagaaatccatacaaatttggcgtcgtaatgagtcactggccccaagcattagccaactcgagactccaacg

SEQ ID NO: 19579 - DNA, 1226 bp, Heterodera glycines
aagattaggccagaaaagtggctcctttttttgagagaaattttgcatcgaataaatgctctgcagcatgagtagaggggcggagagcaatggccattttattgttccgagaatttttaaatttcaagattaggccagaaaagtggctcctcttttttgagagaaattttgcatcgaacaaatgctctgcagcatgagcagaggggcggagagcaatggccattttattgttccgagaatttttaaatttcaagattaggccagaaaagtggctcctcttttttgagagaaattttgcatcgaacaaatgctctgcagcatgagcagaggggcggagagcaatggccattttattgttccgagaatttttaaatttcaagattaggccagaaaagtggctcctcttttttgagagaaattttgcatcgaacaaatgctctgcagcatgagtagaggggcggagagcaatggccattttattgttccgagaatttttaaatttcaagattaggccagaaaagtggctcctcttttttgagagaaattttgcatcgaacaaatgctctgcagcatgagtagaggggcggagagcaatggccattttattgttccgagaatttttaaatttcaagattaggccagaaaagtggctcctcttttttgagagaaattttgcatcgaacaaatgctctgcagcatgagtagaggggcggagagcaatggccattttattgttccgagaatttttaaatttcacgattaggccagaaaagtggctcctcttttttgagagaaattttgcatcgaacaaatgctctgcagcatgagtagaggggcggagagcaatggccattttattgttccgagaatttttaaatttcaagattaggccagaaaagtggctcctcttttttgagagaaattttgcatcgaacaaatgctctgcagcatgagcagaggggcggagagcaatggccattttattgttccgagaatttttaaatttcaagattaggccagaaaagtggctcctcttttttgagagaaattttgcatcgaacaaatgctctgcagcatgagcagaggggcggagagcaatggccattttattgttccgagaatttttaatttcaagataggccagaaagtggctcctcttttttgagagaaatttgcatcgaacaatgctctgcagcatgagcagaggggcggagagcatggccatt

SEQ ID NO: 19580 - DNA, 1952 bp, Heterodera glycines
  unsure (1)..(1952): unsure at all n locations
tttctactgatccgttgtccaattgcgcgagacgaaagcaaatggaccaaatgggaagaagaagcgattggctggcaaattgatgatcagtggaataaaattgacattcgtatttatactgagaattacatcggcgatgggtaagtgaataaattattcaacataaaatttactgtttttctatttttagacttctcgacgaaattcccggccctagtgatcagtagaagtgaatgaattgtattgttaagaagtgaccgaccaaactgaattgtggaattggaaattgacgtgctcataaaattgttttctttttttttgttgactgatcattgatcaactttggatttgtgttatgcgccattatgataaattcagtgatttcctgaaattggaacatttccgaccaaccgagcgaatgaatgcgttgtctgcctaagcttttggcttgcgcataggctttgtcttttatatgagttgccattgtctcgtttcttttttatttggttccaacaattaaaacagtttttctcatattttttcaaattttaatctttttgtccacggctaaatttttaaaagctttaaaattttctttatttttttttttgccaatttatcggcgtcggcgagttgtagtgtaccgtcaccccgggtaaaacaaaaaagtctcagaaactcctccccttaaaatttcactcttgaatgatttggattacaacaaacgatcatttgcccccgcattgggtcgggggaataaaaaagtggttttaaagcgatctgagcaatcacagttcggaatgttcccttgttaagtagttttatctgttcgggcattgtttcattatgagaagtttggcccatcaatttgtttgttcaaattttgcgatttggagccaattagaactagagaccggacaagagggtcggtttcggtttaaaaaccgaaaaaaaccgaaaccgaaaaaaacgaagaaaatttttcggtttttttgattttgtttatttttccccaaaaaagaataaaccttttttattaacggaaaaatgctctttaatatttatattgaatttttgggagatttaaatgaatttttttgcttcttctgcatggctgcagggctaccaagtgtcctgattttttagattggtcctgaatttgaaggtacatatctgaaaaatcaaaaatgtccttaattttaaggtctccgagaaatgtataaaaagggcgatatgttgtaacaaaattttaaaaccaaccggtgcccccccgcctcctattgtctcctcgtcgcgttgacgaagaacagagtacaaaaattgttctctttcttcgcctctctatcgaatcacacagcttttttcatcccaggaaaagcgaaggaatagagaggaaattgccataaaattggccattaaatgatcgattaggctaaaataagtcttccattttttgttattattttaaaaaattcttcagcattcgcattattcgtcacccttttttacagcatttcattcattttattttttttataatttataatgcaaaattaattccaataataaaatttaaattttttaaaaatatgagttgaaattctggcccaaaagcttgcaaaagagaaaataacgattaaaaataaatgtaaaatctatatttataatgtagattggaacgagcaccttctttaaccaataattaatatggaaataattaaaatgggtaaaaagagtttaaacctataaaaaataaatataaaaataattttatttatttatctcattcggatatgaaatanaaaatataaaatattaagaattaagtattanaatttgttattattagatgcaagcaattttaaattactagaataaaaaaatgtatatacaataactcagatgttgatgtaatttacgacattgccaatttaaatttaattttgaaaaaa

SEQ ID NO: 19581 - DNA, 1475 bp, Heterodera glycines
  unsure (1)..(1475): unsure at all n locations
aagtgatgaaaatgttaaaaaaaattaataanagccgtacatcctaagggcacactttgaaccgacggaaacaaaaaaaaccctacaaagccccaaaaagtgaaaaatagaaaaaacaattaatttaagctgtcctaaactggcaacattggctggtcattcggagttttgttgtcgtcctgctggagaaaggcacacaacagacggcccatgaccaggctggtcatctgcatgccagcactggagcacatcattctgaattcaaggggggggggattataaatggaagaattaaattggatttgctagaaattgtataattttaataaaattattatttcttaactgacgaaaataaaaataaaattttttgatcaattgcattgttcatcttttttgtcataaatggcatagcttaggggagagcgggggaaaagcggctaacgcgtcggtgaattttccgaaaaccggaggggggcgggggagggggggctcggagaataacgcagaccgaccagtaaaaaaaacaaattatgtcaactcacttggcaaccataatgccgtcgacgccaaggaaggtcatgaattcatctaaaaaaaaacgaattggttaatactaattagcgccaggaccaatttttcatacgtcggcccctattttttttttgctattcaaaccacctttatttgcggcgcgtttttttccaaaaaactttgtggaaaggggtggagcggtcccggcggtgccgataggcgccgccaggaaaattttttgaattttctatgggtttcggctacggaaattgttcaaatgttaactttttcccccttcgttacgacccccaccacgacgacccccccccccctcctttacagccgccccccttacgacgaacgagggggggggggggggggggtgcgccggcgcaccccttgttcatgtatggtaataattagggcgtttaattatacggatataaaatcgcgaaatatggacataaaatggcaaaatatggacatacataaatttttcaaaattaaggatttactttctcaaaatttctaaagtaaaagtctttaaaatgggctaaatacattgttaataatcattttagaagaaaaaaaaacacgtaaagctaaaatttattcagttttattttccttatttttgacataaatttaccaatttttaagaaaatttaaatgtattcaaattctcgaaaaatgtttgctaaaaaattgattttttgaaaaattttccggtctttggggtcaaaaaggtcaatttagctgttgggggccgttctaatagaggttttctggaaaatgccaaaatatggacaaatatggaaaatatggatatagaaatccatcctagaagctccaaaccaagctaaaaatatgtttttcgtgcgtttcaggcctcccacagtccaggaaaaaaatatggattttcatataattcaacgccctag

SEQ ID NO: 19582 - DNA, 1103 bp, Heterodera glycines
gttttgttgtcattgttggacgaccgctgttgctgctgctgccgatgctgatcacctgccgaacactcgaagtgatcagtgccggtccgagttggccttgaaaattgatcagtaataggacatatataatctgtttaattatgcaatttacatttactaagctacagagcttacatataagcactcagaattttgatgaggaaaaatctgctgaattgtgagtgcccagattgatccatgctcattgcaattagctttttgaaatttcatcattctgttgctatttaggcaattttcttacctagggtaattaacgattaaccaattaaaaattgcgcaattctgagtgttgttattacattaattaatcagtgtatgccaatcagaagagtgctttagcataatgatcaattccgaaattgatcagtttccggttgcccgttcaccaattgatcagtccgacattctgtcgctgatcactgagcttaccccttcactttgccgtccgacgcgccacattggccaacagcggaattgcgcaacatttgcttggcgtgctgttcaatttcctccattgtggcggtggagttgttgcttggtgagcccgattgattgtcgtcgcacacattctcagcttttgcagcagtaagaccggaagcgaccgcggtgaaacggccgtgttgccgctcctccaactcatcgccatcctccgtttcggcaccacactcatcagtcccgctctcgtcccgtcgggtgccggcatagccgaagtcgaactcggggtcgggaatcatctgttgatgtggaaaataaattaaaattagtaagccatcaaaaacaatttcgacgctacctgcaaaaggctcagctcaatcagccgtttgataaagcgattttgagagcggaacaaaagagtccagcaccactcggccagactgagcagcgaaacaaatgccatcagaatgaaccaaaagtagagcatcaggaagattttctcgttgagctgaacggggaaggcaagggaatgaaatggattcacatttgggtccactgcgtttcggcgatggcgtttcggcgctcgcgtttcggcgccagccatgttt

SEQ ID NO: 19583 - DNA, 3026 bp, Heterodera glycines
ttttttattactattaaacccacttttttcggcgcgctttttcctgaaaacttttcggatgcaggggcggtccggcggtgccgataggcgccgccggggaaattttgaaaatttgagtgtaacttgttaacagattttcaacaaaaaaggctggtttttgcgattactagacttaatttgtatggattttcatttaaaaaatgataaaaatgtgtaaattaatcatattttgtcgataggaaacccatgggtatacaaaaagaaaattaaaaatactttaatttatgtagagagattgaaccagggtaaataaaagggaaagtcaaggagagtagcctctaggccatttggacaattggcagtgccacttttatataaaatattaattattttataaaaaaatttttgcttttaacaacaattttcttcactaattttcactcaaacccccattcttaccagtgtattttaatacccggttggacccggacctaccgggtcgggtaccgggtattggattttcaaaaaaccgggtccgggtccgggtaatgaaaaaaccgggtatccgggtctgggatccggtcgggtacccggacccggcctaccctaatatttattgtggaatttaaaaatgacaaaattaatatttcattagtcaaaaaattctgaaaaactaggttagtatgcttttgatgctgatcaaatctttacaccaactagatcagatccctggtgatctgggcacccaaaacccactgaaaacgtggaaatttttgaaaaaaattcgtaaagggttggaaaatttttccggaaaaaattatcaggctcattgttaagaacacaaaatactataaaaaaagtccgcaaaattgttttaattgaaattaaatattaattaaaaatcgaactgatggctggaaaagccgggaatttcccggtcccggttaaaactggtcaaaaccgggaccttggtactcagttgtccgtgttttggtcccggtcccgtcctaccctagtataaaatattgggaatttcttttttatattattttcattttatttttatctgtttttttcatgtccaatagtgttgttattgcagtagaatgcgtttttctttatttgcattttatctgtttgggattattactttttgctaaattgccttttcaattactttttgttagtaaaatgcgagaacaacttaattaaaatgagcctcatgaaaaataatttaagataattgtcgttattttttttatctctagttcatattaataattgtaaattaataataaattaattatttttaattttatttcacaaaatagtttaaaataattttctattaaccattttgatgcttaatgatttgttcttttaaagaataataattcaaaatttcttcttttaatgtttttcaatttaaattgttttcttacttttgttataactttgttgccatttgcattggaatgtagcaaaatattgaaagtttaattcattaaattttatgattatttctggatatattgctccatttatgagatccaatattttattatatgggattttgttttaaattattgttttttaactcatataaaattttattactgtttttttaataaaattaaatcaccgtttatatttattatgttgctcaatggaaaataatttaataaaattctcatcaggatattgatcacgatgagttgttgatttcacgcactgttgtgctccaattagcatattcaatattgttttatttttaaataatattttgattattttcaatttgttaaatttgattttgtatatcaatcaatttaaaaaaatagaaatatcataatttcagttaattttaaatttttttcgattcattctggttttcagccagtttttatgtaacaaaatcgctaatgtccagaaatgcagcgggatgttctcatcagggctgggcgcaattacggattacgggaattacggcctttttggacccccgtaattacggattacggcttacggatttttgggatttttccgtaattttgatccgtaattggctttttgggattatttttcgagacgatttcctgcaagattattttttttataaaaaccaaagtttcttactttttaaaattttttgtcgatttttcttaataaaatcattaaaattttcaaaaaatttgcccggcggcacctatcggcaccgccggaccataatttactcgattttaccttatttttttaaattttgactccaaaatggcaaaaattagtcttttttggttaaaaatagttacaattcctgtttttgctctccggcgctgaatttttttaaataatctaaacaaattttgaccaaaaaaattcttcggatccccccccccccgaaatttttttctgactattaaaatgttgaaataattatatacatacaaaatccaattataatgatcaaaatcgtcgtaattacggattacggatttccgtaattgaaaatccagttgcgccagccctgattcgcatgggccaaaggcactcggctcgactcgggtggggccgaaaatttggaaatgcaaataaaatacttaatttaaaattttaaataaagagtaccaaaaattgaatgacattgtaaaatatcattattaattgtacacactcaagactcttgaatttcgcttaattgtaattaattaacatatattgtaaacgatggagactttttgttgatcttctcaacgatgctagcttttttatagtaggttttatcaattaacactggacatgattaggattatttccatttatttagttaattacgttttttatctgatattttcctatcatttgcaccttttaatcattttatcacaactttatgatctgatcaatttccactttccattttatgatcttatcaatccaaactttccattttatgatcttatcaatccaaactttccattttatgatcttatcaatccaaactttccattttatgatcttatcaatcc

SEQ ID NO: 19584 - DNA, 1264 bp, Heterodera glycines
  unsure (1)..(1264): unsure at all n locations
aaattcgaatanattttttgactgcaaatttttttccttttttgaatgggttcaaaaaaattttaagagaatttttgattattaatttgaagtcttgaatttatttgacaaatccaagacttaaaactgggagaagcaaggggctgtggctgggggcctaaaatttgggccacattggagaattaattctgatttctgaaaaagtcccagaaataactattttttctttccataccttcttgtagagctcgagctgctctttccaatggtcttatcccggtctcgatccgtgccgaactcacaaagttatggagtgaaatgtgaaatattgttttcaccacaaggcattttttctgaaaaccggattcaaaaatctggggtttggtataaccgttttagaaatagcgtagaaaacagcttcgatatcaagaaaccaagtcaagtccagaaaggaatattttaaaacgatttcgttttgttttggcattatgataccgaataactttcggaaattatggaaacaaaattggagaaattcgaataattttttgactgcaaatttttttccttttttgaattgggttcaaaaaaattttaagagaatttttgattattaatttgaagtcttgaatttatttgacaaatccaagacttaaaactgggagaagcaaggggctgtggctgggggcctaaaatttgggccacattggagaattaattctgatttctgaaaaagtcccagaaataactattttttctttccataccttcttgtagagctcgagctgctctttccaatggtcttatcccggtctcgatccgtgccgaactcacaaagttatggagtgaaatgtgaaatattgttttcaccacaaggcattttttctgaaaaccggattcaaaaatctggggtttggtataaccgttttagaaatagcgtagaaaacagcttcgatatcaagaaaccaagtcaagtccagaaaggaatattttaaaacgatttcgttttgttttggcattatgataccgaataactttcggaaattatggaaacaaaattggagaaattcgaataattttttgactgcaaatttttttccttttttgaattgngttcaaaaaaattttaagagaatttttgattattattttgaagtcttgaatttatttgacaaatccaagacttanaactgggagaagcaaggggctgtggctggngggnnctaaattgngcacattgnagaattattctgatttctgaaaa

SEQ ID NO: 19585 - DNA, 2779 bp, Heterodera glycines
tcgctaattgagccatttgaattggtgaacgaacggactaacgagaagctgacactgatgaacgatggagatggcttttttcaattatttagtgattggctgctaaaacggggcccaattgttgcggagacggcggcggtggttcagaaacagcagcagaagaacgacgaaaattgggacaaattgaacggagtgtgcttcactcttgatggtgattgtattgggtgagcagaaagattggccgtatttttgaatccaaatccaaacattgtgttgctgtatcatccgccgaaagctcttcacatgctctattagccttaaaaacgcgaaaagatttcttagcctttaaaaaaaattatgaagaaaaaacttcaaaatttcgaccttttcgttttgtccgttctcttacacggtttatttcggaatccctgttggtccgggtttttttcattaattacgggctatccttttacagaatgttggttctaatccatttcaaattttgcttaatttaggccgctgtctccgccaggtcaaagcaacgaaaaagtgttctcaattcccggacctagtgatcagtggagcagaaaaagtgatcatttgagaaatcgccgattattttgagttatgaagaattggattgatttgatgatattttgttttttgctctttggacgtacgatataaaagtgagttctaaaatttgctcatttttcaacaataactatttcgagattcttcgtcgttaaaaaatcgcaaccctacttattactaggagtgaattttttaattcaatggaaaaacgacggaaatttggatgccaatttgaacaatatccaatttattttttggggcggcagtaactgcattagagccgaaaatggtcgaaaatataccaatcgatagtcctaggtctgtaatggaagaatccaaaagaatttttttgcggcaaccaatccctgaagagttacagacccgagactgaaatggccaaatggctttgggactgaaccgtccaacagataaaaacgcattgaattgcgacaaaatatataccaatcgattcctctcggcatgtaacccacgaatccgaaagaattttttgatgaaaaagaaattgaaaaaagttatgggtcatcaaaacctaaaaaatgacaaaaaaaaacaatttaagtgagccaaaaaaaaacgcttttgaggactcataacttagaaaaatttcattttctaaagtaaaaaagtgccaaattttttatttttttattaggttttcaatgatataaagaaaattttcaaaaaattttttcgaaataaagttgttttatgggttttctgggtcgaagaattcgattcttatatctatttcggcccatttcgaacccctgacccggactcgaacaaaaattcgaaaattcaattttcgaaaaattctaaatatgcagcaaaaccggttcaaatgcacgaaatactttatcttgccttctgaatcgatttttctgagagattaagcacaacaaattgagatcgatcatttctcaaatacaattaattattcattttcgtacacttaatcagacgacatttttgttgctttgatccgcttcttcttctccttctttttcttccgctggtggcgccaatggcctaaaattaattaaatattttatttttcgataaaattcaaatgctgttgctgctcacccaatggatttatcgaaactccacagatcaaatctgacattgttcaaattggcactcggattttcgcggttttcccacttaactggcgccgtcgccgtctccccaattgggcaccgttgcaacagccaattatacacatttaagtcgaattcgtcgatctcctgtttcagtgtcagcttttctttcgtcacttcgttatccaattcaaatggttcaattggcattggttccacccaaaaataaagttgaattttgtaactgacagaagtggtggcacggcgaaatgtctaaacaaaattggtaaaataaaaacaatttgacgaaaattctggcgagacgacctctttgaagctgttgacccattcgaaatttggtggactcacataagcacggaaacgtaattgctttggttgtccattttttgtcggagtgtgcagccatttggccaaagcttggccagcagttgcattgggtccatcgtcagcaattccttctgggcacagatgaccggaattgatcgaatgcaattcatcaagatcagtgagaagtgtcggcgaagtgcgacgacgcaaattgtccaaagcattggcattatgaagacccaaatgacgaatgcttttcgcaaaaataggccaaatttcgcgggtaaaaacatcccaaatcggttggacatacgtatcaattgaatgcacaaacacttccaatttggtgccacttttgtcaaagaatcgcttcttggagcggaaaaatttgatcacggaatggtcaatgtagctgaagaaagataaaaatgctttagcgtacacaaaagttaagactgactgaatctgaaggttcttaaagcaaattttgttgggcagttgacgatccgacaacggaaaatccacaaaactgccatcgatccgtacagacactttcggttttggtccattatcgtttgcatttggtccttcgtcctttacaattctgattgttctccaaattgtcaattcgctttttccatcaaaatgcgtgtccaccaaaacatcaaaacgataggaaagcaatgccattttgagtccgagttgggccaatggtc

SEQ ID NO: 19586 - DNA, 3455 bp, Heterodera glycines
aggaaagcaatacttcgtaagggatttggtggacatcttaacaggggaaagatgggcatttggccatggagagaaagtcgagagtgattctcgaatgtggcttttcgagactgactcccgggtggtttatatgaattttcgagactgattctcgaaatgcctttgctttttgtccctcaactgaccctcgagtccgttggccttccacgtttccattatccgatcggccacctttttgtttgcttctgtccccgcgacgtgcggcttctcagcgaatgcctccaaattggccgctattttatccgaattgatattggcgaagatggacgaacggatatcttaaatcagttcatttttgtatttttattttttccatttttctaccttccgacccaaattcttttcgtttctcgccattttgtgtggtcacttggatgacgagcacggcgattagcagcccggtgataataaccaagcacagagacacaaatgccagaaaataggcttggtttcgcgaaagtcgaaaacgaaccgcagaatccgactttaaattgtatgcatccatagaatcaccaaaaaaagataaaagggaaattatcaaccaaaaataattaattaattagttaattaataaataatatttcaaaatttggaagaaaatggccatatttcttaggaggaatctctctcgttttggtacggcggagaattctcattaaaagagtcaaacagtgaatgaagaaagcattctcattctcaattagtcccttatcactaattaccattttgccattttgccattgtgattttaagcaattttgtgctttcattttctgttgatttcactgataagccaaaaataatgtgaattaattgttaagcaaacactttttttcttttatgtttccgaatttcttaaatagttattagtcatcattaattaaatgattaaattccaaatttcattaaattatttgtggcaattttttaagcagctattaaaatgccatatttacacgtaattgccattttttcttgtaatttttttttatcactctttgagatgccgctggacgagcttttgggtaagtttttttttcattgtcaactaaattgaacattgttagtattactatgggatgacagttttagacaaaaaaatcgccaaaaaagggccgaaaaaatcaaaaattccaaaggcatgaaaaaggcaaaaaattaaaaaaggcagcaaaaaactgcgctaattttctcaaatttttccataattgatttgatgatttgaaatatttctgaagaaaaaataaataatttatttttatttaacttgaaaaatggtaaaatattttttgcaagttccaattgttttcttcacacgattccgttcagtgcccattttcggtgaaattctttaaaattaggggtccctattttaggtgcaaaaaaaccaaaaataagggcggggccaagaaaatgcttcatttggcattccgcaatcaatttcaattgttttggtgtttttgtaatcttaataacttacatttttctatagttttttgcccatttttgaaataaaaaggacggttcttacgacatttttcggtcccattttgcctatgcttttttccctcccctccaaaataattttagctttttaatatacgctacagaaaaaagcatcgtgtctttttttggcactgcaaatcatttaaattttttattaattgatttgtatttgccatcaaatggctggcaaattcgagtggtttcctatattttttaaaacatatgcattttataaagaattgtaaaatatttccaaattcacagatggcgcaatttcttaaaaactttttgtttgctatgattttgttcattgaatttgttgttgttgttgttgttgaaagggaagagaaagtaaaattaataattttaaaatattaaaaaataatttaaaatttaatgacagaacaaaatcttcgaatgcccaaaggaaaatgcacggcctgaacagttgagggaattggacaagaaagagcgaagtgaaagaggtacgaaggaaaacaatgaaaataattaattaattaaaccaattaatttattaattactttatttattatgttgttttattttcgaaaaaatcaaaaatcatttgattttgctctaacatatacaatataagaaaaaaaataataattcaaatctgcttaagaatttgaacttttgtatgaaatgcaagaaacattcaaaaaaatgttttctgaagattcaacagttacttacaataatccaattacaaaaaatctgctcaatcgccgaataccaaaatggcacttcgaatttattgtcgaaaaagcatttcaacttttgagaagaataaaagtaaagcttaatttgtatatctattaaagatcagagaaagcattacattatctgctgatatagcatatcagcaccatctttaacatgatatcaccaaatcggtcgaaacaatttttgcatttttggtttttgaaatattttattattttttagtttgccttttttgacaggaaattttctaataatttagttctcattttaccataattttaagcttctgttccatattttccactgtgaaaaaagaagagaacatttctgctgtttaaaaataatttgtttttttaattaagcaaattgatctaacaaattttgaaaaatggaatcaaacccaagaaaaacatgaaaaagaatggcaaaaaatatcggaaaagggcgaatatttccatcgcaaaatatgccttctgcagggatttgcgcatcgaattgtacgcgacgaaacactgaaggaaaactcagaatggcaaaagtttcatatttcagtggcctccgaaatatttggcatcggagaagaaagcgaatttgaagaggtaattaacgaatttgaagaggtaattaattgatacgtaaaaaacagtggcaatttggggtaacgccaaggcatacggcagcttttatgtgccaatgcaaaaaaccatccgaaatttgttctgtttggccccaacttaggcaatttcgtataaatattcttaacgcacgaataaatacaaaacaaattaacttttacaaaacattaattttatttggaaatgccttttgattttaagaataattttgcaattttaactgaagaggaatacatggaacatgtaaaaaaatgtgaggaatcggaagaatattcaagaaaaattggagattatatgctttcttcgactttgaacaaatcgttttatcggtaagcggcgacggatttgggaaaatttaaattattttaacatttttattttgtattatcaaataattaaaatactttagaatgtgtcttcataaagtaatttcaaattccgaagaattccaacactttctgtgttatcacaaaagcatttgaaaaatacaaaaaatcgctttatct

SEQ ID NO: 19587 - DNA, 1938 bp, Heterodera glycines
ggttttgttatttctgttaccgattgatcatttgggttttttgaatgtcacaggaaaaaaaattgttgttgtttgtcaacacacggttctcgagcagtacaccactgctcaagttgtgatttgtccacacatttttttcatttaaattcgttcttttttttacagaaagtgttgaatttgcatttgattcaatgacgaaaggaacttcttcgtttggcaagcgccacaacaaaacccacacgttgtgccgtcgctgtggtcggtcctcataccacatccagaagcacacttgctcttcctgtggctatccggagaagcgaaagcgcactttcgatggtgggttttgcaaacgaaacgaatttctcggagcggaggactcagtgtgaaaacgaaatttgcaaaagcagaatgtccaaataaacaccaaattcatgaactgcaagcaatttggttttcggacccccccccccccatttacataagtgttacatttcttcaaaaagacccgcaaacgtttcattctcaattcattaaaaggccatcgctttcttccacaggtctgtcaagtccatccgccgacgcaccaccggcaccggccgaatgcgtcatctgaagcttgtgcaccgccgcttccgcaacggattccgcgagggagtgaccgcgccgcgcaaaggcggagtgaaagcgtgagaagagtgaagaaaaaaggcatcaaaagatgatggaaaatgttttgttgttgactgattgttacaagaaaaaaatggtcatttttcattcgatatgtctgctacggatggcacggaattttcctacattttggggcggaattccgacaagcaaagattttaaaatttcctcggctccaattacggatcccaaacattacttttttcttaaaaattggcccaaaatcgcaaaaataaaatagtcattttagggattttcagggcggggaatccaattctgggtaatagttaagatggtagcccctattttttggcggaaattttcaaaatttaaaaagtcgttcaaaactagtttctagaggctttcggggtcgctgatcacgatccgggcatccatttcgcccaatttcgaaccccgaacccgaattcgaacaaaaactcgaaacttcaaatttcgcttttttcgtcggaaaagggtttaatgatcttttattgcaatattcgtggttttcagaatgtttccgtgtattttaatcattttttgttgaaaaaagcgcaccgcaaatcttaaaatggacaaaaatatatggaaatccaatccatgtaaatccgggccctaatcatgggcaatcaccgcacctcattaacgccttctgcaccactttgctgatcacaacggttccttgccggaaatgccctcaaagttggcactgtcggtggatgggtggcggtccggtgaaataggaaaacgaattcgatttcgtaaaaatttaagtttttggcgcaaaattttgggttttttccaatttcgtaaaatttcacatttttacaagtgctttttctatttttgccaacgaatgccgtcctgcggattattatgtggcacaatcggtccccttttgattttgaaccaaagagacaatgtgacctactgtatttgctgatgcttttgcagtggtactgtggcctcaaatggcaacaatcgttccaattgccgatgccatcgttcaccctcagcgtttggcacatttgacggagaacaaattcaacaaaattgccgaatcaaaacccattcattcattttggaaacaattcaatattcagcaaaaccaatccgagaccaaacgagttttatgaattttttaattgtaagaccatacgatcgatcggatacagtacgagtttttgatgaaaaaatatttttaaaattcaaaaattttcattttttggaaatttgaaaaattaaaaa

SEQ ID NO: 19588 - DNA, 1006 bp, Heterodera glycines
  unsure (1)..(1006): unsure at all n locations
actttttgatntttatgttttttcactgtcacttttgtcacccctttggcatgaaaactcgagaatcaagtcgtaatgccatccatcccccagctgaaaatccaatctttggttttatgtcattttaatgaattactaaaaagtaatgctttggctaatttattccgtcaaattgcaaattattgggcatggaatagctgatgaaagcggaccgacagcagttcgtgttttgatgcttcttcacttagctagcgaaagctcttcattaatatttgccataaaatttttggctcgtaaaagccaactaatttatttggtttaaattatttcctaaaatattatataatttaaatatagacaatctcggcttatcctcaatgaaaggcgactgatactgtacttctttaatttgatcatgttactgtttttgctaatcaaaaatttgtctgacattcccaaaatatgttcattcacaaatttatcggcaaaatggtgaatatgaaaattaaaataaaataaaaataaaattggttttcaataattgttcgcttttttgtcgtcttaaatgtcaatcatcatcagaagattgaaaagctaaaaagttttaaatcagcatcaaaagttagataaactttaatatttgaggtttttctgtgctcttaaatttgagcttcaaattttccttcttcaggcgcataccgtattatctctaattatcccccgtctccatttatcccatcgtatctaattatcccctccccccttttctgatgaggttgagaaataatcccccgggggataattagagataacacagaattttttcccgcacatattgcttagtgcgcacacttttttggagataaacattttaacaattttggcatttttccggtgtactgtatttcatatttgattttacatatttatgtattatatttacgattttcctttcatgtgtaaatccaatccctcttcatcatcggcaaataaaagaatataaaaa

SEQ ID NO: 19589 - DNA, 1888 bp, Heterodera glycines
  unsure (1)..(1888): unsure at all n locations
catttcgtgaaaaagcaaaggtaatgctaaaagtggcagacatttgtgtcccaattactatttattttgtaaatgaacaaaaatccgtctgcaaccgagattatcaattaattctcggatgtgactcactccgacattttggctcttttaccgtaaatatagacaaaaacaaaattcaaattgggacacaatggataagcttaggctccaaaaattatgaattaatgaacaatattcgagcctttgctgccgaaaattacacaattccaccttcaagccaagtaatgatcagagcaaacattaaaactgcctcacagccaaaacacagcttagttgtggataaacctgatttaaatttaataagcaatgaccttgggattgtaccaagtgtgtcggctccatttgtggaagatatcccgttgacaataattaatccatcaaatgatcctaagattttattcaaaggcatgcatttagcctatttaaacgaaatagtcgaaaatgatggaattttctacgaatcagaccaggagaaaattaaaagcgggaatcctgacccaaatggattaactgatccatcattcaaaattgacctctcaaaatctgacattaatgaaagagaaagagaagcacttaaaaatcttttagaagaatttaaggacatattttcaaaaagtcaatatgatttaggctcattttcaggtggcgaacatcattttgacacgacaaccgaagctccaatttcttcgccgccaagacgaatgccatataaatacagagatgaattaaagaagcatattgaacaattgcttaataaaggagtaatggttgaatctgagacaccatgggtcaccccttttgtagtagtacagaaaaaggatggtggaattagaccatgtttagattttcgaaaattaaacgaggtaatgatacccgacagatacccactcccgagattagactcaattatggaaaaagtcggaagttgcaaattctacagtagcttggacttatcctcaggatatatgcaaatcaaactcagtgatgacacatcatggaaatgtggcgtcataacggaggacaatgtgtatcaaatgcgatacatgccttttggtttaaaaaatgcgactgcggcattttcgagagccatggcagtggtattaagtggtttagaagactgctctctgtcatatgttgatgatgttttagtctacaccaaggacggtactttttgggaccacctaagctccctcagacgagtttttataaatttaggctttacaattagaaactgagtcctaaaaagtgtgtatttgccacccaagaaatgatgtttttgggtttcacattaaacacccaagggtacaagccgagcatgagtcgaattgaaataattcaataaatgtcaactcctaaaaatcttaaagatgttaaaagagtactcggaaaaaaaggattttacagaaggcatattcctaattttgctacggtagttgaaccattattacgtctctcgagacgagacgtcccgtttgaatggagtgctgaacatgataagacatttaaccatataaaagaattactgtcccaagcaccaaatttggtctttcctgattattcaaaaacatttcacatattttcagatgcttcaatggtcgggcttggtgcagtcttaatgcagaaaaatgaattaggcacattttcggccatttcttactgttgccggaccctctctgcatcaaaacgccgttggcctccgctacaaattgaattatgcgcaattatttatgctnntacgcaatttanaccatttattttttaagtgatatcgaattacatactgaccataaaaccgtagcatttttgntaaaaaagtctgatacacatc

SEQ ID NO: 19590 - DNA, 2445 bp, Heterodera glycines
tttaatttagcgaatttttttcgccaattttcacagtttaattataagttagaaattctataaaaaagaaagaaaaaagttatgtcaaataagtagggcagcaacttttagtgacgaaaaatcccgaaatagttaactaaaatagtgaataaaaatgccaaaatagtgagtaaaaatgccaaaatagtgacaaaatagtgtcaaaaaagtccgaaatagtgacgaatagtgacataattttcagccaaaaaataagccaaaataatttttattcactgattgcagttgcaaatgagttggactgggatttttaagaccaaaaaacccaaaatagttacctaaaaaaatttttaaaattaaaaatttttgccaagaaagtaaatttttgagaacattttttttcatttctaggagtatattttgaaaaattttagcttgattcttaggggtgtatttttttgaaattttttaggtcaattcttaggggtgtattttttggttttattgcatttttgttaaggaattttgcccaaaaatgtcaaaatagtgacaaaacgccaaaatagtgatttttaactattttagtgacaaaaccccaaaatagtgatttctagtgacgaaaagtgacgtccaaatgagaaaattttaacgcagaaatgcgttttttgagctcctttcttcaaaacaatcgagcaaaaaaaaaagttttttcactaaaagttgctgccctacaaataagacttctctccaattgagacagatcgctttgcatcagcttaccttcactaattcaatttggaataatgaatttattaaaatttcttattatttttttctttatttagacagttctatcgagaaatagtggtccgaaaagtcgcactacgaaccaagaacctgtttttgcccgacaattctttgtagtgcaacgccaatttccaccaactgctacaatcgaagtatttccaccacatcaaggacatgagcgacgcgaatgcaagagtcccaaatgctcaagccattcgacaaaatcattgtcattcaaagccagtttttcatgcaattttttcaatgtaaaattttgaaactcttccaatacagccatttaggtatattaagcgctgaaaacatagttaaaagctcaacaatttacaaatgtgaatttttaaaatttaaatttttgtttgaatccgcggatttggccgaaatggatgacggactcgtgatcagcgtccccgaaaacctttgaaaatgtattttcatgacttacaaaaaatttaattttgaactttttgttcgaattcgggttcgggattcgaaaaaagggggcccaccaccatccatagtcttacccgcaatttttgtcgattattttgtgcaaatctcaaatttgtgtgttttcgtacattttttgccatttttatgcatctgatttatttaccgaaattgagaggtttttcttcataaaatgcatttgatcactgatgaattaggtcattttcgtggtgagtcgaagtgacaaaaaggcaaatgtgggcgaagtgacaaaaaggcaaatgtgggcgaagtgacaaaaaggcaaatgtgggcgaagtgacaaaaaggcaaatgtgggcgaagtgacaaaaaggcaaatgtgggcgaagtgacaaaaaggcaaatgagtggtgatcagaagaggcgggtcatttcagtaccgaataatattttaattaattaataatataactattttaatatgttaattatatttgctggccctaattataatttagctttatatttaatatttcccaaccaaattacatttttaagagagaaataatattcataagcatagtttactcttacaaatacatgattgtgtgatcgatataagattttataattagcattcaaattcgagttggttcaagtatcacttcaaagtgatttgaagagtttaaaataaaaatggttggcgtttcacggtcttgatcagcgaccatcttaatataatagagagcctttttttattttataaaaattaatgttagtcttttacggaatgatccatattgggagtaaaaatctgccaaaaatattcctctctatcttgtttttcaaattttatttctggtatgtttggactttcttttgatgtatcagaattggcactcttaattttacaaagatatagcctcaaactacgttctgccaatttaatccctttttttgttagttcagcatgtaattctttaatagttttgattcgcttttcttggtaattttggatcgacttcattgcttcttgattttcaagaaagtcctcaaattttgactttatatttgacgtaaagtcaatgaagcagaggccaacaaaaagtttcaaaagtagacttttcattctatactcattatcaattcggtaataaattattaaagacaaagtaatagtgggatatt

SEQ ID NO: 19591 - DNA, 1788 bp, Heterodera glycines
  unsure (1)..(1788): unsure at all n locations
agaggtacaacagtgattagaagaggtacaactgtgattagaagaggtacaacagtcattagaaaaggtacaaaattgttaaaagaggtacaaaagtgattagaagaggtacaactgtgattagaagaggtacaacagtgattaaaagaggaagaacagtgattaaaagaggtacaatagtgattaaaagaggaagaacagtgattagaagaggtacaaaagtgatgagaagaggtacaacagtgattagaagaggtacaactgtgattagaagaggtacaaaagtcattagaagaggtacaaaagtgttagaagaggtacaactgtgattgattagaagaggtacaactgtgattagaagaggtgcaacagtgattagaagaggtgtaacagtgattagaagaggtacaacagtgattagaagaggtacaacagagattagaagaggtacaacagagattagaagaggtacaaactgtgattaggagaggtacaatggtgattagaagaggtacaaaagtgattagaacaggtgaaaaagtgattagaagaggtacaacagagattagaagaggtacaacagagattagaagaggtacaaatttgatgaagaggtacaaagtgatttaaagaggtacaaactgtgattaggagaggtacaatggtgattagaagaggtacaaaagtgattagaacaggtgaaaaagtgattagaagaggtacaactgtgattgattagaagagctacaactgtgattagaagaggtgcaacagtgattagaagaggtgtaacagtgattagaagaggtgcaacagtgattagaagaggtgtaacagtgattagaagaggtgcaacagtgattagaagaggtgtaacagtgataagaagaggttcaacatggtttaaaattatataaataaggaaaagttttttattaaagaataaaaatcgaatgcattgaatatttaagaaatttgaaatgatattattttttacagataaaaaataataatgaaattatttattaaaaaaaaatttaaaatttacaaccaatcttcaaattaattaaaagcattgaaaaataactcaaaaataaatagaaaaataatgttacaccgtccggatccgaacctgccccctcccccctcaaaattatgtctcagaatccccaatcacacagggattctgaggtcttgacgatgtcaaaagtaaaatctgatcacgtattcgtgatcagcgtcataaaatagccctaatgacatgtttttggaagatttttggtgaaaaaaatttttcaatcaaaaatcctatgctcacccctttggtcccgaatcccaaaatcacttttatttttataacaattcgcaaaaaagtgataaaaatgccaaataaaatttatattatagagaaaaaaattgcggatttttgtagtattttacttttccagaatatcttttcagaaccgagttatgaatttttttctgaaaattcgaatttttccagaaattctggaataacttttttcttttttgtgataaaaaactcaaataaatcccataaaattctccttatttttctctatttttaaagctttattatagttaaatcgatgaaaccatcaccgagttatgaattttcaaatatttggccaaaatcccgagggcaaaaaattgccaaaaaataaagaatttttanaaaattccaaaaatcatgaaacgaaaaacaaaggtcaaattcgagctcagcaccttatttaccccagngaaaattttttcacccccattttc

SEQ ID NO: 19592 - DNA, 1670 bp, Heterodera glycines
  unsure (1)..(1670): unsure at all n locations
ttttcataaattcaaagagatattctctgaatagagccacaatataatttatctttaaaaagtttcagtttcgnaggctaacaattagagaccggacaagagggtcggtcggtcagtttcggtataaaaaccgaaaaaaaccgaaaccgaaaaaaaccgaaaaactcaaaaaattttcggtcggtcggtttcggttaaaaaaccgaagaaaaattttcggtatatcgtttcggtttcggttttttttgaatttttatatttttccaaaaaagcaataaaacatttttattaacagtaaaatgtttttaatatttatattgtgtttgacgacaaaaattgaaagaaattgaagacacaaccttatcaatgcgtttgaagtgtccgaccaaatatccgacgtaaaagcaatttttgagcattcgtccaattcattttggacctttgatttgacattctgtagaccattggaagaatttttttacgataaattgactcatccttcaatttgtgcaacggattgtttcccatgaaaagtgcgattgttgtcgggttgttgatatcggagaaagatgattgggtgcatgcgatccaatgaattacttttttgtcgaatgatgaaagaccctcttaaaaattaaaaaaaaccaatacatatgcacatttaatataacgtaccacttcctaagaccaagtgtgtttcgattgtccctttctcacctcgcttctgcttcaacaaatcttcatatttcgcctcatattcgctgtttttgtgtttagatttaaggtggtttatagcattggaggtgttgcctttcttacatataatattcttacaacattcggcacattcgtactcgaaatcattgttgttgctttttttataaagcccgatttgccaaatcacacttccagagggcatgttgactattgctgtaatgtttgttttatatcactaaattaaaaagaaatgaaaattagtgataaacttttcaaaagtccgaaaacttaatcaaaaaccatcgaatttcaaacagtatattatgccaaaaattgttattaacgggttatgtcgcttcaatcgccagtcggtttttttcggtttttgaaaaaagtcggtcggttttttcggttttttgattatttcagtcggtcggcttcggtataaaaaccgaaaaaaaaccgaaaccgaaaaaaaccgaaaccgaaaaaaaccgaaaccgaaaaactcaaaaatttctcggtcggtttttttcggttaaaaaccgaaaccgaaaaatacagaaaaaaccgaccggtccgatctctactaacaatcgatttttagctcaaatttactgtttactgtttttcgagtcaaaatttcaataatctagatcaaaaacaaaatattatttgttgtgaaataaattttattaaaaatttaatcgtgaaaagatttccttctgctttttttattttgctttttttattagcagaaacaaatgcatagaattggaaaactcaattggaacctaattgattaaatttttaaggcatattacaccctaattaatctctttttttgcattgattcgaaaaggatatttattcaacatattttataatttcttgatcaaaaaatatttgaatattttattaatgataatttacgttataaaaaaaccatgcaa

SEQ ID NO: 19593 - DNA, 1099 bp, Heterodera glycines
ttcgaccggccgaacgaccccaaattttcattttcatttggcaaatgatgggaaattagaaaaaatgcacagtgttaacaataagtggaaaatgcgtgttttagtatgtgtttgttttttgaatggttgtcacagcatttaaattttcaaaatttagtacttttctacctcttttctctcctgtttccaacttttcactctctctctctctttcccctctatttctttcttttttctcctttcctcttttcaacttttttctccgttttttcccattaatcgtccatttattcccttttccatccgcttaattttaatttgtattttctcattacccatcaaaataacagtacgattgtgtgtgttctttgttcgcattattctcacataaatatcacacaaatctctcaaagttcgcaatttttccctattattacaaattgaaaaaaaattgtctcgtaaattatgcgaaacgaaaagtgcagtcgcctttcgccaaattttttttgggatgtttgttcgaaaatgtttaaaaacgtccaaatgatgggacaaagtccgcttacgacgcctttacttttggatggaatgggtcagtcatcagtaatctccaacaagaagtctcttttatcaatttcaataataataattgttaaaattaaaatagccttttttctccgtcccaattcgacgcgctttccttttcatttgcataattttctttcatttttatccgtccatttttgtcttatgtacgttttccacagttaatcttctcaagtgccacttccaatctttcatcatttttttgtcgcctttgcgcagacattaaaaggggcgaatggggcacattttgtcaaattgcttacatttaatttgcttaattaacacacacatttgtgtgtcccactgacttttgaactgtccattagttcgaccaaatcacacagcatttcatttcatttcgttgtaattccttctctcccttttgcacaacattcgcttttggtcgattgcccccccccctttttttcccttttttttctcggccctttcgaaacactcacatcataaaacaaataatcgcaatcacccctcc

SEQ ID NO: 19594 - DNA, 846 bp, Heterodera glycines
tgatggttgtgtgtgcttttctgccgatgtttggttgggacgtatagcgcgaggaagggaggagggagggagaaggctgtttcgccccaagtcgtcgtcccctgctgcacattcaatccccccattcagttgagaggaatggaaggggagaaaaacgccgccagctcggcagtactcttttttccgctcccctaccgtttcccccccccccacccctcccatccatcgcatctgctccactgggctcagggcggaatggatgggactgctgatgtatgtgtgagaggggaaaataagagaaatggggcgacggggaagggggacggacggaatgggaatggaagaaaaggaaagggtaaagggggaccgacccaccaaccaaccaacaaaacgcgaaaattgggcgggggggaagggggatgatatgaagttctaaaaatacgagaactgatggggtgaattggagaagggaacgggggggaggcgtaagaagacgcttttttgtgggacataaaatgatgcaaaagaggcaaaagtttgattcatttactccgctggtcggatccaaaaagcaaaaaattttctggaccaaaatttttataaaaacatagttaagaggacgaagtaagtcagcaaaagaagcaattggtataagatgaaggccaaaatgggtgcaaatgcaaataaaattcaaaggcaacaaaaagaaaggcacataaagtgaatggatgaaaatgcataggcatggagagatttgacttttaaatggcatttaacgccttcccaaagtgtgcaaaatgtgtgtgaaggggtcgaatgactccaaaaattcgagtcgattaaaac

SEQ ID NO: 19595 - DNA, 3902 bp, Heterodera glycines
  unsure (1)..(3902): unsure at all n locations
atgcaaagtttaagcccagaaaatcaaaaagaaattgaaatatttgccaaacattgctttgccgcgttgaaattgtttcaacaattcatcaccggtatttctttatgcaaataattaagtttcagtcagaagcaaaatattcatcaaaattgctaaaaacgcttattctgggctctattgcactttatgaatataaagttacaaaagaaattactcaacaattacttaattaatctaatcttttttggcaattgcctaacgctgagattttatatatatttgcttcttaaagcttttcgttcggatgatactaaaaagataggggtttgttcgaataggacattacggtggataatcgatcaaatgatgacagatcgcggcaatttgaatccgcgattcgcacgcggtttttctcgcgctccaccccttgttttacagcgaaagatttgagaaaattcatttttcctactaatgaaaacaatatcagcagcttactgttttatacaacaacaaattaagatgagcggttgtctcagactttgctcgctggtggaggacagacagtgtctgatcaaagctcagccttatcagctcaaccggcgcccactcgatctgatcggcaacagaaagggaagtcgtcacggcgaagaaaaaggggcgattggatgcccgatgggtcgagtaaatggccaaaatgcgttggtgccgttttgttggccggcttttccggctatatgtgcactttgttttggatcatcttggcccggagtcatattaatccattcacttacttttctgctgatgacctctctgttcattatcatcctcatattccgttgggaacggcggtggtaattgctgtgtacatgtcctttgttgtttgcttggtcagcatctttttgggcatttatcattgctttgtcaagcgttcttattagggaaacgatttttagggttttactttttttactgagctctctatggtctgaaacacaccaaaaacaagttttttttttctttggtgactgtagagctacttatagtgttattagcacctattttctaggtttttttttttagaacctaaaacctaaaagaaatttgaattattttggcattttgccaaaaatttagtaacaaaaatgcaataaaaaaggaaaaacacaccctctatgaataaacccgagaatttctgaaaataaaacctaataaatgaaaatttgtattatttatttccatgacaagaatttaaaattttaaaaattagtatctcaatactaatctgggcttaattttttgctttttggaaattgttttcttattttacacccctaaatttgaagctttttggcacctagtttcctatttttagcacctattttggcatttttagaacctaaaactaactttttggcagtttttagaacctcttcgtatcactaattattaatggggggggggatctgctttatcggtcacaattaggctgggctggaaaattggatccaaacttttaggccatattttatatgactttattttttaattaataaatatgacgataatcattttttgatacatagtgagaaaatttttggttttagctaaaattcttaacaaaaatgcaataaaaacaaaatgatctacnttttttcttcaaaaacattcatcattaatattgatttgttcaaaaaaaaatttgaccaaaaatttacacacgcctaaatttgtggctatttttagataattttctattttcgcgcatatttttgtgcttttatttgacggttttctaaatttaaaatatctaaatatggataacaatttttaaaattgataaaaaatagtcaaaactactatttgggctgaaccatccaataggtagaaacgcgataatggctagcaaaatatatatcaatcggttccttttgcatttcaattacgaatccgaaagaattttcggacaaaaaggaattgacaaaaggaattgtcaacgaaaaccttcgcaaatgaatttgataaaaaaatttaggtgagccaaaaacactcaaaatcacttgaagattttgaactatgtaaaaagcaaattaaataaatccttataaaagcttttggctcacctaaattattattttttgtcaaagtaattttcggaggtttttgaggataagtcagtttgattttgtcagaaaattctttcgggtgcgtaattgaaatgctgggagaaattgtttgataagtaatttgttgatcatttatgcgtctttattgttttttcttcttttttaatgtttggtttttcctttctttattaataattttttgcttgaaactttctttttgccgacccattatttatttatttaatgtaatcactgattttgactttcttcagtccccgtgaaaatcgtatagaattttacaacatgatagccaataaaatttttaaaaataccgttttataaagcgatcacgcatagaatttccaaaaattttcattttatttgttattatccataggcgatttggtccatttggcgttagaaattccaattttttcggcaatccaaatattggactcgagatatttttttaggaaataatcgcttataatgtctaaaaaaattttttaaattttttttgttgtcgcattaacctgtcattttttcgttgtatatttgctgagaatttcttttttattcataaatactttttagccattcgaaaattcaaaaataaattaaaaataaattcttcaataatatgagatcttttagcagttttcacattttagcaccttattaaagggtcgcaacatttattaatttaacttctttttttgttccattgttttgaagaaagaaactcaaaaaacgcgtttctgtgttgaaattttcaattatgatgtattatccgtcactgtaaatcactatttggcgcttcgtttttgctcaatttttggatgaaaattatgtcactattcggacttttggttacttttgtcactatttgtcaatattttggcatttttcaggccctaagcatatcccagaataatcgctgccgagcatatttgaaaatctgtaagcaagatttagaaagataattatcaaggattatcctaagattttaaagatttaactgactatcattgagattactgtaaagttttaagcagggtttttaaaggctcaacacagcagcgcttgttctgaacttttttcggttcatattaaaatccaaaaaaatttaaaaatgcaactatcttagcaccatcctttttctacgcatttttttataaaagtttattcaaaaaaagaaaaagtggacgccccggacggtgtgaatgagtacgagtgcgaaatacaacaaccgcatccgggtgcggaggaagaacaagtggaagatgggaaacattggaaacacaaaattttatttttatttatcgagcaaaccaaagtgtacattagtgctcttacagggtgcgaatgagaaacaaagtggtcggtgccaaacagcggcgccgggataccccccgccccaacaattcattagtaataacctccctcccgacattatcttcagggccttcgtttttctttgttgactaaacataacatcaatgatatcattcgaaagctctggatcttttgaagatatttgtgagctatttctaagtgattaagaagctcacaaaaaagatgtcgcttgaaaaccgcaaaaaaggcaaaattttcgaagttttttatctctatctttttttacagttcgttattatctgtaattattagtaggtcaatagagcctgtgaagagctttcgaatgatgtcaagattgtcggattcggtcagcaatataaaaagttatgctactcaaaacttggctgggacggagttggcggg

SEQ ID NO: 19596 - DNA, 1352 bp, Heterodera glycines
caaaggcgtagccagaccctcggcttcaggggtggtgctaaagtcaaaaattgatttttagggtgtatttttcatcttcaattgatttttattggtgtaaaaaagttaattgcatcatcatgatcagatcatgcccccagggtgactgaaagtaaaattttagcagcccagtggagttaggtctgctctagcaattgtcctacatagaaaagtaaaatagggatggaaaatttttcgcggaatatttttttttttgcttacattttaaaaaatcaaacaaccataacataattgaagaagaaatgcataaaaaacattaaaaataataaaaggatcagtattagtgaacatttatcccacaaagttgcaaaatcccatttaaatttcggtccaaaattcgcctcaattttgtcaccagtgtcgtacaaagaaacgaatggatgaagataatcaccaacaagaaatggagaatagataaaatcatagcagtctgtgaaaaaaggcaattaatttgaatataatttaagaatttttaaattaaattatttatttatttatttccaacccaaacattgtccatttttggtgaaaatgattcgcagagaggcaaaattaacggcaattcctacggtatcaccaacaccgtaggaaaattgggttattcctcttccctctccgtaaatccaaagctcccctttactgtcatatgcacaaatgcccttgcggctacgatttatcccttcaaattttgtttgctgattgacggcgaatccgaagctaatccgactggaaaatgaaaatttataataaacgaatggtaactaataataataacaataattaagttttttgatttctgatatataaataaatttcttactttttcatatttttgaccgaaatttcataataaaaaatgacgggcgaattattgctcagcaaaattgaatgttttgcaaacacggaacacgaacctttagagggaaaaaaagattaggcaaatattgagcatagtccctaaactcaaaaatgcttaaaacggtcagaatcgatgtaaaaggtttaaaatggttggaaaaataattagcttgctctttttcaatctgaaaaagtgctgagaatgaagtaccaattcccgccgggactcagtgagtcacactataaaaagcgctcaaaaaacattttaagtgtgtaaaccggaacgctcacaggttgggcgtgcacgggaggccgtcagcatgctttttccctataagttttttctttgtcatccaaatccaacaatcttggtatcactcgaaagctctttacatgctctattagatttacaaaaaacaaaaagattttcaagc

SEQ ID NO: 19597 - DNA, 947 bp, Heterodera glycines
  unsure (1)..(947): unsure at all n locations
ttttacatcgattcttacttttttaagcatttttgagtttgggagtatgattcatatttagaaaaattatataaatgttcaaaaataccagaatcatttccctgntaatggacagtcaaattttttcgccaatgatttcgagattctcatcacaattattggcatcncaaaaattttgtcgaaaattnaaaagcatcttaaaatggtgtttaaatttaaaaaaaaaattaaatattgatgattataaaacaattaattaattataaaagatttattttttagaaattaaattttaattcatttttccctttttacctttctcggattctgtactctctccaattcactgattttttccaacatttttgacaattgattctcagtagcttaaaaatcgaatcaatttttaaatttaaatataattatttaatattgacaaattttatttttgttttaatttctcctcgccgtttgtctgttctttttgttgcttttccaattcactaattttttccaaaagtttcttctgatcattttgtaattgtgagaatcgttcttcagtatcagcttaaactataaaacaatttcattcaaaatgatgaaaaataatattttctcctttataataatgttttattacctgcgtttgttggcgtttctctttcttgtttctttcgcccatcttcatcgtctagacgaaactcatcatcatccgatcctagaaataattttaagttttgatataattaaaaaagttagccacattaattcgtgaccggaaaataggtcagtggaaaatgcgtcagtgatacaaatatttaaaataaagttctatccgtttttgaaaccaaaaatgctgaattcaaaaatctggactttcgactttttgttcgaattcgggtccggagttcggaatttggtcagtggccccanaaatgcaaggaact

SEQ ID NO: 19598 - DNA, 3011 bp, Heterodera glycines
atcccatttttcttctgtttttaatacttcaattttttactagattggttcttccatcttgaaatgctctttctatctttttgtaatgtttttgcaatttctttgtcagtcatttttatgttttctttttttgtttgccaataaattttcattttttccattttttcgttctccgttattttacagcgaattccaaattgtttcttccatttttcaattgttgaacggctaattccgattttcttacaaatttcggcataatttttctcccattctttttgcgaatattttctgttttgtttaaattcatttttcattacaatgaatttttgcacaattttgcgtttttgttcatcagtttttgatttgtgatatttataaagtccaatttctttaatccattcataaattttgtgtcgattcgtccccaatttcttcgctattttcgtgtttattttattccattcttttgctgaatattttcttcctttttgcttgattttctcttttattttataaaattttgcaattatttctctttttttgagttcatttcgcctttcttcttctttttcttgccatttttctccaaatattgcatcaaatgacttttgttgaagttttttcttttctgattcaattggaataattagggcaatcaaaaataaaaataataaaatacagaatttcattttcaagattttattttatttttcttcaattaaatggcaattcattttttgaggcatttaaatgattttttttctgattaaaaaactgaataaatcattattttacttaataaaataaggaaatcctgtttaatttcaaagaaataataataataattttatcttaatgacaaaataattgccaattggtaaattaatgattaactaaaattttattactttctactacagctcattcgaaaataataaacatattttcaataaaaataaaataaattcacaatgtaaagagattttagaaaaattaaagagattttatgaaatttcattatatcagaaaattggtgtaaaatggccaaaaatgaaattttagcgccgaaaaatgttgctgttcacgaaaataatagaaacttgaatatttgaatgctttgaacacctgtgggtttccacaaccgaaatcagaaatttttacacatatatatatatatatatatatatattttatatatataacaaaaaattttccaattaagtttacaaatttcggtataattttgtttccattctttttctgaatattttctctttagctaatattcatttttcattttaataaatttttgtacaatttcaaatgtttgttcatccgtttttaattttgacagattaaatttttgattaagccccaattccttgatccatttttgaatatattggcgatttgtccccaatttttcgctatttttccatcaatttttctccatttttttgctgaatattttattcctttttcctttattttttcttttattttatggaatttgccaattatttctctttttttctactcatttcttcttctttttcttcccatttttcgccaaatatttcatatttcgccatttttatgtaaattccttgtaaatattatataatttacagtatagtcgaaaaaactttggtttttaaaataattggaaaaataaatttaaaaaaccagttgacattaaatataagacccaaaatggttaaaatggcattttacgcaccttttttgatccactttacaatcacttattgagtccctccctatccaataccttttcaggcgtaacactcgaaaaatgccgcggcactgcaaaattgcttgataattgttcgtggataaaattttgaaatttttgggcctttgaacaaaaattggaaaatattataaaataaaagagaaaattaagcaaaaaggacgaaaatactcaacaaaagaatggagaaaaattgaaggaaaaatagcgaaaaaattggggacaaatcgaaattatatttataaatggatcaaagaatttggtcttcaaaaatacaaatcaaaaactgatgaagatgtaaaagaataacggatgaagaaaaaatgggaaaaatgaaaatttattggaaaataaaaagagaaaatccaaaaatgagtgaaaaggaaattgcaaaaacattgaaaattggtccaagtaccgttacaagatggaggaaacaatttggagaatcggaagaatgaaacgaatgatgaaaaaaagatttgtaaaattttataaattttatttttaagcatgggcccgcccaacaatcatatttattaattaaaattaatgttttaagataattttttaggcaaatacatccaatttttcttataaaaattaacactggctcacagaagataatttaattgaataaaaaattcaagataattgaaaaagaagcaccgtttcaaaaataagtttttttttaaactacaataagatttgataaatcctacgatttgggttacagtttttcatatgatttttggcaaatttatcctatttttcttttaaacattcatttaaatcctcctccatttacatgaaaaatggtgttaggtatttacaaattcaagtcaatctttgccatttacgacaccgtcaaaaattacaaaatgaaaaaatgtcacattgggaaaatatgaccaaatattgttgtataatcttataataaatctcataaaattatataccgaacatacaccgccggacatattgcctcaaaaaaaccaaaattagtaaaacaatttcttgttggatttatatgggaaaacaaatttgatcggaatttttatttctttatcgcgttaaatagcctggatcattcttttttcgacgaagtttcttctcaaaactgttttttccatcttataatgctattttcaaaattttttcaaaaaattttctcttgggaaaattcccggttggtcccggtcccggtttttctcgcggtcgcggtcccggtcgaaaa

SEQ ID NO: 19599 - DNA, 1694 bp, Heterodera glycines
aataattttcacaataattgaatcccccgctcgcggctcccattggcaccggcaattatttttaaaatataaaatttacttttttttttgccccttaattcaatttaactttcaaacccataaatttattagccaattaaaaaaaagaaaattaatggcaataattaaaaattcaatggaggaaataaaacaataacaaaatggttaattttcaatgatctcattaacaaaatagaaagaaattaaggcagtgataacaaaagggggaatgaatggagaaaacaaaatgttgaggaaattgtaaaattggcatggaaataaatccatattttagatgcttcactatcaattggacggtgatcactatggcagtgatcagttggcaatgaatcaattggaagggtgattggggaggaggacagtccaatttaaccaattacagtattccaaatacataaaatcagttaattattacaaaatttataattttctaaaaaatgggtgtccgaaagctgtaagtaactttttaacatgccaattaacttttaaagtgttgcaaaaacctacacttaaattagaaaacttaatgagatgagaatttggctgggtgtcgccgaggatccccgtttagaatttgttccaagttgcccgaaattcaattttttgcgacctgaatttttttaaaatccaacccgaaacacgaaattttgaaaaggagggacaaaatgcaagttcttaaagattttggccttattatttcgattattcgaactgctgaaaatgttccgctcgcaaatcagcaagcaatttcccattcattttgctaggcccaaaatttggttggaatgctcggacgaagctcttcagtggcttttgcaaaatatgccgcacgttgttctgaagttaaaaagtgtttgagtgtgaaggaatgaaaagaaaatcctaaaaaaatgccaaactgaccgtccaactgctcttgggcttgggcccggacttcctcagattgacccaaaggtggcaagtcgaattcctggatggtggccccgtcggaactgtgaaaaagtatggtgtacaaaatattttggcgttgggtgtaattaattcctacccagtcaaatttaaaataatttaaaattgaattttaaaggaaaattttgtgttaaaaataagaattgaaatatttaatttaatttttgaaagttctagcatttgattttacaagaacctgggcatggatataaatttatgaaaaattattccttttaattcaaaataaggtggaaattttttttaaataacttaattttgctaataaaaaatcaaaaattttcggagattcaaccgcaacaaaattattttcgaaattcaaagttccttattttccccgataaatggcccgccatttccttagaatgattgaattttcccacaaaaataattttaaaaactcttatttttatccattattggctcacgtgctggtgcgccaattgttccgtcctcgcgcggccaagtctcccgctgagtaaagtacgcccggcacggcggtcggactgcaacaaatgccgtgctggtagcacaacgcgtaactgatctgctccaattcgccgagtttgacccgcggttgggccgtgtccacaacgacagtgcaacgcaacggctgggcagtgccctgggataagaaaaaaaatttt

SEQ ID NO: 19600 - DNA, 2739 bp, Heterodera glycines
  unsure (1)..(2739): unsure at all n locations
gattgtttaaattggataaaatgatgcgtaattttgaaataactttgacattacaaaatcattaaactaataaggaattgttttgaaaagtcncaattaatattcattacatccatataatggaacgtacgttttaaactctatttaataaacgtaatccggcggaaccatttagttgaactcacgccattttcgtgggtagtgctaatttgaaaaagtgaagaacggcatgagattttaatgagcgggtgggcgccatgaaaagccttttggcatttttcttcgctttgtttcccctgaatttacctagcctttatctgtgtccattttgcgttaaccttttggctttcattggccttaatctgttttttcagcttccacttaattcattttttaattaaaaattgaatggaatgttaaattgtcagttttgcttaataatacaaataatctttgtgttaatttttaataagcaatcaaagatttatttaatgttatcctcaaatgccagcagacgaataaaataaaagacaaaatgtaaaaaacatctgccaccaattgcttcttttcttctatttactaaatttatagcctttttaaaactaattttttataaaatttagaattgttcaattctttttgccaattccttccaatccaatttttgaatgaacattaatagttttagaaaaggcattaaaaactgaactaacaccaaaatgaacagttccgttttggttgaaagcggcgtccaattcgaaatgccaattttgtttgctttgtccggcatcgaaatgctgctaaatttggtcgagttgcccacctccgggatgaacatctatctgatcggacgaacaccgatgatccatcgcaatttgaagtttattctgctctaccaaagcgcatggatttttactgtgacttatttaattttaaaaaatccaaaataaaaaatgtatttttgcccaaattattttggaattgatttcttataattacttattaattaataattaatttttcattttatctcttttttaattggcttttccttttcctttttcagcgttccttcgcccgcttttccatttgtctgctcaaatttctctctgccaatgctttggtcagtgagcagctccaacccttcaaatttgcttatcagctgagtgcttacaatcgcaattttgtgccgcacattttgatcattgagcgacttatggccaccttttggcgtaaaaattatgagcgatccgtcggttggcacttttcgctcggatggagttcattcgtggtacactttcattacgcaccgtttgaatttccacggtcttttttccgtctctaatcattgctttaatttggaatggaaaataaatttaaattttggtccaaaagtttgtccatttctttggctggaattttcgcttgtcccctttgtttccaattccctgctgaagaggtccaatttctggctttttctaatcccggcatttccctgtgattacggcacttcgtttgaccacttgccaattgcgtctaattgttgttttgcctttacgctcatttctttttgccagttcatttggttcagtttttcgtcgctttgtacaattcgttgtccacaagcacaaaaaacacttcactctccggcttaatcaccacatttgtgctgctgcttttgggcttcattgaactctttgtaattacccctaattaaataataattaaaatgaaataactattatttttaggtttttatttggctatggcactacaacaaaaaggcgtatatgaaaagtttggcaaatgtgaaattgcactgcttaaccgagcgataccaagtgaaagaagaagcatctcttagtcagaagcaaaatttaaaactgttaagctgtctgagaacattcgcattggcaagcaactgatgccaacagtgattcttcagcttgtcaatgtgttggccacctccgtttatttgtccaccacaaatttcggcatttccgtcaacccaaacatcagtgccatggtggtggtcaccgtgacaacactttgtggtctgctcattgaagtcacaatgattacgtaaatggagattaaattatttctttcattaattaaaattacgaaacataaaattccatttataattaaaaatgcgacaaaatgccaaaatatgcacagggaacaaatacataaaaaaaaaattcattttaaagtccaaattttgaccgggcgcccgcctgggacgccttttttcaaaatttgtggaactaataaaataaaaaattggtagtcttctatttcagcttgggattaggtcaagccatgcaacgacctttttttctattcacatcgctttttttgcggcgcactttttttaaaaaattttgaggctgggggggggggttgggggtcaggcggtgccgagaggcgccgccggaaaaaatgttgtaatttttaatgcgacttgttaacggattttgtcttaaaaatgaccaaattggcacttttttgctgtagggcccccgaaaaatattggaattttattaaaaatcaaaggcggaacccttttggtttgtaaattttttttgtcacaattggacccgtccggactctaatcgatagcggcaaaacgaccaaatgcagacttttgcaagttatcaatttttttttacagaataaataatacctaattatagcgcgtaaatgtaattattttttaaatttgcgcggataaat

SEQ ID NO: 19601 - DNA, 1641 bp, Heterodera glycines
gcaaaaaataaataaaacgaaagactcagatttcgaaaattttttgagccagctagctcggcgctcatttcagtgtaagttagtcctttaccggggagtatccctgcaaagtttggtacgcttctgctcaattagcaaaaaatatgagtgatcgaattttcactaaaaaagttaaggatgaatttttgttaacataaaaaaaatccaaccatttaaaagctttaaaaaatttttaaaatgagaattcatgcgagattttctggaaataagcttaataggccttagttaagctgtaaaaaaaattgggggcgatttgaatgagaatagaaagagccaggttcgatgaagttttggtaagccaaaaaaaaatccaaacatttaaaaatctataaaaaatttaaaaatgagaattcatgcgagattttctggaaataagcttaatagggcctagttaagctgtaaaaaaaatttggggcgatttgaaagagaatagaaagaaccaggttcgatgaagttttggtaagccaaaaaaaatccaaacatttaaaaatctataaaaaatttaaaaatgagaattcatgcgagattttctggaaataagcttaatatggcctagttaagctgtaaaaaaaatttggggcgatttgaaagagaatagaaagaaccaggttcgatgaagttttggtaagccaaaaaaaatccaaacatttaaaaatctataaaaaatttaaaaatgagaattcatgcgagattttctggaaataagcttaatagggcctagttaagctgtaaaaaaatttggggcgatttgaatgagaatagaaagagccaggttcgatgaagttttggtaagccaaaaaaaatccaaacatttaaaaatctataaaaaatttaaaaatgagaattcatgcgagattttctggaaataagcttaatagggcctagttaagctgtaaaaaaaatttggggcgatttgaatgagaatagaaagagccaggttcgatgaagttttggtaagccaaaaaaaaatccaaacatttaaaaatctataaaaaatttaaaaatgagaattcatgcgagattttctggaaataagcttaatagggcctagttaagctgtaaaaaaaatttggggcgatttgaatgagaatagaaagagccaggttcgatgaagttttggtaagccaaaaaaatatccaaatatttaaaaatctataaaaaattccccataaatctgcgcgcatcggttcggggggactgccccgaaaacaaaaaaatcgattttttcaagtgtccgtttggggtactcaaacaattatggggagcaaaaatccaacgcagaattaaagtacaggctatagggaagctattcccgaaggatttggtctccccataaatctgggcgcatcggttcggggggactgccccgaaaacaaaaaaatcgattttttcaagtgtccgtttggggtactcaaacaattatggggagcaaaaatccaacgcagaattaaagtacaggctatagggaagctattcccgaaggattcggtctccccataaatctgggcgcatcggttcggggggactgccccgaaaacaaaaaaatcgattttttcaagtgtccgtttggggtactcaaac

SEQ ID NO: 19602 - DNA, 2097 bp, Heterodera glycines
agttcgtttcaaagtagtcaaagttgccaacacgtcattgctcgcacttttccgtggaaagaaagagagacctcgttcatagaaactgacttcgcatgataaaggatttttcctttcattgtttttgttgattgcgattccgaaataaattgttgttgaagctaagaataggcagcagggattgagcgtgaaaaaatgactcccatatgcgcaaaaaaatgctattaatagggcgtcaaattatatggaaatccataatttttttcctggactgtgggaggtctgaaacctacgaaaaacatgtttttagctttgtttcaagcttcttggatggattttatcaatatttttccatatttttgcgatttacctgtgtccatattcccactttttccatattttaaaattttccaaaaaacctctacagagcgacccccatcagctaaattggccgttgacatcaaaaaccggaaaaatttccaaaaaatcatttgttagcaaatgtttcacgagaatattgaataaattttaattttcttaaaatttgataaatttttgtcaataagcaaaaaaaggcgaaaatttcgcttctcaagttgattttcgctaaaaatgtgtaaattttagctgtcttgtttttacctctaaaataattttaaataccatatttcgccatattttaaagttttacgttgcatttatcgtttaaagaaaaattaagaaattaaacccttaattttggaaaatttacttttcatggtaaatttgcaattttgggccgagcgattcaccctattttaacaacagaaataaaaaagtagttaaagataagcatatttatataaaaaacatcaaagcagttacgtctcaataaagcaatgcaaaaaacaattcagttcccgtcaagccctccttgcgccgcttcaagttgcgcaggggtcatctcatcaacgttaatcggcggcgcacctagaatttaataataaactaaataggagtttgaaagctttgggctctactgcaatttaagcgttcaatcaaaaaccaacccccgtttcttagtatattattttttttttaatgcaagtatttgctcttgtcttgtacttataaattgccgagattctaagctttaaaggccgaacatcaaattttcacgaatttcttttttattaacctgcattggccagtcgtcgattttcggcacgtcgctgcgccgcttcagcactcgccctatgcattgcctccacttattcttcgtgctcgcctccattatcggcggcgggatccgtgccggcattttgctgctgctgattgtgaaatttcatgtagatcaatgattgcaaaaaagaaaaagatgtgtaaaatactatcgatgatgcatgcctctttttggaaaatttttcgttcagaaattcacggaacatgtttataaatgttttcagggtcgctgatcattaatctgacataaaattttcttcaaatgaggggagatcgatagtactaccaagggctgtgtagtgtagccccatatacaaatatttttacatttcagaataaaagaagccaatctataggttttcggggtcgctaattgcgaatccagtattcgtttcggcaaatcccggacccgaattcgaacaagaagtcgaaaaattaaaacttttgtttttcatttttagtctaaaaaaggtttaaatgattttgtttggcatattttattctgaagtgtaaaaaataaataattttatgtatggggcttaaactacacaagagccctaccaagcgatgaatagaacgcaccacaaccgccgcagcaacagccgcaccaatggtgacgaaaagacggcgacggttcaaattttcccattgcatcagaagcagactcaaattcttcaacaacataatataaaaaatattacgcaagaaattatttttacatcctttttaaaaatgctacataaatttttattgtaaatagtcacaaaaaaacttttttcactgccaattccgaccagttgagagaaataaaaggcgatagttaagcattgagatataaaaaaatcgtctagaataattaccccaacaatttgtcgg

SEQ ID NO: 19603 - DNA, 2175 bp, Heterodera glycines
  unsure (1)..(2175): unsure at all n locations
ctttttttgtcttcataaaaactaagaaaataataaatttaaaaattaattaaaataattaaatctttccatttgcttggattgatcactattgaatgagttcagccgacggcttcttcatctccatgattaatttgttggcttatggtcccattgtcccttttgtcttcgctttgctcattggcattccgtccgccatactgtactgcttggaagtgtgggtcatcatcgccaactttgccgattttaactcggcattttttgttcttgtcgttgtccgcgcaattttggtattttttcataatttaattaattaaaatatttttccagagtttggccaattggatttgccaattttttgagaatcgtttcggcaaaattggcttatttctggcctttttccatcaattgcccgaatgtgctttgtctttcctttattttgctgtcaattttgcatttcatgtggaaaatttgttgacagtatttctgcttttgaatcggttcagctccattttgttgcccttcacttacaataaggtgccaattcagagggggcgcagtcgttatttaaaaaacctccaaatgatttgatgaaaaattatttataacttagctcttaagcaaccaaatttttaattcttcatatcatttgattcgattgctctaagtattctctaccagaatacaaaaaatttcgttaagtttcaaaaaagttatggctagaggaactcaaaaaacccttgttttttgagcatctgtggccctaactgttttgaaacttaacgaaattttttgaaattttgtacactgatagagaacacttttggctatcgaatgttctcaagaattataaatttatattgcttttgagctaaattataaataatttttcaccaaatcatattgatggttttttaaataacaacatagccccattcagagggcattaaatgcaaaaagacttaaatatagtttatttttaattaatttccaattttttttgtttcagttgtggcgttgtgcattggtccccgctttgattgtctctttcgtcctcccacttccgttcactgtgccaattttcagcttacaaatgttcattcacatccaaaatgacaatgtcagcttcacaattgaccattacaagaatgaaaatgtgcgttatcaaataaatatataaaatggaataatttttttttaaattaattttttgaatggttttggtatatttatagagacacctacaatatttggcccatccatctttatttaaaccttgtacaaattctgtaaattccttcttttcaaaaattcttggaatcacaaaaatttaatgatcaaataattgattttgtcaattatcgccattctatcgattggttttccctaattaggcggtgaaaagcagcaaaatctccgcttggtctgccattttctttggcatcatttgtcttctgttgaatttggcctctcttgttgcgtacaaatttcgccgccccaaaagtgttgttggccaagtgcaaagcaattacagcactaataattcaatggtcgagcggaaaatgaccatttatacggtggtctcttttttcggacaattaattatggccattttcatggtaataataataaattaattaattactgttatttgccatgattatgacagataattgtttacgtcacgtccactcaatttgttgatgaacccaacaaatgcaccaacaatggccaaccggcacagtttggcctcagcgcagagcaaacgcagacgcttttcctggccaattacaaccaatacccgtgggtgaacgacctgagcaccatcgccatccccgcgtggttggtgcactcacagatgaacaaacattaatttcaacaaattaaatgattatttaggctcttattgtgggcttcaacaaaaatgcgccaattcatttccaaaaaatttcaataaaatgccattggacgaggaaattttgttgttggagaagaatgaaagagatctgaagcaacactaacaaccattcagaaaaatggacaaatcatgccaaaaggtgcactgattagtttatgattggttctctgtgcaacttctanacattttgtaattncgtangtttttttcaaataatacacaaaaatatttggcattttttaaaatacagtagctga

SEQ ID NO: 19604 - DNA, 919 bp, Heterodera glycines
gtgcttaaaattgcgtattaattgttgtttttcataattatcagtgaaaagatttgcttttctcacaaaaaaaaaatcaaaatgtttaagttaaataaaataatgctaaaaatgaaacaacaaaattaataaaattaatcaccgtaattatttgtcaaaacaaattatcgttttccattgcttttaagcgttttctcaaattttgccaatggacaaaaaattgcactttcaagtaaaaaataaaagcaaaatttacaatttgcttaaaaatttgttcttctgataagataaggtcatgactttttggaaagttaacattaaaaatttgcttgatttagagcaaagttataagcaaatggtttgcgaattttcgaattttgctacaagagcctgcaggttcattagcagagttttcccatgcgattcgaaaatcatatcaaggaaatttattgtatttttgagtacagtccaacggaggttgttttttttaataatttggacgtcgaattataaatggcaacgaaaactttaaaaaaatgcacaaaaaaaaacagaaaagtagcaaaatatacataaaattatataaattttcttaattcagagtaaaattcataattataaattcattaaatcatatggagacaaatagatgaattaacttgggagaaaaaaactcattaaattcgataattttagtggaaaaaatcgtgaaaatttctttccaaaaatctaatagaaagttattttctggaaaatttccgccttacgaggctaaaaataagtggacgttctaagtgaagcaattatccagacatttggatgatgaacacttgacagtggctatttggacagtgaatgaattgtttttaatataaaaagatggtttcatgcatctgaaagaatatagttttaatgttat

SEQ ID NO: 19605 - DNA, 2976 bp, Heterodera glycines
ttattttgatggctttttgactaacgcccattttgatggttttttgactaacgccctaaaatcgatatttttcattttgatggttttttgactaacgcccattttgatgctttttgactaacgacatagcgccgctcgtcgctccgcttcgtaggcttcgcgagggcgcgcgtactttaatccgtacgcttcgcgaaggcgcgtgcagtttaatccgtaggcttagcgaggccgcgcgcagtttaatccctaggctcgcgagggcgcgcgcagtttaatccgtacgcttcgcgagggcgcgtgcagtttaatccgtaggcttagcgaggccgcgcgcagtttaatccctaggcttcgcgagggcgcgtgcagtttaatccgtaggcttagcgagggcactggaaaaggaaaagggaaagaaaaatggaatggaaaggaaaggaaaccgaaagaaaagggaaaaggaaagggaaaagaaaaggaatgggaacaggaaagggataagggtggaaagggaaaggtaaaggaaaggaaagaaccggaacatgcatggcacccgtgagcagttggaatcggcatgagtggcacccgtgagcagttggaacccgagggcttggcgaatggcatgggtggcacccgtcagcagttggaatcggcatgagtggcacccgtgagcagttggaacccgagggcttggcgaatgggcatgggtggcacccgtcagcagttggaatcggcatgagtggcacccgtgagcagttggaacccgagggcttggcgaatgggcatgggtggcacccgtcagcagttggaatcggcatgagtggcacccgtgagcagttggaacccgagggcttggcgaatgggcatgggtggcacccgtcagcagttggaatcggcatgagtggcacccgtgagcagttggaacccgagggcttggcgaatgggcatgggtggcacccgtcagcagttggaatcggcatgagtggcacccgtgagcagttggaacccgagggcttggcgaatgggcatggctggcacccgtaagcagttggaatcggcatgagtggcacccgtgagcagttggaacccgagggcttggcgaatgggcatggctggcacccgtcagcagttggaatcggcatgagtggcacccgtgagcagttggaacccgagggcttggcgaatgggcatgggtggcacccgtcagcagttggaatcggcatgagtggcacccgtgagcagttggaacccgagggcttggcgaatgggcatgggtggcacccgtcagcagttggaacccgagggcttggcgcgaatgggcatgggtggcacccgtcagcagttggaaccagagggcttggcgaatgggcatgcgtggcaccctggcatgcatggcatcattgttcaacatttttagaaattttttaacaaaaggaaatataatataaatttactttttattcgaacatttttggccataaattttttgaaagttaacaaaattttttggaaaatttagaggctagaccgactactgtatactaaatttgtttgctttttactaatgatcgttttggaatgttcaaaatttcgtcaatttttcgatcagtgagctttggtaataagactgaatgtttataaaagcaattataattttgtgtaaacagtagaacattttaaacaaattaatttgtaagaaaaaaaattacaaaaaaaaatacataaaaatatttggattttttcaatttccgactccattttaccgtataagcgggctaatgactgaccgactattgtatactaaatttgtttgcttttactttggtttctgatttgtatctttgtaatgatcgttttggaatgttcaaaatttcgctcatttttcgatcagtgagctttggattttggcttttcaattgataatattgtttcatcttttccattctttcaacatttgtgtaaacttttaacactgtaaaaaaaattaaattaaattaattaaattaaattctttaactatttaaccttttgaattcttttgaataatgccaaatttcttggcccataattctattgtcttataactcaaaccaaataattggctaatttttgcatgaaattcttcccattcctttcgtgaatgtttcccaatttgcataaattcattttttaatttaaaatatttttccacaatttcttttttttgctcatcatttttttgattttgcaccaattttccactttttaattgtttcttccatttataaatggtgcttatttcaatgcccaaatgttttgctattatttttttgcatttttctctttttccctccaatttttcatttaatttcatttttaattttgcatatatttgatcaaattgctttaacattattcttttttcttcaactgaataatttttgttcttcatcattccaaattctcttttcatttgtaaattttcctttgatttacacctaatttttttgcaatttttctttcaattttttgccattctttctttgaatatttctttccaatttgcttaattttctcttttattttatggaattttttaacaatttctcttttttgtttttcatttgaaattcgaatttgatcacaattttgtccaatattttctggcatttgttccatttgatcacattcgcttcccgattcttctttcacctccaaattttgatcaaatatttgatcaaattgtcctgccaatatttttgactcactttttttgccattttttgtcctatttttgtcgtcattttgtctttgtccaattgttccattttgatcaatttgatccattccattttcctccaaatttttctcccatccatcgccaaatatttgatcaaatcctttcgattgttttattttcatagaaacagtctgatcaattgtatttttgatgatgaataggcataatagtaataatatgtcaattttcatatt

SEQ ID NO: 19606 - DNA, 3330 bp, Heterodera glycines
gttgaattgagtttatttttgttagaaaatgtccaaattaaattattaaaaaattctattaatcccccctgccacataaatggagactggtatattatttttcaacctcctcagaaaggggtatataattggagaccggcagattaatggagactggcatataaaaagagtaaatacggtaaatgggtttgattgcttaatttgccattaactttgtttaataaaaatttgttttttcaaaaatcattaaatttcaaaagggaaaaatttgtcgtgacaggcggcgggaggaatgaacttcgtcttaattaaaataaattattaaaattctattttaataggctccccattccaagtgtattgtggtagatatatttgtactctgataagcgtactcatattgagaaaaaattttcaccccctagaaattcttcggaaatttttcttttagtcctccttttttgggtattccggtcagcctgatgctcatattccaatgctaaggataaaaatcggcatatccctagctatatagggtagctgcagatcgattaatctacggctcgaaatctgcattcccaactcggaatacggctggggatagttcgatccccaaatgatacggataagccgctacttttccctttgttagtgtattctttgtctagtggtttgtgctttggacgaaaaagcgtctgtgggttcgggtcctttaggggctaatgtattttgttagttttttaacaatattatgcacctctatgaattgaaaagattttctcaaaaatgaattccctaaaatataaattttttttatcttgaaaaacttttgtttaaaatttgcttattcaaaaaaatttaataaatcaccattgtcgaaaactaacagcaccggttttgaagtttcaataaaaaattttaaattttaaacatactccaaaatttatttggacatcaaaataatactttagaaattaaattatattatttgaaattaattttgaagaatttataaataaatttttggtttttagagggcacttttaactaaatattctcctcgggaggaggctaaggattttcatctgcagataccctagccgataccctatccttagcattgtgaatatgcaatgaggatagagttagagatggggattaatttgctagtttaaaaaaataataatttttacaacctgcccaccctttcatttttaaatctttatcattacctcattacacttttaaatcttctcttttctcaaatcataaagtattttttctaggtttggagctcgtcaccaaggattccttttttaggcataaaaaatagcgaaactggcacctaatttgtaagtagaaaaattgcaaaataggcattaaataggcacatccttcgaatgatacctaatttgtttgggtttgatccttttaaagggttaggagtgcccaattttgttcatttttccgcatttttaaacgggttaaaaaaccggtttaaatattttcccattcttttttttctatcgttttcagttggatttttttcaattattttacaccacaaagttttttatttttcttaaattttgcttaatatttcggacttttttcaatatttgggtcaatatttcggcatttttcataaatatttatttaaatatttcatgattttttaatagatatatataattattattttctttgatttttctttctcccttccttttctcatcacttgttctcctgcaacaaccgtatcatccgtccatatttcaatttcggtccaagtccggcgcttgttccgcatgctcttgcgcatttcgcgccgtgtctttgccctcgtagtttgttgcttttcgcaccgttgctcagtgaaagtattggaatttttaaattgatgtcatgaaaccgaaatttttgccattttcggggttatcccagatttttgtaagttgcaagtccacttcgacccaaaaagtttttaaaaaatgcaccgaaaaaattgttaaaaatatagttttttgagcccgatcgcactttacttttgctaatttcctctccaaaattgttaaatgatcatgggaaggcgaaaaatgatgtaaaagtaatcgatttaatgcaatttcgcaatgttctggttttcgacccccaaagtctaattttttgcattatgttctgttttagaaaaaaaattcaatcgaatttctgtctggactcaaaatctccttgatgtccctaaaataccccgaacttttccaacccagcagcggtttggggttcagggacggttttcagggggggggggcctcccagagacctatctcatggcttatccatgtctaaagttgcagccgctccctttttggtccaatttgttttgaagaacattgcttctttcggccgcaattgattcttctccacatccgaatggtcgtgaaaaccgcgctcgaaacgacaccagattcggcaacaacattacagcatggaatgggcatataacattaatatgacacaaaatgagacaatataattgtcttaaaaagactagaaatcaaaactgaaatcattaagggttcacttcccagtttttggagtctcctgaacaaccaaagaaaagaagcatcgaaatgtcatttatttgttatacattaagagcaagtcactaccattttttgcgggccatgaagtaaataggcaaagtaccgtcggcattcagcttgttcggcatccggttgagcccattctgaaaatggtcggggaaaaagttatgatgtcccagaaatggaaagaacaaaagtcgtcgtgacataacgtctccgcaaaaaacaaaaatttcattttcaggctaacgagaaaaggtcttttcttaagaaatttcaaggaaacgaaacaaaaatttcttttgtttaatttttttgcgaactgaaaacgcatggaattgcgacaaaatagatacaaatcggttcctctcagttagtgaatagtggatccgaaagaattttggacaaaaagaaattgacaagaattatgggtgctcaaaacctccgaaaatgactttgatagaaaaaaaccaaattagatgagccaaaatggtaaaattgccgaattcagtatcaactcaaaatcacataaaaaaaactttggggttttcttatgcgctgaaaagatggaaaaatttaaatttcggtgctgaaaagcatctaaaccggtttttgaaccggttaaaaactcaaaaaattgattgaataggggggctcctgacgctttaaaacggtcaaattcggacaaatttgggatcattcgaaagcgtgactggaccatccgaca

SEQ ID NO: 19607 - DNA, 1181 bp, Heterodera glycines
gaatgggtgacagctgctaaaagaatgccaggaggcttttaaaatttaaaattggtaattttggacgaggatttaatgttgacatttcgaccatttaatttgttggtattaccgtttaatatgaaaatatgtgtaaaaatgtgttgaaaacaaaaaaaaaagggggatttctagggaagaatagggacattaaacagaagagatgtctaagtgcatatctataatataatgatcacaaatcacaatattaaaaaacaaatgtgtctcattttctattactattttcatattgatcgataaaataaaaatggttcgctgtttacaacagtttttgagggtattaggtgctggaatttagagagatgggagtctcttaattttcttaactgctggcgttgatttttttgggtggcaccgattttttcggctgtcacgaagaatattgattggcagaaaaattataaaaaattattttcttgctgcgggggatttatttggacagctcattttcgcacatacaagttcaaacgcggatacacggccatacaggcgcatgcgcttaatgcacacgcgcacatgcataacgcgcgcactcatacgcttaacgcacgctcgatcaaacgctcgttcacacactcactctcactctcgctcacactctcactcactctcactctcattcacactcactcactctcgctctcactcactcactctcactctcactcacactctcactcactctcactctcacattcattcacactatcactcactctcactctcactctcactctcactcacactctcactcactctcactcacactctcactcactctcactctagctctcactcactctcactctcacattcattcacactatcactcactcacactctagctctagctctcactcactcgctcactcactctcactatcactcactctcactctctcagtcactcactctcactatcactcacactcactcgctcactctcactctcactcacactctcactcactctcactcactctcactatcactcacactcactcgctcactctcactctcactcacactctcactcactctcgctcactcactctcactatcactcactctcactatcactcgcacattcacatgtttatttttttcactctgatattttt

SEQ ID NO: 19608 - DNA, 967 bp, Heterodera glycines
ctcgggataattggtcctatttccggtaaattattaacaaattttgacatttgctcatcataaaattcactctttctatttaacattttcctaacgtcacattcctaaaaatttggttattttatttctatttttaataacacttacccaaacttcttctacagtataccccatctttttccctacacttcttaatctctccattttattttgtgttctttcataattttgctctgccgtaaatccattcgcttgaatcatataccccttataacaattttggcacccatgaaaagcgcatccctaaaaattttttaatatttatttcatttccattattacctgaaattcaattattctcttttgcgccccaattatacaatcaatttttaattttttgtcgcccaaaagcgatatttctcccccatttccggcatgcctcgctttaaccccgtcccgatgcataatccattcaaaatattttatcgctatgttgctctgactatctttcggctcaaagccactctcaggaattataggtaatgtttcattgttttttaaaaatttggcccgaaaaatgctaaaaagattaatatttattttcatttattttggtccctacttcatgcatgaagacgcaattgtcgtcgatattctcaaaacatcaatcccatttggagtttccttatcttgtgttatatctataaatatttttctcatttttataagcgctttcatcaaaatatccgtgtcattagaacaatattcatccaatttttcttctaaaatattaaacagttcaattaaaaatttttaaactaacctaaaataaacccgttattataattcgcataataccattttttgaatttttcatattcatcttcacttaattcatcggggaaataatcctcaaagggcgggagggtagtcaatattttgcctaaaaggatatttttatttgttt

SEQ ID NO: 19609 - DNA, 2059 bp, Heterodera glycines
  unsure (1)..(2059): unsure at all n locations
gcgttactttaccaaagtgtttgcacaacagaagaaggaaggtggagatggttccggatctgcggaggagtcgatgactgtcacggcggagccttctgacgacaaaaagtcccttccaacagaccttgccactgcggagcatcctccgcccgtttctgttcctggaatcactgcgcctcaacaccctgtacgaccaatatacaactcaaaattggcaactcagaagaaacgagcggcgatagagcgcgaccgactgaataaattggccgaagttcaacgaatgaagacggaactgtacaccaaacttgttgaacaacagaaaagtttgttgaagaagctgcagcagactgaggacaaggaagcgaagaagaaaatagtgaaatatttgaagacattcgagcttaaagtggatggagtgaaaaccgagctggaacaattagcactgaaaatgcgcgaaatgcaaatgcgacaaccgcctaccaagcgaacgcgtactggtctttcgatatccgaacaacaactgttagacaatggggcagaactgggctcgcaattggaaccaagtggaactagtcttttccaagataataaccaacttatttttaaattaagacaaaattcaccagcaatcgcccagtaaatacagcatttccaacaagaagttattgaagtgagttaacccattatttctgttttttcttttccatttttagactttgtcgtgttgtttacgtctcggcttgtccccaggaatttagtgaaaaattaattcttcatatggaacgatttggagaacttttcgattacgatatcaatgcaacgcctcaaattttcacatacaaggagccacttgatgcgcaaagagtattttctgaatttagtccatttaacctttgcgatccctgttttcaaaattgttattatttgaggctgtgaatgaagcggtgggcagttttgaactggcaaaattgaaagtggaatgggcaccagtggcgaagggagtgaaggatgacaaggacatagtgccagacggggagaggaaaccatcggtgttgcatttgttttctttgcctaactaaattatagtaacctaaattggaaggattatataatcataaattttagatttcaaacaaaaaagtattttacggtcttgtaaaattaatttttaattttttttaaatttaggagcaggtcgctgcaaaggatttgatcgctttgctggaatacgatgaggaagaggaagatgacaagaaggagggagacgaggaacagttgtcggacaaggagggaaatgactgattcatccagaccaaaccgactttaacatccaatgatgggtagtgtcgttcagttcaagctatcatgacattaaattcttccaaatcacctctgtattccgtagttcagtgacgtacggtcggtcttacacgtaaacataaaattagtttttattttttcccaatgacttttacgtctctgctttcatagtcgttaaacatgcaaatcctatgtaaaatcggtagaaacttcgatctgtgtgatcatttcatttccagttgttttgacaatataaagtcccactttagcattttccatggtttgcacccttttatttgtcttgtttcccccacccaacatttttcatacaaatgggactgccagtcccttttcatttacatttttggttaatctaagcctatcatgaaaaagatattcaaagattgaatcatcttaaagaatgaagccaaagaaaagacaaactgacaatgagactcaatgttcaattgtgattgtttttttaataaaatgtcagtaaaagtgttatttaaaaattcatgtaatagtattacttttgtataataaacagggctgccaaaaatatgcacaaaaaagttgaaaattaggggtgcaaatttaattgaaaaatttaattcctcataaattttatcgattgtttttgcaattgcaaatattntctcagatttttggcagcaaagctcaactcgcacatccattcagattttgatttaattttangcataatcaaattttccta

SEQ ID NO: 19610 - DNA, 1210 bp, Heterodera glycines
  unsure (1)..(1210): unsure at all n locations
agacttttaagttcaaatcccctcccatccattcttttttgtgctatttttaaaattcacaaaaaatttgatttcgttttctcaattgtcgcgccattgcgctcggaaatccgtgggttggtaattgacgcggttggatttccgtccatttccctgcgttcggtcggggcttcgttccgctcactaatacgcttgtaagtgagggattaaaagtgacaagcggtggtgacatcctcttctctcccgccccctccctttcatcgcctcccaacggctaaagttgtcggcaaaagtcaccgatggaaagtgccaacacagcatcctccccgaacacaaaaagtgagggatgccaatgccatccgttgcctcttcatccggatgaatggacgaacgaattcgttgggatgacttccacacagtcaaagcccaatttaatttgtgggccatccctccgcggccaaatgtgaggcacagcacaacatttttgggctcttttgcttaggccgacgctgaaaggacggatggcacacgaaatgaagaataatggagcatccgaattattattaattttctgttggggaggaaaaatgtaattggacatgaacatttttatttctcaacggttaaattgcacatttggggccatcaaaaggacagaaaagggacagagggcaaagggagaggagagagtctcctcccccccccccaattggatcggatggaaaattaaaattcattcgtcaaatccctttcccttcctttacttttcaatgatcatcgtcatttctagcttttttaacagtaaatgttcaaatttcatgtccgatttgttatcttttgtcatttctctttgtgtttgattntaaacattttaatttcgaatgaatgccaatgatcagtttcaaatgcttttactttcgtccctcttttctttgtggcgttgtttctccctttaccattcatttttcccctttttattgcgcgaacgtggacttggggagggaaggcgtgccaatgcaatgacaaaatgccgtcaaattggtgccgttttgcctcccctgtccctccgtccttccgttgactttcttcccccaactccaaaacatcattcatcgattctgttgtgctcctccgctcattcgttcgccaattaattgtccaccaattttgcatttgccttccccgccccagcgaaaatgtgccaccaaat

SEQ ID NO: 19611 - DNA, 2649 bp, Heterodera glycines
agcaatggaaatgggaaaatggggaaaattaaacaagtaaacaataaatacaaaaagagtccaaaaactgcgcaagaatgcaaaatttgtgaaagggctacacttttcaagtattacaaaatacagagctgtgatggtaagccaaaaacataaacaaaatgaaaagtttattgccctaatagaacaaattacataattatttttaaagcaattaattagagaaattaaattattatttttttagcttgtaagcaattttttcgtcgtacaatcgttgctcagagaacattcatttgtccgaaatcaaatttatgccccataaataaaggtagctttttcacatatgtaaatataattttaattaaaaataaaaagtttaataaaaattaaaattcgaaataagaaataaagacctgtcggccggcagtgctgaggcgatttttgaggatttaaaaaaccgaataaaacaacaattttcccaaaaaacagcaaaaatcaacatctcaaaaaaaccaactttgaccccttgaaagaagtaaaatgctgataaatcagcagagttggctaccctggattaattaaggattttttaaaatagaaatttttttcatttttgatcatttaatgacggcaatttgctggtctttaggcgataaaattcataaaatgcgaatttaatttcttatgttgattgcattttataaaaattttcacgttaattgaaatatataaggattcattacatattccacttttatgcaaaattaccagcctaatgtgaaaaaagtctagctaaaaatatttttgataaagatgctttttgataaaactggccaatattattttttgcctaactttgaactcatgaacgtgccctcattttgtattatgctgatggaaatcctaattgacccccgaaagtcggcataattctaaactaccaattaattcattgctttgctgatttgtctgtgcttcctcaccaccattttggtccattgcttttcctttgccttggtcattcgattcatttgcaaagtctcttagaaagatggcaatttgcatttcgtccgtattaaataattgctcattaatttgtttgttgacgttgcaattttccaaacttttttctgatttctttaattttgttgcattattataaaaaacatagagaaaaggaagaaataatataaaattcattttagcaacattcataaaaaagctctttgaattaaatatttttttaaaatatcaattattatattgattcataaaatatttttatatgcataggaaatgttttaaaagaaaatatacatgcataatatttatatttgctagaaaataaccatggtgagccgaagtgacaaaagtatattggtaggtctaaatgttcttaattagcctgcaaaattaaaattatcatgcacatccaaacaactctggttttccttctcctttgaccgcataaagcatcaaaaggccaagatcctcctttgaatttttcacttttcgtgtcgccattatttttgctttattaaagaaatatgatcaattttttaaattattttaaaatgaacttactagtaatgcaaatttcatcggtttttcgaccataatgtgtgatttttccaaaaaaaaatccggtgtatagtctctggcagagacatcaaaacaatgatcctaaagtttacatctcacgacctcaatcgtaactcagaaataatgcacatatacaagcgcattcaatctttgattactttccatcgtaggttatgtttctaatccagcttcatcaaaatccacctttggcaaggtaatttaagataaaacctaaacagaaaaacaattaaaagtttattagtcgaatcgaagatgaagatgagtacaaacgaaatcagatgagacaccagcatgggctacgactctccacgcaatttcatttcgtctgacaacaaaaggaattaatgtaggggcgcaaatgttcggggcgcaaatgtttggggcgcaaatgttcggggctcaaatgtaggggcgcaaatgttgcagcacctttttggccacaacttttttatgtctcagctaagttttttaaaacattccaggctaataagcaccatgaagccattcaaaatcataccaaagattatttaatttggatgataaataaaaataatatagcgttttgagccaaaatggcttgcgtcaaagtgggcggttccctacaaaaaaatttcattcaaatttttcagtaatttgtgtatagagcctgcaatttagtccttaatttggcaaacgaataagttcttctcaaatttcccttgggaggaataggaatgccttgtcttgactgttatatttatcaaaaatgccaaaatatttaaatacaaattgaaaaagcattcaccaaagcaaaggtgttgctgcagaccgatcaacaaccttactcactacgacatgtccaagatgcctgaaaagacgaatttggacaaattggtcattcattccaacttggatccgaaaaacttcataaaatgacttaaaaataaagcaaaatatcaaaataaaaatagataaaataaataaataatttataaatttaaaactaaaaacataaatgaattttttaccataatatggcctggatct

SEQ ID NO: 19612 - DNA, 1020 bp, Heterodera glycines
gaatatctattcttctgagacagcattttcaaccgaccttttgtagggctcaaccgcagatagtaatggcgtttttggggaaaccccacatgtacaacggtgtagaaaaaaagagatagccatttttctgagaatatctattcttctgagacagcaattttcaaaccgaccttttgtagggctcaaccgcagatagtaatgcgtttttggggaaaccccacatgtacaacggtgtagaaaaaaagagatagccatttttctgagaatatctattcttctgagacagcaattttcaaaccgaccttttgtagggctcaaccgcagatagtaatgcgtttttggggaaaacccacatgtacaacggtgtagaaaaaaagagatagccatttttctgagaatatctattcttctgagaaagcaattttcaacccgacattttgtagggctcaaccgcagatagtaatgcgtttttggggaaaccccacatgtacaacggtgtagaaaaaaagagatagccatttttctgagaatatctattcttctgagacagcaattttcaaaccgaccttttgtagggctcaaccgcagatagtaatgcgtttttggggaaaccccacatgtacaacggtgtagaaaaaagagatagccatttttctgagaatatctattcttctgagacagcaattttcaaaccgaccttttgtagggctcaaccgcagatagtaatgcgtttttggggaaaacccacatgtacaacggtgtagaaaaaaagagatagccattttctgagaatatctattcttctgagacagcaattttcaaaccgaccttttgtagggctcaaccgcagatagtaatgcgtttttggggaaaccccacatgtacaacggtgtaaaaaaaagagatagccatttttctgagaatatctattcttctgagacagcaattttcaaaccgaccttttgtagggctcaaccgcagatagtaatgcgttttttggggaaacccacatgtacaacg

SEQ ID NO: 19613 - DNA, 1210 bp, Heterodera glycines
  unsure (1)..(1210): unsure at all n locations
ttgcggtcaatccccagggagaaaaaagagatagccattttttgggcagaatttttttcgttagcatttcaaatatcgtgtgagtgtttggtagagccagactagagaaggcaaatgttggtaccaagtttgcggtcaaatccccaggagaaaaaagagatagccattttttgggcaagaatttttttcgttagcatttcaaatatcgtgtgagtgtttggtagagccagactagagaaggaaaatgttggtaccaagtttgcggtcaaatccccaggagaaaaaagagatagccattttttcggcaagaatttttttcgttagcatttcaaatatcgtgtgagtgtttggtagagccagactagagaaggcaaatgttggtaccaagtttgcggtcaaatccccaggagaaaaaagagatagccattttttcggcaagaatttttttcgttagcatttcaaatatcgtgtgagtgtttggtagagccagactagagaaggcaaatgttggtaccaagtttgcggtcaaatccccaggagaaaaaagagatagccattttttgggcaagaatttttttcgttagcatttcaaatatcgtgtgagtgtttggtagagccagactagagaaggcaaatgttggtaccaagtttgcggtcaaatccccaagagaaaaaagagatagccattttttcggcaagaatttttttcgttagcatttcaaatatcgtgtgagtgtttggtagagccagactagagaaggcaaatgttggtaccaagtttgcggtcaaatccccaggagaaaaaagagatagccattttttcggcaagaatttttttcgttagcatttcaaatatcgtgtgagtgtttggtagagccagactagagaaggcaaatgttggtaccaagtttgcggtcaaatccccaggagaaaaaagagatagccattttttgggcaagaatttttttcgttagcatttcaaatatcgtgtgagtgtttggtagagccagactagagaaggaaaatgttggtaccaagtttgcggtcaaatccccaagagaaaaaagagatagccattttttcggccagaatttttttcngtagcatttcaatatcgtgtgagtgtttggtagangcagactagagaagggcaatgttggtaccaagtttgcggtcaaatccccaagagaaaaaagagatagccattttt

SEQ ID NO: 19614 - DNA, 1798 bp, Heterodera glycines
tattattttttgtagttttggtaaatcttagaagcactttctattaaaaacatcaaacatgttgagtaattagtcccattaacttatttttataattactctacttattcaattaatttaatttaattaaaaaattaattttcatctttaaaacgcacatttcagtccgataaattctttttgccctcacaattccctccgctttcgacttgtggcaagttttcataaatcctgagcaatggccagcagtacacgaaatttgctctgtgcacatcacctgccgttaccttttttattttggtgactcatcttgtcatagatacggtaattttgaacggtccttttttaaatgatattatttttattgaaaattattcaaattcactttttattaaatttacgtaaaactaaatcagacgaaaattttgtatcttgattaacacccatttcacccaaaaattggcaaaacttcgaggatttttttgagtaatttgatagcttaagaattcaaaaatatttaattcgattccttaaattttattaatttgtaacataattttctcttttcaaaggtgtagcactataaaaactacaaaaaaggtactgaacactcaaaaaatgctcaaaattgtgtaaaaattcataattgactttaaaaaaaccaaaacaatgactgatgatcagcgtaaagcacaattccattacattttcaaaatttatatatgcaagttcgaattttttaaattttatttatactataagtaaattacactttttaaatattttttgcattttgactgcgcgagccatagtaaaattgagtctgttaatattttaccaaaattaaacttgttttgtttgcaatatatatatatatatatataacatttttaggttgctttctttacttattttataatttaacgacttatttattcattttaatttttttagtttaatgttgaataaaataaaattatattaaataataatattcattagtttgtataaaaataaaccttaaaattattagttaaggccttttggaaaaaatgaaattaatagaaaataaagagaaaattaaaatatgcttttttcatttgataaaatttttatgtaattattaaaatttattttcataaatttactttgctaactcattgttagtattattttagtatatgacagtatctcttcacaaccagatagctaatctaggtagcgaagctcaagaagcgcgaagcgctttccccagcgccaccttcgcatgcaacacccgctagttactactatatattaatttcttatctattgtaactagagaccggacaagatggtcggtcgaacggtatcggttaaaaaccgaaaaaaaaccgaaaaaaaccgaaaaacttaaaaaattctcggtcgaacggtttcggttaaaaacccgaaaaaaaccgaaatcgaaaaaaccgaagaaaaattttcggtataccgtttcggtttcggtttttttgaattttttaatcttttcccaaaaaaaaacaaaaaccatttttatcaatagaaaaagcgaaagatcacctctgagtaaaatattttgttaaaaaaatggccaactgatttgtcaaaaaagtcggtcgattgtttcggttttttaattatttcggtcgaacggtttcggttaaaaaaacgaaaaaaaccgaaaccgaaaaaaaccgaaaaactcaaaaatttctcggtcgggttttttcggttaaaaaccgaaaccgaaaatcgaaaaataccgaaaaaacgaccggtccgatctctaatt

SEQ ID NO: 19615 - DNA, 1458 bp, Heterodera glycines
aattgtttgagtaccccaaacggacacttgaaaaaatcgattttttttgttttcggggcagtccccccgaaccgatgcgccccgatttatggggagaccgaatccttccggaatagcttccctatagcctgtactttaattctgcgttggatttttgctccccataattgtttgagtaccccaaacggacacttgaaaaaatcgatttttttgttttcggggcagtccccccgaaccgatgcgcccagatttatggggagaccgaatccttcgggaatagcttccctatagcctgtactttaattctgcgttggatttttgctccccataattgtttgagtaccccaaacggacacttgaaaaaatcgatttttttgttttcggggcagtccccccgaaccgatgcgcccagatttatggggagaccgaatccttcgggaatagcttccctatagcctgtactttaattctgcgttggatttttgctccccataattgtttgagtaccccaaacggacacttgaaaaaatcgatttttttgttttcggggcagtccccccgaaccgatgcgcccagatttatggggagaccgaatccttcgggaatagcttccctatagcctgtactttaattctgcgttggatttttgctccccataattgtttgagtactccaaacggacacttgaaaaaatcgatttttttataaaatgacaattgtgtaattgattttaaatttttttagaaattctgagtttttaactgtttatttattttttgaaaaattaattcataaatattttttcagaaactgctctgaaacaaaccaaattttatttacatgttaagcaatgctctctgatgcttgtactatcaagaagtgaggtgaataaaattttaaaaattttaaattgttttttaaatatgcgaaaaagtttaggcttaaattttaaaaagtttcattgaatctagcgcactctaaaatgaatataaactcaccaaattttacaggcgtactcctctgtaaaaggactaacttaacctgaaaaaatctggcccataattggttttcaaaatttttagaaattcagagtttttcattaattatttatttttttgcaaaattaattcataagtatttttacagaaactgctctaaaacaaaccaaaatttatttacaagttgaataatgcactctgactcttatattatcaaaaaggagatgaataaatattttaaatttttttaattcctttttaaacaggccaaaaactttaggcttaactatttactgaaatttcaatcactcatagttttacgagtagtgatcagaaaaatcccagattttacagggtaacagctgagaacaatacctaatttatactttttcccccgtttactaggccttgttaaaaatattttagattttctgattttctgtattttttccaatttttt

SEQ ID NO: 19616 - DNA, 889 bp, Heterodera glycines
tttcttttctattgtattccatggaccgattttgagcataaatctggagctgacaacaaattttgtgtttatttttaaatgtctctcttaatgtgtcgtcgacccgcttccacagacatttcgtcgttctttacatcggtggtcgacaaacatatgtcaacgagttcaaacgatacccttaattagaataaataatgtgtcaaaaaagatgaccaaaagaattttttttttggtccgcaactttttcaaaaaatgatcaaaattttttttgttgaaattttgcaaggaaataaagaatcaaaattgttcaatttggttgactttgacaaaagctgtgacaatttttttttgttgtagaaaaatagagaccgaggccccgccgggactctcgtgtcccgttttttttttggaccaaagagagactgggattcccgggatcccgtctcggtccattttccaaatccaagtcccgatcatttctaaatcccgatctctactcgaaaaaccacagcaccgacccgaacaaaaaaaaaaaaggttttccattttattaattatatatgtaaataatccgcgcaccattttccaatgcgcatttgtaatgcaaaaaatgacgacgttcaacatcactcacagttttgctgcttcctgctttgtaaatatacaataattaacatacataagaaaaaatgaatgtaattatttaattatttaccaccactaattgatggagttgccgacactaatggaggatcatcattgtgagaataagtgattggaattgtcgcaccaacgccggaacaaatcaagcatttctgacaaaattataataattagggttcaaaaatatggaaatccaggctctatggcactttatgagtccatcgat

SEQ ID NO: 19617 - DNA, 2120 bp, Heterodera glycines
cgaaagcacaaagtctaattaatgtaataatacgagaaaacaagagaattctaacattccaagaaagttacaaacgaaaataatcagcaattacttaattaatcaaatcttttttggtaattgcctgaacgctgcgattttatatattttaacttcgttagactttgtgctttcgaatgataccaaaaagatagggtttgttcgaacatgaacaaagttattgtataaaaacccggaattgtcaattgattggactcacaaaagtcgattggactcataaagtgcattagagccaaaatccatattttatctatatttcgctatttaggcccataattttcatatttgtctatatttcgcattatatccttattttatgtgcatgttttggcagttttaacaaaaaaacgtgagggataatataagtttgcttctgtttacctttaaattgattttttttttctttaattcatttttcatattttcatttaatattttgtgtctctgtctgaccctttttcctttctttctctttgtattgttactgtgcagctagctgtgcatctctcagcattttttctttttcttgcccttccctcttgaattatctctctccctctctctttgtttttctctttcctttgcccttcctttatattatctctctctctctgtttttctctttctctattgctcattgttagtcacagagagagagagagagagagagagagagagtgtctttgtttctctgtccacaccccactctcctaattgcctccactctctcatccctaaattgattgtctttggtgtcagcaccgccaattcagagcgcgtcgtttagccaatgtgaacatacgacttcagccatttgagtttctataggtgggtacacaacacaacccccaatttcccatttatccccagcccatttatgtatgtacaaatgtataaaacaaaaattaaattaaataatgcccataaatttggcatgatttcgccgaaaaactctcagaaaaagtcgcaaaacaaaaattgatgataattaaattataaagagatttaaaatagaaaaaggttacaaaattgtatatagaaagctttaaacgcgatttaaaaattgtgcaatttaaaatgaaaaaaagatcacaatcaaattcggtactcaattcaaaatgccgcgcttgcttatacttagttattgtactaacaaaatgtggtatttttgagtacttactacacatataatcgcaccttttagtcccgtgaattattaaaataattgtttaagggattttttgctgcttttttttcatttccaacaaatccgtgggtttcaaaatatggaagaaactgaaattcaatcaccaccacaattgacgacacacaacaacaacaataataatgctattattgttaatgataatgttaatgatgatgatggttttgacaaaattgacacaacccaacaacaaacaccgcccccaacccaacaacatgggtcaccaccaccgacaacacaaatcatcacatcacagcgacagaaacccaaattgttgcacgacggtatgctctatgttcggcacaaactcagtaccagcaaagagatcaaattttggcgttgcgagttcttcaattcacgcatcgtcaagtgccggggtccaacaaaaattaattttccgtttcttcaaatttttggcaatggtaaaatgatgtgtttctgtgaaaacgaaaaaaagtgctgatcacgaatctgaactcattgatccagaagttcggcagtttagcatattgacagaaaaatttcatgttgatttaaattgcggaaaacaacccgcagccaaacggaattgaactctagagacctcgcctcataagacccctaaaggagcaataataaattaaaatttaatttcctcatacatttaatagcttattctaaagcatttgtttctataccattcagaacacggaatttacaaacaaaaaattcttagaaaattaaaaatttatgggaaaaataaattacttgatgaaaatcatagactcatgtaatttgcaaaatctaagctctaggagacgtgataagcgcattttttatcttacagaaaccacaa

SEQ ID NO: 19618 - DNA, 1369 bp, Heterodera glycines
ttaatttttctcttcatcattttttggtttaaaaactcccccaatacttttttatactttgaaagacttttttattacttcagaattttttgaaatttcctaaaatccgcaatcctgcgcaggatcctgcagattttaaatgcaggatttgcaggattaatcctgccggatcctgtcctgtaaaaaattttgaattccaatcctgcaacaggatccgcaaatttgaaatttccggtctctagtagagatagagatagagaaagaaagaaagaaaaagaaggtgtgtgagagggaaagaggaaaagaaacaaatagagagtgagtgagtgagagagagagagaaagaaagagtgagagaaagaaagggagagggagggagagatagagagaaagaaagaaaggcagagagagaaagaaagagagagtgaatgagagggaaagagagagtgagtgattgagggaaagaggaaaaaaagaaaaaaagagggagtgagtgagaaagagaaagaaagaaagtcagagagagcgagagagagatagaggagagggagggacagatagagaaagaaagagagaaagagaaggtgagttagagggaaagaggaaaagaaacaaatagagactgaactttaagccaaaaatacattttaaaataaccgtatttaattaaataatgttttatgattatttttaatatattaaatttttctttataaatcaatcacacttacatctaagaaactgaacgacagcaatttaccaccgaccaaagcgatgtgattcacagttttgccgactagataattttttcattattttatgattagaacgaaggtatttccaaaaaaaaattgctgaaaaaaatcaaatttccccaaatttttggacagaatttattttttaatttggctaatcccataaagctgtaaatgcccttctaattcattattcattcattgttggcaccactcacaaaggtgatgaaattcgaggccctgcttgaaaaagttgatgagaatcctggatttgctgttcagctgcttggccaatgagacattcacaaaaacaaaaaatgtgtcaaatttgatgttttgattgattttcaggtatttgatgcgcttccatttaatttgttttggacgctgcttcagcccctctttatcatatactaaacgaacagtaatgtaattttttgaaaaaaatttttttcttaattaaattcttaaaattttcttcggcgtttgcttatcgcaccggtggaccacaaaatttcagtaaaattttttttttaattcagcccaaaaagcacaaaaacccaaaatttggtcaagaaagagaaaataaattataaaaatttggccaagaaaaa

SEQ ID NO: 19619 - DNA, 1372 bp, Heterodera glycines
  unsure (1)..(1372): unsure at all n locations
aatcatatattttgaacagatttttttcaaaaaatgtttaagataccgcttgaacatcgtcaatagtccatgcacacatcccccagtattaacaatatattgtccaaaaatatgggcacagttttatgtattcgccatatgatcgaccatagaaaccgtcctgggccatcagaattttcagtgataacgctcttcttgataatatgttcaatgagttttcttggacaggtccttgacgggtcacctcaaatgtaaattatttttgttaatccaaagacgggttgtgttgttgtccttatttggaggtgtcgaatcgtaaccctcttttttcatataaatttaattatgaaccgtttcttacaaaatgtccttatgtttcgtcccatgaattccttattttatcttcgattctgccctttgcttttaattatattgacctttttttttaaagattttgtccttatttgggggatatcgaatcgtaatcctcttttttcataaatttttttcccccattattttagcttatttaatattgttttgatttctacatcattttacaaaatatttaacggctaaatttcaaaaaaaaattttttttttttattgtttcaaaaaagttatggcctagaagaacattaatagcattaaccaatcggctcagcccaaccccaaatcaccatttttaatttaatttgaacagtttcttacaaaatgtcatttttttgagcaaaaaaatcttattttcgtttatcagttctttatttatctaaaattggaccctttgcttttcattattttttagagtgcggaaaattttatcgtactatggatgcgttctccacgaatatgtgttcacagaaaaactctttgccaagcccaccagcatcaacgttgaactccatttgtgcaataacataatcttaaaatttacaaatatttttaatttaaataaagaataataatatttgttttttaataaggcttcatgttttattttatttttttaaataaagtgaaaaacccattatataaataatataactacgatttgtcacgaaagaatttttgttttgttttgtttaaatacccttaaattttggtggtggcgtgatgctgacaggggcatccggtgaaaaattttaaaaaaattatgaaattttttttaaatatatgacatcccaataaaaaacggaatttcatgcatagaaataatgtgagagacttacttacaatataaaattaaataatatttgacaacacttaacaatcattgagacatttcggtgagccgttcaacaatttgacaataatttttcctctcggctttagatcttcgttacgaatgaggattagatcaccganaatttaa

SEQ ID NO: 19620 - DNA, 1107 bp, Heterodera glycines
aggaacaaaagtgaaaattttttaattttgactttttgttcgaattaaggtccgggattcgaaaatggtcaaaatgaatgttggattcgggttccccgacccaaaaaaccccaataaacatcttttcgcgactttttctaacaaaaagggcccccaccatctatagcagggttaccattgaaaatttcccgaaataagaacatcgctggtcaaaaataagattttagggtcaaaaataaggacatttttaaaacacgcttccaaaatttaaatcgcattttattcaacaaaatcaagcattagcaacatatttctcgccgccaactatttttctgagcaattccggcttagaaatgagaaatttatacatcccgaaaatggattttaataattttgtggaaaaaataagcaacttgtaaattattttaagttcattcgggatcaaaaaatcagtttttaacaatttttttgcggcgtgctttttccaaaaaattttgaggaatgggcgatgggatggggtccggcggtgccgataggcgccaccggaaaaaaatttgtaatttctttctgatttgttaacatattttcatcaaaaaatcatcaatttttgcggtttttacattcaaaaggctttttttgcggcatttttttaaaaactttcttttttaggcggggggaagtccggcggtgccggtaggggccgccgggaaaaattttgtaatttagcgcgacttagtaacaaattttcaccaaaaagaccaatttttacatggcaaatcttaggtcatctcttgaaatcttaggggaattttgtggcactgcggcgccgatagtcgccaatgggaaaattttgccaggcttttcactgtttctacttcaaacaaatttctcgtatttttttcgcgatttttgagtcaatttaaagaaataaaaagaattttggagctctggcggtgccgataggcgccgccgggaaaaaatttgaaattttagtgcattttgttaatagatttagtccaaaaaagaccaaatttttgattgtaaatgttagaattatgatgaattcccatcgataaaggaataatttgaaaaatttaaaaaataaaa

SEQ ID NO: 19621 - DNA, 875 bp, Heterodera glycines
aaaaattttccccggggttaaaaaattttaggaaaaatagtaagcttttgtagtgttccgatacgtatctctgcaaaattggagagcccctgatcaattacaaattatttatgggacgatcaaatttttttgaaatttttttaagtgaaaaagtggtggggtctgcaaaaaattttcaccgggtttaaaaaatctaggaaaattagtaagcatttgtagtgttccgatacgtatccctgcaaaatttggtgagccgctgatcaattacaaattatttatggacgatcaaatttttagaaatttttatttatttttgcaaaattaattcataaatttttttcagaaactgctctgaaacgcaccaaaatttatttacaagtcgaataaggcactctgactcttatattatcaaaaagggagatgaataaatatttaaaaaatttctaattcctatttaaacaggccgaaaaagtttaggcttaactttttcagcgggtttaaaaaatctagaaaaattagtaaaatctaggaaaattagtaagcttttgtagtgttccgatacgtatctctgcaaaatttggtgagcccctgatcaattacaaattatttatggacgatcaaattttttgaaatttttttaagtgaaaaagtgttgggtgtctgcaaaaaattttcaccgggtttaaaaaatctaggaaaattagtaagcatttgtagtgttccgatacgtatctctgcaaaatttggtgagccgctgatcaattacaaattatttatggacgatcaaatttttagaaatttttatttatttttgcaaaattaattcataaatttttttcagaaactgctctgaaacgcaccaaaatttattacaa

SEQ ID NO: 19622 - DNA, 1194 bp, Heterodera glycines
  unsure (1)..(1194): unsure at all n locations
ttaatttntggttaaatttcatagaagtgacaagttcccacccctggtaaccaaaaattctcaacacattcattatcagcctctcaatatctctgaaatcactttcttcattttaattaagacaagttttcattaacactcgaaaaattttgggaaataacctaaaaattaattgtttaaaaatcagacatttatttttctgcattgctttttttgtttgtaaaataggaattcaaaataatttaaaaacgatttaattcaatacaatattatttattagattaattaaatttatttcttaaaaatatcatgaaaaaatttattagataagaaaaaaaaattaaaccatcctcagaaacacaaaaaataattttttcaaaatttaaatttaaattttaaacatttttataagaaattttcaagacaaaaagcaatgtttaaatttaataaaaggttttttgtcaaaaatattattgtttatttttttgaagttcaaatgtataaaaagaacataatatttgaaaataaatagatttaaaaatattttttcttatttaataatctaaaattacctaattatcaaaaattgttaaaaaaaatgtttttcaatatcaaaaaagtaattggtaaaaaatttgtaatgactaatacaatttcacatgctactcttaaatagaattattaatctgctaaacgagttaattggtgcagaaaaccaaataaaattttgtttcctttaattagtccacaaggcgatataataataattgtcattatcaattggtgaaatggatccaaagatcaaccgaatttctttttttacacaaaactgcgcgtaatcttgtaccagccgatcacatttctcgatcggctgtcacgcgaatcttcaaatttgactgagcgaaaaattgcgcaatcgtcagcccaaatgggaagaaaaaatgatagtaaaattaatatggaaaattaaaaatgaagttaaattaaaaaatatttatttacttaggatcaaatttatgcaaaaaaatatttttcaaataatgtattggaaattaaaagtggaaatttatttataaattctggttaaatattttgggaaaaaattggtttttattaaaaggaaaggaaataaaaaaaaggaaaattgaaaagggaaacaaagaaaaacaaaacctccaaattcttcaaattttt

SEQ ID NO: 19623 - DNA, 1915 bp, Heterodera glycines
ttttcaaatatcaaaaagataaattggtaaaaaatttaatgactaatacaatttcacatgctcctcttaaatagaattattaatctgctaaacgagttaattggtgcagaaaccaaataaaattttgtttcctttaattagtccacaaggcgatataataataattgtcattatcaattggtgaaatggatccaaagatcaaccgaatttctttttttacacaaaactgcgcgtaatcttgtaccagccgatcacatttctcgatcggctgtcacgcgaatcttcaaatttgactgagcgaaaaattgcgcaatcgtcagcccaaatgggaagaaaaaatgatagtaaaattaatatggaaaattaaaaatgaagttaaattaaaaaatatttatttacttaggatcaaatttatgcaaaaaaatatttttcaaattaatgtattgaaatttaaaagtggaaatttattttataaatgtctgtttaaatattttggtaaataattgttttttattaaaatgaaaatgaaataaataaaaagcaaaattgaaaatggtaaacaaagagaaacaaaaacctaccaaattcatcaaatttttcaattatgctttttctgttgacaaaaaatgagcaaacaaaaatttgtttattcataattttgataaaagtgagcacgacaatggcatgaaagctgcacaatttttttaaaattttgttttattattaattattattattcaaaaaaatatatttcacattgacgaaaaatgcacattcgaaatgaaatgaaaaaaatttgaaatttttttgctgttttttttcttcttaaaatgctttgagaatagtgatataaataaaaaattggatttcatttaacttaaaaaatttcaaaaaatttgtaatgtgtcaaaactaatgtacaattttttaaaaatacttagaatgaaaaaagatatcaagttttaattattacatttttaccgaaaattgccaattttggcaaaatttgcacaaaaaaaaactttgatttaaaattaaatttgccagttaaagtttatcgaaaaatcatttcaacaaattgaataccatagaaacataacaaacatagaatttcatgtggaaagcagaaaaatcccattttttcatttaataagaaaattttttaaatttttcccgtgaatttatgaattgcctgaccattaattaatttcacatttccgttcgtatattgttgtctttaaggaagctgtcaagagtggaaaataccttaaaaaagaaaatattttgaaaattttaatgaaattgaaaaaaagtactttttctttctgcgcaggagtaatttcttttgagaaaatgatgctcgtttcaatagtcattttttctggatgtattccccagttttttaagactaaaatttttatattaaaaatttaaaataagttattaggcatataattaaattatgtattcttagcaaataacgaattttattaggattatactttttggatctgttttatctttagcgcattgttttgttgaaaaaagattaaaaaattaggttgacaattttaattagaatctttttttatagaaattaaaagaaagcattcggttaaaaataattatacaaaaaaaaagatctgcaaaaaatcgtagtgaatttgtaataaaatgaataattttgcttaaaaaatatctgtaaaagcgtcaaattttaataaactaaatattaattttaaagatttgaccctgcgtggattcttcattctcattgagcaaatttgcaatatgttgtggcacatgatgaccagcaaatgccgagagaactgaaccgaccgaatgttgctcaatgaaattggccatcatttcttgcgcatccatccactcagaatgacccagcatgagtcatcct
